United States Patent Application Publication US 2026/0240980 A1 - sequence listing, part 2

SEQ ID NO: 6552 - protein, 566 aa, synthetic construct; identical to SEQ ID NO: 2669
  REGION 1..566: note = hemagglutinin__InfluenzaA__ADX98990

SEQ ID NO: 6553 - protein, 566 aa, synthetic construct; identical to SEQ ID NO: 3833
  REGION 1..566: note = hemagglutinin__InfluenzaA__ADX99000

SEQ ID NO: 6554 - protein, 565 aa, synthetic construct
  REGION 1..565: note = hemagglutinin__InfluenzaA__ADX99581
MKANLLVLLSALAAADADTICIGYHANNSTDTVDTVLEKNVTVTHSVNLLEDSHNGKLCRLKGIAPLQLGKCNIAGWLLGNPECDPLLPVRSWSYIVETPNSENGICYPGDFIDYEELREQLSSVSSFERFEIFPKESSWPNHNTNGVTAACSHEGKSSFYRNLLWLTEKEGSYPKLKNSYVNKKGKEVLVLWGIHHPPNSKEQQNLYQNENAYVSVVTSNYNRRFTPEIAERPKVRDQAGRMNYYWTLLKPGDTIIFEANGNLIAPMYAFALSRGFGSGIITSNASMHECNTKCQTPLGAINSSLPYQNIHPVTIGECPKYVRSAKLRMVTGLRNTPSIQSRGLFGAIAGFIEGGWTGMIDGWYGYHHQNEQGSGYAADQKSTQNAINGITNKVNTVIEKMNIQFTAVGKEFNKLEKRMENLNKKVDDGFLDIWTYNAELLVLLENERTLDFHDSNVKNLYEKVKSQLKNNAKEIGNGCFEFYHKCDNECMESVRNGTYDYPKYSEESKLNREKVDGVKLESMGIYQILAIYSTVASSLVLLVSLGAISFWMCSNGSLQCRICI

SEQ ID NO: 6555 - protein, 565 aa, synthetic construct; identical to SEQ ID NO: 6554
  REGION 1..565: note = hemagglutinin__InfluenzaA__ADX99592

SEQ ID NO: 6556 - protein, 565 aa, synthetic construct; identical to SEQ ID NO: 6554
  REGION 1..565: note = hemagglutinin__InfluenzaA__ADX99603

SEQ ID NO: 6557 - protein, 565 aa, synthetic construct
  REGION 1..565: note = hemagglutinin__InfluenzaA__ADX99614
MKANLLVLLSALAAADADTICIGYHANNSTDTVDTVLEKNVTVTHSVNLLEDSHNGKLCRLKGIAPLQLGKCNIAGWLLGNPECDPLLPVRSWSYIVETPNSENGICYPGDFIDYEELREQLSSVSSFERFEIFPKESSWPNHNTNGVTAACSHEGKSSFYRNLLWLTEKKGSYPKLKNSYVNKKGKEVLVLWGIHHPPNSKEQQNLYQNENAYVSVVTSNYNRRFTPEIAERPKVRDQAGRMNYYWTLLKPGDTIIFEANGNLIAPMYAFALSRGFGSGIITSNASMHECNTKCQTPLGAINSSLPYQNIHPVTIGECPKYVRSAKLRMVTGLRNTPSIQSRGLFGAIAGFIEGGWTGMIDGWYGYHHQNEQGSGYAADQKSTQNAINGITNKVNTVIEKMNIQFTAVGKEFNKLEKRMENLNKKVDDGFLDIWTYNAELLVLLENERTLDFHDSNVKNLYEKVKSQLKNNAKEIGNGCFEFYHKCDNECMESVRNGTYDYPKYSEESKLNREKVDGVKLESMGIYQILAIYSTVASSLVLLVSLGAISFWMCSNGSLQCRICI

SEQ ID NO: 6558 - protein, 565 aa, synthetic construct
  REGION 1..565: note = hemagglutinin__InfluenzaA__ADX99625
MKANLLVLLSALAAADADTICIGYHANNSTDTVDTVLEKNVTVTHSVNLLEDSHNGKLCRLKGIAPLQLGKCNIAGWLLGNPECDPLLPVRSWSYIVETPNSENGICYPGDFIDYEELREQLSSVSSFERFEIFPKESSWPNHNTNGVTAACSHEGKSSFYRNLLWLTEKEGSYPKLKNSYVNKKGKEVLVLWGIHHPPNSKEQQNLYQNENAYVSVVTSNYNRRFTPEIAERPKVRDQAGRMNYYWTLLKPGDTIIFGANGNLIAPMYAFALSRGFGSGIITSNASMHECNTKCQTPLGAINSSLPYQNIHPVTIGECPKYVRSAKLRMVTGLRNTPSIQSRGLFGAIAGFIEGGWTGMIDGWYGYHHQNEQGSGYAADQKSTQNAINGITNKVNTVIEKMNIQFTAVGKEFNKLEKRMENLNKKVDDGFLDIWTYNAELLVLLENERTLDFHDSNVKNLYEKVKSQLKNNAKEIGNGCFEFYHKCDNECMESVRNGTYDYPKYSEESKLNREKVDGVKLESMGIYQILAIYSTVASSLVLLVSLGAISFWMCSNGSLQCRICI

SEQ ID NO: 6559 - protein, 565 aa, synthetic construct
  REGION 1..565: note = hemagglutinin__InfluenzaA__ADX99636
MKANLLVLLSALAAADADTICIGYHANNSTDTVDTVLEKNVTVTHSVNLLEDSHNGKLCRLKGIAPLQLGKCNIAGWLLGNPECDPLLPVRSWSYIVETPNSENGICYPGDFIDYEELREQLSSVSSFERFEIFPKESSWPNHNTNGVTAACSHEGKSSFYRNLLWLTKKEGSYPKLKNSYVNKKGKEVLVLWGIHHPPNSKEQQNLYQNENAYVSVVTSNYNRRFTPEIAERPKVRDQAGRMNYYWTLLKPGDTIIFEANGNLIAPMYAFALSRGFGSGIITSNASMHECNTKCQTPLGAINSSLPYQNIHPVTIGECPKYVRSAKLRMVTGLRNTPSIQSRGLFGAIAGFIEGGWTGMIDGWYGYHHQNEQGSGYAADQKSTQNAINGITNKVNTVIEKMNIQFTAVGKEFNKLEKRMENLNKKVDDGFLDIWTYNAELLVLLENERTLDFHDSNVKNLYEKVKSQLKNNAKEIGNGCFEFYHKCDNECMESVRNGTYDYPKYSEESKLNREKVDGVKLESMGIYQILAIYSTVASSLVLLVSLGAISFWMCSNGSLQCRICI

SEQ ID NO: 6560 - protein, 565 aa, synthetic construct; identical to SEQ ID NO: 3278
  REGION 1..565: note = hemagglutinin__InfluenzaA__ADX99647

SEQ ID NO: 6561 - protein, 565 aa, synthetic construct
  REGION 1..565: note = hemagglutinin__InfluenzaA__ADX99680
MKANLLVLLCALAAADADTICIGYHANNSTDTVDTVLEKNVTVTHSVNLLEDSHNGKLCRLKGIAPLQLGKCNIAGWLLGNPECDPLLPVRSWSYIVETPNSENGICYPGDFIDYEELREQLSSVSSFERFEIFPKESSWSNHNTNGVTAACSHEGKSSFYRNLLWLTEKEGSYPKLKNSYVNKKGKEVLVLWGIHHPPNSKEQQNLYQNENAYVSVVTSNYNRRFTPEIAERPKVRDQAGRMNYYWTLLKPGDTIIFEANGNLIAPMYAFALSRGFGSGIITSNASMHECNTKCQTPLGAINSSLPYQNIHPVTIGECPKYVRSAKLRMVTGLRNIPSIQSRGLFGAIAGFIEGGWTGMIDGWYGYHHQNEQGSGYAADQKSTQNAINGITNKVNTVIEKMNIQFTAVGKEFNKLEKRMENLNKKVDDGFLDIWTYNAELLVLLENERTLDFHDSNVKNLYEKVKSQLKNNAKEIGNGCFEFYHKCDNECMESVRNGTYDYPKYSEESKLNREKVDGVKLESMGIYQILAIYSTVASSLVLLVSLGAISFWMCSNGSLQCRICI

SEQ ID NO: 6562 - protein, 565 aa, synthetic construct
  REGION 1..565: note = hemagglutinin__InfluenzaA__ADX99702
MKANLLVLLCALAAADADTICIGYHANNSTDTVDTVLEKNVTVTHSVNLLEDSHNGKLCRLKGIAPLQLGKCNIAGWLLGNPECDPLLPVRSWSYIVETPNSENGICYPGDFIDYEELREQLSSVSSFERFEIFPKESSWPNHNTNGVTAACSHEGKSSFYRNLLWLTEKEGSYPKLKKSYVNKKGKEVLVLWGIHHPPNSKEQQNLYQNENAYVSVVTSNYNRRFTPEIAERPKVRDQAGRMNYYWTLLKPGDTIIFEANGNLIAPMYAFALSRGFGSGIITSNASMHECNTKCQTPLGAINSSLPYQNIHPVTIGECPKYVRSAKLRMVTGLRNIPSIQSRGLFGAIAGFIEGGWTGMIDGWYGYHHQNEQGSGYAADQKSTQNAINGITNKVNTVIEKMNIQFTAVGKEFNKLEKRMENLNKKVDDGFLDIWTYNAELLVLLENERTLDFHDSNVKNLYEKVKSQLKNNAKEIGNGCFEFYHKCDNECMESVRNGTYDYPKYSEESKLNREKVDGVKLESMGIYQILAIYSTVASSLVLLVSLGAISFWMCSNGSLQCRICI

SEQ ID NO: 6563 - protein, 565 aa, synthetic construct; identical to SEQ ID NO: 6562
  REGION 1..565: note = hemagglutinin__InfluenzaA__ADX99843

SEQ ID NO: 6564 - protein, 565 aa, synthetic construct
  REGION 1..565: note = hemagglutinin__InfluenzaA__ADX99854
MKANLLVLLCALAAADADTICIGYHANNSTDTVDTVLEKNVTVTHSVNLLEDSHNGKLCRLKGIAPLQLGKCNIAGWLLGNPECDPLLPVRSWSYIVETPNSENGICYPGDFIDYEELREQLSSVSSFERFEIFPKESSWPNHNTNGVTAACSHEGKSSFYRNLLWLTEKEGSYLKLKNSYVNKKGKEVLVLWGIHHPPNSKEQQNLYQNENAYVSVVTSNYNRRFTPEIAERPKVRDQAGRMNYYWTLLKPGDTIIFEANGNLIAPMYAFALSRGFGSGIITSNASMHECNTKCQTPLGAINSSLPYQNIHPVTIGECPKYVRSAKLRMVTGLRNIPSIQSRGLFGAIAGFIEGGWTGMIDGWYGYHHQNEQGSGYAADQKSTQNAINGITNKVNTVIEKMNIQFTAVGKEFNKLEKRMENLNKKVDDGFLDIWTYNAELLVLLENERTLDFHDSNVKNLYEKVKSQLKNNAKEIGNGCFEFYHKCDNECMESVRNGTYDYPKYSEESKLNREKVDGVKLESMGIYQILAIYSTVASSLVLLVSLGAISFWMCSNGSLQCRICI

SEQ ID NO: 6565 - protein, 565 aa, synthetic construct
  REGION 1..565: note = hemagglutinin__InfluenzaA__ADX99865
MKANLLVLLCALAAADADTICIGYHANNSTDTVDTVLEKNVTVTHSVNLLEDSHNGKLCRLKGIAPLQLGKCNIAGWLLGNPECDPLLPVRSWSYIVETPNSENGICYPGDFIDYEELREQLSSVSSFERFEIFPKESSWPNHNTNGVTAACSHEGKSSFYRNLLWLTEKEGSYPKQKNSYVNKKGKEVLVLWGIHHPPNSKEQQNLYQNENAYVSVVTSNYNRRFTPEIAERPKVRDQAGRMNYYWTLLKPGDTIIFEANGNLIAPMYAFALSRGFGSGIITSNASMHECNTKCQTPLGAINSSLPYQNIHPVTIGECPKYVRSAKLRMVTGLRNIPSIQSRGLFGAIAGFIEGGWTGMIDGWYGYHHQNEQGSGYAADQKSTQNAINGITNKVNTVIEKMNIQFTAVGKEFNKLEKRMENLNKKVDDGFLDIWTYNAELLVLLENERTLDFHDSNVKNLYEKVKSQLKNNAKEIGNGCFEFYHKCDNECMESVRNGTYDYPKYSEESKLNREKVDGVKLESMGIYQILAIYSTVASSLVLLVSLGAISFWMCSNGSLQCRICI

SEQ ID NO: 6566 - protein, 565 aa, synthetic construct
  REGION 1..565: note = hemagglutinin__InfluenzaA__ADX99887
MKANLLVLLCALAAADADTICIGYHANNSTDTVDTVLEKNVTVTHSVNLLEDSHNGKLCRLKGIAPLQLGKCNIAGWLLGNPECDPLLPVRSWSYIVETPNSENGICYPGDFIDYEELREQLSSVSSFERFEIFPKESSWPNHNTNGVTAACSHEGKSSFYRNLLWLTEKEGSYPKLENSYVNKKGKEVLVLWGIHHPPNSKEQQNLYQNENAYVSVVTSNYNRRFTPEIAERSKVRDQAGRMNYYWTLLKPGDTIIFEANGNLIAPMYAFALSRGFGSGIITSNASMHECNTKCQTPLGAINSSLPYQNIHPVTIGECPKYVRSAKLRMVTGLRNIPSIQSRGLFGAIAGFIEGGWTGMIDGWYGYHHQNEQGSGYAADQKSTQNAINGITNKVNTVIEKMNIQFTAVGKEFNKLEKRMENLNKKVDDGFLDIWTYNAELLVLLENERTLDFHDSNVKNLYEKVKSQLKNNAKEIGNGCFEFYHKCDNECMESVRNGTYDYPKYSEESKLNREKVDGVKLESMGIYQILAIYSTVASSLVLLVSLGAISFWMCSNGSLQCRICI

SEQ ID NO: 6567 - protein, 565 aa, synthetic construct
  REGION 1..565: note = hemagglutinin__InfluenzaA__ADX99898
MKANLLVLLCALAAADADTICIGYHANNSTDTVDTVLEKNVTVTHSVNLLEDSHNGKLCRLKGIAPLQLGKCNIAGWLLGNPECDPLLPVRSWSYIVETPNSENGICYPGDFIDYEELREQLSSVSSFERFEIFPKESSWPNHNTNGVTAACSHEGKSSFYRNLLWLTEKEGSYPKLKNYYVNKKGKEVLVLWGIHHPPNSKEQQNLYQNENAYVSVVTSNYNRRFTPEIAERPKVRDQAGRMNYYWTLLKPGDTIIFEANGNLIAPMYAFALSRGFGSGIITSNASMHECNTKCQTPLGAINSSLPYQNIHPVTIGECPKYVRSAKLRMVTGLRNIPSIQSRGLFGAIAGFIEGGWTGMIDGWYGYHHQNEQGSGYAADQKSTQNAINGITNKVNTVIEKMNIQFTAVGKEFNKLEKRMENLNKKVDDGFLDIWTYNAELLVLLENERTLDFHDSNVKNLYEKVKSQLKNNAKEIGNGCFEFYHKCDNECMESVRNGTYDYPKYSEESKLNREKVDGVKLESMGIYQILAIYSTVASSLVLLVSLGAISFWMCSNGSLQCRICI

SEQ ID NO: 6568 - protein, 565 aa, synthetic construct
  REGION 1..565: note = hemagglutinin__InfluenzaA__ADX99909
MKANLLVLLCALAAADADTICIGYHANNSTDTVDTVLEKNVTVTHSVNLLEDSHNGKLCRLKGIAPLQLGKCNIAGWLLGNPECDPLLPVRSWSYIVETPNSENGICYPGDFIDYEELREQLSSVSSFERFEIFPKESSWPNHNTNGVTAACSHEGKSSFYRNLLWLTEKEGSYPKLKNFYVNKKGKEVLVLWGIHHPPNSKEQQNLYQNENAYVSVVTSNYNRRFTPEIAERPKVRDQAGRMNYYWTLLKPGDTIIFEANGNLIAPMYAFALSRGFGSGIITSNASMHECNTKCQTPLGAINSSLPYQNIHPVTIGECPKYVRSAKLRMVTGLRNIPSIQSRGLFGAIAGFIEGGWTGMIDGWYGYHHQNEQGSGYAADQKSTQNAINGITNKVNTVIEKMNIQFTAVGKEFNKLEKRMENLNKKVDDGFLDIWTYNAELLVLLENERTLDFHDSNVKNLYEKVKSQLKNNAKEIGNGCFEFYHKCDNECMESVRNGTYDYPKYSEESKLNREKVDGVKLESMGIYQILAIYSTVASSLVLLVSLGAISFWMCSNGSLQCRICI

SEQ ID NO: 6569 - protein, 565 aa, synthetic construct; identical to SEQ ID NO: 6568
  REGION 1..565: note = hemagglutinin__InfluenzaA__ADX99920

SEQ ID NO: 6570 - protein, 565 aa, synthetic construct
  REGION 1..565: note = hemagglutinin__InfluenzaA__ADX99931
MKANLLVLLCALAAADADTICIGYHANNSTDTVDTVLEKNVTVTHSVNLLEDSHNGKLCRLKGIAPLQLGKCNIAGWLLGNPECDPLLPVRSWSYIVETPNSENGICYPGDFIDYEELREQLSSVSSFERFEIFPKESSWPNHNTNGVTAACSHEGKSSFYRNLLWLTEKEGSYPKLENSYVNKKGKEVLVLWGIHHPPNSKEQQNLYQNENAYVSVVTSNYNRRFTPEIAGRPKVRDQAGRMNYYWTLLKPGDTIIFEANGNLIAPMYAFALSRGFGSGIITSNASMHECNTKCQTPLGAINSSLPYQNIHPVTIGECPKYVRSAKLRMVTGLRNIPSIQSRGLFGAIAGFIEGGWTGMIDGWYGYHHQNEQGSGYAADQKSTQNAINGITNKVNTVIEKMNIQFTAVGKEFNKLEKRMENLNKKVDDGFLDIWTYNAELLVLLENERTLDFHDSNVKNLYEKVKSQLKNNAKEIGNRCFEFYHKCDNECMESVRNGTYDYPKYSEESKLNREKVDGVKLESMGIYQILAIYSTVASSLVLLVSLGAISFWMCSNGSLQCRICI

SEQ ID NO: 6571 - protein, 565 aa, synthetic construct
  REGION 1..565: note = hemagglutinin__InfluenzaA__ADX99964
MKANLLVLLCALAAADADTICIGYHANNSTDTVDTVLEKNVTVTHSVNLLEDSHNGKLCRLKGIAPLQLGKCNIAGWLLGNPECDPLLPVRSWSYIVETPNSENGICYPGDFIDYEELREQLSSVSSFERFEIFPKESSWPKHNTNGVTAACSHEGKSSFYRNLLWLTEKEGSYPKLKNSYVNKKGKEVLVLWGIHHPPNSKEQQNLYQNENAYVSVVTSNYNRRFTPEIAERPKVRDQAGRMNYYWTLLKPGDTIIFEANGNLIAPMYAFALSRGFGSGIITSNASMHECNTKCQTPLGAINSSLPYQNIHPVTIGECPKYVRSAKLRMVTGLRNIPSIQSRGLFGAIAGFIEGGWTGMIDGWYGYHHQNEQGSGYAADQKSTQNAINGITNKVNTVIEKMNIQFTAVGKEFNKLEKRMENLNKKVDDGFLDIWTYNAELLVLLENERTLDFHDSNVKNLYEKVKSQLKNNAKEIGNGCFEFYHKCDNECMESVRNGTYDYPKYSEESKLNREKVDGVKLESMGIYQILAIYSTVASSLVLLVSLGAISFWMCSNGSLQCRICI

SEQ ID NO: 6572 - protein, 565 aa, synthetic construct
  REGION 1..565: note = hemagglutinin__InfluenzaA__ADX99975
MKANLLVLLCALAAADADTICIGYHANNSTDTVDTVLEKNVTVTHSVNLLEDSHNGKLCRLKGIAPLQLGKCNIAGWLLGNPECDPLLPVRSWSYIVETPNSENGICYPGDFIDYEELREQLSSVSSFERFEIFPKESSWPNHNTNGVTATCSHEGKSSFYRNLLWLTEKEGSYPELKNSYVNKKGKEVLVLWGIHHPPNSKEQQNLYQNENAYVSVVTSNYNRRFTPEIAERPKVRDQAGRMNYYWTLLKPGDTIIFEANGNLIAPMYAFALSRGFGSGIITSNASMHECNTKCQTPLGAINSSLPYQNIHPVTIGECPKYVRSAKLRMVTGLRNIPSIQSRGLFGAIAGFIEGGWTGMIDGWYGYHHQNEQGSGYAADQKSTQNAINGITNKVNTVIEKMNIQFTAVGKEFNKLEKRMENLNKKVDDGFLDIWTYNAELLVLLENERTLDFHDSNVKNLYEKVKSQLKNNAKEIGNGCFEFYHKCDNECMESVRNGTYDYPKYSEESKLNREKVDGVKLESMGIYQILAIYSTVASSLVLLVSLGAISFWMCSNGSLQCRICI

SEQ ID NO: 6573 - protein, 565 aa, synthetic construct
  REGION 1..565: note = hemagglutinin__InfluenzaA__ADX99986
MKANLLVLLCALAAADADTICIGYHANNSTDTVDTVLEKNVTVTHSVNLLEDSHNGKLCRLKGIAPLQLGKCNIAGWLLGNPKCDPLLPVRSWSYIVETPNSENGICYPGDFIDYEELREQLSSVSSFERFEIFPKESSWPNHNTNGVTAACSHEGKSSFYRNLLWLTEKEGSYPKLENSYVNKKGKEVLVLWGIHHPPNSKEQQNLYQNENAYVSVVTSNYNRRFTPEIAERPKVRDQAGRMNYYWTLLKPGDTIIFEANGNLIAPMYAFALSRGFGSGIITSNASMHECNTKCQTPLGAINSSLPYQNIHPVTIGECPKYVRSAKLRMVTGLRNIPSIQSRGLFGAIAGFIEGGWTGMIDGWYGYHHQNEQGSGYAADQKSTQNAINGITNKVNTVIEKMNIQFTAVGKEFNKLEKRMENLNKKVDDGFLDIWTYNAELLVLLENERTLDFHDSNVKNLYEKVKSQLKNNAKEIGNGCFEFYHKCDNECMESVRNGTYDYPKYSEESKLNREKVDGVKLESMGIYQILAIYSTVASSLVLLVSLGAISFWMCSNGSLQCRICI

SEQ ID NO: 6574 - protein, 565 aa, synthetic construct
  REGION 1..565: note = hemagglutinin__InfluenzaA__ADX99997
MKANLLVLLCALAAADADTICIGYHANNSTDTVDTVLEKNVTVTHSVNLLEDSHNGKLCRLKGIAPLQLGKCNIAGWLLGNPECDPLLPVRSWSYIVETPNSENGICYPGDFIDYEELREQLSSVSSFERFEIFPKESSWPNHNTNGVTAACSHEGKSSFYRNLLWLTEKEGSYPKLENSYVNKKGKEVLVLWGIHHPPNSKEQQNLYQNENAYVSVVTSNYNRRFTPEIAERPKVRDQAGRMKYYWTLLKPGDTIIFEANGNLIAPMYAFALSRGFGSGIITSNASMHECNTKCQTPLGAINSSLPYQNIHPVTIGECPKYVRSAKLRMVTGLRNIPSIQSRGLFGAIAGFIEGGWTGMIDGWYGYHHQNEQGSGYAADQKSTQNAINGITNKVNTVIEKMNIQFTAVGKEFNKLEKRMENLNKKVDDGFLDIWTYNAELLVLLENERTLDFHDSNVKNLYEKVKSQLKNNAKEIGNGCFEFYHKCDNECMESVRNGTYDYPKYSEESKLNREKVDGVKLESMGIYQILAIYSTVASSLVLLVSLGAISFWMCSNGSLQCRICI

SEQ ID NO: 6575 - protein, 565 aa, synthetic construct
  REGION 1..565: note = hemagglutinin__InfluenzaA__ADY00009
MKANLLVLLCALAAADADTICIGYHANNSTDTVDTVLEKNVTVTHSVNLLEDSHNGKLCRLKGIAPLQLGKCNIAGWLLGNPECDPLLPVRSWSYIVETPNSENGICYPGDFIDYEELREQLSSVSSFERFEIFPKESSWPNHNTNGVTAACSHEGKSSFYRNLLWLTEKKGSYPKLENSYVNKKGKEVLVLWGIHHPPNSKEQQNLYQNENAYVSVVTSNYNRRFTPEIAERPKVRDQAGRMNYYWTLLKPGDTIIFEANGNLIAPMYAFALSRGFGSGIITSNASMHECNTKCQTPLGAINSSLPYQNIHPVTIGECPKYVRSAKLRMVTGLRNIPSIQSRGLFGAIAGFIEGGWTGMIDGWYGYHHQNEQGSGYAADQKSTQNAINGITNKVNTVIEKMNIQFTAVGKEFNKLEKRMENLNKKVDDGFLDIWTYNAELLVLLENERTLDFHDSNVKNLYEKVKSQLKNNAKEIGNGCFEFYHKCDNECMESVRNGTYDYPKYSEESKLNREKVDGVKLESMGIYQILAIYSTVASSLVLLVSLGAISFWMCSNGSLQCRICI

SEQ ID NO: 6576 - protein, 565 aa, synthetic construct; identical to SEQ ID NO: 3278
  REGION 1..565: note = hemagglutinin__InfluenzaA__ADY00020

SEQ ID NO: 6577 - protein, 565 aa, synthetic construct
  REGION 1..565: note = hemagglutinin__InfluenzaA__ADY04727
MKAKLLVLLCTFTATYADTICIGYHANNSTDTVDTVLEKNVTVTHSVNLLEDSHNGKLCLLKGIAPLQLGNCSVAGWILGNPECELLISKESWSYIVETPNPENGTCYPGYFADYEELREQLSSVSSFERFEIFPKGSSWPNHTVTGVSASCSHNGKSSFYRNLLWLTGKNGLYPNLSMSYVNNKEKEVLVLWGVHHPPNIGNQRALYHTENAYVSVVSSHYSRRFTPEIAKRPKVRDQEGRINYYWTLLEPGDTIIFEANGNLIAPWYAFALSRGFGSGIITSNAPMGECDAKCQTPQGAINSSLPFQNVHPVTIGECPKYVRSAKLRMVTGLRNIPSIQSRGLFGAIAGFIEGGWTGMVDGWYGYHHQNEQGSGYAADQKSTQNAINGITNKVNSVIEKMNTQFTAVGKEFNKLERRMENLNKKVDDGFLDIWTYNAELLVLLENERTLDFHDSNLKNLYEKVKSQLKNNAKEIGNGCFEFYHKCNNECMESVKNGTYDYPKYSEESKLNREKIDGVKLESMGVYQILAIYSTVASSLVLLVSLGAISFWMCSNGSLQCRICI

SEQ ID NO: 6578 - protein, 566 aa, synthetic construct; identical to SEQ ID NO: 3613
  REGION 1..566: note = hemagglutinin__InfluenzaA__ADY11836

SEQ ID NO: 6579 - protein, 566 aa, synthetic construct; identical to SEQ ID NO: 3588
  REGION 1..566: note = hemagglutinin__InfluenzaA__ADY17654

SEQ ID NO: 6580 - protein, 566 aa, synthetic construct
  REGION 1..566: note = hemagglutinin__InfluenzaA__ADY17665
MKTIIALSYILCLIFAQKLPGNDNSTATLCLGHHAVPNGTIVKTITNDQIEVTNATELVQSSSTGEICDSPHQILDGKNCTLIDALLGDPQCDGFQNKKWDLFVERSKAYSNCYPYDVPDYASLRSLVASSGTLEFNNESFNWTGVTQDGTSSACIRRSKNSFFSRLNWLTHLNFKYPALNVTMPNNEQFDKLYIWGVHHPGTDKDQIFLYAQASGRITVSTKRSQQTAIPNIGSRPRVRNIPSRISIYWTIVKPGDILLINSTGNLIAPRGYFKIRSGKSSIMRSDAPIGKCNSECITPNGSIPNDKPFQNVNRITYGACPRYVKQNTLKLATGMRNVPEKQTRGIFGAIAGFIENGWEGMVDGWYGFRHQNSEGRGQAADLKSTQAAIDQINGKLNRLIGKTNEKFHQIEKEFSEVEGRIQDLEKYVEDTKIDLWSYNAELLVALENQHTIDLTDSEMNKLFEKTKKQLRENAEDMGNGCFKIYHKCDNACIGSIRNGTYDHDVYRDEALNNRFQIKGVELKSGYKDWILWISFAISCFLLCVALLGFIMWACQKGNIRCNICI

SEQ ID NO: 6581 - protein, 566 aa, synthetic construct; identical to SEQ ID NO: 3613
  REGION 1..566: note = hemagglutinin__InfluenzaA__ADY17676

SEQ ID NO: 6582 - protein, 566 aa, synthetic construct
  REGION 1..566: note = hemagglutinin__InfluenzaA__ADY17687
MKTIIALSYILCLVFAQKLPGNDNSTATLCLGHHAVPNGTIVKTITNDQIEVTNATELVQSSSTGEICDSPHQILDGKNCTLIDALLGDPQCDGFQNKKWDLFVERSKAYSNCYPYDVPDYASLRSLVASSGTLEFNNESFNWTGVTQDGTSSACIRRSKNSFFSRLNWLTHLNFKYPALNVTMPNNEQFDKLYIWGVHHPGTDKDQIFLYAQASGRITVSTKRSQQTAIPNIGSRPRVRNIPSRISIYWTIVKPGDILLINSTGNLIAPRGYFKIRSGKSSIMRSDAPIGKCNSECITPNGSIPNDKPFQNVNRITYGACPRYVKQNTLKLATGMRNVPEKQTRGIFGAIAGFIENGWEGMVDGWYGFRHQNSEGRGQAADLKSTQAAIDQINGKLNRLIGKTNEKFHQIEKEFSEVEGRIQDLEKYVEDTKIDLWSYNAELLVALENQHTIDLTDSEMNKLFEKTKKQLRENAEDMGNGCFKIYHKCDNACIGSIRNGTYDHDVYRDEALNNRFQIKGVELKSGYKDWILWISFAISCFLLCAALLGFIMWACQKGNIRCNICI

SEQ ID NO: 6583 - protein, 566 aa, synthetic construct; identical to SEQ ID NO: 3588
  REGION 1..566: note = hemagglutinin__InfluenzaA__ADY17698

SEQ ID NO: 6584 - protein, 566 aa, synthetic construct
  REGION 1..566: note = hemagglutinin__InfluenzaA__ADY38719
MKTIIALSYILCLVFTQKLPGNDNSTATLCLGHHAVPNGTIVKTITNDQIEVTNATELVQSSSTGEICDSPHQILDGKNCTLIDALLGDPQCDGFQNKKWDLFVERSKAYSNCYPYDVPDYASLRSLVASSGTLEFNNESFNWTGVTQNGTSSACIRRSKNSFFSRLNWLTHLNFKYPALNVTMPNNEQFDKLYIWGVHHPGTDKDQIFLYAQASGRITVSTKRSQQTAIPNIGSRPRVRNIPSRISIYWTIVKPGDILLINSTGNLIAPRGYFKIRSGKSSIMRSDAPIGKCNSECITPNGSIPNDKPFQNVNRITYGACPRYVKQNTLKLATGMRNVPEKQTRGIFGAIAGFIENGWEGMVDGWYGFRHQNSEGRGQAADLKSTQAAIDQINGKLNRLIGKTNEKFHQIEKEFSEVEGRIQDLEKYVEDTKIDLWSYNAELLVALENQHTIDLTDSEMNKLFEKTKKQLRENAEDMGNGCFKIYHKCDNACIGSIRNGTYDHDVYRDEALNNRFQIKGVELKSGYKDWILWISFAISCFLLCVALLGFIMWACQKGNIRCNICI

SEQ ID NO: 6585 - protein, 566 aa, synthetic construct; identical to SEQ ID NO: 2669
  REGION 1..566: note = hemagglutinin__InfluenzaA__ADY38750

SEQ ID NO: 6586 - protein, 566 aa, synthetic construct; identical to SEQ ID NO: 3833
  REGION 1..566: note = hemagglutinin__InfluenzaA__ADY38760

SEQ ID NO: 6587 - protein, 566 aa, synthetic construct
  REGION 1..566: note = hemagglutinin__InfluenzaA__ADZ04607
MKAILVVLLYTFATANADTLCIGYHANNSTDTVDTVLEKNVTVTHSVNLLEDKHNGKLCKLRGVAPLHLGKCNIAGWILGNPECESLSTASSWSYIVETSSSDNGTCYPGDFIDYEELREQLSSVSSFERFEIFPKTSSWPNHDSNKGVTAACPHAGAKSFYKNLIWLVKKGNSYPKLSKSYINDKGKEVLVLWGIHHPSTSADQQSLYQNADAYVFVGTSRYSKKFKPEIAIRPKVRDQEGRMNYYWTLVEPGDKITFEATGNLVVPRYAFAMERNAGSGIIISDTPVHDCNTTCQTPKGAINTSLPFQNIHPITIGKCPKYVKSTKLRLATGLRNVPSIQSRGLFGAIAGFIEGGWTGMVDGWYGYHHQNEQGSGYAADLKSTQNAIDEITNKVNSVIEKMNTQFTAVGKEFNHLEKRIENLNKKVDDGFLDIWTYNAELLVLLENERTLDYHDSNVKNLYEKVRSQLKNNAKEIGNGCFEFYHKCDNTCMESVKNGTYDYPKYSEEAKLNREEIDGVKLESTRVYQILAIYSTVASSLVLVVSLGAISFWMCSNGSLQCRICI

SEQ ID NO: 6588 - protein, 565 aa, synthetic construct; identical to SEQ ID NO: 5963
  REGION 1..565: note = hemagglutinin__InfluenzaA__ADZ05834

SEQ ID NO: 6589 - protein, 565 aa, synthetic construct
  REGION 1..565: note = hemagglutinin__InfluenzaA__ADZ05845
MKVKLLVLLCTFTATYADTICIGYHANNSTDTVDTVLEKNVTVTHSVNLLEDSHNGKLCLLKGIAPLQLGNCSVAGWILGNPECELLISKESWSYIVEKPNPENGTCYPGHFADYEELREQLSSVSSFERFEIFPKESSWPNHTVTGVSASCSHNGENSFYRNLLWLTGKNGLYPNLSKSYANNKEKEVLVLWGVHHPPNMADQKTLYHTENAYVSVVSSHYSRKFTPEIAKRPKVRDQEGRINYYWTLLEPGDTIIFEANGNLIAPRYAFALSRGFGSGIINSNAPMDKCDAKCQTPQGAINSSLPFQNVHPVTIGECPKYVRSAKLRMVTGLRNIPSIQSRGLFGAIAGFIEGGWTGMVDGWYGYHHQNEQGSGYAADQKSTQNAINGITNKVNSVIEKMNTQFTAVGKEFNKLERRMENLNKKVDDGFIDIWTYNAELLVLLENERTLDFHDSNVKNLYEKVKSQLKNNAKEIGNGCFEFYHKCNDECMESVKNGTYDYPKYSEESKLNREKIDGVKLESMGVYQILAIYSTVASSLVLLVSLGAISFWMCSNGSLQCRICI

SEQ ID NO: 6590 - protein, 566 aa, synthetic construct; identical to SEQ ID NO: 2434
  REGION 1..566: note = hemagglutinin__InfluenzaA__ADZ05855

SEQ ID NO: 6591 - protein, 566 aa, synthetic construct
  REGION 1..566: note = hemagglutinin__InfluenzaA__ADZ47838
MKAILVVLLYTLATANADTLCIGYHANNSTDTVDTVLEKNVTVTHSVNLLEDKHNGKLCKLRGVAPLHLGKCNIAGWILGNPECESLSTASSWSYIVETSSSDNGTCYPGDFIDYEELREQLSSVSSFERFEIFPKTSSWPNHDSNKGVTAACPHAGAKSFYKNLIWLVKKGNSYPKLSKSYINDKGKEVLVLWGIHHPSTSADQQSLYQNADAYVFVGTSRYSKKFKPEIAIRPKVREQEGRMNYYWTLVEPGDKITFEATGNLVVPRYAFAMERNAGSGIIISDTPVHDCNTTCQTPKGAINTSLPFQNIHSITIGKCPKYVKSTKLRLATGLRNVPSIQSRGLFGAIAGFIEGGWTGMVDGWYGYHHQNEQGSGYAADLKSTQNAIDEITNKVNSVIEKMNTQFTAVGKEFNHLEKRIENLNKKVDDGFLDIWTYNAELLVLLENERTLDYHDSNVKNLYEKVRSQLKNNAKEIGNGCFEFYHKCDNTCMESVKNGTYDYPKYSEEAKLNREEIDGVKLESTRIYQILAIYSTVASSFVLIVSLGAISFWMCSNGSLQCRICI

SEQ ID NO: 6592 - protein, 566 aa, synthetic construct; identical to SEQ ID NO: 3841
  REGION 1..566: note = hemagglutinin__InfluenzaA__ADZ47858

SEQ ID NO: 6593 - protein, 565 aa, synthetic construct
  REGION 1..565: note = hemagglutinin__InfluenzaA__ADZ53100
MKVKLLVLLCTFTATYADTICIGYHANNSTDTVDTVLEKNVTVTHSVNLLENSHNGKLCLLKGIAPLQLGNCSVAGWILGNPECELLISKETWSYIVEKPNPENGTCYPGHFADYEELREQLSSVSSFERFEIFPKESSWPNHTVTGVSASCSHNGESSFYRNLLWLTGKNGLYPNLSKSYANNKEKEVLVLWGVHHPPSINDQKTLYHTENAYVSVVSSHYSRKFTPEIAKRPKVRDQEGRINYYWTLLEPRDTIIFEANGNLIAPRYAFALSRGFGSGIINSNAPMDKCDAKCQTPQGAINSSLPFQNVHPVTIGECPKYVRSAKLRMVTGLRNIPSIQSRGLFGAIAGFIEGGWTGMVDGWYGYHHQNEQGSGYAADQKSTQNAINGITNKVNSVIEKMNTQFTAVGKEFNKLERRMENLNKKVDDGFIDIWTYNAELLVLLENERTLDFHDSNVKNLYEKVKSQLKNNAKEIGNGCFEFYHKCNDECMESVKNGTYDYPKYSEESKLNREKIDGVKLESMGVYQILAIYSTVASSLVLLVSLGAISFWMCSNGSLQCRICI

SEQ ID NO: 6594 - protein, 566 aa, synthetic construct; identical to SEQ ID NO: 3116
  REGION 1..566: note = hemagglutinin__InfluenzaA__ADZ53123

SEQ ID NO: 6595 - protein, 566 aa, synthetic construct; identical to SEQ ID NO: 2911
  REGION 1..566: note = hemagglutinin__InfluenzaA__ADZ53125

SEQ ID NO: 6596 - protein, 566 aa, synthetic construct; identical to SEQ ID NO: 3293
  REGION 1..566: note = hemagglutinin__InfluenzaA__ADZ53127

SEQ ID NO: 6597 - protein, 566 aa, synthetic construct; identical to SEQ ID NO: 2656
  REGION 1..566: note = hemagglutinin__InfluenzaA__ADZ53131

SEQ ID NO: 6598 - protein, 566 aa, synthetic construct; identical to SEQ ID NO: 2669
  REGION 1..566: note = hemagglutinin__InfluenzaA__ADZ53133

SEQ ID NO: 6599 - protein, 566 aa, synthetic construct; identical to SEQ ID NO: 2911
  REGION 1..566: note = hemagglutinin__InfluenzaA__ADZ53135

SEQ ID NO: 6600 - protein, 566 aa, synthetic construct; identical to SEQ ID NO: 3833
  REGION 1..566: note = hemagglutinin__InfluenzaA__ADZ53138

SEQ ID NO: 6601 - protein, 566 aa, synthetic construct; identical to SEQ ID NO: 2669
  REGION 1..566: note = hemagglutinin__InfluenzaA__ADZ53140

SEQ ID NO: 6602 - protein, 566 aa, synthetic construct; identical to SEQ ID NO: 3116
  REGION 1..566: note = hemagglutinin__InfluenzaA__ADZ93496

SEQ ID NO: 6603 - protein, 562 aa, synthetic construct; identical to SEQ ID NO: 2350
  REGION 1..562: note = hemagglutinin__InfluenzaA__AEA04365

SEQ ID NO: 6604 - protein, 562 aa, synthetic construct
  REGION 1..562: note = hemagglutinin__InfluenzaA__AEA04376
MAIIYLILLFTAVRGDQICIGYHANNSTEKVDTILERNVTVTHAKDILEKTHNGKLCKLNGIPPLELGDCSIAGWLLGNPECDRLLSVPEWSYIMEKENPRDGLCYPGSFNDYEELKHLLSSVKHFEKVKILPKDRWTQHTTTGGSRACAVSGNPSFFRNMVWLTEKGSNYPVAKGSYNNTSGEQMLIIWGVHHPNDETEQRTLYQNVGTYVSVGTSTLNKRSTPEIATRPKVNGQGGRMEFSWTLLDMWDTINFESTGNLIAPEYGFKISKRGSSGIMKTEGTLENCETKCQTPLGAINTTLPFHNVHPLTIGECPKYVKSEKLVLATGLRNVPQIESRGLFGAIAGFIEGGWQGMVDGWYGYHHSNDQGSGYAADKESTQKAFDGITNKVNSVIEKMNTQFEAVGKEFSNLERRLENLNKKVEDGFLDVWTYNAELLVLMENERTLDFHDSNVKNLYDKVRMQLRDNVKELGNGCFEFYHKCDDECMNSVKNGTYDYPKYEEESKLNRNEIKGVKLSSMGVYQILAIYATVAGSLSLAIMMAGISFWMCSNGSLQCRICI

SEQ ID NO: 6605 - protein, 565 aa, synthetic construct
  REGION 1..565: note = hemagglutinin__InfluenzaA__AEA10292
MKVKLLVLLCTFTATYADTICIGYHANNSTDTVDTVLEKNVTVTHSVNLLENSHNGKLCSLKGIAPLQLGNCSVAGWILGNPECELLISKESWSYIVEKPNPENGTCYPGHFADYEELREQLSSVSSFERFEIFPKESSWPNHTVTGVSASCSHNGESSFYRNLLWLTVKNGLYPNLSKSYANNKEKEVLVLWGVHHPPNIVDQKTLYRTENAYVSVVSSHYSRKFTPEIAKRPKVRDQEGRINYYWTLLEPGDTIIFEANGNLIAPRYAFALSRGFGSGIINSNAPMDKCDAKCQTPRGAINSSLPFQNVHPVTIGECPKYVRSAKLRMVTGLRNIPSIQSRGLFGAIAGFIEGGWTGMVDGWYGYHHQNEQGSGYAADQKSTQNAINGITNKVNSVIEKMNTQFTAVGKEFNKLERRMENLNKKVDDGFIDIWTYNAELLVLLENERTLDFHDSNVKNLYEKVKSQLKNNAKEIGNGCFEFYHKCNDECMESVKNGTYDYPKYSEESKLNREKIDGVKLESMGVYQILAIYSTVASSLVLLVSLGAISFWMCSNGSLQCRICI

SEQ ID NO: 6606 - protein, 566 aa, synthetic construct; identical to SEQ ID NO: 5268
  REGION 1..566: note = hemagglutinin__InfluenzaA__AEA10303

SEQ ID NO: 6607 - protein, 566 aa, synthetic construct; identical to SEQ ID NO: 6122
  REGION 1..566: note = hemagglutinin__InfluenzaA__AEA10313

SEQ ID NO: 6608 - protein, 566 aa, synthetic construct; identical to SEQ ID NO: 3833
  REGION 1..566: note = hemagglutinin__InfluenzaA__AEA10323

SEQ ID NO: 6609 - protein, 566 aa, synthetic construct; identical to SEQ ID NO: 4221
  REGION 1..566: note = hemagglutinin__InfluenzaA__AEA10339

SEQ ID NO: 6610 - protein, 566 aa, synthetic construct
  REGION 1..566: note = hemagglutinin__InfluenzaA__AEA10349
MKAILIVLLYTFATANADTLCIGYHANNSTDTVDTVLEKNVTVTHSVNLLEDKHNGKLCKLRGVAPLHLGKCNIAGWILGNPECESLSTASSWSYIVETSSSDNGTCYPGDFIDYEELREQLSSVSSFERFEIFPKTSSWPNHDSNKGVTAACPHAGAKSFYKNLIWLVKKGNSYPKLSKSYINDKGKEVLVLWGIHHPSTSADQQSLYQNADAYVFVGTSRYSKKFKPEIAIRPKVRDQEGRMNYYWTLVEPGDKITFEATGNLVVPRYAFAMERNAGSGIIISDTPVHDCNTTCQTPKGAINTSLPFQNIHPITIGKCPKYVKSTKLRLATGLRNVPSIQSRGLFGAIAGFIEGGWTGMVDGWYGYHHQNEQGSGYAADLKSTQNAIDKITNKVNSVIEKMNTQFTAVGKEFNHLEKRIENLNKKVDDGFLDIWTYNAELLVLLENERTLDYHDSNVKNLYEKVRSQLKNNAKEIGNGCFEFYHKCDNTCMESVKNGTYDYPKYSEEAKLNREEIDGVKLESTRIYQILAIYSTVASSLVLVVSLGAISFWMCSNGSLQCRICI

SEQ ID NO: 6611 - protein, 566 aa, synthetic construct; identical to SEQ ID NO: 4266
  REGION 1..566: note = hemagglutinin__InfluenzaA__AEA30293

SEQ ID NO: 6612 - protein, 566 aa, synthetic construct
  REGION 1..566: note = hemagglutinin__InfluenzaA__AEA48989
MKAILVVLLYTFATANADTLCIGYHANNSTDTVDTVLEKNVTVTHSVNLLEDKHNGKLCKLRGVAPLHLGKCNIAGWILGNPECESLSTASSWSYIVETSSSDNGTCYPGDFIDYEELREQLSSVSSFERFEIFPKTSSWPNHESNKGVTAACPHAGARSFYKNLIWLVKKGNSYPKLSKSYINDKGKEVLVLWGIHHPSTSADQQSLYQNADAYVFVGTSRYSKKFKPEIAIRPKVRDQEGRMNYYWTLVEPGDKITFEATGNLVVPRYAFAMERNAGSGIIISDTPVHDCNTTCQTPKGAINTSLPFQNIHPITIGKCPKYVKSTKLRLATGLRNVPSIQSRGLFGAIAGFIEGGWTGMVDGWYGYHHQNEQGSGYAADLKSTQNAIDEITNKVNSVIEKMNTQFTAVGKEFNHLEKRIENLNKKVDDGFLDIWTYNAELLVLLENERTLDYHDSNVKNLYEKVRSQLKNNAKEIGNGCFEFYHKCDNTCMESVKNGTYDYPKYSEEAKLNREEIDGVKLESTRIYQILAIYSTVASSLVLVVSLGAISFWMCSNGSLQCRICI

SEQ ID NO: 6613 - protein, 568 aa, synthetic construct
  REGION 1..568: note = hemagglutinin__InfluenzaA__AEA50985
MEKIVLLLAIINLVKSDQICIGYHANNSTEQVDTIMEKNVTVTHAQDILEKTHNGKLCDLDGVKPLILRDCSVAGWLLGNPMCDEFLNVPEWSYIVEKINPANDLCYPGNFNDYEELKHLLSRINHFEKIQIIPKSSWSDHEASSGVSSACPYQGRSSFFRNVVWLIKKNDAYPTIKISYNNTNQEDLLVLWGIHHPNDAAEQTKLYQNPTTYISVGTSTLNLRLVPKIATRSKVNGQSGRMEFFWTILKPNDAINFESNGNFIAPENAYKIVKKGDSTIMKSELEYGNCNTKCQTPVGAINSSMPFHNIHPLTIGECPKYVKSNRLVLATGLRNSPQGERRRKKRGLFGAIAGFIEGGWQGMVDGWYGYHHSNEQGSGYAADKESTQKAINGVTNKVNSIIDKMNTQFEAVGREFNNLERRIENLNKKMEDGFLDVWTYNAELLVLMENERTLDFHDSNVKNLYDKVRLQLRDNAKELGNGCFEFYHRCDNECMESVRNGTYDYPQYSEESRLKREEISGVKLESIGIYQILSIYSTAASSLALAIMVAGLSLWMCSNGSLQCRICI

SEQ ID NO: 6614 - protein, 566 aa, synthetic construct; identical to SEQ ID NO: 5533
  REGION 1..566: note = hemagglutinin__InfluenzaA__AEA72704

SEQ ID NO: 6615 - protein, 566 aa, synthetic construct; identical to SEQ ID NO: 5533
  REGION 1..566: note = hemagglutinin__InfluenzaA__AEA72715

SEQ ID NO: 6616 - protein, 566 aa, synthetic construct; identical to SEQ ID NO: 5533
  REGION 1..566: note = hemagglutinin__InfluenzaA__AEA72726

SEQ ID NO: 6617 - protein, 566 aa, synthetic construct
  REGION 1..566: note = hemagglutinin__InfluenzaA__AEA72740
MKAILVVLLYTFATANADTLCIGYHANNSTDTVDTVLEKNVTVTHSVNLLEDKHNGKLCKLRGVAPLHLGKCNIAGWILGNPECESLSTASSWSYIVETSSSDNGTCYPGDFIDYEELREQLSSVSSFERFEIFPKTSSWPNHDSNKGVTAACPHAGAKSFYKNLIWLVKKGNSYPKLSKSYINDKGKEVLVLWGIHHPSTSADQQSLYQNADAYVFVGTSRYSKKFKPEIATRPKVRDQEGRMNYYWTLVEPGDKITFEATGNLVVPRYAFAMERNAGSGIIISDTPVHDCNTTCQTPKGAINTSLPFQNIHPITIGKCPKYVKSTKLRLATGLRNVPSIQSRGLFGAIAGFIEGGWTGMVDGWYGYHHQNEQGSGYAADLKSTQNAIDEITNKVNSVIEKMNTQFTAVGKEFNHLEKRIENLNKKVDDGFLDIWTYNAELLVLLENERTLDYHDSNVKNLYEKVRNQLKNNAKEIGNGCFEFYHKCDNTCMESVKNGTYDYPKYSEEAKLNREEIDGVKLESTRIYQILAIYSTVASSLVLVVSLGAISFWMCSNGSLQCRICI

SEQ ID NO: 6618 - protein, 566 aa, synthetic construct
  REGION 1..566: note = hemagglutinin__InfluenzaA__AEA72750
MKAILVVLLYTFATANADTLCIGYHANNSTDTVDTVLEKNVTVTHSVNLLEDKHNGKLCKLRGVAPLHLGKCNIAGWILGNPECESLSTASSWSYIVETSSSDNGTCYPGVFIDYEELREQLSSVSSFERFEIFPKTSSWPNHDSNKGVTAACPHAGAKSFYKNLIWLVKKGNSYPKLSKSYINDKGKEVLVLWGIHHPSTTADQQSLYQNADTYVFVGTSRYSKKFKPEIAIRPKVRDQEGRMNYYWTLVEPGDKITFEATGNLVVPRYAFAMERNAGSGIIISDTPVHDCNTTCQTPKGAINTSLPFQNIHPITIGKCPKYVKSTKLRLATGLRNVPSIQSRGLFGAIAGFIEGGWTGMVDGWYGYHHQNEQGSGYAADLKSTQNAIDKITNKVNSVIEKMNTQFTAVGKEFNHLEKRIENLNKKVDDGFLDIWTYNAELLVLLENERTLDYHDSNVKNLYEKVRNQLKNNAKEIGNGCFEFYHKCDNTCMESVKNGTYDYPKYSEEAKLNREEIDGVKLESTRIYQILAIYSTVASSLVLVVSLGAISFWMCSNGSLQCRICI

SEQ ID NO: 6619 - protein, 566 aa, synthetic construct; identical to SEQ ID NO: 6435
  REGION 1..566: note = hemagglutinin__InfluenzaA__AEA72759

SEQ ID NO: 6620 - protein, 566 aa, synthetic construct
  REGION 1..566: note = hemagglutinin__InfluenzaA__AEA72777
MKAILVVLLYTLATANADTLCIGYHANNSTDTVDTVLEKNVTVTHSVNLLEDKHDGKLCKLRGVAPLHLGKCNIAGWILGNPECESLSTASSWSYIVETSSSDNGTCYPGDFIDYEELREQLSSVSSFERFEIFPKTSSWPNHDSNKGVTAACPHAGAKSFYKNLIWLVKKGNSYPKLSKSYINDKGKEILVLWGIHHPSTSADQQSLYQNADAYVFVGTSRYSKKFKPEIAIRPKVRDQEGRMNYYWTLVEPGDKITFEATGNLVVPRYAFAMERNAGSGIIISDTPVHDCNATCQTPKGAINTSLPFQNIHPITIGKCPKYVKSTKLRLATGLRNVPSIQSRGLFGAIAGFIEGGWTGMVDGWYGYHHQNEQGSGYAADLKSTQNAIDKITNKVNSVIEKMNTQFTAVGKEFNHLEKRIENLNKKVDDGFLDIWTYNAELLVLLENERTLDYHDSNVKNLYEKVRSQLKNNAKEIGNGCFEFYHKCDNTCMESVKNGTYDYPKYSEEAKLNREEIDGVKLESTRIYQILAIYSTVASSLVLVVSLGAISFWMCSNGSLQCRICI

SEQ ID NO: 6621 - protein, 566 aa, synthetic construct; identical to SEQ ID NO: 6435
  REGION 1..566: note = hemagglutinin__InfluenzaA__AEA72787

SEQ ID NO: 6622 - protein, 566 aa, synthetic construct; identical to SEQ ID NO: 5533
  REGION 1..566: note = hemagglutinin__InfluenzaA__AEA73288

SEQ ID NO: 6623 - protein, 566 aa, synthetic construct; identical to SEQ ID NO: 5533
  REGION 1..566: note = hemagglutinin__InfluenzaA__AEA73299

SEQ ID NO: 6624 - protein, 566 aa, synthetic construct; identical to SEQ ID NO: 5533
  REGION 1..566: note = hemagglutinin__InfluenzaA__AEA73310

SEQ ID NO: 6625 - protein, 566 aa, synthetic construct
  REGION 1..566: note = hemagglutinin__InfluenzaA__AEA73321
MKTIIALSYILCLVFAQKLPGNDNSTATLCLGHHAVPNGTIVKTITNDQIEVTNATELVQSSSTGEICDSPHQILDGENCTLIDALLGDPQCDGFQNKKWDLFVERSKAYSNCYPYDVPDYASLRSLVASSGTLEFNNESFNWTGVTQNGTSSACIRRSNNSFFSRLNWLTHLNFKYPALNVTMPNNEQFDKLYIWGVHHPGTDKDQIFLYAQASGRITVSTKRSQQAVIPNIGSRPRVRNIPSRISIYWTIVKPGDILLINSTGNLIAPRGYFKIRSGKSSIMRSDAPIGKCNSECITPNGSIPNDKPFQNVNRITYGACPRYVKQSTLKLATGMRNVPEKQTRGIFGAIAGFIENGWEGMVDGWYGFRHQNSEGRGQAADLKSTQAAIDQINGKLNRLIGKTNEKFHQIEKEFSEVEGRIQDLEKYVEDTKIDLWSYNAELLVTLENQHTIDLTDSEMNKLFEKTKKQLRENAEDMGNGCFTIYHKCDNACIGSIRNGTYDHNVYRDEALNNRFQIKGVELKSGYKDWILWISFAISCFLLCVALLGFIMWACQKGNIRCNICI

SEQ ID NO: 6626 - protein, 566 aa, synthetic construct; identical to SEQ ID NO: 5533
  REGION 1..566: note = hemagglutinin__InfluenzaA__AEA73332

SEQ ID NO: 6627 - protein, 566 aa, synthetic construct; identical to SEQ ID NO: 5533
  REGION 1..566: note = hemagglutinin__InfluenzaA__AEA73343

SEQ ID NO: 6628 - protein, 566 aa, synthetic construct; identical to SEQ ID NO: 5533
  REGION 1..566: note = hemagglutinin__InfluenzaA__AEA73354

SEQ ID NO: 6629 - protein, 566 aa, synthetic construct
  REGION 1..566: note = hemagglutinin__InfluenzaA__AEA73365
MKTIIALSYTLCLVFAQKLPGNDNSTATLCLGHHAVPNGTIVKTITNDQIEVTNATELVQSSSTGEICDSPHQILDGENCTLIDALLGDPQCDGFQNKKWDLFVERSKAYSNCYPYDVPDYASLRSLVASSGTLEFNNESFNWTGVTQNGTSSACIRRSNNSFFSRLNWLTHLNFKYPALNVTMPNNEQFDKLYIWGVHHPGTDKDQIFLYAQASGRITVSTKRSQQAVIPNIGSRPRVRNIPSRISIYWTIVKPGDILLINSTGNLIAPRGYFKIRSGKSSIMRSDAPIGKCNSECITPNGSIPNDKPFQNVNRITYGACPRYVKQSTLKLATGMRNVPEKQTRGIFGAIAGFIENGWEGMVDGWYGFRHQNSEGRGQAADLKSTQAAIDQINGKLNRLIGKTNEKFHQIEKEFSEVEGRIQDLEKYVEDTKIDLWSYNAELLVALENQHTIDLTDSEMNKLFEKTKKQLRENAEDMGNGCFTIYHKCDNACIGSIRNGTYDHNVYRDEALNNRFQIKGVELKSGYKDWILWISFAISCFLLCVALLGFIMWACQKGNIRCNICI

SEQ ID NO: 6630 - protein, 566 aa, synthetic construct; identical to SEQ ID NO: 5533
  REGION 1..566: note = hemagglutinin__InfluenzaA__AEA73376

SEQ ID NO: 6631 - protein, 566 aa, synthetic construct; identical to SEQ ID NO: 5533
  REGION 1..566: note = hemagglutinin__InfluenzaA__AEA73387

SEQ ID NO: 6632 - protein, 566 aa, synthetic construct; identical to SEQ ID NO: 5533
  REGION 1..566: note = hemagglutinin__InfluenzaA__AEA73398

SEQ ID NO: 6633 - protein, 566 aa, synthetic construct; identical to SEQ ID NO: 5533
  REGION 1..566: note = hemagglutinin__InfluenzaA__AEA73409

SEQ ID NO: 6634 - protein, 566 aa, synthetic construct; identical to SEQ ID NO: 5533
  REGION 1..566: note = hemagglutinin__InfluenzaA__AEA73420

SEQ ID NO: 6635 - protein, 566 aa, synthetic construct; identical to SEQ ID NO: 5533
  REGION 1..566: note = hemagglutinin__InfluenzaA__AEA73452

SEQ ID NO: 6636 - protein, 566 aa, synthetic construct; identical to SEQ ID NO: 5533
  REGION 1..566: note = hemagglutinin__InfluenzaA__AEA73463

SEQ ID NO: 6637 - protein, 566 aa, synthetic construct; identical to SEQ ID NO: 5533
  REGION 1..566: note = hemagglutinin__InfluenzaA__AEA73474

SEQ ID NO: 6638 - protein, 566 aa, synthetic construct
  REGION 1..566: note = hemagglutinin__InfluenzaA__AEA73485
MKTIIALSYILCLVFAQKLPGNDNSTATLCLGHHAVPNGTIVKTITNDQIEVTNATELVQSSSTGEICDSPHQILDGENCTLIDALLGDPQCDGFQNKKWDLFVERSKAHSNCYPYDVPDYASLRSLVASSGTLEFNNESFNWTGVTQNGTSSACIRRSNNSFFSRLNWLTHLNFKYPALNVTMPNNEQFDKLYIWGVHHPGTDKDQIFLYAQASGRITVSTKRSQQAVIPNIGSRPRVRNIPSRISIYWTIVKPGDILLINSTGNLIAPRGYFKIRSGKSSIMRSDAPIGKCNSECITPNGSIPNDKPFQNVNRITYGACPRYVKQSTLKLATGMRNVPEKQTRGIFGAIAGFIENGWEGMVDGWYGFRHQNSEGRGQAADLKSTQAAIDQINGKLNRLIGKTNEKFHQIEKEFSEVEGRIQDLEKYVEDTKIDLWSYNAELLVALENQHTIDLTDSEMNKLFEKTKKQLRENAEDMGNGCFTIYHKCDNACIGSIRNGTYDHNVYRDEALNNRFQIKGVELKSGYKDWILWISFAISCFLLCVALLGFIMWACQKGNIRCNICI

SEQ ID NO: 6639 - protein, 566 aa, synthetic construct; identical to SEQ ID NO: 5533
  REGION 1..566: note = hemagglutinin__InfluenzaA__AEA73496

SEQ ID NO: 6640 - protein, 566 aa, synthetic construct; identical to SEQ ID NO: 5533
  REGION 1..566: note = hemagglutinin__InfluenzaA__AEA73507

SEQ ID NO: 6641 - protein, 566 aa, synthetic construct; identical to SEQ ID NO: 5533
  REGION 1..566: note = hemagglutinin__InfluenzaA__AEA73518

SEQ ID NO: 6642 - protein, 566 aa, synthetic construct; identical to SEQ ID NO: 5533
  REGION 1..566: note = hemagglutinin__InfluenzaA__AEA73529

SEQ ID NO: 6643 - protein, 566 aa, synthetic construct; identical to SEQ ID NO: 5533
  REGION 1..566: note = hemagglutinin__InfluenzaA__AEA73540

SEQ ID NO: 6644 - protein, 566 aa, synthetic construct; identical to SEQ ID NO: 5533
  REGION 1..566: note = hemagglutinin__InfluenzaA__AEA73551

SEQ ID NO: 6645 - protein, 566 aa, synthetic construct; identical to SEQ ID NO: 5533
  REGION 1..566: note = hemagglutinin__InfluenzaA__AEA73562

SEQ ID NO: 6646 - protein, 565 aa, synthetic construct
  REGION 1..565: note = hemagglutinin__InfluenzaA__AEA73573
MKVKLLVLLCTFTATYADTICIGYHANNSTDTVDTVLEKNVTVTHSVNLLENSHNGKLCLLKGIAPLQLGNCSVAGWILGNPECELLISKESWSYIVEKPNPENGTCYPGHFADYEELREQLSSVSSFERFEIFPKESSWPNHTVTGVSASCSHNGESSFYRNLLWLTEKNGLYPNLSKSYANNKEKEVLVLWGVHHPPNIGDQKTLYHTENAYVSVVSSHYSRKFTPEIAKRPKVRDQEGRINYYWTLLEPGDTIIFEANGNLIAPRYAFALSRGFGSGIINSNAPMDKCDAKCQTPQGAINSSLPFQNVHPVTIGECPKYVRSAKLRMVTGLRNIPSIQSRGLFGAIAGFIEGGWTGMVDGWYGYHHQNEQGSGYAADQKSTQNAINGITNKVNSVIEKMNTQFTAVGKEFNKLERRMENLNKKVDDGFIDIWTYNAELLVLLENERTLDFHDSNVKNLYEKVKSQLKNNAKEIGNGCFEFYHKCNDECMESVKNGTYDYPKYSEESKLNREKIDGVKLESMGVYQILAIYSTVASSLVLLVSLGAISFWMCSNGSLQCRICI

SEQ ID NO: 6647 - protein, 565 aa, synthetic construct
  REGION 1..565: note = hemagglutinin__InfluenzaA__AEA73584
MKVKLLVLLCTFTATYADTICIGYHANNSTDTVDTVLEKNVTVTHSVNLLENSHNGKLCLLKGIAPLQLGNCSVAGWILGNPECELLISKESWSYIVEKPNPENGTCYPGHFADYEELREQLSSVSSFERFEIFPKESSWPNHTVTGVSASCSHNGESSFYRNLLWLTGKNGLYPNLSKSYANNKEKEVLVLWGVHHPPNIVDQKTLYRTENAYVSVVSSHYSRKFTPEIAKRPKVRNQEGRINYYWTLLEPGDTIIFEANGNLIAPRYAFALSRGFGSGIINSNAPMDKCDAKCQTPQGAINSSLPFQNVHPVTIGECPKYVRSAKLRMVTGLRNIPSIQSRGLFGAIAGFIEGGWTGMVDGWYGYHHQNEQGSGYAADQKSTQNAINGITNKVNSVIEKMNTQFTAVGKEFNKLERRMENLNKKVDDGFIDIWTYNAELLVLLENERTLDFHDSNVKNLYEKVKSQLKNNAKEIGNGCFEFYHKCNDECMESVKNGTYDYPKYSEESKLNREKIDGVKLESMGVYQILAIYSTVASSLVLLVSLGAISFWMCSNGSLQCRICI

SEQ ID NO: 6648 - protein, 565 aa, synthetic construct
  REGION 1..565: note = hemagglutinin__InfluenzaA__AEA73595
MKVKLLVLLCTFTATYADTICIGYHANNSTDTVDTVLEKNVTVTHSVNLLENSHNGKLCLLKGIAPLQLGNCSVAGWILGNPECELLISKESWSYIVEKPNPENGTCYPGHFADYEELREQLSSVSSFERFEIFPKESSWPNHTVTGVSASCSHNGESSFYRNLLWLTVKNGLYPNLSKSYANNKEKEVLVLWGVHHPPNIVDQKTLYHTENAYVSVVSSHYSRKFTPEIAKRPKVRDQEGRINYYWTLLEPGDTIIFEANGNLIAPRYAFALSRGFGSGIINSNAPMDKCDAKCQTPRGAINSSLPFQNVHPVTIGECPKYVRSAKLRMVTGLRNIPSIQSRGLFGAIAGFIEGGWTGMVDGWYGYHHQNEQGSGYAADQKSTQNAINGITNKVNSVIEKMNTQFTAVGKEFNKLERRMENLNKKVDDGFIDIWTYNAELLVLLENERTLDFHDSNVKNLYEKVKSQLKNNAKEIGNGCFEFYHKCNDECMESVKNGTYDYPKYSEESKLNREKIDGVKLESMGVYQILAIYSTVASSLVLLVSLGAISFWMCSNGSLQCRICI

SEQ ID NO: 6649 - protein, 565 aa, synthetic construct; identical to SEQ ID NO: 5953
  REGION 1..565: note = hemagglutinin__InfluenzaA__AEA73606

SEQ ID NO: 6650 - protein, 565 aa, synthetic construct; identical to SEQ ID NO: 3131
  REGION 1..565: note = hemagglutinin__InfluenzaA__AEA73617

SEQ ID NO: 6651 - protein, 565 aa, synthetic construct; identical to SEQ ID NO: 3616
  REGION 1..565: note = hemagglutinin__InfluenzaA__AEA73628

SEQ ID NO: 6652 - protein, 565 aa, synthetic construct; identical to SEQ ID NO: 5972
  REGION 1..565: note = hemagglutinin__InfluenzaA__AEA73639

SEQ ID NO: 6653 - protein, 565 aa, synthetic construct; identical to SEQ ID NO: 3131
  REGION 1..565: note = hemagglutinin__InfluenzaA__AEA73650

SEQ ID NO: 6654 - protein, 565 aa, synthetic construct; identical to SEQ ID NO: 3616
  REGION 1..565: note = hemagglutinin__InfluenzaA__AEA73661

SEQ ID NO: 6655 - protein, 565 aa, synthetic construct
  REGION 1..565: note = hemagglutinin__InfluenzaA__AEA73672
MKVKLLVLLCTFTATFADTICIGYHANNSTDTVDTVLEKNVTVTHSVNLLENSHNGKLCLLKGIAPLQLGNCSVAGWILGNPECELLISKESWSYIVEKPNPENGTCYPGHFADYEELREQLSSVSSFERFEIFPKESSWPNHTVTGVSASCSHNGESSFYRNLLWLTVKNGLYPNLSKSYANNKEKEVLVLWGVHHPPNIVDQKTLYRTENAYVSVVSSHYSRKFTPEIAKRPKVRDQEGRINYYWTLLEPGDTIIFEANGNLIAPRYAFALSRGFGSGIINSNAPMDKCDAKCQTPRGAINSSLPFQNVHPVTIGECPKYVRSAKLRMVTGLRNIPSIQSRGLFGAIAGFIEGGWTGMVDGWYGYHHQNEQGSGYAADQKSTQNAINGITNKVNSVIEKMNTQFTAVGKEFNKLERRMENLNKKVDDGFIDIWTYNAELLVLLENERTLDFHDSNVKNLYEKVKSQLKNNAKEIGNGCFEFYHKCNDECMESVKNGTYDYPKYSEESKLNREKIDGVKLESMGVYQILAIYSTVASSLVLLVSLGAISFWMCSNGSLQCRICI

SEQ ID NO: 6656 - protein, 565 aa, synthetic construct; identical to SEQ ID NO: 3616
  REGION 1..565: note = hemagglutinin__InfluenzaA__AEA73683

SEQ ID NO: 6657 - protein, 565 aa, synthetic construct
  REGION 1..565: note = hemagglutinin__InfluenzaA__AEA73694
MKVKLLVLLCTFTATYADTICIGYHANNSTDTVDTVLEKNVTVTHSVNLLENSHNGKLCLLKGIAPLQLGNCSVAGWILGNPECELLISKESWSYIVEKPNPENGTCYPGHFADYEELREQLSSVSSFERFEIFPKESSWPNHTVTGVSASCSHNGESSFYRNLLWLTVKNGLYPNLSKSYANNKEKEVLVLWGVHHPPNIVDQKTLYRTENAYVSVVSSHYSRKFTPEIAKRPKVRDQEGRINYYWTLLEPGDTIIFEANGNLIAPRYAFALSRGFGSGIINSNAPMDKCDAKCQTPRGAINSSLPFQNVHPVTIGECPKYVRSAKLRMVTGLRNIPSIQSRGLFGAIAGFIEGGWTGMVDGWYGYHHQNEQGSGYAADQKSTQNAINGITNKVNSVIEKMNTQFTAVGKEFNKLERRMENLNKKVDDGFIDIWTYNAELLVLLENERTLDFHDSNVKNLYEKVKSQLKNNAKEIGNGCFEFYHKCNDECMESVKNGTYDYPKYSEESKLNREKIDGVELESMGVYQILAIYSTVASSLVLLVSLGAISFWMCSNGSLQCRICI

SEQ ID NO: 6658 - protein, 565 aa, synthetic construct; identical to SEQ ID NO: 3616
  REGION 1..565: note = hemagglutinin__InfluenzaA__AEA73705

SEQ ID NO: 6659 - protein, 565 aa, synthetic construct; identical to SEQ ID NO: 3131
  REGION 1..565: note = hemagglutinin__InfluenzaA__AEA73716

SEQ ID NO: 6660 - protein, 565 aa, synthetic construct; identical to SEQ ID NO: 3131
  REGION 1..565: note = hemagglutinin__InfluenzaA__AEA73727

SEQ ID NO: 6661 - protein, 565 aa, synthetic construct; identical to SEQ ID NO: 3131
  REGION 1..565: note = hemagglutinin__InfluenzaA__AEA73738

SEQ ID NO: 6662 - protein, 565 aa, synthetic construct; identical to SEQ ID NO: 3131
  REGION 1..565: note = hemagglutinin__InfluenzaA__AEA73749

SEQ ID NO: 6663 - protein, 565 aa, synthetic construct
  REGION 1..565: note = hemagglutinin__InfluenzaA__AEA73760
MKVKLLVLLCTFTATYADTICIGYHANNSTDTVDTVLEKNVTVTHSVNLLENSHNGKLCLLKGIAPLQLGNCSVAGWILGNPECELLISKESWSYIVEKPNPENGTCYPGHFADYEELREQLSSVSSFERFEIFPKESSWPNHTVTGVSASCSHNGESSFYRNLLWLTVKNGLYPNLSKSYANNKEKEVLVLWGVHHPPNIVDQKTLYRTENAYVSVVSSHYSRKFTPEIAKRPKIRDQEGRINYYWTLLEPGDTIIFEANGNLIAPRYAFALSRGFGSGIINSNAPMDKCDAKCQTPRGAINSSLPFQNVHPVTIGECPKYVRSAKLRMVTGLRNIPSIQSRGLFGAIAGFIEGGWTGMVDGWYGYHHQNEQGSGYAADQKSTQNAINGITNKVNSVIEKMNTQFTAVGKEFNKLERRMENLNKKVDDGFIDIWTYNAELLVLLENERTLDFHDSNVKNLYEKVKSQLKNNAKEIGNGCFEFYHKCNDECMESVKNGTYDYPKYSEESKLNREKIDGVKLESMGVYQILAIYSTVASSLVLLVSLGAISFWMCSNGSLQCRICI

SEQ ID NO: 6664 - protein, 566 aa, synthetic construct; identical to SEQ ID NO: 2669
  REGION 1..566: note = hemagglutinin__InfluenzaA__AEA73771

SEQ ID NO: 6665 - protein, 566 aa, synthetic construct; identical to SEQ ID NO: 4299
  REGION 1..566: note = hemagglutinin__InfluenzaA__AEA73781

SEQ ID NO: 6666 - protein, 566 aa, synthetic construct; identical to SEQ ID NO: 4221
  REGION 1..566: note = hemagglutinin__InfluenzaA__AEA73791

SEQ ID NO: 6667 - protein, 566 aa, synthetic construct; identical to SEQ ID NO: 2849
  REGION 1..566: note = hemagglutinin__InfluenzaA__AEA73801

SEQ ID NO: 6668 - protein, 566 aa, synthetic construct; identical to SEQ ID NO: 3833
  REGION 1..566: note = hemagglutinin__InfluenzaA__AEA73811

SEQ ID NO: 6669 - protein, 566 aa, synthetic construct; identical to SEQ ID NO: 4391
  REGION 1..566: note = hemagglutinin__InfluenzaA__AEA73821

SEQ ID NO: 6670 - protein, 566 aa, synthetic construct
  REGION 1..566: note = hemagglutinin__InfluenzaA__AEA73831
MKAILVVLLYTFATANADTLCIGYHANNSTDTVDTVLEKNVTVTHSVNLLEDKHNGKLCKLRGVTPLHLGKCNIAGWILGNPECESLSTASSWSYIVETSSSDNGTCYPGDFIDYEELREQLSSVSSFERFEIFPKTSSWPNHDSNKGVTAACPHAGAKSFYKNLIWLVKKGNSYPKLSKSYINDKGKEVLVLWGIHHPSTSTDQQSLYQNADAYVFVGTSRYSKKFKPEIAIRPKVRDQEGRMNYYWTLVEPGDKITFEATGNLVVPRYAFAMERNAGSGIIISDTPVHDCNTTCQTPKGAINTSLPFQNIHPITIGKCPKYVKSTKLRLATGLRNVPSIQSRGLFGAIAGFIEGGWTGMVDGWYGYHHQNEQGSGYAADLKSTQNAIDKITNKVNSVIEKMNTQFTAVGKEFNHLEKRIENLNKKVDDGFLDIWTYNAELLVLLENERTLDYHDSNVKNLYEKVRSQLKNNAKEIGNGCFEFYHKCDNTCMESVKNGTYDYPKYSEEAKLNREEIDGVKLESTRIYQILAIYSTVASSLVLVVSLGAISFWMCSNGSLQCRICI

SEQ ID NO: 6671 - protein, 566 aa, synthetic construct
  REGION 1..566: note = hemagglutinin__InfluenzaA__AEA73841
MKAILVVLLYTFATANADTLCIGYHANNSTDTVDTVLEKNVTVTHSVNLLEDKHNGKLCKLRGVAPLHLGKCNIAGWILGNPECESLSTASSWSYIVETSSSDNGTCYPGDFINYEELREQLSSVSSFERFEIFPKTSSWPNHDSNKGVTAACPHAGAKSFYKNLIWLVKKGNSYPKLSKSYINDKGKEVLVLWGIHHPSTSADQQSLYQNADAYVFVGTSRYSKKFKPEIAIRPKVRDQEGRMNYYWTLVEPGDKITFEATGNLVVPRYAFAMERNAESGIIISDTPVHDCNTTCQTPKGAINTSLPFQNIHPITIGKCPKYVKSTKLRLATGLRNVPSIQSRGLFGAIAGFIEGGWTGMVDGWYGYHHQNEQGSGYAADLKSTQNAIDKITNKVNSVVEKMNTQFTAVGKEFNHLEKRIENLNKKVDDGFLDIWTYNAELLVLLENERTLDYHDSNVKNLYEKVRSQLKNNAKEIGNGCFEFYHKCDNTCMESVKNGTYDYPKYSEEAKLNREEIDGVKLESTRIYQILAIYSTVASSLVLVVSLGAISFWMCSNGSLQCRICI

SEQ ID NO: 6672 - protein, 566 aa, synthetic construct; identical to SEQ ID NO: 4299
  REGION 1..566: note = hemagglutinin__InfluenzaA__AEA73851

SEQ ID NO: 6673 - protein, 566 aa, synthetic construct
  REGION 1..566: note = hemagglutinin__InfluenzaA__AEA73861
MKAILVVLLYTFATANADTLCIGYHANNSTDTVDTVLEKNVTVTHSVNLLEDKHNGKLCKLRGVAPLHLGECNIAGWILGNPECESLSTASSWSYIVETSSSDNGTCYPGDFIDYEELREQLSSVSSFERFEIFPKTSSWPNHDSNKGVTAACPHAGAKSFYKNLIWLVKKGNSYPKLSKSYINDKGKEVLVLWGIHHPSTSADQQSLYQNADAYVFVGTSRYSKKFKPEIAIRPKVRDQEGRMNYYWTLVEPGDKITFEATGNLVVPRYAFAMERNAGSGIIISDTPVHDCNTTCQTPKGAINTSLPFQNVHPITIGKCPKYVKSTKLRLATGLRNVPSIQSRGLFGAIAGFIEGGWTGMVDGWYGYHHQNEQGSGYAADLKSTQNAIDEITNKVNSVIEKMNTQFTAVGKEFNHLEKRIENLNKKIDDGFLDIWTYNAELLVLLENERTLDYHDSNVKNLYEKVRSQLKNNAKEIGNGCFEFYHKCDNTCMESVKNGTYDYPKYSEEAKLNREEIDGVKLESTRIYQILAIYSTVASSLVLVVSLGAISFWMCSNGSLQCRICI

SEQ ID NO: 6674 - protein, 566 aa, synthetic construct; identical to SEQ ID NO: 4541
  REGION 1..566: note = hemagglutinin__InfluenzaA__AEA73871

SEQ ID NO: 6675 - protein, 566 aa, synthetic construct; identical to SEQ ID NO: 4541
  REGION 1..566: note = hemagglutinin__InfluenzaA__AEA73881

SEQ ID NO: 6676 - protein, 566 aa, synthetic construct; identical to SEQ ID NO: 4221
  REGION 1..566: note = hemagglutinin__InfluenzaA__AEA73891

SEQ ID NO: 6677 - protein, 566 aa, synthetic construct
  REGION 1..566: note = hemagglutinin__InfluenzaA__AEA73901
MNAILVVLLYTFATANADTLCIGYHANNSTDTVDTLLEKNVTVTHSVNLLEDKHNGKLCKLRGVAPLHLGKCNIAGWILGNPECESLSTASSWSYIVETSSSDNGTCYPGDFIDYEELREQLSSVSSFERFEIFPKTSSWPNHDSNKGVTAACPHAGAKSFYKNLIWLVKKGNSYPKLSKSYINDKGKEVLVLWGIHHPSTSADQQSLYQNADAYVFVGTSRYSKKFKPEIAIRPKVRDQEGRMNYYWTLVEPGDKITFEATGNLVVPRYAFAMERNAGSGIIISDTPVHDCNTTCQTPKGAINTSLPFQNIHPITIGKCPKYVKSTKLRLATGLRNVPSIQSRGLFGAIAGFIEGGWTGMVDGWYGYHHQNEQGSGYAADLKSTQNAIDEITNKINSVIEKMNTQFTAVGKEFNHLEKRIENLNKKVDDGFLDIWTYNAELLVLLENERTLDYHDSNVKNLYEKVRSQLKNNAKEIGNGCFEFYHKCDNTCMESVKNGTYDYPKYSEEAKLNREEIDGVKLESTRIYQILAIYSTVASSLVLVVSLGAISFWMCSNGSLQCRICI

SEQ ID NO: 6678 - protein, 566 aa, synthetic construct; identical to SEQ ID NO: 3833
  REGION 1..566: note = hemagglutinin__InfluenzaA__AEA73911

SEQ ID NO: 6679 - protein, 566 aa, synthetic construct; identical to SEQ ID NO: 4541
  REGION 1..566: note = hemagglutinin__InfluenzaA__AEA73921

SEQ ID NO: 6680 - protein, 566 aa, synthetic construct; identical to SEQ ID NO: 4299
  REGION 1..566: note = hemagglutinin__InfluenzaA__AEA73931

SEQ ID NO: 6681 - protein, 566 aa, synthetic construct; identical to SEQ ID NO: 4299
  REGION 1..566: note = hemagglutinin__InfluenzaA__AEA73961

SEQ ID NO: 6682 - protein, 566 aa, synthetic construct
  REGION 1..566: note = hemagglutinin__InfluenzaA__AEA73971
MKAILVVLLYTFATANADTLCIGYHANNSTDTVDTVLEKNVTVTHSVNLLEDKHNGKLCKLRGVAPLHLGKCNIAGWILGNPECESLSTASSWSYIVETSSSDNGTCYPGDFIDYEELREQLSSVSSFERFEIFPKTSSWPNHDSNKGVTAACPHAGAKSFYKNLIWLVKKGNSYPKLSKSYINDKGKEVLVLWGIHHPSTSADQQSLYQNADAYVFVGTSRYSKKFKPEIAIRPKVREQEGRMNYYWTLVEPGDKITFEATGNLVVPRYAFAMERNAGSGIIISDTPVHDCNTTCQTPKGAINTSLPFQNIHSITIGKCPKYVKSTKLRLATGLRNVPSIQSRGLFGAIAGFIEGGWTGMVDGWYGYHHQNEQGSGYAADQKSTQNAIDEITNKVNSVIEKMNTQFTAVGKEFNHLEKRIENLNKKVDDGFLDIWTYNAELLVLLENERTLDYHDSNVKNLYEKVRSQLKNNAKEIGNGCFEFYHKCNNTCMESVKNGTYDYPKYSEEAKLNREEIDGVKLESTRIYQILAIYSTVASSLVLVVSLGAISFWMCSNGSLQCRICI

SEQ ID NO: 6683 - protein, 566 aa, synthetic construct; identical to SEQ ID NO: 4299
  REGION 1..566: note = hemagglutinin__InfluenzaA__AEA73981

SEQ ID NO: 6684 - protein, 566 aa, synthetic construct
  REGION 1..566: note = hemagglutinin__InfluenzaA__AEA73991
MKAILVVLLYTFATANADTLCIGYHANNSTDTVDTVLEKNVTVTHSVNLLEDKHNGKLCKLRGVAPLHLGKCNIAGWILGNPECESLSTASSWSYIVETSSSDNGTCYPGDFIDYEELREQLSSVSSFEKFEIFPKTSSWPNHDSNKGVTAACPHAGAKSFYKNLIWLVKKGNSYPKLSKSYINDKGKEVLVLWGIHHPSTSADQQSLYQNADSYVFVGTSRYSKKFKPEIAIRPKVRDQEGRMNYYWTLVEPGDKITFEATGNLVVPRYAFAMERNAGSGIIISDTPVHDCNTTCQTPEGAINTSLPFQNIHPITIGKCPKYVKSTKLRLATGLRNVPSIQSRGLFGAIAGFIEGGWTGMVDGWYGYHHQNEQGSGYAADLKSTQNAIDEITNKVNSVIEKMNTQFTAVGKEFNHLEKRIENLNKKVDDGFLDIWTYNAELLVLLENERTLDYHDSNVKNLYEKVRSQLKNNAKEIGNGCFEFYHKCDNTCMESVKNGTYDYPKYSEEAKLNREEIDGVKLESTRIYQILAIYSTVASSLVLVVSLGAISFWMCSNGSLQCRICI

SEQ ID NO: 6685 - protein, 566 aa, synthetic construct; identical to SEQ ID NO: 4282
  REGION 1..566: note = hemagglutinin__InfluenzaA__AEA74001

SEQ ID NO: 6686 - protein, 566 aa, synthetic construct
  REGION 1..566: note = hemagglutinin__InfluenzaA__AEA74011
MKAILVVLLYTFATANADTLCIGYHANNSTDTVDTVLEKNVTVTHSVNLLEDKHNGKLCKLRGVAPLHLGKCNIAGWILGNPECESLSTASSWSYIVETSSSDNGTCYPGDFIDYEELREQLSSVSSFERFEIFPKTSSWPNHDSNKGVTAACPHAGAKSFYKNLIWLVKKRNSYPKLSQSYINDKGKEVLVLWGIHHPSTSADQQSLYQNADAYVFVGTSRYSKKFKPEIAIRPKVRDQEGRMNYYWTLVEPGDKITFEATGNLVVPRYAFAMERNAGSGIIISDTPVHDCNTTCQTPKGAINTSLPFQNIHPITIGKCPKYVKSTKLRLATGLRNVPSIQSRGLFGAIAGFIEGGWTGMVDGWYGYHHQNEQGSGYAADLKSTQNAIDKITNKVNSVIEKMNTQFTAVGKEFNHLEKRIENLNKKVDDGFLDIWTYNAELLVLLENERTLDYHDSNVKNLYEKVRSQLKNNAKEIGNGCFEFYHKCDNTCMESIKNGTYDYPKYSEEAKLNREEIDGVKLESTRIYQILAIYSTVASSLVLVVSLGAISFWMCSNGSLQCRICI

SEQ ID NO: 6687 - protein, 566 aa, synthetic construct
  REGION 1..566: note = hemagglutinin__InfluenzaA__AEA74021
MKAILVVLLYTFATANADTLCIGYHANNSTDTVDTVLEKNVTVTHSVNLLEDKHNGKLCKLRGVAPLHLGKCNIAGWILGNPECESLSTASSWSYIVETSSSDNGTCYPGDFIDYEELREQLSSVSSFERFEIFPKTSSWPNHDSNKGVTAACPHAGAKSFYKNLIWLVKKGNSYPKLSQSYINDKGKEVLVLWGIHHPSTSADQQSLYQNADAYVFVGTSRYSKKFKPEIAIRPKVRDQEGRMNYYWTLVEPGDKITFEATGNLVVPRYAFAMERNAGSGIIISDTPVHDCNTTCQTPKGAINTSLPFQNIHPITIGKCPKYVKSTKLRLATGLRNVPSIQSRGLFGAIAGFIEGGWTGMVDGWYGYHHQNEQGSGYAADLKSTQNAIDKITNKVNSVIEKMNTQFTAVGKEFNHLEKRIENLNKKVDDGFLDIWTYNAELLVLLENERTLDYHDSNVKNLYEKVRSQLKNNAKEIGNGCFEFYHKCDNTCMESIKNGTYDYPKYSEEAKLNREEIDGVKLESTRIYQILAIYSTVASSLVLVVSLGAISFWMCSNGSLQCRICI

SEQ ID NO: 6688 - protein, 566 aa, synthetic construct
  REGION 1..566: note = hemagglutinin__InfluenzaA__AEA74031
MKAILVVLLYTFATANADTLCIGYHANNSTDTVDTVLEKNVTVTHSVDLLEDKHNGKLCKLRGVAPLHLGKCNIAGWILGNPECESLSTASSWSYIVETSSSDNGTCYPGDFIDYEELREQLSSVSSFERFEIFPKTSSWPNHDSNKGVTAACPHAGAKSFYNNLIWLVKKGNSYPKLNKSYINDKGKEVLVLWGIHHPSTSTDQQSLYQNADAYVFVGTSRYSKKFKPEIAIRPKVRNQEGRMNYYWTLVEPGDKITFEATGNLVVPRYAFAMERNAGSGIIISDTPIHDCNTTCQTPKGAINTSLPFQNIHPITIGKCPKYVKSTKLRLATGLRNVPSIQSRGLFGAIAGFIEGGWTGMVDGWYGYHHQNEQGSGYAADLKSTQNAIDEITNKVNSVIEKMNTQFTAVGKEFNHLEKRIENLNKKVDDGFLDIWTYNAELLVLLENERTLDYHDSNVKNLYEKVRSQLKNNAKEIGNGCFEFYHKCDNTCMESVKNGTYDYPKYSEEAKLNREEIDGVKLESTRIYQILAIYSTVASSLVLVVSLGAISFWMCSNGSLQCRICI

SEQ ID NO: 6689 - protein, 566 aa, synthetic construct
  REGION 1..566: note = hemagglutinin__InfluenzaA__AEA74035
MKAILVVLLYTFATANADTLCIGYHANNSTDTVDTVLEKNVTVTHSVDLLEDKHNGKLCKLRGVAPLHLGKCNIAGWILGNPECESLSTASSWSYIVETSSSDNGTCYPGDFIDYEELREQLSSVSSFERFEIFPKTSSWPNHDSNKGVTAACPHAGAKSFYNNLIWLVKKGNSYPKLNKSYINDKGKEVLVLWGIHHPSTSTDQQSLYQNADAYVFVGTSRYSKKFKPEIAIRPKVRDQEGRMNYYWTLVEPGDKITFEATGNLVVPRYAFAMERNAGSGIIISDTPIHDCNTTCQTPKGAINTSLPFQNIHPITIGKCPKYVKSTKLRLATGLRNVPSIQSRGLFGAIAGFIEGGWTGMVDGWYGYHHQNEQGSGYAADLKSTQNAIDEITNKVNSVIEKMNTQFTAVGKEFNHLEKRIENLNKKVDDGFLDIWTYNAELLVLLENERTLDYHDSNVKNLYEKVRSQLKNNAKEIGNGCFEFYHKCDNTCMESVKNGTYDYPKYSEEAKLNREEIDGVKLESTRIYQILAIYSTVASSLVLVVSLGAISFWMCSNGSLQCRICI

SEQ ID NO: 6690 - protein, 566 aa, synthetic construct; identical to SEQ ID NO: 2434
  REGION 1..566: note = hemagglutinin__InfluenzaA__AEA77299

SEQ ID NO: 6691 - protein, 566 aa, synthetic construct; identical to SEQ ID NO: 6435
  REGION 1..566: note = hemagglutinin__InfluenzaA__AEB21316

SEQ ID NO: 6692 - protein, 566 aa, synthetic construct; identical to SEQ ID NO: 6454
  REGION 1..566: note = hemagglutinin__InfluenzaA__AEB21326

SEQ ID NO: 6693 - protein, 566 aa, synthetic construct; identical to SEQ ID NO: 6435
  REGION 1..566: note = hemagglutinin__InfluenzaA__AEB21338

SEQ ID NO: 6694 - protein, 566 aa, synthetic construct; identical to SEQ ID NO: 6454
  REGION 1..566: note = hemagglutinin__InfluenzaA__AEB21348

SEQ ID NO: 6695 - protein, 566 aa, synthetic construct; identical to SEQ ID NO: 3588
  REGION 1..566: note = hemagglutinin__InfluenzaA__AEB40206

SEQ ID NO: 6696 - protein, 566 aa, synthetic construct; identical to SEQ ID NO: 3588
  REGION 1..566: note = hemagglutinin__InfluenzaA__AEB66895

SEQ ID NO: 6697 - protein, 565 aa, synthetic construct
  REGION 1..565: note = hemagglutinin__InfluenzaA__AEB71102
MDVPVFVLLMLTSICVQADRICVGYLSTNSSERVDTLLENNVPVTSSVDLVETNHTGTYCSLGGISPVHLGDCSFEGWIVGNPACASNLGIREWSYLIEDPSAPHGLCYPGELDNNGELRHLFSGIRSFSRTELIAPTSWGEVNDGVTAACQDKGASSFYRNLVWFVERGNKYPVIRRTYNNTTGRDVLVIWGIHHPVSTDEARKLYAKDNPYTLVSTSSWSRKYNLETGTRPGYNGQKSWTKIYWYLMHPGDSISFESNGGLLAPKYGYIIEEYGKGRIFQSRIRIAKCNTKCQTSVGGINTNKTFQNIERNALGDCPKYIKSGQLKLATGLRNVPAISNRGLFGAIAGFIEGGWPGLINGWYGFQHQNEQGMGMAADKESTQKAIDQITTKINNIIEKMNGNYDSIRGEFSQVEQRINMLADRIDDAVTDVWSYNAKLLVLLENDKTLDMHDANVRNLHDQVRRVLRTNAIDEGNGCFELLHKCNDSCMETIRNGTYNHIEYEEESKLKRQEIEGIKLKSDDNVYKALSIYSCIASSIVLVGLILAFIMWACSSGNCRFNICI

SEQ ID NO: 6698 - protein, 565 aa, synthetic construct
  REGION 1..565: note = hemagglutinin__InfluenzaA__AEB71896
MKVKLLVLLCTFTATYADTICIGYHANNSTDTVDTVLEKNVTVTHSVNLLENSHNGKLCLLKGIAPLQLGNCSVAGWILGNPECELLISKESWSYIVEKPNPENGTCYPGHFADYEELREQLSSVSSFERFEIFPKESSWPNHTVTGVSASCSHNGESSFYRNLLWLTGKNGLYPNLSKSYANNKEKEVLVLWGVHHPPNIVDQKTLYRTENAYVSVVSSHYSRKFTPEIAKRPKVRDQEGRINYYWTLLEPGDTIIFEANGNLIAPRYAFALSRGFGSGIINSNAPMGKCDAKCQTPQGAINSSLPFQNVHPVTIGECPKYVRSAKLRMVTGLRNIPSIQSRGLFGAIAGFIEGGWTGMVDGWYGYHHQNEQGSGYAADQKSTQNAINGITNKVNSVIEKMNTQFTAVGKEFNKLERRMENLNKKVDDGFIDIWTYNAELLVLLENERTLDFHDSNVKNLYEKVKSQLKNNAKEIGNGCFEFYHKCNDECMESVKNGTYDYPKYSEESKLNKEKIDGVKLESMGVYQILAIYSTVASSLVLLVSLGAISFWMCSNGSLQCRICI

SEQ ID NO: 6699 - protein, 566 aa, synthetic construct; identical to SEQ ID NO: 2911
  REGION 1..566: note = hemagglutinin__InfluenzaA__AEB71916

SEQ ID NO: 6700 - protein, 566 aa, synthetic construct; identical to SEQ ID NO: 2434
  REGION 1..566: note = hemagglutinin__InfluenzaA__AEB71925

SEQ ID NO: 6701 - protein, 566 aa, synthetic construct; identical to SEQ ID NO: 2434
  REGION 1..566: note = hemagglutinin__InfluenzaA__AEB71936

SEQ ID NO: 6702 - protein, 566 aa, synthetic construct; identical to SEQ ID NO: 2434
  REGION 1..566: note = hemagglutinin__InfluenzaA__AEB71947

SEQ ID NO: 6703 - protein, 565 aa, synthetic construct; identical to SEQ ID NO: 5972
  REGION 1..565: note = hemagglutinin__InfluenzaA__AEB71958

SEQ ID NO: 6704 - protein, 566 aa, synthetic construct; identical to SEQ ID NO: 5419
  REGION 1..566: note = hemagglutinin__InfluenzaA__AEB71969

SEQ ID NO: 6705 - protein, 566 aa, synthetic construct
  REGION 1..566: note = hemagglutinin__InfluenzaA__AEB71980
MKTIIALSCILCLVFAQKLPGNDNSTATLCLGHHAVPNGTIVKTITNDQIEVTNATELVQSSSTGEICDSPHQILDGENCTLIDALLGDPQCDGFQNKKWDLFVERSKAYSNCYPYDVPDYASLRSLVASSGTLEFNNESFNWTGVTQNGTSSACIRRSNNSFFSRLNWLTHLKFKYPALNVTMPNNEQFDKLYIWGVHHPGTDNDQIFLYAQASGRITVSTKRSQQTVIPNIGSRPRVRNIPSRISIYWTIVKPGDILLINSTGNLIAPRGYFKIRSGKSSIMRSDAPIGKCNSECITPNGSIPNDKPFQNVNRITYGACPRYVKQNTLKLATGMRNVPEKQTRGIFGAIAGFIENGWEGMVDGWYGFRHQNSEGRGQAADLKSTQAAIDQINGKLNRLIGKTNEKFHQIEKEFSEVEGRIQDLEKYVEDTKIDLWSYNAELLVALENQHTIDLTDSEMNKLFEKTKKQLRENAEDMGNGCFKIYHKCDNACIGSIRNGTYDHDVYRDEALNNRFQIKGVELKSGYKDWILWISFAISCFLLCVALLGFIMWACQKGNIRCNICI

SEQ ID NO: 6706 - protein, 565 aa, synthetic construct; identical to SEQ ID NO: 3616
  REGION 1..565: note = hemagglutinin__InfluenzaA__AEB71992

SEQ ID NO: 6707 - protein, 565 aa, synthetic construct; identical to SEQ ID NO: 3616
  REGION 1..565: note = hemagglutinin__InfluenzaA__AEC13313

SEQ ID NO: 6708 - protein, 566 aa, synthetic construct
  REGION 1..566: note = hemagglutinin__InfluenzaA__AEC46553
MKAILVVLLYTFATANADTLCIGYHANNSTDTVDTVLEKNVTVTHSVNLLEDKHNGKLCKLRGVAPLHLGKCNIAGWILGNPECESLSTASSWSYIVETSSSDNGTCYPGDFIDYEELREQLSSVSSFERFEIFPKTSSWPNHDPNKGVTAACPHAGAKSFYKNLIWLVKKGNSYPKLSTSYINDKGKEVLVLWGIHHPSTSADQQSLYQNADAYAFVGTSRYSKKFKPEIAIRPKVRDQEGRMNYYWTLVEPGDKITFEATGNLVVPRYAFAMERNAGSGIIISDTSVHDCNTTCQTPKGAINTSLPFQNVHPITIGKCPKYVKSTKLRLATGLRNVPSIQSRGLFGAIAGFIEGGWTGMVDGWYGYHHQNEQGSGYAADLKSTQNAFDKITNKVNSVIEKMNTQFTAVGKEFNHLEKRIENLNKKVDDGFLDIWTYNAELLVLLENERTLDYHDSNVKNLYEKVRSQLKNNAKEIGNGCFEFYHKCDNTCMESVKNGTYDYPKYSEEAKLNREEIDGVKLESTRIYQILAIYSTVASSLVLVVSLGAISFWMCSNGSLQCRICI

SEQ ID NO: 6709 - protein, 566 aa, synthetic construct
  REGION 1..566: note = hemagglutinin__InfluenzaA__AEC46555
MKAILVVLLYTFATANADTLCIGYHANNSTDTVDTVLEKNVTVTHSVNLLEDKHNGKLCKLRGVAPLHLGKCNIAGWILGNPECESLSTASSWSYIVETSSSDNGTCYPGDFIDYEELREQLSSVSSFERFEIFPKTSSWPNHDPNKGVTAACPHAGAKSFYKNLIWLVKKGNSYPKLSTSYINDKGKKVLVLWGIHHPSTSADQQSLYQNADAYAFVGTSRYSKKFKPEIAIRPKVRDQEGRMNYYWTLVEPGDKITFEATGNLVVPRYAFAMERNEGSGIIISDTSVHDCNTTCQTPKGAINTSLPFQNVHPITIGKCPKYVKSTKLRLATGLRNVPSIQSRGLFGAIAGFIEGGWTGMVDGWYGYHHQNEQGSGYAADLKSTQNAFDKITNKVNSVIEKMNTQFTAVGKEFNHLEKRIENLNKKVDDGFLDIWTYNAELLVLLENERTLDYHDSNVKNLYEKVRSQLKNNAKEIGNGCFEFYHKCDNTCMESVKNGTYDYPKYSEEAKLNREEIDGVKLESTRIYQILAIYSTVASSLVLVVSLGAISFWMCSNGSLQCRICI

SEQ ID NO: 6710 - protein, 566 aa, synthetic construct; identical to SEQ ID NO: 6708
  REGION 1..566: note = hemagglutinin__InfluenzaA__AEC46557

SEQ ID NO: 6711 - protein, 566 aa, synthetic construct; identical to SEQ ID NO: 2656
  REGION 1..566: note = hemagglutinin__InfluenzaA__AEC53259

SEQ ID NO: 6712 - protein, 566 aa, synthetic construct
  REGION 1..566: note = hemagglutinin__InfluenzaA__AEC53269
MKAILVVLLYTFATANADTLCIGYHANNSTDTVDTVLEKNVTVTHSVNLLEDKHNGKLCKLRGVAPLHLGKCNIAGWILGNPECESLSTASSWSYIVETSSSDNGTCYPGDFIDYEELRELLSSVSSFERFEIFPKTSSWPNHDSNKGVTAACPHAGAKSFYKNLIWLVKKGNSYPKLSKSYINDKGKEVLVLWGIHHPSTSADQQSLYQNADAYVFVGSSRYSKKFKPEIAIRPKVRDQEGRMNYYWTLVEPGDKITFEATGNLVVPRYAFAMERNAGSGIIISDTPVHDCNTTCQTPKGAINTSLPFQNIHPITIGKCPKYVKSTKLRLATGLRNIPSIQSRGLFGAIAGFIEGGWTGMVDGWYGYHHQNEQGSGYAADLKSTQNAIDEITNKVNSVIEKMNTQFTAVGKEFNHLEKRIENLNKKVDDGFLDIWTYNAELLVLLENERTLDYHDSNVKNLYEKVRSQLKNNAKEIGNGCFEFYHKCDNTCMESVKNGTYDYPKYSEEAKLNREEIDGVKLESTRIYQILAIYSTVASSLVLVVSLGAISFWMCSNGSLQCRICI

SEQ ID NO: 6713 - protein, 566 aa, synthetic construct; identical to SEQ ID NO: 3399
  REGION 1..566: note = hemagglutinin__InfluenzaA__AEC53279

SEQ ID NO: 6714 - protein, 566 aa, synthetic construct; identical to SEQ ID NO: 2656
  REGION 1..566: note = hemagglutinin__InfluenzaA__AEC53289

SEQ ID NO: 6715 - protein, 566 aa, synthetic construct; identical to SEQ ID NO: 2656
  REGION 1..566: note = hemagglutinin__InfluenzaA__AEC53299

SEQ ID NO: 6716 - protein, 566 aa, synthetic construct; identical to SEQ ID NO: 2849
  REGION 1..566: note = hemagglutinin__InfluenzaA__AEC53327

SEQ ID NO: 6717 - protein, 566 aa, synthetic construct
  REGION 1..566: note = hemagglutinin__InfluenzaA__AEC53347
MKAILVVLLYTFATANADTLCIGYHANNSTDTVDTVLEKNVTVTHSVNLLEDKHNGKLCKLRGVAPLHLGKCNIAGWILGNPECESLSTASSWSYIVETSSSDNGTCYPGDFIDYEELREQLSSVSSFERFEIFPKTSSWPNHDSNKGVTAACPHAGAKSFYKNLIWLVKKGNSYPKLSKSYINDKGKEVLVLWGIHHPSTSADQQSLYQNADAYVFVGSSRYSKKFKPEIAIRPKVRDQEGRMNYYWTLIEPGDKITFEATGNLVVPRYAFAMERNAGSGIIISDTPVHDCNTTCQTPKGAINTSLPFQNIHPITIGKCPKYVKSTKLRLATGLRNVPSIQSRGLFGAIAGFIEGGWTGMVDGWYGYHHQNEQGSGYAADLKSTQNAIDEITNKVNSVIEKMNTQFTAVGKEFNHLEKRIENLNKKVDDGFLDIWTYNAELLVLLENERTLDYHDSNVKNLYEKVRSQLKNNAKEIGNGCFEFYHKCDNTCMESVKNGTYDYPKYSEEAKLNREEIDGVKLESTRIYQILAIYSTVASSLVLVVSLGAISFWMCSNGSLQCRICI

SEQ ID NO: 6718 - protein, 566 aa, synthetic construct
  REGION 1..566: note = hemagglutinin__InfluenzaA__AEC53404
MKAILVVLLYTFATANADTLCIGYHANNSTDTVDTVLEKNVTVTHSVNILEDKHNGKLCKLRGVAPLHLGKCNIAGWILGNPECESLSTASSWSYIVETSSSDNGTCYPGDFIDYEELREQLSSVSSFERFEIFPKTSSWPNHDSNKGITAACPHAGAKSFYKNLIWLVKKGNSYPKLSKSYINDKGKEVLVLWGIHHPSTSADQQSLYQNADAYVFVGSSRYSKKFKPEIAIRPKVRDQEGRMNYYWTLVEPGDKITFEATGNLVVPRYAFAMERNAGSGIIISDTPVHDCNTTCQTPKGAINTSLPFQNIHPITIGKCPKYVKSTKLRLATGLRNVPSIQSRGLFGAIAGFIEGGWTGMVDGWYGYHHQNEQGSGYAADLKSTQNAIDEITNKVNSVIEKMNTQFTAVGKEFNHLEKRIENLNKKVDDGFLDIWTYNAELLVLLENERTLDYHDSNVKNLYEKVRSQLKNNAKEIGNGCFEFYHKCDNTCMESVKNGTYDYPKYSEEAKLNREEIDGVKLESTRIYQILAIYSTVASSLVLVVSLGAISFWMCSNGSLQCRICI

SEQ ID NO: 6719 - protein, 566 aa, synthetic construct; identical to SEQ ID NO: 2656
  REGION 1..566: note = hemagglutinin__InfluenzaA__AEC53414

SEQ ID NO: 6720 - protein, 566 aa, synthetic construct
  REGION 1..566: note = hemagglutinin__InfluenzaA__AEE27177
MKTILVVLLYTFATANADTLCIGYHANNSTDTVDTVLEKNVTVTHSVNILEDKHNGKLCKLRGVAPLHLGKCNIAGWILGNPECESLSTASSWSYIVETSSSDNGTCYPGDFIDYEELREQLSSVSSFERFEIFPKTSSWPNHDSNKGVTAACPHAGAKSFYKNLIWLVKKGNSYPKLSKSYINDKRKEVLVLWGIHHPSTSADQQSLYQNADAYVFVGSSRYSKKFKPEIAIRPKVRDQEGRMNYYWTLVEPGDKITFEATGNLVVPRYAFAMERNAGSGIIISDTPVHDCNTTCQTPKGAINTSLPFQNIHPITIGKCPKYVKSTKLRLATGLRNVPSIQSRGLFGAIAGFIEGGWTGMVDGWYGYHHQNEQGSGYAADLKSTQNAIDEITNKVNSVIEKMNTQFTAVGKEFNHLEKRIENLNKKVDDGFLDIWTYNAELLVLLENERTLDYHDSNVKNLYEKVRSQLKNNAKEIGNGCFEFYHKCDNTCMESVKNGTYDYPKYSEEAKLNREEIDGVKLESTRIYQILAIYSTVASSLVLVVSLGAISFWMCSNGSLQCRICI

SEQ ID NO: 6721 - protein, 566 aa, synthetic construct; identical to SEQ ID NO: 4441
  REGION 1..566: note = hemagglutinin__InfluenzaA__AEE27187

SEQ ID NO: 6722 - protein, 566 aa, synthetic construct
  REGION 1..566: note = hemagglutinin__InfluenzaA__AEE27207
MKAILVVLLYTFATANADTLCIGYHANNSTDTVDTVLEKNVTVTHSVNLLEDKHNGKLCKLRGVAPLHLGKCNIAGWILGNPECESLSTASSWSYIVETSSSDNGTCYPGDFIDYEELREQLSSVSSFERFEIFPKTSSWPNHDSNKGVTAACPHAGAKSFYKNLIWLVKKGNSYPKLSKSYINDKGKEVLVLWGIHHPSTSADQQSLYQNADAYVFVGTSRYSKKFKPEIAIRPKVRDQEGRMNYYWTLVEPGDKITFEATGNLVVPRYAFAMERNAGSGIIISDTPVHDCNTTCQTPKGAINTSLPFQNIHPITIGKCPKYVKSTKLRLATGLRNVPSIQSRGLFGAIAGFIEGGWTGMVDGWYGYHHQNEQGSGYAADLKSTQNAIDEITNKVNSVIEKMNTQFTAVGKEFNHLEKRIENLNKKVDDGFLDIWTYNAELLVLLENERTLDYHDSKVKNLYEKVRSQLKNNAKEIGNGCFEFYHKCDNTCMESVKNGTYDYPKYSEEAKLNREEIDGVKLESTRIYQILAIYSTVASSLVLVVSLGAISFWMCSNGSLQCRICI

SEQ ID NO: 6723 - protein, 566 aa, synthetic construct
  REGION 1..566: note = hemagglutinin__InfluenzaA__AEG64752
MKAILVVLLYTFATANADTLCIGYHANNSTDTVDTVLEKNVTVTHSVNLLEDKHNGKLCKLRGVAPLHLGKCNIAGWILGNPECESLSTASSWSYIVETSSSDNGTCYPGDFIDYEELREQLSSVSSFERFEIFPKTSSWPNHDSNKGVTAACPHAGAKSFYKNLIWLVKKGNSYPKLSKSYINDKGKEVLVLWGIHHPSTSADQQSLYQNADAYVFVGSSRYSKKFKPEIAIRPKVRDQEGRMNYYWTLVEPGDKITFEATGNLVVPRYAFAMERNAGSGIIISDTPVHDCNTTCQTPKGAINTSLPFQNIHPITIGKCPKYVRSTKLRLATGLRNVPSIQSRGLFGAIAGFIEGGWTGMVDGWYGYHHQNEQGSGYAADLKSTQNAIDEITNKVNSVIEKMNTQFTAVGKEFNHLEKRIENLNKKVDDGFLDIWTYNAELLVLLENERTLDYHDSNVKNLYEKVRRQLKNNAKEIGNGCFEFYHKCDNTCMESVKNGTYDYPKYSEEAKLNREEIDGVKLESTRIYQILAIYSTVASSLVLVVSLGAISFWMCSNGSLQCRICI

SEQ ID NO: 6724 - protein, 566 aa, synthetic construct
  REGION 1..566: note = hemagglutinin__InfluenzaA__AEG64762
MKARLLVLLCALAATDADTICIGYHANNSTDTVDTLLEKNVTVTHSVNLLEDSHNGKLCKLKGIAPLQLGKCNIAGWLLGNPECDSLLPARSWSYIVETPNSENGACYPGDFIDYEELREQLSTVSSLERFEIFPKESSWPNHNTLKGVTVSCSHGGKSSFYRNLLWLTKTGDSYPKLNNSYVNNKGKEVLVLWGVHHPSSSNEQQSLYHNVNAYVSVVSSNYNRRFTPEIAARPKVRDQPGRMNYYWTLLEPGDTILFEATGNLIAPWYAFALSRGFGSGIITSNASMHECNTKCQTPQGAINSSLPFQNIHPVTIGECPKYVRSTKLRMVTGLRNIPSIQSRGLFGAIAGFIEGGWTGMIDGWYGYHHQNEQGSGYAADQKSTQNAINGITNKVNSVIEKMNTQFTAVGKEFNNLEKRMENLNKKVDDGFLDIWTYNAELLVLLENERTLDFHDLNVKNLYEKVKSQLKNNAKEIGNGCFEFYHKCDNECMESVRDGTYDYPKYSEESKLNREKIDGVKLESMGVYQILAIYSTVASSLVLLVSLGAISFWMCSNGSLQCRICI

SEQ ID NO: 6725 - protein, 566 aa, synthetic construct; identical to SEQ ID NO: 2669
  REGION 1..566: note = hemagglutinin__InfluenzaA__AEG64784

SEQ ID NO: 6726 - protein, 566 aa, synthetic construct
  REGION 1..566: note = hemagglutinin__InfluenzaA__AEG64834
MKTIIALSYILCLVFAQKLPGNDNSTATLCLGHHAVPNGTIVKTITNDQIEVTNATELVQNSSAGEICDSPHQILDGENCTLIDALLGDPQCDGFQNKKWDLFVERSRAYSNCYPYDVPDYASLRSLVASSGTLEFNNESFNWTGVTQNGTSSACIRRSNNSFFSRLNWLTHLNFKYPALNVTMPNNEQFDKLYIWGVHHPGTDKDQIFLYAQASGRITVSTKRSQQAVIPNIGSRPRVRNIPSRISIYWTIVKPGDILLINSTGNLIAPRGYFKIRSGKSSIMRSDAPIGKCNSECITPNGSIPNDKPFQNVNRITYGACPRYVKQSTLKLATGMRNVPEKQTRGIFGAIAGFIENGWEGMVDGWYGFRHQNSEGRGQAADLKSTQAAIDQINGKLNRLIGKTNEKFHQIEKEFSEVEGRIQDLEKYVEDTKIDLWSYNAELLVALENQHTIDLTDSEMNKLFEKTKKQLRENAEDMGNGCFKIYHKCDNACIGSIRNGTYDHDVYRDEALNNRFQIKGVELKSGYKDWILWISFAISCFLLCVALLGFIMWACQKGNIRCNICI

SEQ ID NO: 6727 - protein, 566 aa, synthetic construct
  REGION 1..566: note = hemagglutinin__InfluenzaA__AEG64845
MKTIIALSYILCLVFAQKLPGNDNSTATLCLGHHAVPNGTIVKTITNDQIEVTNATELVQNSSTGEICDSPHQILDGENCTLIDALLGDPQCDGFQNKKWDLFVERSKAYSNCYPYDVPDYASLRSLVASSGTLEFNNESFNWTGVTQNGTSSACIRRSNNSFFSRLNWLTHLNFKYPALNVTMPNNEQFDKLYIWGVHHPGTDKDQIFLYAQASGRITVSTKRSQQTVIPNIGSRPRVRNIPSRISIYWTIVKPGDILLINSTGNLIAPRGYFKIRSGKSSIMRSDAPIGKCNSECITPNGSIPNDKPFQNVNRITYGACPRYVKQNTLKLATGMRNVPEKQTRGIFGAIAGFIENGWEGMVDGWYGFRHQNSEGRGQAADLKSTQAAIDQINGKLNRLIGKTNEKFHQIEKEFSEVEGRIQDLEKYVEDTKIDLWSYNAELLVALENQHTIDLTDSEMNKLFEKTKKQLRENAEDMGNGCFKIYHKCDNACIGSIRNGTYDHDVYRDEALNNRFQIKGVELKSGYKDWILWISFAISCFLLCVALLGFIMWACQKGNIRCNICI

SEQ ID NO: 6728 - protein, 566 aa, synthetic construct
  REGION 1..566: note = hemagglutinin__InfluenzaA__AEG64856
MKTIIALSYILCLVFAQKLPGNDNSTATLCLGHHAVPNGTLVKTITNDQIEVTNATELVQSSSTGRICDSPHQILDGENCTLIDALLGDPHCDGFQNKEWDLFVERSKAYSNCYPYDVPDYASLRSLVASSGTLEFNNESFNWTGVAQNGTSSACKRRSNKSFFSRLNWLHQLKYKYPALNVTMPNNEKFDKLYIWGVHHPSTDSDQISLYAQASGRVTVSTKRSQQTVIPNIGSRPWVRGVSSRISIYWTIVKPGDILLINSTGNLIAPRGYFKIRSGKSSVMRSDASIGKCNSECITPNGSIPNDKPFQNVNRITYGACPRYVKQNTLKLATGMRNVPEKQTRGIFGAIAGFIENGWEGMVDGWYGFRHQNSEGTGQAADLKSTQAAINQINGKLNRLIEKTNEKFHQIEKEFSEVEGRIQDLEKYVEDTKIDLWSYNAELLVALENQHTIDLTDSEMNKLFERTKKQLRENAEDMGNGCFKIYHKCDNACIESIRNGTYDHDVYRDEALNNRFQIKGVELKSGYKDWILWISFAISCFLLCVVLLGFIMWACQKGNIRCNICI

SEQ ID NO: 6729 - protein, 566 aa, synthetic construct; identical to SEQ ID NO: 72
  REGION 1..566: note = hemagglutinin__InfluenzaA__AEG64867

SEQ ID NO: 6730 - protein, 566 aa, synthetic construct
  REGION 1..566: note = hemagglutinin__InfluenzaA__AEG64878
MKTIIALSYILCLVFAQKLPVNDNSTATLCLGHHAVPNGTLVKTITNDHIEVTNATELVQSSSTGRICDSPHQILDGENCTLIDALLGDPHCDGFQNKEWDLFVERSTAYSNCYPYDVPDYASLRSLVASSGTLEFNNESFNWTGVAQNGTSSACKRRSIKSFFSRLNWLHQLKYKYPALNVTMPNNEKFDKLYIWGVHHPSTDSDQISLYAQASGRVTVSTKRSQQTVIPNIGSRPWVRGVSSRISIYWTIVKPGDILLINSTGNLIAPRGYFKIRSGKSSIMRSNAPIGKCNSECITPNGSIPNDKPFQNVNRITYGACPRYVKQNTLKLATGMRNVPEKQTRGIFGAIAGFIENGWEGMVDGWYGFRHQNSEGIGQAADLKSTQAAINQINGKLNRLIEKTNEKFHQIEKEFSEVEGRIQDLEKYVEDTKIDLWSYNAELLVALENQHTIDLTDSEMNKLFERTRKQLRENAEDMGNGCFKIYHKCDNACIGSIRNGTYDHDVYRDEALNNRFQIKGVELKSGYKDWILWISFAISCFLLCVVLLGFIMWACQKGNIRCNICI

SEQ ID NO: 6731 - protein, 566 aa, synthetic construct
  REGION 1..566: note = hemagglutinin__InfluenzaA__AEG64889
MKTIIALSYILCLVFAQKLPVNDNSTATLCLGHHAVPNGTLVKTITNDHIEVTNATELVQSSSTGRICDSPHQILDGENCTLIDALLGDPHCDGFQNKEWDLFVERSTAYSNCYPYDVPDYASLRSLFASSGTLEFNNESFNWTGVAQNGTSSACKRRSIKSFFSRLNWLHQLKYKYPALNVTMPNNEKFDKLYIWGVHHPSTDSDQISLYAQASGRVTVSTKRSQQTVIPNIGSRPWVRGVSSRISIYWTIVKPGDILLINSTGNLIAPRGYFKIRSGKSSIMRSNAPIGKCNSECITPNGSIPNDKPFQNVNRITYGACPRYVKQNTLKLATGMRNVPEKQTRGIFGAIAGFIENGWEGMVDGWYGFRHQNSEGTGQAADLKSTQAAINQINGKLNRLIEKTNEKFHQIEKEFSEVEGRIQDLEKYVEDTKIDLWSYNAELLVALENQHTIDLTDSEMNKLFEKTRKQLRENAEDMGNGCFKIYHKCDNACIGSIRNGTYDHDVYRDEALNNRFQIKGVELKSGYKDWILWISFAISCFLLCVVLLGFIMWACQKGNIRCNICI

SEQ ID NO: 6732 - protein, 566 aa, synthetic construct; identical to SEQ ID NO: 32
  REGION 1..566: note = hemagglutinin__InfluenzaA__AEG64911

SEQ ID NO: 6733 - protein, 566 aa, synthetic construct; identical to SEQ ID NO: 32
  REGION 1..566: note = hemagglutinin__InfluenzaA__AEG64922

SEQ ID NO: 6734 - protein, 566 aa, synthetic construct; identical to SEQ ID NO: 32
  REGION 1..566: note = hemagglutinin__InfluenzaA__AEG64933

SEQ ID NO: 6735 - protein, 566 aa, synthetic construct; identical to SEQ ID NO: 118
  REGION 1..566: note = hemagglutinin__InfluenzaA__AEG64944

SEQ ID NO: 6736 - protein, 566 aa, synthetic construct; identical to SEQ ID NO: 32
  REGION 1..566: note = hemagglutinin__InfluenzaA__AEG64955

SEQ ID NO: 6737 - protein, 566 aa, synthetic construct; identical to SEQ ID NO: 32
  REGION 1..566: note = hemagglutinin__InfluenzaA__AEG64966

SEQ ID NO: 6738 - protein, 566 aa, synthetic construct
  REGION 1..566: note = hemagglutinin__InfluenzaA__AEG64977
MKTIIALSYILCLVFAQKLPENDNSTATLCLGHHAVPNGTIVKTITNDQIEVTNATELVQSSSTGGICDSPHQILDGENCTLIDALLGDPQCDGFQNKKWDLFVERSKAYSNCYPYDVPDYASLRSLVASSGTLEFNNESFDWTGVTQNGTSSACKRRSNKSFFSRLNWLTHLKYKYPALNVTMPNNEKFDKLYIWGVHHPGTDSDQISLYAQASGRITVSTKRSQQTVIPNIGSRPRVRDVSSRISIYWTIVKPGDILLINSTGNLIAPRGYFKIRSGKSSIMRSDAPIDKCNSECITPNGSIPNDKPFQNVNRITYGACPRYVKQNTLKLATGMRNVPEKQTRGIFGAIAGFIENGWEGMVDGWYGFRHQNSEGTGQAADLKSTQAAINQINGKLNRLIGKTNEKFHQIEKEFSEVEGRIQDLEKYVEDTKIDLWSYNAELLVALENQHTIDLTDSEMNKLFERTKKQLRENAEDMGNGCFKIYHKCDNACIGSIRNGTYDHDVYRDEALNNRFQIKGVELKSGYKDWILWISFAISCFLLCVALLGFIMWACQKGNIRCNICI

SEQ ID NO: 6739 - protein, 566 aa, synthetic construct
  REGION 1..566: note = hemagglutinin__InfluenzaA__AEG64988
MKTIIALSYILCLVFAQKLPGNDNSTATLCLGHHAVPNGTIVKTITNDQIEVTNATELVQSSSTGEICDMPHQILDGENCTLIDALLGDPQCDGFQNKKWDLFVERSKAYSNCYPYDVPDYASLRSLVASSGTLEFNNESFNWTGVTQNGTSSACKRRSNNSFFSRLNWLTHLKFKYPALNVTMPNNEKFDKLYIWGVHHPGTDNDQIFLYAQASGRITVSTKRSQQTVIPNIGSRPRVRNIPSRISIYWTIVKPGDILLINSTGNLIAPRGYFKIRSGKSSIMRSDAPIGKCNSECITPNGSIPNDKPFQNVNRITYGACPRYVKQNTLKLATGMRNVPEKQTRGIFGAIAGFIENGWEGMVDGWYGFRHQNSEGIGQAADLKSTQAAINQINGKLNRLIGKTNEKFHQIEKEFSEVEGRIQDLEKYVEDTKIDLWSYNAELLVALENQHTIDLTDSEMNKLFERTKKQLRENAEDMGNGCFKIYHKCDNACIGSIRNGTYDHDVYRDEALNNRFQIKGVELKSGYKDWILWISFAISCFLLCVVLLGFIMWACQKGNIRCNICI

SEQ ID NO: 6740 - protein, 566 aa, synthetic construct
  REGION 1..566: note = hemagglutinin__InfluenzaA__AEG64999
MKTIIALSYILCLVFAQKLPGNDNSTATLCLGHHAVPNGTIVKTITNDQIEVTNATELVQNSSTGGICDSPHQILDGENCTLIDALLGDPQCDGFQNKKWDLFVERSKAYSNCYPYDVPDYVSLRSLVASSGTLEFNNESFNWTGVTQNGTSSACKRRSNNSFFSRLNWLTHLKFKYPALNVTMPNNEKFDKLYIWGVHHPGTDNDQISLYAQASGRITVSTKRSQQTVIPNIGSRPRVRDIPSRISIYWTIVKPGDILLINSTGNLIAPRGYFKIRSGKSSIMRSDAPIGKCNSECITPNGSIPNDKPFQNVNRITYGACPRYVKQNTLKLATGMRNVPEKQTRGIFGAIAGFIENGWEGMVDGWYGFRHQNSEGIGQAADLKSTQAAINQINGKLNRLIGKTNEKFHQIEKEFSEVEGRIQDLEKYVEDTKIDLWSYNAELLVALENQHTIDLTDSEMNKLFERTKKQLRENAEDMGNGCFKIYHKCDNACIGSIRNGTYDHDVYRDEALNNRFQIKGVELKSGYKDWILWISFAISCFLLCVALLGFIMWACQKGNIRCNICI

SEQ ID NO: 6741 - protein, 566 aa, synthetic construct; identical to SEQ ID NO: 255
  REGION 1..566: note = hemagglutinin__InfluenzaA__AEG65010

SEQ ID NO: 6742 - protein, 566 aa, synthetic construct
  REGION 1..566: note = hemagglutinin__InfluenzaA__AEG65021
MKTIIALSYILCLVFAQKLPGNDNSTATLCLGHHAVPNGTIVKTITNDQIEVTNATELVQSSSTGGICDSPHQILDGENCTLIDALLGDPQCDGFQNKKWDLFVERSKAYSNCYPYDVPDYVSLRSLVASSGTLEFNNESFNWTGVTQNGTSSACKRRSNNSFFSRLNWLTHLKFKYPALNVTMPNTEKFDKLYIWGVHHPGTDNDQISLYAQASGRITVSTKRSQQTVIPNIGSRPRVRDIPSRISIYWTIVKPGDILLINSTGNLIAPRGYFKIRSGKSSIMRSDAPIGKCNSECITPNGSIPNDKPFQNVNRITYGACPRYVKQNTLKLATGMRNVPEKQTRGIFGAIAGFIENGWEGMVDGWYGFRHQNSEGIGQAADLKSTQAAINQINGKLNRLIGKTNEKFHQIEKEFSEVEGRIQDLEKYVEDTKIDLWSYNAELLVALENQHTIDLTDSEMNKLFERTKKQLRENAEDMGNGCFKIYHKCDNACIGSIRNGTYDHDVYRDEALNNRFQIKGVELKSGYKDWILWISFAISCFLLCVALLGFIMWACQKGNIRCNICI

SEQ ID NO: 6743 - protein, 566 aa, synthetic construct
  REGION 1..566: note = hemagglutinin__InfluenzaA__AEG65032
MKTIIALSYILCLVFAQKLPGNDNSTATLCLGHHAVPNGTIVKTITNDQIEVTNATELVQSSSTGGICDSPHQILDGENCTLIDALLGDPQCDGFQNKKWDLFVERSKAYSNCYPYDVPDYASLRSLVASSGTLEFNNESFNWTGVTQNGTSSACKRRSNNSFFSRLNWLTHLKFKYPALNVTMPNNEKFDKLYIWGVHHPGTDNDQIFLYAQASGRITVSTKRSQQTVIPNIGSRPRVRNIPSRISIYWTIVKPGDILLINSTGNLIAPRGYFKIRSGKSSIMRSDAPIGKCNSECITPNGSIPNDKPFQNVNRITYGACPRYVKQNTLKLATGMRNVPEKQTRGIFGAIAGFIENGWEGMVDGWYGFRHQNSEGIGQAADLKSTQAAINQINGKLNKLIGKTNEKFHQIEKEFSEVEGRIQDLEKYVEDTKIDLWSYNAELLVALENQHTIDLTDSEMNKLFERTKKQLRENAEDMGNGCFKIYHKCDNACIGSIRNGTYDHDVYRDEALNNRFQIKGVELKSGYKDWILWISFAISCFLLCVALLGFIMWACQKGNIRCNICI

SEQ ID NO: 6744 - protein, 566 aa, synthetic construct; identical to SEQ ID NO: 630
  REGION 1..566: note = hemagglutinin__InfluenzaA__AEG65043

SEQ ID NO: 6745 - protein, 566 aa, synthetic construct; identical to SEQ ID NO: 630
  REGION 1..566: note = hemagglutinin__InfluenzaA__AEG65054

SEQ ID NO: 6746 - protein, 566 aa, synthetic construct
  REGION 1..566: note = hemagglutinin__InfluenzaA__AEG65065
MKTIIALSYILCLVFAQKLPGNDNSTATLCLGHHAVPNGTIVKTITNDQIEVTNATELVQSSSTGEICDSPHQILDGENCTLIDALLGDPQCDGFQNKKWDLFVERSKAYSNCYPYDVPDYASLRSLVASSGTLEFNNESFNWTGVTQNGTSSACKRRSNNSFFSRLNWLTHLKFKYPALNVTMPNNEKFDKLYIWGVHHPGTDNDQIFLYAQASGRITVSTKRSQQTVIPNIGSRPRVRNIPSRISIYWTIVKPGDILLINSTGNLIAPRGYFKIRSGKSSIMRSDAPIGKCNSECITPNGSIPNDKPFQNVNRITYGACPRYVKQNTLKLATGMRNVPEKQTRGIFGAIAGFIENGWEGMVDGWYGFRHQNSEGIGQAADLKSTQAAINQINGKLNRLIGKTNEKFHQIEKEFSEVEGRIQDLEKYVEDTKIDLWSYNAELLVALENQHTIDLTDSEMNKLFERTKKQLRENAEDMGNGCFKIYHKCDNACIGSIRNGTYDHDVYRDEALNNRFQIKGVELKSGYKDWVLWISFAISCFLLCVVLLGFIMWACQKGNIRCNICI

SEQ ID NO: 6747 - protein, 566 aa, synthetic construct
  REGION 1..566: note = hemagglutinin__InfluenzaA__AEG65076
MKTIIALSYILCLVFAQKLPGNDNSTATLCLGHHAVPNGTIVKTITNDQIEVTNATELVQSSSTGGICDSPHQILDGENCTLIDALLGDPQCDGFQNKKWDLFVERSKAYSNCYPYDVPDYASLRSLVASSGTLEFNNESFNWTGVTQNGTSSACKRRSNNSFFSRLNWLTHLRFKYPALNVTMPNNEKFDKLYIWGVHHPGTDNDQIFLYAQASGRITVSTKRSQQTVIPNVGSRPRVRNIPSRISIYWTIVKPGDILLINSTGNLIAPRGYFKIRSGKSSIMRSDAPIGKCNSECITPNGSIPNDKPFQNVNRITYGACPRYVKQNTLKLATGMRNVPEKQTRGIFGAIAGFIENGWEGMVDGWYGFRHQNSEGTGQAADLKSTQAAINQINGKLNRLIGKTNEKFHQIEKEFSEVEGRIQDLEKYVEDTKIDLWSYNAELLVALENQHTIDLTDSEMNKLFERTKKQLRENAEDMGNGCFKIYHKCDNACIGSIRNGTYDHDVYRDEALNNRFQIKGVELKSGYKDWILWISFAISCFLLCVALLGFIMWACQKGNIRCNICI

SEQ ID NO: 6748 - protein, 566 aa, synthetic construct
  REGION 1..566: note = hemagglutinin__InfluenzaA__AEG65087
MKTIIALSYILCLVFAQKLPGNDNSTATLCLGHHAVPNGTIVKTITNDQIEVTNATELVQSSSTGGICDSPHQILDGENCTLIDALLGDPQCDGFQNKKWDLFVERSKAYSNCYPYDVPDYASLRSLVASSGTLEFNNESFNWTGVTQNGTSSACKRRSNNSFFSRLNWLTHLKFKYPALNVTMPNNEKFDKLYIWGVHHPGTNNDQIFLYAQASGRITVSTKRSQQTVIPNIGSRPRVRNIPSRISIYWTIVKPGDILLINSTGNLIAPRGYFKIRSGKSSIMRSDAPIGKCNSECITPNGSIPNDKPFQNVNRITYGACPRYVKQNTLKLATGMRNVPEKQTRGIFGAIAGFIENGWEGMVDGWYGFRHQNSEGIGQAADLKSTQAAINQINGKLNRLIGKTNEKFHQIEKEFSEVEGRIQDLEKYVEDTKIDLWSYNAELLVALENQHTIDLTDSEMNKLFERTKKQLRENAEDMGNGCFKIYHKCDNACIGSIRNGTYDHDVYRDEALNNRFQIKGVELKSGYKDWILWISFAISCFLLCVALLGFIMWACQKGNIRCNICI

SEQ ID NO: 6749 - protein, 566 aa, synthetic construct
  REGION 1..566: note = hemagglutinin__InfluenzaA__AEG65098
MKTIIALSYILCLVFAQKLPGNDNSTATLCLGHHAVPNGTIVKTITNDQIEVTNATELVQSSSTGEICDSPHQILDGENCTLIDALLGDPQCDDFQNKKWDLFVERSKAYSNCYPYDVPDYASLRSLVASSGTLEFNNESFNWTGVTQNGTSSACKRRSNNSFFSRLNWLTHSKFKYPALNVTMPNNEKFDKLYIWGVHHPGTDNDQIFLYAQASGRITVSTKRSQQTVIPNIGSRPRVRNIPSRISIYWTIVKPGDILLINSTGNLIAPRGYFKIRSGKSSIMRSDAPIGKCNSECITPNGSIPNDKPFQNVNRITYGACPRYVKQNTLKLATGMRNVPEKQTRGIFGAIAGFIENGWEGMVDGWYGFRHQNSEGIGQAADLKSTQAAINQINGNLNRLIGKTNEKFHQIEKEFSEVEGRIQDLEKYVEDTKIDLWSYNAELLVALENQHTIDLTDSEMNKLFERTKKQLRENAEDMGNGCFKIYHKCDNACIGSIRNGTYDHDVYRDEALNNRFQIKGVELKSGYKDWILWISFAISCFLLCVVLLGFIMWACQKGNIRCNICI

SEQ ID NO: 6750 - protein, 566 aa, synthetic construct
  REGION 1..566: note = hemagglutinin__InfluenzaA__AEG65109
MKTIIALSYILCLVFAQKLPGNDNSTATLCLGHHAVPNGTIVKTITNDQIEVTNATELVQSSSTGEICDSPHQILDGENCKLIDALLGDPQCDGFQNKKWDLFVERSKAYSNCYPYDVPDYASLRSLVASSGTLEFNNESFNWTGVTQNGTSSACKRRSNNSFFSRLNWLTHLKFKYPALNVTMPNNEKFDKLYIWGVHHPGTDNDQIFLYAQSSGRITVSTKRSQQTVIPNIGSRPRVRNIPSRISIYWTIVKPGDILLINSTGNLIAPRGYFKIRSGKSSIMRSDAPIGKCNSECITPNGSIPNDKPFQNVNRITYGACPRYVKQNTLKLATGMRNVPEKQTRGIFGAIAGFIENGWEGMVDGWYGFRHQNSEGIGQAADLKSTQAAINQINGKLNRLIGKTNEKFHQIEKEFSEVEGRIQDLEKYVEDTKIDLWSYNAELLVALENQHTIDLTDSEMNKLFERTKKQLRENAEDMGNGCFKIYHKCDNACIGSIRNGTYDHDVYRDEALNNRFQIKGVELKSGYKDWILWISFAISCFLLCVALLGFIMWACQKGNIRCNICI

SEQ ID NO: 6751 - protein, 566 aa, synthetic construct
  REGION 1..566: note = hemagglutinin__InfluenzaA__AEG65120
MKTIIALSYILCLVFAQKLPGNDNSTATLCLGHHAVPNGTIVKTITNDQIEVTNATELVQSSSTGEICDSPHQILDGENCTLIDALLGDPQCDGFQNKKWDLFVERSKAYSNCYPYDVPDYASLRSLVASSGTLEFNNESFNWTGVTQNGTSSACKRRSNNSFFSRLNWLTHLKFKYPALNVTMPNNEKFDKLYIWGVHHPGTDNDQIFLYAQASGRITVSTKRSQQTVIPNIGSRPRVRNIPSRISIYWTIVKPGDILLINSTGNLIAPRGYFKIRSGKSSIMRSDAPIGKCNSECITPNGSIPNDKPFQNVNRIAYGACPRYVKQNTLKLATGMRNVPEKQTRGIFGAIAGFIENGWEGMVDGWYGFRHQNSEGIGQAADLKSTQAAINQINGKLNRLIGKTNEKFHQIEKEFSEVEGRIQDLEKYVEDTKIDLWSYNAELLVALENQHTIDLTDSEMNKLFERTKKQLRENAEDMGNGCFKIYHKCDNACIGSIRNGTYDHDVYRDEALNNRFQIKGVELKSGYKDWILWISFAISCFLLCVVLLGFIMWACQKGNIRCNICI

SEQ ID NO: 6752 - protein, 566 aa, synthetic construct
  REGION 1..566: note = hemagglutinin__InfluenzaA__AEG65131
MKTIIALSYILCLVFAQKLPGNDNSTATLCLGHHAVPNGTIVKTITNDQIEVTNATELVQSSSTGEICDSPHQILDGENCTLIDALLGDPQCDGFQNKKWDLFVERSKAYSNCYPYDVPDYASLRSLVASSGTLEFNNESFNWTGVTQNGTSSACKRRSNNSFFSRLNWLTHSKFKYPALNVTMPNNEKFDKLYIWGVHHPGTDNDQIFLYAQASGRITVSTKRSQQTVIPNIGSRPRVRNIPSRISIYWTIVKPGDILLINSTGNLIAPRGYFKIRSGKSSIMRSDAPIGKCNSECITPNGSIPNDKPFQNVNRITYGACPRYVKQNTLKLATGMRNVPEKQTRGIFGAIAGFIENGWEGMVDGWYGFRHQNSEGIGQAADLKSTQAAINQINGKLNRLIGKTNEKFHQIEKEFSEVEGRIQDLEKYVEDTKIDLWSYNAELLVALENQHTIDLTDSEMNKLFERTKKQLRENAEDMGNGCFKIYHKCDNACIGSIRNGTYDHDVYRDEALNNRFQIKGVELKSGYKDWILWISFAISCFLLCVVLLGFIMWACQKGNIRCNICI

SEQ ID NO: 6753 - protein, 566 aa, synthetic construct; identical to SEQ ID NO: 51
  REGION 1..566: note = hemagglutinin__InfluenzaA__AEG65142

SEQ ID NO: 6754 - protein, 566 aa, synthetic construct; identical to SEQ ID NO: 51
  REGION 1..566: note = hemagglutinin__InfluenzaA__AEG65153

SEQ ID NO: 6755 - protein, 566 aa, synthetic construct
  REGION 1..566: note = hemagglutinin__InfluenzaA__AEG65164
MKTIIALSYILCLVFAQKLPGNDNSTATLCLGHHAVPNGTLVKTITNDQIEVTNATELVQSSSTGRICDSPHQILDGENCTLIDALLGDPHCDGFQNKEWDLFVERSKAYSNCYPYDVPDYVSLRSLVASSGTLEFNNESFNWTGVAQNGTSSACKRRSDKSFFSRLNWLHQLKYKYPALNVTMPNNEKFDKLYIWGVHHPGTDSDQISLYAQASGRVTVSTKRSQQTVIPNIGSRPWVRGVSSRISIYWTIVKPGDILLINSTGNLIAPRGYFKIRSGKSSIMRSDAPIGKCNSECITPNGSIPNDKPFQNVNRITYGPCPRYVKQNTLKLATGMRNVPEKQTRGIFGAIAGFIENGWEGMMDGWYGFRHQNSEGTGQAADLKSTQAAINQINGKLNRLIEKTNEKFHQIEKEFSEVEGRIQDLEKYVEDTKIDLWSYNAEFLVALENQHTIDLTDSEMNKLFERTKKQLRENAEDMGNGCFKIYHKCDNACIGSIRNGTYDHDVYRDEALNNRFQIKGVELKSGYKDWILWISFAISCFLLCIVLLGFIMWACQKGNIRCNICI

SEQ ID NO: 6756 - protein, 566 aa, synthetic construct
  REGION 1..566: note = hemagglutinin__InfluenzaA__AEG65175
MKTIIALSYILCLVFAQKLPGNDNSTATLCLGHHAVPNGTIVKTITNDQIEVTNATELVQSSSTGGICDSPHQILDGENCTLIDALLGDPQCDGFQNKKWDLFVERSKAYSNCYPYDVPDYASLRSLVASSGTLEFNNESFNWTGVTQNGTSSACERRSNKSFFSRLNWLTHLKYKYPALNVTMPNNEKFDKLYIWGVHHPGTDSDQISLYAQASGRITVSTKRSQQTVIPNIGSRPRVRDVSSRISIYWTIVKPGDILLINSTGNLIAPRGYFKIRNGKSSIMRSDAPIGKCNSECITPNGSIPNDKPFQNVNRITYGACPRYVKQNTLKLATGMRNVPEKQTRGIFGAIAGFIENGWEGMVDGWYGFRHQNSEGTGQAADLKSTQAAINQINGKLNRLIGKTNEKFHQIEKEFSEVEGRIQDLEKYVEDTKIDLWSYNAELLVALENQHTIDLTDSEMNKLFERTKKQLRENAEDMGNGCFKIYHKCDNACIGSIRNGTYDHDVYRDEALNNRFQIKGVELKSGYKDWILWISFAISCFLLCVALLGFIMWACQKGNIRCDICI

SEQ ID NO: 6757 - protein, 566 aa, synthetic construct; identical to SEQ ID NO: 419
  REGION 1..566: note = hemagglutinin__InfluenzaA__AEG65186

SEQ ID NO: 6758 - protein, 566 aa, synthetic construct
  REGION 1..566: note = hemagglutinin__InfluenzaA__AEG65197
MKTIIALSYILCLVFAQKLPGNDNSTATLCLGHHAVPNGTIVKTITNDQIEVTNATELVQSSPTGGICDSPHQILDGENCTLIDALLGDPQCDGFQNKKWDLFVERSKAYSNCYPYDVPDYASLRSLVASSGTLEFNNESFNWTGVTQNGTSSACKRRSNNSFFSRLNWLTHLKFKYPALNVTMPNNEKFDKLYIWGVHHPGTDNDQISLYAQASGRITVSTKRSQQTVIPNIGSRPRVRDIPSRISIYWTIVKPGDIILINSTGNLIAPRGYFKIRSGKSSIMRSDTPIGKCNSECITPNGSIPNDKPFQNVNRITYGACPRYVKQNTLKLATGMRNVPEKQTRGIFGAIAGFIENGWEGMVDGWYGFRHQNSEGIGQAADLKSTQAAINQINGKLNRLIGKTNEKFHQIEKEFSEVEGRIQDLEKYVEDTKIDLWSYNAELLVALENQHTIDLTDSEMNKLFERTKKQLRENAEDMGNGCFKIYHKCDNACIGSIRNGTYDHDVYRDEALNNRFQIKGVELKSGYKDWILWISFAISCFLLCVALLGFIMWACQKGNIRCNICI

SEQ ID NO: 6759 - protein, 566 aa, synthetic construct; identical to SEQ ID NO: 630
  REGION 1..566: note = hemagglutinin__InfluenzaA__AEG65208

SEQ ID NO: 6760 - protein, 566 aa, synthetic construct
  REGION 1..566: note = hemagglutinin__InfluenzaA__AEG65219
MKTIIALSYILCLVFAQKLPGNDNSTATLCLGHHAVPNGTIVKTITNDQIEVTNATELVQSSSTGGICDSPHQILDGENCTLIDALLGDPQCDGFQNKKWDLFVERSKAYSNCYPYDVPDYASLRSLVASSGTLEFNNESFNWTGVTQNGTSSACKRRSNKSFFSRLNWLTHLKFKYPALNVTMPNNEKFDKLYIWGVHHPGTDNDQISLYAQASGRITVSTKRSQQTVIPNIGSRPRVRDVPSRISIYWTIVKPGDILLINSTGNLIAPRGYFKIRSGKSSIMRSDAPIGKCNSECITPNGSIPNDKPFQNVNRITYGACPRYVKQNTLKLATGMRNVPEKQTRGIFGAIAGFIENGWEGMVDGWYGFRHQNSEGTGQAADLKSTQAAINQINGKLNRLIGKTNEKFHQIEKEFSEVEGRIQDLEKYVEDTKIDLWSYNAELLVALENQHTIDLTDSEMNKLFERTKKQLRENAEDMGNGCFKIYHKCDNACIGSIRNGTYDHDVYRDEALNNRFQIKGVELKSGYKDWILWISFAISCFLLCVALLGFIMWACQKGNIKCNICI

SEQ ID NO: 6761 - protein, 566 aa, synthetic construct; identical to SEQ ID NO: 1795
  REGION 1..566: note = hemagglutinin__InfluenzaA__AEG65230

SEQ ID NO: 6762 - protein, 566 aa, synthetic construct; identical to SEQ ID NO: 1795
  REGION 1..566: note = hemagglutinin__InfluenzaA__AEG65252

SEQ ID NO: 6763 - protein, 566 aa, synthetic construct; identical to SEQ ID NO: 516
  REGION 1..566: note = hemagglutinin__InfluenzaA__AEG65263

SEQ ID NO: 6764 - protein, 566 aa, synthetic construct; identical to SEQ ID NO: 516
  REGION 1..566: note = hemagglutinin__InfluenzaA__AEG65274

SEQ ID NO: 6765 - protein, 566 aa, synthetic construct; identical to SEQ ID NO: 516
  REGION 1..566: note = hemagglutinin__InfluenzaA__AEG65285

SEQ ID NO: 6766 - protein, 566 aa, synthetic construct
  REGION 1..566: note = hemagglutinin__InfluenzaA__AEG65296
MKTVIALSYILCLVFAQKLPGNDNSTATLCLGHHAVPNGTIVKTITNDQIEVTNATELVQSSSTGGICDSPHQILDGENCTLIDALLGDPQCDGFQNKKWDLFVERSKAYSNCYPYDVPDHASLRSLVASSGTLEFNNESFDWTGVTQNGTSSACKRRSNKSFFSRLNWLTHLKYKYPALNVTMPNNEKFDKLYIWGVHHPGTDSDQISLYAQASGRITVSTKRSQQTVIPNIGSRPRVRDVSSRISIYWTIVKPGDILLINSTGNLIAPRGYFKIRSGKSSIMRSDAPIGKCNSECITPNGSIPNDKPFQNVNRITYGACPRYVKQNTLKLATGMRNVPEKQTRGIFGAIAGFIENGWEGMVDGWYGFRHQNSEGTGQAADLKSTQAAINQINGKLNRLIGKTNEKFHQIEKEFSEVEGRIQDLEKYVEDTKIDLWSYNAELLVALENQHTIDLTDSEMNKLFERTKKQLRENAEDMGNGCFKIYHKCDNACIGSIRNGTYDHDVYRDEALNNRFQIKGVELKSGYKDWILWISFAISCFLLCVALLGFIMWACQKGNIRCNICI

SEQ ID NO: 6767 - protein, 566 aa, synthetic construct; identical to SEQ ID NO: 1795
  REGION 1..566: note = hemagglutinin__InfluenzaA__AEG65307

SEQ ID NO: 6768 - protein, 566 aa, synthetic construct
  REGION 1..566: note = hemagglutinin__InfluenzaA__AEG65318
MKTIIALSYILCLVFAQKLPGNDNSTATLCLGHHAVPNGTIVKTITNDQIEVTNATELVQSSSTGGICDSPHQILDGENCTLIDALLGDPQCDGFQNKKWDLFVERSKAYSNCYPYDVPDYASLRSLVASSGTLEFNNESFNWTGVTQNGTSSACKRRSNKSFFSRLNWLTHLKFKYPALNVTMPNNEKFDKLYIWGVHHPGTDNDQISLYAQASGRITVSTKRSQQTVIPNIGSRPRVRDVPSRISIYWTIVKPGDILLINSTGNLIAPRGYFKIRSGKSSIMRSDAPIGKCNSECITPNGSIPNDKPFQNVNRITYGACPRYVRQNTLKLATGMRNVPEKQTRGIFGAIAGFIENGWEGMVDGWYGFRHQNSEGTGQAADLKSTQAAINQINGKLNRLIGKTNEKFHQIEKEFSEVEGRIQDLEKYVEDTKIDLWSYNAELLVALENQHTIDLTDSEMNKLFERTKKQLRENAEDMGNGCFKIYHKCDNACIGSIRNGTYDHDVYRDEALNNRFQIKGVELKSGYKDWILWISFAISCFLLCVALLGFIMWACQKGNIRCNICI

SEQ ID NO: 6769 - protein, 566 aa, synthetic construct; identical to SEQ ID NO: 1795
  REGION 1..566: note = hemagglutinin__InfluenzaA__AEG65329

SEQ ID NO: 6770 - protein, 566 aa, synthetic construct
  REGION 1..566: note = hemagglutinin__InfluenzaA__AEG65340
MKTIIALSYILCLVFAQKLPGNDNSTATLCLGHHAVPNGTIVKTITNDQIEVTNATELVQSSSTGGICDSPHQILDGENCTLIDALLGDPQCDGFQNKKWDLFVERSKAYSNCYPYDVPDYASLRSLVASSGTLEFNNESFNWTGVTQNGTSSACERRSNKSFFSRLNWLTHLKYKYPALNVTMPNNEKFDKLYIWGVHHPGTDSDQISLYAQASGRITVSTKRSQQTVIPNIGSRPRVRDVSSRISIYWTIVKPGDILLINSTGNLIAPRGYFKIRSGKSSIMRSDAPIGKCNSECITPNGSIPNDKPFQNVNRITYGACPRYVKQNTLKLATGMRNVPEKQTRGIFGAIAGFIENGWEGMVDGWYGFRHQNSEGTGQAADLKSTQAAINQINGKLNRLIGKTNEKFHQIEKEFSEVEGRIQDLEKYVEDTKIDLWSYNAELLVALENQHTIDLTDSEMNKLFERTKKQLRENAEDMGNGCFKIYHKCDNACIESIRNGTYDHDVYRDEALNNRFQIKGVELKSGYKDWILWISFAISCFLLCVALLGFIMWACQKGNIRCNICI

SEQ ID NO: 6771 - protein, 566 aa, synthetic construct; identical to SEQ ID NO: 1795
  REGION 1..566: note = hemagglutinin__InfluenzaA__AEG65351

SEQ ID NO: 6772 - protein, 566 aa, synthetic construct; identical to SEQ ID NO: 1795
  REGION 1..566: note = hemagglutinin__InfluenzaA__AEG65362

SEQ ID NO: 6773 - protein, 566 aa, synthetic construct; identical to SEQ ID NO: 6770
  REGION 1..566: note = hemagglutinin__InfluenzaA__AEG65373

SEQ ID NO: 6774 - protein, 566 aa, synthetic construct; identical to SEQ ID NO: 516
  REGION 1..566: note = hemagglutinin__InfluenzaA__AEG65384

SEQ ID NO: 6775 - protein, 566 aa, synthetic construct; identical to SEQ ID NO: 516
  REGION 1..566: note = hemagglutinin__InfluenzaA__AEG65406

SEQ ID NO: 6776 - protein, 566 aa, synthetic construct; identical to SEQ ID NO: 516
  REGION 1..566: note = hemagglutinin__InfluenzaA__AEG65417

SEQ ID NO: 6777 - protein, 566 aa, synthetic construct; identical to SEQ ID NO: 516
  REGION 1..566: note = hemagglutinin__InfluenzaA__AEG65428

SEQ ID NO: 6778 - protein, 566 aa, synthetic construct
  REGION 1..566: note = hemagglutinin__InfluenzaA__AEG65439
MKTIIALSYILCLVFAQKLPGNDNSTATLCLGHHAVPNGTIVKTITNDQIEVTNATELVQSSSTGGICDSPHQILDGENCTLIDALLGDPQCDGFQNKKWDLFVERSKAYSNCYPYDVPDYASLRSLVASSGTLEFNNESFNWTGVTQNGTSSACKRRSNNSFFSRLNWLTHLKFKYPALNVTMPNNEKFDKLYIWGVHHPGTDNDQIFLYAQASGRITVSTKRSQQTVIPNIGSRPRVRNIPSRISIYWTIVKPGDILLINSTGNLIAPRGYFKIRSGKSSIMRSDAPIGKCNSECITPNGSIPNDKPFQNVNRITYGACPRYVKQNTLKLATGMRNVPEKQTRGIFGAIAGFIENGWEGMVDGWYGFRHQNSEGVGQAADLKSTQAAINQINGKLNRLIGKTNEKFHQIEKEFSEVEGRIQDLEKYVEDTKIDLWSYNAELLVALENQHTIDLTDSEMNKLFERTKKQLRENAEDMGNGCFKIYHKCDNACIGSIRNGTYDHDVYRDEALNNRFQIKGVELKSGYKDWILWISFAISCFLLCVALLGFIMWACQKGNIRCNICI

SEQ ID NO: 6779 - protein, 566 aa, synthetic construct
  REGION 1..566: note = hemagglutinin__InfluenzaA__AEG65450
MKTIIAWSYILCLVFAQKLPGNDNSTATLCLGHHAVPNGTIVKTITNDQIEVTNATELVQSSSTGGICDSPHQILDGENCTLIDALLGDPQCDGFQNKKWDLFVERSKAYSNCYPYDVPDYASLRSLIASSGTLEFNNESFNWTGVTQNGTSSACKRRSNSSFFSRLNWLTHLKFKYPALNVTMPNNEEFDKLYIWGVHHPGTYNDQISLYAQASGRITVSTKRSQQTVIPNIGSRPRVRDIPSRISIYWTIVKPGDILLINSTGNLIAPRGYFKIRSGKSSIMRSDAPIGKCNSECITPNGSIPNDKPFQNVNRITYGACPRYVKQNTLKLATGMRNVPEKQTRGIFGAIAGFIENGWEGMVDGWYGFRHQNSEGIGQAADLKSTQAAIDQINGKLNRLIGKTNEKFHQIEKEFSEVEGRIQDLEKYVEDTKIDLWSYNAELLVALENQHTIDLTDSEMNKLFERTKKQLRENAEDMGNGCFKIYHKCDNACIGSIRNGTYDHDVYRDEALNNRFQIKGVELKSGYKDWILWISFAISCFLLCVALLGFIMWACQKGNIRCNICI

SEQ ID NO: 6780 - protein, 566 aa, synthetic construct; identical to SEQ ID NO: 6779
  REGION 1..566: note = hemagglutinin__InfluenzaA__AEG65461

SEQ ID NO: 6781 - protein, 566 aa, synthetic construct
  REGION 1..566: note = hemagglutinin__InfluenzaA__AEG65472
MKTIIAWSYILCLVFAQKLPGNDNSTATLCLGHHAVPNGTIVKTITNDQIEVTNATELVQSSSTGGICDSPHQILDGENCTLIDALLGDPQCDGFQNKKWDLFVERSKAYSNCYPYDVPDYASLRSLIASSGTLEFNNESFNWTGVTQNGTSSACKRRSNSSFFSRLNWLTHLKFKYPALNVTMPNNEEFDKLYIWGVHHPGTYNDQISLYAQASGRITVSTKRSQQTVIPNIGSRPRVRDIPSRISIYWTIVKPGDILLINSTGNLIAPRGYFKIRSGKSSIMRSDAPIGKCNSECITPNGSIPNDKPFQNVNRITYGACPRYVKQNTLKLATGMRNVPEKQTRGIFGAIAGFIENGWEGMVDGWYGFRHQNSEGIGQAADLKSTQAAIDQINGKLNRLIGKTNEKFHQIEKEFSEVEGRIQDLEKYVEDTKIDLWSYNAELLVALENQHTIDLTDSEMNKLFEITKKQLRENAEDMGNGCFKIYHKCDNACIGSIRNGTYDHDVYRDEALNNRFQIKGVELKSGYKDWILWISFAISCFLLCVALLGFIMWACQKGNIRCNICI

SEQ ID NO: 6782 - protein, 566 aa, synthetic construct; identical to SEQ ID NO: 6779
  REGION 1..566: note = hemagglutinin__InfluenzaA__AEG65483

SEQ ID NO: 6783 - protein, 566 aa, synthetic construct; identical to SEQ ID NO: 6779
  REGION 1..566: note = hemagglutinin__InfluenzaA__AEG65494

SEQ ID NO: 6784 - protein, 566 aa, synthetic construct; identical to SEQ ID NO: 6779
  REGION 1..566: note = hemagglutinin__InfluenzaA__AEG65505

SEQ ID NO: 6785 - protein, 566 aa, synthetic construct; identical to SEQ ID NO: 6779
  REGION 1..566: note = hemagglutinin__InfluenzaA__AEG65516

SEQ ID NO: 6786 - protein, 566 aa, synthetic construct; identical to SEQ ID NO: 6779
  REGION 1..566: note = hemagglutinin__InfluenzaA__AEG65527

SEQ ID NO: 6787 - protein, 566 aa, synthetic construct; identical to SEQ ID NO: 6779
  REGION 1..566: note = hemagglutinin__InfluenzaA__AEG65538

SEQ ID NO: 6788 - protein, 566 aa, synthetic construct
  REGION 1..566: note = hemagglutinin__InfluenzaA__AEG65560
MKTIIALSYILCLVFAQKLPGNDNSTATLCLGHHAVPNGTIVKTITNDQIEVTNATELVQSSSTGGICDSPHQILDGENCTLIDALLGDPQCDGFQNKKWDLFVERSKAYSNCYPYDVPDYASLRSLIASSGTLEFNNESFNWTGVTQNGTSSACKRRSNSSFFSRLNWLTHLKFKYPALNVTMPNNEEFDKLYIWGVHHPGTYNDQISLYAQASGRITVSTKRSQQTVIPNIGSRPRVRDIPSRISIYWTIVKPGDILLINSTGNLIAPRGYFKIRSGKSSIMKSDAPIGKCNSECITPNGSIPNDKPFQNVNRITYGACPRYVKQNTLKLATGMRNVPEKQTRGIFGAIAGFIENGWEGMVDGWYGFRHQNSEGIGQAADLKSTQAAIDQINGKLNRLIGKTNEKFHQIEKEFSEVEGRIQDLEKYVEDTKIDLWSYNAELLVALENQHTIDLTDSEMNKLFERTKKQLRENAEDMGNGCFKIYHKCDNACIGSIRNGTYDHDVYRDEALNNRFQIKGVELKSGYKDWILWISFAISCFLLCVALLGFIMWACQKGNIRCNICI

SEQ ID NO: 6789 - protein, 566 aa, synthetic construct; identical to SEQ ID NO: 6788
  REGION 1..566: note = hemagglutinin__InfluenzaA__AEG65571

SEQ ID NO: 6790 - protein, 566 aa, synthetic construct; identical to SEQ ID NO: 6788
  REGION 1..566: note = hemagglutinin__InfluenzaA__AEG65582

SEQ ID NO: 6791 - protein, 566 aa, synthetic construct; identical to SEQ ID NO: 6788
  REGION 1..566: note = hemagglutinin__InfluenzaA__AEG65593

SEQ ID NO: 6792 - protein, 566 aa, synthetic construct
  REGION 1..566: note = hemagglutinin__InfluenzaA__AEG65604
MKTIIALSYILCLVFAQKLPGNDNSTATLCLGHHAVPNGTIVKTITNDQIEVTNATELVQSSSTGGICDSPHQILDGENCTLIDALLGDPQCDGFQNKKWDLFVERSKAYSNCYPYDVPDYASLRSLIASSGTLEFNNESFNWTGVTQNGTSSACKRRSNNSFFSRLNWLTHLKFKYPALNVTMPNNEEFDKLYIWGVHHPGTDNDQISLYAQASGKITVSTKRSQQTVIPNIGSRPRVRDIPSRISIYWTIVKPGDILLINSTGNLIAPRGYFKIRSGKSSIMRSDAPIGKCNSECITPNGSIPNDKPFQNVNRITYGACPRYVKQNTLKLATGMRNVPEKQTRGIFGAIAGFIENGWEGMVDGWYGFRHQNSEGIGQAADLKSTQAAIDQINGKLNRLIGKTNEKFHQIEKEFSEVEGRIQDLEKYVEDTKIDLWSYNAELLVALENQHTIDLTDSEMNKLFERTKKQLRENAEDMGNGCFKIYHKCDNACIGSIRNGTYDHDVYRDEALNNRFQIKGVELKSGYKDWILWISFAISCFLLCVALLGFIMWACQKGNIRCNICI

SEQ ID NO: 6793 - protein, 566 aa, synthetic construct
  REGION 1..566: note = hemagglutinin__InfluenzaA__AEG65626
MKTIIALSYILCLVFAQKLPGNDNSTATLCLGHHAVPNGTIVKTITNDQIEVTNATELVQSSSTGGICDSPHQILDGENCTLIDALLGDPQCDGFQNKKWDLFVERSKAYSNCYPYDVPDYASLRSLVASSGTLEFNNESFNWTGVTQNGTSSACKRKSNNSFFSRLNWLTHLKFKYPALNVTMPNNKKFDKLYIWGVHHPGTDNDQISLYAQASGRITVSTKRSQQTVIPNIGSRPRVRDIPSRISIYWTIVKPGDMLLINSTGNLIAPRGYFKIRSGKSSIMRSDAPIGKCNSECITPNGSIPNDKPFQNVNRITYGACPRYVKQNTLKLATGMRNVPEKQTRGIFGAIAGFIENGWEGMVDGWYGFRHQNSEGTGQAADLKSTQAAINQINGKLNRLIGKTNEKFHQIEKEFSEVEGRIQDLEKYVEDTKIDLWSYNAELLVALENQHTIDLTDSEMNKLFERTKKQLRENAEDMGNGCFKIYHKCDNACIGSIRNGTYDHDVYRDEALNNRFQIKGVELKSGYKDWILWISFAISCFLLCVALLGFIMWACQKGNIRCNICI

SEQ ID NO: 6794 - protein, 566 aa, synthetic construct
  REGION 1..566: note = hemagglutinin__InfluenzaA__AEG65637
MKTIIALSYILCLVFAQKLPGNDNSTATLCLGHHAVPNGTIVKTITNDQIEVTNATELVQSSSTGGICDSPHQILDGENCTLIDALLGDPQCDGFQNKKWDLFVERSKAYSNCYPYDVPDYASLRSLVASSGTLEFNNESFNWTGVTQNGTSSACKRKSNNSFFSRLNWLTHLKFKYPALNVTMPNNKKFDKLYIWGVHHPGTDNDQISLYAQASGRITVSTKRSQQTVIPNIGSRPRVRDIPSRISIYWTIVKPGDMLLINSTGNLIAPRGYFKIRSGRSSIMRSDAPIGKCNSECITPNGSIPNDKPFQNVNRITYGACPRYVKQNTLKLATGMRNVPEKQTRGIFGAIAGFIENGWEGMVDGWYGFRHQNSEGTGQAADLKSTQAAINQINGKLNRLIGKTNEKFHQIEKEFSEVEGRIQDLEKYVEDTKIDLWSYNAELLVALENQHTIDLTDSEMNKLFERTKKQLRENAEDMGNGCFKIYHKCDNACIGSIRNGTYDHDVYRDEALNNRFQIKGVELKSGYKDWILWISFAISCFLLCVALLGFIMWACQKGNIRCNICI

SEQ ID NO: 6795 - protein, 566 aa, synthetic construct; identical to SEQ ID NO: 31
  REGION 1..566: note = hemagglutinin__InfluenzaA__AEG65648

SEQ ID NO: 6796 - protein, 566 aa, synthetic construct; identical to SEQ ID NO: 1795
  REGION 1..566: note = hemagglutinin__InfluenzaA__AEG65659

SEQ ID NO: 6797 - protein, 566 aa, synthetic construct; identical to SEQ ID NO: 1795
  REGION 1..566: note = hemagglutinin__InfluenzaA__AEG65670

SEQ ID NO: 6798 - protein, 566 aa, synthetic construct; identical to SEQ ID NO: 1795
  REGION 1..566: note = hemagglutinin__InfluenzaA__AEG65681

SEQ ID NO: 6799 - protein, 566 aa, synthetic construct; identical to SEQ ID NO: 6770
  REGION 1..566: note = hemagglutinin__InfluenzaA__AEG65692

SEQ ID NO: 6800 - protein, 566 aa, synthetic construct; identical to SEQ ID NO: 630
  REGION 1..566: note = hemagglutinin__InfluenzaA__AEG65703

SEQ ID NO: 6801 - protein, 566 aa, synthetic construct
  REGION 1..566: note = hemagglutinin__InfluenzaA__AEG65747
MKTIIALSYILCLVFAQKLPGNDNSTATLCLGHHTVPNGTIVKTITNDQIEVTNATELVQSSSTGEICDSPHQILDGENCTLIDALLGDPQCDGFQNKKWDLFVERSKAYSNCYPYDVPDYASLRSLVASSGTLEFNNESFNWTGVTQNGTSSACKRRSNNSFFSRLNWLTHLKFKYPALNVTMPNNEKFDKLYIWGVHHPGTDNDQIFLYAQASGRITVSTKRSQQTVIPNIGSRPRVRNIPSRISIYWTIVKPGDILLINSTGNLIAPRGYFKIRSGKSSIMRSDAPIGKCNSECITPNGSIPNDKPFQNVNRITYGACPRYVKQNTLKLATGMRNVPEKQTRGIFGAIAGFIENGWEGMVDGWYGFRHQNSEGTGQAADLKSTQAAINQINGKLNRLIGKTNEKFHQIEKEFSEVEGRIQDLEKYVEDTKIDLWSYNAELLVALENQHTIDLTDSEMNKLFERTKKQLRENAEDMGNGCFKIYHKCDNACIGSIRNGTYDHDVYRDEALNNRFQIKGVELKSGYKDWILWISFAISCFLLCVALLGFIMWACQKGNIRCNICI

SEQ ID NO: 6802 - protein, 566 aa, synthetic construct
  REGION 1..566: note = hemagglutinin__InfluenzaA__AEG65758
MKTIIALSYILCLVSAQKLPGNDNSTATLCLGHHAVPNGTIVKTITNDQIEVTNATELVQSSSTGGICDSPHQILDGENCTLIDALLGDPQCDGFQNKKWDLFVERSKAYSNCYPYDVPDYASLRSLVASSGTLEFNNESFNWTGVTQNGTSSACKRRSNNSFFSRLNWLTHLKFKYPALNVTMPNNEKFDKLYIWGVHHPGTDNDQIFLYAQASGRITVSTKRSQQTVIPNIGSRPRVRNIPSRISIYWTIVKPGDILLINSTGNLIAPRGYFKIRSGKSSIMRSDAPIGKCNSECITPNGSIPNDKPFQNVNRITYGACPRYVKQNTLKLATGMRNVPEKQTRGIFGAIAGFIENGWEGMVDGWYGFRHQNSEGIGQAADLKSTQAAINQINGKLNRLIGKTNEKFHQIEKEFSEVEGRIQDLEKYVEDTKIDLWSYNAELLVALENQHTIDLTDSEMNKLFERTKKQLRENAEDMGNGCFKIYHKCDNACIGSIRNGTYDHDVYRDEALNNRFQIKGVELKSGYKDWILWISFAISCFLLCVALLGFIMWACQKGNIRCNICI

SEQ ID NO: 6803 - protein, 566 aa, synthetic construct; identical to SEQ ID NO: 281
  REGION 1..566: note = hemagglutinin__InfluenzaA__AEG65769

SEQ ID NO: 6804 - protein, 566 aa, synthetic construct
  REGION 1..566: note = hemagglutinin__InfluenzaA__AEG65780
MKTIIALSYILCLVFAQKLPGNDNSTATLCLGHHAVPNGTIVKTITNDKIEVTNATELVQSSSTGEICNSPHQILDGENCTLIDALLGDPQCDGFQNKKWDLFVERSKAHSNCYPYDVPDYASLRSLVAASGTLEFNNESFNWTGVTQNGTSSACIRRSNNSFFSRLNWLTHLNFKYPALNVTMPNNEQFDKLYIWGVHHPGTDKDQIFLYAQAAGRITVSTKRSQQAVIPNIGSRPRVRNIPSRVSIYWTIVKPGDILLINSTGNLIAPRGYFKIRSGKSSIMRSDAPIGKCNSACITPNGSIPNDKPFQNVNRITYGACPRYVKQNTLKLATGMRNVPEKQTRGIFGAIAGFIENGWEGMVDGWYGFRHQNSEGRGQAADLKSTQAAIDQINGKLNRLIGKTNEKFHQIEKEFSEVEGRIQDLEKYVEDTKIDLWSYNAELLVALENQHTIDLTDSEMNKLFEKTKKQLRENAEDMGNGCFKIYHKCDNACIGSIRNGTYDHDVYRDEALNNRFQIKGVELKSGYKDWILWISFAISCFLLCVALLGFIMWACQKGNIRCNICI

SEQ ID NO: 6805 - protein, 566 aa, synthetic construct
  REGION 1..566: note = hemagglutinin__InfluenzaA__AEG65813
MKTIIALSYILCLVFAQKLPGNDNSTATLCLGHHAVPNGTIVKTITNDQIEVTNATELVQSSSTGEICNSPHQILDGENCTLIDALLGDPQCDGFQNKKWDLFVERSKAHSNCYPYDVPDYASLRSLVASSGTLEFNNESFNWTGVTQNGTSSACIRRSNNSFFSRLNWLTHLNFKYPALNVTMPNNEQFDKLYIWGVHHPGTDKDQIFLYAQAAGRITVSTKRSQQAVIPNIGSRPRVRNIPSRVSIYWTIVKPGDILLINSTGNLIAPRGYFKIRSGKSSIMRSDAPIGKCNSACITPNGSIPNDKPFQNVNRITYGACPRYVKQNTLKLATGMRNVPEKQTRGIFGAIAGFIENGWEGMVDGWYGFRHQNSEGRGQAADLKSTQAAIDQINGKLNRLIGKTNEKFHQIEKEFSEVEGRIQDLEKYVEDTKTDLWSYNAELLVALENQHTIDLTDSEMNKLFEKTKKQLRENAEDMGNGCFKIYHKCDNACIGSIRNGTYDHDVYRDEALNNRFQIKGVELKSGYKDWILWISFAISCFLLCVALLGFIMWACQKGNIRCNICI

SEQ ID NO: 6806 - protein, 566 aa, synthetic construct
  REGION 1..566: note = hemagglutinin__InfluenzaA__AEG79801
MKAILVVLLYTFATANADTLCIGYHANNSTDTVDTVLEKNVTVTHSVNLLEDKHNGKLCKLRGVAPLHLGKCNIAGWILGNPECESLSTASSWSYIVETSSSDNGTCYPGDFINYEELREQLSSVSSFERFEIFPKTSSWPNHDSNKGVTAACPHAGAKSFYKNLIWLVKKGNSYPKLSKSYINDKGKEVLVLWGIHHPSTTADQQSLYQNADAYVFVGTSRYSKKFKPEIAIRPKVRDREGRMNYYWTLVEPGDKITFEATGNLVVPRYAFAMERNAGSGIIISDTPVHDCNTTCQTPKGAINTSLPFQNIHPITIGKCPKYVKSTKLRLATGLRNVPSIQSRGLFGAIAGFIEGGWTGMVDGWYGYHHQNEQGSGYAADLKSTQNAIDKITNKVNSVIEKMNTQFTAVGKEFNHLEKRIENLNKKVDDGFLDIWTYNAELLVLLENERTLDYHDSNVKNLYEKVRNQLKNNAKEIGNGCFEFYHKCDNTCMESVKNGTYDYPKYSEEAKLNREEIDGVKLESTRIYQILAIYSTVASSLVLVVSLGAISFWMCSNGSLQCRICI

SEQ ID NO: 6807 - protein, 566 aa, synthetic construct
  REGION 1..566: note = hemagglutinin__InfluenzaA__AEG79807
MKAILVVLLYTFATANADTLCIGYHANNSTDTVDTVLEKNVTVTHSVNLLEDKHNGKLCKLRGVAPLHLGKCNIAGWILGNPECESLSTASSWSYIVETSSSDNGTCYPGDFINYEELREQLSSVSSFERFEIFPKTSSWPNHDSNKGVTAACPHAGAKSFYKNLIWLVKKENSYPKLSKSYINDKGKEVLVLWGIHHPSTTADQQSIYQNADAYVFVGTSRYSKKFKPEIAIRPKVRDQEGRMNYYWTLVEPGDKITFEATGNLVVPRYAFAMERNAGSGIIISDTPVHDCNTTCQTPKGAINTSLPFQNIHPITIGKCPKYVKSTKLRLATGLRNVPSIQSRGLFGAIAGFIEGGWTGMVDGWYGYHHQNEQGSGYAADLKSTQNAIDKITNKVNSVIEKMNTQFTAVGKEFNHLEKRIENLNKKVDDGFLDIWTYNAELLVLLENERTLDYHDSNVKNLYEKVRNQLKNNAKEIGNGCFEFYHKCDNTCMESVKNGTYDYPKYSEEAKLNREEIDGVKLESTRIYQILAIYSTVASSLVLVVSLGAISFWMCSNGSLQCRICI

SEQ ID NO: 6808 - protein, 566 aa, synthetic construct
  REGION 1..566: note = hemagglutinin__InfluenzaA__AEG79835
MKAILVVLLYTFATANADTLCIGYHANNSTDTVDTVLEKNVTVTHSVNLLEDKHNGKLCKLRGVAPLHLGKCNIAGWILGNPECESLSTASSWSYIVETSSSDNGTCYPGDFIDYEELREQLSSVSSFERFEIFPKTSSWPNHDSNKGVTAACPHAGAKGFYKNLIWLVKKGNSYPKLSKSYINDKGKEVLVLWGIHHPSTTADQQSIYQNADTYVFVGTSRYSKKFKPEIAIRPKVRDQEGRMNYYWTLVEPGDKITFEATGNLVVPRYAFAMERNAGSGIIISDTPVHDCNTTCQTPKGAINTSLPFQNIHPITIGKCPKYVKSTKLRLATGLRNVPSIQSRGLFGAIAGFIEGGWTGMVDGWYGYHHQNEQGSGYAADLKSTQNAIDKITNKVNSVIEKMNTQFTAVGKEFNHLEKRIENLNKKVDDGFLDIWTYNAELLVLLENERTLDYHDSNVKNLYEKVRNQLKNNAKEIGNGCFEFYHKCDNTCMESVKNGTYDYPKYSEEAKLNREEIDGVKLESTRIYQILAIYSTVASSLVLVVSLGAISFWMCSNGSLQCRICI

SEQ ID NO: 6809 - protein, 566 aa, synthetic construct
  REGION 1..566: note = hemagglutinin__InfluenzaA__AEH59363
MKAILVVLLYTFATANADTLCIGYHANNSTDTVDTVLEKNVTVTHSVNLLEDKHNGKLCKLRGVAPLHLGKCNIAGWILGNPECESLSTASSWSYIVETSSSDNGTCYPGDFINYEELREQLSSVSSFERFEIFPKTSSWPNHDSNKGVTAACPQAGAKSFYKNLIWLVKKGNSYPKLSKSYINDKGKEVLVLWGIHHPSTSADQQSLYQNADAYVFVGTSKYSKKFKPEIAVRPKVRDQEGRMNYYWTLVEPGDKITFEATGNLLVPRYAFAMERNAGSGIIISDTPVHDCNTTCQTPKGAINTSLPFQNIHPITIGKCPKYVKSTKLRLATGLRNVPSIQSRGLFGAIAGFIEGGWTGMVDGWYGYHHQNAQGSGYAADLKSTQNAIDKITNKVNSVIEKMNTQFTAVGKEFNHLEKRIENLNKKVDDGFLDIWTYNAELLVLLENERTLDYHDSNVKNLYEKVRSQLKNNAKEIGNGCFEFYHKCDNTCMESVKNGTYDYPKYSEEAKLNREEIDGVKLESTRIYQILAIYSTVASSLVLVVSLGAISFWMCSNGSLQCRICI

SEQ ID NO: 6810 - protein, 566 aa, synthetic construct
  REGION 1..566: note = hemagglutinin__InfluenzaA__AEH59367
MKAILVVLLYTFATANADTLCIGYHANNSTDTVDTVLEKNVTVTHSVNLLEDKHNGKLCKLRGVAPLHLGKCNIAGWILGNPECESLSTASSWSYIVETSSSDNGTCYPGDFINYEELREQLSSVSSFERFEIFPKTSSWPNHDSNKGVTAACPHAGAKSFYKNLIWLVKKGNSYPKLSKSYINDKGKEVLVLWGIHHPSTTADQQSLYQNADAYVFVGTSRYSKKFKPEIAIRPKVRDQEGRMNYYWALVEPGDKITFEATGNLVVPRYAFAMERNAGSGIIISDTPVHDCNTTCQTPKGAINTSLPFQNIHPITIGKCPKYVKSTKLRLATGLRNVPSIQSRGLFGAIAGFIEGGWTGMVDGWYGYHHQNEQGSGYAADLKSTQNAIDKITNKVNSVIEKMNTQFTAVGKEFNHLEKRIENLNKKVDDGFLDIWTYNAELLVLLENERTLDYHDSNVKNLYEKVRNQLKNNAKEIGNGCFEFYHKCDNTCMESVKNGTYDYPKYSEEAKLNREEIDGVKLESTRIYQILAIYSTVASSLVLVVSLGAISFWMCSNGSLQCRICI

SEQ ID NO: 6811 - protein, 566 aa, synthetic construct
  REGION 1..566: note = hemagglutinin__InfluenzaA__AEH59369
MKAILVVLLYTFATANADTLCIGYHANNSTDTVDTVLEKNVTVTHSVNLLEDKHNGKLCKLRGVAPLHLGKCNIAGWILGNPECESLSTASSWSYIVETSSSDNGTCYPGDFIDYEELREQLSSVSSFERFEIFPKASSWPNHDSNKGVTAACPHAGAKGFYKNLIWLVKKGNSYPKLSKSYINDKGKEVLVLWGIHHPSTTADQQSLYQNADTYVFVGTSRYSKKFKPEIAIRPKVRDQEGRMNYYWTLVEPGDKITFEATGNLVVPRYAFAMERNAGSGIIISDTPVHDCNTTCQTPKGAINTSLPFQNIHPITIGKCPKYVKSTKLRLATGLRNVPSIQSRGLFGAIAGFIEGGWTGMVDGWYGYHHQNEQGSGYAADLKSTQNAIDKITNKVNSVIEKMNTQFTAVGKEFNHLEKRIENLNKKVDDGFLDIWTYNAELLVLLENERTLDYHDSNVKNLYEKVRNQLKNNAKEIGNGCFEFYHKCDNTCMESVKNGTYDYPKYSEEAKLNREEIDGVKLESTRIYQILAIYSTVASSLVLVVSLGAISFWMCSNGSLQCRICI

SEQ ID NO: 6812 - protein, 566 aa, synthetic construct; identical to SEQ ID NO: 6809
  REGION 1..566: note = hemagglutinin__InfluenzaA__AEH59371

SEQ ID NO: 6813 - protein, 566 aa, synthetic construct
  REGION 1..566: note = hemagglutinin__InfluenzaA__AEH59373
MKAILVVLLYTFATANADTLCIGYHANNSTDTVDTVLEKNVTVTHSVNLLEDKHNGKLCKLREVAPLHLGKCNIAGWILGNPECESLSTASSWSYIVETSSSDNGTCYPGDFIDYEELREQLSSVSSFERFEIFPKTSSWPNHDSNKGVTAACPHAGAKGFYKNLIWLVKKGNSYPKLSKSYINDKGKEVLVLWGIHHPSTTADQQSLYQNADTYVFVGTSRYSKKFKPEIAIRPKVRDQEGRMNYYWTLVEPGDKITFEATGNLVVPRYAFAMERNAGSGIIISDTPVHDCNTTCQTPKGAINTSLPFQNIHPITIGKCPKYVKSTKLRLATGLRNVPSIQSRGLFGAIAGFIEGGWTGMVDGWYGYRHQNEQGSGYAADLKSTQNAIDKITNKVNSVIEKMNTQFTAVGKEFNHLERRIENLNKKVDDGFLDIWTYNAELLVLLENERTLDYHDSNVKNLYEKVRNQLKNNAKEIGNGCFEFYHKCDNTCMESVKNGTYDYPKYSEEAKLNREEIDGVKLESTRIYQILAIYSTVASSLVLVVSLGAISFWMCSNGSLQCRICI

SEQ ID NO: 6814 - protein, 566 aa, synthetic construct; identical to SEQ ID NO: 6809
  REGION 1..566: note = hemagglutinin__InfluenzaA__AEH59375

SEQ ID NO: 6815 - protein, 566 aa, synthetic construct
  REGION 1..566: note = hemagglutinin__InfluenzaA__AEH59379
MKAILVVLLYTFATANADTLCIGYHANNSTDTVDTVLEKNVTVTHSVNLLEDKHNGKLCKLRGVAPLHLGKCNIAGWILGNPECESLSTASSWSYIVETSSSDNGTCYPGDFIDYEELREQLSSVSSFERFEIFPKTSSWPNHDSNKGVTAACPHAGAKSFYKNLIWLVKKGNSYPKLSKSYINDKGKEVLVLWGIHHPSTTADQQSLYQNADTYVFVGTSRYSKKFKPEIAIRPKVRDQEGRMNYYWTLVEPGDKITFEATGNLVVPRYAFAMERNAGSGIIISDTPVHDCNTTCQTPKGAINTSLPFQNIHPITIGKCPKYVKSTKLRLATGLRNVPSIQSRGLFGAIAGFIEGGWTGMVDGWYGYHHQNEQGSGYAADLKSTQNAIDKITNKVNSVIEKMNTQFTAVGKEFNHLEKRIENLNKKVDDGFLDIWTYNAELLVLLENERTLDYHDSNVKNLYEKVRNQLKNNAKETGNGCFEFYHKCDNTCMESVKNGTYDYPKYSEEAKLNREEIDGVKLESTRIYQILAIYSTVASSLVLVVSLGAISFWMCSNGSLQCRICI

SEQ ID NO: 6816 - protein, 566 aa, synthetic construct; identical to SEQ ID NO: 6809
  REGION 1..566: note = hemagglutinin__InfluenzaA__AEH59381

SEQ ID NO: 6817 - protein, 566 aa, synthetic construct
  REGION 1..566: note = hemagglutinin__InfluenzaA__AEH59383
MKAILVVLLYTFATANADTLCIGYHANNSTDTVDTVLEKNVTVTHSVNLLEDKHNGKLCKLRGVAPLHLGKCNIAGWILGNPECESLSTASSWSYIVETSSSDNGTCYPGDFIDYEELREQLSSVSSFERFEIFPKTSSWPNHDSNKGVTAACPHAGAKGFYKNLIWLVKKGNSYPKLSISYINDKGKEVLVLWGIHHPSTTADQQSLYQNADTYVFVGTSRYSKKFKPEIAIRPKVRDQEGRMNYYWTLVEPGDKITFEATGNLVVPRYAFAMERNAGSGIIISDTPVHDCNTTCQTPKGAINTSLPFQNIHPITIGKCPKYVKSTKLRLATGLRNVPSIQSRGLFGAIAGFIEGGWTGMVDGWYGYHHQNEQGSGYAADLKSTQNAIDKITNKVNSVIEKMNTQFTAVGKEFNHLEKRIENLNKKVDDGFLDIWTYNAELLVLLENERTLDYHDSNVKNLYEKVRNQLKNNAKEIGNGCFEFYHKCDNTCMESVKNGTYDYPKYSEEAKLNREEIDGVKLESTRIYQILAIYSTVASSLVLVVSLGAISFWMCSNGSLQCRICI

SEQ ID NO: 6818 - protein, 566 aa, synthetic construct
  REGION 1..566: note = hemagglutinin__InfluenzaA__AEH59385
MKAILVVLLYTFATANADTLCIGYHANNSTDTVDTVLEKNVTVTHSVNLLEDKHNGKLCKLRGVAPLHLGKCNIAGWILGNPECESLSTASSWSYIVETSSSDNGTCYPGDFIDYEELREQLSSVSSFERFEIFPKTSSWPNHDSNKGVTAACPHAGAKSFYKNLIWLVKKGNSYPKLSKSYINDKGKEVLVLWGIHHPSTTADQQSLYQNADAYIFVGTSRYSKKFKPEIAIRPKVRDQEGRMNYYWTLVEPGDKITFEATGNLVVPRYAFAMERNAGSGIIISDTPVHDCNTTCQTPKGAINTSLPFQNIHPITIGKCPKYVKSTKLRLATGLRNVPSIQSRGLFGAIAGFIEGGWTGMVDGWYGYHHQNEQGSGYAADLKSTQNAIDKITNKVNSVIEKMNTQFTAVGKEFNHLEKRIENLNKKVDDGFLDIWTYNAELLVLLENERTLDYHDSNVKNLYEKVRNQLKNNAKEIGNGCFEFYHKCDNTCMESVKNGTYDYPKYSEEAKLNREEIDGVKLESTRIYQILAIYSTVASSLVLVVSLGAISFWMCSNGSLQCRICI

SEQ ID NO: 6819 - protein, 566 aa, synthetic construct; identical to SEQ ID NO: 6809
  REGION 1..566: note = hemagglutinin__InfluenzaA__AEH59387

SEQ ID NO: 6820 - protein, 566 aa, synthetic construct
  REGION 1..566: note = hemagglutinin__InfluenzaA__AEH59393
MKAILVVILYTFATANADTLCIGYHANNSTDTVDTVLEKNVTVTHSVNLLEDKHNGKLCKLRGVAPLHLGKCNIAGWILGNPECESLSTASSWSYIVETSSSDNGTCYPGDFIDYEELREQLSSVSSFERFEIFPKTSSWPNHDSNKGVTAACPHAGAKGFYKNLIWLVKKGNSYPKLSKSYINDKGKEVLVLWGIHHPSTTADQQSLYQNADTYVFVGTSRYSKKFKPEIAIRPKVRDQEGRMNYYWTLVEPGDKITFEATGNLVVPRYAFAMERNAGSGIIISDTPVHDCNTTCQTPKGAINTSLPFQNIHPITIGKCPKYVKSTKLRLATGLRNVPSIQSRGLFGAIAGFIEGGWTGMVDGWYGYHHQNEQGSGYAADLKSTQNAIDKITNKVNSVIEKMNTQFTAVGKEFNHLEKRIENLNKKVDDGFLDIWTYNAELLVLLENERTLDYHDSNVKNLYEKVRNQLKNNAKEIGNGCFEFYHKCDNTCMESVKNGTYDYPKYSEEAKLNREEIDGVKLESTRIYQILAIYSTVASSLVLVVSLGAISFWMCSNGSLQCRICI

SEQ ID NO: 6821 - protein, 566 aa, synthetic construct
  REGION 1..566: note = hemagglutinin__InfluenzaA__AEH59397
MKAILVVLLYTFATANADTLCIGYHANNSTDTVDTVLEKNVTVTHSVNLLEDKHNGKLCKLRGVAPLHLGKCNIAGWILGNPECESLSTASSWSYIVETSSSDNGTCYPGDFINYEELREQLSSVSSFERFEIFPKTSSWPSHDSNKGVTAACPHAGAKSFYKNLIWLVKKGNSYPKLSKSYINDKGKEVLVLWGIHHPSTSADQQSLYQNADAYVFVGTSKYSKKFKPEIAVRPKVRDQEGRMNYYWTLVEPGDKITFEATGNLLVPRYAFAMERNAGSGIIISDTPVHDCNTTCQTPKGAINTSLPFQNIHPITIGKCPKYVKSTKLRLATGLRNVPSIQSRGLFGAIAGFIEGGWTGMVDGWYGYHHQNEQGSGYAADLKSTQNAIDKITNKVNSVIEKMNTQFTAVGKEFNHLEKRIENLNKKVDDGFLDIWTYNAELLVLLENERTLDYHDSNVKNLYEKVRSQLKNNAKEIENGCFEFYHKCDNTCMESVKNGTYDYPKYSEEAKLNREEIDGVKLESTRIYQILAIYSTVASSLVLVVSLGAISFWMCSNGSLQCRICI

SEQ ID NO: 6822 - protein, 566 aa, synthetic construct
  REGION 1..566: note = hemagglutinin__InfluenzaA__AEH59399
MKAILVVLLYTFATANADTLCIGYHANNSTDTVDTVLEKNVTVTHSVNLLEDKHNGKLCKLRGVAPLHLGKCNIAGWILGNPECESLSTASSWSYIVETSSSDNGTCYPGDFIDYEELREQLSSVSSFERFEIFPKTSSWPNHDSNKGVTAACPHAGAKGFYKNLIWLVKKGNSYPKLSKSYINDKGKEVLVLWGIHHPSTTADQQSLYQNADTYVFVGTSRYSKKFKPEIAIRPKVRDQEGRMNYYWTIVEPGDKITFEATGNLVVPRYAFAMERNAGSGIIISDTPVHDCNTTCQTPKGAINTSLPFQNIHPITIGKCPKYVKSTKLRLATGLRNVPSIQSRGLFGAIAGFIEGGWTGMVDGWYGYHHQNEQGSGYAADLKSTQNAIDKITNKVNSVIEKMNTQFTAVGKEFNHLEKRIENLNKKVDDGFLDIWTYNAELLVLLENERTLDYHDSNVKNLYEKVRNQLKNNAKEIGNGCFEFYHKCDNTCMESVKNGTYDYPKYSEEAKLNREEIDGVKLESTRIYQILAIYSTVASSLVLVVSLGAISFWMCSNGSLQCRICI

SEQ ID NO: 6823 - protein, 566 aa, synthetic construct
  REGION 1..566: note = hemagglutinin__InfluenzaA__AEH59403
MKAILVVLLYTFATANADTLCIGYHANNSTDTVDTVLEKNVTVTHSVNLLEDKHNGKLCKLRGVAPLHLGKCNIAGWILGNPECESLSTASSWSYIVETSSSDNGTCYPGDFIDYEELREQLSSVSSFERFEIFPKTSSWPNHDSNKGVTAACPHAGAKGFYKNLIWLVKKGNSYPKLSKSYINDKGKEVLVLWGIHHPSTTADQQSLYQNADTYVFVGTSRYSKKFKPEIAIRPKVRDQEGRMNYYWTLVAPGDKITFEATGNLVVPRYAFAMERNAGSGIIISDTPVHDCNTTCQTPKGAINTSLPFQNIHPITIGKCPKYVKSTKLRLATGLRNVPSIQSRGLFGAIAGFIEGGWTGMVDGWYGYHHQNEQGSGYAADLKSTQNAIDKITNKVNSVIEKMNTQFTAVGKEFNHLEKRIENLNKKVDDGFLDIWTYNAELLVLLENERTLDYHDSNVKNLYEKVRNQLKNNAKEIGNGCFEFYHKCDNTCMESVKNGTYDYPKYSEEAKLNREEIDGVKLESTRIYQILAIYSTVASSLVLVVSLGAISFWMCSNGSLQCRICI

SEQ ID NO: 6824 - protein, 566 aa, synthetic construct
  REGION 1..566: note = hemagglutinin__InfluenzaA__AEH59407
MKAILVVMLYTFATANADTLCIGYHANNSTDTVDTVLEKNVTVTHSVNLLEDKHNGKLCKLRGVAPLHLGKCNIAGWILGNPECESLSTASSWSYIVETSSSDNGTCYPGDFIDYEELREQLSSVSSFERFEIFPKTSSWPNHDSNKGVTAACPHAGAKGFYKNLIWLVKKGNSYPKLSKSYINDKGKEVLVLWGIHHPSTTADQQSLYQNADTYVFVGTSRYSKKFKPEIAIRPKVRDQEGRMNYYWTLVEPGDKITFEATGNLVVPRYAFAMERNAGSGIIISDTPVHDCNTTCQTPKGAINTSLPFQNIHPITIGKCPKYVKSTKLRLATGLRNVPSIQSRGLFGAIAGFIEGGWTGMVDGWYGYHHQNEQGSGYAADLKSTQNAIDKITNKVNSVIEKMNTQFTAVGKEFNHLEKRIENLNKKVDDGFLDIWTYNAELLVLLENERTLDYHDSNVKNLYEKVRNQLKNNAKEIGNGCFEFYHKCDNTCMESVKNGTYDYPKYSEEAKLNREEIDGVKLESTRIYQILAIYSTVASSLVLVVSLGAISFWMCSNGSLQCRICI

SEQ ID NO: 6825 - protein, 566 aa, synthetic construct; identical to SEQ ID NO: 6824
  REGION 1..566: note = hemagglutinin__InfluenzaA__AEH59409

SEQ ID NO: 6826 - protein, 566 aa, synthetic construct
  REGION 1..566: note = hemagglutinin__InfluenzaA__AEH59411
MKAILVVLLYTFATANADTLCIGYHANNSTDTVDTVLEKNVTVTHSVNLLEDKHNGKLCKLRGVAPLHLGKCNIAGWILGNPECESLSTASSWSYIVETSSSDNGTCYPGDFIDYEELREQLSSVSSFERFEIFPKTSSWPNHDSNKGVTAACPHAGAKGFYKNLIWLVKKGNSYPKLSKSYINDKGKEVLVLWGIHHPSTTADQQSLYQNADTYVFVGTSRYSKKFKPEIAIRPKVRDQEGRMNYYWTLVEPGDKITFEATGNLVVPRYAFAMDRNAGSGIIISDTPVHDCNTTCQTPKGAINTSLPFQNIHPITIGKCPKYVKSTKLRLATGLRNVPSIQSRGLFGAIAGFIEGGWTGMVDGWYGYHHQNEQGSGYAADLKSTQNAIDKITNKVNSVIEKMNTQFTAVGKEFNHLEKRIENLNKKVDDGFLDIWTYNAELLVLLENERTLDYHDSNVKNLYEKVRNQLKNNAKEIGNGCFEFYHKCDNTCMESVKNGTYDYPKYSEEAKLNREEIDGVKLESTRIYQILAIYSTVASSLVLVVSLGAISFWMCSNGSLQCRICI

SEQ ID NO: 6827 - protein, 566 aa, synthetic construct
  REGION 1..566: note = hemagglutinin__InfluenzaA__AEH59413
MKAILVVLLYTFAIANADTLCIGYHANNSTDTVDTVLEKNVTVTHSVNLLEDKHNGKLCKLRGVAPLHLGKCNIAGWILGNPECESLSTASSWSYIVETSSSDNGTCYPGDFINYEELREQLSSVSSFERFEIFPKTSSWPNHDSNKGVTAACPHAGAKSFYKNLIWLVKKGNSYPKLSKSYINDKGKEVLVLWGIHHPSTSADQQSLYQNADAYVFVGTSKYSKKFKPEIAVRPKVRDQEGRMNYYWTLVEPGDKITFEATGNLLVPRYAFAMERNAGSGIIISDTPVHDCNTTCQTPEGAINTSLPFQNIHPITIGKCPKYVKSTKLRLATGLRNVPSIQSRGLFGAIAGFIEGGWTGMVDGWYGYHHQNEQGSGYAADLKSTQNAIDKITNKVNSVIEKMNTQFTAVGKEFNHLEKRIENLNKKVDDGFLDIWTYNAELLVLLENERTLDYHDSNVKNLYEKVRSQLKNNAKEIGNGCFEFYHKCDNTCMESVKNGTYDYPKYSEEAKLNREEIDGVKLESTRIYQILAIYSTVASSLVLVVSLGAISFWMCSNGSLQCRICI

SEQ ID NO: 6828 - protein, 566 aa, synthetic construct
  REGION 1..566: note = hemagglutinin__InfluenzaA__AEH59585
MKAILVVLLYTFATANADTLCIGYHANNSTDTVDTVLEKNVTVTHSVNLLEDKHNGKLCKLRGVAPLHLGKCNIAGWILGNPECESLSTASSWSYIVETSSSDNGTCYPGDFIDYEELREQLSSVSSFERFEIFPKTSSWPNHDPNKGVTAACPHAGAKSFYKNLIWLVKKGNSYPKLSKSYINDKGKEVLVLWGIHHPSTSADQQSLYQNADAYVFVGTSRYSKKFKPEIAIRPKVRDQEGRMNYYWTLVEPGDKITFEATGNLVVPRYAFAMERNAGSGIIISDTPVHDCNTTCQTPKGAINTSLPFQNIHPITIGKCPKYVKSTKLRLATGLRNVPSIQSRGLFGAIAGFIEGGWTGMVDGWYGYHHQNEQGSGYAADLKSTQNAIDEITNKVNSVIEKMNTQFTVVGKEFNHLEKRIENLNKKVDDGFLDIWTYNAELLVLLENERTLDYHDSNVKNLYEKVRSQLKNNAKEIGNGCFEFYHKCDNTCMESVKNGTYDYPKYSEEAKLNREEIDGVKLESTRIYQILAIYSTVASSLVLVVSLGAISFWMCSNGSLQCRICI

SEQ ID NO: 6829 - protein, 566 aa, synthetic construct
  REGION 1..566: note = hemagglutinin__InfluenzaA__AEH59587
MKAILVVLLYTFATANADTLCIGYHANNSTDTVDTVLEKNVTVTHSVNLLEDKHNGKLCKLRGVAPLHLGKCNIAGWILGNPECESLSTASSWSYIVETSSSDNGTCYPGDFIDYEELREQLSSVSSFERFEIFPKTSSWPNHESNKGVTAACPHAGAKSFYKNLIWLVKKGNSYPKLSKSYINDKGKEVLVLWGIHHPSTSADQQSLYQNADAYVFVGTSRYSKKFKPEIAIRPKVRDQEGRMNYYWTLVEPGDKITFEATGNLVVPRYAFAMERNAGSGIIISDTPVHDCNTTCQTPKGAINTSLPFQNIHPITIGKCPKYVKSTKLRLATGLRNVPFIQSRGLFGAIAGFIEGGWTGMVDGWYGYHHQNEQGSGYAADLKSTQNAIDKITNKVNSVIEKMNTQFTVVGKEFNPLEKRIENLNKKVDDGFLDIWTYNAELLVLLENERTLDYHDSNVKNLYEKVRSQLKNNAKEIGNGCFEFYHKCDNTCMESVKNGTYDYPKYSEEAKLNREEIDGVKLESTRIYQILAIYSTVASSLVLVVSLGAISFWMCSNGSLQCRICI

SEQ ID NO: 6830 - protein, 566 aa, synthetic construct; identical to SEQ ID NO: 3833
  REGION 1..566: note = hemagglutinin__InfluenzaA__AEH59589

SEQ ID NO: 6831 - protein, 566 aa, synthetic construct
  REGION 1..566: note = hemagglutinin__InfluenzaA__AEH59591
MKAILVVLLYTFATANADTLCIGYHANNSTDTVDTVLEKNVTVTHSVNLLEDKHNGKLCKLRGVAPLHLGKCNIAGWILGNPECESLSTASSWSYIVETSSSDNGTCYPGDFIDYEELREQLSSVSSFERFEIFPKTSSWPNHDSNKGVTAACPHAGAKSFYKNLIWLVKKGNSYPKLSKSYINDKGKEVLVLWGIHHPSTSADQQSLYQNADAYVFVGTSRYSKKFKPEIAIRPKVRDQEGRMNYYWTLVEPGDKITFEATGNLVVPRYAFAMERNAGSGIIISDTPVHDCNTTCQTPKGAINTSLPFQNIHPITIGKCPKYVKSTKLRLATGLRNVPSIQSRGLFGAIAGFIEGGWTGMVDGWYGYHHQNEQGSGYAADLKSTQNAIDKITNKVNSVIEKMNTQFTVVGKEFNHLEKRIENLNKKVDDGFLDIWTYNAELLVLLENERTLDYHDSNVKNLYEKVRSQLKNNAKEIGNGCFEFYHKCDNTCMESVKNGTYDYPKYSEEAKLNREEIDGVKLESTRIYQILAIYSTVASSLVLVVSLGAISFWMCSNGSLQCRICI

SEQ ID NO: 6832 - protein, 566 aa, synthetic construct
  REGION 1..566: note = hemagglutinin__InfluenzaA__AEH59593
MKAILVVLLYTFATANADTLCIGYHANNSTDTVDTVLEKNVTVTHSVNLLEDKHNGKLCKLRGVAPLHLGKCNIAGWILGNPECESLSTASSWSYIVETSSSDNGTCYPGDFIDYEELREQLSSVSSFERFEIFPKTSSWPNHESNKGVTAACPHAGAKSFYKNLIWLVKKGNSYPKLSKSYINDKGKEVLVLWGIHHPSTSADQQSIYQNADAYVFVGTSRYSKKFKPEIAIRPKVRDQEGRMNYYWTLVEPGDKITFEATGNLVVPRYAFAMERNAGSGIIISDTPVHDCNTTCQTPKGAINTSLPFQNIHPITIGKCPKYVKSTKLRLATGLRNVPSIQSRGLFGAIAGFIEGGWTGMVDGWYGYHHQNEQGSGYAADLKSTQNAIDKITNKVNSVIEKMNTQFTAVGKEFNHLEKRIENLNKKVDDGFLDIWTYNAELLVLLENERTLDYHDSNVKNLYEKVRSQLKNNAKEIGNGCFEFYHKCDNTCMESVKNGTYDYPKYSEEAKLNREEIDGVKLESTRIYQILAIYSTVASSLVLVVSLGAISFWMCSNGSLQCRICI

SEQ ID NO: 6833 - protein, 566 aa, synthetic construct; identical to SEQ ID NO: 3467
  REGION 1..566: note = hemagglutinin__InfluenzaA__AEH59595

SEQ ID NO: 6834 - protein, 566 aa, synthetic construct; identical to SEQ ID NO: 3833
  REGION 1..566: note = hemagglutinin__InfluenzaA__AEH59597

SEQ ID NO: 6835 - protein, 566 aa, synthetic construct; identical to SEQ ID NO: 6828
  REGION 1..566: note = hemagglutinin__InfluenzaA__AEH59599

SEQ ID NO: 6836 - protein, 566 aa, synthetic construct
  REGION 1..566: note = hemagglutinin__InfluenzaA__AEH59601
MKAILVVLLYTFATANADTLCIGYHANNSTDTVDTVLEKNVTVTHSVNLLEDKHNGKLCKLRGVAPLHLGNCNIAGWILGNPECESLSTASSWSYIVETSSSDNGTCYPGDFIDYEELREQLSSVSSFERFEIFPKTSSWPNHDSNKGVTAACPHAGAKSFYKNLIWLVKKGNSYPKLSKSYINDKGKEVLVLWGIHHPSTSADQQSLYQNADAYVFVGTSRYSKKFKPEIAIRPKVRDQEGRMNYYWTLVEPGDKITFEATGNLVVPRYAFAMERNAGSGIIISDTPVHDCNTTCQTPKGAINTSLPFQNIHPITIGKCPKYVKSTKLRLATGLRNVPSIQSRGLFGAIAGFIEGGWTGMVDGWYGYHHQNEQGSGYAADLKSTQNAIDKITNKVNSVIEKMNTQFTVVGKEFNHLEKRIENLNKKVDDGFLDIWTYNAELLVLLENERTLDYHDSNVKNLYEKVRSQLKNNAKEIGNGCFEFYHKCDNTCMESVKNGTYDYPKYSEEAKLNREEIDGVKLESTRIYQILAIYSTVASSLVLVVSLGAISFWMCSNGSLQCRICI

SEQ ID NO: 6837 - protein, 566 aa, synthetic construct; identical to SEQ ID NO: 3467
  REGION 1..566: note = hemagglutinin__InfluenzaA__AEH59604

SEQ ID NO: 6838 - protein, 566 aa, synthetic construct; identical to SEQ ID NO: 3467
  REGION 1..566: note = hemagglutinin__InfluenzaA__AEH59614

SEQ ID NO: 6839 - protein, 566 aa, synthetic construct
  REGION 1..566: note = hemagglutinin__InfluenzaA__AEH59624
MKAILVVLLYTFATANADTLCIGYHANNSTDTVDTVLEKNVTVTHSVNLLEDKHNGKLCKLRGVAPLHLGKCNIAGWILGNPECESLSTASSWSYIVETSSSDNGTCYPGDFIDYEELREQLSSVSSFERFEIFPKTSSWPNHDPNKGVTAACPHAGAKSFYKNLIWLVKKGNSYPKLSKSYINDKGKEVLVLWGIHHPSTSADQQSFYQNADAYVFVGTSRYSKKFKPEIAIRPKVRDQEGRMNYYWTLVEPGDKITFEATGNLVVPRYAFAMERNAGSGIIISDTPVHDCNTTCQTPKGAINTSLPFQNIHPITIGKCPKYVKSTKLRLATGLRNVPSIQSRGLFGAIAGFIEGGWTGMVDGWYGYHHQNEQGSGYAADLKSTQNAIDEITNKVNSVIEKMNTQFTAVGKEFNHLEKRIENLNKKVDDGFLDIWTYNAELLVLLENERTLDYHDSNVKNLYEKVRSQLKNNAKEIGNGCFEFYHKCDNTCMESVKNGTYDYPKYSEEAKLNREEIDGVKLESTRIYQILAIYSTVASSLVLVVSLGAISFWMCSNGSLQCRICI

SEQ ID NO: 6840 - protein, 565 aa, synthetic construct
  REGION 1..565: note = hemagglutinin__InfluenzaA__AEH77259
MKVKLLVLLCTFTATYADTICIGYHANNSTDTVDTVLEKNVTVTHSVNLLENSHNGKLCLLKGIAPLQLGNCSVAGWILGNPECELLISKESWSYIVEKPNPENGTCYPGHFADYEELREQLSSVSSFERFEMFPKESSWPNHTVTGVSASCSHNGESSFYRNLLWLTEKNGLYPNLSKSYANNKEKEVLVLWGVHHPPSISDQKTLYHTENAYVSVVSSHYSRKFTPEIAKRPKVRDQEGRINYYWTLLEPGDTIIFEANGNLIAPRYAFALSRGFGSGIINSNAPMDKCDAKCQTPQGAINSSLPFQNVHPVTIGECPKYVRSAKLRMVTGLRNIPSIQSRGLFGAIAGFIEGGWTGMVDGWYGYHHQNEQGSGYAADQKSTQNAINGITNKVNSVIEKMNTQFTAVGKEFNKLERRMENLNKKVDDGFIDIWTYNAELLVLLENERTLDFHDSNVKNLYEKVKNQLKNNAKEIGNGCFEFYHKCNDECMESVKNGTYDYPKYSEESKLNREKIDGVKLESMGVYQILAIYSTVASSLVFLVSLGAISFWMCSNGSLQCRICI

SEQ ID NO: 6841 - protein, 566 aa, synthetic construct; identical to SEQ ID NO: 2656
  REGION 1..566: note = hemagglutinin__InfluenzaA__AEH77270

SEQ ID NO: 6842 - protein, 566 aa, synthetic construct; identical to SEQ ID NO: 32
  REGION 1..566: note = hemagglutinin__InfluenzaA__AEH77279

SEQ ID NO: 6843 - protein, 566 aa, synthetic construct; identical to SEQ ID NO: 3771
  REGION 1..566: note = hemagglutinin__InfluenzaA__AEI29215

SEQ ID NO: 6844 - protein, 566 aa, synthetic construct; identical to SEQ ID NO: 2669
  REGION 1..566: note = hemagglutinin__InfluenzaA__AEI29225

SEQ ID NO: 6845 - protein, 566 aa, synthetic construct
  REGION 1..566: note = hemagglutinin__InfluenzaA__AEI29591
MKTIIALSYIFCLVFAQDLPGNDNSTATLCLGHHAVPNGTLVKTITNDQIEVTNATELVQSSSTGKICDNPHRILDGINCTLIDALLGDPHCDGFQNEKWDLFVERSKAFSNCYPYDVPDYASLRSLVASSGTLEFINEGFNWTGVTQNGGSSACKRGPDNGFFSRLNWLYKSGSTYPVQNVTMPNNDNSDKLYIWGVHHPSTDKEQTNLYVQASGKVTVSTKRSQQTVIPNVGSRPWVRGLSSRVSIYWTIVKPGDILVINSNGNLIAPRGYYKMRTGKSSIMRSDAPIGTCSSECITPNGSIPNDKPFQNVNKITYGACPKYVKQNTLKLATGMRNVPEKQTRGIFGAIAGFIENGWEGMIDGWYGFRHQNSEGTGQAADLKSTQAAIDQINGKLNRVIEKTNEKFHQIEKEFSEVEGRIQDLEKYVEDTKIDLWSYNAELLVALENQHTIDLTDSEMNKLFEKTRRQLRENAEDMGNGCFKIYHKCDNACIGSIRNGTYDHDVYRDEALNNRFQIKGVELKSGYKDWILWISFAISCFLLCVVLLGFIMWACQKGNIRCNICI

SEQ ID NO: 6846 - protein, 566 aa, synthetic construct; identical to SEQ ID NO: 32
  REGION 1..566: note = hemagglutinin__InfluenzaA__AEI54347

SEQ ID NO: 6847 - protein, 566 aa, synthetic construct; identical to SEQ ID NO: 118
  REGION 1..566: note = hemagglutinin__InfluenzaA__AEI54358

SEQ ID NO: 6848 - protein, 566 aa, synthetic construct; identical to SEQ ID NO: 633
  REGION 1..566: note = hemagglutinin__InfluenzaA__AEI54369

SEQ ID NO: 6849 - protein, 566 aa, synthetic construct; identical to SEQ ID NO: 516
  REGION 1..566: note = hemagglutinin__InfluenzaA__AEI54380

SEQ ID NO: 6850 - protein, 566 aa, synthetic construct; identical to SEQ ID NO: 6779
  REGION 1..566: note = hemagglutinin__InfluenzaA__AEI54391

SEQ ID NO: 6851 - protein, 566 aa, synthetic construct
  REGION 1..566: note = hemagglutinin__InfluenzaA__AEI54402
MKTIIALSYILCLVFAQKLPGNDNSTATLCLGHHAVPNGTIVKTITNDQIEVTNATELVQSSSTGEICYSPHQILDGENCTLIDALLGDPQCDGFQNKKWDLFVERSKAYSNCYPYDVPDYASLRSLVASSGTLEFNNESFNWTGVTQNGTSSACIRRSNNSFFSRLNWLTHLKFKYPALNVTMPNNEKFDKLYIWGVHHPGTDNDQIFLYAQASGRITVSTKRSQQTVIPNIGSRPRVRNIPSRISIYWTIVKPGDILLINSTGNLIAPRGYFKIRSGKSSIMRSDAPIGKCNSECITPNGSIPNDKPFQNVNRITYGACPRYVKQNTLKLATGMRNVPEKQTRGIFGAIAGFIENGWEGMVDGWYGFRHQNSEGIGQAADLKSTQAAIDQINGKLNRLIGKTNEKFHQIEKEFSEVEGRIQDLEKYVEDTKIDLWSYNAELLVALENQHTIDLTDSEMNKLFEKTKKQLRENAEDMGNGCFKIYHKCDNACIGSIRNGTYDHDVYRDEALNNRFQIKGVELKSGYKDWILWISFAISCFLLCVALLGFIMWACQKGNIRCNICI

SEQ ID NO: 6852 - protein, 566 aa, synthetic construct; identical to SEQ ID NO: 1928
  REGION 1..566: note = hemagglutinin__InfluenzaA__AEI54413

SEQ ID NO: 6853 - protein, 566 aa, synthetic construct; identical to SEQ ID NO: 281
  REGION 1..566: note = hemagglutinin__InfluenzaA__AEI54424

SEQ ID NO: 6854 - protein, 566 aa, synthetic construct
  REGION 1..566: note = hemagglutinin__InfluenzaA__AEI54446
MKTIIALSYILCLVFAQKLPENDNSTATLCLGHHAVPNGTIVKTITNDQIEVTNATELVQSSSTGEICNSPHQILDGENCTLIDALLGDPQCDGFQNKKWDLFVERSKAHSNCYPYDVPDYASLRSLVASSGTLEFNNESFNWTGVTQNGTSSACIRRSNNSFFSRLNWLTHLNFKYPALNVTMPNNEQFDKLYIWGVHHPGTDKDQIFLYAQAAGRITVSTKRSQQAVIPNIGSRPRVRNIPSRVSIYWTIVKPGDILLINSTGNLIAPRGYFKIRSGKSSIMRSDAPIGKCNSACITPNGSIPNDKPFQNVNRITYGACPRYVKQNTLKLATGMRNVPEKQTRGIFGAIAGFIENGWEGMVDGWYGFRHQNSEGRGQAADLKSTQAAIDQINGKLNRLIGKTNEKFHQIEKEFSEVEGRIQDLEKYVEDTKIDLWSYNAELLVALENQHTIDLTDSEMNKLFEKTKKQLRENAEDMGNGCFKIYHKCDNACIGSIRNGTYDHDVYRDEALNNRFQIKGVELKSGYKDWILWISFAISCFLLCVALLGFIMWACQKGNIRCNICI

SEQ ID NO: 6855 - protein, 566 aa, synthetic construct
  REGION 1..566: note = hemagglutinin__InfluenzaA__AEI54457
MKTIIALSYILCLVFAQKLPGNDNSTATLCLGHHAVPNGTIVKTITNDQIEVTNATELVQSSSTGEICNSPHQILDGENCTLIDALLGDPQCDGFQNKKWDLFVERSKAHSNCYPYDVPDYASLRSLVASSGTLEFNNESFNWTGVTQNGTSSACIRRSNNSFFSRLNWLTHLNFKYPALNVTMPNNEQFDKLYIWGVHHPGTDKDQIFLYAQAAGRITVSTKRSQQAVIPNIGSRPRVRNIPSRVSIYWTIVKPGDILLINSTGNLIAPRGYFKIRSGKSSIMRSDAPIGKCNSACITPNGSIPNDKPFQNVNRITYGACPRYVKQNTLKLATGMRNVPEKQTRGIFGAIAGFIENGWEGMVDGWYGFRHQNSEGRGQAADLKSTQAAIDQINGKLNRLIGKTNEKFHQIEKEFSEVEGRIQDLEKYVEDTKIDLWSYNAELLVALENQHTIDLTDSEMNKLFEKTKKQLRENAEDMGNGCFKIYHKCDNACIGSIRNGTYDHDVYRDEALNNRFQIKGVELKSGYKDWILWISFAISCFLLCVALLGFIMWACQKGNIRCNICI

SEQ ID NO: 6856 - protein, 566 aa, synthetic construct; identical to SEQ ID NO: 5533
  REGION 1..566: note = hemagglutinin__InfluenzaA__AEI54468

SEQ ID NO: 6857 - protein, 566 aa, synthetic construct; identical to SEQ ID NO: 5533
  REGION 1..566: note = hemagglutinin__InfluenzaA__AEI54479

SEQ ID NO: 6858 - protein, 566 aa, synthetic construct; identical to SEQ ID NO: 6855
  REGION 1..566: note = hemagglutinin__InfluenzaA__AEI54490

SEQ ID NO: 6859 - protein, 566 aa, synthetic construct; identical to SEQ ID NO: 6854
  REGION 1..566: note = hemagglutinin__InfluenzaA__AEI54501

SEQ ID NO: 6860 - protein, 566 aa, synthetic construct
  REGION 1..566: note = hemagglutinin__InfluenzaA__AEI59979
MKTIIALSYILCLVFAQKLPGNDNSTATLCLGHHAVPNGTIVKTITNDQIEVTNATELVQISSTGEICDSPHQILDGENCTLIDALLGDPQCDGFQNKKWDLFVERSKAYSNCYPYDVPDYASLRSLVASSGTLEFNNESFNWTGVTQNGTSSACIRRSNNSFFSRLNWLTHLKFKYPALNVTMPNNEQFDKLYIWGVHHPGTDNDQIFLYAQASGRITVSTKRSQQTVIPNIGSRPRVRNIPSRISIYWTIVKPGDILLINSTGNLIAPRGYFKIRSGKSSIMRSDAPIGKCNSECITPNGSIPNDKPFQNVNRITYGACPRYVKQNTLKLATGMRNVPEKQTRGIFGAIAGFIENGWEGMVDGWYGFRHQNSEGRGQAADLKSTQAAIDQINGKLNRLIEKTNEKFHQIEKEFSEVEGRIQDLEKYVEDTKIDLWSYNAELLVALENQHTIDLTDSEMNKLFEKTKKQLRENAEDMGNGCFKIYHKCDNACIGSIRNGTYDHDVYRDEALNNRFQIKGVELKSGYKDWILWISFAISCFLLCVALLGFIMWACQKGNIRCNICI

SEQ ID NO: 6861 - protein, 565 aa, synthetic construct; identical to SEQ ID NO: 5957
  REGION 1..565: note = hemagglutinin__InfluenzaA__AEI59990

SEQ ID NO: 6862 - protein, 565 aa, synthetic construct; identical to SEQ ID NO: 5959
  REGION 1..565: note = hemagglutinin__InfluenzaA__AEI60001

SEQ ID NO: 6863 - protein, 566 aa, synthetic construct
  REGION 1..566: note = hemagglutinin__InfluenzaA__AEI60012
MKTIIALSYILCLVFAQKLPGNDNSTATLCLGHHAVPNGTIVKTITNDQIEVTNATELVQSSSTGEICDSPHQILDGENCTLIDALLGDPQCDGFQNKKWDLFVERSKAYSNCYPYDVPDYASLRSLVASSGTLEFNNESFNWTGVTQNGTSSACIRSSNNSFFSRLNWLTHLKFKYPALNVTMPNNEQFDKLYIWGVHHPGTDNDQIFLYAQASGRITVSTKRSQQTVIPNIGSRPRVRNIPSRISIYWTIVKPGDILLINSTGNLIAPRGYFKIRSGKSSIMRSDAPIGKCNSECITPNGSIPNDKPFQNVNRITYGACPRYVKQNTLKLATGMRNVPEKQTRGIFGAIAGFIENGWEGMVDGWYGFRHQNSEGRGQAADLKSTQAAIDQINGKLNRLIGKTNEKFHQIEKEFSEVEGKIQDLEKYVEDTKIDLWSYNAELLVALENQHTIDLTDSEMNKLFEKTKKQLRENAEDMGNGCFKIYHKCDNACIGSIRNGTYNHDVYRDEALNNRFQIKGVELKSGYKDWILWISFAISCFLLCVALLGFIMWACQKGNIRCNICI

SEQ ID NO: 6864 - protein, 566 aa, synthetic construct; identical to SEQ ID NO: 2434
  REGION 1..566: note = hemagglutinin__InfluenzaA__AEI60023

SEQ ID NO: 6865 - protein, 566 aa, synthetic construct
  REGION 1..566: note = hemagglutinin__InfluenzaA__AEI60034
MKTIIALSYILCLVFAQKLPGNDNSTATLCLGHHAVPNGTIVKTITNDQIEVTNATELVQSSSTGEICDSPHQILDGKNCTLIDALLGDPQCDGFQNKKWDLFVERSKAYSNCYPYDVPDYASLRSLVASSGTLEFNNESFNWTGVTQNGTSSACIRRSNNSFFSRLNWLTHLKFKYPALNVTMPNNEQFDKLYIWGVHHPGTDKDQIFLYAQASGRITVSTKRSQQTVIPNIGSRPRVRNIPSRISIYWTIVKPGDILLINSTGNLIAPRGYFKIRSGKSSIMRSDAPIGKCNSECITPNGSIPNDKPFQNVNRITYGACPRYVKQNTLKLATGMRNVPEKQTRGIFGAIAGFIENGWEGMVDGWYGFRHQNSEGRGQAADLKSTQAAIDQINGKLNRLIGKTNEKFHQIEKEFSEVEGRIQDLEKYVEDTKIDLWSYNAELLVALENQHTIDLTDSEMNKLFEKTKKQLRENAEDMGNGCFKIYHKCDNACIGSIRNGTYDHDVYRDEALNNRFQIKGVELKSGYKDWILWISFAISCFLLCVALLGFIMWACQKGNIRCNICI

SEQ ID NO: 6866 - protein, 566 aa, synthetic construct
  REGION 1..566: note = hemagglutinin__InfluenzaA__AEI60045
MKTIIALSYILCLVFAQKLPGNDNSTATLCLGHHAVPNGTIVKTIMNDQIEVTNATELVQSSSTGEICDSPHQILDGKNCTLIDALLGDPQCDGFQNKKWDLFVERSKAYSNCYPYDVPDYASLRSLVASSGTLEFNNESFNWTGVTQNGTSSACIRRSKNSFFSRLNWLTHLNFKYPALNVTMPNNEQFDKLYIWGVHHPGTDKDQIFLYAQASGRITVSTKRSQQTAIPNIGYRPRVRNIPSRISIYWTIVKPGDILLINSTGNLIAPRGYFKIRSGKSSIMRSDAPIGKCNSECITPNGSIPNDKPFQNVNRITYGACPRYVKQNTLKLATGMRNVPEKQTRGIFGAIAGFIENGWEGMVDGWYGFRHQNSEGRGQAADLKSTQAAIDQINGKLNRLIGKTNEKFHQIEKEFSEVEGRIQDLEKYVEDTKIDLWSYNAELLVALENQHTIDLTDSEMNKLFEKTKKQLRENAEDMGNGCFKIYHKCDNACIGSIRNGTYDHDVYRDEALNNRFQIKGVELKSGYKDWILWISFAISCFLLCVALLGFIMWACQKGNIRCNICI

SEQ ID NO: 6867 - protein, 566 aa, synthetic construct
  REGION 1..566: note = hemagglutinin__InfluenzaA__AEI60086
MKAILVVLLYTFATANADTLCIGYHANNSTDTVDTVLEKNVTVTHSVNLLEDKHNGKLCKLRGVAPLHLGKCNIAGWILGNPECESLSTASSWSYIVETSSSDNGTCYPGDFINYEELREQLSSVSSFERFEIFPKTSSWPNHDSNKGVTAACPHAGAKSFYKNLIWLVKKGNSYPKLSKSYINDKGKEVLVLWGIHHPSTTADQQSLYQNADAYVFVGTSRYSKKFKPEIAIRPKVRDQEGRMNYYWTLVEPGDKITFEATGNLVVPRYAFAMERNAGSGIIISDTPVHDCNTTCQTPKGAINTSLPFQNIHPITIGKCPKYVKSTKLRLATGLRNVPSIQSRGLFGAIAGFIEGGWTGMVDGWYGYHHQNEQGSGYAADLKSTQNAIDKITNKVNSVIEKMNTQFTAVGKEFNHLEKRIENLNKKVDDGFLDIWTYNAELLVLLENERTLDYHDSNVKNLYEKVRNQLKNNAKEIGNGCFEFYHKCDNTCMESVKNGTYDYPKYSEEAKLNREEIDGVKLESTRIYQILAIYSTVASSLVLVVSLGAISFWMCSNGSLQCRICI

SEQ ID NO: 6868 - protein, 566 aa, synthetic construct
  REGION 1..566: note = hemagglutinin__InfluenzaA__AEI60109
MKTTIALSYILCLVFAQKLPGNDNSTATLCLGHHAVPNGTLVKTITNDQIEVTNATELVQNSSTGRICDSPHQILDGENCTLIDALLGDPHCDGFQNKEWDLFVERSKAYSNCYPYNVPDYVSLRSLVASSGTLEFNNESFNWTGVAQDGSSYACKRRSNKSFFSRLNWLHQLNYKYPALNVTMPNNENFDKLYIWGVHHPGTDSDQISLYAQASGRVTVSTKRSQQTVIPNIGYRPWVRGVSSIISIYWTIVKPGDILLINSTGNLIAPRGYFKIRSGKSSIMRSDAPIGKCNSECITPNGSIPNDKPFQNVNRITYGPCPRYVKQNTLKLATGMRNVPEKQTRGIFGAIAGFIENGWEGMKDGWYGFRHQNSEGTGQAADIKSTQAAINQINGKLNRLIEKTNEKFHQIEKEFSEVEGRIQDLEKYVEDTKIDLWSYNAELLVALENQHTIDLTDSEMNKLFERTKKQLRENAEDMGNGCFKIYHKCDNTCIGSIRNGTYDHDVYRDEALNNRFHIKGVELKSGYKDWILWISFATSCFLLCIVLLGFIMWACQKGNIRCNICI

SEQ ID NO: 6869 - protein, 566 aa, synthetic construct
  REGION 1..566: note = hemagglutinin__InfluenzaA__AEI86734
MKAILVVLLYTFATANADTLCVGYHANNSTDTVDTVLEKNVTVTHSVNLLEDKHNGKLCKLRGVAPLHLGKCNIAGWILGNPECESLSTASSWSYIVETSNSDNGTCYPGDFIDYEELREQLSSVSSFERFEIFPKTSSWPNHDSNKGVTAACPHAGAKSFYRNLIWLVKKGNSYPKLSKSYINDKGKEVLVLWGIHHPSTSADQQSLYQNADTYVFVGTSRYSKKFKPEIAIRPKVRDQEGRMNYYWTLVEPGDKITFEATGNLVVPRYAFAMERNAGSGIIISDTPVHDCNTTCQTPKGAINTSLPFQNIHPITIGKCPKYVKSTKLRLATGLRNVPSIQSRGLFGAIAGFIEGGWTGMVDGWYGYHHQNEQGSGYAADLKSTQNAIDEITNKVNSVIEKMNTQFTAVGKEFNHLEKRIENLNKKVDDGFLDIWTYNAELLVLLENERTLDYHDSNVKNLYEKVRSQLKNNAKEIGNGCFEFYHKCDNTCMESVKNGTYDYPKYSEEAKLNREEIDGVKLESTRIYQILAIYSTVASSLVLVVSLGAISFWMCSNGSLQCRICI

SEQ ID NO: 6870 - protein, 566 aa, synthetic construct
  REGION 1..566: note = hemagglutinin__InfluenzaA__AEI86764
MKAILVVLLYTFATANADTLCIGYHANNSTDTVDTVLEKNVTVTHSVNLLEDKHNGKLCKLRGVAPLHLGKCNIAGWILGNPECESLSTASSWSYIVETSSSDNGTCYPGDFIDYEELREQLSSVSSFERFEIFPKTSSWPDHDSNKGVTAACPHAGAKSFYKNLIWLVKKGNSYPKLSKSYINDKGKEVLVLWGIHHPSTSADQQSLYQNADAYVFVGTSRYSKKFKPEIAIRPKVRDQEGRMNYYWTLVEPGDKITFEATGNLVVPRYAFAMERNAGSGIIISDTPVHDCNTTCQTPKGAINTSLPFQNIHPITIGKCPKYVKSTKLRLATGLRNVPSIQSRGLFGAIAGFIEGGWTGMVDGWYGYHHQNEQGSGYAADLKSTQNAIDKITNKVNSVIEKMNTQFTAVGKEFNHLEKRIENLNKKVDDGFLDIWTYNAELLVLLENERTLDYHDSNVKNLYEKVRSQLKNNAKEIGNGCFEFYHKCDNTCMESVKNGTYDYPKYSEEAKLNREKIDGVKLESTRIYQILAIYSTVASSLVLVVSLGAISFWMCSNGSLQCRICI

SEQ ID NO: 6871 - protein, 566 aa, synthetic construct; identical to SEQ ID NO: 6870
  REGION 1..566: note = hemagglutinin__InfluenzaA__AEI86774

SEQ ID NO: 6872 - protein, 566 aa, synthetic construct
  REGION 1..566: note = hemagglutinin__InfluenzaA__AEI86784
MKVILVVLLYTFATANADTLCIGYHANNSTDTVDTVLEKNVTVTHSVNLLEDKHNGKLCKLRGVAPLHLGKCNIAGWILGNPECESLSTASSWSYIVETSSSDNGTCYPGDFIDYEELREQLSSVSSFKRFEIFPKTSSWPNHDSNKGVTAACPHAGAKSFYKNLIWLVKKGNSYPKLSKSYINDKGKEVLVLWGIHHPSTSADQQSLYQNADAYVFVGTSRYSKKFKPEIAIRPKVRDQEGRMNYYWTLVEPGDKITFEATGNLVVPRYAFAMERNAGSGIIISDTPVHDCNTTCQTPKGAINTSLPFQNIHPITIGKCPKYVKSTKLRLATGLRNVPSIQSRGLFGAIAGFIEGGWTGMVDGWYGYHHQNEQGSGYAADLKSTQNAIDKITNKVNSVIEKMNTQFTAVGKEFNHLEKRIENLNKKVDDGFLDIWTYNAELLVLLENERTLDYHDSNVKNLYEKVRSQLKNNAKEIGNGCFEFYHKCDNTCMESVKNGTYDYPKYSEEAKLNREEIDGVKLESTRIYQILAIYSTVASSLVLVVSLGAISFWMCSNGSLQCRICI

SEQ ID NO: 6873 - protein, 566 aa, synthetic construct
  REGION 1..566: note = hemagglutinin__InfluenzaA__AEI86794
MKTILVVLLYTFATANADTLCIGYHANNSTDTVDTVLEKNVTVTHSVNLLEDKHNGKLCKLRGVAPLHLGKCNIAGWILGNPECESLSTASSWSYIVETSSSDNGTCYPGNFIDYEELREQLSSVSSFERFEIFPKTSSWPDHDSNKGVTAACPHAGAKSFYKNLIWLVKKGNSYPKLSKSYINDKGKEVLVLWGIHHPSTSADQQSLYQNADAYVFVGTSKYSKKFKPEIAIRPKVRDQEGRMNYYWTLVEPGDKITFEATGNLVAPRYAFAMERNAGSGIIISDTPVHDCNTTCQTPKGAINTSLPFQNIHPITIGKCPKYVKSTKLRLATGLRNVPSIQSRGLFGAIAGFIEGGWTGMVDGWYGYHHQNEQGSGYAADLKSTQNAIDKITNKVNSVIEKMNTQFTAVGKEFNHLEKRIENLNKKVDDGFLDIWTYNAELLVLLENERTLDYHDSNVKNLYEKVRSQLKNNAKEIGNGCFEFYHKCDNTCMESVKNGTYDYPKYSEEAKLNREEIDGVKLESTRIYQILAIYSTVASSLVLVVSLGAISFWMCSNGSLQCRICI

SEQ ID NO: 6874 - protein, 566 aa, synthetic construct
  REGION 1..566: note = hemagglutinin__InfluenzaA__AEI86804
MKAILVVLLYTFATANADTLCIGYHANNSTDTVDTVLEKNVTVTHSVNLLEDKHNGKLCKLRGVAPLHLGKCNIAGWILGNPECESLSTASSWSYIVETSSSDNGTCYPGDFINYEELREQLSSVSSFERFEIFPKTSSWPDHDSNKGVTAACPHAGAKSFYKNLMWLVKKGNSYPKLSKSYINDKGKEVLVLWGIHHPSTSADQQSLYQNADAYVFVGTSRYSKKFKPEIAIRPKVRDQEGRMNYYWTLVEPGDKITFEATGNLVVPRYAFAMERNAGSGIIISDTPVHDCNTTCQTPKGAINTSLPFQNIHPITIGKCPKYVKSTKLRLATGLRNVPSIQSRGLFGAIAGFIEGGWTGMVDGWYGYHHQNEQGSGYAADLKSTQNAIDKITNKVNSVIEKMNTQFTAVGKEFNHLEKRIENLNKKVDDGFLDIWTYNAELLVLLENERTLDYHDSNVKNLYEKVRSQLKNNAKEIGNGCFEFYHKCDNTCMESVKNGTYDYPKYSEEAKLNREEIDGVKLESTRIYQILAIYSAVASSLVLVVSLGAISFWMCSNGSLQCRICI

SEQ ID NO: 6875 - protein, 566 aa, synthetic construct; identical to SEQ ID NO: 6870
  REGION 1..566: note = hemagglutinin__InfluenzaA__AEI86814

SEQ ID NO: 6876 - protein, 566 aa, synthetic construct
  REGION 1..566: note = hemagglutinin__InfluenzaA__AEI86824
MKAILVVLLYTFATANADTLCIGYHANNSTDTVDTVLEKNVTVTHSVNLLEDKHNGKLCKLRGVAPLHLGKCNIAGWILGNPECESLSTASSWSYIVETSSSDNGTCYPGDFIDYEELREQLSSVSSFERFEIFPKTSSWPDHDSNKGVTAACPHAGAKSFYKNLIWLVKKGNSYPKLSKSYINDKGKEVLVLWGIHHPSTSADQQSLYQNADAYVFVGTSRYSKKFKPEIAIRPKVRDQEGRMNYYWTLVEPGDKITFEATGNLVVPRYAFAMERNAGSGIIISDTPVHDCNTTCQTPKGAINTSLPFQNIHPITIGKCPKYVKSTKLRLATGLRNVPSIQSRGLFGAIAGFIEGGWTGMVDGWYGYHHQNEQGSGYAADLKSTQDAIDKITNKVNSVIEKMNTQFTAVGKEFNHLEKRIENLNKKVDDGFLDIWTYNAELLVLLENERTLDYHDSNVKNLYEKVRSQLKNNAKEIGNGCFEFYHKCDNTCMESVKNGTYDYPKYSEEAKLNREKIDGVKLESTRIYQILAIYSTVASSLVLVVSLGAISFWMCSNGSLQCRICI

SEQ ID NO: 6877 - protein, 566 aa, synthetic construct
  REGION 1..566: note = hemagglutinin__InfluenzaA__AEI86834
MKAILVVLLYTFATANADTLCIGYHANNSTDTVDTVLEKNVTVTHSVNLLEDKHNGKLCKLRGVAPLHLGKCNIAGWILGNPECESLSTASSWSYIVETSSSDNGTCYPGNFIDYEELREQLSSVSSFERFEIFPKTSSWPDHDSNKGVTAACPHAGAKSFYKNLIWLVKKGNSYPKLSKSYINDKGKEVLVLWGIHHPSTSADQQSLYQNADAYVFVGTSRYSRKFKPEIAIRPKVRDQEGRMNYYWTLVEPGDKITFEATGNLVAPRYAFAMERNAGSGIIISDTPVHDCNTTCQTPKGAINTSLPFQNIHPITIGKCPKYVKSTKLRLATGLRNVPSIQSRGLFGAIAGFIEGGWTGMVDGWYGYHHQNEQGSGYAADLKSTQNAIDKITNKVNSVIEKMNTQFTAVGKEFNHLEKRIENLNKKVDDGFLDIWTYNAELLVLLENERTLDYHDSNVKNLYEKVRSQLKNNAKEIGNGCFEFYHKCDNTCMESVKNGTYDYPKYSEEAKLNREEIDGVKLESTRIYQILAIYSTVASSLVLVVSLGAISFWMCSNGSLQCRICI

SEQ ID NO: 6878 - protein, 566 aa, synthetic construct; identical to SEQ ID NO: 5584
  REGION 1..566: note = hemagglutinin__InfluenzaA__AEI86854

SEQ ID NO: 6879 - protein, 566 aa, synthetic construct
  REGION 1..566: note = hemagglutinin__InfluenzaA__AEI86864
MKAILVALLYTFATANADTLCIGYHANNSTDTVDTVLEKNVTVTHSVNLLEDKHNGKLCKLRGVAPLHLGKCNIAGWILGNPECESLSTASSWSYIVETSSSDNGTCYPGDFINYEELREQLSSVSSFERFEIFPKTSSWPNHDSNKGVTAACPHAGAKSFYKNLIWLVKKGNSYPKLSKSYINDKGKEVLVLWGIHHPSTTADQQSLYQNADAYVFVGTSRYSKKFKPEIAIRPKVRDQEGRMNYYWTLVEPGDKITFEATGNLVVPRYAFAMERNAGSGIIISDTPVHDCNTTCQTPKGAINTSLPFQNIHPITIGKCPKYVKSTKLRLATGLRNVPSIQSRGLFGAIAGFIEGGWTGMVDGWYGYHHQNEQGSGYAADLKSTQNAIDKITNKVNSVIEKMNTQFTAVGKEFNHLEKRIENLNKKVDDGFLDIWTYNAELLVLLENERTLDYHDSNVKNLYEKVRNQLKNNAKEIGNGCFEFYHKCDNTCMESVKNGTYDYPKYSEEAKLNREEIDGVKLESTRIYQILAIYSTVASSLVLVVSLGAISFWMCSNGSLQCRICI

SEQ ID NO: 6880 - protein, 566 aa, synthetic construct; identical to SEQ ID NO: 6870
  REGION 1..566: note = hemagglutinin__InfluenzaA__AEI86874

SEQ ID NO: 6881 - protein, 566 aa, synthetic construct
  REGION 1..566: note = hemagglutinin__InfluenzaA__AEI86894
MKAILVVLLYTFATANADTLCIGYHANNSTDTVDTVLEKNVTVTHSVNLLEDKHNGKLCKLRGVAPLHLGKCNIAGWILGNPECESLSTASSWSYIVETSSSDNGTCYPGNFIDYEELREQLSSVSSFERFEIFPKTSSWPDHDSNKGVTAACPHAGAKSFYKNLIWLVKKGNSYPKLSKSYINDKGKEVLVLWGIHHPSTSADQQSLYQNADAYVFVGTSRYSKKFKPEIAIRPKVRDQEGRMNYYWTLVEPGDKITFEATGNLVAPRYAFAMERNAGSGIIISDTPVHDCNTTCQTPKGAINTSLPFQNIHPITIGKCPKYVKSTKLRLATGLRNVPSIQSRGLFGAIAGFIEGGWTGMVDGWYGYHHQNEQGSGYAADLKSTQNAIDKITNKVNSVIEKMNTQFTAVGKEFNHLEKRIENLNKKVDDGFLDIWTYNAELLVLLENERTLDYHDSNVKNLYEKVRSQLKNNAKEIGNGCFEFYHKCDNTCMESVKNGTYDYPKYSEEAKLNREEIDGVKLESTRIYQILAIYSTVASSLVLVVSLGAISFWMCSNGSLQCRICI

SEQ ID NO: 6882 - protein, 566 aa, synthetic construct
  REGION 1..566: note = hemagglutinin__InfluenzaA__AEI86904
MKAILVVLLYTFTTANADTLCIGYHANNSTDTVDTVLEKNVTVTHSVNLLEDKHNGKLCKLRGVAPLHLGKCNIAGWILGNPECESLSTASSWSYIVETSSSDNGTCYPGDFIDYEELREQLSSVSSFERFEIFPKTSSWPNHDSNKGVTAACPHAGAKSFYKNLIWLVKKGNSYPKLSKSYINDKGKEVLVLWGIHHPSTTADQQSLYQNADAYVFVGTSRYSKKFKPEIAIRPKVRDQEGRMNYYWTLVEPGDKITFEATGNLVVPRYAFAMERNAGSGIIISDTPVHDCNTTCQTPKGAINTSLPFQNIHPITIGKCPKYVKSTKLRLATGLRNVPSIQSRGLFGAIAGFIEGGWTGMVDGWYGYHHQNEQGSGYAADLKSTQNAIDKITNKVNSVIEKMNTQFTAVGKEFNHLEKRIENLNKKVDDGFLDIWTYNAELLVLLENERTLDYHDSNVKNLYEKVRNQLKNNAKEIGNGCFEFYHKCDNTCMESVKNGTYDYPKYSEEAKLNREEIDGVKLESTRIYQILAIYSTVASSLVLVVSLGAISFWMCSNGSLQCRICI

SEQ ID NO: 6883 - protein, 566 aa, synthetic construct
  REGION 1..566: note = hemagglutinin__InfluenzaA__AEI86914
MKAILVVLLYTFATANADTLCIGYHANNSTDTVDTVLEKNVTVTHSVNLLEDKHNGKLCKLRGVAPLHLGKCNIAGWILGNPECESLSTASSWSYIVETSSSDNGTCYPGDFINYEELREQLSSVSSFERFEIFPKTSSWPNHDSNKGVTAACPHAGAKSFYKNLIWLVKKGNSYPRLSKSYINDKGKEVLVLWGIHHPSTTADQQSLYQNADAYVFVGTSRYSKKFKPEIAIRPKVRDQEGRMNYYWTLVEPGDKITFEATGNLVVPRYAFAMERNAGSGIIISDTPVHDCNTTCQTPKGAINTSLPFQNIHPITIGKCPKYVKSTKLRLATGLRNVPSIQSRGLFGAIAGFIEGGWTGMVDGWYGYHHQNEQGSGYAADLKSTQNAIDKITNKVNSVIEKMNTQFTAVGKEFNHLEKRIENLNKKVDDGFLDIWTYNAELLVLLENERTLDYHDSNVKNLYEKVRNQLKNNAKEIGNGCFEFYHKCDNTCMESVKNGTYDYPKYSEEAKLNREEIDGVKLESTRIYQILAIYSTVASSLVLVVSLGAISFWMCSNGSLQCRICI

SEQ ID NO: 6884 - protein, 566 aa, synthetic construct
  REGION 1..566: note = hemagglutinin__InfluenzaA__AEI86924
MKAILVVLLYTFATANADTLCIGYHANNSTDTVDTVLEKNVTVTHSVNLLEDKHNGKLCKLRGVAPLHLGKCNIAGWILGNPECESLSTASSWSYIVETSSSDNGTCYPGVFIDYEELREQLSSVSSFERFEIFPKTSSWPNHDSNKGVTAACPHAGAKSFYKNLIWLIKKGNSYPKLSKSYINDKGKEVLVLWGIHHPSTTADQQSLYQNADAYVFVGTSRYSKKFKPEIAVRPKVRDQEGRMNYYWTLVEPGDKITFEATGNLVVPRYAFAMERNAGSGIIISDTPVHDCNTTCQTPKGAINTSLPFQNIHPITIGKCPKYVKSTKLRLATGLRNVPSIQSRGLFGAIAGFIEGGWTGMVDGWYGYHHQNEQGSGYAADLKSTQNAIDKITNKVNSVIEKMNTQFTAVGKEFNHLEKRIENLNKKVDDGFLDIWTYNAELLVLLENERTLDYHDSNVKNLYEKVRNQLKNNAKEIGNGCFEFYHKCDNTCMESVKNGTYDYPKYSEEAKLNREEIDGVKLESTRIYQILAIYSTVASSLVLVVSLGAISFWMCSNGSLQCRICI

SEQ ID NO: 6885 - protein, 566 aa, synthetic construct; identical to SEQ ID NO: 6870
  REGION 1..566: note = hemagglutinin__InfluenzaA__AEI86934

SEQ ID NO: 6886 - protein, 566 aa, synthetic construct; identical to SEQ ID NO: 5584
  REGION 1..566: note = hemagglutinin__InfluenzaA__AEI86944

SEQ ID NO: 6887 - protein, 566 aa, synthetic construct
  REGION 1..566: note = hemagglutinin__InfluenzaA__AEI86964
MKAILVVLLYTFATANADTLCIGYHANNSTDTVDTVLEKNVTVTHSVNLLEDKHNGKLCKLRGVAPLHLGKCNIAGWILGNPECESLSTASSWSYIVETSSSDNGTCYPGVFIDYEELREQLSSVSSFERFEIFPKTSSWPNHDSNKGVTAACPHAGAKSFYKNLIWLVKKGNSYPKLSKSYINDKGKEVLVLWGIHHPSTTADQQSLYQNADAYVFVGTSRYSKKFKPEIAVRPKVRDQEGRMNYYWTLVEPGDKITFEATGNLVVPRYAFAMERNAGSGIIISDTPVHDCNTTCQTPKGAINTSLPFQNIHPITIGKCPKYVKSTKLRLATGLRNVPSIQSRGLFGAIAGFIEGGWTGMVDGWYGYHHQNEQGSGYAADLKSTQNAIDKITNKVNSVIEKMNTQFTAVGKEFNHLEKRIENLNKKVDDGFLDIWTYNAELLVLLENERTLDYHDSNVKNLYEKVRNQLKNNAKEIGNGCFEFYHKCDNMCMESVKNGTYDYPKYSEEAKLNREEIDGVKLESTRIYQILAIYSTVASSLVLVVSLGAISFWMCSNGSLQCRICI

SEQ ID NO: 6888 - protein, 566 aa, synthetic construct; identical to SEQ ID NO: 5826
  REGION 1..566: note = hemagglutinin__InfluenzaA__AEI86974

SEQ ID NO: 6889 - protein, 566 aa, synthetic construct; identical to SEQ ID NO: 5584
  REGION 1..566: note = hemagglutinin__InfluenzaA__AEI86984

SEQ ID NO: 6890 - protein, 566 aa, synthetic construct; identical to SEQ ID NO: 5584
  REGION 1..566: note = hemagglutinin__InfluenzaA__AEI86994

SEQ ID NO: 6891 - protein, 566 aa, synthetic construct
  REGION 1..566: note = hemagglutinin__InfluenzaA__AEI87004
MKAILVVLLYTFATANADTLCIGYHANNSTDTVDTVLEKNVTVTHSVNLLEDKHNGKLCKLKGVAPLHLGKCNIAGWILGNPECESLSTASSWSYIVETSSSDNGTCYPGNFIDYEELREQLSSVSSFERFEIFPKTSSWPDHDSNKGVTAACPHAGAKSFYKNLIWLVKKGNSYPKLSKSYINDKGKEVLVLWGIHHPSTSADQQGLYQNADAYVFVGTSRYSKKFKPEIAIRPKVRDQEGRMNYYWTLVEPGDKITFEATGNLVAPRYAFAMERNAGSGIIISDTPVHDCNTTCQTPKGAINTSLPFQNIHPITIGKCPKYVKSTKLRLATGLRNVPSIQSRGLFGAIAGFIEGGWTGMVDGWYGYHHQNEQGSGYAADLKSTQNAIDKITNKVNSVIEKMNTQFTAVGKEFNHLEKRIENLNKKVDDGFLDIWTYNAELLVLLENERTLDYHDSNVKNLYEKVRSQLKNNAKEIGNGCFEFYHKCDNTCMESVKNGTYDYPKYSEEAKLNREEIDGVKLESTRIYQILAIYSTVASSLVLVVSLGAISFWMCSNGSLQCRICI

SEQ ID NO: 6892 - protein, 566 aa, synthetic construct
  REGION 1..566: note = hemagglutinin__InfluenzaA__AEI87014
MKAILVVLLYTFATANADTLCIGYHANNSTDTVDTVLEKNVTVTHSVNLLEDKHNGKLCKLRGVAPLHLGKCNIAGWILGNPECESLSTASSWSYIVETSSSDNGTCYPGDFIDYEELREQLSSVSSFERFEIFPKTSSWPNHDSNKGVTAACPHAGAKSFYKNLIWLVKKGNSYPKLSKSYINDKGKEVLVLWGIHHPSTSADQQSLYQNADAYVFVGTSRYSKKFKPEIAIRPKVRDQEGRMNYYWTLVEPGDKITFEATGNLVVPRYAFAMERNAGSGIIISDTPVHDCNTTCQTPKGAINTSLPFQNIHPITIGKCPKYVKSTKLRLATGLRNVPSIQSRGLFGAIAGFIEGGWTGMVDGWYGYHHQNEQGSGYAADLKSTQNAIDKITNKVNSVIEKMNTQFTAVGKEFNHLEKRIENLNKKVDDGFLDIWTYNAELLVLLENERTLDYHDSNVKNLYEKVRSQLKNNAKEIGNGCFEFYHKCDNTCMESVKNGTYDYPKYSGEAKLNREEIDGVKLESTRIYQILAIYSTVASSLVLVVSLGAISFWMCSNGSLQCRICI

SEQ ID NO: 6893 - protein, 566 aa, synthetic construct
  REGION 1..566: note = hemagglutinin__InfluenzaA__AEI87034
MKAILVVLLYTFATANADTLCIGYHANNSTDTVDTVLEKNVTVTHSVNLLEDKHNGKLCKLRGVAPLHLGKCNIAGWILGNPECESLSTASSWSYIVETSSSDNGTCYPGDFIDYEELREQLSSVSSFERFEIFPKTSSWPDHDSNKGVTAACPHAGAKSFYKNLIWLVKKGNSYPKLSKSYINDKGKEVLVLWGIHHPSTSADQQSLYQNADAYVFVGTSRYSKKFKPEIAIRPKVRDQEGRMNYYWTLVEPGDKITFEATGNLVVPRYAFAMERNAGSGIIISDTPVHDCNTTCQTPKGAINTSLPFQNIHPITIGKCPKYVKSTKLRLATGLRNVPSIQSRGLFGAIAGFIEGGWTGMVDGWYGYHHQNEQGSGYAADLKSTQNAIDKITNKVNSVIEKMNTQFTAIGKEFNHLEKRIENLNKKVDDGFLDIWTYNAELLVLLENERTLDYHDSNVKNLYEKVRSQLKNNAKEIGNGCFEFYHKCDNTCMESVKNGTYDYPKYSEEAKLNREEIDGVKLESTRIYQILAIYSTVASSLVLVVSLGAISFWMCSNGSLQCRICI

SEQ ID NO: 6894 - protein, 566 aa, synthetic construct; identical to SEQ ID NO: 5584
  REGION 1..566: note = hemagglutinin__InfluenzaA__AEI87044

SEQ ID NO: 6895 - protein, 566 aa, synthetic construct; identical to SEQ ID NO: 3833
  REGION 1..566: note = hemagglutinin__InfluenzaA__AEI87054

SEQ ID NO: 6896 - protein, 566 aa, synthetic construct
  REGION 1..566: note = hemagglutinin__InfluenzaA__AEI87064
MKAILVVLLYTFATANADTLCIGYHANNSTDTVDTVLEKNVTVTHSVNLLEDKHNGKLCKLRGVAPLHLGKCNIAGWILGNPECESLSTASSWSYIVETSSSDNGTCYPGDFIDYEELREQLSSVSSFERFEIFPKTSSWPNHDSNKGVTAACPHAGAKSFYKNLIWLVKKGNSYPKLSKSYINDKGKEVLVLWGIHHPSTTADQQSLYQNADTYVFVGTSRYSKKFKPEIAIRPKVRDQEGRMNYYWTLVEPGDKITFEATGNLVVPRYAFAMERNAGSGIIISDTPVHDCNTTCQTPKGAINTSLPFQNIHPITIGKCPKYVKSTKLRLATGLRNVPSIQSRGLFGAIAGFIEGGWTGMVDGWYGYHHQNEQGSGYAADLKSTQNAIDKITNKVNSVIEKMNTQFTAVGKEFNHLEKRIENLNKKVDDGFLDIWTYNAELLVLLENERTLDYHDSNVKNLYEKVRNQLKNNAKEIGNGCFEFYHKCDNTCMESVKNGTYDYPKYSEEAKLNREEIDGVKLESTRIYQILAIYSTAASSLVLVVSLGAISFWMCSNGSLQCRICI

SEQ ID NO: 6897 - protein, 566 aa, synthetic construct
  REGION 1..566: note = hemagglutinin__InfluenzaA__AEI87074
MKATLVVLLYTFATANADTLCIGYHANNSTDTVDTVLEKNVTVTHSVNLLEDKHNGKLCKLRGVAPLHLGKCNIAGWILGNPECESLSTASSWSYIVETSSSDNGTCYPGDFINYEELREQLSSVSSFERFEIFPKTSSWPNHDSNKGVTAACPHAGAKSFYKNLIWLVKKGNSYPKLSKSYINDKGKEVLVLWGIHHPSTTADQQSLYQNADAYVFVGTSRYSKKFKPEIAIRPKVRDQEGRMNYYWTLVEPGDKITFEATGNLVVPRYAFAMERNAGSGIIISDTPVHDCNTTCQTPKGAINTSLPFQNIHPITIGKCPKYVKSTKLRLATGLRNVPSIQSRGLFGAIAGFIEGGWTGMVDGWYGYHHQNEQGSGYAADLKSTQNAIDKITNKVNSVIEKMNTQFTAVGKEFNHLEKRIENLNKKVDDGFLDIWTYNAELLVLLENERTLDYHDSNVKNLYEKVRNQLKNNAKEIGNGCFEFYHKCDNTCMESVKNGTYDYPKYSEEAKLNREEIDGVKLESTRIYQILAIYSTVASSLVLVVSLGAISFWMCSNGSLQCRICI

SEQ ID NO: 6898 - protein, 566 aa, synthetic construct
  REGION 1..566: note = hemagglutinin__InfluenzaA__AEI87094
MKAILVVLLYTFATANADTLCIGYHANNSTDTVDTVLEKNVTVTHSVNLLEDKHNGKLCKLRGVAPLHLGKCNIAGWILGNPECESLSTASSWSYIVETSSSDNGTCYPGDFIDYEELREQLSSVSSFERFEIFPKTSSWPDHDSNKGVTAACPHAGAKSFYKNLIWLVKKGNSYPKLSKSYINDKGKEVLVLWGIHHPSTSADQQSLYQNADAYVFVGTSRYSKKFKPEIAIRPKVRDQEGRMNYYWTLVEPGDKITFEATGNLVVPRYAFAMERNTGSGIIISDTPVHDCNTTCQTPKGAINTSLPFQNIHPITIGKCPKYVKSTKLRLATGLRNVPSIQSRGLFGAIAGFIEGGWTGMVDGWYGYHHQNEQGSGYAADLKSTQNAIDKITNKVNSVIEKMNTQFTAVGKEFNHLEKRIENLNKKVDDGFLDIWTYNAELLVLLENERTLDYHDSNVKNLYEKVRSQLKNNAKEIGNGCFEFYHKCDNTCMESVKNGTYDYPKYSEEAKLNREKIDGIKLESTRIYQILAIYSTVASSLVLVVSLGAISFWMCSNGSLQCRICI

SEQ ID NO: 6899 - protein, 566 aa, synthetic construct; identical to SEQ ID NO: 6898
  REGION 1..566: note = hemagglutinin__InfluenzaA__AEI87104

SEQ ID NO: 6900 - protein, 565 aa, synthetic construct; identical to SEQ ID NO: 3626
  REGION 1..565: note = hemagglutinin__InfluenzaA__AEI91963

SEQ ID NO: 6901 - protein, 566 aa, synthetic construct; identical to SEQ ID NO: 3833
  REGION 1..566: note = hemagglutinin__InfluenzaA__AEI91977

SEQ ID NO: 6902 - protein, 566 aa, synthetic construct; identical to SEQ ID NO: 5357
  REGION 1..566: note = hemagglutinin__InfluenzaA__AEI91978

SEQ ID NO: 6903 - protein, 566 aa, synthetic construct; identical to SEQ ID NO: 4299
  REGION 1..566: note = hemagglutinin__InfluenzaA__AEI91998

SEQ ID NO: 6904 - protein, 566 aa, synthetic construct
  REGION 1..566: note = hemagglutinin__InfluenzaA__AEI91999
MKTIIALSYILCLVFAQKLPGNDNSTATLCLGHHAVPNGTIVKTITNDQIEVTNATELVQSSSTGEICNSPHQILDGENCTLIDALLGDPQCDGFQNKKWDLFVERSKAYSNCYPYDVPDYASLRSLVASSGTLEFNNESFNWTGVTQNGTSSACIRRSNNSFFSRLNWLTHLNFKYPALNVTMPNNEQFDKLYIWGVHHPGTDKDQIFLYAQASGRITVSTKRSQQAVIPNIGSRPRVRNIPSRISIYWTIVKPGDILLINSTGNLIAPRGYFKIRSGKSSIMRSDAPIGKCNSECITPNGSILNDKPFQNVNRITYGACPRYVKQNTLKLATGMRNVPEKQTRGIFGAIAGFIENGWEGMVDGWYGFRHQNSEGRGQAADLKSTQAAIDQINGKLNRLIGKTNEKFHQIEKEFSEVEGRIQDLEKYVEDTKIDLWSYNAELLVALENQHTIDLTDSEMNKLFEKTKKQLRENAEDMGNGCFKIYHKCDNACIGSIRNGTYDHDVYRDEALNNRFQIKGVELKSGYKDWILWISFAISCFLLCVALLGFIMWACQKGNIRCNICI

SEQ ID NO: 6905 - protein, 565 aa, synthetic construct
  REGION 1..565: note = hemagglutinin__InfluenzaA__AEI92018
MKVKLLVLLCTFTATYADTICIGYHANNSTDTVDTVLEKNVTVTHSVNLLENSHNGKLCLLKGIAPLQLGNCSVAGWILGNPECELLISKESWSYIVEKPNPENGTCYPGHFADYEELREQLSSVSSFERFEIFPKESSWPNHTVTGVSASCSHNGESSFYRNLLWLTGKNGLYPNLSKSYANNKEKEVLVLWGVHHPPNIADQKTLYHTENAYVSVVSSHYSRKFTPEIAKRPKVRDQEGRINYYWTLLEPGDTIIFEANGNLIAPRYAFALSRGFGSGIINSNAPMDKCDAKCQTPQGAINSSLPFQNVHPVTIGECPKYVRSAKLRMVTGLRNIPSIQSRGLFGAIAGFIEGGWTGMVDGWYGYHHQNEQGSGYAADQKSTQNAINGITNKVNSVIEKMNTQFTAVGKEFNKLERRMENLNKKVDDGFIDIWTYNAELLVLLENERTLDFHDSNVKNLYEKVKSQLKNNAKEIGNGCFEFYHKCNDECMESVKNGTYDYPKYSEESKLNREKIDGVKLESMGVYQILAIYSTVASSLVLLVSLGAISFWMCSNGSLQCRICI

SEQ ID NO: 6906 - protein, 566 aa, synthetic construct; identical to SEQ ID NO: 6881
  REGION 1..566: note = hemagglutinin__InfluenzaA__AEJ10400

SEQ ID NO: 6907 - protein, 566 aa, synthetic construct
  REGION 1..566: note = hemagglutinin__InfluenzaA__AEJ10410
MKTILVVLLYTFATANADTLCIGYHANNSTDTIDTVLEKNVTVTHSVNLLEDKHNGKLCKLRGVAPLHLGKCNIAGWILGNPECESLSTASSWSYIVETSSSDNGTCYPGNFIDYEELREQLSSVSSFERFEIFPKTSSWSDHDSNKGVTAACPHAGAKSFYKNLIWLVKKGNSYPKLSKSYINDKGKEVLVLWGIHHPSTSADQQSLYQNADAYVFVGTSRYSKKFKPEIAIRPKVRDQEGRMNYYWTLVEPGDKITFEATGNLVAPRYAFAMERNAGSGIIISDTPVHDCNTTCQTPKGAINTSLPFQNIHPITIGKCPKYVKSTKLRLATGLRNVPSIQSRGLFGAIAGFIEGGWTGMVDGWYGYHHQNEQGSGYAADLKSTQNAIDKITNKVNSVIEKMNTQFTAVGKEFNHLEKRIENLNKKVDDGFLDIWTYNAELLVLLENERTLDYHDSNVKNLYEKVRSQLKNNAKEIGNGCFEFYHKCDNTCMESVKNGTYDYPKYSEEAKLNREEIDGVKLESTRIYQILAIYSTVASSLVLVVSLGAISFWMCSNGSLQCRICI

SEQ ID NO: 6908 - protein, 566 aa, synthetic construct
  REGION 1..566: note = hemagglutinin__InfluenzaA__AEJ10420
MKAILVVLLYTFATANADTLCIGYHANNSTDTVDTVLEKNVTVTHSVNLLEDRHNGKLCKLRGVAPLHLGKCNIAGWILGNPECESLSTASSWSYIVETSSSDNGTCYPGDFIDYEELREQLSSVSSFERFEIFPKTSSWPDHDSNKGVTAACPHAGAKSFYKNLIWLVKKGNSYPKLSKSYINDKGKEVLVLWGIHHPSTSADQQSLYQNADAYVFVGTSRYSKKFKPEIAIRPKVRDQEGRMNYYWTLVEPGDKITFEATGNLVVPRYAFAMERNAGSGIIISDTPVHDCNTTCQTPKGAINTSLPFQNIHPITIGKCPKYVKSTKLRLATGLRNVPSIQSRGLFGAIAGFIEGGWTGMVDGWYGYHHQNEQGSGYAADLKSTQNAIDKITNKVNSVIEKMNTQFTAVGKEFNHLEKRIENLNKKVDDGFLDIWTYNAELLVLLENERTLDYHDSNVKNLYEKVRSQLKNNAKEIGNGCFEFYHKCDNTCMESVKNGTYDYPKYSEEAKLNREEIDGVKLESTRIYQILAIYSTVASSLVLVVSLGAISFWMCSNGSLQCRICI

SEQ ID NO: 6909 - protein, 566 aa, synthetic construct
  REGION 1..566: note = hemagglutinin__InfluenzaA__AEJ10430
MKAILVVLLYTFATANADTLCIGYHANNSTDTVDTVLEKNVTVTHSVNLLEDKHNGKLCKLRGVAPLHLGKCNIAGWILGNPECESLSTASSWSYIVETSSSDNGTCYPGDFIDYEELREQLSSVSSFERFEIFPKTSSWPNHDSNKGVTTACPHAGAKSFYKNLIWLVKKGNSYPKLSKSYINDKGKEVLVLWGIHHPPTSADQQSLYQNADAYVFVGTSRYSKKFKPEIAIRPKVRDQEGRMNYYWTLVEPGDKITFEATGNLVVPRYAFAMERNAGSGIIISDTPVHDCNTTCQTPKGAINTSLPFQNIHPITIGKCPKYVKSTKLRLATGLRNVPSIQSRGLFGAIAGFIEGGWTGMVDGWYGYHHQNEQGSGYAADLKSTQNAIDEITNKVNSVIEKMNTQFTAVGKEFNHLEKRIENLNKKVDDGFLDIWTYNAELLVLLENERTLDYHDSNVKNLYEKVRSQLKNNAKEIGNGCFEFYHKCDNTCMESVKNGTYDYPKYSEEAKLNREEIDGVKLESTRIYQILAIYSTVASSLVLVVSLGAISFWMCSNGSLQCRICI

SEQ ID NO: 6910 - protein, 566 aa, synthetic construct
  REGION 1..566: note = hemagglutinin__InfluenzaA__AEJ10440
MKAILVVLLYTFATANADTLCIGYHANNSTDTVDTVLEKNVTVTHSVNLLEDKHNGKLCKLRGVAPLHLGKCNIAGWILGNPECESLSTASSWSYIVETSSSDNGTCYPGDFIDYEELREQLSSVSSFERFEIFPKTSSWPNHDSNKGVTAACPHAGAKSFYKNLIWLVKKGNSYPKLSKSYINDKGKEVLVLWGIHHPSTTADQQILYQNADTYVFVGTSRYSKKFKPEIAIRPKVRDQEGRMNYYWTLVEPGDKITFEATGNLVVPRYAFAMERNAGSGIIISDTPVHDCNTTCQTPKGAINTSLPFQNIHPITIGKCPKYVKSTKLRLATGLRNVPSIQSRGLFGAIAGFIEGGWTGMVDGWYGYHHQNEQGSGYAADLKSTQNAIDKITNKVNSVIEKMNTQFTAVGKEFNHLEKRIENLNKKVDDGFLDIWTYNAELLVLLENERTLDYHDSNVKNLYEKVRNQLKNNAKEIGNGCFEFYHKCDNTCMESVKNGTYDYPKYSEEAKLNREEIDGVKLESTRIYQILAIYSTVASSLVLVVSLGAISFWMCSNGSLQCRICI

SEQ ID NO: 6911 - protein, 566 aa, synthetic construct; identical to SEQ ID NO: 6824
  REGION 1..566: note = hemagglutinin__InfluenzaA__AEJ10450

SEQ ID NO: 6912 - protein, 566 aa, synthetic construct
  REGION 1..566: note = hemagglutinin__InfluenzaA__AEJ10480
MKAILVVLLYTFATANADTLCIGYHANNSTDTVDTVLEKNVTVTHSVNLLEDKHNGKLCKLRGVAPLHLGKCNIAGWILGNPECESLSTASSWSYIVETSSSDNGTCYPGDFINYEELREQLSSVSSFERFEIFPKTSSWPNHDSNKGVTAACPQAGAKSFYKNLIWLVKKGNSYPKLSKSYINDKGKEVLVLWGIHHPSTSADQQSLYQSADAYVFVGTSKYSKKFKPEIAVRPKVRDQEGRMNYYWTLVEPGDKITFEATGNLLVPRYAFAMERNAGSGIIISDTPVHDCNTTCQTPKGAINTSLPFQNIHPITIGKCPKYVKSTKLRLATGLRNVPSIQSRGLFGAIAGFIEGGWTGMVDGWYGYHHQNAQGSGYAADLKSTQNAIDKITNKVNSVIEKMNTQFTAVGKEFNHLEKRIENLNKKVDDGFLDIWTYNAELLVLLENERTLDYHDSNVKNLYEKVRSQLKNNAKEIGNGCFEFYHKCDNTCMESVKNGTYDYPKYSEEAKLNREEIDGVKLESTRIYQILAIYSTVASSLVLVVSLGAISFWMCSNGSLQCRICI

SEQ ID NO: 6913 - protein, 566 aa, synthetic construct
  REGION 1..566: note = hemagglutinin__InfluenzaA__AEJ10490
MKAILVVLLYTFATANADTLCIGYHANNSTDTVDTVLEKNVTVTHSVNLLEDKHNGKLCKLRGVAPLHLGKCNIAGWILGNPECESLSTASSWSYIVETSSSDNGTCYPGDFIDYEELREQLSSVSSFERFEIFPKTSSWPNHDSNKGVTTACPHAGAKSFYKNLIWLVKKGNSYPKLSKSYINDKGKEVLVLWGIHHPPTSADQQSLYQNADAYVFVGTSRYSKKFKPEIAIRPKVRDQEGRMNYYWTLVEPGDKITFEATGNLVVPRYAFAMERNAGSGIIISDTPVHDCNTTCQTPKGAINTSLPFQNIHPITIGRCPKYVKSTKLRLATGLRNVPSIQSRGLFGAIAGFIEGGWTGMVDGWYGYHHQNEQGSGYAADLKSTQNAIDGITNKVNSVIEKMNTQFTAVGKEFNHLEKRIENLNKKVDDGFLDIWTYNAELLVLLENERTLDYHDSNVKNLYEKVRSQLKNNAKEIGNGCFEFYHKCDNTCMESVKNGTYDYPKYSEEAKLNREEIDGVKLESTMIYQILAIYSTVASSLVLIVSLGAISFWMCSNGSLQCRICI

SEQ ID NO: 6914 - protein, 566 aa, synthetic construct
  REGION 1..566: note = hemagglutinin__InfluenzaA__AEJ10500
MKAILVVLLYTFATANADTLCIGYHANNSTDTVDTVLEKNVTVTHSVNLLEGKHNGKLCKLRGVAPLHLGKCNIAGWILGNPECESLSTASSWSYIVETSSSDNGTCYPGDFIDYEELREQLSSVSSFERFEIFPKTSSWPNHDSNKGVTAACPHAGAKGFYKNLIWLVKKGNSYPKLNKSYINDKGKEVLVLWGIHHPSTTADQQSLYQNADTYVFVGTSRYSKKFKPEIAIRPKVRDQEGRMNYYWTLVEPGDKITFEATGNLVVPRYAFAMERNAGSGIIISDTPVHDCNTTCQTPKGAINTSLPFQNIHPITIGKCPKYVKSTKLRLATGLRNVPSIQSRGLFGAIAGFIEGGWTGMVDGWYGYHHQNEQGSGYAADLKSTQNAIDKITNKVNSVIEKMNTQFTAVGKEFNHLEKRIENLNKKVDDGFLDIWTYNAELLVLLENERTLDYHDSNVKNLYEKVRNQLKNNAKEIGNGCFEFYHKCDNTCMESVKNGTYDYPKYSEEAKLNREEIDGVKLESTRIYQILAIYSTVASSLVLVVSLGAISFWMCSNGSLQCRICI

SEQ ID NO: 6915 - protein, 566 aa, synthetic construct; identical to SEQ ID NO: 6867
  REGION 1..566: note = hemagglutinin__InfluenzaA__AEJ10510

SEQ ID NO: 6916 - protein, 566 aa, synthetic construct
  REGION 1..566: note = hemagglutinin__InfluenzaA__AEJ10520
MKAILVVLLYTFATANADTLCIGYHANNSTDTVDTVLEKNVTVTHSVNLLEDKHNGKLCKLRGVAPLHLGKCNIAGWILGNPECESLSTASSWSYIVETSSSDNGTCYPGDFIDYEELREQLSSVSSFERFEIFPKTSSWPNYDSNKGVTAACPHAGAKSFYKNLIWLVKKGNSYPKLSKSYINDKGKEVLVLWGIHHPSTSADQQSLYQNADAYVFVGTSRYSKKFKPEIAIRPKVRDQEGRMNYYWTLVEPGDKITFEATGNLVVPRYAFAMERNAGSGIIISDTPVHDCNTTCQTPKGAINTSLPFQNIHPITIGKCSKYVKSTKLRLATGLRNVPSIQSRGLFGAIAGFIEGGWTGMVDGWYGYHHQNEQGSGYAADLKSTQNAIDEITNKVNSVIEKMNTQFTAVGKEFNHLEKRIENLNKKVDDGFLDIWTYNAELLVLLENERTLDYHDSNVKNLYEKVRSQLKNNAKEIGNGCFEFYHKCDNTCMESVKNGTYDYPKYSEEAKLNREEIDGVKLESTRIYQILAIYSTVASSLVLVVSLGAISFWMCSNGSLQCRICI

SEQ ID NO: 6917 - protein, 566 aa, synthetic construct; identical to SEQ ID NO: 2669
  REGION 1..566: note = hemagglutinin__InfluenzaA__AEJ10530

SEQ ID NO: 6918 - protein, 566 aa, synthetic construct; identical to SEQ ID NO: 2669
  REGION 1..566: note = hemagglutinin__InfluenzaA__AEJ10540

SEQ ID NO: 6919 - protein, 566 aa, synthetic construct; identical to SEQ ID NO: 2669
  REGION 1..566: note = hemagglutinin__InfluenzaA__AEJ10550

SEQ ID NO: 6920 - protein, 566 aa, synthetic construct
  REGION 1..566: note = hemagglutinin__InfluenzaA__AEJ10570
MKAILVVLLYTLATANADTLCIGYHANNSTDTVDTVLEKNVTVTHSVNLLEDKHDGKLCKLRGVAPLHLGKCNIAGWILGNPECESLSTASSWSYIVETSSSDNGTCYPGDFIDYEELREQLSSVSSFERFEIFPKTSSWPNHDSNKGVTAACPHAGAKSFYKNLIWLVKKGNSYPKLSKSYINDKGKEVLVLWGIHHPSTSADQQSLYQNADAYVFVGTSRYSKKFKPEIAIRPKVRDQEGRMNYYWTLVEPGDKITFEATGNLVVPRYAFAMERNAGSGIIISDTPVHDCNATCQTPKGAINTSLPFQNIHPITIGKCPKYVKSTKLRLATGLRNVPSIQSRGLFGAIAGFIEGGWTGMVDGWYGYHHQNEQGSGYAADLKSTQNAIDKITNKVNSVIEKMNTQFTAVGKEFNHLEKRIENLNKKVDDGFLDIWTYNAELLVLLENERTLDYHDSNVKNLYEKVRSQLKNNAKEIGNGCFEFYHKCDNTCMESVKNGTYDYPKYSEEAKLNREEIDGVKLESTRIYQILAIYSTVASSLVLVVSLGAISFWMCSNGSLQCRICI

SEQ ID NO: 6921 - protein, 566 aa, synthetic construct; identical to SEQ ID NO: 6920
  REGION 1..566: note = hemagglutinin__InfluenzaA__AEJ10580

SEQ ID NO: 6922 - protein, 566 aa, synthetic construct
  REGION 1..566: note = hemagglutinin__InfluenzaA__AEJ36302
MKAILVVLLYTFATANADTLCIGYHANNSTDTVDTVLEKNVTVTHSVNLLEDKHNGKLCKLRGVAPLHLGKCNIAGWILGNPECESLSTASSWSYIVETSSSYNGTCYPGDFIDYEELREQLSSVSSFERFEIFPKTSSWPNHDPNKGVTAACPHAGAKSFYKNLIWLVKKGNSYPKLSKSYINDKGKEVLVLWGIHHPSTSADQQRLYQNADAYAFVGTSRYSKKFKPEIAIRPKVRDQEGRMNYYWTLVEPGDKITFEATGNLVVPRYAFAMERNAGSGIIISDTPAHDCNTTCQTPKGAINTSLPFQNVHPITIGKCPKYVKSTKLRLATGLRNVPSIQSRGLFGAIAGFIEGGWTGMVDGWYGYHHQNEQGSGYAADLKSTQNAFDEITNKVNSVIEKMNTQFTAVGKEFNHLEKRIENLNKKVDDGFLDIWTYNAELLVLLENERTLDYHDSNVKNLYEKVRSQLKNNAKETGNGCFEFYHKCDNTCMESVKNGTYDYPKYSEEAKLNREEIDGVKLESTRIYQILAIYSTVASSLVLVVSLGAISFWMCSNGSLQCRICI

SEQ ID NO: 6923 - protein, 566 aa, synthetic construct
  REGION 1..566: note = hemagglutinin__InfluenzaA__AEJ36312
MKAILVVLLYTFATANADTLCIGYHANNSTDTVDTVLEKNVTVTHSVNLLEDKHNGKLCKLRGVAPLHLGKCNIAGWILGNPECESLSTASSWSYIVETSSSDNGTCYPGDFIDYEELREQLSSVSSFERFEIFPKTSSWPDHDSNKGVTAACPHAGAKSFYKNLIWLVKKGNSYPKLSKSYINDKGKEVLVLWGIHHPSTSADQQSLYQNADAYVFVGTSRYSKKFKPEIAIRPKVRDQEGRMNYYWTLVEPGDKITFEATGNLVVPRYAFAMERNAGSGIIISDTPVHDCNTTCQTPKGAINTSLPFQNIHPITIGKCPKYVKSTKLRLATGLRNVPSIQSRGLFGAIAGFIEGGWTGMVDGWYGYHHQNEQGSGYAADLKSTQNAIDKITNKVNSVIEKMNIQFTAVGKEFNHLEKRIENLNKKVDDGFLDIWTYNAELLVLLENERTLDYHDSNVKNLYEKVRSQLKNNAKEIGNGCFEFYHKCDNTCMESVKNGTYDYPKYSEEAKLNREEIDGVKLESTRIYQILAIYSTVASSLVLVVSLGAISFWMCSNGSLQCRICI

SEQ ID NO: 6924 - protein, 566 aa, synthetic construct
  REGION 1..566: note = hemagglutinin__InfluenzaA__AEJ37853
MKAILVVLLYTFATANADTLCIGYHANNSTDTVDTVLEKNVTVTHSVNLLEDKHNGKLCKLRGVAPLHLGKCNIAGWILGNPECESLSTASSWSYIVEASSSDNGTCYPGDFIDYEELREQLSSVSSFERFEIFPKTSSWPNHDSNKGVTAACPHAGAKSFYKNLIWLVKKGNSYPKLSKSYINDKGKEVLVLWGIHHPSTSADQQSLYQNADAYVFVGTSRYSKKFKPEIAIRPKVRDQEGRMNYYWTLVEPGDKITFEATGNLVVPRYAFAMERNAGSGIIISDTPVHDCNTTCQTPKGAINTSLPFQNIHPITIGKCPKYVKSTKLRLATGLRNVPSIQSRGLFGAIAGFIEGGWTGMVDGWYGYHHQNEQGSGYAADLKSTQNAIDKITNKVNSVIEKMNTQFTAVGKEFNHLEKRIENLNKKVDDGFLDIWTYNAELLVLLENERTLDYHDSNVKNLYEKVRSQLKNNAKEIGNGCFEFYHKCDNMCMESVKNGTYDYPKYSEEAKLNREEIDGVKLESTRIYQILAIYSTVASSLVLVVSLGAISFWMCSNGSLQCRICI

SEQ ID NO: 6925 - protein, 566 aa, synthetic construct
  REGION 1..566: note = hemagglutinin__InfluenzaA__AEJ37863
MKAILVVLLYTFATANADTLCIGYHANNSTDTVDTVLEKNVTVTHSVNLLEDKHNGKLCKLRGVAPLHLGKCNIAGWILGNPECESLSTASSWSYIVETSSSDNGTCYPGDFIDYEELREQLSSVSSFERFEIFPKTSSWPNHDSNKGVTAACPHAGAKSFYKNLIWLVKKGNSYPKLSKSYINDKGKEVLVLWGIHHPSTSADQQSLYQNADAYVFVGTSRYSKKFKPEIAIRPKLRDQEGRMNYYWTLVEPGDKITFEATGNLVVPRYAFAMERNAGSGIIISDTPVHDCNTTCQTPKGAINTSLPFQNIHPITIGKCPKYVKSTKLRLATGLRNVPSIQSRGLFGAIAGFIEGGWTGMVDGWYGYHHQNEQGSGYAADLKSTQNAIDKITNKVNSVIEKMNTQFTAVGKEFNHLEKRIENLNKKVDDGFLDIWTYNAELLVLLENERTLDYHDSNVKNLYEKVRSQLKNNAKEIGNGCFEFYHKCDNTCMESVKNGTYDYPKYSEEAKLNREEIDGVKLESTRIYQILAIYSTVASSLVLVVSLGAISFWMCSNGSLQCRICI

SEQ ID NO: 6926 - protein, 566 aa, synthetic construct; identical to SEQ ID NO: 3833
  REGION 1..566: note = hemagglutinin__InfluenzaA__AEJ37873

SEQ ID NO: 6927 - protein, 566 aa, synthetic construct; identical to SEQ ID NO: 6881
  REGION 1..566: note = hemagglutinin__InfluenzaA__AEJ37883

SEQ ID NO: 6928 - protein, 566 aa, synthetic construct
  REGION 1..566: note = hemagglutinin__InfluenzaA__AEJ37893
MKAILVVLLYTFATTNADTLCIGYHANNSTDTVDTVLEKNVTVTHSVNLLEDKHNGKLCKLRGVAPLHLGKCNIAGWILGNPECESLSTASSWSYIVETSSSDNGTCYPGNFIDYEELREQLSSVSSFERFEIFPKTSSWPDHDSNKGVTAACPHAGAKSFYKNLIWLVKKGNSYPKLSKSYINDKGKEVLVLWGIHHPSTSADQQSLYQNADAYVFVGTSRYSKKFKPEIAIRPKVRDQEGRMNYYWTLVEPGDKITFEATGNLVAPRYAFAMERNAGSGIIISDKPVHDCNTTCQTPKGAINTSLPFQNIHPITIGKCPKYVKSTKLRLATGLRNVPSIQSRGLFGAIAGFIEGGWTGMVDGWYGYHHQNEQGSGYAADLKSTQNAIDKITNKVNSVIEKMNTQFTAVGKEFNHLEKRIENLNKKVDDGFLDIWTYNAELLVLLENERTLDYHDSNVKNLYEKVRSQLKNNAKEIGNGCFEFYHKCDNTCMESVKNGTYDYPKYSEEAKLNREEIDGVKLESTRIYQILAIYSTVASSLVLVVSLGAISFWMCSNGSLQCRICI

SEQ ID NO: 6929 - protein, 566 aa, synthetic construct; identical to SEQ ID NO: 6881
  REGION 1..566: note = hemagglutinin__InfluenzaA__AEJ37903

SEQ ID NO: 6930 - protein, 566 aa, synthetic construct
  REGION 1..566: note = hemagglutinin__InfluenzaA__AEJ37923
MKAILVVLLYTFATANADTLCIGYHANNSTDTVDTVLEKNVTVTHSVNLLEDKHNGKLCKLRGVAPLHLGKCNIAGWILGNPECESLSTASSWSYIVETSSSDNGTCYPGNFIDYEELREQLSSVSSFERFEIFPKTSSWPDHDSNKGVTAACPHAGAKSFYKNLIWLVKKGNSYPKLSKSYINDKGKEVLVLWGIHHPSTSADQQSLYQNADAYVFVGTSRYSKKFKPEIAIRPKVRDQEGRMNYYWTLVEPGDKITFEATGNLVAPRYAFAIERMAGSGIIISDTPVHDCNTTCQTPKGAINTSLPFQNIHPITIGKCPKYVKSTKLRLATGLRNVPSIQSRGLFGAIAGFIEGGWTGMVDGWYGYHHQNEQGSGYAADLKSTQNAIDKITNKVNSVIEKMNTQFTAVGKEFNHLEKRIENLNKKVDDGFLDIWTYNAELLVLLENERTLDYHDSNVKNLYEKVRSQLKNNAKEIGNGCFEFYHKCDNTCMESVKNGTYDYPKYSEEAKLNREEIDGVKLESTRIYQILAIYSTVASSLVLVVSLGAISFWMCSNGSLQCRICI

SEQ ID NO: 6931 - protein, 566 aa, synthetic construct
  REGION 1..566: note = hemagglutinin__InfluenzaA__AEJ37943
MKAILVVLLYTFATANADTLCIGYHANNSTDTVDTVLEKNVTVTHSVNLLEDKHNGKLCKLRGVAPLHLGKCNIAGWILGNPECESLSTASSWSYIVETSSSDNGTCYPGDFIDYEELREQLSSVSSFERFEIFPKTSSWPNHDSNKGVTAACPHAGAKSFYKNLIWLVKKGNSYPKLSKSYINDKGKEVLVLWGIHHPSTSADQQSLYQNADAYVFVGTSRYSKKFKPEIAIRPKVRDQEGRMNYHWTLVEPGDKITFEATGNLVVPRYAFAMERNAGSGIIISDTPVHDCNTTCQTPKGAINTSLPFQNIHPITIGKCPKYVKSTKLRLATGLRNVPSIQSRGLFGAIAGFIEGGWTGMVDGWYGYHHQNEQGSGYAADLKSTQNAIDKITNKVNSVIEKMNTQFTAVGKEFNHLEKRIENLNKKVDDGFLDIWTYNAELLVLLENERTLDYHDSNVKNLYEKVRSQLKNNAKEIGNGCFEFYHKCDNTCMESVKNGTYDYPKYSEEAKLNREEIDGVKLESTRIYQILAIYSTVASSLVLVVSLGAISFWMCSNGSLQCRICI

SEQ ID NO: 6932 - protein, 566 aa, synthetic construct; identical to SEQ ID NO: 6881
  REGION 1..566: note = hemagglutinin__InfluenzaA__AEJ37953

SEQ ID NO: 6933 - protein, 566 aa, synthetic construct
  REGION 1..566: note = hemagglutinin__InfluenzaA__AEJ37963
MKAILVVLLYTFATANADTLCIGYHANNSTDTVDTVLEKNVTVTHSVNLLEDKHNGKLCKLRGVAPLHLGKCNIAGWILGNPECESLSTASSWSYIVETSSSDNGTCYPGNFIDYEELREQLSSVSSFERFEIFPKTSSWPDHDSNKGVTAACPHAGAKSFYKNLIWLVKKGNSYPKLSKSYINDKGKEVLVLWGIHHPSTSADQQSLYQNADAYVFVGTSRYSKKFKPEIAIRPKVRDQEGRMNYYWTLVEPGDKITFEATGNLVAPRYAFAMERNAGSGIIISDTPVHDCNTTCQTPKGATNTSLPFQNIHPITIGKCPKYVKSTKLRLATGLRNVPSIQSRGLFGAIAGFIEGGWTGMVDGWYGYHHQNEQGSGYAADLKSTQNAIDKITNKVNSVIEKMNTQFTAVGKEFNHLEKRIENLNKKVDDGFLDIWTYNAELLVLLENERTLDYHDSNVKNLYEKVRSQLKNNAKEIGNGCFEFYHKCDNTCMESVKNGTYDYPKYSEEAKLNREEIDGVKLESTRIYQILAIYSTVASSLVLVVSLGAISFWMCSNGSLQCRICI

SEQ ID NO: 6934 - protein, 566 aa, synthetic construct; identical to SEQ ID NO: 3833
  REGION 1..566: note = hemagglutinin__InfluenzaA__AEJ37973

SEQ ID NO: 6935 - protein, 566 aa, synthetic construct; identical to SEQ ID NO: 6881
  REGION 1..566: note = hemagglutinin__InfluenzaA__AEJ37983

SEQ ID NO: 6936 - protein, 566 aa, synthetic construct; identical to SEQ ID NO: 5533
  REGION 1..566: note = hemagglutinin__InfluenzaA__AEK21369

SEQ ID NO: 6937 - protein, 565 aa, synthetic construct; identical to SEQ ID NO: 3616
  REGION 1..565: note = hemagglutinin__InfluenzaA__AEK21380

SEQ ID NO: 6938 - protein, 566 aa, synthetic construct
  REGION 1..566: note = hemagglutinin__InfluenzaA__AEK21396
MKAILVVLLYTFATANADTLCIGYHANNSTDTVDTVLEKNVTVTHSVDLLEDKHNGKLCKLRGVAPLHLGKCNIAGWILGNPECESLSTASSWSYIVETSSSDNGTCYPGDFIDYEELREQLSSVSSFERFEIFPKTSSWPNHDSNKGVTAACPHAGAKSFYKNLIWLVKKGNSYPKLSKSYINDKGKEVLVLWGIHHPSTSADQQSLYQNADAYVFVGTSKYSKKFKPEIAIRPKVRDQEGRMNYYWTLVEPGDKITFEATGNLLVPRYAFEMERKSGSGIIISDTPVHDCNTTCQTPKGAINTSLPFQNIHPITIGKCPKYVKSTKLRLATGLRNVPSIQSRGLFGAIAGFIEGGWTGMVDGWYGYHHQNEQGSGYAADLKSTQNAIDEITNKVNSVIEKMNTQFTAVGKEFNHLEKRIENLNKKVDDGFLDIWTYNAELLVLLENERTLDYHDSNVKNLYEKVRSQLKNNAKEIGNGCFEFYHKCDNTCMESVKNGTYDYPKYSEEAKLNREKIDGVKLESTRIYQILAIYSTVASSLVLVVSLGAISFWMCSNGSLQCRICI

SEQ ID NO: 6939 - protein, 566 aa, synthetic construct
  REGION 1..566: note = hemagglutinin__InfluenzaA__AEK21406
MKAILVVLLYTFATANADTLCIGYHANNSTDTVDTVLEKNVTVTHSVNLLEDKHNGKLCKLRGVAPLHLGKCNIAGWILGNPECESLSTASSWSYIVETSSSDNGTCYPGDFIDYEELREQLSSMSSFERFEIFPKTSSWPDHDSNKGVTAACPHAGAKSFYKNLIWLVKKGNSYPKLSKSYINDKGKEVLVLWGIHHPSTSADQQSLYQNADAYVFVGTSRYSKKFKPEIAIRPKVRDQEGRMNYYWTLVEPGDKITFEATGNLVVPRYAFAMERNAGSGIIISDTPVHDCNTTCQTPKGAINTSLPFQNIHPITIGKCPKYVKSTKLRLATGLRNVPSIQSRGLFGAIAGFIEGGWTGMVDGWYGYHHQNEQGSGYAADLKSTQNAIDKITNKVNSVIEKMNTQFTAVGKEFNHLEKRIENLNKKVDDGFLDIWTYNAELLVLLENERTLDYHDSNVKNLYEKVRSQLKNNAKEIGNGCFEFYHKCDNTCMESVKNGTYDYPKYSEEAKLNREEIDGVKLESTRIYQILAIYSTVASSLVLVVSLGAISFWMCSNGSLQCRICI

SEQ ID NO: 6940 - protein, 566 aa, synthetic construct
  REGION 1..566: note = hemagglutinin__InfluenzaA__AEK21416
MKAILVVLLYTFATANADTLCIGYHANNSTDTVDTVLEKNVTVTHSVNLLEDKHNGKLCKLRGVAPLHLGKCNIAGWILGNPECESLSTASSWSYIVETSSSDNGTCYPGVFIDYEELREQLSSVSSFERFEIFPKTSSWPNHDSNKGVTAACPHAGAKSFYKNLIWLVKKGNSYPKLSKSYINDKGKEVLVLWGIHHPSTTADQQSLYQNADAYVFVGTSRYSKKFKPEIAVRPKVRDQEGRMNYYWTLVEPGDKITFEATGNLVVPRYAFAMERNAGSGIIISDTPVHDCNTTCQTPKGAINTSLPFQNIHPITIGKCPKYVKSTKLRLATGLRNVPSIQSRGLFGAIAGFIEGGWTGMVDGWYGYHHQNEQGSGYAADLKSTQNAIDKITNKVNSVIEKMNTQFTAVGKEFNHLEKRIENLNKKVDDGFLDIWTYNAELLVLLENERTLDYHDSNVKNLYEKVRNQLKNNAKEIGNGCFEFYHKCDNTCMESVKNGTYDYPKYSEEAKLNREEIDGVKLESTRIYQILAIYSTVASSLVLVVSLGAISFWMCSNGSLQCRICI

SEQ ID NO: 6941 - protein, 566 aa, synthetic construct
  REGION 1..566: note = hemagglutinin__InfluenzaA__AEK21426
MKAILVVLLYTFATANADTLCIGYHANNSTDTVDTVLEKNVTVTHSVNLLEDKHNGKLCKLRGVAPLHLGKCNIAGWILGNPECESLSTASSWSYIVETSSSDNGTCYPGNFIDYEELREQLSSVSSFERFEIFPKTSSWPDHDSNKGVTAACPHAGAKSFYKNLIWLVKKGNSYPKLSKSYINDKGKEVLVLWGIHHPSTSADQQSLYQNADAYVFVGTSRYSKKFKPEIAIRPKVRDQEGRMNYYWTLVEPGDKITFEATGNLVAPRYAFAMERNAGSGIIISDTPVHDCNTTCQTPKGAINTSLPFQNIHPITIGKCPKYVRSTKLRLATGLRNVPSIQSRGLFGAIAGFIEGGWTGMVDGWYGYHHQNEQGSGYAADLKSTQNAIDKITNKVNSVIEKMNTQFTAVGKEFNHLEKRIENLNKKVDDGFLDIWTYNAELLVLLENERTLDYHDSNVKNLYEKVRSQLKNNAKEIGNGCFEFYHKCDNTCMESVKNGTYDYPKYSEEAKLNREEIDGVKLESTRIYQILAIYSTVASSLVLVVSLGAISFWMCSNGSLQCRICI

SEQ ID NO: 6942 - protein, 566 aa, synthetic construct; identical to SEQ ID NO: 3833
  REGION 1..566: note = hemagglutinin__InfluenzaA__AEK21436

SEQ ID NO: 6943 - protein, 566 aa, synthetic construct
  REGION 1..566: note = hemagglutinin__InfluenzaA__AEK21456
MKAILVVLLYTFATANADTLCIGYHANNSTDTVDTVLEKNVTVTHSVNLLEDKHNGKLCKLRGVAPLHLGKCNIAGWILGNPECESLSTASSWSYIVETSSSDNGTCYPGDFIDYEELREQLSSVSSFERFEIFPKTSSWPNHDSNKGVTAACPHAGAKSFYKNLIWLVKKGNSYPKLSKSYINDKGKEVLVLWGIHHPSTSADQQSLYQNADAYVFVGTSRYSKKFKPEIAIRPKVRDQEGRMNYYWTLVEPGDKITFEATGNLVVPRYAFAMERNAGSGIIISDTPVHDCNTTCQTPKGAINTSLPFQNIHPITIGKCPKYVKSTKLRLATGLRNVPSIQSRGLFGAIAGFIEGGWTGMVDGWYGYHHQNEQGSGYAADLKSTQNAIDKITNKVNSVIEKMNTQFTAVGKEFNHLEKRIENLNKKVDDGFLDIWTYNAELLVLLENERTLDYHDSNVKNLYEKVRSQLKNNAKEIGNGCFEFYHKCDNTCMENVKNGTYDYPKYSEEAKLNREEIDGVKLESTRIYQILAIYSTVASSLVLVVSLGAISFWMCSNGSLQCRICI

SEQ ID NO: 6944 - protein, 566 aa, synthetic construct; identical to SEQ ID NO: 6881
  REGION 1..566: note = hemagglutinin__InfluenzaA__AEK21466

SEQ ID NO: 6945 - protein, 566 aa, synthetic construct; identical to SEQ ID NO: 6881
  REGION 1..566: note = hemagglutinin__InfluenzaA__AEK21476

SEQ ID NO: 6946 - protein, 566 aa, synthetic construct; identical to SEQ ID NO: 3833
  REGION 1..566: note = hemagglutinin__InfluenzaA__AEK21486

SEQ ID NO: 6947 - protein, 566 aa, synthetic construct
  REGION 1..566: note = hemagglutinin__InfluenzaA__AEK28774
MKTIIALSYILCLVFAQKLPGNDNSTATLCLGHHAVPNGTIVKTITNDQIEVTNATELVQSSSTGEICDSPHQILDGKNCTLIDALLGDPQCDGFQNKKWDLFVERSKAYSNCYPYDVPDYASLRSLVASSGTLEFNNESFNWTGVTQNGTSSACIRRSKNSFFSRLNWLTHLNFKYPALNVTMPNNEQFDKLYIWGVHHPGTDKDQIFLYAQASGRITVSTKRSQQTAIPNIGSRPRVRNIPSRISIYWTIVKPGDILLINSTGNLIAPRGYFKIRSGKSSIMRSDAPIGKCNSECITPNGSIPNDKPFQNVNRITYGACPRYVKQNTLKLATGMRNVPEKQTRGIFGAIAGFIENGWEGMVDGWYGFRHQNSEGRGQAADLKSTQAAIDQINGKLNRLIGKTNEKFHQIEKEFSEVEGRIQDLEKYVEDTKIDLWSYNAELLVALENQHTIHLTDSEMNKLFEKTKKQLRENAEDMGNGCFKIYHKCDNACIGSIRNGTYDHDVYRDEALNNRFQIKGVELKSGYKDWILWISFAISCFLLCVALLGFIMWACQKGNIRCNICI

SEQ ID NO: 6948 - protein, 566 aa, synthetic construct
  REGION 1..566: note = hemagglutinin__InfluenzaA__AEK28785
MKTIIALSYILCLVFAQNLPGNDNSAATLCLGHHAVPNGTIVKTITNDQVEVTNATELVQNSSTGEICDSPHQILDGENCTLIDALLGDPQCDGFQNKKWDLFVERSKAYSNCYPYDVPDYASLRSLVASSGTLEFNNESFNWTGVTQNGTSSACIRRSNNSFFSRLNWLTHLNFKYPALNVTMPNNEQFDKLYIWGVHHPGTDKDQIFLYAQASGRITVSTKRSQQAVIPNIGSRPRVRNIPSRISIYWTIVKPGDILLINSTGNLIAPRGYFKIRSGKSSIMRSDAPIGKCNSECITPNGSIPNDKPFQNVNRITYGACPRYVKQNTLKLATGMRNVPEKQTRGIFGAIAGFIENGWEGMVDGWYGFRHQNSEGRGQAADLKSTQAAIDQINGKLNRLIGKTNEKFHQIEKEFSEVEGRIQDLEKYVEDTKIDLWSYNAELLVALENQHTIHLTDSEMNKLFEKTKKQLRENAEDMGNGCFKIYHKCDNACIGSIRNGTYDHDVYRDEALNNRFQIKGVELKSGYKDWILWISFAISCFLLCVALLGFIMWACQKGNIRCNICI

SEQ ID NO: 6949 - protein, 566 aa, synthetic construct
  REGION 1..566: note = hemagglutinin__InfluenzaA__AEK28796
MKTIIALSYILCLVFAQKLPGNDNSTATLCLGHHAVPNGTIVKTITNDKIEVTNATELVQSSSTGEICDSPHQILDGKNCTLIDALLGDPQCDGFQNKKWDLFVERSKAYSNCYPYDVPDYASLRSLVASSGTLEFNNESFNWTGVTQDGTSSACIRGSKNSFFSRLNWLTHLNFKYPALNVTMPNNEQFDKLYIWGVHHPGTDKDQIFLYAQASGRITVSTKRSQQAAIPNIGSRPRVRNIPSRISIYWTIVKPGDILLINSTGNLIAPRGYFKIRSGKSSIMRSDAPIGKCNSECITPNGSIPNDKPFQNVNRITYGACPRYVKQNTLKLATGMRNVPEKQTRGIFGAIAGFIENGWEGMVDGWYGFRHQNSEGRGQAADLKSTQAAIDQINGKLNRLIGKTNEKFHQIEKEFSEVEGRIQDLEKYVEDTKIDLWSYNAELLVALENQHTIHLTDSEMNKLFEKTKKQLRENAEDMGNGCFKIYHKCDNACIGSIRNGTYDHDVYRDEALNNRFQIKGVELKSGYKDWILWISFAISCFLLCVALLGFIMWACQKGNIRCNICI

SEQ ID NO: 6950 - protein, 566 aa, synthetic construct
  REGION 1..566: note = hemagglutinin__InfluenzaA__AEK28807
MKTIIALSYILCLVFAQKLPGNDNSTATLCLGHHAVPNGTIVKTITNDQIEVTNATELVQSSSTGEICDSPHQILDGENCTLIDALLGDPQCDGFQNKKWDLFVERSKAYGNCYPYDVPDYASLRSLVASSGTLEFNNESFNWTGVTQNGTSSACIRKSNNSFFSRLNWLTHLKFKYPALNVTMPNNEQFDKLYIWGVHHPGTDNDQIFLYAQASGRITVSTKRSQQTVIPNIGSRPRVRNIPSRISIYWTIVKPGDILLINSTGNLIAPRGYFKIRSGKSSIMRSDAPIGKCNSECITPNGSIPNDKPFQNVNRITYGACPRYVKQNTLKLATGMRNVPEKQTRGIFGAIAGFIENGWEGMVDGWYGFRHQNSEGRGQAADLKSTQAAIDQINGKLNRLIGKTNEKFHQIEKEFSEVEGRIQDLEKYVEDTKIDLWSYNAELLVALENQHTIHLTDSEMNKLFEKTKKQLRENAEDMGNGCFKIYHKCDNACIGSIRNGTYDHDVYRDEALNNRFQIKGVELKSGYKDWILWISFAISCFLLCVALLGFIMWACQKGNIRCNICI

SEQ ID NO: 6951 - protein, 566 aa, synthetic construct
  REGION 1..566: note = hemagglutinin__InfluenzaA__AEK28818
MKTIIALSYILCLVFAQKLPGNDNSTATLCLGHHAVPNGTIVKTITNDQIEVTNATELVQSSSTGEICDSPHQILDGKNCTLIDALLGDPQCDGFQNKKWDLFVERSKAYSNCYPYDVPDYASLRSLVASSGTLEFNNESFNWTGVTQNGTSSACIRRSKNSFFSRLNWLTHLNFKYPALNVTMPNNEQFDKLYIWGVHHPGTDKDQIFLYAQASGRITVSTKRSQQTVIPNIGSRPRVRNIPSRISIYWTIVKPGDILLINNTGNLIAPRGYFKIRSGKSSIMRSDAPIGKCNSECITPNGSIPNDKPFQNVNRITYGACPRYVKQNTLKLATGMRNVPEKQTRGIFGAIAGFIENGWEGMVDGWYGFRHQNSEGRGQAADLKSTQAAIDQINGKLNRLIGKTNEKFHQIEKEFSEVEGRIQDLEKYVEDTKIDLWSYNAELLVALENQHTIHLTDSEMNKLFEKTKKQLRENAEDMGNGCFKIYHKCDNACIGSIRNGTYDHDVYRDEALNNRFQIKGVELKSGYKDWILWISFAISCFLLCVALLGFIMWACQKGNIRCNICI

SEQ ID NO: 6952 - protein, 566 aa, synthetic construct
  REGION 1..566: note = hemagglutinin__InfluenzaA__AEK28828
MKTIIALSYILCLVFAQKLPGNDNSTATLCLGHHAVPNGTIVKTITNDQIEVTNATELVQSSSTGEICDSPHQILDGKNCTLIDALLGDPQCDGFQNKKWDLFVERSKAYSNCYPYDVPDYASLRSLVASSGTLEFNNESFNWTGVTQNGTSSACIRRSKNSFFSRLNWLTHLNFKYPALNVTMPNNEQFDKLYIWGVHHPGTDKDQIFLYAQASGRITVSTKRSQQTVIPNIGSRPRVRDIPSRISIYWTIVKPGDILLINSTGNLIAPRGYFKIRSGKSSIMRSDAPIGKCNSECITPNGSIPNDKPFQNVNRITYGACPRYVKQNTLKLATGMRNVPEKQTRGIFGAIAGFIENGWEGMVDGWYGFRHQNSEGRGQAADLKSTQAAIDQINGKLNRLIGKTNEKFHQIEKEFSEVEGRIQDLEKYVEDTKIDLWSYNAELLVALENQHTIHLTDSEMNKLFEKTKKQLRENAEDMGNGCFKIYHKCDNACIGSIRNGTYDHDVYRDEALNNRFQIKGVELKSGYKDWILWISFAISCFLLCVALLGFIMWVCQKGNIRCNICI

SEQ ID NO: 6953 - protein, 566 aa, synthetic construct; identical to SEQ ID NO: 2434
  REGION 1..566: note = hemagglutinin__InfluenzaA__AEK28839

SEQ ID NO: 6954 - protein, 566 aa, synthetic construct
  REGION 1..566: note = hemagglutinin__InfluenzaA__AEK28850
MKTIIALSYILCLVFAQKLPGNDNSTATLCLGHHAVPNGTIVKTITNDQIEVTNATELVQSSSTGEICDSPHQILDGENCTLIDALLGDPQCDGFQNKKWDLFVERSKAYSNCYPYDVPDYASLRSLVASSGTLEFNNESFNWTGVTQNGTSSACIRRSNNSFFSRLNWLTHLKFKYPALNVTMPNNEQFDKLYIWGVHHPGTDNDQIFLYAQASGRITVSTKRSQQTVIPNIGSRLRVRNIPSRISIYWTIVKPGDILLINSTGNLIAPRGYFKIRSGKSSIMRSDAPIGKCNSECITPNGSIPNDKPFQNVNRITYGACPRYVKQNTLKLATGMRNVPEKQTRGIFGAIAGFIENGWEGMVDGWYGFRHQNSEGRGQAADLKSTQAAIDQINGKLNRLIGKTNEKFHQIEKEFSEVEGRIQDLEKYVEDTKIDLWSYNAELLVALENQHTIDLTDSEMNKLFEKTKKQLRENAEDMGNGCFKIYHKCDNACIGSIRNGTYDHDVYRDEALNNRFQIKGVELKSGYKDWILWISFAISCFLLCVALLGFIMWACQKGNIRCNICI

SEQ ID NO: 6955 - protein, 566 aa, synthetic construct
  REGION 1..566: note = hemagglutinin__InfluenzaA__AEK28861
MKTIIALSYILCLVFAQKLPGNDNSTATLCLGHHAVPNGTIVKTITNDQIEVTNATELVQSSSTGEICDSPHQILDGENCTLIDALLGDPQCDGFQNKKWDLFVERSKAYSNCYPYDVPDYASLRSLVASSGTLEFNNESFNWTGVTQNGTSSACIRRSNNSFFSRLNWLTHLKFKYPALNVTMPNNEQFDKLYIWGVHHPGTDNDQIFLYAQASGRITVSTKRSQQTVIPNIGSRPRVRNIPSRISIYWTIVKPGDILLINSTGNLIAPRGYFKIRSGKSSIMRSDAPIGKCNSECITPNGSIPNDKPFQNVNRITYGACPRYVKQNTLKLATGMRNVPEKQTRGIFGAIAGFIENGWEGMVDGWYGFRHQNSEGRGQAADLKSTQAAIDQINGKLNRLIGKTNEKFHQIEKEFSEVEGRIQDLEKYVEDTKIDLWSYNAELLVALENQHTIDLTDSEMNKLFEKTKKQLKENAEDMGNGCFKIYHKCDNACIGSIRNGTYDHDVYRDEALNNRFHIKGVELKSGYKDWILWISFATSCFLLCVALLGFIMWACQKGNIRCNICI

SEQ ID NO: 6956 - protein, 566 aa, synthetic construct
  REGION 1..566: note = hemagglutinin__InfluenzaA__AEK28872
MKTIIALSYILCLVFAQKLPGNDNSTATLCLGHHAVPNGTIVKTITNDQIEVTNATELVQSSSTGEICDSPHQILDGENCTLIDALLGDPQCDGFQNKKWDLFVERSKAYSNCYPYDVPDYASLRSLVASSGTLEFNNESFNWTGVTQNGTSSACIRRSNNSFFSRLNWLTHLKFKYPALNVTMPNNEQFDKLYIWGVHHPGTDNDQIFLYAQASGRITVSTKRSQQTVIPNIGSRPRVRDIPSRISIYWTIVKPGDILLINSTGNLIAPRGYFKIRSGKSSIMRSDAPIGKCNSECITPNGSIPNDKPFQNVNRITYGACPRYVKQNTLKLATGMRNVPEKQTRGIFGAIAGFIENGWEGMVDGWYGFRHQNSEGRGQAADLKSTQAAIDQINGKLNRLIGKTNEKFHQIEKEFSEVEGRIQDLEKYVEDTKIDLWSYNAELLVALENQHTIHLTDSEMNKLFEKTKKQLRENAEDMGNGCFKIYHKCDNACIGSIRNGTYDHDVYRDEALNNRFQIKGVELKSGYKDWILWISFAISCFLLCVALLGFIMWACQKGNIRCNICI

SEQ ID NO: 6957 - protein, 566 aa, synthetic construct
  REGION 1..566: note = hemagglutinin__InfluenzaA__AEK28883
MKTIIALSYILCLVFAQKLPGNDNSTATLCLGHHAVPNGTIVKTITNDQIEVTNATELVQSSSTGEICDSPHQILDGENCTLIDALLGDPQCDGFQNKKWDLFVERSKAYSNCYPYDVPDYASLRSLIASSGTLEFNNESFNWTGVTQNGTSSACIRRSSNSFFSRLNWLTHLKFKYPALNVTMPNNEQFDKLYIWGVHHPGTDNDQIFLYAQASGRITVSTKRSQQTVIPNIGSRPRVRNIPSRISIYWTIVKPGDILLINSTGNLIAPRGYFKIRSGKSSIMRSDAPIGKCNSECITPNGSIPNDKPFQNVNRITYGACPRYVKQNTLKLATGMRNVPEKQTRGIFGAIAGFIENGWEGMVDGWYGFRHQNSEGRGQAADLKSTQAAIDQINGKLNRLIGKTNEKFHQIEKEFSEVEGRIQDLEKYVEDTKIDLWSYNAELLVALENQHTIHLTDSEMNKLFEKTKKQLRENAEDMGNGCFKIYHKCDNACIGSIRNGTYDHDVYRDEALNNRFQIKGVELKSGYKDWILWISFAISCFLLCVALLGFIMWACQKGNIRCNICI

SEQ ID NO: 6958 - protein, 566 aa, synthetic construct
  REGION 1..566: note = hemagglutinin__InfluenzaA__AEK28894
MKTIIALSYILCLVFAQKLPGNDNSTATLCLGHHAVPNGTIVKTITNDQIEVTNATELVQSSSTGEICDSPHQILDGENCTLIDALLGDPQCDGFQNKKWDLFVERSKAYSNCYPYDVPDYASLRSLVASSGTLEFNNESFNWTGVTQNGTSSACIRRSNNSFFSRLNWLTHLKFKYPALNVTMPNNEQFDKLYIWGVHHPGTDNDQIFLYAQASGRITVSTKRSQQTVIPNIGSRPRVRNIPSRISIYWTIVKPGDILLINSTGNLIAPRGYFKIRSGKSSIMRSDAPIGKCNSECITPNGSIPNDKPFQNVNRITYGACPRYVKQNTLKLATGMRNVPEKQTRGIFGAIAGFIENGWEGMVDGWYGFRHQNSEGRGQAADLKSTQAAIDQINGKLNRLIGKTNEKFHQIEKEFSEVEGRIQDLEKYVEDTKIDLWSYNAELLVALENQHTIHLTDSEMNKLFEKTKKQLRENAEDMGNGCFKIYHKCDNACIGSIRNGTYDHDVYRDEALNNRFQIKGVELKSGYKDWILWISFAISCFLLCVALLGFIMWACQKGNIRCNICI

SEQ ID NO: 6959 - protein, 566 aa, synthetic construct
  REGION 1..566: note = hemagglutinin__InfluenzaA__AEK28905
MKTIIALSYILCLVFAQKLPGNDNSTATLCLGHHAVPNGTIVKTITNDQIEVTNATELVQSSSTGEICDSPHQILDGENCTLIDALLGDPQCDGFQNKKWDLFVERSKAYSNCYPYDVPDYASLRSLVASSGTLEFNNESFNWTGVTQNGTSSACIRRSNNSFFSRLNWLTHLRFKYPALNVTMPNNEQFDKLYIWGVHHPGTDNDQIFPYAQASGRITVSTKRSQQTVIPNIGSRPRVRNIPSRISIYWTIVKPGDILLINSTGNLIAPRGYFKIRSGKSSIMRSDAPIGKCNSECITPNGSIPNDKPFQNVNRITYGACPRYVKQNTLKLATGMRNVPEKQTRGIFGAIAGFIENGWEGMVDGWYGFRHQNSEGRGQAADLKSTQAAIDQINGKLNRLIGKTNEKFHQIEKEFSEVEGRIQDLEKYVEDTKIDLWSYNAELLVALENQHTIDLTDSEMNKLFEKTKKQLRENAEDMGNGCFKIYHKCDNACIGSIRNGTYDHDVYRDEALNNRFQIKGVELKSGYKDWILWISFAISCFLLCVALLGFIMWACQKGNIRCNICI

SEQ ID NO: 6960 - protein, 566 aa, synthetic construct
  REGION 1..566: note = hemagglutinin__InfluenzaA__AEK28916
MKTIIALSYILCLVFAQKLPGNDNSTATLCLGHHAVPNGTIVKTITNDQIEVTNATELVQSSSTGEICDSPHQILDGENCTLIDALLGDPQCDGFQNKKWDLFVERSKAYSNCYPYDVPDYASLRSLVASSGTLEFNNESFNWTGVTQNGTSSACIRRSNNSFFSRLNWLTHLKFKYPALNVTMPNNEQFDKLYIWGVHHPGTDNDQIFLYAQASGRITVSTKRSQQTVIPNIGSRPRIRNIPSRISIYWTIVKPGDILLINSTGNLIAPRGYFKIRSGKSSVMRSDAPIGKCNSECITPNGSIPNDKPFQNVNRITYGACPRYVKQNTLKLATGMRNVPEKQTRGIFGAIAGFIENGWEGMVDGWYGFRHQNSEGRGQAADLKSTQAAIDQINGKLNRLIGKTNEKFHQIEKEFSEVEGRIQDLEKYVEDTKIDLWSYNAELLVALENQHTIDLTDSEMNKLFEKTKKQLRENAEDMGNGCFKIYHKCDNACIGSIRNGTYDHDVYRDEALNNRFQIKGVELKSGYKDWILWISFAISCFLLCVALLGFIMWACQKGNIRCNICI

SEQ ID NO: 6961 - protein, 566 aa, synthetic construct
  REGION 1..566: note = hemagglutinin__InfluenzaA__AEK28927
MKTIIALSYILCLVFAQKLPGNDNSTATLCLGHHAVPNGTIVKTITNDQIEVTNATELVQSSSTGEICDSPHQILDGENCTLIDALLGDPQCDGFQNKKWDLFVERSKAYSNCYPYDVPDYASLRSLIASSGTLEFNNESFNWTGVTQNGTSSACIRRSNNSFFSRLNWLTHLKFKYPALNVTMPNNEQFDKLYIWGVHHPGTDNDQIFLYAQASGRITVSTKRSQQTVIPNIGSRPRVRNIPSRISIYWTIVKPGDILLINSTGNLIAPRGYFKIRSGKSSIMRSDAPIGKCNSECITPNGSIPNDKPFQNVNRITYGACPRYVKQNTLKLATGMRNVPEKQTRGIFGAIAGFIENGWEGMVDGWYGFRHQNSEGRGQAADLKSTQAAIDQINGKLNRLIGKTNEKFHQIEKEFSEVEGRIQDLEKYVEDTKIDLWSYNAELLVALENQHTIHLTDSEMNKLFEKTKKQLRENAEDMGNGCFKIYHKCDNACIGSIRNGTYDHDVYRDEALNNRFQIKGVELKSGYKDWILWISFAISCFLLCVALLGFIMWACQKGNIRCNICI

SEQ ID NO: 6962 - protein, 566 aa, synthetic construct
  REGION 1..566: note = hemagglutinin__InfluenzaA__AEK28949
MKTIIALSYILCLVFAQKLPGNDNSTATLCLGHHAVPNGTIVKTITNDQIEVTNATELVQSSSTGEICDSPHQILDGENCTLIDALLGDPQCDGFQNKKWDLFVERSKAYSNCYPYDVPDYASLRSLVASSGTLEFNNESFNWTGVTQNGTSSACIRRSNNSFFSRLNWLTHLKFKYPALNVTMPNNEQFDKLYIWGVHHPGTDNDQIFLYAQASGRITVSTKRSQQTVIPNIGSRPRVRNIPSRISIYWTIVKPGDILLINSTGNLIAPRGYFKIRSGKSSIMRSDAPIGKCNSECITPNGSIPNDKPFQNVNRITYGACPRYVKQNTLKLATGMRNVPEKQTRGIFGAIAGFIENGWEGMVDGWYGFRHQNSEGRGQAADLKSTQAAIDQINGKLNRLIGKTNEKFHQIEKEFSEVEGRIQDLEKYVEDTKIDLWSYNAELLVALENQHTIDLTDSEMNKLFEKTKKQLRENAEDMGNGCLKIYHKCDNACIGSIRNGTYDHDVYRDEALNNRFQIKGVELKSGYKDWILWISFAISCFLLCVALLGFIMWACQKGNIRCNICI

SEQ ID NO: 6963 - protein, 566 aa, synthetic construct; identical to SEQ ID NO: 2434
  REGION 1..566: note = hemagglutinin__InfluenzaA__AEK28960

SEQ ID NO: 6964 - protein, 566 aa, synthetic construct; identical to SEQ ID NO: 2434
  REGION 1..566: note = hemagglutinin__InfluenzaA__AEK28971

SEQ ID NO: 6965 - protein, 566 aa, synthetic construct
  REGION 1..566: note = hemagglutinin__InfluenzaA__AEK28982
MKTIIALSYILCLVFAQKLPGNYNSTATLCLGHHAVPNGTIVKTITNDQIEVTNATELVQSSSTGEICDSPHQILDGENCTLIDALLGDPQCDGFQNKKWDLFVERSKAYSNCYPYDVPDYASLRSLVASSGTLEFNNESFNWTGVTQNGTSSACIRRSNNSFFSRLNWLTHLKFKYPALNVTMPNNEQFDKLYIWGVHHPGTDNDQIFLYAQASGRITVSTKRSQQTVIPNIGSRPRVRNIPSRISIYWTIVKPGDILLINSTGNLIAPRGYFKIRSGKSSIMRSDAPIGKCNSECITPNGSIPNDKPFQNVNRITYGACPRYVKQNTLKLATGMRNVPEKQTRGIFGAIAGFIENGWEGMVDGWYGFRHQNSEGRGQAADLKSTQAAIDQINGKLNRLIGKTNEKFHQIEKEFSEVEGRIQDLEKYVEDTKIDLWSYNAELLVALENQHTIHLTDSEMNKLFEKTKKQLRENAEDMGNGCFKIYHKCDNACIGSIRNGTYDHDVYRDEALNNRFQIKGVELKSGYKDWILWISFAISCFLLCVALLGFIMWACQKGNIRCNICI

SEQ ID NO: 6966 - protein, 566 aa, synthetic construct
  REGION 1..566: note = hemagglutinin__InfluenzaA__AEK28993
MKTIIALSYILCLVFAQKLPGNYNSTATLCLGHHAVPNGTIVKTITNDQIEVTNATELVQSSSTGEICDSPHQILDGENCTLIDALLGDPQCDGFQNKKWDLFVERSKAYSNCYPYDVPDYASLRSLVASSGTLEFNNESFNWTGVTQNGTSSACIRRSNNSFFSRLNWLTHLKFKYPALNVTMPNNEQFDKLYIWGVHHPGTDNDQIFLYAQASGRITVSTKRSQQTVIPNIGSRPRVRNIPSRISIYWTIVKPGDILLINSTGNLIAPRGYFKIRSGKSSIMRSDAPIGKCNSECITPNGSIPNDKPFQNVNRITYGACPRYVKQNTLKLATGMRNVPEKQTRGIFGAIAGFIENGWEGMVDGWYGFRHQNSEGRGQAADLKSTQAAIDQINGKLNRLIGKTNEKFHQIEKEFSEVEGRIQDLEKYVEDTKIDLWSYNAELLVALENQHTIDLTDSEMNKLFEKTKKQLRENAEDMGNGCFKIYHKCDNACIGSIRNGTYDHDVYRDEALNNRFQIKGVELKSGYKDWILWISFAISCFLLCVALLGFIMWACQKGNIRCNICI

SEQ ID NO: 6967 - protein, 566 aa, synthetic construct
  REGION 1..566: note = hemagglutinin__InfluenzaA__AEK29004
MKTIIALSYILCLVFAQKLPGNDNSTATLCLGHHAVPNGTIVKTITNDQIEVTNATELVQSSSTGEICNSPHQILDGENCTLIDALLGDPQCDGFQNKKWDLFVERSKAHSNCYPYDVPDYVSLRSLVASSGTLEFNNESFNWTGVTQNGTSSACIRRSNNSFFSRLNWLTHLNFKYPALNVTMPNNEQFDKLYIWGVHHPGTDKDQIFLYAQASGRITVSTKRSQQAVIPNIGSRPRVRNIPSRVSIYWTIVKPGDILLINSTGNLIAPRGYFKIRSGKSSIMRSDAPIGKCNSACITPNGSIPNDKPFQNVNRITYGACPRYVKQNTLKLATGMRNVPEKQTRGIFGAIAGFIENGWEGMVDGWYGFRHQNSEGRGQAADLKSTQAAIDQINGKLNRLIGKTNEKFHQIEKEFSEVEGRIQDLEKYVEDTKIDLWSYNAELLVALENQHTIDLTDSEMNKLFEKTKKQLRENAEDMGNGCFKIYHKCDNACIGSIRNGTYDHDVYRDEALNNRFQIKGVELKSGYKDWILWISFAISCFLLCVALLGFIMWACQKGNIRCNICI

SEQ ID NO: 6968 - protein, 566 aa, synthetic construct
  REGION 1..566: note = hemagglutinin__InfluenzaA__AEK29026
MKTIIALSYILCLVFAQKLPGNDNSTATLCLGHHAVPNGTIVKTITNDQIEVTNATELVQSSSTGEICDSPHQILDGKNCTLIDALLGDPQCDGFQDKKWDLFVERSKAYSNCYPYDVPDYASLRSLVASSGTLEFNNESFNWTGVTQNGTSSACIRRSKNSFFSRLNWLTHLNFKYSALNVTMPNNEQFDKLYIWGVHHPGTDKDQIFLYAQASGRITVSTKRSQQTVIPNIGSRPRVRNIPSRISIYWTIVKPGDILLINSTGNLIAPRGYFKMQSGKSSIMRSDAPIGKCNSECITPNGSIPNDKPFQNVNRITYGACPRYVKQNTLKLATGMRNVPEKQTRGIFGAIAGFIENGWEGMVDGWYGFRHQNSEGRGQAADLKSTQAAIDQINGKLNRLIGKTNEKFHQIEKEFSEVEGRIQDLEKYVEDTKIDLWSYNAELLVALENQHTIDLTDSEMNKLFEKTKKQLRENAEDMGNGCFKIYHKCDNACIGSIRNGTYDHDVYRDEALNNRFQIKGVELKSGYKDWILWISFAISCFLLCVALLGFIMWACQKGNIRCNICI

SEQ ID NO: 6969 - protein, 566 aa, synthetic construct
  REGION 1..566: note = hemagglutinin__InfluenzaA__AEK29048
MKTIIALSYILCLVFAQKLPGNDNSTATLCLGHHAVPNGTIVKTITNDQIEVTNATELVQSSSTGEICNSPHQILDGENCTLIDALLGDPQCDGFQNKKWDLFVERSKAHSNCYPYDVPDYASLRSLVASSGTLEFNNESFNWTGVAQNGTSSACIRRSNNSFFSRLNWLTHLNFKYPALNVTMPNNEQFDKLYIWGVHHPGTDKDQIFLYAQAAGRITVSTKRSQQAVIPNIGSRPRVRNIPSRVSIYWTIVKPGDILLINSTGNLIAPRGYFKIRSGKSSIMRSDAPIGKCNSACITPNGSIPNDKPFQNVNRITYGACPRYVKQNTLKLATGMRNVPEKQTRGIFGAIAGFIENGWEGMVDGWYGFRHQNSEGRGQAADLKSTQAAIDQINGKLNRLIGKTNEKFHQIEKEFSEVEGRIQDLEKYVEDTKIDLWSYNAELLVALENQHTIDLTDSEMNKLFEKTKKQLRENAEDMGNGCFKIYHKCDNACIGSIRNGTYDHDVYRDEALNNRFQIKGVELKSGYKDWILWISFAISCFLLCVALLGFIMWACQKGNIRCNICI

SEQ ID NO: 6970 - protein, 566 aa, synthetic construct
  REGION 1..566: note = hemagglutinin__InfluenzaA__AEK29070
MKTIIALSYILCLVFAQKLPGNDNSTATLCLGHHAVPNGTIVKTITNDQIEVTNATELVQSSSTGEICDSPHQILDGENCTLIDALLGDPQCDGFQNKKWDLFVERSKAYSNCYPYDVPDYASLRSLVASSGTLEFNNESFNWTGVTQNGTSSACIRRSNNSFFSRLNWLTHLNFKYPALNVTMPNNEQFDKLYIWGVHHPGTDKDQIFLYAQASGRITVSTKRSQQAVIPNIGSRPRVRNIPSRISIYWTIVKPGDILLINSTGNLIAPRGYFKIRSGKSSIMRSDAPIGKCNSECITPNGSIPNDKPFQNVNRITYGACPRYVKQNTLKLATGMRNVPEKQTRGIFGAIAGFIENGWEGMVDGWYGFRHQNSEGRGQAADLKSTQAAIDQINGKLNRLIGKTNEKFHQIEKEFSEVEGRIQDLEKYVEDTKIDLWSYNAELLVALENQHTIHLTDSEMNKLFEKTKKQLRENAEDMGNGCFKIYHKCDNACIGSIRNGTYDHDVYRDEALNNRFQIKGVELKSGYKDWILWISFAISCFLLCVALLGFIMWACQKGNIRCNICI

SEQ ID NO: 6971 - protein, 566 aa, synthetic construct
  REGION 1..566: note = hemagglutinin__InfluenzaA__AEK29081
MKTIIALSYILCLVFAQKLPGNDNSTATLCLGHHAVPNGTIVKTITNDQIEVTNATELVQSSSTGEICDSPHQILDGENCTLIDALLGDPQCDGFQNKKWDLFVERSKAYSNCYPYDVPDYASLRSLVASSGTLEFNNESFNWTGVTQNGTSSSCIRRSNNSFFSRLNWLTHLNFKYPALNVTMPNNEQFDKLYIWGVHHPGTDKDQIFLYAQASGRITVSTKRSQQAVIPNIGSRPRVRNIPSRISIYWTIVKPGDILLINSTGNLIAPRGYFKIRSGKSSIMRSDAPIGKCNSECITPNGSIPNDKPFQNVNRITYGACPRYVKQNTLKLATGMRNVPEKQTRGIFGAIAGFIENGWEGMVDGWYGFRHQNSEGRGQAADLKSTQAAIDQINGKLNRLIGKTNEKFHQIEKEFSEVEGRIQDLEKYVEDTKIDLWSYNAELLVALENQHTIHLTDSEMNKLFEKTKKQLRENAEDMGNGCFKIYHKCDNACIGSIRNGTYDHDVYRDEALNNRFQIKGVELKSGYKDWILWISFAISCFLLCVALLGFIMWACQKGNIRCNICI

SEQ ID NO: 6972 - protein, 566 aa, synthetic construct; identical to SEQ ID NO: 5533
  REGION 1..566: note = hemagglutinin__InfluenzaA__AEK29092

SEQ ID NO: 6973 - protein, 566 aa, synthetic construct; identical to SEQ ID NO: 6855
  REGION 1..566: note = hemagglutinin__InfluenzaA__AEK29125

SEQ ID NO: 6974 - protein, 566 aa, synthetic construct; identical to SEQ ID NO: 6855
  REGION 1..566: note = hemagglutinin__InfluenzaA__AEK29136

SEQ ID NO: 6975 - protein, 566 aa, synthetic construct; identical to SEQ ID NO: 6855
  REGION 1..566: note = hemagglutinin__InfluenzaA__AEK29169

SEQ ID NO: 6976 - protein, 566 aa, synthetic construct; identical to SEQ ID NO: 6855
  REGION 1..566: note = hemagglutinin__InfluenzaA__AEK29180

SEQ ID NO: 6977 - protein, 566 aa, synthetic construct; identical to SEQ ID NO: 6855
  REGION 1..566: note = hemagglutinin__InfluenzaA__AEK29191

SEQ ID NO: 6978 - protein, 566 aa, synthetic construct; identical to SEQ ID NO: 6855
  REGION 1..566: note = hemagglutinin__InfluenzaA__AEK29202

SEQ ID NO: 6979 - protein, 566 aa, synthetic construct; identical to SEQ ID NO: 6855
  REGION 1..566: note = hemagglutinin__InfluenzaA__AEK29213

SEQ ID NO: 6980 - protein, 566 aa, synthetic construct; identical to SEQ ID NO: 6855
  REGION 1..566: note = hemagglutinin__InfluenzaA__AEK29224

SEQ ID NO: 6981 - protein, 566 aa, synthetic construct; identical to SEQ ID NO: 6855
  REGION 1..566: note = hemagglutinin__InfluenzaA__AEK29235

SEQ ID NO: 6982 - protein, 566 aa, synthetic construct
  REGION 1..566: note = hemagglutinin__InfluenzaA__AEK29268
MKTIIALSYILCLVFAQKLPGNDNSTATLCLGHHAVPNGTIVKTITNDQIEVTNATELVQSSSTGEICNSPHQILDGENCTLIDALLGDPQCDGFQNKKWDLFVERSKAHSNCYPYDVPDYASLRSLVASSGTLEFNNESFNWTGVTQNGTSSACIRRSNNSFFSRLNWLTHLNFKYPALNVTMPNNEQFDKLYIWGVHHPGTDKDQIFLYAQASGRITVSTKRSQQAVIPNIGSRPRVRNIPSRVSIYWTIVKPGDILLINSTGNLIAPRGYFKIRSGKSSIMRSDAPIGKCNSACITPNGSIPNDKPFQNVNRITYGACPRYVKQNTLKLATGMRNVPEKQTRGIFGAIAGFIENGWEGMVDGWYGFRHQNSEGRGQAADLKSTQAAIDQINGKLNRLIGKTNEKFHQIEKEFSEVEGRIQDLEKYVEDTKIDLWSYNAELLVALENQHTIDLTDSEMNKLFEKTKKQLRENAEDMGNGCFKIYHKCDNACIGSIRNGTYDHDVYRDEALNNRFQIKGVELKSGYKDWILWISFAISCFLLCVALLGFIMWACQKGNIRCNICI

SEQ ID NO: 6983 - protein, 565 aa, synthetic construct
  REGION 1..565: note = hemagglutinin__InfluenzaA__AEK59838
MKVKLLVLLCTFTATYADTICIGYHANNSTDTVDTVLEKNVTVTHSVNLLEDSHNGKLCLLKGIAPLQLGNCSVAGWILGNPECELLISKESWSYIVEKPDPENGTCYPGHFADYEELREQLSSVSSFERFEIFPKESSWPNHTVTGVSASCSHNGKSSFYKNLLWLTGKNGLYPNLSKSYANNKEKEVLVLWGVHHPPNIGDQKALYHTENAYVSVVSSHYSKKFTPEIAKRPKVRDQEGRINYYWTLLEPGNTIIFEANGNLIAPRYAFALSRGFGSGIINSNAPMDKCDAKCQTPQGAINSSLPFQNVHPVTIGECPKYVRSAKLRMVTGLRNIPSIQSRGLFGAIAGFIEGGWTGMVDGWYGYHHQNEQGSGYAADQKSTQNAINGITNKVNSVIEKMNTQFTAVGKEFNKLERRMENLNKKVDDGFIDIWTYNAELLVLLENERTLDFHDSNVKNLYEKVKSQLKNNAKEIGNGCFEFYHKCNDECMESVKNGTYDYPKYSEESKLNREKIDGVKLESMGVYQILAIYSTVASSLVLLVSLGAISFWMCSNGSLQCRICI

SEQ ID NO: 6984 - protein, 566 aa, synthetic construct
  REGION 1..566: note = hemagglutinin__InfluenzaA__AEK98378
MKTIIALSYILCLVFAQKLPGNDNSTATLCLGHHAVPNGTIVKTITNDQIEVTNATELVQSSSTGEICDSPHQILDGENCTLIDALLGDPQCDGFQNKKWDLFVERSKAYSNCYPYDVPDYASLRSLVASSGTLEFNNESFNWTGVTQNGTSSACIRRSNNSFFSRLNWLTHLKFKYPALNVTMPNNEKFDKLYIWGVHHPGTDNDQIFPYAQASGRITVSTKRSQQTVIPNIGSRPRVRNIPSRISIYWTIVKPGDILLINSTGNLIAPRGYFKIQSGKSSIMRSDAPIGKCNSECITPNGSIPNDKPFQNVNRITYGACPRYVKQNTLKLATGMRNVPEKQTRGIFGAIAGFIENGWEGMVDGWYGFRHQNSEGIGQAADLKSTQAAIDQINGKLNRLIGKTNEKFHQIEKEFSEVEGRIQDLEKYVEDTKIDLWSYNAELLVALENQHTIDLTDSEMNKLFEKTKKQLRENAEDMGNGCFKIYHKCDNACIGSIRNGTYDHDVYRDEALNNRFQIKGVELKSGYKDWILWISFAISCFLLCVALLGFIMWACQKGNIRCNICI

SEQ ID NO: 6985 - protein, 566 aa, synthetic construct; identical to SEQ ID NO: 1915
  REGION 1..566: note = hemagglutinin__InfluenzaA__AEK98380

SEQ ID NO: 6986 - protein, 566 aa, synthetic construct
  REGION 1..566: note = hemagglutinin__InfluenzaA__AEK98382
MKTIIALSYILCLVFAQKLPGNDNSTATLCLGHHAVPNGTIVKTITNDQIEVTNATELVQNSSTGEICDSPHQILDGENCTLIDALLGDPQCDGFQNKKWDLFVERSKAYSNCYPYDVPDYASLRSLVASSGTLEFNNESFNWTGVTQNGTSSACIRRSNNSFFSRLNWLTHLKFKYPALNVTMPNNEKFDKLYIWGVHHPGTDNDQIFLYAQASGRITVSTKRSQQTVIPNIGSRPRIRNIPSRISIYWTIVKPGDILLINSTGNLIAPRGYFKIQIGKSSIMRSDAPIGKCNSECITPNGSIPNDKPFQNVNRITYGACPRYVKQNTLKLATGMRNVPEKQTRGIFGAIAGFIENGWEGMVDGWYGFRHQNSEGIGQAADLKSTQAAIDQINGKLNRLIGKTNEKFHQIEKEFSEVEGRIQDLEKYVEDTKIDLWSYNAELLVALENQHTIDLTDSEMNKLFEKTKKQLRENAEDMGNGCFKIYHKCDNACIGSIRNGTYDHDVYRDEALNNRFQIKGVELKSGYKDWILWISFAISCFLLCVALLGFIMWACQKGNIRCNICI

SEQ ID NO: 6987 - protein, 566 aa, synthetic construct
  REGION 1..566: note = hemagglutinin__InfluenzaA__AEK98386
MKTIIALSYILCLVFAQKLPGNDNSTATLCLGHHAVPNGTIVKTITNDQIEVTNATELVQSSSTGEICNSPHQILDGENCTLIDALLGDPQCDGFQNKKWDLFVERSKAHSNCYPYDVPDYASLRSLVASSGTLEFNNESFNWTGVTQNGTSSACIRRSNNSFFSRLNWLTHLNFKYPALNVTMPNNEQFDKLYIWGVHHPGTDKDQIFLYAQASGRITVSTKRSQQAVIPNIGSRTRVRNIPSRVSIYWTIVKPGDILLINSTGNLIAPRGYFKIRSGKSSIMRSDAPIGKCNSACITPNGSIPNDKPFQNVNRITYGACPRYVKQNTLKLATGMRNVPEKQTRGIFGAIAGFIENGWEGMVDGWYGFRHQNSEGRGQAADLKSTQAAIDQINGKLNRLIGKTNEKFHQIEKEFSEVEGRIQDLEKYVEDTKIDLWSYNAELLVALENQHTIDLTDSEMNKLFEKTKKQLRENAEDMGNGCFKIYHKCDNACIGSIRNGTYDHDVYRDEALNNRFQIKGVELKSGYKDWILWISFAISCFLLCVALLGFIMWACQKGNIRCNICI

SEQ ID NO: 6988 - protein, 566 aa, synthetic construct
  REGION 1..566: note = hemagglutinin__InfluenzaA__AEK98388
MKTIIALSYILCLVFAQKLPGNDNSTATLCLGHHAVPNGTIVKTITNDQIEVTNATELVQSSSTGEICDSPHQILDGKNCTLIDALLGDPQCDGLQNKKWDLFVERSKAYSNCYPYDVPDYASLRSLVASSGTLEFNNESFNWTGVTQNGTSSACIRRSKNSFFSRLNWLTHLNFKYPALNVTMPNNEQFDKLYIWGVHHPGTDKDQIFLYAQASGRITVSTKRSQQTAIPNIGSRPRVRNIPSRISIYWTIVKPGDILLINSTGNLIAPRGYFKIRSGKSSIMRSDAPIGKCNSECITPNGSIPNDKPFQNVNRITYGACPRYVKQNTLKLATGMRNVPEKQTRGIFGAIAGFIENGWEGMVDGWYGFRHQNSEGRGQAADLKSTQAAIDQINGKLNRLIGKTNEKFHQIEKEFSEVEGRIQDLEKYVEDTKIDLWSYNAELLVALENQHTIDLTDSEMNKLFEKTKKQLRENAEDMGNGCFKIYHKCDNACIGSIRNGTYDHDVYRDEALNNRFQIKGVELKSGYKDWILWISFAISCFLLCVALLGFIMWACQKGNIRCNICI

SEQ ID NO: 6989 - protein, 566 aa, synthetic construct
  REGION 1..566: note = hemagglutinin__InfluenzaA__AEK98390
MKTIIALSYILCLVFAQELPGNDNSTATLCLGHHAVPNGTIVKTITNDQIEVTNATELVQSSSTGEICNSPHQILDGENCTLIDALLGDPQCDGFQNKKWDLFVERSKAHSNCYPYDVPDYASLRSLVASSGTLEFNNESFNWTGVTQNGTSSACIRRSNNSFFSRLNWLTHLNFKYPALNVTMPNNEQFDKLYIWGVHHPGTDKDQIFLYAQASGRITVSTKRSQQAVIPNIGSRPRVRNIPSRVSIYWTIVKPGDILLINSTGNLIAPRGYFKIRSGKSSIMRSDAPIGKCKSACITPNGSIPNDKTFQNVNRITYGACPRYVKQNTLKLATGMRNVPEKQTRGIFGAIAGFIENGWEGMVDGWYGFRHQNSEGRGQAADLKSTQAAIDQINGKLNRLIGKTNEKFHQIEKEFSEVEGRIQDLEKYVEDTKIDLWSYNAELLVALENQHTIDLTDSEMNKLFEKTKKQLRENAEDMGNGCFKIYHKCDNACIGSIRNGTYDHDVYRDEALNNRFQIKGVELKSGYKDWILWISFAISCFLLCVALLGFIMWACQKGNIRCNICI

SEQ ID NO: 6990 - protein, 566 aa, synthetic construct
  REGION 1..566: note = hemagglutinin__InfluenzaA__AEK98392
MKTIIALSYILCLVFAQKLPGNDNSTATLCLGHHAVPNGTIVKTITDDQIEVTNATELVQSSSTGEICNSPHQILDGENCTLIDALLGDPQCDGFQNKKWDLFVERSKAHSNCYPYDVPDYASLRSLVASSGTLEFNNENFNWTGVTQNGTSSACIRRSNNSFFSRLNWLTHLNFKYPALNVTMPNNEQFDKLYIWGVHHPGTDKDQIFLYAQASGRITVSTKRSQQAVIPNIGSRLRVRNIPSRVSIYWTIVKPGDILLINSTGNLIAPRGYFKIRSGKSSIMRSDAPIGKCNSACITPNGSIPNDKPFQNVNRITYGACPRYVKQNTLKLATGMRNVPEKQTRGIFGAIAGFIENGWEGMVDGWYGFRHQNSEGRGQAADLKSTQAAIDQINGKLNRLIGKTNEKFHQIEKEFSEVEGRIQDLEKYVEDTKIDLWSYNAELLVALENQHTIDLTDSEMNKLFEKTKKQLRENAEDMGNGCFKIYHKCDNACIGSIRNGTYDHDVYRDEALNNRFQIKGVELKSGYKDWILWISFAISCFLLCVALLGFIMWACQKGNIRCNICI

SEQ ID NO: 6991 - protein, 566 aa, synthetic construct
  REGION 1..566: note = hemagglutinin__InfluenzaA__AEK98394
MKTIIALSYILCLVFAQKLPGNDNSTATLCLGHHAVPNGTIVKTITNDQIEVTNATELVQSSSTGEICNSPHQILDGENCTLIDALLGDPQCDGFQNKKWDLFVERSKAHSNCYPYDVPDYASLRSLVASSGTLEFNNESFNWTGVTQNGTSSACIRRSNNSFFSRLNWLTHLNFKYPALNVTMPNNEQFDKLYIWGVHHPGTDKDQIFLYAQASGRITVSTKRSQQAVIPNIGSRLRVRNIPSRVSIYWTIVKPGDILLINSTGNLIAPRGYFKIRSGKSSIMRSDAPIGKCNSACITPNGSIPNDKPFQNVNRITYGACPRYVKQNTLKLATGMRNVPEKQTRGIFGAIAGFIENGWEGMVDGWYGFRHQNSEGRGQAADLKSTQAAIDQINGKLNRLIGKTNEKFHQIEKEFSEVEGRIQDLEKYVEDTKIDLWSYNAELLVALENQHTIDLTDSEMNKLFEKTKKQLRENAEDMGNGCFKIYHKCDNACIGSIRNGTYDHDVYRDEALNNRFQIKGVELKSGYKDWILWISFAISCFLLCVALLGFIMWACQKGNIRCNICI

SEQ ID NO: 6992 - protein, 566 aa, synthetic construct
  REGION 1..566: note = hemagglutinin__InfluenzaA__AEK98396
MKTIIALSYILCLVFAQKLPGNDNSTATLCLGHHAVPNGTIVKTITNDQIEVTNATELVQSSSTGEICDSPHQILDGENCTLIDALLGDPQCDGFQNKKWDLFVERSKAYSNCYPYDVPDYASLRSLVASSGTLEFNNESFNWTGVTQNGTSSACIRRSNKSFFSRLNWLTHLKFKYPALNVTMPNNEQFDKLYIWGVHHPGTDNDQISLYAQASGRITVSTKRSQQTVIPNIGSRPRVRNIPSRISIYWTIVKPGDILLINSTGNLIAPRGYFKIRSGKSSIMRSDAPIGKCNSECITPNGSIPNDKPFQNVNRITYGACPRYVKQNTLKLATGMRNVPEKQTRGIFGAIAGFIENGWEGMVDGWYGFRHQNSEGRGQAADLKSTQAAIDQINGKLNRLIGKTNEKFHQIEKEFSEVEGRIQDLEKYVEDTKIDLWSYNAELLVALENQHTIDLTDSEMNKLFEKTKKQLRENAEDMGNGCFKIYHKCDNACIGSIRNGTYDHDVYRDEALNNRFQIKGVELKSGYKDWILWISFAISCFLLCIALLGFIMWACQKGNIRCNICI

SEQ ID NO: 6993 - protein, 566 aa, synthetic construct
  REGION 1..566: note = hemagglutinin__InfluenzaA__AEK98398
MKTIIALSYILCLVFAQKLPGNDNSTATLCLGHHAVPNGTIVKTITNDQIEVTNATELVQSSSTGEICDSPHQILDGKNCTLIDALLGDPQCDGLQNKKWDLFVERSKAYSNCYPYDVPDYASLRSLVASSGTLEFNNESFNWTGVTQNGTSSACIRRSKNSFFSRLNWLTHLNFKYPALNVTMPNNEQFDKLYIWGVHHPGTDKDQIFLYAQASGRITVSTKRSQQTAIPNIGSRPRVRNIPSRISIYWTIVKPGDILLINSTGNLIAPRGYFKIRSGKSSIMRSDAPIGKCNSECITPNGSIPNDKPFQNVNRITYGACPRYVKQNTLKLATGMRNIPEKQTRGIFGAIAGFIENGWEGMVDGWYGFRHQNSEGRGQAADLKSTQAAIDQINGKLNRLIGKTNEKFHQIEKEFSEVEGRIQDLEKYVEDTKIDLWSYNAELLVALENQHTIDLTDSEMNKLFEKTKKQLRENAEDMGNGCFKIYHKCDNACIGSIRNGTYDHDVYRDEALNNRFQIKGVELKSGYKDWIIWISFAISCFLLCVALLGFIMWACQKGNIRCNICI

SEQ ID NO: 6994 - protein, 566 aa, synthetic construct
  REGION 1..566: note = hemagglutinin__InfluenzaA__AEK98400
METIIALSYILSLVFAQKLPGNDNSTATLCLGHHAVPNGTIVKTITNDQIEVTNATELVQSSSTGEICDSPHQILDGENCTLIDALLGDPQCDGFQNKKWDLFVERSKAYSNCYPYDVPDYASLRSLVASSGTLEFNNENFNWTGVTQNGTSSACIRRSNNSFFSRLNWLTHLRFKYPALNVTMPNNEEFDKLYIWGVHHPGTDNDQIFLYAQASGRITVSTKRSQQTVIPNIGSRPRVRNIPSRISIYWTIVKPGDILLINSTGNLIAPRGYFKIRSGKSSIMRSDAPIGKCSSECITPNGSIPNDKPFQNVNRITYGACPRYVKQNTLKLATGMRNVPEKQTRGIFGAIAGFIENGWEGMVDGWYGFRHQNSEGIGQAADLKSTQAAIDQINGKLNRLIGKTNEKFHQIEKEFSEIEGRIQDLEKYVEDTKIDLWSYNAELLVALENQHTIDLTDSEMNKLFEKTKKQLRENAEDMGNGCFKIYHKCDNACIGSIRNGTYDHDVYRDEALNNRFQIKGVELKSGYKDWILWISFAISCFLLCVALLGFIMWACQKGNIRCNICI

SEQ ID NO: 6995 - protein, 566 aa, synthetic construct
  REGION 1..566: note = hemagglutinin__InfluenzaA__AEK98402
MKTIIALSYILCLGFAQKLPGNDNSTATLCLGHHAVPNGTIVKTITNDQIEVTNATELVQSSSTGEICDSPHQILDGKNCTLIDALLGDPQCDGFQNKKWDLFVERSKAYSNCYPYDVPDYASLRSLVASSGTLEFNNESFNWTGVTQNGTSSACIRRSKNSFFSRLNWLTHLNFKYPALNVTMPNNEQFDKLYIWGVHHPGTDKDQIFLYAQASGRITVSTKRSQQTAIPNIGSRPRVRNIPSRISIYWTIVKPGDILLINSTGNLIAPRGYFKIRSGKSSIMRSDAPIGKCNSECITPNGSIPNDKPFQNVNRITYGACPRYVKQNTLKLATGMRNVPEKQTRGIFGAIAGFIENGWEGMVDGWYGFRHQNSEGRGQAADLKSTQAAINQINGKLNRLIGKTNEKFHQIEKEFSEVEGRIQDLEKYVEDTKIDLWSYNAELLVALENQHTIDLTDSEMNKLFEKTKKQLRENAEDMGNGCFKIYHKCDNACIGSIRNGTYDHDVYRDEALNNRFQIKGVELKSGYKDWILWISFAISCFLLCVALLGFIMWACQKGNIRCNICI

SEQ ID NO: 6996 - protein, 566 aa, synthetic construct
  REGION 1..566: note = hemagglutinin__InfluenzaA__AEK98404
MKTIIALSYILSLVFAQKLPGNDNSTATLCLGHHAVPNGTIVKTITNDQIEVTNATELVQSSSTGEICDSPHQILDGENCTLIDALLGDPQCDGFQNKKWDLFVERSKAYSNCYPYDVPDYASLRSLVASSGTLEFNNENFNWTGVTQNGTSSACIRRSNNSFFSRLNWLTHLRFKYPALNVTMPNNEEFDKLYIWGVHHPGTDNDQIFLYAQASGRITVSTKRSQQTVIPNIGSRPRVRNIPSRISIYWTIVKPGDILLINSTGNLIAPRGYFKMRSGKSSIMRSDAPIGKCNSECITPNGSIPNDKPFQNVNRITYGACPRYVKQNTLKLATGMRNVPEKQTRGIFGAIAGFIENGWEGMVDGWYGFRHQNSEGIGQAADLKSTQAAIDQINGKLNRLIGKTNEKFHQIEKEFSEVEGRIQDLEKYVEDTKIDLWSYNAELLVALENQHTIDLTDSEMNKLFEKTKKQLRENAEDMGNGCFKIYHKCDNACIGSIRNGTYDHDVYRDEALNNRFQIKGVELKSGYKDWILWISFAISCFLLCVALLGFIMWACQKGNIRCNICI

SEQ ID NO: 6997 - protein, 566 aa, synthetic construct
  REGION 1..566: note = hemagglutinin__InfluenzaA__AEK98406
MKTIIALSYILSLVFAQKLPGNDNSTATLCLGHHAVPNGTIVKTITNDQIEVTNATELVQSSSTGEICDSPHQILDGENCTLIDALLGDPQCDGFQNKKWDLFVERSKAYSNCYPYDVPDYASLRSLVASSGTLEFNNENFNWTGVTQNGTSSACIRRSNNSFFSRLNWLTHLRFKYPALNVTMPNNEELDKLYIWGVHHPGTDNDQIFLYAQASGRITVSTKRSQQTVIPNIGSRPRVRNIPSRISIYWTIVKPGDILLINSTGNLIAPRGYFKIRSGKSSIMRSDAPIGKCNSECITPNGSIPNDKPFQNVNRITYGACPRYVKQNTLKLATGMRNVPEKQTRGIFGAIAGFIENGWEGMVDGWYGFRHQNSEGIGQAADLKSTQAAIDQINGKLNRLIGKTNEKFHQIEKEFSEVEGRIQDLEKYVEDTKIDLWSYNAELLVALENQHTIDLTDSEMNKLFEKTKKQLRENAEDMGNGCFKIYHKCDNACIGSIRNGTYDHDVYRDEALNNRFQIKGVELKSGYKDWILWISFAISCFLLCVALLGFVMWACQKGNIRCNICI

SEQ ID NO: 6998 - protein, 566 aa, synthetic construct
  REGION 1..566: note = hemagglutinin__InfluenzaA__AEL11687
MKTIIALSYILCLVFAQKLPGNDNSTATLCLGHHAVPNGTIVKTITNDQIEVTNATELVQSSSTGGICDSPHQILDGENCTLIDALLGDPQCDGFQNKKWDLFVERSKAYSNCYPYDVPDYASLRSLVASSGTLEFNNESFNWTGVTQNGTSSSCKRRSNNSFFSRLNWLTHLKFKYPALNVTMPNNEKFDKLYIWGVHHPVTDNDQIRLYAQASGRITVSTKRSQQTVIPNIGYRPRVRDIPSRISIYWTIVKPGDILLINSTGNLIAPRGYFKIRSGKSSIMRSDAPIGKCNSECITPNGSIPNDKPFQNVNRITYGACPRYVKQNTLKLATGMRNVPEKQTRGIFGAIAGFIENGWEGMVDGWYGFRHQNSEGIGQAADLKSTQAAINQINGKLNRLIGKTNEKFHQIEKEFSEVEGRIQDLEKYVEDTKIDLWSYNAELLVALENQHTIDLTDSEMNKLFERTKKQLRENAEDMGNGCFKIYHKCDNACIGSIRNGTYDHDVYRDEALNNRFQIKGVELKSGYKDWILWISFAISCFLLCVVLLGFIMWACQKGNIRCNICI

SEQ ID NO: 6999 - protein, 563 aa, synthetic construct
  REGION 1..563: note = hemagglutinin__InfluenzaA__AEL31632
MEKIVLLLAIVSLVKSDQICIGYHANNSTEQVDTIMEKNVTVTHAQDILEKTHNGKLCNLDGVKPLILRDCSVAGWLLGNPMCDEFLNVPEWSYIVEKINPANDLCYPGNFNDYEELKHLLSRINHFEKIQIIPKSSWSDHEASGVSSVCPYQGRSSFFRNVVWLTKKDNAYPTIKRSYNNTNQEDLLVLWGIHHPNDAAEQTRLYQNPTTYISVGTSTLNQRLVPKIATRSKVNGQSGRMEFFWTILKSNDAINFESNGNFIAPENAYKIVKKGDSTIMKSELEYGNCNTKCQTPIGAINSSMPFHNIHPLTIGECPKYVKSNRLVLATGLRNSPQGETRGLFGAIAGFIEGGWQGMVDGWYGYHHSNEQGSGYAADKESTQKAIDGVTNKVNSIIDKMNTQFEAVGREFNNLERRIENLNKKMEDGFLDVWTYNAELLVLMENERTLDFHDSNVKNLYDKVRLQLRDNAKELGNGCFEFYHRCDNECMESVRNGTYDYPQYSEEARLKREEISGVKLESIGTYQILSIYSTVASSLALAIMVAGLFLWMCSNGSLQCRICI

SEQ ID NO: 7000 - protein, 566 aa, synthetic construct; identical to SEQ ID NO: 6920
  REGION 1..566: note = hemagglutinin__InfluenzaA__AEL89297

SEQ ID NO: 7001 - protein, 566 aa, synthetic construct; identical to SEQ ID NO: 6920
  REGION 1..566: note = hemagglutinin__InfluenzaA__AEL89307

SEQ ID NO: 7002 - protein, 566 aa, synthetic construct; identical to SEQ ID NO: 6920
  REGION 1..566: note = hemagglutinin__InfluenzaA__AEL89317

SEQ ID NO: 7003 - protein, 566 aa, synthetic construct; identical to SEQ ID NO: 6920
  REGION 1..566: note = hemagglutinin__InfluenzaA__AEL89327

SEQ ID NO: 7004 - protein, 566 aa, synthetic construct; identical to SEQ ID NO: 6920
  REGION 1..566: note = hemagglutinin__InfluenzaA__AEL89337

SEQ ID NO: 7005 - protein, 566 aa, synthetic construct; identical to SEQ ID NO: 6920
  REGION 1..566: note = hemagglutinin__InfluenzaA__AEL89347

SEQ ID NO: 7006 - protein, 566 aa, synthetic construct; identical to SEQ ID NO: 6920
  REGION 1..566: note = hemagglutinin__InfluenzaA__AEL89357

SEQ ID NO: 7007 - protein, 566 aa, synthetic construct; identical to SEQ ID NO: 6920
  REGION 1..566: note = hemagglutinin__InfluenzaA__AEL89367

SEQ ID NO: 7008 - protein, 566 aa, synthetic construct; identical to SEQ ID NO: 6920
  REGION 1..566: note = hemagglutinin__InfluenzaA__AEL89391

SEQ ID NO: 7009 - protein, 566 aa, synthetic construct; identical to SEQ ID NO: 6920
  REGION 1..566: note = hemagglutinin__InfluenzaA__AEL89401

SEQ ID NO: 7010 - protein, 566 aa, synthetic construct; identical to SEQ ID NO: 6920
  REGION 1..566: note = hemagglutinin__InfluenzaA__AEL89411

SEQ ID NO: 7011 - protein, 566 aa, synthetic construct; identical to SEQ ID NO: 6920
  REGION 1..566: note = hemagglutinin__InfluenzaA__AEL89421

SEQ ID NO: 7012 - protein, 566 aa, synthetic construct; identical to SEQ ID NO: 6920
  REGION 1..566: note = hemagglutinin__InfluenzaA__AEL89441

SEQ ID NO: 7013 - protein, 566 aa, synthetic construct; identical to SEQ ID NO: 6920
  REGION 1..566: note = hemagglutinin__InfluenzaA__AEL89451

SEQ ID NO: 7014 - protein, 566 aa, synthetic construct; identical to SEQ ID NO: 6920
  REGION 1..566: note = hemagglutinin__InfluenzaA__AEL89461

SEQ ID NO: 7015 - protein, 566 aa, synthetic construct; identical to SEQ ID NO: 6920
  REGION 1..566: note = hemagglutinin__InfluenzaA__AEL89471

SEQ ID NO: 7016 - protein, 566 aa, synthetic construct
  REGION 1..566: note = hemagglutinin__InfluenzaA__AEL89481
MKVILVVLLYTFATANADTLCIGYHANNSTDTVDTVLEKNVTVTHSVNLLEDKHNGKLCKLRGVAPLHLGKCNIAGWILGNPECESLSTASSWSYIVETSSSDNGTCYPGDFIDYEELREQLSSVSSFERFEIFPKTSSWPNHDSNKGVTAACPHAGAKSFYKNLIWLVKKGNSYPKLSKSYINDKGKEVLVLWGIHHPSTSADQQSLYQNADAYVFVGTSRYSKKFKPEIAIRPKVRDQEGRMNYYWTLVEPGDKITFEATGNLVVPRYAFAMERNAGSGIIISDTPVHDCNTTCQTPKGAINTSLPFQNIHPITIGKCPKYVKSTKLRLATGLRNVPSIQSRGLFGAIAGFIEGGWTGMVDGWYGYHHQNEQGSGYAADLKSTQNAIDKITNKVNSVIEKMNTQFTAVGKEFNHLEKRIENLNKKVDDGFLDIWTYNAELLVLLENERTLDYHDSNVKNLYEKVRSQLKNNAKEIGNGCFEFYHKCDNTCMESVKNGTYDYPKYSEEAKLNREEIDGVKLESTRIYQILAIYSTVASSLVLVVSLGAISFWMCSNGSLQCRICI

SEQ ID NO: 7017 - protein, 566 aa, synthetic construct; identical to SEQ ID NO: 5584
  REGION 1..566: note = hemagglutinin__InfluenzaA__AEL89491

SEQ ID NO: 7018 - protein, 566 aa, synthetic construct
  REGION 1..566: note = hemagglutinin__InfluenzaA__AEL89501
MKAILVVLLYTFATANADTLCIGYHANNSTDTVDTVLEKNVTVTHSVNLLEDKHNGKLCKLRGVAPLHLGKCNIAGWILGNPECESLSTASSWSYIVETSSSDNGTCYPGDFIDYEELREQLSSVSSFERFEIFPKTSSWPDHDSNKGVTAACPHAGAKSFYKNLIWLVKKGNSYPKLSKSYINDEGKEVLVLWGIHHPSTSADQQSLYQNADAYVFVGTSRYSKKFKPEIAIRPKVRDQEGRMNYYWTLVEPGDKITFEATGNLVVPRYAFAMERNAGSGIIISDTPVHDCNTTCQTPKGAINTSLPFQNIHPITIGKCPKYVKSTKLRLATGLRNVPSIQSRGLFGAIAGFIEGGWTGMVDGWYGYHHQNEQGSGYAADLKSTQNAIDKITNKVNSVIEKMNTQFTAVGKEFNHLEKRIENLNKKVDDGFLDIWTYNAELLVLLENERTLDYHDSNVKNLYEKVRSQLKNNAKEIGNGCFEFYHKCDNTCMESVKNGTYDYPKYSEEAKLNREEIDGVKLESTRIYQILAIYSTVASSLVLVVSLGAISFWMCSNGSLQCRICI

SEQ ID NO: 7019 - protein, 566 aa, synthetic construct; identical to SEQ ID NO: 3833
  REGION 1..566: note = hemagglutinin__InfluenzaA__AEL89511

SEQ ID NO: 7020 - protein, 566 aa, synthetic construct; identical to SEQ ID NO: 5584
  REGION 1..566: note = hemagglutinin__InfluenzaA__AEL89521

SEQ ID NO: 7021 - protein, 566 aa, synthetic construct
  REGION 1..566: note = hemagglutinin__InfluenzaA__AEL89531
MKAILVVLLYTFTTANADTLCIGYHANNSTDTVDTVLEKNVTVTHSVNLLEDKHNGKLCQLRGVAPLHLGKCNIAGWILGNPECESLSTASSWSYIVETSSSDNGTCYPGDFIDYEELREQLSSVSSFERFEMFPKTSSWPNHDSNKGVTAACPHAGAKSFYKNLIWLVKKGNSYPKLSKSYINDKGKEVLVLWGIHHPSTSADQQSLYQNADAYVFVGTSRYSKKFKPEIAIRPKVRDQEGRMNYYWTLVEPGDKITFEATGNLVVPRYAFAMERNAGSGIIISDTPVHDCNTTCQTPKGAINTSLPFQNIHPITIGKCPKYVKSTKLRLATGLRNVPSIQSRGLFGAIAGFIEGGWTGMVDGWYGYHHQNEQGSGYAADLKSTQNAIDKITNKVNSVIEKMNTQFTAVGKEFNHLEKRIENLNKKVDDGFLDIWTYNAELLVLLENERTLDYHDSNVKNLYEKVRSQLKNNAKEIGNGCFEFYHKCDNTCMESVKNGTYDYPKYSEEAKLNREEIDGVKLESTRIYQILAIYSTVASSLVLVVSLGAISFWMCSNGSLQCRICI

SEQ ID NO: 7022 - protein, 566 aa, synthetic construct; identical to SEQ ID NO: 5584
  REGION 1..566: note = hemagglutinin__InfluenzaA__AEL89541

SEQ ID NO: 7023 - protein, 566 aa, synthetic construct
  REGION 1..566: note = hemagglutinin__InfluenzaA__AEL89551
MKAILVVLLYTFATANADTLCIGYHANNSTDTVDTVLEKNVTVTHSVNLLEDKHNGKLCKLRGVAPLHLGKCNIAGWILGNPECESLSTASSWSYIVETSSSDNGTCYPGDFIDYEELREQLSSVSSFERFEIFPKTSSWPDHDSNKGVTAACPHAGAKSFYKNLIWLVKKGNSYPKLSKSYINDKGKEVLVLWGIHHPSTSADQQSLYQNADAYVFVGTSRYSKKFKPEIAIRPKVRDQEGRMNYYWTLVEPGDKITFEATGNLVVPRYAFAMERNAGSGIIISDTPAHDCNTTCQTPKGAINTSLPFQNIHPITIGKCPKYVKSTKLRLATGLRNVPSIQSRGLFGAIAGFIEGGWTGMVDGWYGYHHQNEQGSGYAADLKSTQNAIDKITNKVNSVIEKMNTQFTAVGKEFNHLEKRIENLNKKVDDGFLDIWTYNAELLVLLENERTLDYHDSNVKNLYEKVRSQLKNNAKEIGNGCFEFYHKCDNTCMESVKNGTYDYPKYSEEAKLNREEIDGVKLESTRIYQILAIYSTVASSLVLVVSLGAISFWMCSNGSLQCRICI

SEQ ID NO: 7024 - protein, 566 aa, synthetic construct
  REGION 1..566: note = hemagglutinin__InfluenzaA__AEL89561
MKAILVVLLYTFATANADTLCIGYHANNSTDTVDTVLEKNVTVTHSVNLLEDKHNGKLCKLRGVAPLHLGKCNIAGWILGNPECESLSTASSWSYIVETSSSGNGTCYPGDFIDYEELREQLSSVSSFERFEIFPKTSSWPDHDSNKGVTAACPHAGAKSFYKNLIWLVKKGNSYPKLSKSYINDKGKEVLVLWGIHHPSTSADQQSLYQNADAYVFVGTSRYSKKFKPEIAIRPKVRDQEGRMNYYWTLVEPGDKITFEATGNLVVPRYAFAMERNAGSGIIISDTPVHDCNTTCQTPKGAINTSLPFQNIHPITIGKCPKYVKSTKLRLATGLRNVPSIQSRGLFGAIAGFIEGGWTGMVDGWYGYHHQNEQGSGYAADLKSTQNAIDKITNKVNSVIEKMNTQFTAVGKEFNHLEKRIENLNKKVDDGFLDIWTYNAELLVLLENERTLDYHDSNVKNLYEKVRSQLKNNAKEIGNGCFEFYHKCDNTCMESVKNGTYDYPKYSEEAKLNREEIDGVKLESTEIYQILAIYSTVASSLVLVVSLGAISFWMCSNGSLQCRICI

SEQ ID NO: 7025 - protein, 566 aa, synthetic construct; identical to SEQ ID NO: 5584
  REGION 1..566: note = hemagglutinin__InfluenzaA__AEL89571

SEQ ID NO: 7026 - protein, 566 aa, synthetic construct
  REGION 1..566: note = hemagglutinin__InfluenzaA__AEL89581
MKAILVVLLYTFATANADTLCIGYHANNSTDTVDTVLEKNVTVTHSVNLLEDKHNGKLCKLRGVAPLHLGKCNIAGWILGNPECESLSTASSWSYIVETSSSDNGTCYPGDFIDYEELREQLSSVSSFERFEMFPKTSSWPDHDSNKGVTAACPHAGAKSFYKNLIWLVKKGNSYPKLSKSYINDKGKEVLVLWGIHHPSTSADQQSLYQNADAYVFVGTSRYSKKFKPEIAIRPKVRDQEGRMNYYWTLVEPGDKITFEATGNLVVPRYAFAMERNAGSGIIISDTPVHDCNTTCQTPKGAINTSLPFQNIHPITIGKCPKYVKSTKLRLATGLRNVPSIQSRGLFGAIAGFIEGGWTGMVDGWYGYHHQNEQGSGYAADLKSTQNAIDKITNKVNSVIEKMNTQFTAVGKEFNHLEKRIENLNKKVDDGFLDIWTYNAELLVLLENERTLDYHDSNVKNLYEKVRSQLKNNAKEIGNGCFEFYHKCDNTCMESVKNGTYDYPKYSEEAKLNREEIDGVKLESTRIYQILAIYSTVASSLVLVVSLGAISFWMCSNGSLQCRICI

SEQ ID NO: 7027 - protein, 566 aa, synthetic construct; identical to SEQ ID NO: 6454
  REGION 1..566: note = hemagglutinin__InfluenzaA__AEL89591

SEQ ID NO: 7028 - protein, 566 aa, synthetic construct
  REGION 1..566: note = hemagglutinin__InfluenzaA__AEL89601
MKAILVVLLYTFATANADTLCIGYHANNSTDTVDTVLEKNVTVTHSVNLLEDKHNGKLCKLRGVAPLHLGKCNIAGWILGNPECESLSTASSWSYIVETSSSDNGTCYPGDFIDYEELREQLSSVSSFERFEIFPKTSSWPNHDSNKGVTTACPHAGAKSFYKNLIWLVKKGNSYPKLSKSYINDKGKEVLVLWGIHHPPTSADQQSLYQNADAYVFVGTSRYSKKFKPEIAIRPKVRDQEGRMNYYWTLVEPGDKITFEATGNLVVPRYAFAMERNAGSGIIISDTPVHDCNTTCQTPKGAINTSLPFQNIHPITIGKCPKYVKSTKLRLATGLRNVPSIQSRGLFGAIAGFIEGGWTGMVDGWYGYHHQNEQGSGYAADLKSTQNAIDEITNKVNSVIEKMNTQFTAVGKEFNHLEKRIENLNKKVDDGFLDIWTYNAELLVLLENERTLDYHDSKVKNLYEKVRSQLKNNAKEIGNGCFEFYHKCDNTCMESVKNGTYDYPKYSEEAKLNREEIDGVKLESTRIYQILAIYSTVASSLVLVVSLGAISFWMCSNGSLQCRICI

SEQ ID NO: 7029 - protein, 566 aa, synthetic construct; identical to SEQ ID NO: 6454
  REGION 1..566: note = hemagglutinin__InfluenzaA__AEL89611

SEQ ID NO: 7030 - protein, 566 aa, synthetic construct; identical to SEQ ID NO: 6896
  REGION 1..566: note = hemagglutinin__InfluenzaA__AEL89621

SEQ ID NO: 7031 - protein, 566 aa, synthetic construct; identical to SEQ ID NO: 5584
  REGION 1..566: note = hemagglutinin__InfluenzaA__AEL89631

SEQ ID NO: 7032 - protein, 566 aa, synthetic construct; identical to SEQ ID NO: 6920
  REGION 1..566: note = hemagglutinin__InfluenzaA__AEL89641

SEQ ID NO: 7033 - protein, 566 aa, synthetic construct
  REGION 1..566: note = hemagglutinin__InfluenzaA__AEL89651
MKAILVVLLYTFATANADTLCIGYHANNSTDTVDTVLEKNVTVTHSVNLLEDKHNGKLCKLRGVAPLHLGKCNIAGWILGNPECESLSTASSWSYIVETSSSDNGTCYPGVFIDYEELREQLSSVSSFERFEIFPKTSSWPNHDSNKGVTAACPHAGAKSFYKNLIWLVKKGNSYPKLSKSYINDKGKEVLVLWGIHHPSTTADQQSLYQNADAYVFVGTSRYSKKFKPEIAIRPKVRDQEGRMNYYWTLVEPGDKITFEATGNLVVPRYAFAMERNAGSGIIISDTPVHDCNTTCQTPKGAINTSLPFQNIHPITIGKCPKFVKSTKLRLATGLRNVPSIQSRGLFGAIAGFIEGGWTGMVDGWYGYHHQNEQGSGYAADLKSTQNAIDKITNKVNSVIEKMNTQFTAVGKEFNHLEKRIENLNKKVDDGFLDIWTYNAELLVLLENERTLDYHDSNVKNLYEKVRNQLKNNAKEIGNGCFEFYHKCDNTCMESVKNGTYDYPKYSEEAKLNREEIDGVKLESTRIYQILAIYSTVASSLVLVVSLGAISFWMCSNGSLQCRICI

SEQ ID NO: 7034 - protein, 566 aa, synthetic construct; identical to SEQ ID NO: 6435
  REGION 1..566: note = hemagglutinin__InfluenzaA__AEL89661

SEQ ID NO: 7035 - protein, 566 aa, synthetic construct
  REGION 1..566: note = hemagglutinin__InfluenzaA__AEL89671
MKAILVVLLYTFATANADTLCIGYHANNSTDTVDTVLEKNVTVTHSVNLLEDKHNGKLCKLRGVAPLHLGKCNIAGWILGNPECESLSTASSWSYIVETSSSDNGTCYPGDFIDYEELREQLSSVSSFERFEIFPKTSSWPNHDSNKGVTAACPHAGAKSFYKNLIWLVKKGNSYPKLSKSYINDKGKEVLVLWGIHHPSTTADQQSLYQSADTYVFVGTSRYSKKFKPEIAIRPKVRDQEGRMNYYWTLVEPGDKITFEATGNLVVPRYAFAMERNAGSGIIISDTPVHDCNTTCQTPKGAINTSLPFQNIHPITIGKCPKYVKSTKLRLATGLRNVPSIQSRGLFGAIAGFIEGGWTGMVDGWYGYHHQNEQGSGYAADLKSTQNAIDKITNKVNSVIEKMNTQFTAVGKEFNHLEKRIENLNKKVDDGFLDIWTYNAELLVLLENERTLDYHDSNVKNLYEKVRNQLKNNAKEIGNGCFEFYHKCDNTCMESVKNGTYDYPKYSEEAKLNREEIDGVKLESTRIYQILAIYSTVASSLVLVVSLGAISFWMCSNGSLQCRICI

SEQ ID NO: 7036 - protein, 566 aa, synthetic construct; identical to SEQ ID NO: 6435
  REGION 1..566: note = hemagglutinin__InfluenzaA__AEL89691

SEQ ID NO: 7037 - protein, 566 aa, synthetic construct
  REGION 1..566: note = hemagglutinin__InfluenzaA__AEL89701
MKAILVVLLYTFATANADTLCIGYHANNSTDTVDTVLEKNVTVTHSVNLLEDKHNGKLCKLRGVAPLHLGKCNIAGWILGNPECESLSTASSWSYIVETSSSDNGTCYPGDFIDYEELREQLSSVSSFERFEIFPKTSSWPNHDSNKGVTTACPHAGAKSFYKNLIWLVKKGNSYPKLSKSYINDKGKEVLVLWGIHHPPTSADQQNLYQNADAYVFVGTSRYSKKFKPEIAIRPKVRDQEGRMNYYWTLVEPGDKITFEATGNLVVPRYAFAMERNAGSGIIISDTPVHDCNTTCQTPKGAINTSLPFQNIHPITIGKCPKYVKSTKLRLATGLRNVPSIQSRGLFGAIAGFIEGGWTGMVDGWYGYHHQNEQGSGYAADLKSTQNAIDGITNKVNSVIEKMNTQFTAVGKEFNHLEKRIENLNKKVDDGFLDIWTYNAELLVLLENERTLDYHDSNVKNLYEKVRSQLKNNAKEIGNGCFEFYHKCDNTCMESVKNGTYDYPKYSEEAKLNREEIDGVKLESTMIYQILAIYSTVASSLVLVVSLGAISFWMCSNGSLQCRICI

SEQ ID NO: 7038 - protein, 566 aa, synthetic construct; identical to SEQ ID NO: 7037
  REGION 1..566: note = hemagglutinin__InfluenzaA__AEL89711

SEQ ID NO: 7039 - protein, 566 aa, synthetic construct; identical to SEQ ID NO: 6435
  REGION 1..566: note = hemagglutinin__InfluenzaA__AEL89721

SEQ ID NO: 7040 - protein, 566 aa, synthetic construct
  REGION 1..566: note = hemagglutinin__InfluenzaA__AEL89741
MKAILVVLLYTFATTNADTLCIGYHANNSTDTVDTVLEKNVTVTHSVNLLEDKHNGKLCKLRGVAPLHLGKCNIAGWILGNPECESLSTASSWSYIVETSSSDNGTCYPGDFIDYEELREQLSSVSSFERFEIFPKTSSWPNHDSNKGVTAACPHAGAKSFYKNLIWLVKKGNSYPKLSKSYINDKGKEVLVLWGIHHPSTTADQQSLYQNADTYVFVGTSRYSKKFKPEIAIRPKVRDQEGRMNYYWTLVEPGDKITFEATGNLVVPRYAFAMERNAGSGIIISDTPVHDCNTTCQTPKGAINTSLPFQNIHPITIGKCPKYVKSTKLRLATGLRNVPSIQSRGLFGAIAGFIEGGWTGMVDGWYGYHHQNEQGSGYAADLKSTQNAIDKITNKVNSVIEKMNTQFTAVGKEFNHLEKRIENLNKKVDDGFLDIWTYNAELLVLLENERTLDYHDSNVKNLYEKVRNQLKNNAKEIGNGCFEFYHKCDNTCMESVKNGTYDYPKYSEEAKLNREEIDGVKLESTRIYQILAIYSTVASSLVLVVSLGAISFWMCSNGSLQCRICI

SEQ ID NO: 7041 - protein, 566 aa, synthetic construct; identical to SEQ ID NO: 5584
  REGION 1..566: note = hemagglutinin__InfluenzaA__AEL89751

SEQ ID NO: 7042 - protein, 566 aa, synthetic construct
  REGION 1..566: note = hemagglutinin__InfluenzaA__AEL89761
MKAILVVLLYTFATANADTLCIGYHANNSTDTVDTVLEKNVTVTHSVNLLEDKHNGKLCKLRGVAPLHLGKCNIAGWILGNPECESLSTASSWSYIVETSSSDNGTCYPGDFIDYEELREQLSSVSSFERFEIFPKTSSWPNHDSNKGVTTACPHAGAKSFYKNLIWLVKKGNSYPKLSKSYINDKGKEVLVLWGIHHPPTSADQQSLYQNADAYVFVGTSRYSKKFKPEIAIRPKVRDQEGRMNYYWTLVEPGDKITFEATGNLVVPRYAFAMERNAGSGIIISDTPVHDCNTTCQTPKGAINTSLPFQNIHPITIGKCPKYVKSTKLRLATGLRNVPSIQSRGLFGAIAGFIEGGWTGMVDGWYGYHHQNEQGSGYAADLKSTQNAIDGITNKVNSVIEKMNTQFTAVGKEFNHLEKRIENLNKKVDDGFLDIWTYNAELLVLLENERTLDYHDSNVKNLYEKVRSQLKNNAKEIGNGCFEFYHKCDNTCMESVKNGTYDYPKYSEEAKLNREEIDGVKLESTMIYQILAIYSTVASSLVLVVSLGAISFWMCSNGSLQCRICI

SEQ ID NO: 7043 - protein, 566 aa, synthetic construct; identical to SEQ ID NO: 6920
  REGION 1..566: note = hemagglutinin__InfluenzaA__AEL89771

SEQ ID NO: 7044 - protein, 566 aa, synthetic construct; identical to SEQ ID NO: 7042
  REGION 1..566: note = hemagglutinin__InfluenzaA__AEL89781

SEQ ID NO: 7045 - protein, 566 aa, synthetic construct; identical to SEQ ID NO: 6435
  REGION 1..566: note = hemagglutinin__InfluenzaA__AEL89791

SEQ ID NO: 7046 - protein, 566 aa, synthetic construct
  REGION 1..566: note = hemagglutinin__InfluenzaA__AEL89801
MKAILVVLLYTFATANADTLCIGYHANNSTDTVDTVLEKNVTVTHSVNLLEDKHNGKLCKLRGVAPLHLGKCNIAGWILGNPECESLSTASSWSYIVETSSSDNGTCYPGVFIDYEELREQLSSVSSFERFEIFPKTSSWPNHDSNKGVTAACPHAGAKSFYKNLIWLVKKGNSYPKLSKSYINDKGKEVLVLWGIHHPSTTADQQSLYQNADAYVFVGTSRYSKKFKPEIAVRPKVRDQEGRMNYYWTLVEPGDKITFEATGNLVVPRYAFAMERNAGSGIIISDTPVHDCNTTCQTPKGAINTSLPFQNIHPITIGKCPKYVKSTKLRLATGLRNVPSIQSRGLFGAIAGFIEGGWTGMVDGWYGYHHQNEQGSGYAADLKSTQNAIDKITNKVNSVIEKMNTQFTAVGKEFNHLEKRIENLNKKVDDGFLDIWTYNAELLVLLENERTLDYHDSNVKNLYEKVRNQLKNNAKEIGNGCFEFYHKCDNTCMESVKNGTYDYPKYSEEAKLNREEIDGVKLESTRIYQILAIYSTVASSLILVVSLGAISFWMCSNGSLQCRICI

SEQ ID NO: 7047 - protein, 566 aa, synthetic construct
  REGION 1..566: note = hemagglutinin__InfluenzaA__AEL89812
MKAILVVLLYTFATANADTLCIGYHANNSTDTVDTVLEKNVTVTHSVNLLEDKHNGKLCKLRGVAPLHLGKCNIAGWILGNPECESLSTASSWSYIVETSSSDNGTCYPGDFIDYEELREQLSSVSSFERFEIFPKTSSWPNHDSNKGVTTACPHAGAKSFYKNLIWLVKKGNSYPKLSKSYINDKGKEVLVLWGIHHPPTSADQQSLYQNADAYVFVGTSRYSKKFKPEIAIRPKVRDQEGRMNYYWTLVEPGDKITFEATGNLVVPRYAFAMERNAGSGIIISDTPVHDCNATCQTPKGVINTSLPFQNIHPITIGKCPKYVKSTKLRLATGLRNVPSIQSRGLFGAIAGFIEGGWTGMVDGWYGYHHQNEQGSGYAADLKSTQNAIDGITNKVNSVIEKMNTQFTAVGKEFNHLEKRIENLNKKVDDGFLDIWTYNAELLVLLENERTLDYHDSNVKNLYEKVRSQLKNNAKEIGNGCFEFYHKCDNTCMESVKNGTYDYPKYSEEAKLNREEIDGVKLESTMIYQILAIYSTVASSLVLVVSLGAISFWMCSNGSLQCRICI

SEQ ID NO: 7048 - protein, 566 aa, synthetic construct; identical to SEQ ID NO: 6435
  REGION 1..566: note = hemagglutinin__InfluenzaA__AEL89832

SEQ ID NO: 7049 - protein, 566 aa, synthetic construct
  REGION 1..566: note = hemagglutinin__InfluenzaA__AEL89842
MKAILVVLLYTLATANADTLCIGYHANNSTDTVDTVLEKNVTVTHSVNLLEDKHDGKLCKLRGVAPLHLGKCNIAGWILGNPECESLSTASSWSYIVETSSSDNGTCYPGDFIDYEELREQLSSVSSFERFEIFPKTSSWPNHDSNKGVTAACPHAGAKSFYKNLIWLVKKGNSYPKLSKSYINDKGKEVLVLWGIHHPSTSADQQSLYQNADAYVFVGTSRYSKKFKPEIAIRPKVRDQEGRMNYYWTLVEPGDKITFEATGNLVVPRYAFAMERNAGSGIIISDTPVHDCNATCQTPKGAINTSLPFQNVHPITIGKCPKYVKSTKLRLATGLRNVPSIQSRGLFGAIAGFIEGGWTGMVDGWYGYHHQNEQGSGYAADLKSTQNAIDKITNKVNSVIEKMNTQFTAVGKEFNHLEKRIENLNKKVDDGFLDIWTYNAELLVLLENERTLDYHDSNVKNLYEKVRSQLKNNAKEIGNGCFEFYHKCDNTCMESVKNGTYDYPKYSEEAKLNREEIDGVKLESTRIYQILAIYSTVASSLVLVVSLGAISFWMCSNGSLQCRICI

SEQ ID NO: 7050 - protein, 566 aa, synthetic construct
  REGION 1..566: note = hemagglutinin__InfluenzaA__AEL89852
MKAILVVLLYTFATANADTLCIGYHANNSTDTVDTVLEKNVTVTHSVNLLEDKHNGKLCKLRGVAPLHLGKCNIAGWILGNPECESLSTASSWSYIVETSSSDNGTCYPGDFINYEELREQLSSVSSFERFEIFPKTSSWPNHDSNKGVTAACPHAGAKSFYKNLIWLVKKGNSYPKLSKSYINDKGKEVLVLWGIHHPSTSADQQSLYQNADAYVFVGTSKYSKKFKPEIAVRPKVRDQEGRMNYYWTLVEPGDKITFEATGNLLVPRYAFAMERNAGSGIIISDTPVHDCNTTCQTPKGAINTSLPFQNIHPITIGKCPKYVKSTKLRLATGLRNVPSIQSRGLFGAIAGFIEGGWTGMVDGWYGYHHQNEQGSGYAADLKSTQNAIDKITNKVNSVIEKMNTQFTAVGKEFNHLEKRIENLNKKVDDGFLDIWTYNAELLVLLENERTLDYHDSNVKNLYEKVRSQLKNNAKEIGNGCFEFYHKCDNTCMESVKNGTYDYPKYSEEAKLNREEIDGVKLESTRIYQILAIYSTVASSLVLVVSLGAISFWMCSNGSLQCRICI

SEQ ID NO: 7051 - protein, 566 aa, synthetic construct; identical to SEQ ID NO: 6454
  REGION 1..566: note = hemagglutinin__InfluenzaA__AEL93568

SEQ ID NO: 7052 - protein, 566 aa, synthetic construct; identical to SEQ ID NO: 6435
  REGION 1..566: note = hemagglutinin__InfluenzaA__AEL93578

SEQ ID NO: 7053 - protein, 566 aa, synthetic construct
  REGION 1..566: note = hemagglutinin__InfluenzaA__AEL93598
MKAILVVLLYTFATANADTLCIGYHANNSTDTVDTVLEKNVTVTHSVNLLEDKHNGKLCKLRGVAPLHLGKCNIAGWILGNPECESLSTASSWSYIVETSSSDNGTCYPGVFIDYEELREQLSSVSSFERFEIFPKTSSWPNHDSNKGVTAACPHAGAKSFYKNLIWLVKKGNSYPKLSKSYINDKGKEVLVLWGIHHPSTTADQQSLYQNADAYVFVGTSRYSKKFKPEIAIRPKVRDQEGRMNYYWTLVEPGDKITFEATGNLVVPRYAFAMERNAGSGIIISDTPVHDCNTTCQTPKGAINTSLPFQNIHPITIGKCPKYVKSTKLRLATGLRNVPSIQSRGLFGAIAGFIEGGWTGMVDGWYGYHHQNEQGSGYAADLKSTQNAIDKITNKVNSVIEKMNTQFTAVGKEFNHLEKRIENLNKKVDDGFLDIWTYNAELLVLLENERTLDYHDSNVKNLYEKVRNQLKNNAKEIGNGCFEFYHKCDNTCMESVKNGTYDYPKYSEEAKLNREEIDGVKLESTRIYQILAIYSTVASSLVLVVSLGAISFWMCSNGSLQCRICI

SEQ ID NO: 7054 - protein, 566 aa, synthetic construct
  REGION 1..566: note = hemagglutinin__InfluenzaA__AEL93618
MKAILVVMLYTFATANADTLCIGYHANNSTDTVDTVLEKNVTVTHSVNLLEDKHNGKLCKLRGVAPLHLGKCNIAGWILGNPECESLSTASSWSYIVETSSSDNGTCYPGDFIDYEELREQLSSVSSFERFEIFPKTSSWPNHDSNKGVTAACPHAGAKSFYKNLIWLVKKGNSYPKLSKSYINDKGKEVLVLWGIHHPSTTADQQSLYQNADTYVFVGTSRYSKKFKPEIAIRPKVRDQEGRMNYYWTLVEPGDKITFEATGNLVVPRYAFAMERNAGSGIIISDTPVHDCNTTCQTPKGAINTSLPFQNIHPITIGKCPKYVKSTKLRLATGLRNVPSIQSRGLFGAIAGFIEGGWTGMVDGWYGYHHQNEQGSGYAADLKSTQNAIDKITNKVNSVIEKMNTQFTAVGKEFNHLEKRIENLNKKVDDGFLDIWTYNAELLVLLENERTLDYHDSNVKNLYEKVRNQLKNNAKEIGNGCFEFYHKCDNTCMESVKNGTYDYPKYSEEAKLNREEIDGVKLESTRIYQILAIYSTVASSLVLVVSLGAISFWMCSNGSLQCRICI

SEQ ID NO: 7055 - protein, 566 aa, synthetic construct; identical to SEQ ID NO: 6435
  REGION 1..566: note = hemagglutinin__InfluenzaA__AEL93628

SEQ ID NO: 7056 - protein, 566 aa, synthetic construct; identical to SEQ ID NO: 6870
  REGION 1..566: note = hemagglutinin__InfluenzaA__AEL93638

SEQ ID NO: 7057 - protein, 566 aa, synthetic construct
  REGION 1..566: note = hemagglutinin__InfluenzaA__AEL94870
MKAILVVLLYTFATANADTLCIGYHANNSTDTVDTVLEKNVTVTHSVNLLEDKHNGKLCKLRGVAPLHLGKCNIAGWILGNPECESLSTASSWSYIVETSSSDNGTCYPGDFIDYEELREQLSSVSSFERFEIFPKTSSWPDHDSNKGVTAACPHAGAKSFYKNLIWLVKKGNSYPKLSKSYINDKGKEVLVLWGIHHPSTSADQQSLYQNADAYVFVGTSRYSKKFKPEIAIRPKVRDQEGRMNYYWTLVEPGDKITFEATGNLVVPRYAFAMERNAGSGIIISDTPAHDCNTTCQTPKGAINTSLPFQNIHPITIGKCPKYVKSTKLRLATGLRNVPSIQSRGLFGAIAGFIEGGWTGMVDGWYGYHHQNEQGSGYAADLKSTQNAIDKITNKVNSVIKKMNTQFTAVGKEFNHLEKRIENLNKKVDDGFLDIWTYNAELLVLLENERTLDYHDSNVKNLYEKVRSQLKNNAKEIGNGCFEFYHKCDNTCMESVKNGTYDYPKYSEEAKLNREEIDGVKLESTRIYQILAIYSTVASSLVLVVSLGAISFWMCSNGSLQCRICI

SEQ ID NO: 7058 - protein, 566 aa, synthetic construct
  REGION 1..566: note = hemagglutinin__InfluenzaA__AEL95426
MKAILVVLLYTFATANADTLCIGYHANNSTDTVDTVLEKNVTVTHSVNLLEDKHNGKLCKLRGVAPLHLGKCNIAGWILGNPECESLSTASSWSYIVETSSSDNGTCYPGDFIDYEELREQLSSVSSFERFEIFPKTSSWPNHDSNKGVTAACPHAGAKSFYKNLIWLVKKGNSYPKLSKSYINDKGKEVLVLWGIHHPSTTADQQSLYQNADTYVFVGTSRYSKKFKPEIATRPKVRDQEGRMNYYWTLVEPGDKITFEATGNLVVPRYAFAMERNAGSGIIISDTPVHDCNTTCQTPKGAINTSLPFQNIHPITIGKCPKYVKSTKLRLATGLRNVPSIQSRGLFGAIAGFIEGGWTGMVDGWYGYHHQNEQGSGYAADLKSTQNAIDKITNKVNSVIEKMNTQFTAVGKEFNHLEKRIENLNKKVDDGFLDIWTYNAELLVLLENERTLDYHDSNVKNLYEKVRNQLKNNAKEIGNGCFEFYHKCDNTCMESVKNGTYDYPKYSEEAKLNREEIDGVKLESTRIYQILAIYSTVASSLVLVVSLGAISFWMCSNGSLQCRICI

SEQ ID NO: 7059 - protein, 566 aa, synthetic construct
  REGION 1..566: note = hemagglutinin__InfluenzaA__AEL97631
MKAILVVLLYTFATANADTLCIGYHANNSTDTVDTVLEKNVTVTHSVNILEDKHNGKLCKLRGVAPLHLGKCNIAGWILGNPECESLSTASSWSYIVETSSSDNGTCYPGDFIDYEELREQLSSVSSFKRFEIFPKTSSWPNHDSNKGVTAACPHAGAKSFYKNLIWLVKKGNSYPKLSKSYINDKGKEVLVLWGIHHPSTSADQQSLYQNADAYVFVGTSRYSKKFKPEIAIRPKVRDQEGRMNYYWTLVEPGDKITFEATGNLVVPRYAFAMERNAGSGIIISDTPVHDCNTTCQTPKGAINTSLPFQNIHPTTIGKCPKYVKSTKLRLATGLRNVPSIQSRGLFGAIAGFIEGGWTGMVDGWYGYHHQNEQGSGYAADLKSTQNAIDEITNKVNSVIEKMNTQFTAVGKEFNHLEKRIENLNKKVDDGFLDIWTYNAELLVLLENERTLDYHDSNVKNLYEKVRSQLKNNAKEIGNGCFEFYHKCDNTCMESVKNGTYDYPKYSEEAKLNREEIDGVKLESTRIYQILAIYSTVASSLVLVVSLGAISFWMCSNGSLQCRICI

SEQ ID NO: 7060 - protein, 566 aa, synthetic construct
  REGION 1..566: note = hemagglutinin__InfluenzaA__AEL99664
MKAILVVLLYTFATANADTLCIGYHANNSTDTVDTILEKNVTVTHSVNLLEDKHNGKLCKLRGVAPLHLGKCNIAGWILGNPECESLSTASSWSYIVETSSSDNGTCYPGDFIDYEELREQLSSVSSFKRFEIFPKTSSWPNHDSNKGVTAACPHAGAKSFYKNLIWLVKKGNSYPKLSKSYINDKGKEVLVLWGIHHPSTSADQQSLYQNADAYVFVGTSRYSKKFKPEIAIRPKVRDQEGRMNYYWTLVEPGDKITFEATGNLVVPRYAFAMERNAGSGIIISDTSVHDCNTTCQTPKGAINTSLPFQNIHPITIGKCPKYVKSTKLRLATGLRNVPSIQSRGLFGAIAGFIEGGWTGMVDGWYGYHHQNEQGSGYAADLKSTQNAIDEITNKVNSVIEKMNTQFTAVGKEFNHLEKRIENLNKKVDDGFLDIWTYNAELLVLLENERTLDYHDSNVKNLYEKVRSQLKNNAKEIGNGCFEFYHKCDNTCMESVKNGTYDYPKYSEEAKLNREEIDGVKLESTRIYQILAIYSTVASSLVLVVSLGAISFWMCSNGSLQCRICI

SEQ ID NO: 7061 - protein, 566 aa, synthetic construct
  REGION 1..566: note = hemagglutinin__InfluenzaA__AEL99674
MKAILVVLLYTFATANADTLCIGYHANNSTDTVDTVLEKNVTVTHSVNLLEDKHNGKLCKLRGVAPLHLGKCNIAGWILGNPECESLSTASSWSYIVETSSSDNGTCYPGDFIDYEELREQLSSVSSFERFEIFPKTSSWPNHDSNKGVTAACPHAGAKSFYKNLIWLVKKGNSYPKLSKSYINDKGKEVLVLWGIHHPSTSADQQSLYQNADAYVFVGTSRYSKKFKPEIAIRPKVRDQEGRMNYYWTLVEPGDKIIFEATGNLVVPRYAFAMERNAGSGIIISDTPVHDCNTTCQTPKGAINTSLPFQNIHPITIGKCPKYVKSTKLRLATGLRNVPSIQSRGLFGAIAGFIEGGWTGMVDGWYGYHHQNEQGSGYAADLKSTQNAIDEITNKVNSVIEKMNTQFTAVGKEFNHLEKRIENLNKKVDDGFLDIWTYNAELLVLLENERTLDYHDSNVKNLYEKVRSQLKNNAKEIGNGCFEFYHKCDNTCMESVKNGTYDYPKYSEEAKLNREEIDGVKLESTRIYQILAIYSTVASSLVLVVSLGAISFWMCSNGSLQCRICI

SEQ ID NO: 7062 - protein, 562 aa, synthetic construct; identical to SEQ ID NO: 6271
  REGION 1..562: note = hemagglutinin__InfluenzaA__AEM53455

SEQ ID NO: 7063 - protein, 562 aa, synthetic construct; identical to SEQ ID NO: 1620
  REGION 1..562: note = hemagglutinin__InfluenzaA__AEM53468

SEQ ID NO: 7064 - protein, 565 aa, synthetic construct; identical to SEQ ID NO: 2115
  REGION 1..565: note = hemagglutinin__InfluenzaA__AEM60037

SEQ ID NO: 7065 - protein, 565 aa, synthetic construct
  REGION 1..565: note = hemagglutinin__InfluenzaA__AEM60058
MKVKLLVLLCTFTATYADTICIGYHANNSTDTVDTVLEKNVTVTHSVNLLEESHNGKLCLLKGIAPLQLGNCSVAGWILGNPECELLISKESWSYIVETPNPENGTCYPGYFADYEELREQLSSVSSFERFEIFPKESSWPNHTVTGVSASCSHNGESSFYRNLLWLTGKNGLYPNLSKSYANNKEKDVLVLWGVHHPPNIGDQRALYHTENAYVSVVSSHYSRRFTPEIAKRPKVRDQEGRINYYWTLLEPGDTIIFEANGNLIAPRFAFALGRGFGSGIITSNAPMDKCDAKCQTPQGAINSSLPFQNVHPVTIGECPKYVRSTKLRMVTGLRNIPSIQSRGLFGAIAGFIEGGWTGMVDGWYGYHHQNEQGSGYAADQKSTQNAINGITNKVNSVIEKMNTQFTAVGKEFNKLERRMENLNKKVDDGFLDIWTYNAELLVLLENERTLDFHDSNVKNLYEKVKSQLKNNAKEIGNGCFEFYHKCNDECMESVKNGTYDYPKYSEESKLNREKIDGVKLESMGVYQILAIYSTVASSLVLLVSLGAISFWMCSNGSLQCRICI

SEQ ID NO: 7066 - protein, 566 aa, synthetic construct
  REGION 1..566: note = hemagglutinin__InfluenzaA__AEM60069
MKTIIALSYIFCLVFAQKLPGNDNSTATLCLGHHAVPNGTLVKTITNDQIEVTNATELVQSSSTGRICDSPHRILDGKNCTLIDALLGDPHCDGFQNEKWDLFVERSKAYSNCYPYDVPDYASLRSLVASSGTLEFINEDFNWTGVTQSGGSYACKRGSVKSFFSRLNWLHESEYKYPALNVTMPNNGKFDKLYIWGVHHPSTDREQTNLYVRASGRVTVSTKRSQQTVIPNIGSRPWVRGLSSRISIYWTIVKPGDILLINSTGNLIAPRGYFKIRTGKSSIMRSDAPIGTCSSECITPNGSIPNDKPFQNVNKITYGACPRYVKQNTLKLATGMRNVPEKQTRGIFGAIAGFIENGWEGMVDGWYGFRHQNSEGTGQAADLKSTQAAIDQINGKLNRLIEKTNEKFHQIEKEFSEVEGRIQDLEKYVEDTKIDLWSYNAELLVALENQHTIDLTDSEMNKLFEKTRKQLRENAEDMGNGCFKIYHKCDNACIGSIRNGTYDHDVYRDEALNNRFQIKGVELKSGYKDWILWISFAISCFLLCVVLLGFIMWACQKGNIRCNICI

SEQ ID NO: 7067 - protein, 566 aa, synthetic construct
  REGION 1..566: note = hemagglutinin__InfluenzaA__AEM92308
MKAILVVLLYTFATANADTLCIGYHANNSTDTVDTVLEKNVTVTHSVNLLEDKHNGKLCKLRGVAPLHLGKCNIAGWILGNPECESLSTASSWSYIVETSSSDNGTCYPGDFIDYEELREQLSSVSSFERFEIFPKTSSWPNHDSNKGVTAACPHAGAKSFYKNLIWLVKKRNSYPKLSKSYINDKGKEVLVLWGIHHPSTSADQQSLYQNADAYVFVGSSRYSKKFKPEIAIRPKVRDQEGRMNYYWTLVEPGDKITFEATENLVVPRYAFAMERNAGSGIIISDTPVHDCNTTCQTPKGAINTSLPFQNIHPITIGKCPKYVKSTKLRLATGLRNVPSIQSRGLFGAIAGFIEGGWTGMVDGWYGYHHQNEQGSGYAADLKSTQNAIDEITNKVNSVIEKMNTQFTAVGKEFNHLEKRIENLNKKVDDGFLDIWTYNAELLVLLENERTLDYHDSNVKNLYEKVRSQLKNNAKEVGNGCFEFYHKCDNTCMESVKNGTYDYPKYSEEAKLNREEIDGVKLESTRIYQILAIYSTAASSLVLVVSLGAISFWMCSNGSLQCRICI

SEQ ID NO: 7068 - protein, 566 aa, synthetic construct
  REGION 1..566: note = hemagglutinin__InfluenzaA__AEM92318
MKAILVVLLYTFATANADTLCIGYHANNSTDTVDTVLEKNVTVTHSVDLLEDKHNGKLCKLRGVAPLHLGKCNIAGWILGNPECESLSTASSWSYIVETSSSDNGTCYPGDFIDYEELREQLSSVSSFERFEIFPKTSSWPNHDSNKGVTAACPHAGEKSFYKNLIWLVKKGNSYPKLNKSYINDKGKEVLVLWGIHHPSTSADQQSLYQNADAYVFVGTSRYSKKFKPEIAIRPKVRDQEGRMNYYWTLVEPGDKITFEATGNLVVPRYAFAMERNAGSGIIISDTPIHDCNTTCQTPKGAINTSLPFQNIHPITIGKCPKYVKSTKLRLATGLRNVPSIQSRGLFGAIAGFIEGGWTGMVDGWYGYHHQNEQGSGYAADLKSTQNAIDEITNKVNSVIEKMNTQFTAVGKEFNHLEKRIENLNKKVDDGFLDIWTYNAELLVLLENERTLDYHDSNVKNLYEKVRNQLKNNAKEIGNGCFEFYHKCDNTCMESVKNGTYDYPKYSEEAKLNREEIDGVKLESTRIYQILAIYSTVASSLVLVVSLGAISFWMCSNGSLQCRICI

SEQ ID NO: 7069 - protein, 566 aa, synthetic construct
  REGION 1..566: note = hemagglutinin__InfluenzaA__AEM92328
MKAILVVLLYTFATANADTLCIGYHANNSTDTVDTVLEKNVTVTHSVNLLEDKHNGKLCKLRGVAPLHLGKCNIAGWILGNPECESLSTASSWSYIVETSSSDNGTCYPGDFIDYEELREQLSSVSSFERFEIFPKTSSWPNHDSNKGVTAACPHAGAKSFYKNLIWLVKKGNSYPKLNISYINDKGKEVLVLWGIHHPSTTADQQSLYQNADAYVFVGTSRYSKKFKPEIAIRPKVRDQEGRMNYYWTLVEPGDKITFEATGNLVVPRYAFAMERNAGSGIIISDTPVHDCNTTCQTPKGAINTSLPFQNIHPITIGKCPKYVKSTKLRLATGLRNVPSIQSRGLFGAIAGFIEGGWTGMVDGWYGYHHQNEQGSGYAADLKSTQNAIDKITNKVNSVIEKMNTQFTAVGKEFNHLEKRIENLNKKVDDGFLDIWTYNAELLVLLENERTLDYHDSNVKNLYEKVRNQLKNNAKEIGNGCFEFYHKCDNTCMESVKNGTYDYPKYSEEAKLNREEIDGVKLESTRIYQILAIYSTVASSLVLVVSLGAISFWMCSNGSLQCRICI

SEQ ID NO: 7070 - protein, 566 aa, synthetic construct
  REGION 1..566: note = hemagglutinin__InfluenzaA__AEM92348
MKAILVVLLYTFATANADTLCIGYHANNSTDTVDTVLEKNVTVTHSVDLLEDKHNGKLCKLRGVAPLHLGKCNIAGWILGNPECESLSTASSWSYIVETSSSDNGTCYPGDFIDYEELREQLSSVSSFERFEIFPKTSSWPNHDSNKGVTAACPHAGEKSFYKNLIWLVKKGNSYPKLNKSYINDKGKEVLVLWGIHHPSTSADQQSLYQNADAYVFVGTSRYSKKFKPEIAIRPKVRDQEGRMNYYWTLVEPGDKITFEATGNLVVPRYAFAMERNAGSGIIISDTPIHDCNTTCQTPKGAINTSLPFQNIHPITIGKCPKYVKSTKLRLATGLRNVPSIQSRGLFGAIAGFIEGGWTGMVDGWYGYHHQNEQGSGYAADLKSTQNAIDEITNKVNSVIEKMNTQFTAVGKEFNHLEKRIENLNKKVDDGFLDIWTYNAELLVLLENERTLDYHDSNVKNLYEKVKSQLKNNAKEIGNGCFEFYHKCDNTCMESVKNGTYDYPKYSEEAKLNREKIDGVKLESTRIYQILAIYSTVASSLVLVVSLGAISFWMCSNGSLQCRICI

SEQ ID NO: 7071 - protein, 566 aa, synthetic construct
  REGION 1..566: note = hemagglutinin__InfluenzaA__AEM92358
MKAILVVLLYTFATANADTLCIGYHANNSTDTVDTVLEKNVTVTHSVNLLEDKHNGKLCKLRGVAPLHLGKCNIAGWILGNPECESLSTASSWSYIVETSSSDNGTCYPGDFINYEELREQLSSVSSFERFEIFPKTSSWPNHDSNKGVTAACPHAGAKSFYKNLIWLVKEGNSYPKLSKSYINDKGKEVLVLWGIHHPSTTTDQQSLYQNADAYVFVGTSRYSKKFKPEIAIRPKMRDQEGRMNYYWTLVEPGDKITFEATGNLVVPRYAFAMERNAGSGIIISDTPVHDCNTTCQTPKGAINTSLPFQNIHPITIGKCPKYVKSTKLRLATGLRNVPSIQSRGLFGAIAGFIEGGWTGMVDGWYGYHHQNEQGSGYAADLKSTQNAIDKITNKVNSVIEKMNTQFTAVGKEFNHLEKRIENLNKKVDDGFLDIWTYNAELLVLLENERTLDYHDSNVKNLYEKVRNQLKNNAKEIGNGCFEFYHKCDNTCMESVKNGTYDYPKYSEEAKLNREEIDGVKLESTRIYQILAIYSTVASSLVLVVSLGAISFWMCSNGSLQCRICI

SEQ ID NO: 7072 - protein, 566 aa, synthetic construct
  REGION 1..566: note = hemagglutinin__InfluenzaA__AEM92368
MKAILVVLLYTFATANADTLCIGYHANNSTDTVDTVLEKNVTVTHSVNLLEDKHNGKLCKLRGVAPLHLGKCNIAGWILGNPECESLSTASSWSYIVETSSSDNGTCYPGDFIDYEELREQLSSVSSFERFEIFPKTSSWPNHDSNKGVTAACPHAGAKSFYKNLIWLVKKGNSYPKLNKSYINDKGKEVLVLWGIHHPSTTADQQSLYQNADAYVFVGTSRYSKKFKPEIAIRPKVRDQEGRMNYYWTLVEPGDKITFEATGNLVVPRYAFAMERNAGSGIIISDTPVHDCNTTCQTPKGAINTSLPFQNIHPITIGKCPKYVKSTKLRLATGLRNVPSIQSRGLFGAIAGFIEGGWTGMVDGWYGYHHQNEQGSGYAADLKSTQNAIDKITNKVNSVIEKMNTQFTAVGKEFNHLEKRIENLNKKVDDGFLDIWTYNAELLVLLENERTLDYHDSNVKNLYEKVRNQLKNNAKEIGNGCFEFYHKCDNTCMESVKNGTYDYPKYSEEAKLNREEIDGVKLESTRIYQILAIYSTVASSLVLVVSLGAISFWMCSNGSLQCRICI

SEQ ID NO: 7073 - protein, 566 aa, synthetic construct
  REGION 1..566: note = hemagglutinin__InfluenzaA__AEM92378
MKAILVVLLYTFATANADTLCIGYHANNSTDTVDTVLEKNVTVTHSVNLLEDKHNGKLCKLRGVAPLHLGKCNIAGWILGNPECESLSTASSWSYIVETSSSDNGTCYPGDFIDYEELREQLNSVSSFERFEIFPKTSSWPNHDSNKGVTAACPHAGAKSFYKNLIWLVKKGNSYPKLNKSYINDKGKEVLVLWGIHHPSTTADQQSLYQNADAYVFVGTSRYSKKFKPEIAIRPKVRDQEGRMNYYWTLVEPGDKITFEATGNLVVPRYAFAMERNAGSGIIISDTPVHDCNTTCQTPKGAINTSLPFQNIHPITIGKCPKYVKSTKLRLATGLRNVPSIQSRGLFGAIAGFIEGGWTGMVDGWYGYHHQNEQGSGYAADLKSTQNAIDKITNKVNSVIEKMNTQFTAVGKEFNHLEKRIENLNKKVDDGFLDIWTYNAELLVLLENERTLDYHDSNVKNLYEKVRNQLKNNAKEIGNGCFEFYHKCDNTCMESVKNGTYDYPKYSEEAKLNREEIDGVKLESTRIYQILAIYSTVASSLVLVVSLGAISFWMCSNGSLQCRICI

SEQ ID NO: 7074 - protein, 566 aa, synthetic construct
  REGION 1..566: note = hemagglutinin__InfluenzaA__AEM92407
MKAILVVLLYTFATANADTLCIGYHANNSTDTVDTVLEKNVTVTHSVNLLEDKHNGKLCKLRGVAPLHLGKCNIAGWILGNPECESLSTANSWSYIVETSSSDNGTCYPGDFIDYEELREQLSSVSSFERFEIFPKTNSWPNHDSNKGVTAACPHAGAKSFYKNLIWLVKKGNSYPKLSKSYINDKGKEVLVLWGIHHPSTSTDQQSLYQNADAYVFVGTSRYSKKFKPEIAIRPKVRNQEGRMNYYWTLVEPGDKITFEATGNLVVPRYAFTIERNAGSGIIISDTPIHDCNTTCQTPKGAINTSLPFQNIHPITIGKCPKYVKSTKLRLATGLRNVPSIQSRGLFGAIAGFIEGGWTGMVDGWYGYHHQNEQGSGYAADLKSTQNAIDEITNKVNSVIEKMNTQFTAVGKEFNHLEKRIENLNKKVDDGFLDIWTHNAELLVLLENERTLDYHDSNVKNLYEKVRSQLKNNAKEIGNGCFEFYHKCDNTCMESVKNGTYDYPKYSEEAKLNREEIDGVKLESTRIYQILAIYSTVASSLVLVVSLGAISFWMCSMGSLQCRICI

SEQ ID NO: 7075 - protein, 566 aa, synthetic construct
  REGION 1..566: note = hemagglutinin__InfluenzaA__AEM92417
MKAILVVLLYTFATANADTLCIGYHANNSTDTVDTVLEKNVTVTHSVNILEDKHNGKLCKLRGVAPLHLGKCNIAGWILGNPECESLSTASSWSYIVETSSSDNGTCYPGDFIDYEELREQLSSVSSFERFEIFPKASSWPNHDSNKGVTAACPHAGAKSFYKNLIWLVKKENSYPKLSKSYINDKGKEVLVLWGIHHPSTSADQQSLYQNADAYVFVGSSRYSKKFKPEIAIRPKVRDQEGRMNYYWTLVEPGDKITFEATGNLVVPRYAFAMERNAGSGIIISDTPVHDCNTTCQTPKGAINTSLPFQNIHPITIGKCPKYVKSTKLRLATGLRNVPSIQSRGLFGAIAGFIEGGWTGMVDGWYGYHHQNEQGSGYAADLKSTQNAIDEITNKVNSVIEKMNTQFTAVGKEFNHLEKRIENLNKKVDDGFLDIWTYNAELLVLLENERTLDYHDSNVKNLYEKVRSQLKNNAKEIGNGCFEFYHKCDNTCMESVKNGTYDYPKYSEEAKLNREEIDGVKLESTRIYQILAIYSTVASSLVLVVSLGAISFWMCSNGSLQCRICI

SEQ ID NO: 7076 - protein, 566 aa, synthetic construct
  REGION 1..566: note = hemagglutinin__InfluenzaA__AEM92428
MKAILVVLLYTFATANADTLCIGYHANNSTDTVDTVLEKNVTVTHSVNLLEDKHNGKLCKLRGVAPLHLGKCNIAGWILGNPECESLSTASSWSYIVETSSSDNGTCYPGDFIDYEELREQLSSVSSFERFEIFPKTSSWPNHDSNKGVTAACPHAGAKSFYKNLIWLVKKGNSYPKLSKSYINDKGKEVLVLWGIHHPSTSADQQSLYQNADAYVFVGTSRYSKKFKPEIAIRPKVRDQEGRMNYYWTLVEPGDKITFEATGNLVVPRYAFAMERNAGSGIIISDTPVHDCNTTCQTPKGAINTSLPFQNIHPITIGKCPKYVKSTKLRLATGLRNVPSIQSRGLFGAIAGFIEGGWTGMVDGWYGYHHQNEQGSGYAADLKSTQNAIDEITNKVNSVIEKMNTQFTAVGKEFNHLEKRIENLNKKVDDGFLDIWTYNAELLVLLENERTLDYHDSNVKNLYEKVRSQLKNNAKEIGNGCFEFYHKCDNMCMESVKNGTYDYPKYSEEAKLNREEIDGVKLESTRIYQILAIYSTVASSLVLVVSLGAISFWMCSNGSLQCRICI

SEQ ID NO: 7077 - protein, 566 aa, synthetic construct
  REGION 1..566: note = hemagglutinin__InfluenzaA__AEM92438
MKAILVVLLYTFATANADTLCIGYHANNSTDTVDTVLEKNVTVTHSVNLLEDKHNGKLCKLRGVAPLHLGKCNIAGWILGNPECESLSTASSWSYIVETSSSDNGTCYPGDFIDYEELREQLSSVSSFERFEIFPKTSSWPNHDSNKGVTAACPHAGAKGFYKNLIWLVKKGNSYPKLSKSYINDKGKEVLVLWGIHHPSTTADQQSLYQNADTYVFVGTSRYSKKFKPEIAIRPKVRDQEGRMNYYWTLVEPGDKITFEATGNLVVPRYAFAMERNAGSGIIISDTPVHDCNTTCQTPKGAINTSLPFQNIHPITIGKCPKYVKSTKLRLATGLRNVPSIQSRGLFGAIAGFIEGGWTGMVDGWYGYHHQNEQGSGYAADLKSTQNAIDKITNKVNSVIEKMNTQFTAVGKEFNHLEKRIENLNKKVDDGFLDIWTYNAELLVLLENERTLDYHDSNVKNLYEKIRNQLKNNAKEIGNGCFEFYHKCDNTCMESVKNGTYDYPKYSEEAKLNREEIDGVKLESTRIYQILAIYSTVASSLVLVVSLGAISFWMCSNGSLQCRICI

SEQ ID NO: 7078 - protein, 566 aa, synthetic construct; identical to SEQ ID NO: 6809
  REGION 1..566: note = hemagglutinin__InfluenzaA__AEM92448

SEQ ID NO: 7079 - protein, 566 aa, synthetic construct; identical to SEQ ID NO: 6809
  REGION 1..566: note = hemagglutinin__InfluenzaA__AEM92458

SEQ ID NO: 7080 - protein, 566 aa, synthetic construct
  REGION 1..566: note = hemagglutinin__InfluenzaA__AEM92468
MKAILVVLLYTFATANADTLCIGYHANNSTDTVDTVLEKNVTVTHSVNLLEDKHNGKLCKLRGVAPLHLGKCNIAGWILGNPECESLSTASSWSYIVETSSSDNGTCYPGDFINYEELREQLSSVSSFERFEIFPKTSSWPNHDSNKGVTAACPHAGAKSFYKNLIWLVKKGNSYPKLSKSYINDKGKEVLVLWGIHHPSTSADQQSLYQNADAYVFVGTSKYSKEFKPEIAVRPKVRDQEGRMNYYWTLVEPGDKITFEATGNLLVPRYAFAMERNAGSGIIISDTPVHDCNTICQTPKGAINTSLPFQNIHPITIGKCPKYVKSTKLRLATGLRNVPSIQSRGLFGAIAGFIEGGWTGMVDGWYGYHHQNEQGSGYAADLKSTQNAIDKITNKVNSVIEKMNTQFTAVGKEFNHLEKRIENLNKKVDDGFLDIWTYNAELLVLLENERTLDYHDSNVKNLYEKVRSQLKNNAKEIGNGCFEFYHKCDNTCMESVKNGTYDYPKYSEEAKLNREEIDGVKLESTRIYQILAIYSTVASSLVLVVSLGAISFWMCSNGSLQCRICI

SEQ ID NO: 7081 - protein, 566 aa, synthetic construct
  REGION 1..566: note = hemagglutinin__InfluenzaA__AEM92478
MKAILVVLLYTFATANADTLCIGYHANNSTDTVDTVLEKNVTVTHSVNLLEDKHNGKLCKLRGVAPLHLGKCNIAGWILGNPECESLSTASSWSYIVETSSSDNGTCYPGDFINYEELREQLSSVSSFERFEIFPKTSSWPNHDSNKGVTAACPHAGAKSFYKNLIWLVKKGNSYPKLSKSYINDKGKEVLVLWGIHHPSTSADQQSLYQNADAYVFVGTSKYSKKFKPEIAVRPKVRDQEGRMNYYWTLVEPGDKITFEATGNLLVPRYAFAMERNAGSGIIISDTPVHDCNTICQTPKGAINTSLPFQNIHPITIGKCPKYVKSTKLRLATGLRNVPSIQSRGLFGAIAGFIEGGWTGMVDGWYGYHHQNEQGSGYAADLKSTQNAIDKITNKVNSVIEKMNTQFTAVGKEFNHLEKRIENLNKKVDDGFLDIWTYNAELLVLLENERTLDYHDSNVKNLYEKVRSQLKNNAKEIGNGCFEFYHKCDNTCMESVKNGTYDYPKYSEEAKLNREEIDGVKLESTRIYQILAIYSTVASSLVLVVSLGAISFWMCSNGSLQCRICI

SEQ ID NO: 7082 - protein, 566 aa, synthetic construct
  REGION 1..566: note = hemagglutinin__InfluenzaA__AEM92498
MKAILVVLLYTFATANADTLCIGYHANNSTDTVDTVLEKNVTVTHSVNLLEDKHNGKLCKLRGVAPLHLGKCNIAGWILGNPECESLSTANSWSYIVETSSSDNGTCYPGDFIDYEELREQLSSVSSFERFEIFPKTNSWPNHDSNKGVTAACPHAGAKSFYKNLIWLVKKGNSYPKLSKSYINDKGKEVLVLWGIHHPSTSADQQSLYQNADAYVFVGTSRYSKKFKPEIAIRPKVRDQEGRMNYYWTLVEPGDKITFEATGNLVVPRYAFAMERNAGSGIIISDTPAHDCNTTCQTPKGAINTSLPFQNIHPITIGKCPKYVKSTKLRLATGLRNVPSIQSRGLFGAIAGFIEGGWTGMVDGWYGYHHQNEQGSGYAADLKSTQNAIDKITNKVNSVIEKMNTQFTAVGKEFNHLEKRIENLNKKVDDGFLDIWTYNAELLVLLENERTLDYHDSNVKNLYEKVRSQLKNNAKEIGNGCFEFYHKCDNTCMESVKNGTYDYPKYSEEAKLNREEIDGVKLESTRIYQILAIYSTVASSLVLVVSLGAISFWMCSNGSLQCRICI

SEQ ID NO: 7083 - protein, 566 aa, synthetic construct
  REGION 1..566: note = hemagglutinin__InfluenzaA__AEM92518
MKAILVVLLYTFATANADTLCIGYHANNSTDTVDTVLEKNVTVTHSVNLLEDKHNGKLCKLRGVAPLHLGKCNIAGWILGNPECESLSTASSWSYIVETSSSDNGTCYPGDFIDYEELREQLSSVSSFERFEIFPKTSSWPNHDSNKGVTTACPHAGAKSFYKNLIWLVKKGNSYPKLSKSYINDKRKEVLVLWGIHHPPTSADQQSLYQNADAYVFVGTSRYSKKFKPEIAIRPKVRDQEGRMNYYWTLVEPGDKITFEATGNLVVPRYAFAMERNAGSGIIISDTPVHDCNATCQTPKGAINTSLPFQNIHPITIGKCPKYVKSTKLRLATGLRNVPSIQSRGLFGAIAGFIEGGWTGMVDGWYGYHHQNEQGSGYAADLKSTQNAIDEITNKVNSVIEKMNTQFTAVGKEFNHLEKRIENLNKKVDDGFLDIWTYNAELLVLLENERTLDYHDSKVKNLYEKVRSQLKNNAKEIGNGCFEFYHKCDNTCMESVKNGTYDYPKYSEEAKLNREEIDGVKLESTRIYQILAIYSTVASSLVLVVSLGAISFWMCSNGSLQCRICI

SEQ ID NO: 7084 - protein, 566 aa, synthetic construct
  REGION 1..566: note = hemagglutinin__InfluenzaA__AEM92528
MKAILVVLLYTFATANADTLCIGYHANNSTDTVDTVLEKNVTVTHSVNLLEDKHNGKLCKLRGVAPLHLGKCNIAGWILGNPECESLSTASSWSYIVETSSSDNGTCYPGDFIDYEELREQLSSVSSFERFEIFPKTSSWPNHDSNKGVTAACPHAGAKSFYKNLIWLVKKGNSYPKLNKSYINDKGKEVLVLWGIHHPSTSADQQSLYQNADAYVFVGTSRYSKKFKPEIAIRPKVRDQEGRMNYYWTLVEPGDKITFEATGNLVVPRYAFAMERNAGSGIIISDTPVHDCNTTCQTPKGAINTSLPFQNIHPITIGKCPKYVKSTKLRLATGLRNVPSIQSRGLFGAIAGFIEGGWTGMVDGWYGYHHQNEQGSGYAADLKSTQNAIDKITNKVNSVIEKMNTQFTAVGKAFNHLEKRIENLNKKVDDGFLDIWTYNAELLVLLENERTLDYHDSNVKNLYEKVRNQLKNNAKEIGNGCFEFYHKCDNTCMESVKNGTYDYPKYSEEAKLNREEIDGVKLESTRIYQILAIYSTVASSLVLVVSLGAISFWMCSNGSLQCRICI

SEQ ID NO: 7085 - protein, 566 aa, synthetic construct
  REGION 1..566: note = hemagglutinin__InfluenzaA__AEM92548
MKAILVVLLYTFATATADTLCIGYHANNSTDTVDTVLEKNVTVTHSVNLLEDKHNGKLCKLRGVAPLHLGKCNIAGWILGNPECESLSTASSWSYIVETSSSDNGTCYPGDFINYEELREQLSSVSSFERFEIFPKTSSWPNHDSNKGVTAACPHAGAKSFYKNLIWLVKKGNSYPKLSKSYINDKGKEVLVLWGIHHPSTSADQQSLYQNADAYVFVGTSRYSKKFKPEIAIRPKVRDQEGRMNYYWTLVEPGDKITFEATGNLVVPRYAFAMERNAGSGIIISDTPVHDCNTTCQTPKGAINTSLPFQNIHPITIGKCPKYVKSTKLRLATGLRNVPSIQSRGLFGAIAGFIEGGWTGMVDGWYGYHHQNEQGSGYAADLKSTQNAIDKITNKVNSVIEKMNTQFTAVGKEFNHLEKRIENLNKKVDDGFLDIWTYNAELLVLLENERTLDYHDSNVKNLYEKVRNQLKNNAKEIGNGCFEFYHKCDNTCMESVKNGTYDYPKYSEEAKLNREEIDGVKLESTRIYQILAIYSTVASSLVLVVSLGAISFWMCSNGSLQCRICI

SEQ ID NO: 7086 - protein, 566 aa, synthetic construct
  REGION 1..566: note = hemagglutinin__InfluenzaA__AEM92558
MKAILVVLLYTFATANADTLCIGYHANNSTDTVDTVLEKNVTVTHSVNLLEDKHNGKLCKLRGVAPLHLGKCSIAGWILGNPECESLSTASSWSYIVETSSSDNGTCYPGDFINYEELREQLSSVSSFERFEIFPKTSSWPNHDSNKGVTAACPHAGAKSFYKNLIWLVKKGNSYPKLSKSYINDKGKEVLVLWGIHHPSTTADQQSLYQNADAYVFVGTSRYSKKFKPEIAIRPKVRDQEGRMNYYWTLVEPGDKITFEATGNLVVPRYAFAMERNAGSGIIISDTPVHDCNTTCQTPKGAINTSLPFQNIHPITIGKCPKYVKSTKLRLATGLRNVPSIQSRGLFGAIAGFIEGGWTGMVDGWYGYHHQNEQGSGYAADLKSTQNAIDKITNKVNSVIEKMNTQFTAVGKEFNHLEKRIENLNKKVDDGFLDIWTYNAELLVLLENERTLDYHDSNVKNLYEKVRNQLKNNAKEIGNGCFEFYHKCDNTCMESVKNGTYDYPKYSEEAKLNREEIDGVKLESTRIYQILAIYSTVASSLVLVVSLGAISFWMCSNGSLQCRICI

SEQ ID NO: 7087 - protein, 566 aa, synthetic construct; identical to SEQ ID NO: 7086
  REGION 1..566: note = hemagglutinin__InfluenzaA__AEM92568

SEQ ID NO: 7088 - protein, 566 aa, synthetic construct
  REGION 1..566: note = hemagglutinin__InfluenzaA__AEM92578
MKAILVVLLYTFATANADTLCIGYHANNSTDTVDTVLEKNVTVTHSVNLLEDKHNGKLCKLRGVAPLHLGKCNIAGWILGNPECESLSTASSWSYIVETSISDNGTCYPGDFINYEELREQLSSVSSFERFEIFPKTSSWPNHDSNKGVTAACPHAGAKSFYKNLIWLVKKGNSYPKLSKSYINDKGKEVLVLWGIHHPSTSADQQSLYQNADAYVFVGTSRYSKKFKPEIAIRPKVRDQEGRMNYYWTLVEPGDKITFEATGNLVVPRYAFAMERNAGSGIIISDTPVHDCNTTCQTPKGAINTSLPFQNIHPITIGKCPKYVKSTKLRLATGLRNVPSIQSRGLFGAIAGFIEGGWTGMVDGWYGYHHQNEQGSGYAADLKSTQNAIDKITNKVNSVIEKMNTQFTAVGKEFNHLEKRIENLNKKVDDGFLDIWTYNAELLVLLENERTLDYHDSNVKNLYEKVRNQLKNNAKEIGNGCFEFYHKCDNTCMESVKNGTYDYPKYSEEAKLNREEIDGVKLESTRIYQILAIYSTVASSLVLVVSLGAISFWMCSNGSLQCRICI

SEQ ID NO: 7089 - protein, 566 aa, synthetic construct
  REGION 1..566: note = hemagglutinin__InfluenzaA__AEM92608
MKAILVVLLYTFATANADTLCIGYHANNSTDTVDTVLEKNVTVTHSVNLLEDKHNGKLCKLRGVAPLHLGKCNIAGWILGNPECESLSTASSWSYIVETSSSDNGTCYPGDFIDYEELREQLSSVSSFERFEIFPKTSSWPNHDSNKGVTAACPHAGAKSFYKNLIWLVKKGNSYPKLSKSYINDKGKEVLVLWGIHHPSTTADQQSLYQNADAYVFVGTSRYSKKFKPEIAIRPKVRDQEGRMNYYWTLVEPGDKITFEATGNLVVPRYAFAMERNAGSGIIISDTPVHDCNTTCQTPKGAINTSLPFQNIHPITIGKCPKYVKSTKLRLATGLRNVPSIQSRGLFGAIAGFIEGGWTGMVDGWYGYHHQNEQGSGYAADLKSTQNAIDKITNKVNSVIEKMNTQFTAVGKEFNHLEKRIENLNKKVDDGFLDIWTYNAELLVLLENERTLDYHDSNVKNLYEKVRNQLKNNAKEIGNGCFEFYHKCDNTCMESVKNGTYDYPKYSEEAKLNREEIDGVKLESTRIYQILAIYSTVASSLVLVVSLGAISFWMCSNGSLQCRICI

SEQ ID NO: 7090 - protein, 566 aa, synthetic construct
  REGION 1..566: note = hemagglutinin__InfluenzaA__AEM92618
MKAILVVLLYTFATANADTLCIGYHANNSTDTVDTVLEKNVTVTHSVNLLEDKHNGKLCKLRGVAPLHLGKCNIAGWILGNPECESLSTANSWSYIVETSSSDNGTCYPGDFIDYEELREQLSSVSSFERFEIFPKTNSWPNHDSNKGVTAACPHAGAKSFYKNLIWLVKTGNSYPKLSKSYINDKGKEVLVLWGIHHPSTSADQQSLYQNADAYVFVGTSRYSRKFKPEIAIRPKVRDQEGRMNYYWTLVEPGDKITFEATGNLVVPRYAFAMERNAGSGIIISDTPAHDCNTTCQTPKGAINTSLPFQNIHPITIGKCPKYVKSTKLRLATGLRNVPSIQSRGLFGAIAGFIEGGWTGMVDGWYGYHHQNEQGSGYAADLKSTQNAIDKITNKVNSVIEKMNTQFTAVGKEFNHLEKRIENLNKKVDDGFLDIWTYNAELLVLLENERTLDYHDSNVKNLYEKVRSQLKNNAKEIGNGCFEFYHKCDNTCMESVKNGTYDYPKYSEEAKLNREEIDGVKLESTRIYQILAIYSTVASSLVLVVSLGAISFWMCSNGSLQCRICI

SEQ ID NO: 7091 - protein, 566 aa, synthetic construct
  REGION 1..566: note = hemagglutinin__InfluenzaA__AEM92638
MKAILVVLLYTFATANADTLCIGYHANNSTDTVDTVLEKNVTVTHSVNILEDKHNGKLCKLRGVAPLHLGKCNIAGWILGNPECESLSTASSWSYIVETSSSDNGTCYPGDFIDYEELREQLSSVSSFERFEIFPKTSSWPNHDTNKGVTAACPHAGAKSFYKNLIWLVKKGNSYPKLSKSYINDKGKEVLVLWGIHHPSTSADQQSLYQNADAYVFVGSSRYSKKFKPEIAIRPKVRDQEGRMNYYWTLVEPGDKITFEATGNLVVPRYAFAMEKNAGSGIIISDTPVHDCNTTCQTPKGAINTSLPFQNIHPITIGKCPKYVKSTKLRLATGLRNVPSIQSRGLFGAIAGFIEGGWTGMVDGWYGYHHQNEQGSGYAADLKSTQNAIDEITNKVNSVIEKMNTQFTAVGKEFNHLEKRIENLNKKVDDGFLDIWTYNAELLVLLENERTLDYHDSNVKNLYEKVRSQLKNNAKEVGNGCFEFYHKCDNTCMESVKNGTYDYPKYSEEAKLNREEIDGVKLESTRIYQILAIYSTAASSLVLVVSLGAISFWMCSNGSLQCRICI

SEQ ID NO: 7092 - protein, 566 aa, synthetic construct
  REGION 1..566: note = hemagglutinin__InfluenzaA__AEM92648
MKAILVVLLYTFATANADTLCIGYHANNSTDTVDTVLEKNVTVTHSVNILEDKHNGKLCKLRGVAPLHLGKCNIAGWILGNPECESLSTASSWSYIVETSSSDNGTCYPGDFIDYEELREQLSSVSSFERFEIFPKTSSWPNHDTNKGVTAACPHAGAKSFYKNLIWLVKEGNSYPKLSKSYINDKGKEVLVLWGIHHPSTSADQQSLYQNADAYVFVGSSRYSKKFKPEIAIRPKVRDQEGRMNYYWTLVEPGDKITFEATGNLVVPRYAFAMEKNAGSGIIISDTPVHDCNTTCQTPKGAINTSLPFQNIHPITIGKCPKYVKSTKLRLATGLRNVPSIQSRGLFGAIAGFIEGGWTGMVDGWYGYHHQNEQGSGYAADLKSTQNAIDEITNKVNSVIEKMNTQFTAVGKEFNHLEKRIENLNKKVDDGFLDIWTYNAELLVLLENERTLDYHDSNVKNLYEKVRSQLKNNAKEVGNGCFEFYHKCDNTCMESVKNGTYDYPKYSEEAKLNREEIDGVKLESTRIYQILAIYSTAASSLVLVVSLGAISFWMCSNGSLQCRICI

SEQ ID NO: 7093 - protein, 566 aa, synthetic construct; identical to SEQ ID NO: 5533
  REGION 1..566: note = hemagglutinin__InfluenzaA__AEM98407

SEQ ID NO: 7094 - protein, 566 aa, synthetic construct; identical to SEQ ID NO: 5533
  REGION 1..566: note = hemagglutinin__InfluenzaA__AEM98418

SEQ ID NO: 7095 - protein, 566 aa, synthetic construct; identical to SEQ ID NO: 5533
  REGION 1..566: note = hemagglutinin__InfluenzaA__AEM98429

SEQ ID NO: 7096 - protein, 566 aa, synthetic construct
  REGION 1..566: note = hemagglutinin__InfluenzaA__AEN55398
MKAILVVLLYTFATANADTLCIGYHANNSTDTVDTVLEKNVTVTHSVNLLEDKHNGKLCKLRGVAPLHLGKCNIAGWILGNPECESLSTASSWSYIVETSSSDNGTCYPGNFIDYEELREQLSSVSSFERFEIFPKTSSWPDHDSNKGVTAACPHAGAKSFYKNLIWLVKKGNSYPKLSKSYINDKGKEVLVLWGIHHPSTSADQQSLYQNADAYVFVGTSRYSKKFKPEIAIRPKVRDQEGRMNYYWTLVEPGDKITFEATGNLVAPRYAFAMERNAGSGIIISDTPVHDCNTTCQTPKGAINTSLPFQNIHPITIGKCPKYVKSTKLRLVTGLRNVPSIQSRGLFGAIAGFIEGGWTGMVDGWYGYHHQNEQGSGYAADLKSTQNAIDKITNKVNSVIEKMNTQFTAVGKEFNHLEKRIENLNKKVDDGFLDIWTYNAELLVLLENERTLDYHDSNVKNLYEKVRSQLKNNAKEIGNGCFEFYHKCDNTCMESVKNGTYDYPKYSEEAKLNREEIDGVKLESTRIYQILAIYSTVASSLVLVVSLGAISFWMCSNGSLQCRICI

SEQ ID NO: 7097 - protein, 566 aa, synthetic construct; identical to SEQ ID NO: 6920
  REGION 1..566: note = hemagglutinin__InfluenzaA__AEN55408

SEQ ID NO: 7098 - protein, 566 aa, synthetic construct; identical to SEQ ID NO: 6435
  REGION 1..566: note = hemagglutinin__InfluenzaA__AEN55418

SEQ ID NO: 7099 - protein, 566 aa, synthetic construct; identical to SEQ ID NO: 5584
  REGION 1..566: note = hemagglutinin__InfluenzaA__AEN55463

SEQ ID NO: 7100 - protein, 566 aa, synthetic construct
  REGION 1..566: note = hemagglutinin__InfluenzaA__AEN55473
MKAILVVLLYTFATANADTLCIGYHANNSTDTVDTVLEKNVTVTHSVNLLEDKHNGKLCKLRGVAPLHLGKCNIAGWILGNPECESLSTASSWSYIVETSSSDNGTCYPGDFIDYEELREQLSSVSSFERFEIFPKTSSWPNHDSNKGVTAACPHAGAKSFYKNLIWLVKKGNSYPKLSKSYINDKGKEVLVLWGIHHPSTTTDQQSLYQTADTYVFVGTSRYSKKFKPEIAIRPKVRDQEGRMNYYWTLVEPGDKITFEATGNLVVPRYAFAMERNAGSGIIISDTPVHDCNTTCQTPKGAINTSLPFQNIHPITIGKCPKYVKSTKLRLATGLRNVPSIQSRGLFGAIAGFIEGGWTGMVDGWYGYHHQNEQGSGYAADLKSTQNAIDKITNKVNSVIEKMNTQFTAVGKEFNHLEKRIENLNKKVDDGFLDIWTYNAELLVLLENERTLDYHDSNVKNLYEKVRNQLKTNAKEIGNGCFEFYHKCDNTCMESVKNGTYDYPKYSEEAKLNREEIDGVKLESTRIYQILAIYSTVASSLVLVVSLGAISFWMCSNGSLQCRICI

SEQ ID NO: 7101 - protein, 566 aa, synthetic construct; identical to SEQ ID NO: 6435
  REGION 1..566: note = hemagglutinin__InfluenzaA__AEN55483

SEQ ID NO: 7102 - protein, 566 aa, synthetic construct; identical to SEQ ID NO: 7042
  REGION 1..566: note = hemagglutinin__InfluenzaA__AEN55493

SEQ ID NO: 7103 - protein, 566 aa, synthetic construct; identical to SEQ ID NO: 6435
  REGION 1..566: note = hemagglutinin__InfluenzaA__AEN55503

SEQ ID NO: 7104 - protein, 566 aa, synthetic construct
  REGION 1..566: note = hemagglutinin__InfluenzaA__AEN55513
MKAILVVLLYTFATANADTLCIGYHANNSTDTVDTVLEKNVTVTHSVNLLEDKHNGKLCKLRGVAPLHLGKCNIAGWILGNPECESLSTASSWSYIVETSSSDNGTCYPGDFIDYEELREQLSSVSSFERFEIFPKTSSWPNHDSNKGVTAACPHAGAKSFYKNLIWLVKKGNSYPKLSKSYINDKGKEVLVLWGIHHPSTTADQQNLYQNADTYVFVGTSRYSKKFKPEIAIRPKVRDQEGRMNYYWTLVEPGDKITFEATGNLVVPRYAFAMERNAGSGIIISDTPVHDCNTTCQTPKGAINTSLPFQNIHPITIGKCPKYVKSTKLRLATGLRNVPSIQSRGLFGAIAGFIEGGWTGMVDGWYGYHHQNEQGSGYAADLKSTQNAIDKITNKVNSVIEKMNTQFTAVGKEFNHLEKRIENLNKKVDDGFLDIWTYNAELLVLLENERTLDYHDSNVKNLYEKVRNQLKNNAKEIGNGCFEFYHKCDNTCMESVKNGTYDYPKYSEEAKLNREEIDGVKLESTRIYQILAIYSTVASSLVLVVSLGAISFWMCSNGSLQCRICI

SEQ ID NO: 7105 - protein, 566 aa, synthetic construct; identical to SEQ ID NO: 6435
  REGION 1..566: note = hemagglutinin__InfluenzaA__AEN55523

SEQ ID NO: 7106 - protein, 566 aa, synthetic construct; identical to SEQ ID NO: 5224
  REGION 1..566: note = hemagglutinin__InfluenzaA__AEN68904

SEQ ID NO: 7107 - protein, 566 aa, synthetic construct; identical to SEQ ID NO: 2669
  REGION 1..566: note = hemagglutinin__InfluenzaA__AEN68905

SEQ ID NO: 7108 - protein, 566 aa, synthetic construct; identical to SEQ ID NO: 2669
  REGION 1..566: note = hemagglutinin__InfluenzaA__AEN68906

SEQ ID NO: 7109 - protein, 566 aa, synthetic construct; identical to SEQ ID NO: 3771
  REGION 1..566: note = hemagglutinin__InfluenzaA__AEN68907

SEQ ID NO: 7110 - protein, 566 aa, synthetic construct; identical to SEQ ID NO: 2669
  REGION 1..566: note = hemagglutinin__InfluenzaA__AEN68908

SEQ ID NO: 7111 - protein, 566 aa, synthetic construct
  REGION 1..566: note = hemagglutinin__InfluenzaA__AEN68909
MKAILVVLLYTFATANADTLCVGYHANNSTDTVDTVLEKNVTVTHSVNLLEDKHNGKLCKLRGVAPLHLGKCNIAGWILGNPECESLSTASSWSYIVETSSSDNGTCYPGDFIDYEELREQLSSVSSFERFEIFPKTSSWPNHDSNKGVTAACPHAGAKSFYKNLIWLVKKGNSYPKLSKSYINDKGKEVLVLWGIHHPSTSADQQSLYQNADAYVFVGTSRYSKKFKPEIAIRPKVRDQEGRMNYYWTLVEPGDKITFEATGNLVVPRYAFAMERNAGSGIIISDTPVHDCNTTCQTPKGAINTSLPFQNIHPITIGKCPKYVKSTKLRLATGLRNVPSIQSRGLFGAIAGFIEGGWTGMVDGWYGYHHQNEQGSGYAADLKSTQNAIDEITNKVNSVIEKMNTQFTAVGKEFNHLEKRIENLNKKVDDGFLDIWTYNAELLVLLENERTLDYHDSNVKNLYEKVRSQLKNNAKEIGNGCFEFYHKCDNTCMESVKNGTYDYPKYSEEAKLNREEIDGVKLESTRIYQILAIYSTVASSLVLVVSLGAISFWMCSNGSLQCRICI

SEQ ID NO: 7112 - protein, 566 aa, synthetic construct
  REGION 1..566: note = hemagglutinin__InfluenzaA__AEN68910
MKAILVVLLYTFATANADTLCVGYHANNSTDTVDTVLEKNVTVTHSVNLLEDKHNGKLCKLRGVAPLHLGKCNIAGWILGNPECESLSTASSWSYIVETSSSDNGTCYPGDFIDYEELREQLSSVSSFERFEIFPKTSSWPNHDSNKGVTAACPHAGAKSFYKNLIWLVKKGNSYPKLSKSYINDKGKEVLVLWGIHHPSTSADQQSLYQNADAYVFVGTSRYSKKFKPEIAIRPKVRDQEGRMNYYWTLVEPGDKITFEATGNLVVPRYAFAMERNAGSGIIISDTPVHDCNTTCQTPKGAINTSLPFQNIHPITIGKCPKYVKGTKLRLATGLRNVPSIQSRGLFGAIAGFIEGGWTGMVDGWYGYHHQNEQGSGYAADLKSTQNAIDEITNKVNSVIEKMNTQFTAVGKEFNHLEKRIENLNKKVDDGFLDIWTYNAELLVLLENERTLDYHDSNVKNLYEKVRSQLKNNAKEIGNGCFEFYHKCDNTCMESVKNGTYDYPKYSEEAKLNREEIDGVKLESTRIYQILAIYSTVASSLVLVVSLGAISFWMCSNGSLQCRICI

SEQ ID NO: 7113 - protein, 566 aa, synthetic construct; identical to SEQ ID NO: 4785
  REGION 1..566: note = hemagglutinin__InfluenzaA__AEN68911

SEQ ID NO: 7114 - protein, 566 aa, synthetic construct; identical to SEQ ID NO: 2669
  REGION 1..566: note = hemagglutinin__InfluenzaA__AEN68912

SEQ ID NO: 7115 - protein, 566 aa, synthetic construct; identical to SEQ ID NO: 2760
  REGION 1..566: note = hemagglutinin__InfluenzaA__AEN68913

SEQ ID NO: 7116 - protein, 566 aa, synthetic construct; identical to SEQ ID NO: 5335
  REGION 1..566: note = hemagglutinin__InfluenzaA__AEN68914

SEQ ID NO: 7117 - protein, 566 aa, synthetic construct; identical to SEQ ID NO: 2669
  REGION 1..566: note = hemagglutinin__InfluenzaA__AEN68915

SEQ ID NO: 7118 - protein, 566 aa, synthetic construct; identical to SEQ ID NO: 2669
  REGION 1..566: note = hemagglutinin__InfluenzaA__AEN68916

SEQ ID NO: 7119 - protein, 566 aa, synthetic construct
  REGION 1..566: note = hemagglutinin__InfluenzaA__AEN68917
MKAILGVLLYTFATANADTLCIGYHANNSTDTVDTVLEKNVTVTHSVNLLEDKHNGKLCKLRGVAPLHLGKCNIAGWILGNPECESLSTASSWSYIVETSSSDNGTCYPGDFIDYEELREQLSSVSSFERFEIFPKTSSWPNHDSNKGVTAACPHAGAKSFYKNLIWLVKKGNSYPKLSKSYINDKGKEVLVLWGIHHPSTSADQQSLYQNADAYVFVGTSRYSKKFKPEIAIRPKVRDQEGRMNYYWTLVEPGDKITFEATGNLVVPRYAFAMERNAGSGIIISDTPVHDCNTTCQTPKGAINTSLPFQNIHPVTIGKCPKYVKSTKLRLATGLRNVPSIQSRGLFGAIAGFIEGGWTGMVDGWYGYHHQNEQGSGYAADLKSTQNAIDKITNKVNSVIEKMNTQFTAVGKEFNHLEKRIENLNKKVDDGFLDIWTYNAELLVLLENERTLDYHDSNVKNLYEKVRSQLKNNAKEIGNGCFEFYHKCDNTCMESVKNGTYDYPKYSEEAKLNREEIDGVKLESTRIYQILAIYSTVASSLVLVVSLGAISFWMCSNGSLQCRICI

SEQ ID NO: 7120 - protein, 566 aa, synthetic construct
  REGION 1..566: note = hemagglutinin__InfluenzaA__AEN68918
MKAILVVLLYTFATANADTLCIGYHANNSTDTVDTVLEKNVTVTHSVNLLEDKNNGKLCKLRGVAPLHLGKCNIAGWILGNPECESLSTASSWSYIVETSSSDNGTCYPGDFIDYEELREQLSSVSSFERFEMFPKTSSWPNHDSNKGVTAACPHAGAKSFYKNLIWLVKKGNSYPKLSKSYINDKGKEVLVLWGIHHPSTSADQQSLYQNADAYVFVGTSRYSKKFKPEIAIRPKVRDQEGRMNYYWTLVEPGDKITFEATGNLVVPRYAFAMERNAGSGIIISDTPVHDCNTTCQTPKGAINTSLPFQNIHPITIGKCPKYVKSTKLRLATGLRNVPSIQSRGLFGAIAGFIEGGWTGMVDGWYGYHHQNEQGSGYAADLKSTQNAIDEITNKVNSVIEKMNTQFTAVGKEFNHLEKRIENLNKKVDDGFLDIWTYNAELLVLLENERTLDYHDSNVKNLYEKVRSQLKNNAKEVGNGCFEFYHKCDNTCMESVKNGTYDYPKYSEEAKLNREEIDGVKLESTRIYQILAIYSTVASSLVLVVSLGAISFWMCSNGSLQCRICI

SEQ ID NO: 7121 - protein, 566 aa, synthetic construct; identical to SEQ ID NO: 5584
  REGION 1..566: note = hemagglutinin__InfluenzaA__AEN68919

SEQ ID NO: 7122 - protein, 566 aa, synthetic construct; identical to SEQ ID NO: 4833
  REGION 1..566: note = hemagglutinin__InfluenzaA__AEN68920

SEQ ID NO: 7123 - protein, 566 aa, synthetic construct; identical to SEQ ID NO: 3833
  REGION 1..566: note = hemagglutinin__InfluenzaA__AEN68921

SEQ ID NO: 7124 - protein, 566 aa, synthetic construct; identical to SEQ ID NO: 3829
  REGION 1..566: note = hemagglutinin__InfluenzaA__AEN68922

SEQ ID NO: 7125 - protein, 566 aa, synthetic construct; identical to SEQ ID NO: 3833
  REGION 1..566: note = hemagglutinin__InfluenzaA__AEN68923

SEQ ID NO: 7126 - protein, 566 aa, synthetic construct; identical to SEQ ID NO: 3833
  REGION 1..566: note = hemagglutinin__InfluenzaA__AEN68924

SEQ ID NO: 7127 - protein, 566 aa, synthetic construct
  REGION 1..566: note = hemagglutinin__InfluenzaA__AEN68925
MKAILVVLLYTFATANADTLCIGYHANNSTDTVDTVLEKNVTVTHSVNLLEDKHNGKLCKLRGVAPLHLGKCNIAGWILGNPECESLSTASSWSYIVETSSSDNGTCYPGDFIDYEELREQLSSVSSFERFEIFPKTSSWPNHDSNKGVTAACPHAGAKSFYKNLIWLVKKGNSYPKLSKSYINDKGKEVLVLWGIHHPSTSADQQSLYQNADAYVFVETSRYSKKFKPEIAIRPKVRDQEGRMNYYWTLVEPGDKITFEATGNLVVPRYAFAMERNAGSGIIISDTPVHDCNTTCQTPKGAINTSLPFQNIHPITIGKCPKYVKSTKLRLATGLRNVPSIQSRGLFGAIAGFIEGGWTGMVDGWYGYHHQNEQGSGYAADLKSTQNAIDKITNKVNSVIEKMNTQFTAVGKEFNHLEKRIENLNKKVDDGFLDIWTYNAELLVLLENERTLDYHDSNVKNLYEKVRSQLKNNAKEIGNGCFEFYHKCDNTCMESVKNGTYDYPKYSEEAKLNREEIDGVKLESTRIYQILAIYSTVASSLVLVVSLGAISFWMCSNGSLQCRICI

SEQ ID NO: 7128 - protein, 566 aa, synthetic construct
  REGION 1..566: note = hemagglutinin__InfluenzaA__AEN68926
MKAILVVLLYTFATANADTLCIGYHANNSTDTVDTVLEKNVTVTHSVNLLEDKHNGKLCKLRGVAPLHLGKCNIAGWILGNPECESLATASSWSYIVETSNSDNGTCYPGDFIDYEELREQLSSVSSFERFEIFPKTSSWPNHDSNKGVTAACPHAGAKSFYKNLIWLVKKGNSYPKLSKSYINDKGREVLVLWGIHHPSTSADQQSLYQNADTYVFVGTSRYSKKFKPEIAIRPKVRDQEGRMNYYWTLVEPGDKITFEATGNLVVPRYAFAMERNAGSGIIISDTPVHDCNTTCQTPKGAINTSLPFQNIHPITIGKCPKYVKSTKLRLATGLRNVPSIQSRGLFGAIAGFIEGGWTGMVDGWYGYHHQNEQGSGYAADLKSTQNAIDEITNKVNSVIEKMNTQFTAVGKEFNHLEKRIENLNKKVDDGFLDIWTYNAELLVLLENERTLDYHDSNVKNLYEKVRSQLKNNAKEIGNGCFEFYHKCDNTCMESVKNGTYDYPKYSEEAKLNREEIDGVKLESTRIYQILAIYSTVASSLVLVVSLGAISFWMCSNGSLQCRICI

SEQ ID NO: 7129 - protein, 566 aa, synthetic construct
  REGION 1..566: note = hemagglutinin__InfluenzaA__AEN68927
MKAILVVLLYTFATANADTLCIGYHANNSTDTVDTVLEKNVTVTHSVNLLEDKHNGKLCKLRGVAPLHLGKCNIAGWILGNPECESLSTASSWSYIVETSSSDNGTCYPGDFIDYEELREQLSSVSSFERFEIFPKTSSWPDHDSNKGVTAACPHAGAKSFYKNLIWLVKKGNSYPKLSKSYINDKGKEVLVLWGIHHPSTSADQQSLYQNADAYVFVGTSRYSKKFKPEIAIRPKVRDQEGRMNYYWTLVEPGDKITFEATGNLVVPRYAFAMERNAGSGIIISDTPVHDCNTTCQTPKGAINTSLPFQNIHPITIGKCPKYVKSTKLRLATGLRNVPSIQSRGLFGAIAGFIEGGWTGMVDGWYGYHHQNEQGSGYAADLKSTQNAIDKITNKVNSVIEKMNTQFTAVGKEFNHLEKRIENLNKKVDDGFLDIWTYNAELLVLLENERTLDYHDSNVKNLYEKVRNQLKNNAKEIGNGCFEFYHKCDNTCMESVKNGTYDYPKYSEEAKLNREEIDGVKLESTRIYQILAIYSTVASSLVLVVSLGAISFWMCSNGSLQCRICI

SEQ ID NO: 7130 - protein, 566 aa, synthetic construct; identical to SEQ ID NO: 6255
  REGION 1..566: note = hemagglutinin__InfluenzaA__AEN68928

SEQ ID NO: 7131 - protein, 566 aa, synthetic construct
  REGION 1..566: note = hemagglutinin__InfluenzaA__AEN68929
MKAILVVLLYTFATANADTLCIGYHANNSTDTVDTVLEKNVTVTHSVNLLEDKHNGKLCKLRGIAPLHLGKCNIAGWILGNPECESLSTASSWSYIVETSSSDNGTCYPGDFIDYEELREQLSSVSSFERFEIFPKTSSWPNHDSNKGVTAACPHAGAKSFYKNLIWLVKKGNSYPKLSKSYINDKGKEVLVLWGIHHPSTSADQQSLYQNADAYVFVGTSRYSKKFKPEIAIRPKVRDQEGRMNYYWTLVEPGDKITFEATGNLVVPRYAFAMERNAGSGIIISDTPVHDCNTTCQTPKGAINTSLPFQNIHPITIGKCPKYVKSTKLRLATGLRNVPSIQSRGLFGAIAGFIEGGWTGMVDGWYGYHHQNEQGSGYAADLKSTQNAIDKITNKVNSVIEKMNTQFTAVGKEFNHLEKRIENLNKKVDDGFLDIWTYNAELLVLLENERTLDYHDSNVKNLYEKVRSQLKNNAKEIGNGCFEFYHKCDNTCMESVKNGTYDYPKYSEEAKLNREEIDGVKLESTRIYQILAIYSTVASSLVLVVSLGAISFWMCSNGSLQCRICI

SEQ ID NO: 7132 - protein, 566 aa, synthetic construct; identical to SEQ ID NO: 5584
  REGION 1..566: note = hemagglutinin__InfluenzaA__AEN68930

SEQ ID NO: 7133 - protein, 566 aa, synthetic construct; identical to SEQ ID NO: 5584
  REGION 1..566: note = hemagglutinin__InfluenzaA__AEN68931

SEQ ID NO: 7134 - protein, 566 aa, synthetic construct; identical to SEQ ID NO: 5584
  REGION 1..566: note = hemagglutinin__InfluenzaA__AEN68932

SEQ ID NO: 7135 - protein, 566 aa, synthetic construct
  REGION 1..566: note = hemagglutinin__InfluenzaA__AEN69426
MKAILVVLLYTFATSNADTLCIGYHANNSTDTVDTVLEKNVTVTHSVNLLEDKHNGKLCKLRGVAPLHLGKCNIAGWILGNPECESLSTASSWSYIVETSSSDNGTCYPGNFIDYEELREQLSSVSSFERFEIFPKTSSWPDHDSNKGVTAACPHAGAKSFYKNLIWLVKKGNSYPKLSKSYINDKGKEVLVLWGIHHPSTSADQQSLYQNADAYVFVGTSRYSKKFKPEIAIRPKVRDQEGRMNYYWTLVEPGDKITFEATGNLVAPRYAFAMERNAGSGIIISDTPVHDCNTTCQTPKGAINTSLPFQNIHPITIGKCPKYVKSTKLRLATGLRNVPSIQSRGLFGAIAGFIEGGWTGMVDGWYGYHHQNEQGSGYAADLKSTQNAIDKITNKVNSVIEKMNTQFTAVGKEFNHLEKRIENLNKKVDDGFLDIWTYNAELLVLLENERTLDYHDSNVKNLYEKVRSQLKNNAKEIGNGCFEFYHKCDNTCMESVKNGTYDYPKYSEEAKLNREEIDGVKLESTRIYQILAIYSTVASSLVLVVSLGAISFWMCSNGSLQCRICI

SEQ ID NO: 7136 - protein, 566 aa, synthetic construct; identical to SEQ ID NO: 6920
  REGION 1..566: note = hemagglutinin__InfluenzaA__AEN69475

SEQ ID NO: 7137 - protein, 566 aa, synthetic construct; identical to SEQ ID NO: 6920
  REGION 1..566: note = hemagglutinin__InfluenzaA__AEN69481

SEQ ID NO: 7138 - protein, 566 aa, synthetic construct; identical to SEQ ID NO: 2922
  REGION 1..566: note = hemagglutinin__InfluenzaA__AEO01032

SEQ ID NO: 7139 - protein, 566 aa, synthetic construct; identical to SEQ ID NO: 3022
  REGION 1..566: note = hemagglutinin__InfluenzaA__AEO01033

SEQ ID NO: 7140 - protein, 566 aa, synthetic construct; identical to SEQ ID NO: 3022
  REGION 1..566: note = hemagglutinin__InfluenzaA__AEO01034

SEQ ID NO: 7141 - protein, 566 aa, synthetic construct; identical to SEQ ID NO: 2656
  REGION 1..566: note = hemagglutinin__InfluenzaA__AEO01035

SEQ ID NO: 7142 - protein, 566 aa, synthetic construct; identical to SEQ ID NO: 3022
  REGION 1..566: note = hemagglutinin__InfluenzaA__AEO01036

SEQ ID NO: 7143 - protein, 566 aa, synthetic construct; identical to SEQ ID NO: 2911
  REGION 1..566: note = hemagglutinin__InfluenzaA__AEO01037

SEQ ID NO: 7144 - protein, 566 aa, synthetic construct; identical to SEQ ID NO: 3022
  REGION 1..566: note = hemagglutinin__InfluenzaA__AEO01038

SEQ ID NO: 7145 - protein, 566 aa, synthetic construct; identical to SEQ ID NO: 2849
  REGION 1..566: note = hemagglutinin__InfluenzaA__AEO01039

SEQ ID NO: 7146 - protein, 566 aa, synthetic construct
  REGION 1..566: note = hemagglutinin__InfluenzaA__AEO01040
MKAILVVLLYTFATANADTLCIGYHANNSTDTVDTVLEKNVTVTHSVNLLEDKHNGKLCKLRGVAPLHLGKCNIAGWILGNPECESLSTASSWSYIVETSSSDNGTCYPGDFIDYEELREQLSSVSSFERFEIFPKTSSWPNHDSNKGVTAACPHAGAKSFYKNLIWLVKKGNSYPKLSKSYINDKGKKVLVLWGIHHPSTSADQQSLYQNADAYVFVGTSRYSKKFKPEIAIRPKVRDQEGRMNYYWTLIEPGDKITFEATGNLVVPRYAFTMERNAGSGIIISDTPVHDCNTTCQTPKGAINTSLPFQNIHPITIGKCPKYVKSTKLRLATGLRNVPSIQSRGLFGAIAGFIEGGWTGMVDGWYGYHHQNEQGSGYAADLKSTQNAIDEITNKVNSVIEKMNTQFTAVGKEFNHLEKRIENLNKKVDDGFLDIWTYNAELLVLLENERTLDYHDSNVKNLYEKVRSQLKNNAKEIGNGCFEFYHKCDNTCMESVKNGTYDYPKYSEEAKLNREEIDGVKLESTRIYQILAIYSTVASSLVLVVSLGAISFWMCSNGSLQCRICI

SEQ ID NO: 7147 - protein, 566 aa, synthetic construct; identical to SEQ ID NO: 2669
  REGION 1..566: note = hemagglutinin__InfluenzaA__AEO01041

SEQ ID NO: 7148 - protein, 566 aa, synthetic construct; identical to SEQ ID NO: 3022
  REGION 1..566: note = hemagglutinin__InfluenzaA__AEO01042

SEQ ID NO: 7149 - protein, 566 aa, synthetic construct
  REGION 1..566: note = hemagglutinin__InfluenzaA__AEO01043
MKAILVVLLYTFATANADTLCIGYHANNSTDTVDTVLEKNVTVTHSVNLLEDKHNGKLCKLRGVAPLHLGKCNIAGWILGNPECESLSTASSWSYIVETSSSNNGTCYPGDFIDYEELREQLSSVSSFERFEIFPKTSSWPNHDSNKGVTAACPHAGAKSFYKNLIWLVKKGNSYPKLSKSYINDKGKEVLVLWGIHHPSTSADQQSLYQNADAYVFVGTSRYSKKFKPEIAIRPKVREQEGRMNYYWTLVEPGDKITFEATGNLVVPRYAFAMERNAGSGIIISDTPVHDCNTTCQTPKGAINTSLPFQNIHPITIGKCPKYVKSTKLRLATGLRNVPSIQSRGLFGAIAGFIEGGWTGMVDGWYGYHHQNEQGSGYAADLKSTQNAIDEITNKVNSVIEKMNTQFTAVGKEFNHLEKRIENLNKKVDDGFLDIWTYNAELLVLLENERTLDYHDSNVKNLYEKVRSQLKNNAKEIGNGCFEFYHKCDNTCMESVKNGTYDYPKYSEEAKLNREEIDGVKLESTRIYQILAIYSTVASSLVLVVSLGAISFWMCSNGSLQCRICI

SEQ ID NO: 7150 - protein, 566 aa, synthetic construct; identical to SEQ ID NO: 2669
  REGION 1..566: note = hemagglutinin__InfluenzaA__AEO01044

SEQ ID NO: 7151 - protein, 566 aa, synthetic construct
  REGION 1..566: note = hemagglutinin__InfluenzaA__AEO01045
MKAILVVLLYTFATANADTLCIGYHANNSTDTVDTVLEKNVTVTHSVNLLEDKHNGKLCKLRGVAPLHLGKCNIAGWILGNLECESLSTASSWSYIVETSSSDNGTCYPGDFIDYEELREQLSSVSSFERFEIFPKTSSWPNHDSNKGVTAACPHAGAKSFYKNLIWLVKKGNSYPKLSKSYINDKGKEVLVLWGIHHPSTSADQQSLYQNADAYVFVGTSRYSKKFKPEIAIRPKVRDQEGRMNYYWTLVEPGDKITFEATGNLVVPRYAFAMERNAGSGIIISDTPVHDCNTTCQTPKGAINTSLPFQNIHPITIGKCPKYVKSTKLRLATGLRNVPSIQSRGLFGAIAGFIEGGWTGMVDGWYGYHHQNEQGSGYAADLKSTQNAIDEITNKVNSVIEKMNTQFTAVGKEFNHLEKRIENLNKKVDDGFLDIWTYNAELLVLLENERTLDYHDSNVKNLYEKVRSQLKNNAKEIGNGCFEFYHKCDNTCMESVKNGTYDYPKYSEEAKLNREEIDGVKLESTRIYQILAIYSTVASSLVLVVSLGAISFWMCSNGSLQCRICI

SEQ ID NO: 7152 - protein, 566 aa, synthetic construct; identical to SEQ ID NO: 2669
  REGION 1..566: note = hemagglutinin__InfluenzaA__AEO01046

SEQ ID NO: 7153 - protein, 566 aa, synthetic construct; identical to SEQ ID NO: 2669
  REGION 1..566: note = hemagglutinin__InfluenzaA__AEO01047

SEQ ID NO: 7154 - protein, 566 aa, synthetic construct
  REGION 1..566: note = hemagglutinin__InfluenzaA__AEO01048
MKAILVVLLYTFATANADTLCIGYHANNSTDTVDTVLEKNVTVTHSVNLLEDKHNGKLCKLRGVAPLHLGKCNIAGWILGNPECESLSTASSWSYIVETSSSDNGTCYPGDFIDYEELREQLSSVSSFERFEIFPKTSSWPNHDSNKGVTAACPHAGAKSFYKNLIWLVKKGNSYPKLSKSYINDKGKEVLVLWGIHHPSTSADQQSLYQNADAYVFVGTSRYSKKFKPEIAIRPKVRDQEGRMNYYWTLVEPGDKITFEATGNLVVPRYAFAMERNAGSGIIISDTPVHDCNTTCQTPKGAINTSLPFQNIHPITIGKCPKYVKSTKLRLATGLRNVPSIQSRGLFGAIAGFIEGGWTGMVDGWYGYHHQNEQGSGYAADLKSTQNAIDEITNKVNSVIEKMNTQFTAVGKEFNHLEKRIENLNKKVDDGFLDIWTYNAELLVLLENERTLDYHDSNVKNLYEKVRSQLKNNAKEIGNGCFEFYHKCDNTCMESVKNGTYDYPKYSEEAKLNREEIDGVKLESTRIYQILAIYSTVASSLVLVVSLGAISFWMCSNGSLQCKICI

SEQ ID NO: 7155 - protein, 566 aa, synthetic construct; identical to SEQ ID NO: 3567
  REGION 1..566: note = hemagglutinin__InfluenzaA__AEO01049

SEQ ID NO: 7156 - protein, 566 aa, synthetic construct; identical to SEQ ID NO: 2669
  REGION 1..566: note = hemagglutinin__InfluenzaA__AEO01050

SEQ ID NO: 7157 - protein, 566 aa, synthetic construct; identical to SEQ ID NO: 3022
  REGION 1..566: note = hemagglutinin__InfluenzaA__AEO01051

SEQ ID NO: 7158 - protein, 566 aa, synthetic construct
  REGION 1..566: note = hemagglutinin__InfluenzaA__AEO01052
MKAIIVVLLYTFATANADTLCIGYHANNSTDTVDTVLEKNVTVTHSVNLLEDKHNGKLCKLRGVAPLHLGKCNIAGWILGNPECESLSTASSWSYIVETSSSDNGTCYPGDFIDYEELREQLSSVSSFERFEIFPKTSSWPNHDSNKGVTAACPHAGAKSFYKNLIWLVKKGNSYPKLSKSYINDKGKEVLVLWGIHHPSTSADQQSLYQNADAYVFVGTSRYSKKFKPEIAIRPKVRDQEGRMNYYWTLVEPGDKITFEATGNLVVPRYAFAMERNAGSGIIISDTPVHDCNTTCQTPKGAINTSLPFQNIHPITIGKCPKYVKSTKLRLATGLRNVPSIQSRGLFGAIAGFIEGGWTGMVDGWYGYHHQNEQGSGYAADLKSTQNAIDKITNKVNSVIEKMNTQFTAVGKEFNHLEKRIENLNKKVDDGFLDIWTYNAELLVLLENERTLDYHDSNVKNLYEKVRSQLKNNAKEIGNGCFEFYHKCDNTCMESVKNGTYDYPKYSEEAKLNREEIDGVKLESTRIYQILAIYSTVASSLVLVVSLGAISFWMCSNGSLQCRICI

SEQ ID NO: 7159 - protein, 566 aa, synthetic construct; identical to SEQ ID NO: 3022
  REGION 1..566: note = hemagglutinin__InfluenzaA__AEO01053

SEQ ID NO: 7160 - protein, 566 aa, synthetic construct; identical to SEQ ID NO: 2669
  REGION 1..566: note = hemagglutinin__InfluenzaA__AEO01054

SEQ ID NO: 7161 - protein, 566 aa, synthetic construct; identical to SEQ ID NO: 3481
  REGION 1..566: note = hemagglutinin__InfluenzaA__AEO01055

SEQ ID NO: 7162 - protein, 566 aa, synthetic construct; identical to SEQ ID NO: 3022
  REGION 1..566: note = hemagglutinin__InfluenzaA__AEO01056

SEQ ID NO: 7163 - protein, 566 aa, synthetic construct; identical to SEQ ID NO: 2669
  REGION 1..566: note = hemagglutinin__InfluenzaA__AEO01057

SEQ ID NO: 7164 - protein, 566 aa, synthetic construct; identical to SEQ ID NO: 2669
  REGION 1..566: note = hemagglutinin__InfluenzaA__AEO01058

SEQ ID NO: 7165 - protein, 566 aa, synthetic construct; identical to SEQ ID NO: 2669
  REGION 1..566: note = hemagglutinin__InfluenzaA__AEO01059

SEQ ID NO: 7166 - protein, 566 aa, synthetic construct; identical to SEQ ID NO: 2669
  REGION 1..566: note = hemagglutinin__InfluenzaA__AEO01060

SEQ ID NO: 7167 - protein, 566 aa, synthetic construct; identical to SEQ ID NO: 2669
  REGION 1..566: note = hemagglutinin__InfluenzaA__AEO01061

SEQ ID NO: 7168 - protein, 566 aa, synthetic construct; identical to SEQ ID NO: 2669
  REGION 1..566: note = hemagglutinin__InfluenzaA__AEO01062

SEQ ID NO: 7169 - protein, 566 aa, synthetic construct; identical to SEQ ID NO: 2669
  REGION 1..566: note = hemagglutinin__InfluenzaA__AEO01063

SEQ ID NO: 7170 - protein, 566 aa, synthetic construct; identical to SEQ ID NO: 2669
  REGION 1..566: note = hemagglutinin__InfluenzaA__AEO01064

SEQ ID NO: 7171 - protein, 566 aa, synthetic construct; identical to SEQ ID NO: 2911
  REGION 1..566: note = hemagglutinin__InfluenzaA__AEO01065

SEQ ID NO: 7172 - protein, 566 aa, synthetic construct; identical to SEQ ID NO: 3022
  REGION 1..566: note = hemagglutinin__InfluenzaA__AEO01066

SEQ ID NO: 7173 - protein, 566 aa, synthetic construct
  REGION 1..566: note = hemagglutinin__InfluenzaA__AEO01067
MKAILVVLLYTFATANADTLCIGYHANNSTDTVDTVLEKNVTVTHSVNLLEDKHNGKLCKLRGVAPLHLGKCNIAGWILGNPECESLSTASSWSYIVETSSSDNGTCYPGDFIDYEELREQLSSVSSFERFEIFPKTSSWPNHDSNKGVTAACPHAGAKSFYKNLIWLVKKGNSYPKLSKSYINDKGKEVLVLWGIHHPSTSADQQSLYQNADAYVFVGTSRYSKKFKPEMAIRPKVRDQEGRMNYYWTLVEPGDKITFEATGNLVVPRYAFAMERNAGSGIIISDTPVHDCNTTCQTPKGAINTSLPFQNIHPITIGKCPKYVKSTKLRLATGLRNVPSIQSRGLFGAIAGFIEGGWTGMVDGWYGYHHQNEQGSGYAADLKSTQNAIDEITNKVNSVIEKMNTQFTAVGKEFNHLEKRIENLNKKVDDGFLDIWTYNAELLVLLENERTLDYHDSNVKNLYEKVRSQLKNNAKEIGNGCFEFYHKCDNTCMESVKNGTYDYPKYSEEAKLNREEIDGVKLESTRIYQILAIYSTVASSLVLVVSLGAISFWMCSNGSLQCRICI

SEQ ID NO: 7174 - protein, 566 aa, synthetic construct; identical to SEQ ID NO: 3022
  REGION 1..566: note = hemagglutinin__InfluenzaA__AEO01068

SEQ ID NO: 7175 - protein, 566 aa, synthetic construct; identical to SEQ ID NO: 2669
  REGION 1..566: note = hemagglutinin__InfluenzaA__AEO01069

SEQ ID NO: 7176 - protein, 566 aa, synthetic construct; identical to SEQ ID NO: 3022
  REGION 1..566: note = hemagglutinin__InfluenzaA__AEO01070

SEQ ID NO: 7177 - protein, 566 aa, synthetic construct; identical to SEQ ID NO: 2669
  REGION 1..566: note = hemagglutinin__InfluenzaA__AEO01071

SEQ ID NO: 7178 - protein, 566 aa, synthetic construct
  REGION 1..566: note = hemagglutinin__InfluenzaA__AEO01073
MKAILVVLLYTFATANADTLCIGYHANNSTDTVDTVLEKNVTVTHSVNLLEDKHNGKLCKLRGVAPLHLGKCNIAGWILGNPECESLSTASSWSYIVETSSSDNGTCYPGDFIDYEELREQLSSVSSFERFEIFPKTSSWPNHDSNKGVTAACPHAGAKSFYKNLIWLVKKGNSYPKLSKSYINDKGKEVLVLWGIHHPSTSADQQSLYQNADAYVFVGTSRYSKKFKPEIAIRPKVRDQEGRMNYYWTLVEPGDKITFEATGNLVVPRYAFAMERNAGSGIIISDTPVHDCNTTCQTPKGAVNTSLPFQNIHPITIGKCPKYVKSTKLRLATGLRNVPSIQSRGLFGAIAGFIEGGWTGMVDGWYGYHHQNEQGSGYAADLKSTQNAIDEITNKVNSVIEKMNTQFTAVGKEFNHLEKRIENLNKKVDDGFLDIWTYNAELLVLLENERTLDYHDSNVKNLYEKVRSQLKNNAKEIGNGCFEFYHKCDNTCMESVKNGTYDYPKYSEEAKLNREEIDGVKLESTRIYQILAIYSTVASSLVLVVSLGAISFWMCSNGSLQCRICI

SEQ ID NO: 7179 - protein, 566 aa, synthetic construct; identical to SEQ ID NO: 2911
  REGION 1..566: note = hemagglutinin__InfluenzaA__AEO01074

SEQ ID NO: 7180 - protein, 566 aa, synthetic construct; identical to SEQ ID NO: 3022
  REGION 1..566: note = hemagglutinin__InfluenzaA__AEO01075

SEQ ID NO: 7181 - protein, 566 aa, synthetic construct; identical to SEQ ID NO: 3022
  REGION 1..566: note = hemagglutinin__InfluenzaA__AEO01076

SEQ ID NO: 7182 - protein, 566 aa, synthetic construct
  REGION 1..566: note = hemagglutinin__InfluenzaA__AEO01077
MKAILVVLLYTFATANADTLCIGYHANNSTDTVDTVLEKNVTVTHSVNLLEDKHNGKLCKLRGVAPLHLGKCNIAGWILGNPECESLSTASSWSYIVETSSSDNGTCYPGDFIDYEELREQLSSVSSFERFEIFPKTSSWPNHDSNKGVTAACPHAGAKSFYKNLIWLVKKGNSYPKLSKSYINDKGKEVLVLWGIHHPSTSADQQSLYQNADAYVFVGTSRYSKKFKPEIAIRPKVREQEGRMNYYWTLVEPGDKITFEATGNLVVPRYAFAMERNAGSGIIISDTPVHDCNTTCQTPKGAINTSLPFQNIHPITIGKCPKYVKSTKLRLATGLRNVPSIQSRGLFGAIAGFIEGGWTGMVDGWYGYHHQNEQGSGYAADLKSTQNAIDEITNKVNSVIEKMNTQFTAVGKEFNHLEKRIENLNKKVDDGFLDIWTYNAELLVLLENERTLDYHDSNVKNLYEKVRSQLKNNAKEIGNGCFEFYHKCDNTCMENVKNGTYDYPKYSEEAKLNREEIDGVKLESTRIYQILAIYSTVASSLVLVVSLGAISFWMCSNGSLQCRICI

SEQ ID NO: 7183 - protein, 566 aa, synthetic construct; identical to SEQ ID NO: 2669
  REGION 1..566: note = hemagglutinin__InfluenzaA__AEO01078

SEQ ID NO: 7184 - protein, 566 aa, synthetic construct; identical to SEQ ID NO: 2669
  REGION 1..566: note = hemagglutinin__InfluenzaA__AEO01079

SEQ ID NO: 7185 - protein, 566 aa, synthetic construct; identical to SEQ ID NO: 2669
  REGION 1..566: note = hemagglutinin__InfluenzaA__AEO01080

SEQ ID NO: 7186 - protein, 566 aa, synthetic construct; identical to SEQ ID NO: 3022
  REGION 1..566: note = hemagglutinin__InfluenzaA__AEO01081

SEQ ID NO: 7187 - protein, 566 aa, synthetic construct; identical to SEQ ID NO: 2669
  REGION 1..566: note = hemagglutinin__InfluenzaA__AEO01082

SEQ ID NO: 7188 - protein, 566 aa, synthetic construct; identical to SEQ ID NO: 2669
  REGION 1..566: note = hemagglutinin__InfluenzaA__AEO01083

SEQ ID NO: 7189 - protein, 566 aa, synthetic construct; identical to SEQ ID NO: 2669
  REGION 1..566: note = hemagglutinin__InfluenzaA__AEO01084

SEQ ID NO: 7190 - protein, 566 aa, synthetic construct; identical to SEQ ID NO: 3022
  REGION 1..566: note = hemagglutinin__InfluenzaA__AEO01085

SEQ ID NO: 7191 - protein, 566 aa, synthetic construct; identical to SEQ ID NO: 2669
  REGION 1..566: note = hemagglutinin__InfluenzaA__AEO01086

SEQ ID NO: 7192 - protein, 566 aa, synthetic construct; identical to SEQ ID NO: 3022
  REGION 1..566: note = hemagglutinin__InfluenzaA__AEO01087

SEQ ID NO: 7193 - protein, 566 aa, synthetic construct; identical to SEQ ID NO: 2849
  REGION 1..566: note = hemagglutinin__InfluenzaA__AEO01088

SEQ ID NO: 7194 - protein, 566 aa, synthetic construct; identical to SEQ ID NO: 3022
  REGION 1..566: note = hemagglutinin__InfluenzaA__AEO01089

SEQ ID NO: 7195 - protein, 566 aa, synthetic construct; identical to SEQ ID NO: 3022
  REGION 1..566: note = hemagglutinin__InfluenzaA__AEO01090

SEQ ID NO: 7196 - protein, 566 aa, synthetic construct; identical to SEQ ID NO: 3022
  REGION 1..566: note = hemagglutinin__InfluenzaA__AEO01091

SEQ ID NO: 7197 - protein, 566 aa, synthetic construct
  REGION 1..566: note = hemagglutinin__InfluenzaA__AEO01092
MKAILVVLLYTFATANADTLCIGYHANNSTDTVDTVLEKNVTVTHSVNLLEDKHNGKLCKLRGVAPLHLGKCNIAGWILGNPECESLSTASSWSYIVETSSSDNGTCYPGDFIDYEELREQLSSVSSFERFEIFPKTSSWPNHDSNKGVTAACPHAGAKSFYKNLIWLVKKGNSYPKLSKSYINDKGKEVLVLWGIHHPSTSADQQSLYQNADAYVFVGTSRYSKKFKPEIAIRPKVRDQEGRMNYYWTLVEPGDKITFEATGNLVVPRYAFAMERNAGSGIIISDTPVHDCNTTCQTPKGAINTSLPFQNIHPITIGKCPKYVKSTKLRLATGLRNVPSIQSRGLFGAIAGFIEGGWTGMVDGWYGYHHQNEQGSGYAADLKSTQNAIDEITNKVNSVIEKMNTQFTAVGKEFNHLEKRIENLNKKVDDGFLDIWTYNAELLVLLENERTLDYHDSNVKNLYERVRSQLKNNAKEIGNGCFEFYHKCDNTCMESVKNGTYDYPKYSEEAKLNREEIDGVKLESTRIYQILAIYSTVASSLVLVVSLGAISFWMCSNGSLQCRICI

SEQ ID NO: 7198 - protein, 566 aa, synthetic construct; identical to SEQ ID NO: 2669
  REGION 1..566: note = hemagglutinin__InfluenzaA__AEO01093

SEQ ID NO: 7199 - protein, 566 aa, synthetic construct; identical to SEQ ID NO: 2669
  REGION 1..566: note = hemagglutinin__InfluenzaA__AEO01094

SEQ ID NO: 7200 - protein, 566 aa, synthetic construct; identical to SEQ ID NO: 5876
  REGION 1..566: note = hemagglutinin__InfluenzaA__AEO01095

SEQ ID NO: 7201 - protein, 566 aa, synthetic construct; identical to SEQ ID NO: 3022
  REGION 1..566: note = hemagglutinin__InfluenzaA__AEO01096

SEQ ID NO: 7202 - protein, 566 aa, synthetic construct; identical to SEQ ID NO: 3022
  REGION 1..566: note = hemagglutinin__InfluenzaA__AEO01097

SEQ ID NO: 7203 - protein, 566 aa, synthetic construct; identical to SEQ ID NO: 3022
  REGION 1..566: note = hemagglutinin__InfluenzaA__AEO01098

SEQ ID NO: 7204 - protein, 566 aa, synthetic construct; identical to SEQ ID NO: 2669
  REGION 1..566: note = hemagglutinin__InfluenzaA__AEO01099

SEQ ID NO: 7205 - protein, 566 aa, synthetic construct; identical to SEQ ID NO: 2911
  REGION 1..566: note = hemagglutinin__InfluenzaA__AEO01100

SEQ ID NO: 7206 - protein, 566 aa, synthetic construct; identical to SEQ ID NO: 2669
  REGION 1..566: note = hemagglutinin__InfluenzaA__AEO01101

SEQ ID NO: 7207 - protein, 566 aa, synthetic construct; identical to SEQ ID NO: 2669
  REGION 1..566: note = hemagglutinin__InfluenzaA__AEO01102

SEQ ID NO: 7208 - protein, 566 aa, synthetic construct; identical to SEQ ID NO: 3022
  REGION 1..566: note = hemagglutinin__InfluenzaA__AEO01103

SEQ ID NO: 7209 - protein, 566 aa, synthetic construct; identical to SEQ ID NO: 3022
  REGION 1..566: note = hemagglutinin__InfluenzaA__AEO01104

SEQ ID NO: 7210 - protein, 566 aa, synthetic construct
  REGION 1..566: note = hemagglutinin__InfluenzaA__AEO01105
MKAILVVLLYTFATANADTLCIGYHANNSTDTVDTVLEKNVTVTHSVNLLEDKHNGKLCKLRGVAPLHLGKCNIAGWILGNPECESLSTASSWSYIVETSSSDNGTCYPGDFIDYEELREQLSSVSSFERFEIFPKTSSWPNHDSSKGVTAACPHAGAKSFYKNLIWLVKKGNSYPKLSKSYINDKGKEVLVLWGIHHPSTSADQQSLYQNADAYVFVGTSRYSKKFKPEIAIRPKVRDQEGRMNYYWTLVEPGDKITFEATGNLVVPRYAFAMERNAGSGIIISDTPVHDCNTTCQTPKGAINTSLPFQNIHPITIGKCPKYVKSTKLRLATGLRNVPSIQSRGLFGAIAGFIEGGWTGMVDGWYGYHHQNEQGSGYAADLKSTQNAIDEITNKVNSVIEKMNTQFTAVGKEFNHLEKRIENLNKKVDDGFLDIWTYNAELLVLLENERTLDYHDSNVKNLYEKVRSQLKNNAKEIGNGCFEFYHKCDNTCMESVKNGTYDYPKYSEEAKLNREEIDGVKLESTRIYQILAIYSTVASSLVLVVSLGAISFWMCSNGSLQCRICI

SEQ ID NO: 7211 - protein, 566 aa, synthetic construct; identical to SEQ ID NO: 3022
  REGION 1..566: note = hemagglutinin__InfluenzaA__AEO01106

SEQ ID NO: 7212 - protein, 566 aa, synthetic construct; identical to SEQ ID NO: 2669
  REGION 1..566: note = hemagglutinin__InfluenzaA__AEO01107

SEQ ID NO: 7213 - protein, 566 aa, synthetic construct; identical to SEQ ID NO: 2669
  REGION 1..566: note = hemagglutinin__InfluenzaA__AEO01108

SEQ ID NO: 7214 - protein, 566 aa, synthetic construct; identical to SEQ ID NO: 2669
  REGION 1..566: note = hemagglutinin__InfluenzaA__AEO01109

SEQ ID NO: 7215 - protein, 566 aa, synthetic construct; identical to SEQ ID NO: 2669
  REGION 1..566: note = hemagglutinin__InfluenzaA__AEO01110

SEQ ID NO: 7216 - protein, 566 aa, synthetic construct; identical to SEQ ID NO: 2669
  REGION 1..566: note = hemagglutinin__InfluenzaA__AEO01111

SEQ ID NO: 7217 - protein, 566 aa, synthetic construct; identical to SEQ ID NO: 2669
  REGION 1..566: note = hemagglutinin__InfluenzaA__AEO01112

SEQ ID NO: 7218 - protein, 566 aa, synthetic construct
  REGION 1..566: note = hemagglutinin__InfluenzaA__AEO01113
MKAILVVLLYTFATANADTLCIGYHANNSTDTVDTVLEKNVTVTHSVNLLEDKHNGKLCKLRGVAPLHLGKCNIAGWILGNPECESLSTASSWSYIVETSSSDNGTCYPGDFIDYEELREQLSSVSSFERFEIFPKTSSWPNHDSNKGVTAACLHAGAKSFYKNLIWLVKKGNSYPKLSKSYINDKGKEVLVLWGIHHPSTSADQQSLYQNADAYVFVGTSRYSKKFKPEIAIRPKVRDQEGRMNYYWTLVEPGDKITFEATGNLVVPRYAFAMERNAGSGIIISDTPVHDCNTTCQTPKGAINTSLPFQNIHPITIGKCPKYVKSTKLRLATGLRNVPSIQSRGLFGAIAGFIEGGWTGMVDGWYGYHHQNEQGSGYAADLKSTQNAIDEITNKVNSVIEKMNTQFTAVGKEFNHLEKRIENLNKKVDDGFLDIWTYNAELLVLLENERTLDYHDSNVKNLYEKVRSQLKNNAKEIGNGCFEFYHKCDNTCMESVKNGTYDYPKYSEEAKLNREEIDGVKLESTRIYQILAIYSTVASSLVLVVSLGAISFWMCSNGSLQCRICI

SEQ ID NO: 7219 - protein, 566 aa, synthetic construct; identical to SEQ ID NO: 2911
  REGION 1..566: note = hemagglutinin__InfluenzaA__AEO01114

SEQ ID NO: 7220 - protein, 566 aa, synthetic construct
  REGION 1..566: note = hemagglutinin__InfluenzaA__AEO01115
MEAILVVLLYTFATANADTLCIGYHANNSTDTVDTVLEKNVTVTHSVNLLEDKHNGKLCKLRGVAPLHLGKCNIAGWILGNPECESLSTASSWSYIVETSSSDNGTCYPGDFIDYEELREQLSSVSSFERFEIFPKTSSWPNHDSNKGVTAACLHAGAKSFYKNLIWLVKKGNSYPKLSKSYINDKGKEVLVLWGIHHPSTSADQQSLYQNADAYVFVGTSRYSKKFKPEIAIRPKVRDQEGRMNYYWTLVEPGDKITFEATGNLVVPRYAFAMERNAGSGIIISDTPVHDCNTTCQTPKGAINTSLPFHNIHPITIGKCPKYVKSTKLRLATGLRNVPSIQSRGLFGAIAGFIEGGWTGMVDGWYGYHHQNEQGSGYAADLKSTQNAIDEITNKVNSVIEKMNTQFTAVGKEFNHLEKRIENLNKKVDDGFLDIWTYNAELLVLLENERTLDYHDSNVKNLYEKVRSQLKNNAKEIGNGCFEFYHKCDNTCMESVKNGTYDYPKYSEEAKLNREEIDGVKLESTRIYQILAIYSTVASSLVLVVSLGAISFWMCSNGSLQCRICI

SEQ ID NO: 7221 - protein, 566 aa, synthetic construct; identical to SEQ ID NO: 2669
  REGION 1..566: note = hemagglutinin__InfluenzaA__AEO01116

SEQ ID NO: 7222 - protein, 566 aa, synthetic construct; identical to SEQ ID NO: 2669
  REGION 1..566: note = hemagglutinin__InfluenzaA__AEO01117

SEQ ID NO: 7223 - protein, 566 aa, synthetic construct; identical to SEQ ID NO: 3535
  REGION 1..566: note = hemagglutinin__InfluenzaA__AEO01118

SEQ ID NO: 7224 - protein, 566 aa, synthetic construct; identical to SEQ ID NO: 2669
  REGION 1..566: note = hemagglutinin__InfluenzaA__AEO01119

SEQ ID NO: 7225 - protein, 566 aa, synthetic construct
  REGION 1..566: note = hemagglutinin__InfluenzaA__AEO01120
MKAILVVLLYTFATANADTLCIGYHANNSTDTVDTVLEKNVTVTHSVNLLEDKHNGKLCKLRGVAPLHLGKCNIAGWILGNPECESLSTASSWSYIVETSSSDNGTCYPGDFIDYEELREQLSSVSSFERFEIFPKTSSWPNHDSNKGVTAACPHAGAKSFYKNLIWLVKKGNSYPKLSKSYINDKGKEVLVLWGIHHPSTSADQQSLYQNADAYVFVGTSRYSKKFKPEIAIRPKVREQEGRMNYYWTLVEPGDKITFEATGNLVVPRYAFAMERNAGSGIIISDTPVHDCNTTCQTPKGAINTSLPFQNIHPITIGKCPKYVKSTKLRLATGLRNIPSIQSRGLFGAIAGFIEGGWTGMVDGWYGYHHQNEQGSGYAADLKSTQNAIDEITNKVNSVIEKMNTQFTAVGKEFNHLEKRIENLNKKVDDGFLDVWTYNAELLVLLENERTLDYHDSNVKNLYEKVRSQLKNNAKEIGNGCFEFYHKCDNTCMESVKNGTYDYPKYSEEAKLNREEIDGVKLESTRIYQILAIYSTVASSLVLVVSLGAISFWMCSNGSLQCRICI

SEQ ID NO: 7226 - protein, 566 aa, synthetic construct; identical to SEQ ID NO: 2669
  REGION 1..566: note = hemagglutinin__InfluenzaA__AEO01121

SEQ ID NO: 7227 - protein, 566 aa, synthetic construct; identical to SEQ ID NO: 3022
  REGION 1..566: note = hemagglutinin__InfluenzaA__AEO01122

SEQ ID NO: 7228 - protein, 566 aa, synthetic construct; identical to SEQ ID NO: 2669
  REGION 1..566: note = hemagglutinin__InfluenzaA__AEO01123

SEQ ID NO: 7229 - protein, 566 aa, synthetic construct; identical to SEQ ID NO: 2669
  REGION 1..566: note = hemagglutinin__InfluenzaA__AEO01124

SEQ ID NO: 7230 - protein, 566 aa, synthetic construct; identical to SEQ ID NO: 3022
  REGION 1..566: note = hemagglutinin__InfluenzaA__AEO01125

SEQ ID NO: 7231 - protein, 566 aa, synthetic construct
  REGION 1..566: note = hemagglutinin__InfluenzaA__AEO01126
MKATLVVLLYTFATANADTLCIGYHANNSTDTVDTVLEKNVTVTHSVNLLEDKHNGKLCKLRGVAPLHLGKCNIAGWILGNPECESLSTASSWSYIVETSSSDNGTCYPGDFIDYEELREQLSSVSSFERFEIFPKTSSWPNHDSNKGVTAACPHAGAKSFYKNLIWLVKKGNSYPKLSKSYINDKGKEVLVLWGIHHPSTSADQQSLYQNADAYVFVGTSRYSKKFKPEIAIRPKVREQEGRMNYYWTLVEPGDKITFEATGNLVVPRYAFAMERNAGSGIIISDTPVHDCNTTCQTPKGAINTSLPFQNIHPITIGKCPKYVKSTKLRLATGLRNVPSIQSRGLFGAIAGFIEGGWTGMVDGWYGYHHQNEQGSGYAADLKSTQNAIDEITNKVNSVIEKMNTQFTAVGKEFNHLEKRIENLNKKVDDGFLDIWTYNAELLVLLENERTLDYHDSNVKNLYEKVRSQLKNNAKEIGNGCFEFYHKCDNTCMESVKNGTYDYPKYSEEAKLNREEIDGVKLESTRIYQILAIYSTVASSLVLVVSLGAISFWMCSNGSLQCRICI

SEQ ID NO: 7232 - protein, 566 aa, synthetic construct; identical to SEQ ID NO: 2669
  REGION 1..566: note = hemagglutinin__InfluenzaA__AEO01127

SEQ ID NO: 7233 - protein, 566 aa, synthetic construct; identical to SEQ ID NO: 2669
  REGION 1..566: note = hemagglutinin__InfluenzaA__AEO01128

SEQ ID NO: 7234 - protein, 566 aa, synthetic construct; identical to SEQ ID NO: 3022
  REGION 1..566: note = hemagglutinin__InfluenzaA__AEO01129

SEQ ID NO: 7235 - protein, 566 aa, synthetic construct; identical to SEQ ID NO: 2669
  REGION 1..566: note = hemagglutinin__InfluenzaA__AEO01130

SEQ ID NO: 7236 - protein, 566 aa, synthetic construct; identical to SEQ ID NO: 3022
  REGION 1..566: note = hemagglutinin__InfluenzaA__AEO01131

SEQ ID NO: 7237 - protein, 566 aa, synthetic construct; identical to SEQ ID NO: 2669
  REGION 1..566: note = hemagglutinin__InfluenzaA__AEO01132

SEQ ID NO: 7238 - protein, 566 aa, synthetic construct
  REGION 1..566: note = hemagglutinin__InfluenzaA__AEO01133
MKAILVVLLYTFATANADTLCIGYHANNSTDTVDTVLEKNVTVTHSVNILEDKHNGKLCKLRGVAPLHLGKCNIAGWILGNPECESLSTASSWSYIVETSSSDNGTCYPGDFIDYEELREQLSSVSSFERFEIFPKTSSWPNHDSNKGVTAACPHAGAKSFYKNLIWLVKKGNSYPKLSKSYINDKGKEVLVLWGIHHPSTSADQQSLYQNADAYVFVGSSRYSKKFKPEIAIRPKVRDQEGRMNYYWTLVEPGDKITFEATGNLVVPRYAFAMERNAGSGIIISDTPVHDCNTTCQTPKGAINTSLPFQNIHPITIGKCPKYVKSTKLRLATGLRNVPSIQSRGLFGAIAGFIEGGWTGMVDGWYGYHHQNEQGSGYAADLKSTQNAIDEITNKVNSVIEKMNTQFTAVGKEFNHLEKRIENLNKKVDDGFLDIWTYNAELLVLLENERTLDYHDSNVKNLYEKVRSQLKNNAKEIGNGCFEFYHKCDNTCMESVKNGTYDYPKYSEEAKLNREEIDGVKLESTMIYQILAIYSTVASSLVLVVSLGAISFWMCSNGSLQCRICI

SEQ ID NO: 7239 - protein, 566 aa, synthetic construct; identical to SEQ ID NO: 3022
  REGION 1..566: note = hemagglutinin__InfluenzaA__AEO01134

SEQ ID NO: 7240 - protein, 566 aa, synthetic construct; identical to SEQ ID NO: 3022
  REGION 1..566: note = hemagglutinin__InfluenzaA__AEO01135

SEQ ID NO: 7241 - protein, 566 aa, synthetic construct; identical to SEQ ID NO: 2669
  REGION 1..566: note = hemagglutinin__InfluenzaA__AEO01136

SEQ ID NO: 7242 - protein, 566 aa, synthetic construct; identical to SEQ ID NO: 3116
  REGION 1..566: note = hemagglutinin__InfluenzaA__AEO01137

SEQ ID NO: 7243 - protein, 566 aa, synthetic construct; identical to SEQ ID NO: 3116
  REGION 1..566: note = hemagglutinin__InfluenzaA__AEO01138

SEQ ID NO: 7244 - protein, 566 aa, synthetic construct; identical to SEQ ID NO: 2669
  REGION 1..566: note = hemagglutinin__InfluenzaA__AEO01139

SEQ ID NO: 7245 - protein, 566 aa, synthetic construct; identical to SEQ ID NO: 2669
  REGION 1..566: note = hemagglutinin__InfluenzaA__AEO01140

SEQ ID NO: 7246 - protein, 566 aa, synthetic construct; identical to SEQ ID NO: 2669
  REGION 1..566: note = hemagglutinin__InfluenzaA__AEO01141

SEQ ID NO: 7247 - protein, 566 aa, synthetic construct; identical to SEQ ID NO: 2669
  REGION 1..566: note = hemagglutinin__InfluenzaA__AEO01142

SEQ ID NO: 7248 - protein, 566 aa, synthetic construct
  REGION 1..566: note = hemagglutinin__InfluenzaA__AEO01144
MKAILVVLLYTFATANADTLCIGYHANNSTDTVDTVLEKNVTVTHSVNLLEDKHNGKLCKLRGVAPLHLGKCNIAGWILGNPECESLSTASSWSYIVETSISDNGTCYPGDFIDYEELREQLSSVSSFERFEIFPKTSSWPNHDSNKGVTAACPHAGAKGFYKNLIWLVKKGNSYPKLSKSYINDKGKEVLVLWGIHHPSTSADQQSLYQNADAYVFVGTSRYSKKFKPEIAIRPKVRDQEGRMNYYWTLVEPGDKITFEATGNLVVPRYAFAMERNAGSGIIISDTPVHDCNTTCQTPKGAINTSLPFQNIHPITIGKCPKYVKSTKLRLATGLRNVPSIQSRGLFGAIAGFIEGGWTGMVDGWYGYHHQNEQGSGYAADLKSTQNAIDEITNKVNSVIEKMNTQFTAVGKEFNHLEKRIENLNKKVDDGFLDIWTYNAELLVLLENERTLDYHDSNVKNLYEKVRSQLKNNAKEIGNGCFEFYHKCDNTCMESVKNGTYDYPKYSEEAKLNREEIDGVKLESTRIYQILAIYSTVASSLVLVVSLGAISFWMCSNGSLQCRICI

SEQ ID NO: 7249 - protein, 566 aa, synthetic construct; identical to SEQ ID NO: 2849
  REGION 1..566: note = hemagglutinin__InfluenzaA__AEO01145

SEQ ID NO: 7250 - protein, 566 aa, synthetic construct
  REGION 1..566: note = hemagglutinin__InfluenzaA__AEO01146
MKAILVVLLYTFATANADTLCIGYHANNSTDTVDTVLEKNVTVTHSVNLLEDKHNGKLCKLRGVAPLHLGKCNIAGWILGNPECESLSTASSWSYIVETSSSDNGTCYPGDFIDYEELREQLSSVSSFERFEIFPKTSSWPNHDSNKGVTAACPHAGAKSFYKNLIWLVKKGNSYPKLSKSYINDKGKEVLVLWGIHHPSTSADQQSLYQNADAYVFVGTSRYSKKFNPEIAIRPKVRDQEGRMNYYWTLVEPGDKITFEATGNLVVPRYAFAMERNAGSGIIISDTPVHDCNTTCQTPKGAINTSLPFQNIHPITIGKCPKYVKSTKLRLATGLRNVPSIQSRGLFGAIAGFIEGGWTGMVDGWYGYHHQNEQGSGYAADLKSTQNAIDEITNKVNSVIEKMNTQFTAVGKEFNHLEKRIENLNKKVDDGFLDIWTYNAELLVLLENERTLDYHDSNVKNLYEKVRSQLKNNAKEIGNGCFEFYHKCDNTCMESVKNGTYDYPKYSEEAKLNREEIDGVKLESTRIYQILAIYSTVASSLVLVVSLGAISFWMCSNGSLQCRICI

SEQ ID NO: 7251 - protein, 566 aa, synthetic construct; identical to SEQ ID NO: 2669
  REGION 1..566: note = hemagglutinin__InfluenzaA__AEO01147

SEQ ID NO: 7252 - protein, 566 aa, synthetic construct; identical to SEQ ID NO: 3022
  REGION 1..566: note = hemagglutinin__InfluenzaA__AEO01148

SEQ ID NO: 7253 - protein, 566 aa, synthetic construct; identical to SEQ ID NO: 3022
  REGION 1..566: note = hemagglutinin__InfluenzaA__AEO01149

SEQ ID NO: 7254 - protein, 566 aa, synthetic construct; identical to SEQ ID NO: 5876
  REGION 1..566: note = hemagglutinin__InfluenzaA__AEO01150

SEQ ID NO: 7255 - protein, 566 aa, synthetic construct; identical to SEQ ID NO: 2669
  REGION 1..566: note = hemagglutinin__InfluenzaA__AEO01151

SEQ ID NO: 7256 - protein, 566 aa, synthetic construct
  REGION 1..566: note = hemagglutinin__InfluenzaA__AEO01152
MKAILIVLLYTFATANADTLCIGYHANNSTDTVDTVLEKNVTVTHSVNLLEDKHNGKLCKLRGVAPLHLGKCNIAGWILGNPECESLSTASSWSYIVETSSSDNGTCYPGDFIDYEELREQLSSVSSFERFEIFPKTSSWPNHDSNKGVTAACPHAGAKSFYKNLIWLVKKGNSYPKLSKSYINDKGKEVLVLWGIHHPSTSADQQSLYQNADAYVFVGTSRYSKKFKPEIAIRPKVRGQEGRMNYYWTLVEPGDKITFEATGNLVVPRYAFAMERNAGSGIIISDTPVHDCNTTCQTPKGAINTSLPFQNIHPITIGKCPKYVKSTKLRLATGLRNVPSIQSRGLFGAIAGFIEGGWTGMVDGWYGYHHQNEQGSGYAADLKSTQNAIDEITNKVNSVIEKMNTQFTAVGKEFNHLEKRIENLNKKVDDGFLDIWTYNAELLVLLENERTLDYHDSNVKNLYEKVRSQLKNNAKEIGNGCFEFYHKCDNTCMESVKNGTYDYPKYSEEAKLNREEIDGVKLESTRIYQILAIYSTVASSLVLVVSLGAISFWMCSNGSLQCRICI

SEQ ID NO: 7257 - protein, 566 aa, synthetic construct
  REGION 1..566: note = hemagglutinin__InfluenzaA__AEO01153
MKAILVVLLYTFATANADTLCIGYHANNSTDTVDTVLEKNVTVTHSVNLLEDKHNGKLCKLRGVAPLHLGKCNIAGWILGNPECESLSTASSWSYIVETSSSDNGTCYPGDFIDYEELREQLSSVSSFERFEIFPKTSSWPNHDSNKGVTAACPHAGAKSFYKNLIWLVKKGNSYPKLSKSYINNKGKEVLVLWGIHHPSTSADQQSLYQNADAYVFVGTSRYSKKFKPEIAIRPKVRDQEGRMNYYWTLVEPGDKITFEATGNLVVPRYAFAMERNAGSGIIISNTPVHDCNTTCQTPKGAINTSLPFQNIHPITIGKCPKYVKSTKLRLATGLRNVPSIQSRGLFGAIAGFIEGGWTGMVDGWYGYHHQNEQGSGYAADLKSTQNAIDEITNKVNSVIEKMNTQFTAVGKEFNHLEKRIENLNKKVDDGFLDIWTYNAELLVLLENERTLDYHDSNVKNLYEKVRSQLKNNAKEIGNGCFEFYHKCDNTCMESVKNGTYDYPKYSEEAKLNREEIDGVKLESTRIYQILAIYSTVASSLVLVVSLGAISFWMCSNGSLQCRICI

SEQ ID NO: 7258 - protein, 566 aa, synthetic construct; identical to SEQ ID NO: 2669
  REGION 1..566: note = hemagglutinin__InfluenzaA__AEO01154

SEQ ID NO: 7259 - protein, 566 aa, synthetic construct; identical to SEQ ID NO: 3022
  REGION 1..566: note = hemagglutinin__InfluenzaA__AEO01155

SEQ ID NO: 7260 - protein, 566 aa, synthetic construct; identical to SEQ ID NO: 3022
  REGION 1..566: note = hemagglutinin__InfluenzaA__AEO01156

SEQ ID NO: 7261 - protein, 566 aa, synthetic construct; identical to SEQ ID NO: 2669
  REGION 1..566: note = hemagglutinin__InfluenzaA__AEO01157

SEQ ID NO: 7262 - protein, 566 aa, synthetic construct; identical to SEQ ID NO: 2669
  REGION 1..566: note = hemagglutinin__InfluenzaA__AEO01158

SEQ ID NO: 7263 - protein, 566 aa, synthetic construct; identical to SEQ ID NO: 2669
  REGION 1..566: note = hemagglutinin__InfluenzaA__AEO01159

SEQ ID NO: 7264 - protein, 566 aa, synthetic construct
  REGION 1..566: note = hemagglutinin__InfluenzaA__AEO01160
MKAILVALLYTFATANADTLCIGYHANNSTDTVDTVLEKNVTVTHSVNLLEDKHNGKLCKLRGVAPLHLGKCNIAGWILGNPECESLSTASSWSYIVETSSSDNGTCYPGDFIDYEELREQLSSVSSFERFEIFPKTSSWPNHDSNKGVTAACPHAGAKSFYKNLIWLVKKGNSYPKLSKSYINDKGKEVLVLWGIHHPSTSADQQSLYQNADAYVFVGTSRYSKKFKPEIAIRPKVREQEGRMNYYWTLVEPGDKITFEATGNLVVPRYAFAMERNAGSGIIISDTPVHDCNTTCQTPKGAINTSLPFQNIHPITIGKCPKYVKSTKLRLATGLRNVPSIQSRGLFGAIAGFIEGGWTGMVDGWYGYHHQNEQGSGYAADLKSTQNAIDEITNKVNSVIEKMNTQFTAVGKEFNHLEKRIENLNKKVDDGFLDIWTYNAELLVLLENERTLDYHDSNVKNLYEKVRSQLKNNAKEIGNGCFEFYHKCDNTCMESVKNGTYDYPKYSEEAKLNREEIDGVKLESTRIYQILAIYSTVASSLVLVVSLGAISFWMCSNGSLQCRICI

SEQ ID NO: 7265 - protein, 566 aa, synthetic construct; identical to SEQ ID NO: 2669
  REGION 1..566: note = hemagglutinin__InfluenzaA__AEO01161

SEQ ID NO: 7266 - protein, 566 aa, synthetic construct; identical to SEQ ID NO: 3022
  REGION 1..566: note = hemagglutinin__InfluenzaA__AEO01162

SEQ ID NO: 7267 - protein, 566 aa, synthetic construct; identical to SEQ ID NO: 3022
  REGION 1..566: note = hemagglutinin__InfluenzaA__AEO01163

SEQ ID NO: 7268 - protein, 566 aa, synthetic construct; identical to SEQ ID NO: 3022
  REGION 1..566: note = hemagglutinin__InfluenzaA__AEO01164

SEQ ID NO: 7269 - protein, 566 aa, synthetic construct
  REGION 1..566: note = hemagglutinin__InfluenzaA__AEO01165
MKAILVVLLYTFATANADTLCIGYHANNSTDTVDTVLEKNVTVTHSVNLLEDKHNGKLCKLRGVAPLHLGKCNIAGWILGNPECESLSTASSWSYIVETSSSDNGTCYPGDFIDYEELREQLSSVSSFERFEIFPKTSSWPNHDSNKGVTAACPHAGAKSFYKNLIWLVKKGNSYPKFSKSYINDKGKEVLVLWGIHHPSTSADQQSLYQNADAYVFVGTSRYSKKFKPEIAIRPKVRDQEGRMNYYWTLVEPGDKITFEATGNLVVPRYAFAMERNAGSGIIISDTPVHDCNTTCQTPKGAINTSLPFQNIHPITIGKCPKYVKSTKLRLATGLRNVPSIQSRGLFGAIAGFIEGGWTGMVDGWYGYHHQNEQGSGYAADLKSTQNAIDEITNKVNSVIEKMNTQFTAVGKEFNHLEKRIENLNKKVDDGFLDIWTYNAELLVLLENERTLDYHDSNVKNLYEKVRSQLKNNAKEIGNGCFEFYHKCDNTCMESVKNGTYDYPKYSEEAKLNREEIDGVKLESTRIYQILAIYSTVASSLVLVVSLGAISFWMCSNGSLQCRICI

SEQ ID NO: 7270 - protein, 566 aa, synthetic construct; identical to SEQ ID NO: 3022
  REGION 1..566: note = hemagglutinin__InfluenzaA__AEO01166

SEQ ID NO: 7271 - protein, 566 aa, synthetic construct
  REGION 1..566: note = hemagglutinin__InfluenzaA__AEO01167
MKAILVVLLYTFATANADTLCIGYHANNSTDTVDTVLEKNVTVTHSVNLLEDKHNGKLCKLRGVAPLHLGKCNIAGWILGNPECESLSTASSWSYIVETSSSDNGTCYPGDFIDYEELREQLSSVSSFERFEIFPKTSSWPNHDSNKGVTAACPHAGAKSFYKNLIWLVKKGNSYPKLSKSYINDKGKEVLVLWGIHHPSTSADQQSLYQNADAYVFVGTSRYSKKFKPEIAIRPKVREQEGRMNYYWTLVEPGDKITFEATGNLVVPRYAFAMERNAGSGIIISDTSVHDCNTTCQTPKGAINTSLPFQNIHPITIGKCPKYVKSTKLRLATGLRNVPSIQSRGLFGAIAGFIEGGWTGMVDGWYGYHHQNEQGSGYAADLKSTQNAIDEITNKVNSVIEKMNTQFTAVGKEFNHLEKRIENLNKKVDDGFLDIWTYNAELLVLLENERTLDYHDSNVKNLYEKVRSQLKNNAKEIGNGCFEFYHKCDNTCMESVKNGTYDYPKYSEEAKLNREEIDGVKLESTRIYQILAIYSTVASSLVLVVSLGAISFWMCSNGSLQCRICI

SEQ ID NO: 7272 - protein, 566 aa, synthetic construct; identical to SEQ ID NO: 2669
  REGION 1..566: note = hemagglutinin__InfluenzaA__AEO01168

SEQ ID NO: 7273 - protein, 566 aa, synthetic construct; identical to SEQ ID NO: 3022
  REGION 1..566: note = hemagglutinin__InfluenzaA__AEO01169

SEQ ID NO: 7274 - protein, 566 aa, synthetic construct; identical to SEQ ID NO: 3022
  REGION 1..566: note = hemagglutinin__InfluenzaA__AEO01170

SEQ ID NO: 7275 - protein, 566 aa, synthetic construct; identical to SEQ ID NO: 3022
  REGION 1..566: note = hemagglutinin__InfluenzaA__AEO01171

SEQ ID NO: 7276 - protein, 566 aa, synthetic construct; identical to SEQ ID NO: 2669
  REGION 1..566: note = hemagglutinin__InfluenzaA__AEO01172

SEQ ID NO: 7277 - protein, 566 aa, synthetic construct
  REGION 1..566: note = hemagglutinin__InfluenzaA__AEO01173
MKAILVVLLYTFATANADTLCIGYHANNSTDTVDTVLEKNVTVTHSVNLLEDKHNGKLCKLRGVAPLHLGKCNIAGWILGNPECESLSTASSWSYIVETSSSDNGTCYPGDFIDYEELREQLSSVSSFERFEIFPKTSSWPNHDSNKGVTAACPHAGAKSFYKNLIWLVKKGNSYPKLSKSYINDKGKEVLVLWGIHHPSTSADQQSLYQNADAYVFVGTSRYSKKFKPEIAIRPKVRDQEGRMNYYWTLVEPGGKITFEATGNLVVPRYAFAMERNAGSGIIISDTPVHDCNTTCQTPKGAINTSLPFQNIHPITIGKCPKYVKSTKLRLATGLRNVPSIQSRGLFGAIAGFIEGGWTGMVDGWYGYHHQNEQGSGYAADLKSTQNAIDEITNKVNSVIEKMNTQFTAVGKEFNHLEKRIENLNKKVDDGFLDIWTYNAELLVLLENERTLDYHDSNVKNLYEKVRSQLKNNAKEIGNGCFEFYHKCDNTCMESVKNGTYDYPKYSEEAKLNREEIDGVKLESTRIYQILAIYSTVASSLVLVVSLGAISFWMCSNGSLQCRICI

SEQ ID NO: 7278 - protein, 566 aa, synthetic construct
  REGION 1..566: note = hemagglutinin__InfluenzaA__AEO01174
MKAILVVLLYTFATANADTLCIGYHANNSTDTVDTVLEKNVTVTHSVNLLEDKHNGKLCKLRGVAPLHLGKCNIAGWILGNPECESLSTASSWSYIVETSSSGNGTCYPGDFIDYEELREQLSSVSSFERFEIFPKTSSWPNHDSNKGVTAACPHAGAKSFYKNLIWLVKKGNSYPKLSKSYINDKGKEVLVLWGIHHPSTSADQQSLYQNADAYVFVGTSRYSKKFKPEIAIRPKVREQEGRMNYYWTLVEPGDKITFEATGNLVVPRYAFAMERNAGSGIIISDTPVHDCNTTCQTPKGAINTSLPFQNIHPITIGKCPKYVKSTKLRLATGLRNVPSIQSRGLFGAIAGFIEGGWTGMVDGWYGYHHQNEQGSGYAADLKSTQNAIDEITNKVNSVIEKMNTQFTAVGKEFNHLEKRIENLNKKVDDGFLDIWTYNAELLVLLENERTLDYHDSNVKNLYEKVRSQLKNNAKEIGNGCFEFYHKCDNTCMESVKNGTYDYPKYSEEAKLNREEIDGVKLESTRIYQILAIYSTVASSLVLVVSLGAISFWMCSNGSLQCRICI

SEQ ID NO: 7279 - protein, 566 aa, synthetic construct; identical to SEQ ID NO: 2669
  REGION 1..566: note = hemagglutinin__InfluenzaA__AEO01176

SEQ ID NO: 7280 - protein, 566 aa, synthetic construct; identical to SEQ ID NO: 2669
  REGION 1..566: note = hemagglutinin__InfluenzaA__AEO01177

SEQ ID NO: 7281 - protein, 566 aa, synthetic construct; identical to SEQ ID NO: 3022
  REGION 1..566: note = hemagglutinin__InfluenzaA__AEO01179

SEQ ID NO: 7282 - protein, 566 aa, synthetic construct; identical to SEQ ID NO: 3022
  REGION 1..566: note = hemagglutinin__InfluenzaA__AEO01180

SEQ ID NO: 7283 - protein, 566 aa, synthetic construct; identical to SEQ ID NO: 3022
  REGION 1..566: note = hemagglutinin__InfluenzaA__AEO01181

SEQ ID NO: 7284 - protein, 566 aa, synthetic construct; identical to SEQ ID NO: 3022
  REGION 1..566: note = hemagglutinin__InfluenzaA__AEO01182

SEQ ID NO: 7285 - protein, 566 aa, synthetic construct; identical to SEQ ID NO: 2669
  REGION 1..566: note = hemagglutinin__InfluenzaA__AEO01183

SEQ ID NO: 7286 - protein, 566 aa, synthetic construct; identical to SEQ ID NO: 3022
  REGION 1..566: note = hemagglutinin__InfluenzaA__AEO01184

SEQ ID NO: 7287 - protein, 566 aa, synthetic construct; identical to SEQ ID NO: 2669
  REGION 1..566: note = hemagglutinin__InfluenzaA__AEO01185

SEQ ID NO: 7288 - protein, 566 aa, synthetic construct; identical to SEQ ID NO: 2669
  REGION 1..566: note = hemagglutinin__InfluenzaA__AEO01186

SEQ ID NO: 7289 - protein, 566 aa, synthetic construct; identical to SEQ ID NO: 2669
  REGION 1..566: note = hemagglutinin__InfluenzaA__AEO01187

SEQ ID NO: 7290 - protein, 566 aa, synthetic construct; identical to SEQ ID NO: 2669
  REGION 1..566: note = hemagglutinin__InfluenzaA__AEO01188

SEQ ID NO: 7291 - protein, 566 aa, synthetic construct; identical to SEQ ID NO: 2669
  REGION 1..566: note = hemagglutinin__InfluenzaA__AEO01189

SEQ ID NO: 7292 - protein, 566 aa, synthetic construct; identical to SEQ ID NO: 2669
  REGION 1..566: note = hemagglutinin__InfluenzaA__AEO01191

SEQ ID NO: 7293 - protein, 566 aa, synthetic construct; identical to SEQ ID NO: 2669
  REGION 1..566: note = hemagglutinin__InfluenzaA__AEO01192

SEQ ID NO: 7294 - protein, 566 aa, synthetic construct; identical to SEQ ID NO: 3983
  REGION 1..566: note = hemagglutinin__InfluenzaA__AEO01193

SEQ ID NO: 7295 - protein, 566 aa, synthetic construct; identical to SEQ ID NO: 3022
  REGION 1..566: note = hemagglutinin__InfluenzaA__AEO01194

SEQ ID NO: 7296 - protein, 566 aa, synthetic construct; identical to SEQ ID NO: 3022
  REGION 1..566: note = hemagglutinin__InfluenzaA__AEO01195

SEQ ID NO: 7297 - protein, 566 aa, synthetic construct; identical to SEQ ID NO: 2669
  REGION 1..566: note = hemagglutinin__InfluenzaA__AEO01196

SEQ ID NO: 7298 - protein, 566 aa, synthetic construct; identical to SEQ ID NO: 2669
  REGION 1..566: note = hemagglutinin__InfluenzaA__AEO01197

SEQ ID NO: 7299 - protein, 566 aa, synthetic construct; identical to SEQ ID NO: 3022
  REGION 1..566: note = hemagglutinin__InfluenzaA__AEO01198

SEQ ID NO: 7300 - protein, 566 aa, synthetic construct; identical to SEQ ID NO: 3535
  REGION 1..566: note = hemagglutinin__InfluenzaA__AEO01200

SEQ ID NO: 7301 - protein, 566 aa, synthetic construct
  REGION 1..566: note = hemagglutinin__InfluenzaA__AEO01201
MKAILVVLLYTFATANADTLCIGYHANNSTDTVDTVLEKNVTVTHSVNLLEEKHNGKLCKLRGVAPLHLGKCNIAGWILGNPECESLSTASSWSYIVETSSSDNGTCYPGDFIDYEELREQLSSVSSFERFEIFPKTSSWPNHDSNKGVTAACPHAGAKSFYKNLIWLVKKGNSYPKLSKSYINDKGKEVLVLWGIHHPSTSADQQSLYQNADAYVFVGTSRYSKKFKPEIAIRPKVREQEGRMNYYWTLVEPGDKITFEATGNLVVPRYAFAMERNAGSGIIISDTPVHDCNTTCQTPKGAINTSLPFQNIHPITIGKCPKYVKSTKLRLATGLRNVPSIQSRGLFGAIAGFIEGGWTGMVDGWYGYHHQNEQGSGYAADLKSTQNAIDEITNKVNSVIEKMNTQFTAVGKEFNHLEKRIENLNKKVDDGFLDIWTYNAELLVLLENERTLDYHDSNVKNLYEKVRSQLKNNAKEIGNGCFEFYHKCDNTCMESVKNGTYDYPKYSEEAKLNREEIDGVKLESTRIYQILAIYSTVASSLVLVVSLGAISFWMCSNGSLQCRICI

SEQ ID NO: 7302 - protein, 566 aa, synthetic construct; identical to SEQ ID NO: 2669
  REGION 1..566: note = hemagglutinin__InfluenzaA__AEO01202

SEQ ID NO: 7303 - protein, 566 aa, synthetic construct; identical to SEQ ID NO: 4305
  REGION 1..566: note = hemagglutinin__InfluenzaA__AEO01203

SEQ ID NO: 7304 - protein, 566 aa, synthetic construct; identical to SEQ ID NO: 2669
  REGION 1..566: note = hemagglutinin__InfluenzaA__AEO01204

SEQ ID NO: 7305 - protein, 566 aa, synthetic construct; identical to SEQ ID NO: 2669
  REGION 1..566: note = hemagglutinin__InfluenzaA__AEO01205

SEQ ID NO: 7306 - protein, 566 aa, synthetic construct; identical to SEQ ID NO: 2669
  REGION 1..566: note = hemagglutinin__InfluenzaA__AEO01206

SEQ ID NO: 7307 - protein, 566 aa, synthetic construct; identical to SEQ ID NO: 2669
  REGION 1..566: note = hemagglutinin__InfluenzaA__AEO01207

SEQ ID NO: 7308 - protein, 566 aa, synthetic construct; identical to SEQ ID NO: 2669
  REGION 1..566: note = hemagglutinin__InfluenzaA__AEO01208

SEQ ID NO: 7309 - protein, 566 aa, synthetic construct; identical to SEQ ID NO: 3022
  REGION 1..566: note = hemagglutinin__InfluenzaA__AEO01209

SEQ ID NO: 7310 - protein, 566 aa, synthetic construct; identical to SEQ ID NO: 2669
  REGION 1..566: note = hemagglutinin__InfluenzaA__AEO01210

SEQ ID NO: 7311 - protein, 566 aa, synthetic construct; identical to SEQ ID NO: 3022
  REGION 1..566: note = hemagglutinin__InfluenzaA__AEO01211

SEQ ID NO: 7312 - protein, 566 aa, synthetic construct; identical to SEQ ID NO: 2669
  REGION 1..566: note = hemagglutinin__InfluenzaA__AEO01212

SEQ ID NO: 7313 - protein, 566 aa, synthetic construct; identical to SEQ ID NO: 2669
  REGION 1..566: note = hemagglutinin__InfluenzaA__AEO01213

SEQ ID NO: 7314 - protein, 566 aa, synthetic construct
  REGION 1..566: note = hemagglutinin__InfluenzaA__AEO01214
MKAILVVLLYTFATANADTLCIGYHANNSTDTVDTVLEKNVTVTHSVNLLEDKHNGKLCKLRGVAPLHLGKCNIAGWILGNPECESLSTASSWSYIVETSSSDNGTCYPGDFIDYEELREQLSSVSSFERFEIFPKTSSWPNHDSNKGVTAACPHAGAKSFYKNLIWLVKKGNSYPKLSKSYINDKGKEVLVLWGIHHPSTSADQQSLYQNADAYVFVGTSRYSKKFKPEIAIRPKVRDQEGRMNYYWTLVEPGDKITFEATGNLVAPRYAFAMERNAGSGIIISDTPVHDCNTTCQTPKGAINTSLPFQNIHPITIGKCPKYVKSTKLRLATGLRNVPSIQSRGLFGAIAGFIEGGWTGMVDGWYGYHHQNEQGSGYAADLKSTQNAIDEITNKVNSVIEKMNTQFTAVGKEFNHLEKRIENLNKKVDDGFLDIWTYNAELLVLLENERTLDYHDSNVKNLYEKVRSQLKNNAKEIGNGCFEFYHKCDNTCMESVKNGTYDYPKYSEEAKLNREEIDGVKLESTRIYQILAIYSTVASSLVLVVSLGAISFWMCSNGSLQCRICI

SEQ ID NO: 7315 - protein, 566 aa, synthetic construct; identical to SEQ ID NO: 3022
  REGION 1..566: note = hemagglutinin__InfluenzaA__AEO01215

SEQ ID NO: 7316 - protein, 566 aa, synthetic construct
  REGION 1..566: note = hemagglutinin__InfluenzaA__AEO01216
MKAILVVLLYTFATANADTLCIGYHANNSTDTVDTVLEKNVTVTHSVNLLEDKHNGKLCKLRGVAPLHLGKCNIAGWILGNPECESLSTASSWSYIVETSSSDNGTCYPGDFIDYEELREQLSSVSSFERFEIFPKTSSWPNHDSNKGVTAACPHAGAKSFYKNLIWLVKKGNSYPKLSKSYINDKGKEVLVLWGIHHPSTSADQQSLYQNADAYVFVGTSRYSKKFKPEIAIRPKVREQEGRMNYYWTLVEPGDKITFEATGNLVVPRYAFAMERNAGSGIIISDTPVHDCNTTCQTPKGAINTSLPFQNIHPITIGKCPKYVKSTKLRLATGLRNVPSIQSRGLFGAIAGFIEGGWTGMVDGWYGYHHQNEQGSGYAADLKSTQNAIDEITNKVNSVIEKMNTQFTAVGKEFNHLEKRVENLNKKVDDGFLDIWTYNAELLVLLENERTLDYHDSNVKNLYEKVRSQLKNNAKEIGNGCFEFYHKCDNTCMESVKNGTYDYPKYSEEAKLNREEIDGVKLESTRIYQILAIYSTVASSLVLVVSLGAISFWMCSNGSLQCRICI

SEQ ID NO: 7317 - protein, 566 aa, synthetic construct; identical to SEQ ID NO: 3022
  REGION 1..566: note = hemagglutinin__InfluenzaA__AEO01217

SEQ ID NO: 7318 - protein, 566 aa, synthetic construct; identical to SEQ ID NO: 3022
  REGION 1..566: note = hemagglutinin__InfluenzaA__AEO01218

SEQ ID NO: 7319 - protein, 566 aa, synthetic construct; identical to SEQ ID NO: 3022
  REGION 1..566: note = hemagglutinin__InfluenzaA__AEO01219

SEQ ID NO: 7320 - protein, 566 aa, synthetic construct; identical to SEQ ID NO: 2760
  REGION 1..566: note = hemagglutinin__InfluenzaA__AEO01220

SEQ ID NO: 7321 - protein, 566 aa, synthetic construct; identical to SEQ ID NO: 2669
  REGION 1..566: note = hemagglutinin__InfluenzaA__AEO01221

SEQ ID NO: 7322 - protein, 566 aa, synthetic construct; identical to SEQ ID NO: 2669
  REGION 1..566: note = hemagglutinin__InfluenzaA__AEO01222

SEQ ID NO: 7323 - protein, 566 aa, synthetic construct; identical to SEQ ID NO: 3022
  REGION 1..566: note = hemagglutinin__InfluenzaA__AEO01223

SEQ ID NO: 7324 - protein, 566 aa, synthetic construct
  REGION 1..566: note = hemagglutinin__InfluenzaA__AEO01224
MKAILVVLLYTFATANADTLCIGYHANNSTDTVDTVLEKNVTVTHSVNLLEDKHNGKLCKLRGVAPLHLGKCNIAGWILGNPECESLSTASSWSYIVETSSSDNGTCYPGDFIDYEELREQLSSVSSFERFEIFPKTSSWPNHDSNKGVTAACPHAGAKSFYKNLIWLVKKGNSYPKLSKSYINDKGKEVLVLWGIHHPSTSADQQSLYQNADAYVFVGTSRYSKKFKPEIAIRPKVRDQEGRMNYYWTLVEPGDKITFEATGNLVVPRYAFATERNAGSGIIISDTPVHDCNTTCQTPKGAINTSLPFQNIHPITIGKCPKYVKSTKLRLATGLRNVPSIQSRGLFGAIAGFIEGGWTGMVDGWYGYHHQNEQGSGYAADLKSTQNAIDEITNKVNSVIEKMNTQFTAVGKEFNHLEKRIENLNKKVDDGFLDIWTYNAELLVLLENERTLDYHDSNVKNLYEKVRSQLKNNAKEIGNGCFEFYHKCDNTCMESVKNGTYDYPKYSEEAKLNREEIDGVKLESTRIYQILAIYSTVASSLVLVVSLGAISFWMCSNGSLQCRICI

SEQ ID NO: 7325 - protein, 566 aa, synthetic construct
  REGION 1..566: note = hemagglutinin__InfluenzaA__AEO01225
MKAILVVLLYTFATANADTLCIGYHANNSTDTVDTVLEKNVTVTHSVNLLEDKHNGKLCKLRGVAPLHLGKCNIAGWILGNPECESLSTASSWSYIVETSSSDNGTCYPGDFIDYEELREQLSSVSSFERFEIFPKTSSWPNHDSNKGVTAACPHAGAKSFYKNLIWLVKKGNSYPKLSKSYINDKGKEVLVLWGIHHPSTSADQQSLYQNADAYVFVGTSRYSKKFKPEIAIRPKVRDQEGRMNYYWTVVEPGDKITFEATGNLVVPRYAFAMERNAGSGIIISDTPVHDCNTTCQTPKGAINTSLPFQNIHPITIGKCPKYVKSTKLRLATGLRNVPSIQSRGLFGAIAGFIEGGWTGMVDGWYGYHHQNEQGSGYAADLKSTQNAIDEITNKVNSVIEKMNTQFTAVGKEFNHLEKRIENLNKKVDDGFLDIWTYNAELLVLLENERTLDYHDSNVKNLYEKVRSQLKNNAKEIGNGCFEFYHKCDNTCMESVKNGTYDYPKYSEEAKLNREEIDGVKLESTRIYQILAIYSTVASSLVLVVSLGAISFWMCSNGSLQCRICI

SEQ ID NO: 7326 - protein, 566 aa, synthetic construct
  REGION 1..566: note = hemagglutinin__InfluenzaA__AEO01226
MKAILVVLLYTFATANADTLCIGYHANNSTDTVDTVLEKNVTVTHSVNLLEDKHNGKLCKLRGVAPLHLGKCNIAGWILGNPECESLSTASSWSYIVETSSSDNGTCYPGDFIDYEELREQLSSVSSFERFEIFPKTSSWPNHDSNKGVTAACPHAGAKSFYKNLIWLVKKGNSYPKLSKSYINDKGKEVLVLWGIHHPSTSADQQSLYQNADAYVFVGTSRYSKKFKPEIAIRPKVRDQEGRMNYYWTLVEPGDKITFEATGNLVVPRYAFAMERNDGSGIIISDTPVHDCNTTCQTPKGAINTSLPFQNIHPITIGKCPKYVKSTKLRLATGLRNVPSIQSRGLFGAIAGFIEGGWTGMVDGWYGYHHQNEQGSGYAADLKSTQNAIDEITNKVNSVIEKMNTQFTAVGKEFNHLEKRIENLNKKVDDGFLDIWTYNAELLVLLENERTLDYHDSNVKNLYEKVRSQLKNNAKEIGNGCFEFYHKCDNTCMESVKNGTYDYPKYSEEAKLNREEIDGVKLESTRIYQILAIYSTVASSLVLVVSLGAISFWMCSNGSLQCRICI

SEQ ID NO: 7327 - protein, 566 aa, synthetic construct; identical to SEQ ID NO: 4836
  REGION 1..566: note = hemagglutinin__InfluenzaA__AEO01227

SEQ ID NO: 7328 - protein, 566 aa, synthetic construct; identical to SEQ ID NO: 2669
  REGION 1..566: note = hemagglutinin__InfluenzaA__AEO01228

SEQ ID NO: 7329 - protein, 566 aa, synthetic construct; identical to SEQ ID NO: 2669
  REGION 1..566: note = hemagglutinin__InfluenzaA__AEO01229

SEQ ID NO: 7330 - protein, 566 aa, synthetic construct
  REGION 1..566: note = hemagglutinin__InfluenzaA__AEO01230
MKAILVVLLYTFATANADTLCIGYHANNSTDTVDTVLERNVTVTHSVNLLEDKHNGKLCKLRGVAPLHLGKCNIAGWILGNPECESLSTASSWSYIVETSSSDNGTCYPGDFIDYEELREQLSSVSSFERFEIFPKTSSWPNHDSNKGVTAACPHAGAKSFYKNLIWLVKKGNSYPKLSKSYINDKGKEVLVLWGIHHPSTSADQQSLYQNADAYVFVGTSRYSKKFKPEIAIRPKVRDQEGRMNYYWTLVEPGDKITFEATGNLVVPRYAFAMERNAGSGIIISDTPVHDCNTTCQTPKGAINTSLPFQNIHPITIGKCPKYVKSTKLRLATGLRNVPSIQSRGLFGAIAGFIEGGWTGMVDGWYGYHHQNEQGSGYAADLKSTQNAIDEITNKVNSVIEKMNTQFTAVGKEFNHLEKRIENLNKKVDDGFLDIWTYNAELLVLLENERTLDYHDSNVKNLYEKVRSQLKNNAKEIGNGCFEFYHKCDNTCMESVKNGTYDYPKYSKEAKLNREEIDGVKLESTRIYQILAIYSTVASSLVLVVSLGAISFWMCSNGSLQCRICI

SEQ ID NO: 7331 - protein, 566 aa, synthetic construct; identical to SEQ ID NO: 2669
  REGION 1..566: note = hemagglutinin__InfluenzaA__AEO01231

SEQ ID NO: 7332 - protein, 566 aa, synthetic construct; identical to SEQ ID NO: 3022
  REGION 1..566: note = hemagglutinin__InfluenzaA__AEO01232

SEQ ID NO: 7333 - protein, 566 aa, synthetic construct; identical to SEQ ID NO: 2669
  REGION 1..566: note = hemagglutinin__InfluenzaA__AEO01233

SEQ ID NO: 7334 - protein, 566 aa, synthetic construct; identical to SEQ ID NO: 2669
  REGION 1..566: note = hemagglutinin__InfluenzaA__AEO01234

SEQ ID NO: 7335 - protein, 566 aa, synthetic construct; identical to SEQ ID NO: 2669
  REGION 1..566: note = hemagglutinin__InfluenzaA__AEO01235

SEQ ID NO: 7336 - protein, 566 aa, synthetic construct; identical to SEQ ID NO: 6541
  REGION 1..566: note = hemagglutinin__InfluenzaA__AEO01236

SEQ ID NO: 7337 - protein, 566 aa, synthetic construct; identical to SEQ ID NO: 2669
  REGION 1..566: note = hemagglutinin__InfluenzaA__AEO01237

SEQ ID NO: 7338 - protein, 566 aa, synthetic construct; identical to SEQ ID NO: 2669
  REGION 1..566: note = hemagglutinin__InfluenzaA__AEO01238

SEQ ID NO: 7339 - protein, 566 aa, synthetic construct; identical to SEQ ID NO: 2669
  REGION 1..566: note = hemagglutinin__InfluenzaA__AEO01240

SEQ ID NO: 7340 - protein, 566 aa, synthetic construct; identical to SEQ ID NO: 3022
  REGION 1..566: note = hemagglutinin__InfluenzaA__AEO01241

SEQ ID NO: 7341 - protein, 566 aa, synthetic construct; identical to SEQ ID NO: 2669
  REGION 1..566: note = hemagglutinin__InfluenzaA__AEO01242

SEQ ID NO: 7342 - protein, 566 aa, synthetic construct
  REGION 1..566: note = hemagglutinin__InfluenzaA__AEO01244
MKAILVVLLYTFATANADTLCIGYHANNSTDTVDTVLEKNVTVTHSVNLLEDKHNGKLCKLRGVAPLHLGKCNIAGWILGNPECESLSTASSWSYIVETSSSDNGTCYPGDFIDYEELREQLSSVSSFERFEIFPKTSSWPNHDSNKGVTAACPHAGAKSFYKNLIWLVKKGNSYPKLSKSYINDKGKEVLVLWGIHHPSTSADQQSLYQNADAYVFVGTSKYSKKFKPEIAIRPKVRGQEGRMNYYWTLVEPGDKITFEATGNLVVPRYAFAMERNAGSGIIISDTPVHDCNTTCQTPKGAINTSLPFQNIHPITIGKCPKYVKSTKLRLATGLRNVPSIQSRGLFGAIAGFIEGGWTGMVDGWYGYHHQNEQGSGYAADLKSTQNAIDEITNKVNSVIEKMNTQFTAVGKEFNHLEKRIENLNKKVDDGFLDIWTYNAELLVLLENERTLDYHDSNVKNLYEKVRSQLKNNAKEIGNGCFEFYHKCDNTCMESVKNGTYDYPKYSEEAKLNREEIDGVKLESTRIYQILAIYSTVASSLVLVVSLGAISFWMCSNGSLQCRICI

SEQ ID NO: 7343 - protein, 566 aa, synthetic construct; identical to SEQ ID NO: 2669
  REGION 1..566: note = hemagglutinin__InfluenzaA__AEO01245

SEQ ID NO: 7344 - protein, 566 aa, synthetic construct
  REGION 1..566: note = hemagglutinin__InfluenzaA__AEO01247
MKAILVVLLYTFATANADTLCIGYHANNSTDTVDTVLEKNVTVTHSVNLLEDKHNGKLCKLRGVAPLHLGKCNIAGWILGNPECESLSTASSWSYIVETSSSDNGTCYPGDFIDYEELREQLSSVSSFERFEIFPKTSSWPNHDSNKGVTAACPHAGAKSFYKNLIWLVKKGNSYPKLSKSYINDKGKEVLVLWGIHHPSTSADQQSLYQNADAYVFVGTSRYSKKFKPEIAIRPKVRDQEGRMNYYWTLVEPGDKITFEATGNLVVPRYAFAMERNAGSGILISDTPVHDCNTTCQTPKGAINTSLPFQNIHPITIGKCPKYVKSTKLRLATGLRNVPSIQSRGLFGAIAGFIEGGWTGMVDGWYGYHHQNEQGSGYAADLKSTQHAIDEITNKVNSVIEKMNTQFTAVGKEFNHLEKRIENLNKKVDDGFLDIWTYNAELLVLLENERTLDYHDSNVKNLYEKVRSQLKNNAKEIGNGCFEFYHKCDNTCMESVKNGTYDYPKYSEEAKLNREEIDGVKLESTRIYQILAIYSTVASSLVLVVSLGAISFWMCSNGSLQCRICI

SEQ ID NO: 7345 - protein, 566 aa, synthetic construct; identical to SEQ ID NO: 2669
  REGION 1..566: note = hemagglutinin__InfluenzaA__AEO01248

SEQ ID NO: 7346 - protein, 566 aa, synthetic construct; identical to SEQ ID NO: 2669
  REGION 1..566: note = hemagglutinin__InfluenzaA__AEO01249

SEQ ID NO: 7347 - protein, 566 aa, synthetic construct
  REGION 1..566: note = hemagglutinin__InfluenzaA__AEO01250
MKAILVVLLYTFATANADTLCIGYHANNSTDTVDTVLEKNVTVTHSVNLLEDKHNGKLCKLRGVAPLHLGKCNIAGWILGNPECESLSTASSWSYIVETSSSDNGTCYPGDFIDYEELREQLSSVSSFERFEIFPKTSSWPNHDSNKGVTAACPHAGAKSFYKNLIWLVKKGNSYPKLSKSYINDKGKEVLVLWGIHHPSTSADQQSLYQNEDAYVFVGTSRYSKKFKPEIAIRPKVRDQEGRMNYYWTLVEPGDKITFEATGNLVVPRYAFAMERNAGSGIIISDTPVHDCNTTCQTPKGAINTSLPFQNIHPITIGKCPKYVKSTKLRLATGLRNVPSIQSRGLFGAIAGFIEGGWTGMVDGWYGYHHQNEQGSGYAADLKSTQNAIDEITNKVNSVIEKMNTQFTAVGKEFNHLEKRIENLNKKVDDGFLDIWTYNAELLVLLENERTLDYHDSNVKNLYEKVRSQLKNNAKEIGNGCFEFYHKCDNTCMESVKNGTYDYPKYSEEAKLNREEIDGVKLESTRIYQILAIYSTVASSLVLVVSLGAISFWMCSNGSLQCRICI

SEQ ID NO: 7348 - protein, 566 aa, synthetic construct; identical to SEQ ID NO: 4266
  REGION 1..566: note = hemagglutinin__InfluenzaA__AEO01251

SEQ ID NO: 7349 - protein, 566 aa, synthetic construct; identical to SEQ ID NO: 2669
  REGION 1..566: note = hemagglutinin__InfluenzaA__AEO01252

SEQ ID NO: 7350 - protein, 566 aa, synthetic construct; identical to SEQ ID NO: 2669
  REGION 1..566: note = hemagglutinin__InfluenzaA__AEO01253

SEQ ID NO: 7351 - protein, 566 aa, synthetic construct
  REGION 1..566: note = hemagglutinin__InfluenzaA__AEO01254
MKAILVVLLYTFATANADTLCIGYHANNSTDTVDTVLEKNVTVTHSVNLLEDKHNGKLCKLRGVAPLHLGKCNIAGWILGNPECESLSTASSWSYIVETSSSDNGTCYPGDFIDYEELREQLSSVSSFERFEIFPKTSSWPNHDSNKGVTAACPHAGAKSFYKNLIWLVKKGNSYPKLSKSYINNKGKEVLVLWGIHHPSTSADQQSLYQNADAYVFVGTSRYSKKFKPEIAIRPKVRDQEGRMNYYWTLVEPGDKITFEATGNLVVPRYAFAMERNAGSGIIISDTPVHDCNTTCQTPKGAINTSLPFQNIHPITIGKCPKYVKSTKLRLATGLRNVPSIQSRGLFGAIAGFIEGGWTGMVDGWYGYHHQNEQGSGYAADLKSTQNAIDKITNKVNSVIEKMNTQFTAVGKEFNHLEKRIENLNKKVDDGFLDIWTYNAELLVLLENERTLDYHDSNVKNLYEKVRSQLKNNAKEIGNGCFEFYHKCDNTCMESVKNGTYDYPKYSEEAKLNREEIDGVKLESTRIYQILAIYSTVASSLVLVVSLGAISFWMCSNGSLQCRICI

SEQ ID NO: 7352 - protein, 566 aa, synthetic construct; identical to SEQ ID NO: 3116
  REGION 1..566: note = hemagglutinin__InfluenzaA__AEO01256

SEQ ID NO: 7353 - protein, 566 aa, synthetic construct; identical to SEQ ID NO: 6088
  REGION 1..566: note = hemagglutinin__InfluenzaA__AEO01257

SEQ ID NO: 7354 - protein, 566 aa, synthetic construct; identical to SEQ ID NO: 2669
  REGION 1..566: note = hemagglutinin__InfluenzaA__AEO01258

SEQ ID NO: 7355 - protein, 566 aa, synthetic construct; identical to SEQ ID NO: 7351
  REGION 1..566: note = hemagglutinin__InfluenzaA__AEO01259

SEQ ID NO: 7356 - protein, 566 aa, synthetic construct; identical to SEQ ID NO: 5224
  REGION 1..566: note = hemagglutinin__InfluenzaA__AEO01260

SEQ ID NO: 7357 - protein, 566 aa, synthetic construct
  REGION 1..566: note = hemagglutinin__InfluenzaA__AEO01261
MKAILVVLLYTFATANADTLCIGYHANNSTDTVDTVLEKNVTVTHSVNLLEDKHNGKLCKLRGVAPLHLGKCNIAGWILGNPECESLSTASSWSYIVETSSSDNGTCYPGDFIDYEELREQLSSVSSFERFEIFPKTSSWPNHDSNKGVTAACPHAGAKSFYKNLIWLVKKGNSYPKLSKSYINDKGKEVLVLWGIHHPSTSADQQSLYQNADAYVFVGTSRYSKKFKPEIAIRPKVRDQEGRMNYYWTLVEPGDKITFEATGNLVVPRYAFAMERNAGSGIIISDTPVHDCNTTCQTPKGAINTSLPFQNIHPITIGKCPKYVKSTKLRMATGLRNVPSIQSRGLFGAIAGFIEGGWTGMVDGWYGYHHQNEQGSGYAADLKSTQNAIDEITNKVNSVIEKMNTQFTAVGKEFNHLEKRIENLNKKVDDGFLDIWTYNAELLVLLENERTLDYHDSNVKNLYEKVRSQLKNNAKEIGNGCFEFYHKCDNTCMESVKNGTYDYPKYSEEAKLNREEIDGVKLESTGIYQILAIYSTVASSLVLVVSLGAISFWMCSNGSLQCRICI

SEQ ID NO: 7358 - protein, 566 aa, synthetic construct; identical to SEQ ID NO: 2669
  REGION 1..566: note = hemagglutinin__InfluenzaA__AEO01262

SEQ ID NO: 7359 - protein, 566 aa, synthetic construct; identical to SEQ ID NO: 4351
  REGION 1..566: note = hemagglutinin__InfluenzaA__AEO01263

SEQ ID NO: 7360 - protein, 566 aa, synthetic construct; identical to SEQ ID NO: 3022
  REGION 1..566: note = hemagglutinin__InfluenzaA__AEO01264

SEQ ID NO: 7361 - protein, 566 aa, synthetic construct; identical to SEQ ID NO: 2669
  REGION 1..566: note = hemagglutinin__InfluenzaA__AEO01265

SEQ ID NO: 7362 - protein, 566 aa, synthetic construct
  REGION 1..566: note = hemagglutinin__InfluenzaA__AEO01266
MKAILVVLLYTFATANADTLCIGYHANNSTDTVDTVLEKNVTVTHSVNLLEDKHNGKLCKLRGVAPLHLGKCNIAGWILGNPECESLSTASSWSYIVETSSSDNGTCYPGDFIDYEELREQLSSVSSFERFEIFPKTSSWPNHDSNKGVTAACPHAGAKSFYKNLIWLVKKGNSYPKLSKSYINDKGKEVLVLWGIHHPSTSADQQSLYQNADAYVFVGTSRYSKKFKPEIAIRPKVRGQEGRMNYYWTLVEPGDKITFEATGNLVVPRYAFAMERNAGSGIIISDAPVHDCNTTCQTPKGAINTSLPFQNIHPITIGKCPKYVKSTKLRLATGLRNVPSIQSRGLFGAIAGFIEGGWTGMVDGWYGYHHQNEQGSGYAADLKSTQNAIDEITNKVNSVIEKMNTQFTAVGKEFNHLEKRIENLNKKVDDGFLDIWTYNAELLVLLENERTLDYHDSNVKNLYEKVRSQLKNNAKEIGNGCFEFYHKCDNTCMESVKNGTYDYPKYSEEAKLNREEIDGVKLESTRIYQILAIYSTVASSLVLVVSLGAISFWMCSNGSLQCRICI

SEQ ID NO: 7363 - protein, 566 aa, synthetic construct; identical to SEQ ID NO: 2669
  REGION 1..566: note = hemagglutinin__InfluenzaA__AEO01267

SEQ ID NO: 7364 - protein, 566 aa, synthetic construct; identical to SEQ ID NO: 2669
  REGION 1..566: note = hemagglutinin__InfluenzaA__AEO01268

SEQ ID NO: 7365 - protein, 566 aa, synthetic construct
  REGION 1..566: note = hemagglutinin__InfluenzaA__AEO01269
MKAILVVLLYTFATANADTLCIGYHANNSTDTVDTVLEKNVTVTHSVNLLEDKHNGKLCKLRGVAPLHLGKCNIAGWILGNPECESLSTASSWSYIVETSSSDNGTCYPGDFIDYEELREQLSSVSSFERFEIFPKTSSWPNHDSNKGVTAACPHAGAKSFYKNLIWLVKKGNSYPKLSKSYINDKGKEVLVLWGIHHPSTSADQQSLYQNADAYVFVGTSRYSKKFKPEIAIRPKVREQEGRMNYYWTLVEPGDKITFEATGNLVVPRYAFAMERNAGSGIVISDTPVHDCNTTCQTPKGAINTSLPFQNIHPITIGKCPKYVKSTKLRLATGLRNVPSIQSRGLFGAIAGFIEGGWTGMVDGWYGYHHQNEQGSGYAADLKSTQNAIDEITNKVNSVIEKMNTQFTAVGKEFNHLEKRMENLNKKVDDGFLDIWTYNAELLVLLENERTLDYHDSNVKNLYEKVRSQLKNNAKEIGNGCFEFYHKCDNTCMESVKNGTYDYPKYSEEAKLNREEIDGVKLESTRIYQILAIYSTVASSLVLVVSLGAISFWMCSNGSLQCRICI

SEQ ID NO: 7366 - protein, 566 aa, synthetic construct; identical to SEQ ID NO: 3833
  REGION 1..566: note = hemagglutinin__InfluenzaA__AEO01270

SEQ ID NO: 7367 - protein, 566 aa, synthetic construct
  REGION 1..566: note = hemagglutinin__InfluenzaA__AEO01271
MKAILVVLLYTFATANADTLCIGYHANNSTDTVDTVLEKNVTVTHSVNLLEDKHNGKLCKLRGVAPLHLGKCDIAGWILGNPECESLSTASSWSYIVETPSSDNGTCYPGDFIDYEELREQLSSVSSFERFEIFPKTSSWPNHDSNKGVTAACPHAGAKSFYKNLIWLVKKGNSYPKLSKSYINDKGKEVLVLWGIHHPSTSADQQSLYQNADAYVFVGTSRYSKKFKPEIAIRPKVRDQEGRMNYYWTLVEPGDKITFEATGNLVVPRYAFAMERNAGSGIIISDTPVHDCNTTCQTPKGAINTSLPFQNIHPITIGKCPKYVKSTKLRLATGLRNVPSIQSRGLFGAIAGFIEGGWTGMVDGWYGYHHQNEQGSGYAADLKSTQHAIDEITNKVNSVIEKMNTQFTAVGKEFNHLEKRIENLNKKVDDGFLDIWTYNAELLVLLENERTLDYHDSNVKNLYEKVRSQLKNNAKEIGNGCFEFYHKCDNTCMESVKNGTYDYPKYSEEAKLNREEIDGVKLESTRIYQILAIYSTVASSLVLVVSLGAISFWMCSNGSLQCRICI

SEQ ID NO: 7368 - protein, 566 aa, synthetic construct; identical to SEQ ID NO: 2669
  REGION 1..566: note = hemagglutinin__InfluenzaA__AEO01272

SEQ ID NO: 7369 - protein, 566 aa, synthetic construct; identical to SEQ ID NO: 2669
  REGION 1..566: note = hemagglutinin__InfluenzaA__AEO01273

SEQ ID NO: 7370 - protein, 566 aa, synthetic construct; identical to SEQ ID NO: 2669
  REGION 1..566: note = hemagglutinin__InfluenzaA__AEO01274

SEQ ID NO: 7371 - protein, 566 aa, synthetic construct; identical to SEQ ID NO: 4837
  REGION 1..566: note = hemagglutinin__InfluenzaA__AEO01275

SEQ ID NO: 7372 - protein, 566 aa, synthetic construct
  REGION 1..566: note = hemagglutinin__InfluenzaA__AEO01276
MKAILVVLLYTFATANADTLCIGYHANNSTDTVDTVLKKNVTVTHSVNLLEDKHNGKLCKLRGVAPLHLGKCNIAGWILGNPECESLSTASSWSYIVETSSSDNGTCYPGDFIDYEELREQLSSVSSFERFEIFPKTSSWPNHDSNKGVTAACPHAGAKSFYKNLIWLVKKGNSYPKLSKSYINDKGKEVLVLWGIHHPSTSADQQSLYQNADAYVFVGTSRYSKKFKPEIAIRPKVRDQEGRMNYYWTLVEPGDKITFEATGNLVVPRYAFAMERNAGSGIIISDTPVHDCNTTCQTPKGAINTSLPFQNIHPITIGKCPKYVKSTKLRLATGLRNVPSIQSRGLFGAIAGFIEGGWTGMVDGWYGYHHQNEQGSGYAADLKSTQNAIDEITNKVNSVIEKMNTQFTAVGKEFNHLEKRIENLNKKVDDGFLDIWTYNAELLVLLENERTLDYHDSNVKNLYEKVRSQLKNNAEEIGNGCFEFYHKCDNTCMESVKNGTYDYPKYSEEAKLNREEIDGVKLESTRIYQILAIYSTVASSLVLVVSLGAISFWMCSNGSLQCRICI

SEQ ID NO: 7373 - protein, 566 aa, synthetic construct; identical to SEQ ID NO: 2669
  REGION 1..566: note = hemagglutinin__InfluenzaA__AEO01277

SEQ ID NO: 7374 - protein, 566 aa, synthetic construct
  REGION 1..566: note = hemagglutinin__InfluenzaA__AEO01278
MKAILVVLLYTFATANADTLCIGYHANNSTDTVDTVLEKNVTVTHSVNLLEDKHNGKLCKLRGVAPLHLGKCDIAGWILGNPECESLSTASSWSYIVETSSSDNGTCYPGDFIDYEELREQLSSVSSFERFEIFPKTSSWPNHDSNKGVTAACPHAGAKSFYKNLIWLVKKGNSYPKLSKSYINDKGKEVLVLWGIHHPSTSADQQSLYQNADAYVFVGTSRYSKKFKPEIAIRPKVRDQEGRMNYYWTLVEPGDKITFEATGNLVVPRYAFAMERNAGSGIIISDTPVHDCNTTCQTPKGAINTSLPFQNIHPITIGKCPKYVKSTKLRLATGLRNVPSIQSRGLFGAIAGFIEGGWTGMVDGWYGYHHQNEQGSGYAADLKSTQHAIDEITNKVNSVIEKMNTQFTAVGKEFNHLEKRIANLNKKVDDGFLDIWTYNAELLVLLENERTLDYHDSNVKNLYEKVRSQLKNNAKEIGNGCFEFYHKCDNTCMESVKNGTYDYPKYSEEAKLNREEIDGVKLESTRIYQILAIYSTVASSLVLVVSLGAISFWMCSNGSLQCRICI

SEQ ID NO: 7375 - protein, 566 aa, synthetic construct
  REGION 1..566: note = hemagglutinin__InfluenzaA__AEO01279
MKAILVVLLYTFATANADTLCIGYHANNSTDTVDTVLEKNVTVTHSVNLLEDKHNGKLCKLRGVAPLHLGKCNIAGWILGNPECESLSTASSWSYIVETSSSDNGTCYPGDFIDYEELREQLSSVSSFERFEIFPKTSSWPNHDSNKGVTAACPHAGAKSFYKNLIWLVKKGNSYPKLSKSYINDKGKEVLVLWGIHHPSTSADQQSLYQNADAYVFVGTSRYSKKFKPEIAIRPKVRDQEGRMNYYWTLVEPGDKITFEATGNLVVPRYAFAMERTAGSGIIISDTPVHDCNTTCQTPKGAINTSLPFQNIHPITIGKCPKYVKSTKLRLATGLRNVPSIQSRGLFGAIAGFIEGGWTGMVDGWYGYHHQNEQGSGYAADLKSTQNAIDKITNKVNSVIEKMNTQFTAVGKEFNHLEKRIENLNKKVDDGFLDIWTYNAELLVLLENERTLDYHDSNVKNLYEKVRSQLKNNAKEIGNGCFEFYHKCDNTCMESVKNGTYDYPKYSEEAKLNREEIDGVKLESTRIYQILAIYSTVASSLVLVVSLGAISFWMCSNGSLQCRICI

SEQ ID NO: 7376 - protein, 566 aa, synthetic construct
  REGION 1..566: note = hemagglutinin__InfluenzaA__AEO01282
MKAILVVLLYTFATANADTLCIGYHANNSTDTVDTVLEKNVTVTHSVNLLEDKHNGKLCKLRGVAPLHLGKCNIAGWILGNPECESLSTASSWSYIVETSSSDNGTCYPGDFIDYEELREQLSSVSSFERFEIFPKTSSWPNHDSNKGVTAACPHAGAKSFYKNLIWLVKKGNSYPKLSKSYINDKGKEVLVLWGIHHPSTSADQQSLYQNADAYVFVGTSRYSKKFKPEIAIRPKVRDQEGRMNYYWTLVEPGDKITFEATGNLVVPRYAFAMERNAGSGIIISDTPVHDCNTTCQTPKGAINTSLPFQNIHPITIGKCPKYVKSTKLRLATGLRNVPSIQSRGLFGAIAGFIEGGWTGMVDGWYGYHHQNEQGSGYAADLKSTQNAIDEITNKVNSVIEKMNTQFTAVGKEFNHLEKRIENLNKKVDDGFLDIWTYNAELLVLLENERTLDYHDSNVKKLYEKVRSQLKNNAKEIGNGCFEFYHKCNNTCMESVKNGTYDYPKYSEEAKLNREEIDGVKLESTRIYQILAIYSTVASSLVLVVSLGAISFWMCSNGSLQCRICI

SEQ ID NO: 7377 - protein, 566 aa, synthetic construct; identical to SEQ ID NO: 3771
  REGION 1..566: note = hemagglutinin__InfluenzaA__AEO01283

SEQ ID NO: 7378 - protein, 566 aa, synthetic construct
  REGION 1..566: note = hemagglutinin__InfluenzaA__AEO01284
MKAILVVLLYTFAIANADTLCIGYHANNSTDTVDTVLEKNVTVTHSVNLLEDKHNGKLCKLRGVAPLHLGKCNIAGWILGNPECESLSTASSWSYIVETSSSDNGTCYPGDFIDYEELREQLSSVSSFERFEIFPKTSSWPNHDSNKGVTAACPHAGAKSFYKNLIWLVKKGNSYPKLSKSYINDKGKEVLVLWGIHHPSTSADQQSLYQNADAYVFVGTSRYSKKFKPEIAIRPKVRDQEGRMNYYWTLVEPGDKITFEATGNLVVPRYAFAMERNAGSGIIISDTPVHDCNTTCQTPKGAINTSLPFQNIHPITIGKCPKYVKSTKLRLATGLRNVPSIQSRGLFGAIAGFIEGGWTGMVDGWYGYHHQNEQGSGYAADLKSTQHAIDEITNKVNSVIEKMNTQFTAVGKEFNHLEKRIENLNKKVDDGFLDIWTYNAELLVLLENERTLDYHDSNVKNLYEKVRSQLKNNAKEIGNGCFEFYHKCDNTCMESVKNGTYDYPKYSEEAKLNREEINGVKLESTRIYQILAIYSTVASSLVLVVSLGAISFWMCSNGSLQCRICI

SEQ ID NO: 7379 - protein, 566 aa, synthetic construct; identical to SEQ ID NO: 3770
  REGION 1..566: note = hemagglutinin__InfluenzaA__AEO01285

SEQ ID NO: 7380 - protein, 566 aa, synthetic construct; identical to SEQ ID NO: 3863
  REGION 1..566: note = hemagglutinin__InfluenzaA__AEO01286

SEQ ID NO: 7381 - protein, 566 aa, synthetic construct
  REGION 1..566: note = hemagglutinin__InfluenzaA__AEO01287
MKAILVVLLYTFATANSDTLCIGYHANNSTDTVDTVLEKNVTVTHSVNLLEDKHNGKLCKLRGVAPLHLGKCNIAGWILGNPECESLSTASSWSYIVETSSSDNGTCYPGDFIDYEELREQLSSVSSFERFEIFPKTSSWPNHDSNKGVTAACPHAGAKSFYKNLIWLVKKGNSYPKLSKSYINDKGKEVLVLWGIHHPSTSADQQSLYQNADAYVFVGTSRYSKKFKPEIAIRPKVRDQEGRMNYYWTLVEPGDKITFEATGNLVVPRYAFAMERNAGSGIIISDTPVHDCNTTCQTPKGAINTSLPFQNIHPITIGKCPKYVKSTKLRLATGLRNVPSIQSRGLFGAIAGFIEGGWTGMVDGWYGYHHQNEQGSGYAADLKSTQNAIDEITNKVNSVIEKMNTQFTAVGKEFNHLEKRIENLNKKVDDGFLDIWTYNAELLVLLENERTLDYHDSNVKNLYEKVRSQLKNNAKEIGNGCFEFYHKCDNTCMESVKNGTYDYPKYSEEAKLNREEIDGVKLESTRIYQILAIYSTVASSLVLVVSLGAISFWMCSNGSLQCRICI

SEQ ID NO: 7382 - protein, 566 aa, synthetic construct; identical to SEQ ID NO: 3022
  REGION 1..566: note = hemagglutinin__InfluenzaA__AEO01288

SEQ ID NO: 7383 - protein, 566 aa, synthetic construct; identical to SEQ ID NO: 2669
  REGION 1..566: note = hemagglutinin__InfluenzaA__AEO01289

SEQ ID NO: 7384 - protein, 566 aa, synthetic construct
  REGION 1..566: note = hemagglutinin__InfluenzaA__AEO01290
MKAILVVLLYTFATANADTLCIGYHANNSTDTVDTVLEKNVTVTHSVNLLEDKHNGKLCKLRGVAPLHLGKCNIAGWILGNPECESLSTASSWSYIVETSSSDNGTCYPGDFIDYEELREQLSSVSSFERFEIFPKTSSWPNHDSNKGVTAACPHAGAKSFYKNLIWLVKKGNSYPKLSKSYINDKGKEVLVLWGIHHPSTSADQQSLYQNADAYVFVGTSRYSKKFKPEIAIRPKVRDQEGRMNYYWTLVEPGDKITFEATGNLVVPRYAFAMERNAGSGIIISDTPVHDCNTTCQTPKGAINTSLSFQNIHPITIGKCPKYVKSTKLRLATGLRNVPSIQSRGLFGAIAGFIEGGWTGMVDGWYGYHHQNEQGSGYAADLKSTQNAIDEITNKVNSVIEKMNTQFTAVGKEFNHLEKRIENLNKKVDDGFLDIWTYNAELLVLLENERTLDYHDSNVKNLYEKVRSQLKNNAKEIGNGCFEFYHKCDNTCMESVKNGTYDYPKYSEEAKLNREEIDGVKLESTRIYQILAIYSTVASSLVLVVSLGAISFWMCSNGSLQCRICI

SEQ ID NO: 7385 - protein, 566 aa, synthetic construct; identical to SEQ ID NO: 2669
  REGION 1..566: note = hemagglutinin__InfluenzaA__AEO01291

SEQ ID NO: 7386 - protein, 566 aa, synthetic construct; identical to SEQ ID NO: 2669
  REGION 1..566: note = hemagglutinin__InfluenzaA__AEO01292

SEQ ID NO: 7387 - protein, 566 aa, synthetic construct
  REGION 1..566: note = hemagglutinin__InfluenzaA__AEO01294
MKAILVVLLYTFATANADTLCIGYHANNSTDTVDTVLEKNVTVTHSVNLLEDKHNGKLCKLRGVAPLHLGKCDIAGWILGNPECESLSTASSWSYIVETSSSDNGTCYPGDFIDYEELREQLSSVSSFERFEIFPKTSSWPNHDSNKGVTAACPHAGAKSFYKNLIWLVKKGNSYPKLSKSYINDKGKEVLVLWGIHHPSTSADQQSLYQNADAYVFVGTSRYSKKFKPEIAIRPKVRDQEGRMNYYWTLVEPGDKITFEATGNLVVPRYAFAMERNAGSGIIISDTPVHDCNTTCQTPKGAINTSLPFQNIHPITIGKCPKYVKSTKLRLATGLRNVPSIQSRGLFGAIAGFIEGGWTGMVDGWYGYHHQNEQGSGYAADLKSTQHAIDEITNKVNSVIEKMNTQFTAVGKEFNHLEKRIENLNKKVDDGFLDIWTYNAELLVLLENERTLDYHDSNVKNLYEKVRSQLKNNAKEIGNGCFEFYHKCDNTCMESVKNGTYDYPKYSEEAKLNREEIDGVKLESTRIYQILAIYSTVASSLVLVVSLGAISFWMCSNGSLQCRICI

SEQ ID NO: 7388 - protein, 566 aa, synthetic construct
  REGION 1..566: note = hemagglutinin__InfluenzaA__AEO01295
MKAILVVLLYTFATANADTLCIGYHANNSTDTVDTVLEKNVTVTHSVNLLEDKHNGKLCKLRGVAPLHLGKCNIAGWILGNPECESLSTASSWSYIVETSNSDNGTCYPGDFIDYEELREQLSSVSSFERFEIFPKTSSWPNHDSNKGVTAACPHAGAKSFYKNLIWLVKKGNSYPKLSKSYINDKGKEVLVLWGIHHPSTSADQQSLYQNADAYVFVGTSRYSKKFKPEIAIRPKVRDQEGRMNYYWTLVEPGDKITFEATGNLVVPRYAFAMERNAGSGIIISDTPVHYCNTTCQTPKGAINTSLPFQNIHPITIGKCPKYVKSTKLRLATGLRNVPSIQSRGLFGAIAGFIEGGWTGMVDGWYGYHHQNEQGSGYAADLKSTQNAIDKITNKVNSVIEKMNTQFTAVGKEFNHLEKRIENLNKKVDDGFLDIWTYNAELLVLLENERTLDYHDSNVKNLYEKVRSQLKNNAKEIGNGCFEFYHKCDNTCMESVKNGTYDYPKYSEEAKLNREEIDGVKLESTRIYQILAIYSTVASSLVLVVSLGAISFWMCSNGSLQCRICI

SEQ ID NO: 7389 - protein, 566 aa, synthetic construct; identical to SEQ ID NO: 2669
  REGION 1..566: note = hemagglutinin__InfluenzaA__AEO01296

SEQ ID NO: 7390 - protein, 566 aa, synthetic construct; identical to SEQ ID NO: 4351
  REGION 1..566: note = hemagglutinin__InfluenzaA__AEO01297

SEQ ID NO: 7391 - protein, 566 aa, synthetic construct; identical to SEQ ID NO: 4356
  REGION 1..566: note = hemagglutinin__InfluenzaA__AEO01298

SEQ ID NO: 7392 - protein, 566 aa, synthetic construct; identical to SEQ ID NO: 2669
  REGION 1..566: note = hemagglutinin__InfluenzaA__AEO01299

SEQ ID NO: 7393 - protein, 566 aa, synthetic construct; identical to SEQ ID NO: 2669
  REGION 1..566: note = hemagglutinin__InfluenzaA__AEO01300

SEQ ID NO: 7394 - protein, 566 aa, synthetic construct; identical to SEQ ID NO: 2669
  REGION 1..566: note = hemagglutinin__InfluenzaA__AEO01301

SEQ ID NO: 7395 - protein, 566 aa, synthetic construct; identical to SEQ ID NO: 2669
  REGION 1..566: note = hemagglutinin__InfluenzaA__AEO01302

SEQ ID NO: 7396 - protein, 566 aa, synthetic construct; identical to SEQ ID NO: 4266
  REGION 1..566: note = hemagglutinin__InfluenzaA__AEO01303

SEQ ID NO: 7397 - protein, 566 aa, synthetic construct
  REGION 1..566: note = hemagglutinin__InfluenzaA__AEO01304
MKAILVVLLYTFATANADTLCIGYHANNSTDTVDTVLEKNVTVTHSVNLLEDKHNGKLCKLRGVAPLHLGKCNIAGWILGNPECESLSTASSWSYIVETSSSDNGTCYPGDFIDYEELREQLSSVSSFERFEIFPKASSWPNHDSNKGVTAACPHAGAKSFYKNLIWLVKKGNSYPKLSKSYINDKGKGVLVLWGIHHPSTSADQQSLYQNADAYVFVGTSRYSKKFKPEIAIRPKVRDQEGRMNYYWTLVEPGDKITFEATGNLVVPRYAFAMERNAGSGIIISDTPVHDCNTTCQTPKGAINTSLPFQNIHPITIGKCPKYVKSTKLRLATGLRNVPSIQSRGLFGAIAGFIEGGWTGMVDGWYGYHHQNEQGSGYAADLKSTQNAIDEITNKVNSVIEKMNTQFTAVGKEFNHLEKRIENLNKKVDDGFLDIWTYNAELLVLLENERTLDYHDSNVKNLYEKVRSQLKNNAKEIGNGCFEFYHKCDNTCMESVKNGTYDYPKYSEEAKLNREEIDGVKLESTRIYQILAIYSTVASSLVLVVSLGAISFWMCSNGSLQCRICI

SEQ ID NO: 7398 - protein, 566 aa, synthetic construct
  REGION 1..566: note = hemagglutinin__InfluenzaA__AEO01305
MKAILVVLLYTFATASADTLCIGYHANNSTDTVDTVLEKNVTVTHSVNLLEDKHNGKLCKLRGVAPLHLGKCNIAGWILGNPECESLSTASSWSYIVETSSSDNGTCYPGDFIDYEELREQLSSVSSFERFEIFPKTSSWPNHDSNKGVTAACPHAGAKSFYKNLIWLVKKGNSYPKLSKSYINDKGKEVLVLWGIHHPSTSADQQSLYQNADAYVFVGTSRYSKKFKPEIAIRPKVRDQEGRMNYYWTLVEPGDKITFEATGNLVVPRYAFAMERNAGSGIIISDTPVHDCNTTCQTPKGAINTSLPFQNIHPITIGKCPKYVKSTKLRLATGLRNVPSIQSRGLFGAIAGFIEGGWTGMVDGWYGYHHQNEQGSGYAADLKSTQNAIDEITNKVNSVIEKMNTQFTAVGKEFNHLEKRIENLNKKVDDGFLDIWTYNAELLVLLENERTLDYHDSNVKNLYEKVRSQLKNNAKEIGNGCFEFYHKCDNTCMESVKNGTYDYPKYSEEAKLNREEIDGVKLESTRIYQILAIYSTVASSLVLVVSLGAISFWMCSNGSLQCRICI

SEQ ID NO: 7399 - protein, 566 aa, synthetic construct; identical to SEQ ID NO: 2669
  REGION 1..566: note = hemagglutinin__InfluenzaA__AEO01306

SEQ ID NO: 7400 - protein, 566 aa, synthetic construct; identical to SEQ ID NO: 2669
  REGION 1..566: note = hemagglutinin__InfluenzaA__AEO01307

SEQ ID NO: 7401 - protein, 566 aa, synthetic construct; identical to SEQ ID NO: 2669
  REGION 1..566: note = hemagglutinin__InfluenzaA__AEO01308

SEQ ID NO: 7402 - protein, 566 aa, synthetic construct
  REGION 1..566: note = hemagglutinin__InfluenzaA__AEO01309
MKAILVVLLYTFAIANADTLCIGYHANNSTDTVDTVLEKNVTVTHSVNLLEDKHNGKLCKLRGVAPLHLGKCNIAGWILGNPECESLSTASSWSYIVETSSSDNGTCYPGDFIDYEELREQLSSVSSFERFEIFPKTSSWPNHDSNKGVTAACPHAGAKSFYKNLIWLVKKGNSYPKLSKSYINDKGKEVLVLWGIHHPSTSADQQSLYQNADAYVFVGTSRYSKKFKPEIAIRPKVRDQEGRMNYYWTLVEPGDKITFEATGNLVVPRYAFAMERNAGSGIIISDTPVHDCNTTCQTPKGAINTSLPFQNIHPITIGKCPKYVKSTKLRLATGLRNVPSIQSRGLFGAIAGFIEGGWTGMVDGWYGYHHQNEQGSGYAADLKSTQHAIDEITNKVNSVIEKMNTQFTAVGKEFNHLEKRIENLNKKVDDGFLDIWTYNAELLVLLENERTLDYHDSNVKNLYEKVRSQLKNNAKEIGNGCFEFYHKCDNTCMESVKNGTYDYPKYSKEAKLNREEINGVKLESTRIYQILAIYSTVASSLVLVVSLGAISFWMCSNGSLQCRICI

SEQ ID NO: 7403 - protein, 566 aa, synthetic construct
  REGION 1..566: note = hemagglutinin__InfluenzaA__AEO01310
MKAILVVLLYTFATANADTLCIGYHANNSTDTVDTVLEKNVTVTHSVNLLEDKHNGKLCKLRGVAPLHLGKCNIAGWILGNPECESLSTASSWSYIVETSSSDNGTCYPGDFIDYEELREQLSSVSSFERFEIFPKTSSWPNHDSNKGVTAACPHAGAKSFYKNLIWLVKKGNSYPKLSKSYINDRGKEVLVLWGIHHPSTSADQQSLYQNADAYVFVGTSRYSKKFKPEIAIRPKVRDQEGRMNYYWTLVEPGDKITFEATGNLVVPRYAFAMERNAGSGIIISDTPVHDCNTTCQTPKGAINTSLPFQNIHPITIGKCPKYVKSTKLRLATGLRNVPSIQSRGLFGAIAGFIEGGWTGMVDGWYGYHHQNEQGSGYAADLKSTQNAIDEITNKVNSVIEKMNTQFTAVGKEFNHLEKRIENLNKKVDDGFLDIWTYNAELLVLLENERTLDYHDSNVKNLYEKVRSQLKNNAKEIGNGCFEFYHKCDNTCMESVKNGTYDYPKYSEEAKLNREEIDGVKLESTRIYQILAIYSTVASSLVLVVSLGAISFWMCSNGSLQCRICI

SEQ ID NO: 7404 - protein, 566 aa, synthetic construct; identical to SEQ ID NO: 2669
  REGION 1..566: note = hemagglutinin__InfluenzaA__AEO01311

SEQ ID NO: 7405 - protein, 566 aa, synthetic construct
  REGION 1..566: note = hemagglutinin__InfluenzaA__AEO01312
MKAILVVLLYTFATANADTLCIGYHANNSTDTVDTVLEKNVTVTHSVNLLEDKHNGKLCKLRGVAPLHLGKCNIAGWILGNPECESLSTASSWSYIVETSSSDNGTCYPGDFIDYEELREQLSSVSSFERFEIFPKTSSWPNHDSNKGVTAACPHAGAKSFYKNLIWLVKKGNSYPKLSKSYINDKGKEVLVLWGIHHPSTSADQQSLYQNADAYVFVGTSRYSKKFKPEIAIRPKVRDQEGRMNYYWTLVEPGDKITFEATGNLVVPRYAFAMERNAGSGIIISDTPVHDCNTTCQTPKGAINTSLPFQNIHPITIGKCPKYVKSTKLRLATGLRNVPSIQSRGLFGAIAGFIEGGWTGIVDGWYGYHHQNEQGSGYAADLKSTQNAIDEITNKVNSVIEKMNTQFTAVGKEFNHLEKRIENLNKKVDDGFLDIWTYNAELLVLLENERTLDYHDSNVKNLYEKVRSQLKNNAKEIGNGCFEFYHKCDNTCMESVKNGTYDYPKYSEEAKLNREEIDGVKLESTRIYQILAIYSTVASSLVLVVSLGAISFWMCSNGSLQCRICI

SEQ ID NO: 7406 - protein, 566 aa, synthetic construct; identical to SEQ ID NO: 3022
  REGION 1..566: note = hemagglutinin__InfluenzaA__AEO01313

SEQ ID NO: 7407 - protein, 566 aa, synthetic construct; identical to SEQ ID NO: 3833
  REGION 1..566: note = hemagglutinin__InfluenzaA__AEO01314

SEQ ID NO: 7408 - protein, 566 aa, synthetic construct
  REGION 1..566: note = hemagglutinin__InfluenzaA__AEO01315
MKAILVVLLYTFATANADTLCIGYHANNSTDTVDTVLEKNVTVTHSVNLLEDKHNRKLCKLRGVAPLHLGKCNIAGWILGNPECESLSTASSWSYIVETSSSDNGTCYPGDFIDYEELREQLSSVSSFERFEIFPKTSSWPNHDSNKGVTAACPHAGAKSFYKNLIWLVKKGNSYPKLSKSYINDKGKEVLVLWGIHHPSTSADQQSLYQNADAYVFVGTSRYSKKFKPEIAIRPKVRDQEGRMNYYWTLVEPGDKITFEATGNLVVPRYAFAMERNAGSGIIISDTPVHDCNTTCQTPKGAINTSLPFQNIHPITIGKCPKYVKSTKLRLATGLRNVPSIQSRGLFGAIAGFIEGGWTGMVDGWYGYHHQNEQGSGYAADLKSTQNAIDEITNKVNSVIEKMNTQFTAVGKEFNHLEKRIENLNKKVDDGFLDIWTYNAELLVLLENERTLDYHDSNVKNLYEKVRSQLKNNAKEIGNGCFEFYHKCDNTCMESVKNGTYDYPKYSEEAKLNREEIDGVKLESTRIYQILAIYSTVASSLVLVVSLGAISFWMCSNGSLQCRICI

SEQ ID NO: 7409 - protein, 566 aa, synthetic construct; identical to SEQ ID NO: 2669
  REGION 1..566: note = hemagglutinin__InfluenzaA__AEO01316

SEQ ID NO: 7410 - protein, 566 aa, synthetic construct; identical to SEQ ID NO: 2669
  REGION 1..566: note = hemagglutinin__InfluenzaA__AEO01317

SEQ ID NO: 7411 - protein, 566 aa, synthetic construct; identical to SEQ ID NO: 2669
  REGION 1..566: note = hemagglutinin__InfluenzaA__AEO01318

SEQ ID NO: 7412 - protein, 566 aa, synthetic construct; identical to SEQ ID NO: 2669
  REGION 1..566: note = hemagglutinin__InfluenzaA__AEO01319

SEQ ID NO: 7413 - protein, 566 aa, synthetic construct
  REGION 1..566: note = hemagglutinin__InfluenzaA__AEO01321
MKAILVVLLYTFATANADTLCIGYHANNSTDTVDTVLEKNVTVTHSVNILEDKHNGKLCKLRGVAPLHLGKCNIAGWILGNPECESLSTASSWSYIVETSSSDNGTCYPGDFIDYEELREQLSSVSSFERFEIFPKTSSWPNHDSNKGVTAACPHAGAKSFYKNLIWLVKKGNSYPKLSKSYINDKGKEVLVLWGIHHPSTSADQQSLYQNADAYVFVGTSRYSKKFKPEIAIRPKVRDQEGRMNYYWTLVEPGDKITFEATGNLVVPRYAFAMERNAGSGIIISDTPVHDCNTTCQTPKGAINTSLPFQNIHPITIGKCPKYVKSTKLRLATGLRNVPSIQSRGLFGAIAGFIEGGWTGMVDGWYGYHHQNEQGSGYAADLKSTQNAIDEITNKVNSVIEKMNTQFTAVGKEFNHLEKRIENLNKKVDDGFLDIWTYNAELLALLENERTLDYHDSNVKNLYEKVRSQLKNNAKEIGNGCFEFYHKCDNTCMESVKNGTYDYPKYSEEAKLNREEIDGVKLESTRIYQILAIYSTVASSLVLVVSLGAISFWMCSNGSLQCRICI

SEQ ID NO: 7414 - protein, 566 aa, synthetic construct; identical to SEQ ID NO: 2669
  REGION 1..566: note = hemagglutinin__InfluenzaA__AEO01322

SEQ ID NO: 7415 - protein, 566 aa, synthetic construct; identical to SEQ ID NO: 4351
  REGION 1..566: note = hemagglutinin__InfluenzaA__AEO01323

SEQ ID NO: 7416 - protein, 566 aa, synthetic construct; identical to SEQ ID NO: 4266
  REGION 1..566: note = hemagglutinin__InfluenzaA__AEO01324

SEQ ID NO: 7417 - protein, 566 aa, synthetic construct; identical to SEQ ID NO: 2669
  REGION 1..566: note = hemagglutinin__InfluenzaA__AEO01325

SEQ ID NO: 7418 - protein, 566 aa, synthetic construct
  REGION 1..566: note = hemagglutinin__InfluenzaA__AEO01326
MKAILVVLLYTFATANADTLCIGYHANNSTDTVDTVLEKNVTVTHSVNLLEDKHNGKLCKLRGVAPLHLGKCNIAGWILGNPECESLSTASSWSYIVETSSSDNGTCYPGDFIDYEELREQLSSVSSFERFEIFPKTSSWPNHDSNKGVTAACPHAGAKSFYKNLIWLVKKGNSYPKLSKSYINDKGKEVLVLWGIHHPSTSADQQSLYQDADAYVFVGTSRYSKKFKPEIAIRPKVRDQEGRMNYYWTLVEPGDKITFEATGNLVVPRYAFAMERNAGSGIIISDTPVHDCNTTCQTPKGAINTSLPFQNIHPITIGKCPKYVKSTKLRLATGLRNVPSIQSRGLFGAIAGFIEGGWTGMVDGWYGYHHQNEQGSGYAADLKSTQNAIDEITNKVNSVIEKMNTQFTAVGKEFNHLEKRIENLNKKVDDGFLDIWTYNAELLVLLENERTLDYHDSNVKNLYEKVRSQLKNNAKEIGNGCFEFYHKCDNTCMESVKNGTYDYPKYSEEAKLNREEIDGVKLESTRIYQILAIYSTVASSLVLVVSLGAISFWMCSNGSLQCRICI

SEQ ID NO: 7419 - protein, 566 aa, synthetic construct; identical to SEQ ID NO: 2669
  REGION 1..566: note = hemagglutinin__InfluenzaA__AEO01327

SEQ ID NO: 7420 - protein, 566 aa, synthetic construct; identical to SEQ ID NO: 7378
  REGION 1..566: note = hemagglutinin__InfluenzaA__AEO01328

SEQ ID NO: 7421 - protein, 566 aa, synthetic construct; identical to SEQ ID NO: 2669
  REGION 1..566: note = hemagglutinin__InfluenzaA__AEO01330

SEQ ID NO: 7422 - protein, 566 aa, synthetic construct
  REGION 1..566: note = hemagglutinin__InfluenzaA__AEO01331
MKAILVVLLYTFATANADTLCIGYHANNSTDTVDTLLEKNVTVTHSVNLLEDKHNGKLCKLRGVAPLHLGKCNIAGWILGNPECESLSTASSWSYIVETSSSDNGTCYPGDFIDYEELREQLSSVSSFERFEIFPKTSSWPNHDSNKGVTAACPHAGAKSFYKNLIWLVKKGNSYPKLSKSYINDKGKEVLVLWGIHHPSTSADQQSLYQNADAYVFVGTSRYSKKFKPEIAIRPKVRDQEGRMNYYWTLVEPGDKITFEATGNLVVPRYAFAMERNAGSGIIISDTPVHDCNTTCQTPKGAINTSLPFQNIHPITIGKCPKYVKSTKLRLATGLRNVPSIQSRGLFGAIAGFIEGGWTGMVDGWYGYHHQNEQGSGYAADLKSTQNAIDEITNKVNSVIEKMNTQFTAVGKEFNHLEKRIENLNKKVDDGFLDIWTYNAELLVLLENERTLDYHDSNVKNLYEKVRSQLKNNAKEIGNGCFEFYHKCDNTCMESVKNGTYDYPKYSEEAKLNREEIDGVKLESTRIYQILAIYSTVASSLVLVVSLGAISFWMCSNGSLQCRICI

SEQ ID NO: 7423 - protein, 566 aa, synthetic construct
  REGION 1..566: note = hemagglutinin__InfluenzaA__AEO01332
MKAILVVLLYTFATANADTLCIGYHANNSTDTVDTVLEKNVTVTHSVNLLEDKHNGKLCKLRGVAPLHLGKCNIAGWILGNPECESLSTASSWSYIVETSSSDNGTCYPGDFIDYEELREQLSSVSSFERFEIFPKTSSWPNHDSNKGVTAACPHAGAKSFYKNLIWLVKKGNSYPKLSKSYINDKGKEVLVLWGIHHPSTSADQQSLYQNADAYVFVGLSRYSKKFKPEIAIRPKVREQEGRMNYYWTLVEPGDKITFEATGNLVVPRYAFAMERNAGSGIVISDTPVHDCNTTCQTPKGAINTSLPFQNIHPITIGKCPKYVKSTKLRLATGLRNVPSIQSRGLFGAIAGFIEGGWTGMVDGWYGYHHQNEQGSGYAADLKSTQNAIDEITNKVNSVIEKMNTQFTAVGKEFNHLEKRMENLNKKVDDGFLDIWTYNAELLVLLENERTLDYHDSNVKNLYEKVRSQLKTNAKEIGNGCFEFYHKCDNTCMESVKNGTYDYPKYSEEAKLNREEIDGVKLESTRIYQILAIYSTVASSLVLVVSLGAISFWMCSNGSLQCRICI

SEQ ID NO: 7424 - protein, 566 aa, synthetic construct; identical to SEQ ID NO: 4837
  REGION 1..566: note = hemagglutinin__InfluenzaA__AEO01333

SEQ ID NO: 7425 - protein, 566 aa, synthetic construct
  REGION 1..566: note = hemagglutinin__InfluenzaA__AEO01334
MKAILVVLLYTFATANADTLCIGYHANNSTDTVDTILEKNVTVTHSVNLLEDKHNGKLCKLRGVAPLHLGKCNIAGWILGNPECESLSTASSWSYIVETSSSDNGTCYPGDFIDYEELREQLSSVSSFERFEIFPKTSSWPNHDSNKGVTAACPHAGAKSFYKNLIWLVKKGNSYPKLSKSYINDKGKEVLVLWGIHHPSTSADQQSLYQNADAYVFVGTSRYSKKFKPEIAIRPKVRDQEGRMNYYWTLVEPGDKITFEATGNLVVPRYAFAMERNAGSGIIISDTPVHDCNTTCQTPKGAINTSLPFQNIHPITIGKCPKYVKSTKLRLATGLRNVPSIQSRGLFGAIAGFIEGGWTGMVDGWYGYHHQNEQGSGYAADLKSTQNAIDEITNKVNSVIEKMNTQFTAVGKEFNHLEKRIENLNKKVDDGFLDIWTYNAELLVLLENERTLDYHDSNVKNLYEKVRSQLKNNAKEIGNGCFEFYHKCDNTCMESVKNGTYDYPKYSEEAKLNREEIDGVKLESTRIYQILAIYSTVASSLVLVVSLGAISFWMCSNGSLQCRICI

SEQ ID NO: 7426 - protein, 566 aa, synthetic construct; identical to SEQ ID NO: 4266
  REGION 1..566: note = hemagglutinin__InfluenzaA__AEO01335

SEQ ID NO: 7427 - protein, 566 aa, synthetic construct
  REGION 1..566: note = hemagglutinin__InfluenzaA__AEO01336
MKAILVVLLYTFATANADTLCIGYHANNSTDTVDTVLEKNVTVTHSVNLLEDKHNGKLCKLRGVAPLHLGKCNIAGWILGNPECESLSTASSWSYIVETSSSDNGTCYPGDFIDYEELREQLSSVSSFERFEIFPKTSSWPNHDSNKGVTAACPHAGAKSFYKNLIWLVKKGNSYPKLNKSYINDKGKEVLVLWGIHHPSTSADQQSLYQNADAYVFVGTSRYSKKFKPEIAIRPKVRDQEGRMNYYWTLVEPGDKITFEATGNLVVPRYAFAMERNAGSGIIISDTPVHDCNTTCQTPKGAINTSLPFQNIHPITIGECPKYVKSTKLRLATGLRNVPSIQSRGLFGAIAGFIEGGWTGMVDGWYGYHHQNEQGSGYAADLKSTQNAIDKITNKVNSVIEKMNTQFTAVGKEFNHLEKRIENLNKKVDDGFLDIWTYNAELLVLLENERTLDYHDSNVKNLYEKVRSQLKNNAKEIGNGCFEFYHKCDNTCMESVKNGTYDYPKYSEEAKLNREEIDGVKLESTRIYQILAIYSTVASSLVLVVSLGAISFWMCSNGSLQCRICI

SEQ ID NO: 7428 - protein, 566 aa, synthetic construct
  REGION 1..566: note = hemagglutinin__InfluenzaA__AEO01337
MKAILVVLLYTFATANADTLCIGYHANNSTDTVDTVLEKNVTVTHSVNLLEDKHNGKLCKLRGVAPLHLGKCNIAGWILGNPECESLSTASSWSYIVETSSSDNGTCYPGDFIDYEELREQLSSVSSFERFEIFPKTSSWPNHDSNKGVTAACPHAGAKSFYKNLIWLVKKGNSYPKLSKSYINDKGKEVLVLWGIHHPSTSADQQSLYQNADAYVFVGTSRYSKKFKPEIAIRPKVRDQEGRMNYHWTLVEPGDKITFEATGNLVVPRYAFAMERNAGSGIIISDTPVHDCNTTCQTPKGAINTSLPFQNIHPITIGKCPKYVKSTKLRLATGLRNVPSIQSRGLFGAIAGFIEGGWTGMVDGWYGYHHQNEQGSGYAADLKSTQHAIDEITNKVNSVIEKMNTQFTAVGKEFNHLEKRIENLNKKVDDGFLDIWTYNAELLVLLENERTLDYHDSNVKNLYEKVRSQLKNNAKEIGNGCFEFYHKCDNTCMESVKNGTYDYPKYSEEAKLNREEIDGVKLESTRIYQILAIYSTVASSLVLVVSLGAISFWMCSNGSLQCRICI

SEQ ID NO: 7429 - protein, 566 aa, synthetic construct; identical to SEQ ID NO: 2669
  REGION 1..566: note = hemagglutinin__InfluenzaA__AEO01338

SEQ ID NO: 7430 - protein, 566 aa, synthetic construct; identical to SEQ ID NO: 6541
  REGION 1..566: note = hemagglutinin__InfluenzaA__AEO01339

SEQ ID NO: 7431 - protein, 566 aa, synthetic construct; identical to SEQ ID NO: 7387
  REGION 1..566: note = hemagglutinin__InfluenzaA__AEO01340

SEQ ID NO: 7432 - protein, 566 aa, synthetic construct; identical to SEQ ID NO: 7387
  REGION 1..566: note = hemagglutinin__InfluenzaA__AEO01341

SEQ ID NO: 7433 - protein, 566 aa, synthetic construct; identical to SEQ ID NO: 2669
  REGION 1..566: note = hemagglutinin__InfluenzaA__AEO01342

SEQ ID NO: 7434 - protein, 566 aa, synthetic construct
  REGION 1..566: note = hemagglutinin__InfluenzaA__AEO01343
MKAILVVLLYTFATANADTLCIGYHANNSTDTVDTVLEKNVTVTHSVNLLEDKHNGKLCKLRGVAPLHLGKCNIAGWILGNPECESLSTASSWSYIVETSNSDNGTCYPGDFIDYEELREQLSSVSSFERFEIFPKTSSWPNHDSNKGVTAACPHAGAKSFYKNLIWLVKKGNSYPKLSKSYINDKGKEVLVLWGIHHPSTSADQQSLYQNADAYVFVGTSRYSKKFKPEIAIRPKVRDQEGRMNYYWTLVEPGDKITFEATGNLVVPRYAFAMERNAGSGIIISDTPVHDCNTTCQTPKGAINTSLPFQNIHPITIGKCPKYVKSTKLRLATGLRNVPSIQSRGLFGAIAGFIEGGWTGMVDGWYGYHHQNEQGSGYAADLKSTQNAIDKITNKVNSVIEKMNTQFTAVGKEFNHLEKRIENLNKKVDDGFLDIWTYNAELLVLLENERTLDYHDSNVKNLYEKVRSQLKNNAKEIGNGCFEFYHKCDNTCMESVKNGTYDYPKYSEEAKLNREEIDGVKLESTRIYQILAIYSTVASSLVLVVSLGAISFWMCSNGSLQCRICI

SEQ ID NO: 7435 - protein, 566 aa, synthetic construct
  REGION 1..566: note = hemagglutinin__InfluenzaA__AEO01344
MKAILVVLLYTFATANADTLCIGYHANNSTDTVDTVLEKNVTVTHSVNILEDKHNGKLCKLRGVAPLHLGKCNIAGWILGNPECESLSTASSWSYIVETSSSDNGTCYPGDFIDYEELREQLSSVSSFERFEIFPKTSSWPNHDSNKGVTAACPHAGAKSFYKNLIWLVKKGNSYPKLSKSYINDKGKEVLVLWGIHHPSTSADQQSLYQNADAYVFVGTSKYSKKFKPEIAIRPKVRDQEGRMNYYWTLVEPGDKITFEATGNLVVPRYAFAMERNAGSGIIISDTPVHDCNTTCQTPKGAINTSLPFQNIHPITIGKCPKYVKSTKLRLATGLRNVPSIQSRGLFGAIAGFIEGGWTGMVDGWYGYHHQNEQGSGYAADLKSTQNAIDEITNKVNSVIEKMNTQFTAVGKEFNHLEKRIENLNKKVDDGFLDIWTYNAELLVLLENERTLDYHDSNVKNLYEKVRSQLKNNAKEIGNGCFEFYHKCDNTCMESVKNGTYDYPKYSEEAKLNREEIDGVKLESTRIYQILAIYSTVASSLVLVVSLGAISFWMCSNGSLQCRICI

SEQ ID NO: 7436 - protein, 566 aa, synthetic construct; identical to SEQ ID NO: 6541
  REGION 1..566: note = hemagglutinin__InfluenzaA__AEO01345

SEQ ID NO: 7437 - protein, 566 aa, synthetic construct; identical to SEQ ID NO: 2669
  REGION 1..566: note = hemagglutinin__InfluenzaA__AEO01346

SEQ ID NO: 7438 - protein, 566 aa, synthetic construct
  REGION 1..566: note = hemagglutinin__InfluenzaA__AEO01347
MKAILVVLLYTFATANADTLCIGYHANNSTDTVDTVLEKNVTVTHSVNLLEDKHNGKLCKLRGVAPLHLGKCNIAGWILGNPECESLSTASSWSYIVETSSSDNGTCYPGDFIDYEELREQLSSVSSFERFEIFPKTSSWPNHDSNKGVTAACPHAGAKSFYKNLIWLVKKGNSYPKLSKSYINDKGKEVLVLWGIHHPSTSADQQSLYQNADAYVFVGTSRYSKKFKPEIAIRPKVRDQEGRMNYYWTLVEPGDKITFEATGNLVVPRYAFAMERNAGSGIIISDTPVHDCNTTCQTPKGAINTSLPFQNIHPITIGECPKYVKSTKLRLATGLRNVPSIQSRGLFGAIAGFIEGGWTGMVDGWYGYHHQNEQGSGYAADLKSTQNAIDKITNKVNSVIEKMNTQFTAVGKEFNHLEKRIENLNKKVDDGFLDIWTYNAELLVLLENERTLDYHDSNVKNLYEKVRSQLKNNAKEIGNGCFEFYHKCDNTCMESVKNGTYDYPKYSEEAKLNREEIDGVKLESTRIYQILAIYSTVASSLVLVVSLGAISFWMCSNGSLQCRICI

SEQ ID NO: 7439 - protein, 566 aa, synthetic construct
  REGION 1..566: note = hemagglutinin__InfluenzaA__AEO01348
MKAILVVLLYTFAIANADTLCIGYHANNSTDTVDTVLEKNVTVTHSVNLLEDKHNGKLCKLRGVAPLHLGKCNIAGWILGNPECESLSTASSWSYIVETSSSDNGTCYPGDFIDYEELREQLSSVSSFERFEIFPKTSSWPNHDSNKGVTAACPHAGAKSFYKNLIWLVKKGNSYPKLSKSYINDKGKEVLVLWGIHHPSTSADQQSLYQNADAYVFVGTSRYSKKFKPEIAIRPKVREQEGRMNYYWTLVEPGDKITFEATGNLVVPRYAFAMERNAGSGIIISDTPVHDCNTTCQTPKGAINTSLPFQNIHPITIGKCPKYVKSTKLRLATGLRNVPSIQSRGLFGAIAGFIEGGWTGMVDGWYGYHHQNEQGSGYAADLKSTQNAIDEITNKVNSVIEKMNTQFTAVGKEFNHLEKRIENLNKKVDDGFLDIWTYNAELLVLLENERTLDYHDSNVKNLYEKVRSQLKNNAKEIGNGCFEFYHKCDNTCMESVKNGTYDYPKYSEEAKLNREEIDGVKLESTRIYQILAIYSTVASSLVLVVSLGAISFWMCSNGSLQCRICI

SEQ ID NO: 7440 - protein, 566 aa, synthetic construct
  REGION 1..566: note = hemagglutinin__InfluenzaA__AEO01349
MKAILVVLLYTFATANADTLCIGYHANNSTDTVDTVLEKNVTVTHSVNLLEDKHNGKLCKLRGVAPLHLGKCNIAGWILGNPECESLSTASSWSYIVETSSSENGTCYPGDFIDYEELREQLSSVSSFERFEIFPKTSSWPNHDSNKGVTAACPHAGAKSFYKNLIWLVKKGNSYPKLSKSYINDKGKEVLVLWGIHHPSTSADQQSLYQNADAYVFVGTSRYSKKFKPEIAIRPKVRDQEGRMNYYWTLVEPGDKITFEATGNLVVPRYAFAMERNAGSGIIISDTPVHDCNTTCQTPKGAINTSLPFQNIHPITIGKCPKYVKSTKLRLATGLRNVPSIQSRGLFGAIAGFIEGGWTGMVDGWYGYHHQNEQGSGYAADLKSTQNAIDEITNKVNSVIEKMNTQFTAVGKEFNHLEKRIENLNKKVDDGFLDIWTYNAELLVLLENERTLDYHDSNVKNLYEKVRSQLKNNAKEIGNGCFEFYHKCDNTCMESVKNGTYDYPKYSKEAKLNREEIDGVKLESTRIYQILAIYSTVASSLVLVVSLGAISFWMCSNGSLQCRICI

SEQ ID NO: 7441 - protein, 566 aa, synthetic construct
  REGION 1..566: note = hemagglutinin__InfluenzaA__AEO01350
MKAILVVLLYTFATTNADTLCIGYHANNSTDTVDTVLEKNVTVTHSVNLLEDKHNGKLCKLRGVAPLHLGKCNIAGWILGNPECESLSTASSWSYIVETSSSDNGTCYPGDFIDYEELREQLSSVSSFERFEIFPKTSSWPNHDSNKGVTAACPHAGAKSFYKNLIWLVKKGNSYPKLSKSYINDKGKEVLVLWGIHHPSTSADQQSLYQNADAYVFVGTSRYSKKFKPEIAIRPKVRDQEGRMNYYWTLVEPGDKITFEATGNLVVPRYAFAMERNAGSGIIISDTPVHDCNTTCQTPKGAINTSLPFQNIHPITIGKCPKYVKSTKLRLATGLRNVPSIQSRGLFGAIAGFIEGGWTGMVDGWYGYHHQNEQGSGYAADLKSTQHAIDEITNKVNSVIEKMNTQFTAVGKEFNHLEKRIENLNKKVDDGFLDIWTYNAELLVLLENERTLDYHDSNVKNLYEKVRSQLKNNAKEIGNGCFEFYHKCDNTCMESVKNGTYDYPKYSEEAKLNREEIDGVKLESTRIYQILAIYSTVASSLVLVVSLGAISFWMCSNGSLQCRICI

SEQ ID NO: 7442 - protein, 566 aa, synthetic construct; identical to SEQ ID NO: 2669
  REGION 1..566: note = hemagglutinin__InfluenzaA__AEO01351

SEQ ID NO: 7443 - protein, 566 aa, synthetic construct; identical to SEQ ID NO: 3833
  REGION 1..566: note = hemagglutinin__InfluenzaA__AEO01352

SEQ ID NO: 7444 - protein, 566 aa, synthetic construct
  REGION 1..566: note = hemagglutinin__InfluenzaA__AEO01353
MKAILVVLLYTFATANADTLCIGYHANNSTDTVDTVLEKNVTVTHSVNLLEDKHNGKLCKLRGVAPLHLGKCNIAGWILGNPECESLSTASSWSYIVETSSSDNGTCYPGDFIDYEELREQLSSVSSFERFEIFPKTSSWPNHDSNKGVTAACPHAGAKSFYKNLIWLVKKGNSYPKLSKSYINDKGKEVLVLWGIHHPSTSADQQSLYQNADAYVFVGTSRYSKKFKPEIAIRPKVRDQEGRMNYYWTLVEPGDKITFEATGNLVVPRYAFAMERNAGSGIIISDTPVHDCNTTCQTPKGAINTSLPFQNIHPITIGKCPKYVKSTKLRLATGLRNVPSIQSRGLFGAIAGFIEGGWTGMVDGWYGYHHQNEQGSGYAADLKSTQNAIDEITNKVNSVIEKMNTQFTAVGKEFNHLEKRIENLNKKVDDGFLDIWTYNAELLVLLENERTLDYHDSNVKNLYEKVRSQLKNNAKEIGNGCFEFYHKCDNTCMESVKNGTYDYPKYSEEAKLNREEIDGVKLESTRIYQILAIYSTVASSLVLVVFLGAISFWMCSNGSLQCRICI

SEQ ID NO: 7445 - protein, 566 aa, synthetic construct
  REGION 1..566: note = hemagglutinin__InfluenzaA__AEO01354
MKAILVVLLYKFATANADTLCIGYHANNSTDTVDTVLEKNVTVTHSVNLLEDKHNGKLCKLRGVAPLHLGKCNIAGWILGNPECESLSTASSWSYIVETSSSDNGTCYPGDFIDYEELREQLSSVSSFERFEIFPKTSSWPNHDSNKGVTAACPHAGAKSFYKNLIWLVKKGNSYPKLSKSYINDKGKEVLVLWGIHHPSTSADQQSLYQNADAYVFVGTSRYSKKFKPEIAIRPKVRDQEGRMNYYWTLVEPGDKITFEATGNLVVPRYAFAMERNAGSGIIISDTPVHDCNTTCQTPKGAINTSLPFQNIHPITIGKCPKYVKSTKLRLATGLRNVPSIQSRGLFGAIAGFIEGGWTGMVDGWYGYHHQNEQGSGYAADLKSTQNAIDEITNKVNSVIEKMNTQFTAVGKEFNHLEKRIENLNKKVDDGFLDIWTYNAELLVLLENERTLDYHDSNVKNLYEKVRSQLKNNAKEIGNGCFEFYHKCDNTCMESVKNGTYDYPKYSEEAKLNREEIDGVKLESTRIYQILAIYSTVASSLVLVVSLGAISFWMCSNGSLQCRICI

SEQ ID NO: 7446 - protein, 566 aa, synthetic construct; identical to SEQ ID NO: 4089
  REGION 1..566: note = hemagglutinin__InfluenzaA__AEO01355

SEQ ID NO: 7447 - protein, 566 aa, synthetic construct; identical to SEQ ID NO: 2669
  REGION 1..566: note = hemagglutinin__InfluenzaA__AEO01356

SEQ ID NO: 7448 - protein, 566 aa, synthetic construct
  REGION 1..566: note = hemagglutinin__InfluenzaA__AEO01358
MKAILVVLLYTFATANADTLCVGYHANNSTDTVDTVLEKNVTVTHSVNLLEDKHNGKLCKLRGVAPLHLGKCNIAGWILGNPECESLSTASSWSYIVETSSSDNGTCYPGDFIDYEELREQLSSVSSFERFEIFPKTSSWPNHDSNKGVTAACPHAGAKSFYKNLIWLVKKGNSYPKLSKSYINDKGKEVLVLWGIHHPSTSADQQSLYQNADAYVFVGTSRYSKKFKPEIAIRPKVRDQEGRMNYYWTLVEPGDKITFEATGNLVVPRYAFAMERNAGSGIIISDTPAHDCNTTCQTPKGAINTSLPFQNIHPITIGKCPKYVKSTKLRLATGLRNVPSIQSRGLFGAIAGFIEGGWTGMVDGWYGYHHQNEQGSGYAADLKSTQNAIDEITNKVNSVIEKMNTQFTAVGKEFNHLEKRIENLNKKVDDGFLDIWTYNAELLVLLENERTLDYHDSNVKNLYEKVRSQLKNNAKEIGNGCFEFYHKCDNTCMESVKNGTYDYPKYSEEAKLNREEIDGVKLESTRIYQILAIYSTVASSLVLVVSLGAISFWMCSNGSLQCRICI

SEQ ID NO: 7449 - protein, 566 aa, synthetic construct; identical to SEQ ID NO: 4089
  REGION 1..566: note = hemagglutinin__InfluenzaA__AEO01359

SEQ ID NO: 7450 - protein, 566 aa, synthetic construct; identical to SEQ ID NO: 7422
  REGION 1..566: note = hemagglutinin__InfluenzaA__AEO01360

SEQ ID NO: 7451 - protein, 566 aa, synthetic construct; identical to SEQ ID NO: 3022
  REGION 1..566: note = hemagglutinin__InfluenzaA__AEO01361

SEQ ID NO: 7452 - protein, 566 aa, synthetic construct; identical to SEQ ID NO: 7422
  REGION 1..566: note = hemagglutinin__InfluenzaA__AEO01362

SEQ ID NO: 7453 - protein, 566 aa, synthetic construct; identical to SEQ ID NO: 3833
  REGION 1..566: note = hemagglutinin__InfluenzaA__AEO01363

SEQ ID NO: 7454 - protein, 566 aa, synthetic construct
  REGION 1..566: note = hemagglutinin__InfluenzaA__AEO01365
MKAILVVLLYTFATANADTLCIGYHANNSTDTVDTVLKKNVTVTHSVNILEDKHNGKLCKLRGVAPLHLGKCNIAGWILGNPECESLSTASSWSYIVETSSSDNGTCYPGDFIDYEELREQLSSVSSFERFEIFPKTSSWPNHDSNKGVTAACPHAGAKSFYKNLIWLVKKGNSYPKLSKSYINDKGKEVLVLWGIHHPSTSADQQSLYQNADAYVFVGTSRYSKKFKPEIAIRPKVRDQEGRMNYYWTLVEPGDKITFEATGNLVVPRYAFAMERSAGSGIIISDTPVHDCNTTCQTPKGAINTSLPFQNIHPITIGKCPKYVKSTKLRLATGLRNVPSIQSRGLFGAIAGFIEGGWTGMVDGWYGYHHQNEQGSGYAADLKSTQNAIDEITNKVNSVIEKMNTQFTAVGKEFNHLEKRIENLNKKVDDGFLDIWTYNAELLVLLENERTLDYHDSNVKNLYEKVRSQLKNNAKEIGNGCFEFYHKCDNTCMESVKNGTYDYPKYSEEAKLNREEIDGVKLESTRIYQILAIYSTVASSLVLVVSLGAISFWMCSNGSLQCRICI

SEQ ID NO: 7455 - protein, 566 aa, synthetic construct
  REGION 1..566: note = hemagglutinin__InfluenzaA__AEO01366
MKAILVVLLYTFATANADTLCIGYHANNSTDTVDTVLEKNVTVTHSVNLLEDKHNGKLCKLRGVAPLHLGKCNIAGWILGNPECESLSTASSWSYIVETSSSDNGTCYPGDFIDYEELREQLSSVSSFERFEIFPKTSSWPNHDSNKGVTAACPHAGAKSFYKNLIWLVKKGNSYPKLSKSYINDKGKEVLVLWGIHHPSTSADQQSLYQNADAYVFVGTSRYSKKFKPEIAIRPKVRDQEGRMNYYWTLVEPGDKITFEATGNLVVPRYAFAMERNAGSGIIISDTPVHDCSTTCQTPKGAINTSLPFQNVHPITIGKCPKYVKSTKLRLATGLRNVPSIQSRGLFGAIAGFIEGGWTGMVDGWYGYHHQNEQGSGYAADLKSTQNAIDEITNKVNSVIEKMNTQFTAVGKEFNHLEKRIENLNKKVDDGFLDIWTYNAELLVLLENERTLDYHDSNVKNLYEKVRSQLKNNAKEIGNGCFEFYHKCDNTCMESVKNGTYDYPKYSEEAKLNREEIDGVKLESTRIYQILAIYSTVASSLVLVVSLGAISFWMCSNGSLQCRICI

SEQ ID NO: 7456 - protein, 566 aa, synthetic construct; identical to SEQ ID NO: 7427
  REGION 1..566: note = hemagglutinin__InfluenzaA__AEO01367

SEQ ID NO: 7457 - protein, 566 aa, synthetic construct
  REGION 1..566: note = hemagglutinin__InfluenzaA__AEO01368
MKAILVVLLYTFATANADTLCIGYHANNSTDTVDTVLEKNVTVTHSVNLLEDKHNGKLCKLRGVAPLHLGKCNIAGWILGNPECESLSTASSWSYIVETSSSDNGTCYPGDFIDYEELREQLSSVSSFERFEIFPNTSSWPNHDSNKGVTAACPHAGAKSFYKNLIWLVKKGNSYPKLSKSYINDKGKEVLVLWGIHHPSTSADQQSLYQNADAYVFVGTSRYSKKFKPEIAIRPKVRDQEGRMNYYWTLVEPGDKITFEATGNLVVPRYAFAMERNAGSGIIISDTPVHDCNTTCQTPKGAINTSLPFQNIHPITIGKCPKYVKSTKLRLATGLRNVPSIQSRGLFGAIAGFIEGGWTGMVDGWYGYHHQNEQGSGYAADLKSTQNAIDKITNKVNSVIEKMNTQFTAVGKEFNHLEKRIENLNKKVDDGFLDIWTYNAELLVLLENERTLDYHDSNVKNLYEKVRSQLKNNAKEIGNGCFEFYHKCDNTCMESVKNGTYDYPKYSEEAKLNREEIDGVKLESTRIYQILAIYSTVASSLVLVVSLGAISFWMCSNGSLQCRICI

SEQ ID NO: 7458 - protein, 566 aa, synthetic construct; identical to SEQ ID NO: 2669
  REGION 1..566: note = hemagglutinin__InfluenzaA__AEO01369

SEQ ID NO: 7459 - protein, 566 aa, synthetic construct; identical to SEQ ID NO: 7387
  REGION 1..566: note = hemagglutinin__InfluenzaA__AEO01370

SEQ ID NO: 7460 - protein, 566 aa, synthetic construct; identical to SEQ ID NO: 7434
  REGION 1..566: note = hemagglutinin__InfluenzaA__AEO01371

SEQ ID NO: 7461 - protein, 566 aa, synthetic construct; identical to SEQ ID NO: 4266
  REGION 1..566: note = hemagglutinin__InfluenzaA__AEO01372

SEQ ID NO: 7462 - protein, 566 aa, synthetic construct; identical to SEQ ID NO: 4266
  REGION 1..566: note = hemagglutinin__InfluenzaA__AEO01373

SEQ ID NO: 7463 - protein, 566 aa, synthetic construct
  REGION 1..566: note = hemagglutinin__InfluenzaA__AEO01374
MKAILVVLLYTFATANADTLCIGYHANNSTDTVDTVLEKNVTVTHSVNLLEDKHNGKLCKLRGVAPLHLGKCDIAGWILGNPECESLSTASSWSYIVETSSSDNGTCYPGDFIDYEELREQLSSVSSFERFEIFPKTSSWPNHDSNKGVTAACPHAGAKSFYKNLIWLVKKGNSYPKLSKSYINDKGKEVLVLWGIHHPSTSADQQSLYQNADAYVFVGTSRYSKKFKPEIAIRPKVRDQEGRMNYYWTLVEPGDKITFEATGNLVVPRYAFAMERNAGSGIIISDTPVHDCNTTCQTPKGAINTSLPFQNIHPITIGKCPKYIKSTKLRLATGLRNVPSIQSRGLFGAIAGFIEGGWTGMVDGWYGYHHQNEQGSGYAADLKSTQHAIDEITNKVNSVIEKMNTQFTAVGKEFNHLEKRIENLNKKVDDGFLDIWTYNAELLVLLENERTLDYHDSNVKNLYEKVRSQLKNNAKEIGNGCFEFYHKCDNTCMESVKNGTYDYPKYSEEAKLNREEIDGVKLESTRIYQILAIYSTVASSLVLVVSLGAISFWMCSNGSLQCRICI

SEQ ID NO: 7464 - protein, 566 aa, synthetic construct; identical to SEQ ID NO: 7438
  REGION 1..566: note = hemagglutinin__InfluenzaA__AEO01375

SEQ ID NO: 7465 - protein, 566 aa, synthetic construct; identical to SEQ ID NO: 2669
  REGION 1..566: note = hemagglutinin__InfluenzaA__AEO01376

SEQ ID NO: 7466 - protein, 566 aa, synthetic construct; identical to SEQ ID NO: 4837
  REGION 1..566: note = hemagglutinin__InfluenzaA__AEO01377

SEQ ID NO: 7467 - protein, 566 aa, synthetic construct
  REGION 1..566: note = hemagglutinin__InfluenzaA__AEO01378
MKAILVVLLYTFATANADTLCIGYHANNSTDTVDTVLEKNVTVTHSVNLLEDKHNGKLCKLRGVAPLHLGKCNIAGWILGNPECESLSTASSWSYIVETPSSDNGTCYPGDFIDYEELREQLSSVSSFERFEIFPKTSSWPNHDSNKGVTAACPHAGAKSFYKNLIWLVKKGNSYPKLSKSYINDKGKEVLVLWGIHHPSTSADQQSLYQNADAYVFVGTSRYSKKFKPEIAIRPKVRDQEGRMNYYWTLVEPGDKITFEATGNLVVPRYAFAMERNAGSGIIISDTPVHDCNTTCQTPKGAINTSLPFQNIHPITIGKCPKYVKSTKLRLATGLRNVPSIQSRGLFGAIAGFIEGGWTGMVDGWYGYHHQNEQGSGYAADLKSTQNAIDEITNKVNSVIEKMNTQFTAVGKEFNHLEKRIENLNKKVDDGFLDIWTYNAELLVLLENERTLDYHDSNVKNLYEKVRSQLKNNAKEIGNGCFEFYHKCDNTCMESVKNGTYDYPKYSEEAKLNREEIDGVKLESTRIYQILAIYSTVASSLVLVVSLGAISFWMCSNGSLQCRICI

SEQ ID NO: 7468 - protein, 566 aa, synthetic construct; identical to SEQ ID NO: 3833
  REGION 1..566: note = hemagglutinin__InfluenzaA__AEO01379

SEQ ID NO: 7469 - protein, 566 aa, synthetic construct; identical to SEQ ID NO: 7438
  REGION 1..566: note = hemagglutinin__InfluenzaA__AEO01380

SEQ ID NO: 7470 - protein, 566 aa, synthetic construct; identical to SEQ ID NO: 7438
  REGION 1..566: note = hemagglutinin__InfluenzaA__AEO01381

SEQ ID NO: 7471 - protein, 566 aa, synthetic construct; identical to SEQ ID NO: 3833
  REGION 1..566: note = hemagglutinin__InfluenzaA__AEO01382

SEQ ID NO: 7472 - protein, 566 aa, synthetic construct; identical to SEQ ID NO: 4266
  REGION 1..566: note = hemagglutinin__InfluenzaA__AEO01383

SEQ ID NO: 7473 - protein, 566 aa, synthetic construct
  REGION 1..566: note = hemagglutinin__InfluenzaA__AEO01384
MKAILVVLLYTFATANADTLCIGYHANNSTDTVDTVLEKNVTVTHSVNLLEDKHNGKLCKLRGVSPLHLGKCNIAGWILGNPECESLSTASSWSYIVETSSSDNGTCYPGDFIDYEELREQLSSVSSFERFEIFPKTSSWPNHDSNKGVTAACPHAGAKSFYKNLIWLVKKGNSYPKLSKSYINDKGKEVLVLWGIHHPSTSADQQSLYQNADAYVFVGTSRYSKKFKPEIAIRPKVRDQEGRMNYYWTLVEPGDKITFEATGNLVVPRYAFAMERNAGSGIIISDTPVHDCNTTCQTPKGAINTSLPFQNIHPITIGKCPKYVKSTKLRLATGLRNVPSIQSRGLFGAIAGFIEGGWTGMVDGWYGYHHQNEQGSGYAADLKSTQNAIDEITNKVNSVIEKMNTQFTAVGKEFNHLEKRIENLNKKVDDGFLDIWTYNAELLVLLENERTLDYHDSNVKNLYEKVRSQLKNNAKEIGNGCFEFYHKCDNTCMESVKNGTYDYPKYSEEAKLNREEIDGVKLESTRIYQILAIYSTVASSLVLVVSLGAISFWMCSNGSLQCRICI

SEQ ID NO: 7474 - protein, 566 aa, synthetic construct
  REGION 1..566: note = hemagglutinin__InfluenzaA__AEO01385
MKAILVVLLYTFATANADTLCIGYHANNSTDTVDTVLEKNVTVTHSVNILEDKHNGKLCKLRGVAPLHLGKCNIAGWILGNPECESLSTASSWSYIVETSSSDNGTCYPGDFIDYEELREQLSSVSSFERFEIFPKTSSWPNHDSNKGVTAACPHAGAKSFYKNLIWLVKKGNSYPKLSKSYINDKGKEVLVLWGIHHPSTSADQQSLYQNANAYVFVGTSRYSKKFKPEIAIRPKVRDQEGRMNYYWTLVEPGDKITFEATGNLVVPRYAFAMERNAGSGIIISDTPVHDCNTTCQTPKGAINTSLPFQNIHPITIGKCPKYVKSTKLRLATGLRNVPSIQSRGLFGAIAGFIEGGWTGMVDGWYGYHHQNEQGSGYAADLKSTQNAIDEITNKVNSVIEKMNTQFTAVGKEFNHLEKRIENLNKKVDDGFLDIWTYNAELLVLLENERTLDYHDSNVKNLYEKVRSQLKNNAKEIGNGCFEFYHKCDNTCMESVKNGTYDYPKYSEEAKLNREEIDGVKLESTRIYQILAIYSTVASSLVLVVSLGAISFWMCSNGSLQCRICI

SEQ ID NO: 7475 - protein, 566 aa, synthetic construct; identical to SEQ ID NO: 7378
  REGION 1..566: note = hemagglutinin__InfluenzaA__AEO01386

SEQ ID NO: 7476 - protein, 566 aa, synthetic construct
  REGION 1..566: note = hemagglutinin__InfluenzaA__AEO01387
MKAILVVLLYTFATANADTLCIGYHANNSTDTVDTVLEKNVTVTHSVNILEDKHNGKLCKLRGVAPLHLGKCNIAGWILGNPECESLSTASSWSYIVETSSSDNGTCYPGDFIDYEELREQLSSVSSFERFEIFPKTSSWPNHDSNKGVTAACPHAGAKSFYKNLIWLVKKGNSYPKLSKSYINDKGKEVLVLWGIHHPSTSADQQSLYQNADAYVFVGTSRYSKKFKPEIAIRPKVRDQEGRMNYYWTLVEPGDKITFEATGNLVVPRYAFAMERNAGSGIIISDTPVHDCNTTCQTPKGAINTSLPFQNIHPITIGKCPKYVKSTKLRLATGLRNVPSIQSRGLFGAIAGFIEGGWTGMVDGWYGYHHQNEQGSGYAADLKSTQNAIDEITNKVNSVIEKMNIQFTAVGKEFNHLEKRIENLNKKVDDGFLDIWTYNAELLVLLENERTLDYHDSNVKNLYEKVRSQLKNNAKEIGNGCFEFYHKCDNTCMESVKNGTYDYPKYSEEAKLNREEIDGVKLESTRIYQILAIYSTVASSLVLVVSLGAISFWMCSNGSLQCRICI

SEQ ID NO: 7477 - protein, 566 aa, synthetic construct
  REGION 1..566: note = hemagglutinin__InfluenzaA__AEO01388
MKAILVVLLYTFATANADTLCIGYHANNSTDTVDTVLEKNVTVTHSVNLLEDKHNGKLCKLRGVAPLHLGKCNIAGWILGNPECESLSTASSWSYIVETSSSDNGTCYPGDFIDYEELREQLSSVSSFEKFEIFPKTSSWPNHDSNKGVTAACPHAGAKSFYKNLIWLVKKGNSYPKLSKSYINDKGKEVLVLWGIHHPSTSADQQSLYQNADAYVFVGTSRYSKKFKPEIAIRPKVRDQEGRMNYYWTLVEPGDKITFEATGNLVVPRYAFAMERNAGSGIIISDTPVHDCNTTCQTPKGAINTSLPFQNIHPITIGKCPKYVKSTKLRLATGLRNVPSIQSRGLFGAIAGFIEGGWTGMVDGWYGYHHQNEQGSGYAADLKSTQNAIDKITNKVNSVIEKMNTQFTAVGKEFNHLEKRIENLNKKVDDGFLDIWTYNAELLVLLENERTLDYHDSNVKNLYEKVRSQLKTNAKEIGNGCFEFYHKCDNTCMESVKNGTYDYPKYSEEAKLNREEIDGVKLESTRIYQILAIYSTVASSLVLVVSLGAISFWMCSNGSLQCRICI

SEQ ID NO: 7478 - protein, 566 aa, synthetic construct
  REGION 1..566: note = hemagglutinin__InfluenzaA__AEO01389
MKAILVVLLYTFATANADTLCIGYHANNSTDTVDTVLEKNVTVTHSVNLLEDKHNGKLCKLRGVAPLHLGKCNIAGWILGNPECESLSTASSWSYIVETSSSDNGTCYPGDFIDYEELREQLSSVSSFERFEIFPKTSSWPNHDSNKGVTAACPHAGTKSFYKNLIWLVKKGNSYPKLSKSYINDKGKEVLVLWGIHHPSTSADQQSLYQNADAYVFVGTSRYSKKFKPEIAIRPKVRDQEGRMNYYWTLVEPGDKITFEATGNLVVPRYAFAMERNAGSGIIISDTPVHDCNTTCQTPKGAINTSLPFQNIHPITIGKCPKYVKSTKLRLATGLRNVPSIQSRGLFGAIAGFIEGGWTGMVDGWYGYHHQNEQGSGYAADLKSTQNAIDKITNKVNSVIEKMNTQFTAVGKEFNHLEKRIENLNKKVDDGFLDIWTYNAELLVLLENERTLDYHDSNVKNLYEKVRSQLKNNAKEIGNGCFEFYHKCDNTCMESVKNGTYDYPKYSEEAKLNREEIDGVKLESTRIYQILAIYSTVASSLVLVVSLGAISFWMCSNGSLQCRICI

SEQ ID NO: 7479 - protein, 566 aa, synthetic construct
  REGION 1..566: note = hemagglutinin__InfluenzaA__AEO01390
MKAILVVLLYTFAIANADTLCIGYHANNSTDTVDTVLEKNVTVTHSVNLLEDKHNGKLCKLRGVAPLHLGKCNIAGWILGNPECESLSTASSWSYIVETSSSDNGTCYPGDFIDYEELREQLSSVSSFERFEIFPKTSSWPNHDSNKGVTAACPHAGAKSFYKNLIWLVKKGNSYPKLSKSYINDKGKEVLVLWGIHHPSTSADQQSLYQNADAYVFVETSRYSKKVKPEIAIRPRVRDQEGRMNYYWTLVEPGDKITFEATGNLVVPRYAFAMERNAGSGIIISDTPVHDCNTTCQTPKGAINTSLPFQNIHPITIGKCPKYVKSTKLRLATGLRNVPSIQSRGLFGAIAGFIEGGWTGMVDGWYGYHHQNEQGSGYAADLKSTQHAIDEITNKVNSVIEKMNTQFTAVGKEFNHLEKRIENLNKKVDDGFLDIWTYNAELLVLLENERTLDYHDSNVKNLYEKVRSQLKNNAKEIGNGCFEFYHKCDNTCMESVKNGTYDYPKYSEVAKLNREEINGVKLESTRIYQILAIYSTVASSLVLVVSLGAISFWMCSNGSLQCRICI

SEQ ID NO: 7480 - protein, 566 aa, synthetic construct; identical to SEQ ID NO: 7378
  REGION 1..566: note = hemagglutinin__InfluenzaA__AEO01391

SEQ ID NO: 7481 - protein, 566 aa, synthetic construct; identical to SEQ ID NO: 7387
  REGION 1..566: note = hemagglutinin__InfluenzaA__AEO01392

SEQ ID NO: 7482 - protein, 566 aa, synthetic construct; identical to SEQ ID NO: 4266
  REGION 1..566: note = hemagglutinin__InfluenzaA__AEO01393

SEQ ID NO: 7483 - protein, 566 aa, synthetic construct; identical to SEQ ID NO: 3770
  REGION 1..566: note = hemagglutinin__InfluenzaA__AEO01394

SEQ ID NO: 7484 - protein, 566 aa, synthetic construct
  REGION 1..566: note = hemagglutinin__InfluenzaA__AEO01395
MKAILVVLLYTFATANADTLCIGYHANNSTDTVDTVLEKNVTVTHSVNLLEDKHNGKLCKLRGVAPLHLGKCNIAGWILGNPECESLSTASSWSYIVETSSSDNGTCYPGDFLDYEELREQLSSVSSFERFEIFPKTSSWPNHDSNKGVTAACPHAGAKSFYKNLIWLVKKGNSYPKLSKSYINDKGKEVLVLWGIHHPSTSADQQSLYQNADAYVFVGTSRYSKKFKPEIAIRPKVREQEGRMNYYWTLVEPGDKITFEATGNLVVPRYAFAMERNAGSGIIISDTPVHDCNTTCQTPKGAINTSLPFQNIHPITIGKCPKYVKSTKLRLATGLRNVPSIQSRGLFGAIAGFIEGGWTGMVDGWYGYHHQNEQGSGYAADLKSTQNAIDEITNKVNSVIEKMNTQFTAVGKEFNHLEKRIENLNKKVDDGFLDIWTYNAELLVLLENERTLDYHDSNVKNLYEKVRSQLKNNAKEIGNGCFEFYHKCDNTCMESVKNGTYDYPKYSEEAKLNREEIDGVKLESTRIYQILAIYSTVASSLVLVVSLGAISFWMCSNGSLQCRICI

SEQ ID NO: 7485 - protein, 566 aa, synthetic construct; identical to SEQ ID NO: 3770
  REGION 1..566: note = hemagglutinin__InfluenzaA__AEO01396

SEQ ID NO: 7486 - protein, 566 aa, synthetic construct
  REGION 1..566: note = hemagglutinin__InfluenzaA__AEO01397
MKAILVVLLYTFATANADTLCIGYHANNSTDTVDTVLEKNVTVTHSVNILEDKHNGKLCKLRGVAPLHLGKCNIAGWILGNPECESLSTASSWSYIVETSSSDNGTCYPGDFIDYEELREQLSSVSSFERFEIFPKTSSWPNHDSNKGVTAACPHAGAKSFYKNLIWLVKKGNSYPKLSKSYINDKGKEVLVLWGIHHPSTSADQQSLYQNTDAYVFVGTSRYSKKFKPEIAIRPKVRDQEGRMNYYWTLVEPGDKITFEATGNLVVPRYAFAMERNAGSGIIISDTPVHDCNTTCQTPKGAINTSLPFQNIHPITIGKCPKYVKSTKLRLATGLRNVPSIQSRGLFGAIAGFIEGGWTGMVDGWYGYHHQNEQGSGYAADLKSTQNAIDEITNKVNSVIEKMNTQFTAVGKEFNHLEKRIENLNKKVDDGFLDIWTYNAELLVLLENERTLDYHDSNVKNLYEKVRSQLKNNAKEIGNGCFEFYHKCDNTCMESVKNGTYDYPKYSEEAKLNREEIDGVKLESTRIYQILAIYSTVASSLVLVVSLGAISFWMCSNGSLQCRICI

SEQ ID NO: 7487 - protein, 566 aa, synthetic construct
  REGION 1..566: note = hemagglutinin__InfluenzaA__AEO01398
MKAILVVLLYTFATANADTLCIGYHANNSTDTVDTVLEKNVTVTHSVNLLEDKHNGKLCKLRGVAPLHLGKCNIAGWILGNPECESLSTASSWSYIVETSSSDNGTCYPGDFIDYEELREQLSSVSSFERFEIFPKTSSWPNHDSNKGVTAACPHAGAKSFYKNLIWLVKKGNSYPKLSKSYINDKGKEVLVLWGIHHPSTSADQQSLYQNADANVFVGTSRYSKKFKPEIAIRPKVRGQEGRMNYYWTLVEPGDKITFEATGNLVVPRYAFAMERNAGSGIIISDTPVHDCNTTCQTPKGAINTSLPFQNIHPITIGKCPKYVKSTKLRLATGLRNVPSIQSRGLFGAIAGFIEGGWTGMVDGWYGYHHQNEQGSGYAADLKSTQNAIDEITNKVNSVIEKMNTQFTAVGKEFNHLEKRIENLNKKVDDGFLDIWTYNAELLVLLENERTLDYHDSNVKNLYEKVRNQLKNNAKEIGNGCFEFYHKCDNTCMESVKNGTYDYPKYSEEAKLNREEIDGVKLESTRIYQILAIYSTVASSLVLVVSLGAISFWMCSNGSLQCRICI

SEQ ID NO: 7488 - protein, 566 aa, synthetic construct; identical to SEQ ID NO: 7387
  REGION 1..566: note = hemagglutinin__InfluenzaA__AEO01399

SEQ ID NO: 7489 - protein, 566 aa, synthetic construct; identical to SEQ ID NO: 2669
  REGION 1..566: note = hemagglutinin__InfluenzaA__AEO01402

SEQ ID NO: 7490 - protein, 566 aa, synthetic construct; identical to SEQ ID NO: 3833
  REGION 1..566: note = hemagglutinin__InfluenzaA__AEO01403

SEQ ID NO: 7491 - protein, 566 aa, synthetic construct; identical to SEQ ID NO: 2669
  REGION 1..566: note = hemagglutinin__InfluenzaA__AEO01404

SEQ ID NO: 7492 - protein, 566 aa, synthetic construct
  REGION 1..566: note = hemagglutinin__InfluenzaA__AEO01405
MKAILVVLLYTFATANADTLCIGYHANNSTDTVDTVLEKNVTVTHSVNLLEDKHNGKLCKLRGVAPLHLGKCNIAGWILGNPECESLSTASSWSYIVETSSSDNGTCYPGDFIDYEELREQLSSVSSFERFEIFPKTSSWPNHDSNKGVTAACPHAGAKSFYKNLIWLVKKGNSYPKLSKSYINDKGKEVLVLWGIHHPSTSADQQSLYQNADAYVFVGTSRYSKKFKPEIAIRPKVRDQEGRMNYYWTLVEPGDKITFEATGNLVVPRYAFAMERNAGSGIIISDTPVHDCNTTCQTPKGAINTSLPFQNIHPITIGKCPKYVKSTKLRLATGLRNVPSIQSRGLFGAIAGFIEGGWTGMVDGWYGYHHQNEQGSGYAADLKSTQNAIDEITNKVNSVIEKMNTQFTAVGKEFNHLEKRIENLNKKVDDGFLDIWTYNAELLVLLENERTLDYHDSNVKNLYEKVRSQLKNNAKEIGNGCFEFYHKCDNTCMESVKNGTYDYPKYSEEAKLNREEIDGVKLESTMIYQILAIYSTVASSLVLVVSLGAISFWMCSNGSLQCRICI

SEQ ID NO: 7493 - protein, 566 aa, synthetic construct
  REGION 1..566: note = hemagglutinin__InfluenzaA__AEO01407
MKAILVVLLYTFATANADTLCIGYHANNSTDTVDTVLEKNVTVTHSVNLLEDKHNGKLCKLRGVAPLHLGKCNIAGWILGNPECESLSTASSWSYIVETSSSDNGTCYPGDFIDYEELREQLSSVSSFERFEIFPKTSSWPNHDSNKGVTAACPHAGAKSFYKNLIWLVKKGNSYPKLSKSYINDKGKEVLVLWGIHHPSTSADQQSLYQNADAYVFVGTSRYSKKFKPEIAIRPKVRDQEGRMNYYWTLVEPGDKITFEATGNLVVPRYAFAMERNAGSGIIISDTPVHDCNTTCQTPKGAINTSLPFQNIHPITIGKCPKYVKSTKLRLATGLRNVPSIQSRGLFGAIAGFIEGGWTGMVDGWYGYHHQNEQGSGYAADLKSTQHAIDEITNKVNSVIEKMNTQFTAVGKEFNHLEKRIENLNKKVDDGFLDIWTYNAELLVLLENERTLDYHDSNVKNLYEKVRSQLKNNAKEIGNGCFEFYHKCDNTCMESVKNGTYDYPKYSEEAKLNREEINGVKLESTRIYQILAIYSTVASSLVLVVSLGAISFWMCSNGSLQCRICI

SEQ ID NO: 7494 - protein, 566 aa, synthetic construct
  REGION 1..566: note = hemagglutinin__InfluenzaA__AEO01408
MKAILVVLLYTFATANADTLCIGYHANNSTDTVDTVLEKNVTVTHSVNLLEDKHNGKLCKLRGVAPLHLGKCNIAGWILGNPECESLSTASSWSYIVETSSSDNGTCYPGDFIDYEELREQLSSVSSFERFEIFPKTSSWPNHDSNKGVTAACPHAGAKSFYKNLIWLVKKGNSYPKLSKSYINDKGKEVLVLWGIHHPSTSADQQSLYQNADAYVFVGTSRYSKKFKPEIAIRPKVREQEGRMNYYWTLVEPGDKITFEATGNLVVPRYAFAMERNAGSGIIISDTPVHDCNTTCQTPKGAINTSLPFQNIHPITIGKCPKYVKSTKLRLATGLRNVPSIQSRGLFGAIAGFIEGGWTGMVDGWYGYHHQNEQGSGYAADLKSTQNAIDEITNKVNSVIEKMNTQFTAVGKEFNHLEKRIENLNKKIDDGFLDIWTYNAELLVLLENERTLDYHDSNVKNLYEKVRSQLKNNAKEIGNGCFEFYHKCDNTCMESVKNGTYDYPKYSEEAKLNREEIDGVKLESTRIYQILAIYSTVASSLVLVVSLGAISFWMCSNGSLQCRICI

SEQ ID NO: 7495 - protein, 566 aa, synthetic construct; identical to SEQ ID NO: 3771
  REGION 1..566: note = hemagglutinin__InfluenzaA__AEO01409

SEQ ID NO: 7496 - protein, 566 aa, synthetic construct; identical to SEQ ID NO: 7387
  REGION 1..566: note = hemagglutinin__InfluenzaA__AEO01410

SEQ ID NO: 7497 - protein, 566 aa, synthetic construct; identical to SEQ ID NO: 6088
  REGION 1..566: note = hemagglutinin__InfluenzaA__AEO01411

SEQ ID NO: 7498 - protein, 566 aa, synthetic construct; identical to SEQ ID NO: 3022
  REGION 1..566: note = hemagglutinin__InfluenzaA__AEO01412

SEQ ID NO: 7499 - protein, 566 aa, synthetic construct
  REGION 1..566: note = hemagglutinin__InfluenzaA__AEO01413
MKAILVVLLYTFATANADTLCIGYHANNSTDTVDTVLEKNVTVTHSVNLLEDKHNGKLCKLRGVAPLHLGKCNIAGWILGNPECESLSTASSWSYIVETSSSDNGTCYPGDFIDYEELREQLSSVSSFERFEIFPKTSSWPNHDSNKGVTAACPHAGAKSFYKNLIWLVKKGNSYPKLSKSYINDKGKEVLVLWGIHHPSTSADQQSLYQNADAYVFVGTSRYSKKFKPEIAIRPKVRDQEGRMNYYWTLVEPGDKITFEATGNLVVPRYAFAMERNAGSGIIISDTPVHDCNTTCQTPKGAINTSLPFQNIHPITIGKCPKYVKSTKLRLATGLRNVPSIQSRGLFGAIAGFIEGGWTGMVDGWYGYHHQNEQGSGYAADLKSTQNAIDKITNKVNSVIEKMNTQFTAVGKEFNHLEKRIENLNKKVDDGFLDIWTYNAELLVLLENERTLDYHDSNVKNLYEKVRSQLKSNAKEIGNGCFEFYHKCDNTCMESVKNGTYDYPKYSEEAKLNREEIDGVKLESTRIYQILAIYSTVASSLVLVVSLGAISFWMCSNGSLQCRICI

SEQ ID NO: 7500 - protein, 566 aa, synthetic construct
  REGION 1..566: note = hemagglutinin__InfluenzaA__AEO01414
MKAILVVLLYTFATANADTLCIGYHANNSTDTVDTVLEKNVTVTHSVNLLEDKHNGKLCKLRGVAPLHLGKCNIAGWILGNPECESLSTASSWSYIVETSSSDNGTCYPGDFIDYEELREQLSSVSSFERFEIFPKTSSWPNHDSNKGVTAACPHAGAKSFYKNLIWLVKKGNSYPKLSKSYINDKGKEVLVLWGIHHPSTSADQQSLYQNADAYVFVGTSRYSKKFKPEIAIRPKVRDQEGRMNYYWTLVEPGDKITFEATGNLVVPRYAFAMERNTGSGIIISDTPVHDCSTTCQTPKGAINTSLPFQNVHPITIGKCPKYVKSTKLRLATGLRNVPSIQSRGLFGAIAGFIEGGWTGMVDGWYGYHHQNEQGSGYAADLKSTQNAIDEITNKVNSVIEKMNTQFTAVGKEFNHLEKRIENLNKKVDDGFLDIWTYNAELLVLLENERTLDYHDSNVKNLYEKVRSQLKNNAKEIGNGCFEFYHKCDNTCMESVKNGTYDYPKYSEEAKLNREEIDGVKLESTRIYQILAIYSTVASSLVLVVSLGAISFWMCSNGSLQCRICI

SEQ ID NO: 7501 - protein, 566 aa, synthetic construct; identical to SEQ ID NO: 6300
  REGION 1..566: note = hemagglutinin__InfluenzaA__AEO01416

SEQ ID NO: 7502 - protein, 566 aa, synthetic construct; identical to SEQ ID NO: 3833
  REGION 1..566: note = hemagglutinin__InfluenzaA__AEO01418

SEQ ID NO: 7503 - protein, 566 aa, synthetic construct; identical to SEQ ID NO: 3833
  REGION 1..566: note = hemagglutinin__InfluenzaA__AEO01419

SEQ ID NO: 7504 - protein, 566 aa, synthetic construct
  REGION 1..566: note = hemagglutinin__InfluenzaA__AEO01420
MKAILVVLLYTFATANADTLCIGYHANNSTDTVDTVLEKNVTVTHSVNLLEYKHNGKLCKLRGVAPLHLGKCNIAGWILGNPECESLSTASSWSYIVETSNSDNGTCYPGDFIDYEELREQLSSVSSFERFEIFPKTSSWPNHDSNKGVTAACPHAGAKSFYKNLIWLVKKGNSYPKLSKSYINDKGKEVLVLWGIHHPSTSADQQSLYQNADAYVFVGTSRYSKKFKPEIAIRPKVRDQEGRMNYYWTLVEPGDKITFEATGNLVVPRYAFAMERNAGSGIIISDTPVHDCNTTCQTPKGAINTSLPFQNIHPITIGKCPKYVKSTKLRLATGLRNVPSIQSRGLFGAIAGFIEGGWTGMVDGWYGYHHQNEQGSGYAADLKSTQNAIDEITNKVNSVIEKMNTQFTAVGKEFNHLEKRIENLNKKVDDGFLDIWTYNAELLVLLENERTLDYHDSNVKNLYEKVRSQLKNNAKEIGNGCFEFYHKCDNTCMESVKNGTYDYPKYSEEAKLNREEIDGVKLESTRIYQILAIYSTVASSLVLVVSLGAISFWMCSNGSLQCRICI

SEQ ID NO: 7505 - protein, 566 aa, synthetic construct
  REGION 1..566: note = hemagglutinin__InfluenzaA__AEO01421
MKAILVVLLYTFATANADTLCIGYHANNSTDTVDTVLEKNVTVTHSVNLLEDKHNGKLCKLRGVAPLHLGKCNIAGWILGNPECESLSTASSWSYIVETSSSDNGTCYPGDFIDYEELREQLSSVSSFEKFEIFPKTSSWPNHDSNKGVTAACPHAGAKSFYKNLIWLVKKGNSYPKLSKSYINDKGKEVLVLWGIHHPSTSADQQSLYQNADAYVFVGTSRYSKKFKPEIAIRPKVRDQEGRMNYYWTLVEPGDKITFEATGNLVVPRYAFAMERNAGSGIIISDTPVHDCNTTCQTPKGAINTSLPFQNIHPITIGKCPKYVKSTKLRLATGLRNVPSIQSRGLFGAIAGFIEGGWTGMVDGWYGYHHQNEQGSGYAADLKSTQNAIDKITNKVNSVIEKMNTQFTAVGKEFNHLEKRIENLNKKVDDGFLDIWTYNAELLVLLENERTLDYHDSNVKNLYEKVRSQLKNNAKEIGNGCFEFYHKCDNTCMESVKNGTYDYPKYSEEAKLNREEIDGVKLESTRIYQILAIYSTVASSLVLVVSLGAISFWMCSNGSLQCRICI

SEQ ID NO: 7506 - protein, 566 aa, synthetic construct
  REGION 1..566: note = hemagglutinin__InfluenzaA__AEO01422
MKAILVVLLYTFAIANADTLCIGYHANNSTDTVDTVLEKNVTVTHSVNLLEDKHNGKLCKLRGVAPLHLGKCNIAGWILGNPECESLSTASSWSYIVETSSSDNGTCYPGDFIDYEELREQLSSVSSFERFEIFPKTSSWPNHDSNKGVTAACPHAGAKSFYKNLIWLVKKGNLYPKLSKSYINDKGKEVLVLWGIHHPSTSADQQSLYQNADAYVFVGTSRYSKKFKPEIAIRPKVRDQEGRMNYYWTLVEPGDKITFEATGNLVVPRYAFAMERNAGSGIIISDTPVHDCNTTCQTPKGAINTSLPFQNIHPITIGKCPKYVKSTKLRLATGLRNVPSIQSRGLFGAIAGFIEGGWTGMVDGWYGYHHQNEQGSGYAADLKSTQHAIDEITNKVNSVIEKMNTQFTAVGKEFNHLEKRIENLNKKVDDGFLDIWTYNAELLVLLENERTLDYHDSNVKNLYEKVRSQLKNNAKEIGNGCFEFYHKCDNTCMESVKNGTYDYPKYSEEAKLNREEINGVKLESTRIYQILAIYSTVASSLVLVVSLGAISFWMCSNGSLQCRICI

SEQ ID NO: 7507 - protein, 566 aa, synthetic construct
  REGION 1..566: note = hemagglutinin__InfluenzaA__AEO01423
MKAILIVLLYTFATANADTLCIGYHANNSTDTVDTVLEKNVTVTHSVNLLEDKHNGKLCKLRGVAPLHLGKCNIAGWILGNPECESLSTASSWSYIVETSSSDNGTCYPGDFIDYEELREQLSSVSSFERFEIFPKTSSWPNHDSNKGVTAACPHAGAKSFYKNLIWLVKKGNSYPKLSKSYINDKGKEVLVLWGIHHPSTSADQQSLYQNADAYVFVGTSRYSKKFKPEITIRPKVRDQEGRMNYYWTLVEPGDKITFEATGNLVVPRYAFAMERNAGSGIIISDTPVHDCNTTCQTPKGAINTSLPFQNIHPITIGKCPKYVKSTKLRLATGLRNVPSIQSRGLFGAIAGFIEGGWTGMVDGWYGYHHQNEQGSGYAADLKSTQNAIDEITNKVNSVIEKMNTQFTAVGKEFNHLEKRIENLNKKVDDGFLDIWTYNAELLVLLENERTLDYHDSNVKNLYEKVRSQLKNNAKEIGNGCFEFYHKCDNTCMESVKNGTYDYPKYSEEAKLNREEIDGVKLESTRIYQILAIYSTVASSLVLVVSLGAISFWMCSNGSLQCRICI

SEQ ID NO: 7508 - protein, 566 aa, synthetic construct; identical to SEQ ID NO: 7505
  REGION 1..566: note = hemagglutinin__InfluenzaA__AEO01424

SEQ ID NO: 7509 - protein, 566 aa, synthetic construct; identical to SEQ ID NO: 7505
  REGION 1..566: note = hemagglutinin__InfluenzaA__AEO01425

SEQ ID NO: 7510 - protein, 566 aa, synthetic construct; identical to SEQ ID NO: 2669
  REGION 1..566: note = hemagglutinin__InfluenzaA__AEO01426

SEQ ID NO: 7511 - protein, 566 aa, synthetic construct
  REGION 1..566: note = hemagglutinin__InfluenzaA__AEO01427
MKAILVVLLYTFATANSDTLCIGYHANNSTDTVDTVLEKNVTVTHSVNLLEDKHNGKLCKLRGVAPLHLGKCNIAGWILGNPECESLSTASSWSYIVETSSSDNGTCYPGDFIDYEELREQLSSVSSFERFEIFPKTSSWPNHDSNKGVTAACPHAGAKSFYKNLIWLVKKGNSYPKLSKSYINDKGKEVLVLWGIHHPSTSADQQSLYQNADAYVFVGTSRYSKKFKPEIAIRPKVRDQEGRMNYYWTLVEPGDKITFEATGNLVVPRYAFAMERNAGSGIIISDTPVHDCNTTCQTPKGAINTSLPFQNIHPITIGKCPKYVKSTKLRLATGLRNVPSIQSRGLFGAIAGFIEGGWTGMVDGWYGYHHQNEQGSGYAADLKSTQNAIDKITNKVNSVIEKMNTQFTAVGKEFNHLEKRIENLNKKVDDGFLDIWTYNAELLVLLENERTLDYHDSNVKNLYEKVRSQLKNNAKEIGNGCFEFYHKCDNTCMESVKNGTYDYPKYSEEAKLNREEIDGVKLESTRIYQILAIYSTVASSLVLVVSLGAISFWMCSNGSLQCRICI

SEQ ID NO: 7512 - protein, 566 aa, synthetic construct
  REGION 1..566: note = hemagglutinin__InfluenzaA__AEO01428
MKAILVVLLYTFATANADTLCIGYHANNSTDTVDTVLEKNVTVTHSVNLLEDKHNGKLCKLRGVAPLHLGKCNIAGWILGNPECESLSTASSWSYIVETSSSDNGTCYPGDFIDYEELREQLSSVSSFERFEIFPKTSSWPDHDSNKGVTAACPHAGAKSFYKNLIWLVKKGNSYPKLSKSYINDKGKEVLVLWGIHHPSTSADQQSLYQNADAYVFVGTSRYSKKFKPEIAIRPKVRDQEGRMNYYWTLVEPGDKITFEATGNLVVPRYAFAMERNAGSGIIISDTPVHDCNTTCQTPKGAINTSLPFQNIHPITIGKCPKYVKSTKLRMATGLRNVPSIQSRGLFGAIAGFIEGGWTGMVDGWYGYHHQNEQGSGYAADLKSTQNAIDEITNKVNSVIEKMNTQFTAVGKEFNHLEKRIENLNKKVDDGFLDIWTYNAELLVLLENERTLDYHDSNVKNLYEKVRSQLKNNAKEIGNGCFEFYHKCDNTCMESVKNGTYDYPKYSEEAKLNREEIDGVKLESTRIYQILAIYSTVASSLVLVVSLGAISFWMCSNGSLQCRICI

SEQ ID NO: 7513 - protein, 566 aa, synthetic construct; identical to SEQ ID NO: 3833
  REGION 1..566: note = hemagglutinin__InfluenzaA__AEO01429

SEQ ID NO: 7514 - protein, 566 aa, synthetic construct
  REGION 1..566: note = hemagglutinin__InfluenzaA__AEO01430
MKAILVVLLYTFATANADTLCIGYHANNSTDTVDTVLEKNVTVTHSVNLLEDKHNGKLCKLRGVAPLHLGKCNIAGWILGNPECESLSTASSWSYIVETSSSDNGTCYPGDFIDYEELREQLSSVSSFERFEIFPKTSSWPNHDSNKGVTAACPHDGAKSFYKNLIWLVKKGNSYPKLSKSYINDKGKEVLVLWGIHHPSTSADQQSLYQNADAYVFVGTSRYSKKFKPEIAIRPKVRDQEGRMNYYWTLVEPGDKITFEATGNLVVPRYAFAMERNAGSGIIISDTPVHDCNTTCQTPKGAINTSLPFQNIHPITIGKCPKYVKSTKLRLATGLRNVPSIQSRGLFGAIAGFIEGGWTGMVDGWYGYHHQNEQGSGYAADLKSTQNAIDEITNKVNSVIEKMNTQFTAVGKEFNHLEKRIENLNKKVDDGFLDIWTYNAELLVLLENERTLDYHDSNVKNLYEKVRSQLKNNAKEIGNGCFEFYHKCDNTCMESVKNGTYDYPKYSEEAKLNREEIDGVKLESTRIYQILAIYSTVASSLVLVVSLGAISFWMCSNGSLQCRICI

SEQ ID NO: 7515 - protein, 566 aa, synthetic construct; identical to SEQ ID NO: 7387
  REGION 1..566: note = hemagglutinin__InfluenzaA__AEO01431

SEQ ID NO: 7516 - protein, 566 aa, synthetic construct; identical to SEQ ID NO: 2669
  REGION 1..566: note = hemagglutinin__InfluenzaA__AEO01432

SEQ ID NO: 7517 - protein, 566 aa, synthetic construct
  REGION 1..566: note = hemagglutinin__InfluenzaA__AEO01434
MKAILVVLLYTFATANADTLCIGYHANNSTDTVDTVLEKNVTVTHSVNLLEDKHNGKLCKLRGVAPLHLGECNIAGWILGNPECESLSTASSWSYIVETSSSDNGTCYPGDFIDYEELREQLSSVSSFERFEIFPKTSSWPNHDSNKGVTAACPHAGAKSFYKNLIWLVKKGNSYPKLNKSYINDKGKEVLVLWGIHHPSTSADQQSLYQNADAYVFVGTSRYSKKFKPEIAIRPKVRDQEGRMNYYWTLVEPGDKITFEATGNLVVPRYAFAMERNAGSGIIISDTPVHDCNTTCQTPKGAINTSLPFQNIHPITIGECPKYVKSTKLRLATGLRNVPSIQSRGLFGAIAGFIEGGWTGMVDGWYGYHHQNEQGSGYAADLKSTQNAIDKITNKVNSVIEKMNTQFTAVGKEFNHLEKRIENLNKKVDDGFLDIWTYNAELLVLLENERTLDYHDSNVKNLYEKVRSQLKNNAKEIGNGCFEFYHKCDNTCMESVKNGTYDYPKYSEEAKLNREEIDGVKLESTRIYQILAIYSTVASSLVLVVSLGAISFWMCSNGSLQCRICI

SEQ ID NO: 7518 - protein, 566 aa, synthetic construct
  REGION 1..566: note = hemagglutinin__InfluenzaA__AEO01435
MKAILVVLLYTFATANADTLCIGYHANNSTDTVDTVLEKNVTVTHSVNLLEDKHNGKLCKLRGVAPLHLGKCNIAGWILGNPECESLSTASSWSYIVETSSSDNGTCYPGDFIDYEELREQLSSVSSFERFEIFPKTSSWPNHDSNKGVTAACPHAGAKSFYKNLIWLVKKGNSYPKLSKSYINDKGKEVLVLWGIHHPSTSADQQSLYQNADAYVFVGTSRYSKKFKPEIAIRPKVRDQEGRMNYYWTLVEPGDKITFEATGNLVVPRYAFAMERNAGSGIIISDTPVYDCNTTCQTPKGAINTSLPFQNIHPITIGKCPKYVKSTKLRLATGLRNVPSIQSRGLFGAIAGFIEGGWTGMVDGWYGYHHQNEQGSGYAADLKSTQNAIDKITNKVNSVIEKMNTQFTAVGKEFNHLEKRIENLNKKVDDGFLDIWTYNAELLVLLENERTLDYHDSNVKNLYEKVRNQLKNNAKEIGNGCFEFYHKCDNTCMESVKNGTYDYPKYSEEAKLNREEIDGVKLESTRIYQILAIYSTVASSLVLVVSLGAISFWMCSNGSLQCRICI

SEQ ID NO: 7519 - protein, 566 aa, synthetic construct; identical to SEQ ID NO: 7505
  REGION 1..566: note = hemagglutinin__InfluenzaA__AEO01436

SEQ ID NO: 7520 - protein, 566 aa, synthetic construct; identical to SEQ ID NO: 7387
  REGION 1..566: note = hemagglutinin__InfluenzaA__AEO01437

SEQ ID NO: 7521 - protein, 566 aa, synthetic construct; identical to SEQ ID NO: 7438
  REGION 1..566: note = hemagglutinin__InfluenzaA__AEO01438

SEQ ID NO: 7522 - protein, 566 aa, synthetic construct; identical to SEQ ID NO: 3022
  REGION 1..566: note = hemagglutinin__InfluenzaA__AEO01440

SEQ ID NO: 7523 - protein, 566 aa, synthetic construct
  REGION 1..566: note = hemagglutinin__InfluenzaA__AEO01441
MKAILVVLLYTFATANADTLCIGYHANNSTDTVDTVLEKNVTVTHSVNLLEDKHNGKLCKLRGVAPLHLGKCNIAGWILGNPECESLSTASSWSYIVETSSSDNGTCYPGDFIDYEELREQLSSVSSFERFEIFPKTSSWPNHDSNKGVTAACPHAGAKSFYKNLIWLVKKGNSYPKLSKSYINDKGKEVLVLWGIHHPSTSADQQSLYQNADAYVFVGTSRYSKKFKPEIAIRPKVRDQEGRMNYYWTLVEPGDKITFEATGNLVVPRYAFAMERNDGSGIIISDTPVHDCNTTCQTPKGAINTSLPFQNIHPITIGKCPKYVKSTKLRLATGLRNVPSIQSRGLFGAIAGFIEGGWTGMVDGWYGYHHQNEQGSGYAADLKSTQNAIDKITNKVNSVIEKMNTQFTAVGKEFNHLEKRIENLNKKVDDGFLDIWTYNAELLVLLENERTLDYHDSNVKNLYEKVRSQLKNNAKEIGNGCFEFYHKCDNTCMESVKNGTYDYPKYSEEAKLNREEIDGVKLESTRIYQILAIYSTVASSLVLVVSLGAISFWMCSNGSLQCRICI

SEQ ID NO: 7524 - protein, 566 aa, synthetic construct; identical to SEQ ID NO: 4089
  REGION 1..566: note = hemagglutinin__InfluenzaA__AEO01442

SEQ ID NO: 7525 - protein, 566 aa, synthetic construct
  REGION 1..566: note = hemagglutinin__InfluenzaA__AEO01443
MKAILVVLLYTFATANADTLCIGYHANNSTDTVDTVLEKNVTVTHSVNLLEDKHNGKLCKLRGVAPLHLGKCNIAGWILGNPECESLSTASSWSYIVETSSSDNGTCYPGDFIDYEELREQLSSVSSFERFEIFPKTSSWPNHDSNKGVTAACPHAGAKSFYKNLIWLVKKENSYPKLSKSYINDKGKEVLVLWGIHHPSTSADQQSLYQNADAYVFVGTSRYSKKFKPEIAIRPKVRDQEGRMNYYWTLVEPGDKITFEATGNLVVPRYAFAMERNAGSGIIISDTPVHDCNTTCQTPKGAINTSLPFQNIHPITIGKCPKYVKSTKLRLATGLRNVPSIQSRGLFGAIAGFIEGGWTGMVDGWYGYHHQNEQGSGYAADLKSTQNAIDKITNKVNSVIEKMNTQFTAVGKEFNHLEKRIENLNKKVDDGFLDIWTYNAELLVLLENERTLDYHDSNVKNLYEKVRSQLKNNAKEIGNGCFEFYHKCDNTCMESVKNGTYDYPKYSEEAKLNREEIDGVKLESTRIYQILAIYSTVASSLVLVVSLGAISFWMCSNGSLQCRICI

SEQ ID NO: 7526 - protein, 566 aa, synthetic construct
  REGION 1..566: note = hemagglutinin__InfluenzaA__AEO01444
MKAILVVLLYTFATANADTLCIGYHANNSTDTVDTVLEKNVTVTHSVNLLEDKHNGKLCKLRGVAPLHLGKCNIAGWILGNPECESLSTASSWSYIVETSNSDNGTCYPGDFIDYEELREQLSSVSSFERFEIFPKTSSWPNHDSDKGVTAACPHAGAKSFYKNLIWLVKKGNSYPKLSKSYINDKGKEVLVLWGIHHPSTSADQQSLYQNADAYVFVGTSRYSKKFKPEIAIRPKVRDQEGRMNYYWTLVEPGDKITFEATGNLVVPRYAFAMERNAGSGIIISDTPVHDCNTTCQTPKGAINTSLPFQNIHPITIGKCPKYVKSTKLRLATGLRNVPSIQSRGLFGAIAGFIEGGWTGMVDGWYGYHHQNEQGSGYAADLKSTQNAIDKITNKVNSVIEKMNTQFTAVGKEFNHLEKRIENLNKKVDDGFLDIWTYNAELLVLLENERTLDYHDSNVKNLYEKVRSQLKNNAKEIGNGCFEFYHKCDNTCMESVKNGTYDYPKYSEEAKLNREEIDGVKLESTRIYQILAIYSTVASSLVLVVSLGAISFWMCSNGSLQCRICI

SEQ ID NO: 7527 - protein, 566 aa, synthetic construct; identical to SEQ ID NO: 4837
  REGION 1..566: note = hemagglutinin__InfluenzaA__AEO01445

SEQ ID NO: 7528 - protein, 566 aa, synthetic construct; identical to SEQ ID NO: 7387
  REGION 1..566: note = hemagglutinin__InfluenzaA__AEO01446

SEQ ID NO: 7529 - protein, 566 aa, synthetic construct
  REGION 1..566: note = hemagglutinin__InfluenzaA__AEO01447
MKAILVVLLYTFATANADTLCIGYHANNSTDTVDTVLEKNVTVTHSVNLLEDKHNGKLCKLRGVAPLHLGKCNIAGWILGNPECESLSTASSWSYIVETSSSDNGTCYPGDFIDYEELREQLSSVSSFERFEIFPKTSSWPNHDSNKGVTAACPHAGAKSFYKNLIWLVKKGNSYPKLSKSYINDKGKEVLVLWGIHHPSTSADQQSLYQNADAYVFVGTSRYSKKFKPEIAIRPKVRDQEGRMNYYWTLVEPGDKITFEATGNLVVPRYAFAMERNAGSGIIISDTPVHDCNTTCQTPKGAINTSLPFQNIHPITIGKCPKYVKSTKLRLATGLRNVPSIQSRGLFGAIAGFIEGGWTGMVDGWYGYHHQNEQGSGYAADLKSTQNAIDEITNKVNSVIEKMNTQFTAVGKEFNHLEKRIENLNKKVDDGFLDIWTYNAELLVLLENERTLDYHDSNVKNLYEKVRSQLKNNAKEIGNGCFEFYHKCDNTCMESVKNGTYDYPKYSEEAKLNREEIDGVKLESTRIYQILAIYSTIASSLVLVVSLGAISFWMCSNGSLQCRICI

SEQ ID NO: 7530 - protein, 566 aa, synthetic construct; identical to SEQ ID NO: 3022
  REGION 1..566: note = hemagglutinin__InfluenzaA__AEO01448

SEQ ID NO: 7531 - protein, 566 aa, synthetic construct; identical to SEQ ID NO: 7505
  REGION 1..566: note = hemagglutinin__InfluenzaA__AEO01449

SEQ ID NO: 7532 - protein, 566 aa, synthetic construct
  REGION 1..566: note = hemagglutinin__InfluenzaA__AEO01450
MKAILVVLLYTFATANADTLCIGYHANNSTDTVDTVLEKNVTVTHSVNLLEDKHNGKLCKLRGVAPLHLGKCNIAGWILGNPECESLSTASSWSYIVETSSSDNGTCYPGDFIDYEELREQLSSVSSFERFEIFPKTSSWPNHDSNKGVTAACPHAGAKSFYKNLIWLVKKGNSYPKLSKSYINDKGKEVLVLWGIHHPSTSTDQQSLYQNADAYVFVGTSRYSKKFKPEIAIRPKVRDQEGRMNYYWTLVEPGDKITFEATGNLVVPRYAFAMERNAGSGIIISDTPVHDCNTTCQTPKGAINTSLPFQNIHPITIGKCPKYVKSTKLRLATGLRNVPSIQSRGLFGAIAGFIEGGWTGMVDGWYGYHHQNEQGSGYAADLKSTQHAIDEITNKVNSVIEKMNTQFTAVGKEFNHLEKRIENLNKKVDDGFLDIWTYNAELLVLLENERTLDYHDSNVKNLYEKVRSQLKNNAKEIGNGCFEFYHKCDNTCMESVKNGTYDYPKYSEEAKLNREEIDGVKLESTRIYQILAIYSTVASSLVLVVSLGAISFWMCSNGSLQCRICI

SEQ ID NO: 7533 - protein, 566 aa, synthetic construct; identical to SEQ ID NO: 2669
  REGION 1..566: note = hemagglutinin__InfluenzaA__AEO01451

SEQ ID NO: 7534 - protein, 566 aa, synthetic construct
  REGION 1..566: note = hemagglutinin__InfluenzaA__AEO01452
MKAILVVLLYTFATANADTLCIGYHANNSTDTVDTVLEKNVTVTHSVNLLEDKHNGKLCKLRGVAPLHLGKCNIAGWILGNPECESLSTASSWSYIVETSSSDNGTCYPGDFIDYEELREQLSSVSSFERFEIFPKTSSWPNHDSNKGVTAACPHAEAKSFYKNLIWLVKKGNSYPKLSKSYINDKGKEVLVLWGIHHPSTSADQQSLYQNADAYVFVGTSRYSKKFKPEIAIRPKVRDQEGRMNYYWTLVEPGDKITFEATGNLVVPRYAFAMERNAGSGIIISDTPAHDCNTTCQTPKGAINTSLPFQNIHPITIGKCPKYVKSTKLRLATGLRNVPSIQSRGLFGAIAGFIEGGWTGMVDGWYGYHHQNEQGSGYAADLKSTQNAIDEITNKVNSVIEKMNTQFTAVGKEFNHLEKRIENLNKKVDDGFLDIWTYNAELLVLLENERTLDYHDSNVKKLYEKVRSQLKNNAKEIGNGCFEFYHKCDNTCMESVKNGTYDYPKYSEEAKLNREEIDGVKLESTRIYQILAIYSTVASSLVLVVSLGAISFWMCSNGSLQCRICI

SEQ ID NO: 7535 - protein, 566 aa, synthetic construct
  REGION 1..566: note = hemagglutinin__InfluenzaA__AEO01453
MKAILVVLLYTFAIANADTLCIGYHANNSTDTVDTVLEKNVTVTHSVNLLEDKHNGKLCKLRGVAPLHLGKCNIAGWILGNPECESLSTASSWSYIVETSSSDNGTCYPGDFIDYEELREQLSSVSSFERFEIFPKTSSWPNHDSNKGVTAACPHAGAKSFYKNLIWLVKKGNSYPKLSKSYINDKGKEVLVLWGVHHPSTSADQQSLYQNADAYVFVGTSRYSKKFKREIAIRPKVRDQEGRMNYYWTLVEPGDKITFEATGNLVVPRYAFAMERNAGSGIIISDTPVHDCNTTCQTPKGAINTSLPFQNIHPITIGKCPKYVKSTKLRLATGLRNVPSIQSRGLFGAIAGFIEGGWTGMVDGWYGYHHQNEQGSGYAADLKSTQHAIDEITNKVNSVIEKMNTQFTAVGKEFNHLEKRIENLNKKVDDGFLDIWTYNAELLVLLENERTLDYHDSNVKNLYEKVRSQLKNNAKEIGNGCFEFYHKCDNTCMESVKNGTYDYPKYSEEAKLNREEINGVKLESTRIYQILAIYSTVASSLVLVVSLGAISFWMCSNGSLQCRICI

SEQ ID NO: 7536 - protein, 566 aa, synthetic construct
  REGION 1..566: note = hemagglutinin__InfluenzaA__AEO01454
MKAILVVLLYTFATANADTLCIGYHANNSTDTVDTVLEKNVTVTHSVNILEDKHNGKLCKLRGVAPLHLGKCNIAGWILGNPECESLSTASSWSYIVETSSSDNGTCYPGDFIDYEELREQLSSVSSFERFEIFPKTSSWPNHDSNKGVTAACPHAGAKSFYKNLIWLVKKGNSYPKLSKSYINDKGKEVLVLWGIHHPSTSADQQSLYQNADAYVFVGTSRYSKKFKPEIAIRPKVRDQEGRMNYYWTLVEPGDKITFEATGNLVVPRYAFAMERNAGSGIIISDTPVHDCNTTCQTPKGAINTSLPFQNIHPTTIGKCPKYVKSTKLRLATGLRNVPSIQSRGLFGAIAGFIEGGWTGMVDGWYGYHHQNEQGSGYAADLKSTQNAIDEITNKVNSVIEKMNTQFTAVGKEFNHLEKRIENLNKKVDDGFLDIWTYNAELLVLLENERTLDYHDSNVKNLYEKVRSQLKNNAKEIGNGCFEFYHKCDNTCMESVKNGTYDYPKYSEEAKLNREEIDGVKLESTRIYQILAIYSTVASSLVLVVSLGAISFWMCSNGSLQCRICI

SEQ ID NO: 7537 - protein, 566 aa, synthetic construct
  REGION 1..566: note = hemagglutinin__InfluenzaA__AEO01455
MKAILVVLLYTFATANADTLCIGYHANNSTDTVDTVLEKNVTVTHSVNLLEDKHNGKLCKLRGVAPLHLGKCNIAGWILGNPECESLSTASSWSYIVETSSSDNGTCYPGDFIDYEELREQLSSVSSFERFEIFPKTSSWPNHDSNKGVTAACPHAGAKSFYKNLIWLVKKGNSYPKLSKSYINDKGKEVLVLWGIHHPSTSADQQSLYQNADAYVFVGTSRYSKKFKPEIAIRPKVREQEGRMNYYWTLVEPGDKITFEATGNLVVPRYAFAMERNAGSGIIISDTPVHDCNTTCQTPKGAINTSLPFQNIHPITIGKCPKYVKSTKLRLATGLRNIPSIQSRGLFGAIAGFIEGGWTGMVDGWYGYHHQNEQGSGYAADLKSTQNAIDEITNKVNSVIEKMNTQFTAVGKEFNHLEKRIENLNKKVDDGFLDIWTYNAELLVLLENERTLDYHDSNVKNLYEKVRSQLKNNAKEIGNGCFEFYHKCDNTCMESVKNGTYDYPKYSEEAKLNREEIDGVKLESTRIYQILAIYSTVASSLVLVVSLGAISFWMCSNGSLQCRICI

SEQ ID NO: 7538 - protein, 566 aa, synthetic construct
  REGION 1..566: note = hemagglutinin__InfluenzaA__AEO01456
MKAILIVLLYTFATANADTLCIGYHANNSTDTVDTLLEKNVTVTHSVNLLEDKHNGKLCKLRGVAPLHLGKCNIAGWILGNPECESLSTASSWSYIVETSSSDNGTCYPGDFIDYEELREQLSSVSSFERFEIFPKTSSWPNHDSNKGVTAACPHAGAKSFYKNLIWLVKKGNSYPKLSKSYINDKGKEVLVLWGIHHPSTSADQQSLYQNADAYVFVGTSRYSKKFKPEIAIRPKVRDQEGRMNYYWTLVEPGDKITFEATGNLVVPRYAFAMDRNAGSGIIISDAPVHDCNTTCQTPKGAINTSLPFQNIHPITIGKCPKYVKSTKLRLATGLRNVPSIQSRGLFGAIAGFIEGGWTGMVDGWYGYHHQNEQGSGYAADLKSTQNAIDEITNKVNSVIEKMNTQFTAVGKEFNHLEKRIENLNKKVDDGFLDIWTYNAELLVLLENERTLDYHDSNVKNLYEKVRSQLKNNAKEIGNGCFEFYHKCDNTCMESVKNGTYDYPKYSEEAKLNREEIDGVKLESTRIYQILAIYSTVASSLVLVVSLGAISFWMCSNGSLQCRICI

SEQ ID NO: 7539 - protein, 566 aa, synthetic construct; identical to SEQ ID NO: 7438
  REGION 1..566: note = hemagglutinin__InfluenzaA__AEO01457

SEQ ID NO: 7540 - protein, 566 aa, synthetic construct; identical to SEQ ID NO: 7434
  REGION 1..566: note = hemagglutinin__InfluenzaA__AEO01458

SEQ ID NO: 7541 - protein, 566 aa, synthetic construct; identical to SEQ ID NO: 7434
  REGION 1..566: note = hemagglutinin__InfluenzaA__AEO01459

SEQ ID NO: 7542 - protein, 566 aa, synthetic construct; identical to SEQ ID NO: 4089
  REGION 1..566: note = hemagglutinin__InfluenzaA__AEO01461

SEQ ID NO: 7543 - protein, 566 aa, synthetic construct; identical to SEQ ID NO: 3770
  REGION 1..566: note = hemagglutinin__InfluenzaA__AEO01462

SEQ ID NO: 7544 - protein, 566 aa, synthetic construct; identical to SEQ ID NO: 3022
  REGION 1..566: note = hemagglutinin__InfluenzaA__AEO01463

SEQ ID NO: 7545 - protein, 566 aa, synthetic construct
  REGION 1..566: note = hemagglutinin__InfluenzaA__AEO01464
MKAILVVLLYTFATANADTLCIGYHANNSTDTVDTLLEKNVTVTHSVNLLEDKHNGKLCKLRGVAPLHLGKCNIAGWILGNPECESLSTASSWSYIVETSSSDNGTCYPGDFIDYEELREQLSSVSSFERFEIFPKTSSWPNHDSNKGVTAACPHAGAKSFYKNLIWLVKKGNSYPKLSKSYINDKGKEVLVLWGIHHPSTSADQQSLYQNADAYVFVGTSRYSKKFKPEIAIRPKVRDQEGRMNYYWTLVEPGDKITFEATGNLVVPRYAFAMDRNAGSGIIISDTSVHDCNTTCQTPKGAINTSLPFQNIHPITIGKCPKYVKSTKLRLATGLRNVPSIQSRGLFGAIAGFIEGGWTGMVDGWYGYHHQNEQGSGYAADLKSTQNAIDEITNKVNSVIEKMNTQFTAVGKEFNHLEKRIENLNKKVDDGFLDIWTYNAELLVLLENERTLDYHDSNVKNLYEKVRSQLKNNAKEIGNGCFEFYHKCDNTCMESVKNGTYDYPKYSEEAKLNREEIDGVKLESTRIYQILAIYSTVASSLVLVVSLGAISFWMCSNGSLQCRICI

SEQ ID NO: 7546 - protein, 566 aa, synthetic construct; identical to SEQ ID NO: 7525
  REGION 1..566: note = hemagglutinin__InfluenzaA__AEO01465

SEQ ID NO: 7547 - protein, 566 aa, synthetic construct; identical to SEQ ID NO: 4541
  REGION 1..566: note = hemagglutinin__InfluenzaA__AEO01466

SEQ ID NO: 7548 - protein, 566 aa, synthetic construct; identical to SEQ ID NO: 3022
  REGION 1..566: note = hemagglutinin__InfluenzaA__AEO01467

SEQ ID NO: 7549 - protein, 566 aa, synthetic construct; identical to SEQ ID NO: 3833
  REGION 1..566: note = hemagglutinin__InfluenzaA__AEO01468

SEQ ID NO: 7550 - protein, 566 aa, synthetic construct; identical to SEQ ID NO: 2669
  REGION 1..566: note = hemagglutinin__InfluenzaA__AEO01469

SEQ ID NO: 7551 - protein, 566 aa, synthetic construct
  REGION 1..566: note = hemagglutinin__InfluenzaA__AEO01470
MKAILVVLLYTFATANADTLCIGYHANNSTDTVDTVLEKNVTVTHSVNLLEDKHNGKLCKLRGVAPLHLGKCNIAGWILGNPECESLSTASSWSYIVETSSSDNGTCYPGDFIDYEELREQLSSVSSFERFEIFPKTSSWPNHDSNKGVTAACPHAGAKSFYKNLIWLVKKGNSYPKLSKSYINDKGKEVLVLWGIHHPSTSADQQSLYQNADAYVFVGTSRYSKKFKPEIAIRPKVRDQEGRMNYYWTLVEPGDKITFEATGNLVIPRYAFAMERNAGSGIIISDTPVHDCNTTCQTPKGAINTSLPFQNIHPITIGKCPKYVKSTKLRLATGLRNVPSIQSRGLFGAIAGFIEGGWTGMVDGWYGYHHQNEQGSGYAADLKSTQNAIDEITNKVNSVIEKMNTQFTAVGKEFNHLEKRIENLNKKVDDGFLDIWTYNAELLVLLENERTLDYHDSNVKNLYEKVRSQLKNNAKEIGNGCFEFYHKCDNTCMESVKNGTYDYPKYSEEAKLNREEIDGVKLESTRIYQILAIYSTVASSLVLVVSLGAISFWMCSNGSLQCRICI

SEQ ID NO: 7552 - protein, 566 aa, synthetic construct; identical to SEQ ID NO: 7378
  REGION 1..566: note = hemagglutinin__InfluenzaA__AEO01471

SEQ ID NO: 7553 - protein, 566 aa, synthetic construct; identical to SEQ ID NO: 4296
  REGION 1..566: note = hemagglutinin__InfluenzaA__AEO01472

SEQ ID NO: 7554 - protein, 566 aa, synthetic construct
  REGION 1..566: note = hemagglutinin__InfluenzaA__AEO01473
MKAILVVLLYTFATANADTLCIGYHANNSTDTVDTVLEKNVTVTHSVNLLEDKHNGKLCKLRGVAPLHLGKCNIAGWILGNPECESLSTASSWSYIVETSSSDNGTCYPGDFIDYEELREQLSSVSSFERFEIFPKTSSWPNHDSNKGVTAACPHAGAKSFYKNLIWLVKKGNSYPKLNKSYINDKGKEVLVLWGIHHPSTSADQQSLYQNADAYVFVGTSRYSKKFKPEIAIRPKVRDQEGRMNYYWTLVEPGDKITFEATGNLVVPRYAFAMERNAGSGIIISDTPVHDCNTTCQTPEGAINTSLPFQNIHPITIGECPKYVKSTKLRLATGLRNVPSIQSRGLFGAIAGFIEGGWTGMVDGWYGYHHQNEQGSGYAADLKSTQNAIDKITNKVNSVIEKMNTQFTAVGKEFNHLEKRIENLNKKVDDGFLDIWTYNAELLVLLENERTLDYHDSNVKNLYEKVRSQLKNNAKEIGNGCFEFYHKCDNTCMESVKNGTYDYPKYSEEAKLNREEIDGVKLESTRIYQILAIYSTVASSLVLVVSLGAISFWMCSNGSLQCRICI

SEQ ID NO: 7555 - protein, 566 aa, synthetic construct
  REGION 1..566: note = hemagglutinin__InfluenzaA__AEO01474
MKAILVVLLYTFATANADTLCIGYHANNSTDTVDTVLEKNVTVTHSVNLLEDKHNGKLCKLRGVAPLHLGKCNIAGWILGNPECESLSTASSWSYIVETSSSDNGTCYPGDFIDYEELREQLSSVSSFERFEIFPKTSSWPNHDSDKGVTAACPHAGAKSFYKNLIWLVKKGNSYPKLSKSYINDKGKEVLVLWGIHHPSTSADQQSLYQNADAYVFVGTSRYSKKFKPEIAIRPKVRDQEGRMNYYWTLVEPGDKITFEATGNLVVPRYAFAMERNAGSGIIISDTPVHDCNTTCQTPKGAINTSLPFQNIHPITIGKCPKYVKSTKLRLATGLRNVPSIQSRGLFGAIAGFIEGGWTGMVDGWYGYHHQNEQGSGYAADLKSTQNAIDKITNKVNSVIEKMNTQFTAVGKEFNHLEKRIENLNKKVDDGFLDIWTYNAELLVLLENERTLDYHDSNVKNLYEKVRSQLKNNAKEIGNGCFEFYHKCDNTCMESVKNGTYDYPKYSEEAKLNREEIDGVKLESTRIYQILAIYSTVASSLVLVVSLGAISFWMCSNGSLQCRICI

SEQ ID NO: 7556 - protein, 566 aa, synthetic construct
  REGION 1..566: note = hemagglutinin__InfluenzaA__AEO01475
MKAILVVLLYTFATANADTLCIGYHANNSTDTVDTVLEKNVTVTHSVNLLEDKHNGKLCKLRGVAPLHLGKCNIAGWILGNPECESLSTASSWSYIVETSNSDNGTCYPGDFIDYEELREQLSSVSSFERFEIFPKTSSWPNHDSNKGVTAACPHAGAKSFYKNLIWLVKKGNSYPKLSKSYINDKGKEVLVLWGIHHPSTSADQQSLYQNADAYVFVGTSRYSKKFKPEIAIRPKVRDQEGRMNYYWTLVEPGDKITFEATGNLVVPRYAFAMERNAGSGIIISDTPVHDCNTTCQTPKGAINTSLPFQNIHPITIGKCPKYVKSTKLRLATGLRNVPSIQSRGLFGAIAGFIEGGWTGMVDGWYGYHHQNEQGSGYAADLKSTQHAIDEITNKVNSVIEKMNTQFTAVGKEFNHLEKRIENLNKKVDDGFLDIWTYNAELLVLLENERTLDYHDSNVKNLYEKVRSQLKNNAKEIGNGCFEFYHKCDNTCMESVKNGTYDYPKYSEEAKLNREEIDGVKLESTRIYQILAIYSTVASSLVLVVSLGAISFWMCSNGSLQCRICI

SEQ ID NO: 7557 - protein, 566 aa, synthetic construct
  REGION 1..566: note = hemagglutinin__InfluenzaA__AEO01476
MKAILVVLLYTFSTANADTLCIGYHANNSTDTVDTVLEKNVTVTHSVNLLEDKHNGKLCKLRGVAPLHLGKCNIAGWILGNPECESLSTASSWSYIVETSSSDNGTCYPGDFIDYEELREQLSSVSSFERFEIFPKTSSWPNHDSNKGVTAACPHAGAKSFYKNLIWLVKKGNSYPKLSKSYINDKGKEVLVLWGIHHPSTSADQQSLYQNADAYVFVGTSRYSKKFKPEIAIRPKVRDQEGRMNYYWTLVEPGDKITFEATGNLVVPRYAFAMERNAGSGIIISDTPVHDCNTTCQTPKGAINTSLPFQNIHPITIGKCPKYVKSTKLRLATGLRNVPSIQSRGLFGAIAGFIEGGWTGMVDGWYGYHHQNEQGSGYAADLKSTQNAIDEITNKVNSVIEKMNTQFTAVGKEFNHLEKRIENLNKKVDDGFLDIWTYNAELLVLLENERTLDYHDSNVKNLYEKVRSQLKNNAKEIGNGCFEFYHKCDNTCMESVKNGTYDYPKYSEEAKLNREEIDGVKLESTRIYQILAIYSTVASSLVLVVSLGAISFWMCSNGSLQCRICI

SEQ ID NO: 7558 - protein, 566 aa, synthetic construct
  REGION 1..566: note = hemagglutinin__InfluenzaA__AEO01477
MKAILVVLLYTFATANADTLCIGYHANNSTDTVDTVLEKNVTVTHSVNLLEDKHNGKLCKLRGVAPLHLGKCNIAGWILGNPECESLSTASSWSYIVETSSSDNGTCYPGDFIDYEELREQLSSVSSFERFEIFPKTSSWPNHDSNKGVTAACPHAGAKSFYKNLIWLVKKGNSYPKLSKSYINDKGKEVLVLWGIHHPSTSADQQSLYQNADAYAFVGTSRYSKKFKPEIAIRPKVREQEGRMNYYWTLVEPGDKITFEATGNLVVPRYAFAMERNAGSGIIISDTPVHDCNTTCQTPKGAINTSLPFQNIHPITIGKCPKYVKSTKLRLATGLRNVPSIQSRGLFGAIAGFIEGGWTGMVDGWYGYHHQNEQGSGYAADLKSTQNAIDEITNKVNSVIEKMNTQFTAVGKEFNHLEKRIENLNKKVDDGFLDIWTYNAELLVLLENERTLDYHDSNVKNLYEKVRSQLKNNAKEIGNGCFEFYHKCDNTCMESVKNGTYDYPKYSEEAKLNREEIDGVKLESTRIYQILAIYSTVASSLVLVVSLGAISFWMCSNGSLQCRICI

SEQ ID NO: 7559 - protein, 566 aa, synthetic construct; identical to SEQ ID NO: 3997
  REGION 1..566: note = hemagglutinin__InfluenzaA__AEO01478

SEQ ID NO: 7560 - protein, 566 aa, synthetic construct; identical to SEQ ID NO: 7387
  REGION 1..566: note = hemagglutinin__InfluenzaA__AEO01479

SEQ ID NO: 7561 - protein, 566 aa, synthetic construct; identical to SEQ ID NO: 7434
  REGION 1..566: note = hemagglutinin__InfluenzaA__AEO01480

SEQ ID NO: 7562 - protein, 566 aa, synthetic construct
  REGION 1..566: note = hemagglutinin__InfluenzaA__AEO01482
MKAILVVLLYTFATANADTLCIGYHANNSTDTVDTVLEKNVTVTHSVNLLEDKHNGKLCKLRGVAPLHLGKCNIAGWILGNPECESLSTASSWSYIVETSSSDNGTCYPGDFIDYEELREQLSSVSSFERFEIFPKTSSWPNHDSNKGVTAACPHAGAKSFYKNLIWLVKKGNSYPKLSKSYINDKGKEVLVLWGIHHPSTSADQQSLYQNADAYVFVGTSRYSKKFKPEIAIRPKVRDQEGRMNYYWTLVEPGDKITFEATGNLVVPRYAFAMERNAGSGIIISDTPVHDCNTTCQTPKGAINTSLPFQNIHPITIGKCPKYVKSTKLRLATGLRNVPSIQSRGLFGAIAGFIEGGWTGMVDGWYGYHHQNEQGSGYAADLKSTQNAIDKITNKVNSVIEKMNTQFTAVGKEFNHLEKRIENLNKKVDDGFLDIWTYNAELLVLLENERTLDYHDSNVKNLYEKVRSQLKNNAKEIGNGCFEFYHKCNNTCMESVKNGTYDYPKYSEEAKLNREEIDGVKLESTRIYQILAIYSTVASSLVLVVSLGAISFWMCSNGSLQCRICI

SEQ ID NO: 7563 - protein, 566 aa, synthetic construct
  REGION 1..566: note = hemagglutinin__InfluenzaA__AEO01483
MKAILVVLLYTFATANADTLCIGYHANNSTDTVDTVLEKNVTVTHSVNLLEDKHNGKLCKLRGVAPLHLGKCNIAGWILGNPECESLSTASSWSYIVETSNSDNGTCYPGDFIDYEELREQLSSVSSFERFEIFPKTSSWPNHDSNKGVTAACPHAGAKSFYKNLIWLVKKGNSYPKLSKSYINDKGKEVLVLWGIHHPSTSADQQSLYQNADAYVFVGTSRYSKKFKPEIAIRPKVRDQEGRMNYYWTLVEPGDKITFEATGNLVVPRYAFAMERNAGSGIIISDTPVHDCNTTCQTPKGAINTSLPFQNIHPITIGKCPKYVKSTKLRLATGLRNVPSIQSRGLFGAIAGFIEGGWTGMVDGWYGYHHQNEQGSGYAADLKSTQNAIDKITNKVNSVIEKMNTQFTAVGKEFNHLEKRIENLNKKVDDGFLDIWTYNAELLVLLENERTLDYHDSNVKNLYEKVRSQLKNNAKEIGNGCFEFYHKCDNTCMESVKNGTYDYPKYSEEAKLNREEIDGVKLESTRIYQILAIYSTAASSLVLVVSLGAISFWMCSNGSLQCRICI

SEQ ID NO: 7564 - protein, 566 aa, synthetic construct
  REGION 1..566: note = hemagglutinin__InfluenzaA__AEO01484
MKAILVVLLYTFATANADTLCIGYHANNSTDTVDTVLEKNVTVTHSVNLLEDKHNGKLCKLKGVAPLHLGKCDIAGWILGNPECESLSTASSWSYIVETSSSDNGTCYPGDFIDYEELREQLSSVSSFERFEIFPKTSSWPNHDSNKGVTAACPHAGAKSFYKNLIWLVKKGNSYPKLSKSYINDKGKEVLVLWGIHHPSTSADQQSLYQNADAYVFVGTSRYSKKFKPEIAIRPKVRDQEGRMNYYWTLVEPGDKITFEATGNLVVPRYAFAMERNAGSGIIISDTPVHDCNTTCQTPKGAINTSLPFQNIHPITIGKCPKYVKSTKLRLATGLRNVPSIQSRGLFGAIAGFIEGGWTGMVDGWYGYHHQNEQGSGYAADLKSTQHAIDEITNKVNSVIEKMNTQFTAVGKEFNHLEKRIENLNKKVDDGFLDIWTYNAELLVLLENERTLDYHDSNVKNLYEKVRSQLKNNAKEIGNGCFEFYHKCDNTCMESVKNGTYDYPKYSEEAKLNREEIDGVKLESTRIYQILAIYSTVASSLVLVVSLGAISFWMCSNGSLQCRICI

SEQ ID NO: 7565 - protein, 566 aa, synthetic construct
  REGION 1..566: note = hemagglutinin__InfluenzaA__AEO01485
MKAILVVLLYTFATANADTLCIGYHANNSTDTVDTVLEKNVTVTHSVNLLEDKHNGKLCKLRGVAPLHLGKCNIAGWILGNPECESLSTASSWSYIVETSSSDNGTCYPGDFIDYEELREQLSSVSSFERFEIFPKTSSWPNHDSNKGVTAACPHAGAKSFYKNLIWLVKKGNSYPKLSKSYINDKGKEVLVLWGIHHPSTSADQQSLYQNADAYVFVGTSRYSKKFKPEITIRPKVRDQEGRMNYYWTLVEPGDKITFEATGNLVVPRYAFAMERNAGSGIIISDTPVHDCNTTCQTPKGAINTSLPFQNIHPITIGKCPKYVKSTKLRLATGLRNVPSIQSRGLFGAIAGFIEGGWTGMVDGWYGYHHQNEQGSGYAADLKSTQNAIDEITNKVNSVIEKMNTQFTAVGKEFNHLEKRIENLNKKVDDGFLDIWTYNAELLVLLENERTLDYHDSNVKNLYEKVRSQLKNNAKEIGNGCFEFYHKCDNTCMESVKNGTYDYPKYSEEAKLNREEIDGVKLESTRIYQILAIYSTVASSLVLVVSLGAISFWMCSNGSLQCRICI

SEQ ID NO: 7566 - protein, 566 aa, synthetic construct
  REGION 1..566: note = hemagglutinin__InfluenzaA__AEO01487
MKAILVVLLYTFATANADTLCIGYHANNSTDTVDTVLEKNVTVTHSVNLLEDKHNGKLCKLRGVAPLHLGKCNIAGWILGNPECESLSTASSWSYIVETSSSDNGTCYPGDFIDYEELREQLSSVSSFERFEIFPKTSSWPNHDSNKGVTAACPHAGAKSFYKNLIWLVKKGNSYPKLSKSYINDKGKEVLVLWGIHHPSTSADQQSLYQNADAYVFVGTSRYSKKFKPEIAIRPKVRDQEGRMNYYWTLVEPGDKITFEATGNLVVPRYAFAMERNAGSGIIISDTPVHDCNTTCQTPKGAINTSLPFQNIHPITIGKCPKYVKSTKLRLATGLRNVPSIQSRGLFGAIAGFIEGGWTGMVDGWYGYHHQNEQGSGYAADLKSTQNAIDEITNKVNSVIEKMNTQFTAVGKEFNHLEKRIENLNKKVDDGFLDIWTYNAELLVLLENERTLDYHDSNVKNLYEKVRSQLKNNAKEIGNGCFEFYHKCDNTCMESVKNGTYDYPKYSEEAKLNREEIDGVTLESTRIYQILAIYSTVASSLVLVVSLGAISFWMCSNGSLQCRICI

SEQ ID NO: 7567 - protein, 566 aa, synthetic construct
  REGION 1..566: note = hemagglutinin__InfluenzaA__AEO01488
MKAILVVLLYTFATANADTLCIGYHANNSTDTVDTVLEKNVTVTHSVNLLEDKHNGKLCKLRGVAPLHLGKCNIAGWILGNPECESLSTASSWSYIVETSSSDNGTCYPGDFIDYEELREQLSSVSSFERFEIFPKTSSWPNHDSNKGVTAACPHAGAKSFYKNLIWLVKKGNSYPKLSKSYINDKGKEVLVLWGIHHPSTSADQQSLYQNADAYVFVGTSRYSKKFKPEIAIRPKVRDQEGRMNYYWTLVEPGDKITFEATGNLVVPRYAFTMERNAGSGIIISDTPVHDCNTTCQTPKGAINTSLPFQNIHPITIGKCPKYVKSTKLRLATGLRNVPSIQSRGLFGAIAGFIEGGWTGMVDGWYGYHHQNEQGSGYAADLKSTQNAIDGITNKVNSVIEKMNTQFTAVGKEFNHLEKRIENLNKKVDDGFLDIWTYNAELLVLLENERTLDYHDSNVKNLYEKVRSQLKNNAKEIGNGCFEFYHKCDNTCMESVKNGTYDYPKYSEEAKLNREEIDGVKLESTRIYQILAIYSTVASSLVLVVSLGAISFWMCSNGSLQCRICI

SEQ ID NO: 7568 - protein, 566 aa, synthetic construct
  REGION 1..566: note = hemagglutinin__InfluenzaA__AEO01489
MKAILVVLLYTFATANADTLCIGYHANNSTDTVDTVLEKNVTVTHSVNLLEDKHNGKLCKLRGVAPLHLGKCNIAGWILGNPECESLSTASSWSYIVETSSSDNGTCYPGDFIDYEELREQLSSVSSFERFEIFPKTSSWPNHDSNKGVTAACPHAGAKSFYKNLIWLVKKGNSYPKLSKSYINDKGKEVLVLWGIHHPSTSADQQSLYQNADAYVFVGTSRYSKKFRPEIAIRPKVRDQEGRMNYYWTLVEPGDKITFEATGNLVVPRYAFAMERNAGSGIIISDTPVHDCNTTCQTPKGAINTSLPFQNIHPITIGKCPKYVKSTKLRLATGLRNVPSIQSRGLFGAIAGFIEGGWTGMVDGWYGYHHQNEQGSGYAADLKSTQNAIDEITNKVNSVIEKMNTQFTAVGKEFNHLEKRIENLNKKVDDGFLDIWTYNAELLVLLENERTLDYHDSNVKNLYEKVRSQLKNNAKEIGNGCFEFYHKCDNTCMESVKNGTYDYPKYSEEAKLNREEIDGVKLESTRIYQILAIYSTVASSLVLVVSLGAISFWMCSNGSLQCRICI

SEQ ID NO: 7569 - protein, 566 aa, synthetic construct
  REGION 1..566: note = hemagglutinin__InfluenzaA__AEO01490
MKAILVVLLYTFATANADTLCIGYHANNSTDTVDTVLEKNVTVTHSVNLLEDKHNGKLCKLRGVAPLHLGKCNIAGWILGNPECESLSTASSWSYIVETSSSDNGTCYPGDFIDYEELREQLSSVSSFERFEIFPKTSSWPNHDSNKGVTAACPHAGAKSFYKNLIWLVKKGNSYPKLSKSYINDKGKEVLVLWGIHHPSTSADQQSLYQNADAYVFVGTSRYSKKFKPEIAIRPKVRDQEGRMNYYWTLVEPGDKITFEATGNLVVPRYAFAMERNAGSGIIISDTPVHDCNTTCQTPKGAINTSLPFQNIHPITIGKCPKYVKSTKLRMATGLRNVPSIQSRGLFGAIAGFIEGGWTGMVDGWYGYHHQNEQGSGYAADLKSTQNAIDEITNKVNSVIEKMNTQFTAVGKEFNHLEKRIENLNKKVDDGFLDIWTYNAELLVLLENERTLDYHDSNVKNLYEKVRNQLKNNAKEIGNGCFEFYHKCDNTCMESVKNGTYDYPKYSEEAKLNREEIDGVKLESTRIYQILAIYSTVASSLVLVVSLGAISFWMCSNGSLQCRICI

SEQ ID NO: 7570 - protein, 566 aa, synthetic construct
  REGION 1..566: note = hemagglutinin__InfluenzaA__AEO01491
MKAILVVLLYTFATANADTLCIGYHANNSTDTVDTVLEKNVTVTHSVNLLEDKYNGKLCKLRGVAPLHLGKCNIAGWILGNPECESLSTASSWSYIVETSSSDNGTCYPGDFIDYEELREQLSSVSSFERFEIFPKTSSWPNHDSNKGVTAACPHAGAKSFYKNLIWLVKKGNSYPKLSKSYINDKGKEVLVLWGIHHPSTSADQQSLYQNADAYVFVGTSRYSKKFKPEIAIRPKVRDQEGRMNYHWTLVEPGDKITFEATGNLVVPRYAFAMERNAGSGIIISDTPVHDCNTTCQTPKGAINTSLPFQNIHPITIGKCPKYVKSTKLRLATGLRNVPSIQSRGLFGAIAGFIEGGWTGMVDGWYGYHHQNEQGSGYAADLKSTQNAIDEITNKVNSVIEKMNTQFTAVGKEFNHLEKRIENLNKKVDDGFLDIWTYNAELLVLLENERTLDYHDSNVKNLYEKVRSQLKNNAKEIGNGCFEFYHKCDNTCMESVKNGTYDYPKYSEEAKLNREEIDGVKLESTRIYQILAIYSTVASSLVLVVSLGAISFWMCSNGSLQCRICI

SEQ ID NO: 7571 - protein, 566 aa, synthetic construct; identical to SEQ ID NO: 7438
  REGION 1..566: note = hemagglutinin__InfluenzaA__AEO01492

SEQ ID NO: 7572 - protein, 566 aa, synthetic construct
  REGION 1..566: note = hemagglutinin__InfluenzaA__AEO01493
MKAILVVLLYTFATANADTLCIGYHANNSTDTVDTVLEKNVTVTHSVNILEDKHNGKLCKLRGVAPLHLGKCNIAGWILGNPECESLSTASSWSYIVETSSSDNGTCYPGDFIDYEELREQLSSVSSFERFEIFPKTSSWPNHDSNKGVTAACPHAGAKSFYKNLIWLVKKGNSYPKLSKSYINDKGKEVLVLWGIHHPSTSADQQSLYQNADAYVFVGTSRYSKKFKPEIAIRPKVRDQEGRMNYYWTLVEPGDKITFEATGNLVVPRYAFAMERSAGSGIIISDTPVHDCNTTCQTPKGAINTSLPFQNIHPITIGKCPKYVKSTKLRLATGLRNVPSIQSRGLFGAIAGFIEGGWTGMVDGWYGYHHQNEQGSGYAADLKSTQNAIDEITNKVNSVIEKMNTQFTAVGKEFNHLEKRIENLNKKVDDGFLDIWTYNAELLVLLENERTLDYHDSNVKNLYEKVRSQLKNNAKEIGNGCFEFYHKCDNTCMESVKNGTYDYPKYSEEAKLNREEIDGVKLESTRIYQILAIYSTVASSLVLVVSLGAISFWMCSNGSLQCRICI

SEQ ID NO: 7573 - protein, 566 aa, synthetic construct
  REGION 1..566: note = hemagglutinin__InfluenzaA__AEO01494
MKAILVVLLYTFATANADTLCTGYHANNSTDTVDTVLEKNVTVTHSVNLLEDKHNGKLCKLRGVAPLHLGKCNIAGWILGNPECESLSTASSWSYIVETSSSDNGTCYPGDFIDYEELREQLSSVSSFERFEIFPKTSSWPNHDSNKGVTAACPHAGAKSFYKNLIWLVKKGNSYPKLSKSYINDKGKEVLVLWGIHHPSTSADQQSLYQNADAYVFVGTSRYSKKFKPEIAIRPKVRDQEGRMNYYWTLVEPGDKITFEATGNLVVPRYAFAMERNAGSGIIISDTPVHDCNTTCQTPKGAINTSLPFQNIHPITIGKCPKYVKSTKLRLATGLRNVPSIQSRGLFGAIAGFIEGGWTGMVDGWYGYHHQNEQGSGYAADLKSTQNAIDEITNKVNSVIEKMNTQFTAVGKEFNHLEKRIENLNKKVDDGFLDIWTYNAELLVLLENERTLDYHDSNVKNLYEKVRNQLKNNAKEIGNGCFEFYHKCDNTCMESVKNGTYDYPKYSEEAKLNREEIDGVKLESTRIYQILAIYSTVASSLVLVVSLGAISFWMCSNGSLQCRICI

SEQ ID NO: 7574 - protein, 566 aa, synthetic construct; identical to SEQ ID NO: 4266
  REGION 1..566: note = hemagglutinin__InfluenzaA__AEO01496

SEQ ID NO: 7575 - protein, 566 aa, synthetic construct; identical to SEQ ID NO: 3022
  REGION 1..566: note = hemagglutinin__InfluenzaA__AEO01497

SEQ ID NO: 7576 - protein, 566 aa, synthetic construct; identical to SEQ ID NO: 4266
  REGION 1..566: note = hemagglutinin__InfluenzaA__AEO01498

SEQ ID NO: 7577 - protein, 566 aa, synthetic construct
  REGION 1..566: note = hemagglutinin__InfluenzaA__AEO01499
MKAILVVLLYTFAIANADTLCIGYHANNSTDTVDTVLEKNVTVTHSVNLLEDKHNGKLCKLRGVAPLHLGKCNIAGWILGNPECESLSTASSWSYIVETSSSDNGTCYPGDFIDYEELREQLSSVSSFERFEIFPKTSSWPNHDSNKGVTAACPHAGAKSFYKNLIWLVKKGNSYPKLSKSYINDKGKEVLVLWGIHHPYTSADQQSLYQNADAYVFVGTSRYSKKFKPEIAIRPKVRDQEGRMNYYWTLVEPGDKITFEATGNLVVPRYAFAMERNAGSGIIISDTPVHDCNTTCQTPKGAINTSLPFQNIHPITIGKCPKYVKSTKLRLATGLRNVPSIQSRGLFGAIAGFIEGGWTGMVDGWYGYHHQNEQGSGYAADLKSTQHAIDEITNKVNSVIEKMNTQFTAVGKEFNHLEKRIENLNKKVDDGFLDIWTYNAELLVLLENERTLDYHDSNVKNLYEKVRSQLKNNAKEIGNGCFEFYHKCDNTCMESVKNGTYDYPKYSEEAKLNREEINGVKLESTRIYQILAIYSTVASSLVLVVSLGAISFWMCSNGSLQCRICI

SEQ ID NO: 7578 - protein, 566 aa, synthetic construct; identical to SEQ ID NO: 3770
  REGION 1..566: note = hemagglutinin__InfluenzaA__AEO01500

SEQ ID NO: 7579 - protein, 566 aa, synthetic construct; identical to SEQ ID NO: 3833
  REGION 1..566: note = hemagglutinin__InfluenzaA__AEO01501

SEQ ID NO: 7580 - protein, 566 aa, synthetic construct; identical to SEQ ID NO: 3833
  REGION 1..566: note = hemagglutinin__InfluenzaA__AEO01502

SEQ ID NO: 7581 - protein, 566 aa, synthetic construct; identical to SEQ ID NO: 4089
  REGION 1..566: note = hemagglutinin__InfluenzaA__AEO01503

SEQ ID NO: 7582 - protein, 566 aa, synthetic construct; identical to SEQ ID NO: 4266
  REGION 1..566: note = hemagglutinin__InfluenzaA__AEO01505

SEQ ID NO: 7583 - protein, 566 aa, synthetic construct; identical to SEQ ID NO: 3770
  REGION 1..566: note = hemagglutinin__InfluenzaA__AEO01506

SEQ ID NO: 7584 - protein, 566 aa, synthetic construct; identical to SEQ ID NO: 7378
  REGION 1..566: note = hemagglutinin__InfluenzaA__AEO01507

SEQ ID NO: 7585 - protein, 566 aa, synthetic construct; identical to SEQ ID NO: 4266
  REGION 1..566: note = hemagglutinin__InfluenzaA__AEO01508

SEQ ID NO: 7586 - protein, 566 aa, synthetic construct; identical to SEQ ID NO: 3997
  REGION 1..566: note = hemagglutinin__InfluenzaA__AEO01510

SEQ ID NO: 7587 - protein, 566 aa, synthetic construct
  REGION 1..566: note = hemagglutinin__InfluenzaA__AEO01511
MKAILVVLLYTFATANADTLCIGYHANNSTDTVDTVLEKNVTVTHSVNLLEDKHNGKLCKLRGVTPLHLGKCNIAGWILGNPECESLSTTSSWSYIVETSSSDNGTCYPGDFIDYEELREQLSSVSSFERFEIFPKTSSWPNHDSNKGVTAACPHAGAKSFYKNLIWLVKKGNSYPKLSKSYINDKGKEVLVLWGIHHPSTSADQQSLYQNADAYVFVGTSRYSKKFKPEIAIRPKVREQEGRMNYYWTLVEPGDKITFEATGNLVVPRYAFAMERNAGSGIIISDTPVHDCNTTCQTPKGAINTSLPFQNIHPITIGKCPKYVKSTKLRLATGLRNVPSIQSRGLFGAIAGFIEGGWTGMVDGWYGYHHQNEQGSGYAADLKSTQNAIDKITNKVNSVIEKMNTQFTAVGKEFNHLEKRIENLNKKVDDGFLDIWTYNAELLVLLENERTLDYHDSNVKNLYEKVRSQLKNNAKEIGNGCFEFYHKCDNTCMESVKNGTYDYPKYSEEAKLNREEIDGVKLESTRIYQILAIYSTVASSLVLVVSLGAISFWMCSNGSLQCRICI

SEQ ID NO: 7588 - protein, 566 aa, synthetic construct
  REGION 1..566: note = hemagglutinin__InfluenzaA__AEO01512
MKAILVVLLYTFATANADTLCIGYHANNSTDTVDTVLEKNVTVTHSVNLLEDKHNGKLCKLRGVAPLHLGKCNIAGWILGNPECESLSTASSWSYIVETSSSDNGTCYPGDFIDYEELREQLSSVSSFERFEIFPKTSSWPNHDSNKGVTAACPHAGAKSFYKNLIWLVKKGNSYPKLSKSYINDKGKEVLVLWGIHHPSTSADQQSLYQNADAYVFVGTSRYSKKFKPEIAIRPKVREQEGRMNYYWTLVEPGDKITFEATGNLVVPRYAFAMERNAGSGIIISDTPVHDCNTTCQTPKGAINTSLPFQNIHPITIGKCPKYVKSTKLRLATGLRNVPSIQSRGLFGAIAGFIEGGWTGMVDGWYGYHHQNEQGSGYAADLKSTQNAIDEITNKVNSVIEKMNTQFTAVGKEFNHLEKRIENLNKKVDDGFLDIWTYNAELLVLLENERTLDYHDSNVKNLYEKVRSQLKNNAKEIGNGCFEFYHKCDNKCMESVKNGTYDYPKYSEEAKLNREEIDGVKLESTRIYQILAIYSTVASSLVLVVSLGAISFWMCSNGSLQCRICI

SEQ ID NO: 7589 - protein, 566 aa, synthetic construct
  REGION 1..566: note = hemagglutinin__InfluenzaA__AEO01513
MKAILAVLLYTFATANADTLCIGYHANNSTDTVDTVLEKNVTVTHSVNILEDKHNGKLCKLRGVAPLHLGKCNIAGWILGNPECESLSTASSWSYIVETSSSDNGTCYPGDFIDYEELREQLSSVSSFERFEIFPKTSSWPNHDSNKGVTAACPHAGAKSFYKNLIWLVKKGNSYPKLSKSYINDKGKEVLVLWGIHHPSTSADQQSLYQNADAYVFVGSSRYSKKFKPEIAIRPKVRDQEGRMNYYWTLVEPGDKITFEATGNLVVPRYAFAMERNAGSGIIISDTPVHDCNTTCQTPKGAINTSLPFQNIHPVTIGKCPKYVKSTKLRLATGLRNVPSIQSRGLFGAIAGFIEGGWTGMVDGWYGYHHQNEQGSGYAADLKSTQNAIDEITNKVNSVIEKMNTQFTAVGKEFNHLEKRIENLNKKVDDGFLDIWTYNAELLVLLENERTLDYHDSNVKNLYEKVRSQLKNNAKEIGNGCFEFYHKCDNTCMESVKNGTYDYPKYSEEAKLNREEIDGVKLESTRIYQILAIYSTVASSLVLVVSLGAISFWMCSNGSLQCRICI

SEQ ID NO: 7590 - protein, 566 aa, synthetic construct
  REGION 1..566: note = hemagglutinin__InfluenzaA__AEO01514
MKAILVVLLYTFATANADTLCIGYHANNSTDTVDTVLEKNVTVTHSVNLLEDMHNGKLCKLRGVAPLHLGKCNIAGWILGNPECESLSTASSWSYIVETSSSDNGTCYPGDFIDYEELREQLSSVSSFERFEIFPKTSSWPNHDSNKGVTAACPHAGAKSFYKNLIWLVKKGNSYPKLSKSYINDKGKEVLVLWGIHHPSTSADQQSLYQNADAYVFVGTSRYSKKFKPEIAIRPKVREQEGRMNYYWTLVEPGDKITFEATGNLVVPRYAFAMERNAGSGIIISDTPVHDCNTTCQTPKGAINTSLPFQNIHPITIGKCPKYVKSTKLRLATGLRNVPSIQSRGLFGAIAGFIEGGWTGMVDGWYGYHHQNEQGSGYAADLKSTQNAIDKITNKVNSVIEKMNTQFTAVGKEFNHLEKRIENLNKKVDDGFLDIWTYNAELLVLLENERTLDYHDSNVKNLYEKVRSQLKNNAKEIGNGCFEFYHKCDNTCMESVKNGTYDYPKYSEEAKLNREEIDGVKLESTRIYQILAIYSTVASSLVLVVSLGAISFWMCSNGSLQCRICI

SEQ ID NO: 7591 - protein, 566 aa, synthetic construct; identical to SEQ ID NO: 4856
  REGION 1..566: note = hemagglutinin__InfluenzaA__AEO01515

SEQ ID NO: 7592 - protein, 566 aa, synthetic construct; identical to SEQ ID NO: 7438
  REGION 1..566: note = hemagglutinin__InfluenzaA__AEO01516

SEQ ID NO: 7593 - protein, 566 aa, synthetic construct
  REGION 1..566: note = hemagglutinin__InfluenzaA__AEO01517
MKAILVVLLYTFATANADTLCIGYHANNSTDTVDTVLEKNVTVTHSVNLLEDKHNGKLCKLRGVAPLHLGKCNIAGWILGNPECESLSTASSWSYIVETSSSDNGTCYPGDFIDYEELREQLSSVSSFERFEIFPKTSSWPNHDSNKGVTAACPHAGAKSFYKNLIWLVKKENSYPKLSKSYINDKGKEVLVLWGIHHPSTSADQQSLYQNADAYVFVGTSRYSKKFKPEIAIRPKVRDQEGRMNYYWTLVEPGDKITFEATGNLVVPRYAFAMERNAGSGIIISDTPVHDCNTTCQTPEGAINTSLPFQNIHPITIGKCPKYVKSTKLRLATGLRNVPSIQSRGLFGAIAGFIEGGWTGMVDGWYGYHHQNEQGSGYAADLKSTQNAIDEITNKVNSVIEKMNTQFTAVGKEFNHLEKRIENLNKKVDDGFLDIWTYNAELLVLLENERTLDYHDSNVKNLYEKVRSQLKNNAKEIGNGCFEFYHKCDNTCMESVKNGTYDYPKYSEEAKLNREEIDGVKLESTRIYQILAIYSTVASSLVLVVSLGAISFWMCSNGSLQCRICI

SEQ ID NO: 7594 - protein, 566 aa, synthetic construct
  REGION 1..566: note = hemagglutinin__InfluenzaA__AEO01518
MKAILVVLLYTFATANADTLCIGYHANNSTDTVDTVLEKNVTVTHSVNLLEDKHNGKLCKLRGVAPLHLGKCNIAGWILGNPECESLSTASSWSYIVETSSSDNGTCYPGDFIDYEELREQLSSVSSFERFEIFPKTSSWPNHDSNKGVTAACPHAGAKSFYKNLIWIVKKGNSYPKLNKSYINDKGKEVLVLWGIHHPSTSADQQSLYQNADAYVFVGTSRYSKKFKPEIAIRPKVRDQEGRMNYYWTLVEPGDKITFEATGNLVVPRYAFAMERNAGSGIIISDTPVHDCNTTCQTPKGAINTSLPFQNIHPITIGECPKYVKSTKLRLATGLRNVPSIQSRGLFGAIAGFIEGGWTGMVDGWYGYHHQNEQGSGYAADLKSTQNAIDKITNKVNSVIEKMNTQFTAVGKEFNHLEKRIENLNKKVDDGFLDIWTYNAELLVLLENERTLDYHDSNVKNLYEKVRSQLKNNAKEIGNGCFEFYHKCDNTCMESVKNGTYDYPKYSEEAKLNREEIDGVKLESTRIYQILAIYSTVASSLVLVVSLGAISFWMCSNGSLQCRICI

SEQ ID NO: 7595 - protein, 566 aa, synthetic construct
  REGION 1..566: note = hemagglutinin__InfluenzaA__AEO01519
MKAILVVLLYTFATANADTLCIGYHANNSTDTVDTVLEKNVTVTHSVNLLEDKHNGKLCKLRGVAPLHLGKCNIAGWILGNPECESLSTASSWSYIVETSSSDNGTCYPGDFIDYEELREQLSSVSSFERFEIFPKTSSWPNHDSNKGVTAACPHAGAKSFYKNLIWLVKKGNSYPKLSKSYINDKGKEVLVLWGIHHPSTSADQQSLYQNADAYVFVGTSRYSKKFRPEIAIRPKVREQEGRMNYYWTLVEPGDKITFEATGNLVVPRYAFAMERNAGSGIIISDTPVHDCNTTCQTPKGAINTSLPFQNIHPITIGKCPKYVKSTKLRLATGLRNIPSIQSRGLFGAIAGFIEGGWTGMVDGWYGYHHQNEQGSGYAADLKSTQNAIDEITNKVNSVIEKMNTQFTAVGKEFNHLEKRIENLNKKVDDGFLDIWTYNAELLVLLENERTLDYHDSNVKNLYEKVRSQLKNNAKEIGNGCFEFYHKCDNTCMESVKNGTYDYPKYSEEAKLNREEIDGVKLESTRIYQILAIYSTVASSLVLVVSLGAISFWMCSNGSLQCRICI

SEQ ID NO: 7596 - protein, 566 aa, synthetic construct; identical to SEQ ID NO: 5574
  REGION 1..566: note = hemagglutinin__InfluenzaA__AEO01520

SEQ ID NO: 7597 - protein, 566 aa, synthetic construct; identical to SEQ ID NO: 4296
  REGION 1..566: note = hemagglutinin__InfluenzaA__AEO01521

SEQ ID NO: 7598 - protein, 566 aa, synthetic construct; identical to SEQ ID NO: 6088
  REGION 1..566: note = hemagglutinin__InfluenzaA__AEO01522

SEQ ID NO: 7599 - protein, 566 aa, synthetic construct; identical to SEQ ID NO: 3833
  REGION 1..566: note = hemagglutinin__InfluenzaA__AEO01523

SEQ ID NO: 7600 - protein, 566 aa, synthetic construct; identical to SEQ ID NO: 7427
  REGION 1..566: note = hemagglutinin__InfluenzaA__AEO01524

SEQ ID NO: 7601 - protein, 566 aa, synthetic construct
  REGION 1..566: note = hemagglutinin__InfluenzaA__AEO01525
MKAILVVLLYTFATANADTLCIGYHANNSTDTVDTVLEKNVTVTHSVNLLEDKHNGKLCKLRGVAPLHLGKCNIAGWILGNPECESLSTASSWSYIVETSSSGNGTCYPGDFIDYEELREQLSSVSSFERFEIFPKTSSWPNHDSNKGVTAACPHAGAKSFYKNLIWLVKKGNSYPRLSKSYINDKGKEVLVLWGIHHPSTSADQQSLYQNADAYVFVGTSRYSKKFKPEIAIRPKVRDQEGRMNYYWTLVEPGDKITFEATGNLVVPRYAFAMERNAGSGIIISDTPVHDCNTTCQTPKGAINTSLPFQNIHPITIGKCPKYVKSTKLRLATGLRNVPSIQSRGLFGAIAGFIEGGWTGMVDGWYGYHHQNEQGSGYAADLKSTQNAIDEITNKVNSVIEKMNTQFTAVGKEFNHLEKRIENLNKKVDDGFLDIWTYNAELLVLLENERTLDYHDSNVKNLYEKVRSQLKNNAKEIGNGCFEFYHKCDNTCMESVKNGTYDYPKYSEEAKLNREEIDGVKLESTRIYQILAIYSTVASSLVLVVSLGAISFWMCSNGSLQCRICI

SEQ ID NO: 7602 - protein, 566 aa, synthetic construct; identical to SEQ ID NO: 3833
  REGION 1..566: note = hemagglutinin__InfluenzaA__AEO01526

SEQ ID NO: 7603 - protein, 566 aa, synthetic construct; identical to SEQ ID NO: 6610
  REGION 1..566: note = hemagglutinin__InfluenzaA__AEO01527

SEQ ID NO: 7604 - protein, 566 aa, synthetic construct
  REGION 1..566: note = hemagglutinin__InfluenzaA__AEO01529
MKAILVVLLYTFATANADTLCIGYHANNSTDTVDTVLEKNVTVTHSVNILEDKHNGKLCKLRGVAPLHLGKCNIAGWILGNPECESLSTASSWSYIVETSSSDNGTCYPGDFIDYEELREQLSSVSSFERFEIFPKTSSWPNHDSNKGVTAACPHAGAKSFYKNLIWLVKKGNSYPKLSKSYINDKGKEVLVLWGIHHPSTSADQQSLYQNADAYVFVGSSRYSKKFKPEIAIRPKVRDQEGRMNYYWTLVEPGDKITFEATGNLVVPRYAFAMERNAGSGIIISDTPVHDCNTTCQTPKGAINTSLPFQNIHPITIGKCPKYVKSTKLRLATGLRNVPSIQSRGLFGAIAGFIEGGWTGMVDGWYGYHHQNEQGSGYAADLKSTQNAIDEITNKVNSVIEKMNTQFTAVGKEFNHLEKRIENLNKKVDDGFLDIWTYNAELLVLLENERTLDYHDSNVKNLYEKVRSQLKNNAKEVGNGCFEFYHKCDNTCMESVKNGTYDYPKYSEEAKLNREKIDGVKLESTRIYQILAIYSTAASSLVLVVSLGAISFWMCSNGSLQCRICI

SEQ ID NO: 7605 - protein, 566 aa, synthetic construct; identical to SEQ ID NO: 3833
  REGION 1..566: note = hemagglutinin__InfluenzaA__AEO01530

SEQ ID NO: 7606 - protein, 566 aa, synthetic construct
  REGION 1..566: note = hemagglutinin__InfluenzaA__AEO01531
MKAILVVLLYTFATANTDTLCIGYHANNSTDTVDTVLEKNVTVTHSVNLLEDKHNGKLCKLRGVAPLHLGKCNIAGWILGNPECESLSTASSWSYIVETSSSDNGTCYPGDFIDYEELREQLSSVSSFERFEIFPKTSSWPNHDSNKGVTAACPHAGAKSFYKNLIWLVKKGNSYPKLSKSYINDKGKEVLVLWGIHHPSTSADQQSLYQNADAYVFVGTSRYSKKFKPEIAIRPKVREQEGRMNYYWTLVEPGDKITFEATGNLVVPRYAFAMERNAGSGIIISDTPVHDCNTTCQTPKGAINTSLPFQNIHPITIGKCPKYVKSTKLRLATGLRNVPSIQSRGLFGAIAGFIEGGWTGMVDGWYGYHHQNEQGSGYAADLKSTQNAIDKITNKVNSVIEKMNTQFTAVGKEFNHLEKRIENLNKKVDDGFLDIWTYNAELLVLLENERTLDYHDSNVKNLYEKVRSQLKNNAKEIGNGCFEFYHKCDNTCMESVKNGTYDYPKYSEEAKLNREEIDGVKLESTRVYQILAIYSTVASSLVLVVSLGAISFWMCSNGSLQCRICI

SEQ ID NO: 7607 - protein, 566 aa, synthetic construct; identical to SEQ ID NO: 7438
  REGION 1..566: note = hemagglutinin__InfluenzaA__AEO01532

SEQ ID NO: 7608 - protein, 566 aa, synthetic construct
  REGION 1..566: note = hemagglutinin__InfluenzaA__AEO01533
MKAILVVLLYTFATANADTLCIGYHANNSTDTVDTVLEKNVTVTHSVDLLEDKHNGKLCKLRGVAPLHLGKCNIAGWILGNPECESLSTASSWSYIVETSSSDNGTCYPGDFIDYEELREQLSSVSSFERFEIFPKTSSWPNHDSNKGVTAACPHAGAKSFYKNLIWLVKKGNSYPKLSKSYINDKGKEVLVLWGIHHPSTSADQQSLYQNADAYVFVGTSRYSKKFKPEIAIRPKVRDQEGRMNYYWTLVEPGDKITFEATGNLVVPRYAFAMERNAGSGIIISDTPVHDCNTTCQTPKGAINTSLPFQNIHPITIGKCPKYVKSTKLRLATGLRNVPSIQSRGLFGAIAGFIEGGWTGMVDGWYGYHHQNEQGSGYAADLKSTQNAIDEITNKVNSVIEKMNTQFTAVGKEFNHLEKRIENLNKKVDDGFLDIWTYNAELLVLLENERTLDYHDSNVKNLYEKVRSQLKNNAKEIGNGCFEFYHKCDNTCMESVKNGTYDYPKYSEEAKLNREEIDGVKLESTRIYQILAIYSTVASSLVLVVSLGAISFWMCSNGSLQCRICI

SEQ ID NO: 7609 - protein, 566 aa, synthetic construct
  REGION 1..566: note = hemagglutinin__InfluenzaA__AEO01534
MKAILVVLLYTFATANADTLCIGYHANNSTDTVDTVLEKNVTVTHSVNLLEDKHNGKLCKLRGVAPLHLGKCNIAGWILGNPECESLSTARSWSYIVETSSSDNGTCYPGDFIDYEELREQLSSVSSFERFEIFPKTSSWPNHDSNKGVTAACPHAGAKSFYKNLIWLVKKGNSYPKLSKSYINDKGKEVLVLWGIHHPSTSADQQSLYQNADAYVFVGTSRYSKKFKPEIAIRPKVRDQEGRMNYYWTLVEPGDKITFEATGNLVVPRYAFAMERNAGSGIIISDTPVHDCNTTCQTPKGAINTSLPFQNIHPITIGKCPKYVKSTKLRLATGLRNVPSIQSRGLFGAIAGFIEGGWTGMVDGWYGYHHQNEQGSGYAADLKSTQHAIDEITNKVNSVIEKMNTQFTAVGKEFNHLEKRIENLNKKVDDGFLDIWTYNAELLVLLENERTLDYHDSNVKNLYEKVRSQLKNNAKEIGNGCFEFYHKCDNTCMESVKNGTYDYPKYSEEAKLNREEIDGVKLESTRIYQILAIYSTVASSLVLVVSLGAISFWMCSNGSLQCRICI

SEQ ID NO: 7610 - protein, 566 aa, synthetic construct; identical to SEQ ID NO: 4318
  REGION 1..566: note = hemagglutinin__InfluenzaA__AEO01535

SEQ ID NO: 7611 - protein, 566 aa, synthetic construct; identical to SEQ ID NO: 3833
  REGION 1..566: note = hemagglutinin__InfluenzaA__AEO01536

SEQ ID NO: 7612 - protein, 566 aa, synthetic construct; identical to SEQ ID NO: 5574
  REGION 1..566: note = hemagglutinin__InfluenzaA__AEO01537

SEQ ID NO: 7613 - protein, 566 aa, synthetic construct
  REGION 1..566: note = hemagglutinin__InfluenzaA__AEO01538
MKAILVVLLYTFATANADTLCIGYHANNSTDTVDTVLEKNVTVTHSVNLLEDKHNGKLCKLGGVAPLHLGKCNIAGWILGNPECESLSTASSWSYIVETSSSDNGTCYPGDFIDYEELREQLSSVSSFERFEIFPKTSSWPNHDSNKGVTAACPHAGAKSFYKNLIWLVKKGNSYPKLSKSYINDKGKEVLVLWGIHHPSTSADQQSLYQNADAYVFVGTSRYSKKFKPEIAIRPKVRDQEGRMNYYWTLVEPGDKITFEATGNLVVPRYAFAMERNAGSGIIISDTPVHDCNTTCQTPKGAINTSLPFQNIHPITIGKCPKYVKSTKLRLATGLRNVPSIQSRGLFGAIAGFIEGGWTGMVDGWYGYHHQNEQGSGYAADLKSTQNAIDEITNKVNSVIEKMNTQFTAVGKEFNHLEKRIENLNKKVDDGFLDIWTYNAELLVLLENERTLDYHDSNVKNLYEKVRSQLKNNAKEIGNGCFEFYHKCDNTCMESVKNGTYDYPKYSEEAKLNREEIDGVKLESTRIYQILAIYSTVASSLVLVVSLGAISFWMCSNGSLQCRICI

SEQ ID NO: 7614 - protein, 566 aa, synthetic construct; identical to SEQ ID NO: 4296
  REGION 1..566: note = hemagglutinin__InfluenzaA__AEO01539

SEQ ID NO: 7615 - protein, 566 aa, synthetic construct
  REGION 1..566: note = hemagglutinin__InfluenzaA__AEO01540
MKAILVVLLYTFAIANADTLCIGYHANNSTDTVDTVLEKNVTVTHSVNLLEDKHNEKLCKLRGVAPLHLGKCNIAGWILGNPECESLSTASSWSYIVETSSSDNGTCYPGDFIDYEELREQLSSVSSFERFEIFPKTSSWPNHDSNKGVTAACPHAGAKSFYKNLIWLVKKGNSYPKLSKSYINDKGKEVLVLWGIHHPSTSADQQSLYQNADAYVFVGTSRYSKKFKPEIAIRPKVRDQEGRMNYYWTLVEPGDKITFEATGNLVVPRYAFAMERNAGSGIIISDTPVHDCNTTCQTPKGAINTSLPFQNIHPITIGKCPKYVKSTKLRLATGLRNVPSIQSRGLFGAIAGFIEGGWTGMVDGWYGYHHQNEQGSGYAADLKSTQHAIDEITNKVNSVIEKMNTQFTAVGKEFNHLEKRIENLNKKVDDGFLDIWTYNAELLVLLENERTLDYHDSNVKNLYEKVRSQLKNNAKEIGNGCFEFYHKCDNTCMESVKNGTYDYPKYSEEAKLNREEINGVKLESTRIYQILAIYSTVASSLVLVVSLGAISFWMCSNGSLQCRICI

SEQ ID NO: 7616 - protein, 566 aa, synthetic construct; identical to SEQ ID NO: 4089
  REGION 1..566: note = hemagglutinin__InfluenzaA__AEO01541

SEQ ID NO: 7617 - protein, 566 aa, synthetic construct; identical to SEQ ID NO: 3833
  REGION 1..566: note = hemagglutinin__InfluenzaA__AEO01542

SEQ ID NO: 7618 - protein, 566 aa, synthetic construct; identical to SEQ ID NO: 3770
  REGION 1..566: note = hemagglutinin__InfluenzaA__AEO01543

SEQ ID NO: 7619 - protein, 566 aa, synthetic construct; identical to SEQ ID NO: 3770
  REGION 1..566: note = hemagglutinin__InfluenzaA__AEO01544

SEQ ID NO: 7620 - protein, 566 aa, synthetic construct
  REGION 1..566: note = hemagglutinin__InfluenzaA__AEO01545
MKAILVVLLYTFATANADTLCIGYHANNSTDTVDTVLEKNVTVTHSVNLLEDKHSGKLCKLRGVAPLHLGKCNIAGWILGNPECESLSTASSWSYIVETSSSDNGTCYPGDFVDYEELREQLSSVSSFERFEIFPKTSSWPNHDSNKGVTAACPHAGAKSFYKNLIWLVKKGNSYPKLSKSYINDKGKEVLVLWGIHHPSTSADQQSLYQNADAYVFVGTSRYSKKFKPEIAIRPKVRDQEGRMNYYWTLVEPGDKITFEATGNLVVPRYAFAMERNAGSGIIISDTPVHDCNTTCQTPKGAINTSLPFQNIHPITIGKCPKYVKSTKLRLATGLRNVPSIQSRGLFGAIAGFIEGGWTGMVDGWYGYHHQNEQGSGYAADLKSTQNAIDKITNKVNSVIEKMNTQFTAVGKEFNHLEKRIENLNKKVDDGFLDIWTYNAELLVLLENERTLDYHDSNVKNLYEKVRSQLKNNAKEIGNGCFEFYHKCDNTCMESVKNGTYDYPKYSEEAKLNREEIDGVKLESTRIYQILAIYSTVASSLVLVVSLGAISFWMCSNGSLQCRICI

SEQ ID NO: 7621 - protein, 566 aa, synthetic construct; identical to SEQ ID NO: 2656
  REGION 1..566: note = hemagglutinin__InfluenzaA__AEO01546

SEQ ID NO: 7622 - protein, 566 aa, synthetic construct; identical to SEQ ID NO: 2656
  REGION 1..566: note = hemagglutinin__InfluenzaA__AEO01547

SEQ ID NO: 7623 - protein, 566 aa, synthetic construct; identical to SEQ ID NO: 2849
  REGION 1..566: note = hemagglutinin__InfluenzaA__AEO01548

SEQ ID NO: 7624 - protein, 566 aa, synthetic construct; identical to SEQ ID NO: 2760
  REGION 1..566: note = hemagglutinin__InfluenzaA__AEO01549

SEQ ID NO: 7625 - protein, 566 aa, synthetic construct; identical to SEQ ID NO: 2669
  REGION 1..566: note = hemagglutinin__InfluenzaA__AEO01550

SEQ ID NO: 7626 - protein, 566 aa, synthetic construct; identical to SEQ ID NO: 2669
  REGION 1..566: note = hemagglutinin__InfluenzaA__AEO01551

SEQ ID NO: 7627 - protein, 566 aa, synthetic construct; identical to SEQ ID NO: 2669
  REGION 1..566: note = hemagglutinin__InfluenzaA__AEO01552

SEQ ID NO: 7628 - protein, 566 aa, synthetic construct; identical to SEQ ID NO: 2669
  REGION 1..566: note = hemagglutinin__InfluenzaA__AEO01553

SEQ ID NO: 7629 - protein, 566 aa, synthetic construct; identical to SEQ ID NO: 2669
  REGION 1..566: note = hemagglutinin__InfluenzaA__AEO01554

SEQ ID NO: 7630 - protein, 566 aa, synthetic construct; identical to SEQ ID NO: 2849
  REGION 1..566: note = hemagglutinin__InfluenzaA__AEO01555

SEQ ID NO: 7631 - protein, 566 aa, synthetic construct; identical to SEQ ID NO: 2669
  REGION 1..566: note = hemagglutinin__InfluenzaA__AEO01557

SEQ ID NO: 7632 - protein, 566 aa, synthetic construct; identical to SEQ ID NO: 2669
  REGION 1..566: note = hemagglutinin__InfluenzaA__AEO01558

SEQ ID NO: 7633 - protein, 566 aa, synthetic construct
  REGION 1..566: note = hemagglutinin__InfluenzaA__AEO01559
MKAILVVLLYTFATANADTLCIGYHANNSTDTVDTVLEKNVTVTHSVNLLEDKHNGKLCKLRGVAPLHLGKCNIAGWILGNPECESLSTASSWSYIVETSSSDNGTCYPGDFIDYEELREQLSSVSSFERFEIFPKTSSWPNHDSNKGVTAACPHAGAKSFYKNLIWLVKKGNSYPKLSKSYINDKGKEVLVLWGIHHPSTSADQQSLYQNADAYVFVGTSRYSKKFKPEIAIRPKVRDQEGRMNYYWTLVEPGDKITFEATGNLVVPRYAFAMERNAGSGIIISDTPVQDCNTTCQTPKGAINTSLPFQNIHPITIGKCPKYVKSTKLRLATGLRNVPSIQSRGLFGAIAGFIEGGWTGMVDGWYGYHHQNEQGSGYAADLKSTQNAIDEITNKVNSVIEKMNTQFTAVGKEFNHLEKRIENLNKKVDDGFLDIWTYNAELLVLLENERTLDYHDSNVKNLYEKVRSQLKNNAKEIGNGCFEFYHKCDNTCMESVKNGTYDYPKYSEEAKLNREEIDGVKLESTRIYQILAIYSTVASSLVLVVSLGAISFWMCSNGSLQCRICI

SEQ ID NO: 7634 - protein, 566 aa, synthetic construct; identical to SEQ ID NO: 2669
  REGION 1..566: note = hemagglutinin__InfluenzaA__AEO01560

SEQ ID NO: 7635 - protein, 566 aa, synthetic construct; identical to SEQ ID NO: 2669
  REGION 1..566: note = hemagglutinin__InfluenzaA__AEO01561

SEQ ID NO: 7636 - protein, 566 aa, synthetic construct; identical to SEQ ID NO: 2669
  REGION 1..566: note = hemagglutinin__InfluenzaA__AEO01562

SEQ ID NO: 7637 - protein, 566 aa, synthetic construct; identical to SEQ ID NO: 2669
  REGION 1..566: note = hemagglutinin__InfluenzaA__AEO01563

SEQ ID NO: 7638 - protein, 566 aa, synthetic construct; identical to SEQ ID NO: 2669
  REGION 1..566: note = hemagglutinin__InfluenzaA__AEO01564

SEQ ID NO: 7639 - protein, 566 aa, synthetic construct; identical to SEQ ID NO: 2669
  REGION 1..566: note = hemagglutinin__InfluenzaA__AEO01565

SEQ ID NO: 7640 - protein, 566 aa, synthetic construct; identical to SEQ ID NO: 2656
  REGION 1..566: note = hemagglutinin__InfluenzaA__AEO01566

SEQ ID NO: 7641 - protein, 566 aa, synthetic construct; identical to SEQ ID NO: 2911
  REGION 1..566: note = hemagglutinin__InfluenzaA__AEO01567

SEQ ID NO: 7642 - protein, 566 aa, synthetic construct; identical to SEQ ID NO: 2851
  REGION 1..566: note = hemagglutinin__InfluenzaA__AEO01568

SEQ ID NO: 7643 - protein, 566 aa, synthetic construct; identical to SEQ ID NO: 2851
  REGION 1..566: note = hemagglutinin__InfluenzaA__AEO01569

SEQ ID NO: 7644 - protein, 566 aa, synthetic construct; identical to SEQ ID NO: 2911
  REGION 1..566: note = hemagglutinin__InfluenzaA__AEO01570

SEQ ID NO: 7645 - protein, 566 aa, synthetic construct; identical to SEQ ID NO: 2851
  REGION 1..566: note = hemagglutinin__InfluenzaA__AEO01571

SEQ ID NO: 7646 - protein, 566 aa, synthetic construct; identical to SEQ ID NO: 2911
  REGION 1..566: note = hemagglutinin__InfluenzaA__AEO01572

SEQ ID NO: 7647 - protein, 566 aa, synthetic construct; identical to SEQ ID NO: 2656
  REGION 1..566: note = hemagglutinin__InfluenzaA__AEO01573

SEQ ID NO: 7648 - protein, 566 aa, synthetic construct; identical to SEQ ID NO: 2669
  REGION 1..566: note = hemagglutinin__InfluenzaA__AEO01574

SEQ ID NO: 7649 - protein, 566 aa, synthetic construct; identical to SEQ ID NO: 2656
  REGION 1..566: note = hemagglutinin__InfluenzaA__AEO01575

SEQ ID NO: 7650 - protein, 566 aa, synthetic construct; identical to SEQ ID NO: 2656
  REGION 1..566: note = hemagglutinin__InfluenzaA__AEO01576

SEQ ID NO: 7651 - protein, 566 aa, synthetic construct; identical to SEQ ID NO: 2656
  REGION 1..566: note = hemagglutinin__InfluenzaA__AEO01577

SEQ ID NO: 7652 - protein, 566 aa, synthetic construct; identical to SEQ ID NO: 2911
  REGION 1..566: note = hemagglutinin__InfluenzaA__AEO01578

SEQ ID NO: 7653 - protein, 566 aa, synthetic construct; identical to SEQ ID NO: 2911
  REGION 1..566: note = hemagglutinin__InfluenzaA__AEO01579

SEQ ID NO: 7654 - protein, 566 aa, synthetic construct; identical to SEQ ID NO: 2656
  REGION 1..566: note = hemagglutinin__InfluenzaA__AEO01581

SEQ ID NO: 7655 - protein, 566 aa, synthetic construct; identical to SEQ ID NO: 2656
  REGION 1..566: note = hemagglutinin__InfluenzaA__AEO01582

SEQ ID NO: 7656 - protein, 566 aa, synthetic construct; identical to SEQ ID NO: 2656
  REGION 1..566: note = hemagglutinin__InfluenzaA__AEO01583

SEQ ID NO: 7657 - protein, 566 aa, synthetic construct; identical to SEQ ID NO: 2656
  REGION 1..566: note = hemagglutinin__InfluenzaA__AEO01584

SEQ ID NO: 7658 - protein, 566 aa, synthetic construct; identical to SEQ ID NO: 2656
  REGION 1..566: note = hemagglutinin__InfluenzaA__AEO01585

SEQ ID NO: 7659 - protein, 566 aa, synthetic construct; identical to SEQ ID NO: 2656
  REGION 1..566: note = hemagglutinin__InfluenzaA__AEO01586

SEQ ID NO: 7660 - protein, 566 aa, synthetic construct; identical to SEQ ID NO: 2656
  REGION 1..566: note = hemagglutinin__InfluenzaA__AEO01587

SEQ ID NO: 7661 - protein, 566 aa, synthetic construct; identical to SEQ ID NO: 2656
  REGION 1..566: note = hemagglutinin__InfluenzaA__AEO01588

SEQ ID NO: 7662 - protein, 566 aa, synthetic construct; identical to SEQ ID NO: 2669
  REGION 1..566: note = hemagglutinin__InfluenzaA__AEO01589

SEQ ID NO: 7663 - protein, 566 aa, synthetic construct; identical to SEQ ID NO: 2669
  REGION 1..566: note = hemagglutinin__InfluenzaA__AEO01590

SEQ ID NO: 7664 - protein, 566 aa, synthetic construct; identical to SEQ ID NO: 2669
  REGION 1..566: note = hemagglutinin__InfluenzaA__AEO01591

SEQ ID NO: 7665 - protein, 566 aa, synthetic construct; identical to SEQ ID NO: 2656
  REGION 1..566: note = hemagglutinin__InfluenzaA__AEO01592

SEQ ID NO: 7666 - protein, 566 aa, synthetic construct; identical to SEQ ID NO: 2669
  REGION 1..566: note = hemagglutinin__InfluenzaA__AEO01593

SEQ ID NO: 7667 - protein, 566 aa, synthetic construct; identical to SEQ ID NO: 2656
  REGION 1..566: note = hemagglutinin__InfluenzaA__AEO01594

SEQ ID NO: 7668 - protein, 566 aa, synthetic construct; identical to SEQ ID NO: 2656
  REGION 1..566: note = hemagglutinin__InfluenzaA__AEO01595

SEQ ID NO: 7669 - protein, 566 aa, synthetic construct; identical to SEQ ID NO: 2849
  REGION 1..566: note = hemagglutinin__InfluenzaA__AEO01596

SEQ ID NO: 7670 - protein, 566 aa, synthetic construct; identical to SEQ ID NO: 2669
  REGION 1..566: note = hemagglutinin__InfluenzaA__AEO01597

SEQ ID NO: 7671 - protein, 566 aa, synthetic construct
  REGION 1..566: note = hemagglutinin__InfluenzaA__AEO01598
MKAILVVLLYTFATANADTLCIGYHANNSTDTVDTVLEKNVTVTHSVNLLEDKHNGKLCKLRGVAPLHLGKCNIAGWILGNPECESLSTASSWSYIVETSSSDNGTCYPGDFIDYEELREQLSSVSSFERFEMFPKTSSWPNHDSNNGVTAACPHAGAKSFYKNLIWLVKKGNSYPKLSKSYINDKGKEVLVLWGIHHPSTSADQQSLYQNADAYVFVGSSRYSKKFKPEIAIRPKVRDQEGRMNYYWTLVEPGDKITFEATGNLVVPRYAFAMERNAGSGIIISDTPVHDCNTTCQTPKGAINTSLPFQNIHPITIGKCPKYVKSTKLRLATGLRNVPSIQSRGLFGAIAGFIEGGWTGMVDGWYGYHHQNEQGSGYAADLKSTQNAIDEITNKVNSVIEKMNTQFTAVGKEFNHLEKRIENLNKKVDDGFLDIWTYNAELLVLLENERTLDYHDSNVKNLYEKVRSQLKNNAKEIGNGCFEFYHKCDNTCMESVKNGTYDYPKYSEEAKLNREEIDGVKLESTRIYQILAIYSTVASSLVLVVSLGAISFWMCSNGSLQCRICI

SEQ ID NO: 7672 - protein, 566 aa, synthetic construct; identical to SEQ ID NO: 2669
  REGION 1..566: note = hemagglutinin__InfluenzaA__AEO01599

SEQ ID NO: 7673 - protein, 566 aa, synthetic construct; identical to SEQ ID NO: 2669
  REGION 1..566: note = hemagglutinin__InfluenzaA__AEO01600

SEQ ID NO: 7674 - protein, 566 aa, synthetic construct; identical to SEQ ID NO: 2669
  REGION 1..566: note = hemagglutinin__InfluenzaA__AEO01601

SEQ ID NO: 7675 - protein, 566 aa, synthetic construct; identical to SEQ ID NO: 2669
  REGION 1..566: note = hemagglutinin__InfluenzaA__AEO01602

SEQ ID NO: 7676 - protein, 566 aa, synthetic construct; identical to SEQ ID NO: 2669
  REGION 1..566: note = hemagglutinin__InfluenzaA__AEO01603

SEQ ID NO: 7677 - protein, 566 aa, synthetic construct; identical to SEQ ID NO: 2669
  REGION 1..566: note = hemagglutinin__InfluenzaA__AEO01604

SEQ ID NO: 7678 - protein, 566 aa, synthetic construct; identical to SEQ ID NO: 2669
  REGION 1..566: note = hemagglutinin__InfluenzaA__AEO01605

SEQ ID NO: 7679 - protein, 566 aa, synthetic construct
  REGION 1..566: note = hemagglutinin__InfluenzaA__AEO01606
MKAILVVLLYTFATANADTLCIGYHANNSTDTVDTVLEKNVTVTHSVNLLEDKHNGKLCKLRGVAPLHLGKCNIAGWILGNPECESLSTASSWSYIVETSSSDNGTCYPGDFIDYEELREQLSSVSSFERFEIFPKTSSWPNHDSNKGVTAACPHAGAKSFYKNLIWLVKKGNSYPKLSKSYINDKGKEVLVLWGIHHPSTSADQQSLYQNADAYVFVGTSRYSKKFKPEIAIRPKVRDQEGRMNYYWTLVEPGDKITFEATGNLVVPRYAFAMERNAGSGIIISDTPVHDCNTTCQTPKGAINTSLPFQNIHPITIGKCPKYVKSTKLRLATGLRNVPSIQSRGLFGAIAGFIEGGWTGMVDGWYGYHHQNEQGSGYAADLKSTQNAIDEITNKVNSVIEKMNTQFTAVGKEFNHLEKRIENLNKKVDDGFLDIWTYNAELLVLLENERTLDYHDSNVKNLYEKVKSQLKNNAKEIGNGCFEFYHKCDNTCMESVKNGTYDYPKYSEEAKLNREEIDGVKLESTRIYQILAIYSTVASSLVLVVSLGAISFWMCSNGSLQCRICI

SEQ ID NO: 7680 - protein, 566 aa, synthetic construct; identical to SEQ ID NO: 2911
  REGION 1..566: note = hemagglutinin__InfluenzaA__AEO01607

SEQ ID NO: 7681 - protein, 566 aa, synthetic construct; identical to SEQ ID NO: 5574
  REGION 1..566: note = hemagglutinin__InfluenzaA__AEO01608

SEQ ID NO: 7682 - protein, 566 aa, synthetic construct; identical to SEQ ID NO: 7434
  REGION 1..566: note = hemagglutinin__InfluenzaA__AEO01609

SEQ ID NO: 7683 - protein, 566 aa, synthetic construct
  REGION 1..566: note = hemagglutinin__InfluenzaA__AEO01610
MKAILVVLLYTFATTNADTLCIGYHANNSTDTVDTVLEKNVTVTHSVNLLEDKHNGKLCKLRGVAPLHLGKCNIAGWILGNPECESLSTASSWSYIVETSSSDNGTCYPGDFIDYEELREQLSSVSSFERFEIFPKTSSWPNHDSNKGVTAACPHAGAKSFYKNLIWLVKKGNSYPKLSKSYINDKGKEVLVLWGIHHPSTSADQQSLYQNADAYVFVGTSRYSKKFKPEIAIRPKVRDQEGRMNYYWTLVEPGDKITFEATGNLVVPRYAFAMERNAGSGIIISDTPVHDCNTTCQTPKGAINTSLPFQNIHPITIGKCPKYVKSTKLRLATGLRNVPSIQSRGLFGAIAGFIEGGWTGMVDGWYGYHHQNEQGSGYAADLKSTQHAIDEITNKVNSVIEKMNTQFTAVGKEFNHLEKRIENLNKKVDDGFLDIWTYNAELLVLLENERTLDYHDSNVKNLYEKVRSQLKNNAKEIGNGCFEFYHKCDNTCMESVKNGTYDYPKYSEEAKLNREEIDGVKLESTRIYQILAIYSTVASSLVLVVSLGAISFWMCSNGSLQCRVCI

SEQ ID NO: 7684 - protein, 566 aa, synthetic construct
  REGION 1..566: note = hemagglutinin__InfluenzaA__AEO01611
MKAILVVLLYTFATANADTLCIGYHANNSTDTVDTVLEKNVTVTHSVNLLEDKHNGKLCKLRGVAPLHLGKCNIAGWILGNPECESLSTASSWSYIVETSSSDNGTCYPGDFIDYEELREQLSSVSSFERFEIFPKTSSWPNHDSNKGVTAACPHAGAKSFYKNLIWLVKKGNSYPKLSKSYINDKGREVLVLWGIHHPSTSADQQSLYQNADAYVFVGTSRYSKKFKPEIAIRPKVRDQEGRMNYYWTLVEPGDKITFEATGNLVVPRYAFAMERNAGSGIIISDTPVHDCNTTCQTPKGAINTSLPFQNIHPITIGECPKYVKSTKLRLATGLRNVPSIQSRGLFGAIAGFIEGGWTGMVDGWYGYHHQNEQGSGYAADLKSTQNAIDKITNKVNSVIEKMNTQFTAVGKEFNHLEKRIENLNKKVDDGFLDIWTYNAELLVLLENERTLDYHDSNVKNLYEKVRSQLKNNAKEIGNGCFEFYHKCDNTCMESVKNGTYDYPKYSEEAKLNREEIDGVKLESTRIYQILAIYSTAASSLVLVVSLGAISFWMCSNGSLQCRICI

SEQ ID NO: 7685 - protein, 566 aa, synthetic construct
  REGION 1..566: note = hemagglutinin__InfluenzaA__AEO01612
MKAILVVLLYTFATANADTLCIGYHANNSTDTVDTVLEKNVTVTHSVNLLEDKHNGKLCKLRGVAPLHLGKCNIAGWILGNPECESLSTASSWSYIVETSSSDNGTCYPGDFIDYEELREQLSSVSSFERFEIFPKTSSWPNHDSNKGATAACPHAGAKSFYKNLIWLVKKGNSYPKLSKSYINDKGKEVLVLWGIHHPSTSADQQSLYQNADAYVFVGTSRYSKKFKPEIAIRPKVRDQEGRMNYYWTLVEPGDKITFEATGNLVVPRYAFAMERNAGSGIIISDTPVHDCNTTCQTPKGAINTSLPFQNIHPITIGKCPKYVKSTKLRLATGLRNVPSIQSRGLFGAIAGFIEGGWTGMVDGWYGYHHQNEQGSGYAADLKSTQNAIDEITNKVNSVIEKMNTQFTAVGKEFNHLEKRIENLNKKVDDGFLDIWTYNAELLVLLENERTLDYHDSNVKNLYEKVRSQLKNNAKEIGNGCFEFYHKCDNTCMESVKNGTYDYPKYSEEAKLNREEIDGVKLESTRIYQILAIYSTVASSLVLVVSLGAISFWMCSNGSLQCRICI

SEQ ID NO: 7686 - protein, 566 aa, synthetic construct; identical to SEQ ID NO: 5266
  REGION 1..566: note = hemagglutinin__InfluenzaA__AEO01613

SEQ ID NO: 7687 - protein, 566 aa, synthetic construct
  REGION 1..566: note = hemagglutinin__InfluenzaA__AEO01614
MKAILVVLLYTFATANADTLCIGYHANNSTDTVDTVLEKNVTVTHSVNLLEDKHNGKLCKLKGVAPLHLGKCNIAGWILGNPECESLSTASSWSYIVETSSSDNGTCYPGDFIDYEELREQLSSVSSFERFEIFPKTSSWPNHDSNKGVTAACPHAGAKSFYKNLIWLVKKGNSYPKLSKSYINDKGKEVLVLWGIHHPSTSADQQSLYQNADAYVFVGTSRYSKKFKPEIAIRPKVRDQEGRMNYYWTLVEPGDKITFEATGNLVVPRYAFAMERNAGSGIIISDTPVHDCNTTCQTPKGAINTSLPFQNIHPITIGKCPKYVKSTKLRLATGLRNIPSIQSRGLFGAIAGFIEGGWTGMVDGWYGYHHQNEQGSGYAADLKSTQNAIDEITNKVNSVIEKMNTQFTAVGKEFNHLEKRIENLNKKVDDGFLDIWTYNAELLVLLENERTLDYHDSNVKNLYEKVRSQLKNNAKEIGNGCFEFYHKCDNTCMESVKNGTYDYPKYSEEAKLNREEIDGVKLESTRIYQILAIYSTVASSLVLVVSLGAISFWMCSNGSLQCRICI

SEQ ID NO: 7688 - protein, 566 aa, synthetic construct
  REGION 1..566: note = hemagglutinin__InfluenzaA__AEO01615
MKAILVVLLYTFATANADTLCIGYHANNSTDTVDTVLEKNVTVTHSVNLLEDKHNGKLCKLRGVAPLHLGKCNIAGWILGNPECESLSTASSWSYIVETSSSDNGTCYPGDFIDYEELREQLSSVSSFERFEIFPKTSSWPNHDSNKGVTAACPHAGAKSFYKNLIWLVKKGNSYPKLSKYYINDKGKEVLVLWGIHHPSTSADQQSLYQNADAYVFVGTSRYSKKFKPEIAIRPKVREQEGRMNYYWTLVEPGDKITFEATGNLVVPRYAFAMERNAGSGIIISDTPVHDCNTTCQTPKGAINTSLPFQNIHPITIGKCPKYVKSTKLRLATGLRNVPSIQSRGLFGAIAGFIEGGWTGMVDGWYGYHHQNEQGSGYAADLKSTQNAIDKITNKVNSVIEKMNTQFTAVGKEFNHLEKRIENLNKKVDDGFLDIWTYNAELLVLLENERTLDYHDSNVKNLYEKVRSQLKNNAKEIGNGCFEFYHKCDNTCMESVKNGTYDYPKYSEEAKLNREEIDGVKLESTRIYQILAIYSTVASSLVLVVSLGAISFWMCSNGSLQCRICI

SEQ ID NO: 7689 - protein, 566 aa, synthetic construct; identical to SEQ ID NO: 3022
  REGION 1..566: note = hemagglutinin__InfluenzaA__AEO01616

SEQ ID NO: 7690 - protein, 566 aa, synthetic construct; identical to SEQ ID NO: 3833
  REGION 1..566: note = hemagglutinin__InfluenzaA__AEO01617

SEQ ID NO: 7691 - protein, 566 aa, synthetic construct; identical to SEQ ID NO: 4266
  REGION 1..566: note = hemagglutinin__InfluenzaA__AEO01619

SEQ ID NO: 7692 - protein, 566 aa, synthetic construct; identical to SEQ ID NO: 7378
  REGION 1..566: note = hemagglutinin__InfluenzaA__AEO01620

SEQ ID NO: 7693 - protein, 566 aa, synthetic construct; identical to SEQ ID NO: 7525
  REGION 1..566: note = hemagglutinin__InfluenzaA__AEO01621

SEQ ID NO: 7694 - protein, 566 aa, synthetic construct
  REGION 1..566: note = hemagglutinin__InfluenzaA__AEO01625
MKTIIALSYILCLVSAQKLPGNDNSTATLCLGHHAVPNGTIVKTITNDQIEVTNATELVQSSSTGEICDSPHQVLDGENCTLIDALLGDPQCDGFQNKKWDLFVERSKAYSNCYPYDVPDYASLRSLVASSGTLEFNNESFNWTGVTQNGTSSACIRRSNNSFFSRLNWLTHSKFKYPALNVTMPNNEEFDKLYIWGVHHPGTDNDQIFLYAQASGRITVSTKRSQQTVIPNIGSRPRVRNIPSRISIYWTIVKPGDILLINSTGNLIAPRGYFKIRSGKSSIMRSDAPIGKCNSECITPNGSIPNDKPFQNVNRITYGACPRYVKQNTLKLATGMRNVPEKQTRGIFGAIAGFIENGWEGMVDGWYGFRHQNSEGIGQAADLKSTQAAIDQINGKLNRLIGKTNEKFHQIEKEFSEVEGRIQDLEKYVEDTKIDLWSYNAELLVALENQHTIDLTDSEMNKLFEKTKKQLRENAEDMGNGCFKIYHKCDNACIGSIRNGTYDHEVYRDEALNNRFQIKGVELKSGYKDWILWISFAISCFLLCVALLGFIMWACQKGNIRCNICI

SEQ ID NO: 7695 - protein, 566 aa, synthetic construct
  REGION 1..566: note = hemagglutinin__InfluenzaA__AEO01636
MKSIIALSYILCLVSAQKLPGNDNSTATLCLGHHAVPNGTIVKTITNDQIEVTNATELVQSSSTGEICDSPHQVLDGENCTLIDALLGDPQCDGFQNKKWDLFVERSKAYSNCYPYDVPDYASLRSLVASSGTLEFNNESFNWTGVTQNGTSSACIRRSNNSFFSRLNWLTHSKFKYPALNVTMPNNEEFDKLYIWGVHHPGTDNDQIFLYAQASGRITVSTKRSQQTVIPNIGSRPRVRNIPSRISIYWTIVKPGDILLINSTGNLIAPRGYFKIRSGKSSIMRSDAPIGKCNSECITPNGSIPNDKPFQNVNRITYGACPRYVKQNTLKLATGMRNVPEKQTRGIFGAIAGFIENGWEGMVDGWYGFRHQNSEGIGQAADLKSTQAAIDQINGKLNRLIGKTNEKFHQIEKEFSEVEGRIQDLEKYVEDTKIDLWSYNAELLVALENQHTIDLTDSEMNKLFEKTKKQLRENAEDMGNGCFKIYHKCDNACIGSIRNGTYDHDVYRDEALNNRFQIKGVELKSGYKDWILWISFAISCFLLCVALLGFIMWACQKGNIRCNICI

SEQ ID NO: 7696 - protein, 566 aa, synthetic construct
  REGION 1..566: note = hemagglutinin__InfluenzaA__AEO01642
MKTIIALSYILCLVSAQKLPGNDNSTATLCLGHHAVPNGTIVKTITNDQIEVTNATELVQSSSTGEICNSPHQILDGENCTLIDALLGDPQCDGFQNKKWDLFVERSKAYSNCYPYDVPDYASLRSLVASSGTLEFNNESFNWTGVTQNGTSSACIRRSNNSFFSRLNWLTHLKFKYPALNVTMPNNEEFDKLYIWGVHHPGTDNDQIFLYAQASGRITVSTKRSQQTVIPNIGSRPRVRNIPSRISIYWTIVKPGDILLINSTGNLIAPRGYFKIRSGKSSIMRSDAPIGKCNSKCITPNGSIPNDKPFQNVNRVTYGACPRYVKQNTLKLATGMRNVPEKQTRGIFGAIAGFIENGWEGMVDGWYGFRHQNSEGIGQAADLKSTQAAIDQINGKLNRLIGKTNEKFHQIEKEFSEVEGRIQDLEKYVEDTKIDLWSYNAELLVALENQHTIDLTDSEMNKLFEKTKKQLRENAEDMGNGCFKIYHKCDNACIGSIRNGTYDHDVYRDEALNNRFQIKGVELKSGYKDWILWISFAISCFLLCVALLGFIMWACQKGNIRCNICI

SEQ ID NO: 7697 - protein, 565 aa, synthetic construct
  REGION 1..565: note = hemagglutinin__InfluenzaA__AEO01663
MKVKLLVLLCTFAATYADTICIGYHANNSTDTVDTVLEKNVTVTHSVNLLENSHNGKLCLLKGIAPLQLGNCSVAGWILGNPECELLISKESWSYIVEKPNPENGTCYPGHFADYEELREQLSSVSSFERFEIFPKESSWPNHTVTGVSASCSHNGESSFYRNLLWLTGKNGLYPNLSKSYANNKEKEVLVLWGVHHPPNIGDQKALYHTENAYVSVVSSHYSRKFTPEIAKRPKVRDQEGRINYYWTLLEPGDTIIFEANGNLRAPRYAFALSRGFGSGIINSNAPMDKCDAKCQTPQGAINSSLPFQNVHPVPIGECPKYVRSAKLRMVTGLRNIPSIQSRGLFGAIAGFIEGGWTGMVDGWYGYHHQNEQGSGYAADQKSTQNAINGITNKVNSVIEKMNTQFTAVGKEFNKLERRMENLNKKVDDGFIDIWTYNAELLVLLENERTLDFHDSNVKNLYEKVKSQLKNNAKEIGNGCFEFYHKCNDECMESVKNGTYDYPKYSEESKLNREKIDGVRLESMGVYQILAIYSTVASSLVLLVSLGAISFWMCSNGSLQCRICI

SEQ ID NO: 7698 - protein, 565 aa, synthetic construct
  REGION 1..565: note = hemagglutinin__InfluenzaA__AEO01674
MKVKLLVLLCTFTATYADTICIGYHANNSTDTVDTVLEKNVTVTHSVNLLENSHNGKLCLLKGIAPLQLGNCSVAGWILGNPECELLISKESWSYIVEKPNPENGTCYPGHFADYEELREQLSSVSSFERFEIFPKESSWPNHTVTGVSASCSHNGESSFYRNLLWLTGKNGLYPNLSKSYANNKEKEVLVLWGVHHPPNIGDQKALYHTENAYVSVVSSHYSRKFTPEIAKRPKVRDQEGRINYYWTLLEPGDTIIFEANENLKAPRYAFALSRGFGSGIINSKAPMDKCDAKCQTPQGAINSSLPFQNVHPVTIGECPKYVRSAKLRMVTGLRNIPSIQSRGLFGAIAGFIEGGWTGMVDGWYGYHHQNEQGSGYAADQKSTQNAINGITNKVNSVIEKMNTQFTAVGKEFNKLERRMENLNKKVDDGFIDIWTYNAELLVLLENERTLDFHDSNVKNLYEKVKSQLKNNAKEIGNGCFEFYHKCNDECMESVKNGTYDYPKYSEESKLNREKIDGVRLESMGVYQILAIYSTVASSLVLLVSLGAISFWMCSNGSLQCRICI

SEQ ID NO: 7699 - protein, 566 aa, synthetic construct; identical to SEQ ID NO: 7694
  REGION 1..566: note = hemagglutinin__InfluenzaA__AEO01691

SEQ ID NO: 7700 - protein, 565 aa, synthetic construct
  REGION 1..565: note = hemagglutinin__InfluenzaA__AEO01699
MKVKLLVLLCTFTATYADTICIGYHANNSTDTVDTVLEKNVTVTHSVNLLENSHNGKLCLLKGIAPLQLGNCSVAGWILGNPECELLISKESWSYIVEKPNPENGTCYPGHFADYEELREQLSSVSSFERFEIFPKESSWPNHTVTGVSASCSHNGESSFYRNLLWLTGKNGLYPNLSKSYANNKEKEVLVLWGVHHPPNIGDQKALYHTENAYVSVVSSHYSRKFTPEIAKRPKVRDQEGRINYYWTLLEPRDTIIFEANGNLIAPRYAFALSRGFGSGIINSNAPMDKCDAKCQTPQGAINSSLPFQNVHPVTIGECPKYVRSAKLRMVTGLRNIPSIPSRGLFGAIAGFIEGGWTGMVDGWYGYHHQNEQGSGYAADQKSTQNAINGITNKVNSVIEKMNTQFTAVGKEFNKLERRMENLNKKVDDGFIDIWTYNAELLVLLENERTLDFHDSNVKNLYEKVKSQLKNNAKEIGNGCFEFYHKCNDECMESVKNGTYDYPKYSEESKLNREKIDGVKLESMGAYQILAIYSTGASSLVLLVSLGAISFWMCSNGSLQRRICI

SEQ ID NO: 7701 - protein, 565 aa, synthetic construct
  REGION 1..565: note = hemagglutinin__InfluenzaA__AEO01709
MKVKLLVLLCTFTATYADTICIGYHANNSTDTVDTVLEKNVTVTHSVNLLENSHNGKLCLLKGIAPLQLGNCSVAGWILGNPECELLISKESWSYIVEKPNPENGTCYPGHFADYEELREQLSSVSSFERFEIFPKESSWPNHTVTGVSASCSHNGESSFYRNLLWLTGKNGLYPNLSKSYANNKEKEVLVLWGVHHPPNIGDQKALYHTENAYVSVVSSHYSRKFTPEIAKRPKLRDQDGRINYYWTLLEPGDTTIFEANGNLIAPRYAFALSRGFGSGIINSNAPMDKCDAKCQTPQGAINSSLPFQNVHPVTIGECPKYVRSAKLRMVTGLRNIPSIQSRGLFGAIAGFIEGGWTGMVDGWYGYHHQNEQGSGYAADQKSTQNAINGITNKVNSVIEKMNTQFTAVGKEFNKLERRMENLNKKVDDGFIDIWTYNAELLVLLENERTLDFHDSNVKNLYEKVKSQLKNNAKEIGNGCFELYLKCNGECMESVKNGTYDYPKYSEESKLNREKIDGVKLESMGVYQILAIYSTVASSLVLLVSLGAISFWMCSNGSLQCRICI

SEQ ID NO: 7702 - protein, 566 aa, synthetic construct; identical to SEQ ID NO: 3833
  REGION 1..566: note = hemagglutinin__InfluenzaA__AEO37530

SEQ ID NO: 7703 - protein, 566 aa, synthetic construct
  REGION 1..566: note = hemagglutinin__InfluenzaA__AEO72176
MKAILVVLLYTFATANADTLCIGYHANNSTDTVDTVLEKNVTVTHSVNLLEDKHNGKLCKLRGVAPLHLGKCNIAGWILGNPECESLSTASSWSYIVETSSSDNGTCYPGDFIDYEELREQLSSVSSFERFEIFPKTSSWPNHDSNKGVTAACPHAGAKSFYKNLIWLVKKGNSYPKLSKSYINDKGKEVLVLWGIHHPSTTADQQSLYQNADTYVFVGTSRYSKKFKPEIAIRPKVRDQEGRMNYYWTLVEPGDKITFEATGNLVVPRYAFAMERNAGSGIIISDTPVHDCNTTCQTPKGAINTSLPFQNIHPITIGKCPKYVKSTKLRLATGLRNVPSIQSRGLFGAIAGFIEGGWTGMVDGWYGYHHQNEQGSGYAADLKSTQNAIDKITNKVNSVIEKMNTQFTAVGKEFNHLEKRIENLNKKVDDGFLDIWTYNAELLVLLENERTLDYHDSNVKNLYEKVRNQLKNNAKEIGNGCFEFYHKCDNTCMESVKNGTYDYPKYSEEAKLNREEIDGVKLESTRIYQILAIYSTVASSLVLAVSLGAISFWMCSNGSLQCRICI

SEQ ID NO: 7704 - protein, 567 aa, synthetic construct
  REGION 1..567: note = hemagglutinin__InfluenzaA__AEO88980
MEKIVLLLAIVSLVKSDQICIGYHANNSTEQVDTIMEKNVTVTHAQDILEKTHNGKLCDLDGVKPLILRDCSVAGWLLGNPMCDEFINVPEWSYIVEKANPANDLCYPGNFNDYEELKHLLSRINHFEKIQIIPKSSWSDHEASSGVSSACPYQGTPSFFRNVVWLIKKNNTYPTIKRSYNNTNQEDLLILWGIHHSNDAAEQTKLYQNPTTYISVGTSTLNQRLVPKIATRSKVNGQSGRMDFFWTILKPNDAINFESNGNFIAPEYAYKIVKKGDSAIMKSEVEYGNCNTKCQTPIGAINSSMPFHNIHPLTIGECPKYVKSNKLVLATGLRNSPLRERRRKRGLFGAIAGFIEGGWQGMVDGWYGYHHSNEQGSGYAADKESTQKAIDGVTNKVNSIIDKMNTQFEAVGREFNNLERRIENLNKKMEDGFLDVWTYNAELLVLMENERTLDFHDSNVKNLYDKVRLQLRDNAKELGNGCFEFYHKCDNECMESVRNGTYDYPQYSEEARLKREEISGVKLESIGTYQILSIYSTVASSLALAIMVAGLSLWMCSNGSLQCRICI

SEQ ID NO: 7705 - protein, 567 aa, synthetic construct
  REGION 1..567: note = hemagglutinin__InfluenzaA__AEO89021
MEKIVLLLAIVSLVKSDQICIGYHANNSTEQVDTIMEKNVTVTHAQDILEKTHNGKLCDLDGVKPLILRDCSVAGWLLGNPMCDEFINVPEWSYIVEKANPANDLCYPGNFNDYEELKHLLSRINHFEKIPIIPKSSWSDHEASSGVSSACPYQGTPSFFRNVVWLIKKNNTYPTIKRSYNNTNQEDLLILWGIHHSNNAAEQTKLYQNPTTYISVGTSTLNLRLVPKIATRSKVNGQSGRMDFFWTILKPNDAINFESNGNFIAPEYAYKIVKKGDSAIMKSEVEYGNCNTKCQTPIGAINSSMPFHNIHPLTIGECPKYVKSNKLVLATGLRNSPLRERRRKRGLFGAIAGFIEGGWQGMVDGWYGYHHSNEQGSGYAADKESTQKAIDGVTNKVNSIIDKMNTQFEAVGREFNNLERRIENLNKKMEDGFLDVWTYNAELLVLMENERTLDFHDSNVKNLYDKVRLQLRDNAKELGNGCFEFYHKCDNECMESVRNGTYDYPQYSEEARLKREEISGVKLESIGTYQILSIYSTVASSLALAIMVAGLSLWMCSNGSLQCRICI

SEQ ID NO: 7706 - protein, 567 aa, synthetic construct
  REGION 1..567: note = hemagglutinin__InfluenzaA__AEO89030
MEKIVLLLAIVSLVKSDQICIGYHANNSTEQVDTIMEKNVTVTHAQDILEKTHNGKLCDLDGVKPLILRDCSVAGWLLGNPMCDEFINVPEWSYIVEKANPANDLCYPGNFNDYEELKHLLSRINHFEKIQIIPKSSWSDHEASSGVSSVCPYQGTPSFFRNVVWLIKKNNTYPTIKRSYNNTNQEDLLILWGIHHSNDAAEQTKLYQNPTTYISVGTSTLNQRLVPKIATRSKVNGQSGRMDFFWTVLKPNDAINFESNGNFIAPEYAYKIVKKGDSAIMKSEVEYGNCNTKCQTPIGAINSSMPFHNIHPLTIGECPKYVKSNKLVLATGLRNSPLRERRRKRGLFGAIAGFIEGGWQGMVDGWYGYHHSNEQGSGYAADKESTQKAIDGVTNKVNSIIDKMNTQFEAVGREFNNLERRIENLNKKMEDGFLDVWTYNAELLVLMENERTLDFHDSNVKNLYDKVRLQLRDNAKELGNGCFEFYHKCDNECMESVRNGTYDYPQYSEEARLKREEISGVKLESIGTYQILSIYSTVASSLALAIMVAGLSLWMCSNGSLQCRICI

SEQ ID NO: 7707 - protein, 567 aa, synthetic construct
  REGION 1..567: note = hemagglutinin__InfluenzaA__AEO89048
MEKIVFLLAIVSLVKSDQICIGYHANNSTEQVDTIMEKNVTVTHAQDILEKTHNGKLCDLDGVKPLILRDCSVAGWLLGNPMCDEFINVPEWSYIVEKANPANDLCYPGNFNDYEELKHLLSRINHFEKIQIIPKSSWSDHEASSGVSSACPYQGTPSFFRNVIWLIKKNNTYPTIKRSYNNTNQEDLLILWGIHHSNDAAEQTKLYQNPTTYISVGTSTLNQRLVPKIATRSKVNGQSGRMDFFWTILKPNDAINFESNGNFIAPEYAYKIVKKGDSAILKSEVEYGNCNTKCQTPIGAINSSMPFHNIHPLTIGECPKYVKSNKLVLATGLRNSPLRERRRKRGLFGAIAGFIEGGWQGMVDGWYGYHHSNEQGSGYAADKESTQKAIDGVTNKVNSIIDKMNTQFEAVGREFNNLERRIENLNKKMEDGFLDVWTYNAELLVLMENERTLDFHDSNVKNLYDKVRLQLRDNAKELGNGCFEFYHKCDNECMESVRNGTYDYPQYSEEARLKREEISGVKLESIGTYQILSIYSTVASSLALAIMVAGLSLWMCSNGSLQCRICI

SEQ ID NO: 7708 - protein, 567 aa, synthetic construct
  REGION 1..567: note = hemagglutinin__InfluenzaA__AEO89065
MEKIVLLLAIVSLVKSDQICIGYHANNSTEQVDTIMEKNVTVTHAQDILEKTHNGKLCDLDGVKPLILRDCSVAGWLLGNPMCDEFINVPEWSYIVEKANPANDLCYPGNFNDYEELKHLLSRINHFEKIQIIPKSSWSDHEASSGVSSVCPYQGTPSFFRNVVWLIKKNNTYPTIKRSYNNTNQEDLLILWGIHHSNDAAEQTKLYQNPTTYISVGTSTLNLRLVPKIATRSKVNGQSGRMDFFWTILKPSDAINFESNGNFIAPEYAYKIVKKGDSAIMKSEVEYGNCNTKCQTPIGAINSSMPFHNIHPLTIGECPKYVKSNKLVLATGLRNSPLRERRRKRGLFGAIAGFIEGGWQGMVDGWYGYHHSNEQGSGYAADKESTQKAIDGVTNKVNSIIDKMNTQFEAVGREFNNLERRIENLNKKMEDGFLDVWTYNAELLVLMENERTLDFHDSNVKNLYDKVRLQLRDNAKELGNGCFEFYHKCDNECMESVRNGTYDYPQYSEEARLKREEISGVKLESIGTYQILSIYSTVASSLALAIMVAGLSLWMCSNGSLQCRICI

SEQ ID NO: 7709 - protein, 567 aa, synthetic construct
  REGION 1..567: note = hemagglutinin__InfluenzaA__AEO89082
MEKIVLLLAIVSLVKSDQICIGYHANNSTEQVDTIMEKNVTVTHAQDILEKTHNGKLCDLDGVKPLILRDCSVAGWLLGNPMCDEFINVPEWSYIVEKANPANDLCYPGNFNDYEELKHLLSRINHFEKIQIIPKSSWSDHDTSSGVSSACPYQGTPSFFRNVVWLIKKNNTYPTIKRSYNNTNKEDLLILWGIHHSNDAAEQTKLYQNPTTYISVGTSTLNQRLVPKIATRSKVNGQSGRMDFFWTILKPNDAINFESNGNFIAPEYAYKIVKKGDSAIMKSEVEYGNCNTKCQTPIGAINSSMPFHNIHPLTIGECPKYVKSNKLVLATGLRNSPLRERRRKRGLFGAIAGFIEGGWQGMVDGWYGYHHSNEQGSGYAADKESTQKAIDGVTNKVNSIIDKMNTQFEAVGREFNNLERRIENLNKKMEDGFLDVWTYNAELLVLMENERTLDFHDSNVKNLYDKVRLQLRDNAKELGNGCFEFYHKCDNECMESVRNGTYDYPQYSEEARLKREEISGVKLESIGTYQILSIYSTVASSLALAIMVAGLSLWMCSNGSLQCRICI

SEQ ID NO: 7710 - protein, 567 aa, synthetic construct
  REGION 1..567: note = hemagglutinin__InfluenzaA__AEO89091
MEKTVFLLAIVSLVKSDQICIGYHANNSTEQVDTIMEKNVTVTHAQNILEKTHNGKLCDIDGVKPLILKDCSVAGWLLGNPMCDEFINVPEWSYIVEKANPANDLCYPGNFNDYEELKHLLSRINHFEKIQIIPKSSWSDHEASSGVSSTCPYQGTPSFFRNVVWLIKKNNTYPTIKRSYNNTNQEDLLILWGIHHSNDEAEQAKLYQNPTTYISVGTSTLNQRLVPKIATRSKVNGQSGRMDFFWTILKPNDAINFESNGNFIAPEYAYKIVKKGDSAIMKSEVEYGNCNTKCQTPIGAINSSMPFHNIHPLTIGECPKYVKSNKLVLATGLRNSPLRERRRKRGLFGAIAGFIEGGWQGMVDGWYGYHHSNEQGSGYAADKESTQKAIDGVTNKVNSIIDKMNTQFEAVGREFNNLERRIENLNKKMEDGFLDVWTYNAELLVLMENERTLDFHDSNVKNLYDKVRLQLRDNAKELGNGCFEFYHKCDDECMESVRNGTYDYPQYSEEARLKREEISGVKLESIGTYQILSIYSTVASSLALAIMMAGLSLWMCSNGSLQCRICI

SEQ ID NO: 7711 - protein, 567 aa, synthetic construct
  REGION 1..567: note = hemagglutinin__InfluenzaA__AEO89100
MEKIVPFLAIISLVKSDQICIGYHANNSTEQVDTIMEKNVTVTHAQDILEKTHNGKLCDLDGVKPLILRDCSVAGWLLGNPMCDEFINVPEWSYIVEKANPANDLCYPGNFNDYEELKHLLSRINHFEKIQIIPKNSWSDHEASSGVSSACPYQGTPSFFRNVVWLIKKNNTYPTIKRSYNNTNQEDLLILWGIHHSNDAAEQTKLYQNPTTYISVGTSTLNQRLVPKIATRSKVNGQSGRMDFFWTILKPNDAINFESNGNFIAPEYAYKIVKKGDSAIMKSEVEYGNCNTKCQTPIGAINSSMPFHNIHPLTIGECPKYVKSNKLVLATGLRNSPLRERRRKRGLFGAIAGFIEGGWQGMVDGWYGFHHSNEQGSGYAADKESTQKAIDGVTNKVNSIIDKMNTQFEAVGREFNNLERRIENLNKKMEDGFLDVWTYNAELLVLMENERTLDFHDSNVKNLYDKVRLQLRDNAKELGNGCFEFYHKCDDECMESVKNGTYDYPQYSEEARLKREEISGVKLESIGTYQILSIYSTVASSLALAIMVAGLSLWMCSNGSLQCRICI

SEQ ID NO: 7712 - protein, 567 aa, synthetic construct
  REGION 1..567: note = hemagglutinin__InfluenzaA__AEO89109
MEKIVLLLAIVSLVKSDQICIGYHANNSTEQVDTIMEKNVTVTHAQDILEKTHNGKLCDLDGVKPLILRDCSVAGWLLGNPMCDEFINVPEWSYIVEKANPANDLCYPGNFNDYEELKHLLSRINHFEKIQIIPKSSWSDHEASSGVSSACPYQGTPSFFRNVVWLIKKNNTYPTIKRSYNNTNQENLLILWGIHHSNDAAEQIKLYQNPTTYISVGTSTLNQRLVTKIATRPKVNGQSGRMDFFWTILKPNDAINFESNGNFIAPEYAYKIVKEGDSAIMKSEVEYGNCNTKCQTPIGAINSSMPFHNIHPLTIGECPKYVKSNKLVLATGLRNSPLRERRRKRGLFGAIAGFIEGGWQGMVDGWYGYHHSNEQGSGYAADKESTQKAIDGVTNKVNSIIDKMNTQFEAVGREFNNLERRIENLNKKMEDGFLDVWTYNAELLVLMENERTLDFHDSNVKNLYDKVRLQLRDNAKELGNGCFEFYHKCDNECMESVRNGTYDYPQYSEEARLKREEISGVKLESIGTYQILSIYSTVASSLALAIMVAGLSLWMCSNGSLQCRICI

SEQ ID NO: 7713 - protein, 567 aa, synthetic construct
  REGION 1..567: note = hemagglutinin__InfluenzaA__AEO89127
MEKIVLLLAIISLVKSDQICIGYHANNSTEQVDTIMEKNVTVTHAQDILEKTHNGKLCDLDGVKPLILRDCSVAGWLLGNPMCDEFINVPEWSYIVEKANPANDLCYPGNFNDYEELKHLLSRINHFEKIQIIPKSSWSDHEASSGVSSACPYQGTPSFFRNVVWLIKKNNTYPTIKRSYNNTNQENLLILWGIHHSNDAAEQIKLYQNPTTYISVGTSTLNQRLVPKIATRSKVNGQSGRMDFFWTILKPNDAINFESNGNFIAPEYAYKIVKEGDSAIMKSEVEYGNCNTKCQTPIGAINSSMPFHNIHPLTIGECPKYVKSNKLVLATGLRNSPLRERRRRRGLFGAIAGFIEGGWQGMVDGWYGYHHSNEQGSGYAADKESTQKAIDGVTNKVNSIIDKMNTQFEAVGREFNNLERRIENLNKKMEDGFLDVWTYNAELLVLMENERTLDFHDSNVKNLYDKVRLQLRDNAKELGNGCFEFYHKCDNECMESVRNGTYDYPQYSEEARLKREEISGIKLESMGTYQILSIYSTVASSLALAIMVAGLSLWMCSNGSLQCRICI

SEQ ID NO: 7714 - protein, 567 aa, synthetic construct
  REGION 1..567: note = hemagglutinin__InfluenzaA__AEO89145
MEKIVLLLAIVSLVKSDQICIGYHANNSTEQVDTIMEKNVTVTHAQDILEKTHNGKLCDLDGVKPLILGDCSVAGWLLGNPMCDKFINVPEWSYIVEKANPANDLCYPGNFNDYEELKHLLSRINHFEKIQIIPKSSWSDHEASSGVSSACPYQGTPSFFRNVVWLTKKNNTYPTIKRSYNNTNQEDLLILWGIHHSNNAAEQEKLYQNPTTYISVGTSTLNQRLVPKIATRSKVNGQSGRMDFFWTILKPNDAINFESNGNFIAPEYAYKIVKKGDSAIMKSGVEYGNCNTKCQTPIGAINSSMPFHNIHPLTIGECPKYVKSNKLVLATGLRNSPLRERRRKRGLFGAIAGFIEGGWQGMVDGWYGYHHSNEQGSGYAADKESTQKAIDGVTNKVNSIIDKMNTQFEAVGREFNNLERRIENLNKKMEDGFLDVWTYNAELLVLMENERTLDFHDSNVKNLYDKVRLQLRDNAKELGNGCFEFYHKCDNECMESVRNGTYDYPQYSEEARLKREEISGVKLESIGTYQILSIYSTAASSLALAIMVAGLSLWMCSNGSLQCRICI

SEQ ID NO: 7715 - protein, 568 aa, synthetic construct
  REGION 1..568: note = hemagglutinin__InfluenzaA__AEO89163
MEKIVLLFAIVSLVKSDHICIGYHANNSTEQVDTIMEKNVTVTHAQDILEKTHNGKLCDLNGVKPLILKDCSVAGWLLGNPMCDEFIDVPEWSYIVEKANPANDLCYPGNFNDYEELKHLLSRINHFEKIQIIPKDSWPDHEASLGVSSACPYQGNSSFFRNVVWLIKKGNAYPTIKKSYNNTNKEDLLILWGIHHPNDEAEQTRLYQNPTTYISIGTSTLNQRLVPRIATRSKVNGQSGRIDFFWTILKPNDAINFESNGNFIAPEYAYKIVKKGDSTIMKSEVEYGNCNTRCQTPMGAINSSMPFHNIHPLTIGECPKYVKSNKLVLATGLRNSPQRERRRRKRGLFGAIAGFIEGGWQGMVDGWYGYHHSNEQGSGYAADKESTQKAIDGVTNKVNSIIDKMNTQFEAVGREFNNLERRIENLNKKMEDGFLDVWTYNAELLVLMENERTLDFHDSNVKNLYDKVRLQLRDNAKELGNGCFEFYHKCDNECMESVRNGTYDYPQYSEEARLKREEISGVKLESIGTYQILSIYSTVASSLVLAIMVAGLSLWMCSNGSLQCRICI

SEQ ID NO: 7716 - protein, 567 aa, synthetic construct
  REGION 1..567: note = hemagglutinin__InfluenzaA__AEO89172
MEKIVLLLAIVSLVRSDQICIGYHANNSTEQVDTIMEKNVTVTHAQNILEKTHNGKLCDLDGVKPLILRDCSVAGWLLGNPMCDEFINVPEWSYIVEKANPANDLCYPGNFNDYEELKHLLSRINHFEKIQIIPKSSWSDHEASSGVSSACPYQGTPSFFRNVVWLIKKNNTYPTIKRSYNNTNQEDLLVLWGIHHSNDATEQIKLYQNPTTYVSVGTSTLNQRLVPKIATRSKVNGQSGRMDFFWTILKSNDAINFESNGNFIAPEYAYKIVKKGDSAIMKSEVEYGNCSTKCQTPIGAINSSMPFHNIHPLTIGECPKYVKSNKLVLATGLRNSPLRERRRKRGLFGAIAGFIEGGWQGMVDGWYGYHHSNEQGSGYAADKESTQKAIDGVTNKVNSIIDKMNTQFEAVGREFNNLERRIENLNKKMEDGFLDVWTYNAELLVLMENERTLDFHDSNVKNLYDKVRLQLRDNAKELGNGCFEFYHKCDNECMESVRNGTYDYPQYSEEARLKREEISGVKLESIGTYQILSIYSTVASSLALAIMVAGLSLWMCSNGSLQCRICI

SEQ ID NO: 7717 - protein, 567 aa, synthetic construct
  REGION 1..567: note = hemagglutinin__InfluenzaA__AEO89181
MEKIVLLFATISLVKSDHICIGYHANNSTEQVDTIMEKNVTVTHAQDILEKTHNGKLCDLNGVKPLILKDCSVAGWLLGNPMCDEFINVPEWSYIVEKANPANDLCYPGNFNDYEELKHLLSRINHFEKIQIIPKNSWSDHEASLGVSAACPYQGKSSFFRNVVWLIKKDNAYPTIKKGYNNTNQEDLLVLWGIHHPNDEAEQTRLYQNPTTYISIGTSTLNQRLVPKIATRSKINGQSGRIDFFWTILKPNDAIHFESNGNFIAPEYAYKIVKKGDSTIMKSEVEYGNCNTRCQTPIGAINSSMPFHNIHPLTIGECPKYVKSNKLVLATGLRNSPQRERRRKRGLFGAIAGFIEGGWQGMVDGWYGYHHSNEQGSGYAADKESTQKAIDGVTNKVNSIIDKMNTQFEAVGREFNNLERRIENLNKKMEDGFLDVWTYNAELLVLMENERTLDFHDSNVRNLYDKVRLQLKDNAKELGNGCFEFYHKCDNECMESVRNGTYDYPQYSEEARLKREEISGVKLESIGIYQILSIYSTVASSLVLAIMMAGLSLWMCSNGSLQCRICI

SEQ ID NO: 7718 - protein, 567 aa, synthetic construct
  REGION 1..567: note = hemagglutinin__InfluenzaA__AEO89192
MEKIVLLLAIVSLVKSDQICIGYHANNSTEQVDTIMEKNVTVTHAQDILEKTHNGKLCDLDGVKPLILRDCSVAGWLLGNPMCDEFINVPEWSYIVEKANPANDLCYPGNFNDYEELKHLLSRINHFEKIQIIPKSSWSDHEASSGVSSACPYQGTPSFFRNVVWLIKKNNTYPTIKRSYNNTNQENLLILWGIHHSNDAAEQIKLYQNPTTYVSIGTSTLNQRLVPKIATRSKVNGQSGRMDFFWTILKPNDAINFESNGNFIAPEYAYKIVKEGDSAIMKSEVEYGNCNTKCQTPIGAINSSMPFHNIHPLTIGECPKYVKSNKLVLATGLRNSPLRERRRKRGLFGAIAGFIEGGWQGMVDGWYGYPHSNEQGSGYAADKESTQKAIDGVTNKVNSIIDKMNTQFEAVGREFNNLERRIENLNKKMEDGFLDVWTYNAELLVLMENERTLDFHDSNVKNLYDKVRLQLRDNAKELGNGCFEFYHKCDNECMESVRNGTYDYPQYSEEARLKREEINGVKLESIGTYQILSIYSTVASSLALAIMVAGLSLWMCSNGSLQCRICI

SEQ ID NO: 7719 - protein, 567 aa, synthetic construct
  REGION 1..567: note = hemagglutinin__InfluenzaA__AEO89203
MEKIVLLLAIVSLVKSDQICIGYHANNSTEQVDTIMEKNVTVTHAQDILEKTHNGKLCDLDGVKPLILRDCSVAGWLLGNPMCDEFINVPEWSYIVEKANPANDLCYPGNFNDYEELKHLLSRINHFEKIQIIPKSSWSDHEASSGVSSACPYQGTPSFFRNVVWLIKKNNTYPTIKRSYNNTNQENLLILWGIHHSNDAAEQIKLYQNPTTYVSIGTSTLNQRLVPKIATRSKVNGQSGRMDFFWTILKPNDAINFESNGNFIAPEYAYKIVKEGDSAIMKSEVEYGNCNTKCQTPIGAINSSMPFHNIHPLTIGECPKYVKSNKLVLATGLRNSPLRERRRKRGLFGAIAGFIEGGWQGMVDGWYGYHHSNEQGSGYAADKESTQKAIDGVTNKVNSIIDKMNTQFEAVGREFNNLERRIENLNKKMEDGFLDVWTYNAELLVLMENERTLDFHDSNVKNLYDKVRLQLRDNAKELGNGCFEFYHKCDNECMESVRNGTYDYPQYSEEARLKREEINGVKLESIGTYQILSIYSTVASSLALAIMVAGLSLWMCSNGSLQCRICI

SEQ ID NO: 7720 - protein, 567 aa, synthetic construct; identical to SEQ ID NO: 7719
  REGION 1..567: note = hemagglutinin__InfluenzaA__AEO89213

SEQ ID NO: 7721 - protein, 567 aa, synthetic construct; identical to SEQ ID NO: 7719
  REGION 1..567: note = hemagglutinin__InfluenzaA__AEO89224

SEQ ID NO: 7722 - protein, 567 aa, synthetic construct
  REGION 1..567: note = hemagglutinin__InfluenzaA__AEO89235
MEKIVLLLAMVSLVRSDQICIGYHANNSTEQVDTIMEKNVTVTHAQDILEKTHNGKLCDLDGVKPLILRDCSVAGWLLGNPMCDEFINVPEWSYIVEKANPANDLCYPGNLNDYEELKHLLSRINHFEKIQIIPKSSWSDHEASLGVSSACPYQGTPSFFRNVIWLIKKNNTYPTIKRSYNNTNQEDLLILWGIHHSNDEAEQIKLYQNPTTYISVGTSTLNQRLVPKIATRSKVNGQSGRMDFFWTILKPDDAINFESNGNFIAPEYAYKIVKKGDSAIMKSEVEYGNCNTKCQTPIGAINSSMPFHNIHPLTIGECPKYVKSNKLVLATGLRNSPLREKRRKRGLFGAIAGFIEGGWQGMVDGWYGYHHSNEQGSGYAADKESTQKAIDGVTNKVNSIIDKMNTQFEAVGREFNNLERRIENLNKKMEDGFLDVWTYNAELLVLMENERTLDFHDSNVKNLYDKVRLQLRDNAKELGNGCFEFYHKCDNECMESVRNGTYDYPQYSEEARLKREEISGVKLESIGTYQILSIYSTVASSLALAIMVAGLSLWMCSNGSLQCRICI

SEQ ID NO: 7723 - protein, 567 aa, synthetic construct
  REGION 1..567: note = hemagglutinin__InfluenzaA__AEO89246
MEKIVPLLAMVSLVKSDQICIGYHANNSTEQVDTIMEKNVTVTHAQDILEKTHNGKLCDLDGVKPLILRDCSVAGWLLGNPMCDEFINVPEWSYIVEKANPANDLCYPGNLNDYEELKHLLSRINHFEKIQIIPKSSWSDHEASLGVSSACPYQGTPSFFRNVVWLIKKNNTYPTIKRSYNNTNQEDLLILWGIHHSNDEAEQIKLYQNPTTYISVGTSTLNQRLVPKIATRSKVNGQSGRMDFFWTILKPDDAINFESNGNFIAPEYAYKIVKKGDSAIMKSEVEYGNCNTKCQTPIGAINSSMPFHNIHPLTIGECPKYVKSNKLVLATGLRNSPLRERRRKRGLFGAIAGFIEGGWQGMVDGWYGYHHSNEQGSGYAADKESTQKAIDGVTNKVNSIIDKMNTQFEAVGREFSNLERRIENLNKKMEDGFLDVWTYNAELLVLMENERTLDFHDSNVKNLYDKVRLQLRDNAKELGNGCFEFYHKCDNECMESVRNGTYDYPQYSEEARLKREEISGVKLESIGTYQILSIYSTVASSLALAIMVAGLSLWMCSNGSLQCRICI

SEQ ID NO: 7724 - protein, 567 aa, synthetic construct
  REGION 1..567: note = hemagglutinin__InfluenzaA__AEO89257
MEKIVLLLAIVSLVRSDQICIGYHANNSTEQVDTIMEKNVTVTHAQDILEKTHNGKLCDLDGVKPLILRDCSVAGWLLGNPMCDEFINVPEWSYIVEKANPANDLCYPGNFNDYEELKHLLSRINHFEKIQIIPKSSWSDHEASSGVSSACPYQGTPSFFRNVVWLIKKNNTYPTIKRSYNNTNQEDLLVLWGIHHSNDAAEQIKLYQNPTTYVSVGTSTLNQRLVPKIATRSKVNGQSGRMDFFWTILKSNDAINFESNGNFIAPEYAYKIVKKGDSAIMKSEVEYGNCSTKCQTPIGAINSSMPFHNIHPLTIGECPKYVKSNKLVLATGLRNSPLRERRRKRGLFGAIAGFIEGGWQGMVDGWYGYHHSNEQGSGYAADKESTQKAIDGVTNKVNSIIDKMNTQFEAVGREFNNLERRIENLNKKMEDGFLDVWTYNAELLVLMENERTLDFHDSNVKNLYDKVRLQLRDNAKELGNGCFEFYHKCDNECMESVRNGTYDYPQYSEEARLKREEISGVKLESIGTYQILSIYSTVASSLVLAIMVAGLSLWMCSNGSLQCRICI

SEQ ID NO: 7725 - protein, 567 aa, synthetic construct; identical to SEQ ID NO: 7724
  REGION 1..567: note = hemagglutinin__InfluenzaA__AEO89268

SEQ ID NO: 7726 - protein, 567 aa, synthetic construct
  REGION 1..567: note = hemagglutinin__InfluenzaA__AEO89279
MEKIVLLLAIVSLVKSDQICIGYHANNSTEQVDTIMEKNVTVTHAQDILEKTHNGKLCDLDGVKPLILGDCSVAGWLLGNPMCDKFINVPEWSYIVEKANPANDLCYPGNFNDYEELKHLLSRINHFEKIQIIPKSSWSDHEASSGVSSACPYQGTPSFFRNVVWLIKKNNTYPTIKRSYNNTNQEDLLILWGIHHSNNAAEQEKLYQNPTTYISVGTSTLNQRLVPKIATRSKVNGQSGRMDFFWTILKPNDAINFESNGNFIAPEYAYKIVKKGDSAIMKSGVKYGNCNTKCQTPIGAINSSMPFHNIHPLTIGECPKYVKSNKLVLATGLRNSPLRERRRKRGLFGAIAGFIEGGWQGMVDGWYGYHHSNEQGSGYAADKESTQKAIDGVTNKVNSIIDKMNTQFEAVGREFNNLERRIENLNKKMEDGFLDVWTYNAELLVLMENERTLDFHDSNVKNLYDKVRLQLRDNAKELGNGCFEFYHKCDNECMESVRNGTYDYPQYSEEARLKREEISGVKLESIGTYQILSIYSTAASSLALAIMVAGLSLWMCSNGSLQCRICI

SEQ ID NO: 7727 - protein, 567 aa, synthetic construct
  REGION 1..567: note = hemagglutinin__InfluenzaA__AEO89289
MEKIVLLLAIVSLAKSDQICIGYHANNSTEQVDTIMEKNVTVTHAQDILEKTHNGKLCDLDGVKPLILGDCSVAGWLLGNPMCDKFINVPEWSYIVEKVNPANDLCYPGNFNDYEELKHLLSRINHFEKIKIIPKSSWSDHEASSGVSSACPYQGTPSFFRNVVWLIKKNNTYPTIKRSYNNTNQEDLLILWGIHHSNNVAEQEKLYQNPTTYISVGTSTLNQRLVPKIATRSKVNGQSGRMDFFWTILKPNDTINFESNGNFIAPEYAYKIVKKGDSAIMKSGVEYGNCNTKCQTPIGAINSSMPFHNIHPLTIGECPKYVKSNKLVLATGLRNSPLRERRRKRGLFGAIAGFIEGGWQGMVDGWYGYHHSNEQGSGYAADKESTQKAIDGVTNKVNSIIDKMNTQFEAVGREFNNLERRIENLNKKMEDGFLDVWTYNAELLVLMENERTLDFHDSNVKNLYDKVRLQLRDNAKELGNGCFEFYHKCDNECMESVRNGTYDYPRYSEEARLKREEISGVKLESIGTYQILSIYSTAASSLALAIMVAGLSLWMCSNGSLQCRICI

SEQ ID NO: 7728 - protein, 567 aa, synthetic construct
  REGION 1..567: note = hemagglutinin__InfluenzaA__AEO89300
MEKIVLLLAIVSLVKSDQICIGYHANNSTEQVDTIMEKNVTVTHAQDILEKTHNGKLCDLDGVKPLILRDCSVAGWLLGNPMCDEFINVPEWSYIVEKANPANDLCYPGNFNDYEELKHLLSRINHFEKIQIIPKSSWSDHEASSGVSSACPYQGTPSFFRNVVWLIKKNNTYPTIKRSYNNTNQENLLILWGIHHSNDAAEQIKLYQHPTTYISVGTSTLNQRLVPKIATRSKVNGQSGRMDFFWTILKPNDAINFESNGNFIAPEYAYKIVKEGDSAIMKSEVEYGNCNTKCQTPIGAINSSMPFHNIHPLTIGECPKYVKSNKLVLATGLRNSPLRERRRKRGLFGAIAGFIEGGWQGMVDGWYGYHHSNEQGSGYAADKESTQKAIDGVTNKVNSIIDKMNTQFEAVGREFNNLERRIENLNKKMEDGFLDVWTYNAELLVLMENERTLDFHDSNVKNLYDKVRLQLRDNAKELGNGCFEFYHKCDNECMESVRNGTYDYPQYSEEARLKREEINGVKLESMGTYQILSIYSTVASSLALAIMVAGLSFWMCSNGSLQCRICI

SEQ ID NO: 7729 - protein, 567 aa, synthetic construct
  REGION 1..567: note = hemagglutinin__InfluenzaA__AEO89311
MEKIVLLFAIVSLVKSDHICIGYHANNSTEQVDTIMEKNVTVTHAQDILEKTHNGKLCDLNGVKPLILKDCSVAGWLLGNPMCDEFINVPEWSYIVEKANPANDLCYPGNFNDYEELKHLLSRINHFEKIQIIPKDSWSDHEASLGVSAACPYQGNSSFFRNVVWLIKKDNAYPTIKKSYNNTNQEDLLILWGIHHPNDEAEQTRLYQNPTTYISIGTSTLNQRLVPKIATRSKVNGQSGRIDFFWTILKPNDAIHFESNGNFIAPEYAYKIVKKGDSTIMKSEVEYGNCNTRCQTPMGAINSSMPFHNIHPLTIGECPKYVKSTKLVLATGLRNSPQRERRRKRGLFGAIAGFIEGGWQGMVDGWYGYHHSNEQGSGYAADKESTQKAIDGVTNKVNSIIDKMNTQFEAVGREFNKLERRIENLNKKMEDGFLDVWTYNAELLVLMENERTLDFHDSNVKNLYDKVRLQLRDNAKELGNGCFEFYHKCNNECMESVRNGTYDYPQYSEEARLKREEISGVKLESIGIYQILSIYSTVASSLVLAIMMAGLSLWMCSNGSLQCRICI

SEQ ID NO: 7730 - protein, 566 aa, synthetic construct; identical to SEQ ID NO: 1928
  REGION 1..566: note = hemagglutinin__InfluenzaA__AEO99215

SEQ ID NO: 7731 - protein, 565 aa, synthetic construct
  REGION 1..565: note = hemagglutinin__InfluenzaA__AEQ38187
MKVKLLVLLCTFTATYADTICIGYHANNSTDTVDTVLEKNVTVTHSVNLLENSHNGKLCLLKGIAPLQLGNCSVAGWILGNPECELLISKESWSYIVEKPNPENGTCYPGHFADYEELREQLSSVSSFERFEIFPKESSWPNHTVTGASASCSHNGENSFYRNLLWLTGKNGLYPNLSKSYANNKEKEVLVLWGVHHPPNIADQKTLYHTENAYVSVVSSHYSRKFTPEIAKRPKVRDQEGRINYYWTLLEPGDTIIFEANGNLIAPRYAFALSRGFGSGIINSNAPMDKCDAKCQTPQGAINSSLPFQNVHPVTIGECPKYVRSAKLRMVTGLRNIPSIQSRGLFGAIAGFIEGGWTGMVDGWYGYHHQNEQGSGYAADQKSTQNAINGITNKVNSVIEKMNTQFTAVGKEFNKLERRMENLNKKVDDGFIDIWTYNAELLVLLENERTLDFHDSNVKNLYEKVKSQLKNNAKEIGNGCFEFYHKCNDECMESVKNGTYDYPKYSEESKLNREKIDGVKLESMGVYQILAIYSTVASSLVLLVSLGAISFWMCSNGSLQCRICI

SEQ ID NO: 7732 - protein, 565 aa, synthetic construct; identical to SEQ ID NO: 7731
  REGION 1..565: note = hemagglutinin__InfluenzaA__AEQ38188

SEQ ID NO: 7733 - protein, 565 aa, synthetic construct
  REGION 1..565: note = hemagglutinin__InfluenzaA__AEQ38189
MKVKLLVLLCTFTATYADTICIGYHANNSTDTVDTVLEKNVTVTHSVNLLENSHNGKLCLLKGIAPLQLGNCSVAGWILGNPECELLISKESWSYIVEKPNPENGTCYPGHFADYEELREQLSSVSSFERFEIFPKESSWPNHTVTGVSASCSHNGENSFYRNLLWLTGKNGLYPNLSKSYANNKEKEVLVLWGVHHPPNIANQKTLYHTENAYVSVVSSHYSRKFTPEIAKRPKVRDQEGRINYYWTLLEPGDTIIFEANGNLIAPRYAFALSRGFGSGIINSNAPMDKCDAKCQTPQGAINSSLPFQNVHPVTIGECPKYVRSAKLRMVTGLRNIPSIQSRGLFGAIAGFIEGGWTGMVDGWYGYHHQNEQGSGYAADQKSTQNAINGITNKVNSVIEKMNTQFTAVGKEFNKLERRMENLNKKVDDGFIDIWTYNAELLVLLENERTLDFHDSNVKNLYEKVKSQLKNNAKEIGNGCFEFYHKCNDECMESVKNGTYDYPKYSEESKLNREKIDGVKLESMGVYQILAIYSTVASSLVLLVSLGAISFWMCSNGSLQCRICI

SEQ ID NO: 7734 - protein, 565 aa, synthetic construct
  REGION 1..565: note = hemagglutinin__InfluenzaA__AEQ38190
MKVKLLVLLCTFTATYADTICIGYHANNSTDTVDTVLEKNVTVTHSVNLLENSHNGKLCLLKGIAPLQLGNCSVAGWILGNPECELLISKESWSYIVEKPNPENGTCYPGHFADYEELREQLSSVSSFERFEIFPKESSWPNHTVTGVSASCSHNGENSFYRNLLWLTGKNGLYPNLSKPYANNKEKEVLVLWGVHHPPNIAVQKTLYHTENAYVSVVSSHYSRKFTPEIAKRPKVRDQEGRINYYWTLLEPGDTIIFEANGNLIAPRYAFALSRGFGSGIINSNAPMDKCDAKCQTPQGAINSSLPFQNVHPVTIGECPKYVRSAKLRMVTGLRNIPSIQSRGLFGAIAGFIEGGWTGMVDGWYGYHHQNEQGSGYAADQKSTQNAINGITNKVNSVIEKMNTQFTAVGKEFNKLERRMENLNKKVDDGFIDIWTYNAELLVLLENERTLDFHDSNVKNLYEKVKSQLKNNAKEIGNGCFEFYHKCNDECMESVKNGTYDYPKYSEESKLNREKIDGVKLESMGVYQILAIYSTVASSLVLLVSLGAISFWMCSNGSLQCRICI

SEQ ID NO: 7735 - protein, 565 aa, synthetic construct; identical to SEQ ID NO: 3626
  REGION 1..565: note = hemagglutinin__InfluenzaA__AEQ38191

SEQ ID NO: 7736 - protein, 565 aa, synthetic construct
  REGION 1..565: note = hemagglutinin__InfluenzaA__AEQ38192
MKVKLLVLLCTFTATYADTICIGYHANNSTDTVDTVLEKNVTVTHSVNLLENSHNGKLCLLKGIAPLQLGNCSVAGWILGNPECELLISKESWSYIVEKPNPENGTCYPGHFADYEELREQLSSVSSFERFEIFPKESSWPNHTVTGVSASCSHNGESSFYRNLLWLTGKNGLYPNLSKSYANNKEKEVLVLWGVHHPPSISDQKTLYHTENAYVSVVSSHYSRKFTPEITKRPKVRDQEGRINYYWTLLEPGDTIIFEANGNLIAPRYAFALSRGFGSGIINSNTPMDKCDTKCQTPQGAINSSLPFQNVHPVTIGECPKYVRSAKLRMVTGLRNIPSIQSRGLFGAIAGFIEGGWTGMVDGWYGYHHQNEQGSGYAADQKSTQNAINGITNKVNSVIEKMNTQFTAVGKEFNKLERRMENLNKKVDDGFIDIWTYNAELLVLLENERTLDFHDSNVKNLYEKVKSQLKNNAKEIGNGCFEFYHKCNDECMESVKNGTYDYPKYSEESKLNREKIDGVKLESMGVYQILAIYSTVASSLVLLVSLGAISFWMCSNGSLQCRICI

SEQ ID NO: 7737 - protein, 565 aa, synthetic construct
  REGION 1..565: note = hemagglutinin__InfluenzaA__AEQ38193
MKVKLLILLCTFTATYADTICIGYHANNSTDTVDTVLEKNVTVTHSVNLLENSHNGKLCLLKGIAPLQLGNCSVAGWILGNPECELLISKESWSYIVEKPNPENGTCYPGHFADYEELREQLSSVSSFERFEIFPKESSWPNHTVTGVSASCSHNGESSFYRNLLWLTGKNGLYPNLSKSYANNKEKEVLVLWGVHHPPNIVDQKTLYRTENAYVSVVSSHYSRKFTPEIAKRPKVRDQEGRINYYWTLLEPGDTIIFEANGNLIAPRYAFALSRGFGSGIINSNAPMDKCDAKCQTPQGAINSSLPFQNVHPVTIGECPKYVRSAKLRMVTGLRNIPSIQSRGLFGAIAGFIEGGWTGMVDGWYGYHHQNEQGSGYAADQKSTQNAINGITNKVNSVIEKMNTQFTAVGKEFNKLERRMENLNKKVDDGFIDIWTYNAELLVLLENERTLDFHDSNVKNLYEKVKSQLKNNAKEIGNGCFEFYHKCNDECMESVKNGTYDYPKYSEESKLNREKIDGVKLESMGVYQILAIYSTVASSLVLLVSLGAISFWMCSNGSLQCRICI

SEQ ID NO: 7738 - protein, 565 aa, synthetic construct
  REGION 1..565: note = hemagglutinin__InfluenzaA__AEQ38194
MKVKLLVLLCTFTATYADTICIGYHANNSTDTVDTVLEKNVTVTHSVNLLENSHNGKLCLLKGIAPLQLGNCSVAGWILGNPECELLISKESWSYIVEKPNPENGTCYPGHFADYEELREQLSSVSSFERFEIFPKESSWPNHTVTGVSASCSHNGESSFYRNLLWLTGKNGLYPNLSKSYANNKEKEVLVLWGVHHPPSISDQKTLYHTENAYVSVVSSHYSRKFTPEIAKRPKVRDQEGRINYYWTLLEPGDTIIFEASGNLIAPRYAFALSRGFGSGIINSNAPMDKCDAKCQTPQGAINSSLPFQNVHPVTIGECPKYVRSAKLRMVTGLRNIPSIQSRGLFGAIAGFIEGGWTGMVDGWYGYHHRNEQGSGYAADQKSTQNAINGITNKVNSVIEKMNTQFTAVGKEFNKLERRMENLNKRVDDGFIDIWTYNAELLVLLENERTLDFHDSNVKNLYEKVKSQLKNNAKEIGNGCFEFYHKCNDECMESVKNGTYDYPKYSEESKLNREKIDGVKLESMGVYQILAIYSTVASSLVLLVSLGAISFWMCSNGSLQCRICI

SEQ ID NO: 7739 - protein, 565 aa, synthetic construct
  REGION 1..565: note = hemagglutinin__InfluenzaA__AEQ38195
MKVKLLVLLCTFTATYADTICIGYHANNSTDTVDTVLEKNVTVTHSVNLLENSHNGKLCLLKGIAPLQLGNCSVAGWILGNPECELLISKESWSYIVEKPNPENGTCYPGHFADYEELREQLSSVSSFERFEIFPKESSWPNHTVTGASASCSHNGENSFYRNLLWLTGKNGLYPNLSKSYANNKEKEVLVLWGVHHPPNIANQKTLYHTENAYVSVVSSHYSRKFTPEIAKRPKVRDQEGRINYYWTLLEPGDTIIFEANGNLIAPRYAFALSRGFGSGIINSNAPMDKCDAKCQTPQGAINSSLPFQNVHPVTIGECPKYVRSAKLRMVTGLRNIPSIQSRGLFGAIAGFIEGGWTGMVDGWYGYHHQNEQGSGYAADQKSTQNAINGITNKVNSVIEKMNTQFTAMGKEFNKLERRMENLNKKVDDGFIDIWTYNAELLVLLENERTLDFHDSNVKNLYEKVKSQLKNNAKEIGNGCFEFYHKCNDECMESVKNGTYDYPKYSEESKLNREKIDGVKLESMGVYQILAIYSTVASSLVLLVSLGAISFWMCSNGSLQCRICI

SEQ ID NO: 7740 - protein, 565 aa, synthetic construct
  REGION 1..565: note = hemagglutinin__InfluenzaA__AEQ38196
MKVKLLVLLCTFTATYADTICIGYHANNSTDTVDTVLEKNVTVTHSVNLLENSHNGKLCLLKGIAPLQLGNCSVAGWILGNPECELLISKESWSYIVEKPNPENGTCYPGHFADYEELREQLSSVSSFERFEIFPKESSWPNHTVTGASASCSHNGENSFYRNLLWLTGKNGLYPNLSKSYANNKEKEVLVLWGVHHPPNIADQKTLYHTENAYVSVVSSHYSRKFTPEIAKRPKVRDQEGRINYYWTLLEPGDTIIFEANGNLIAPRYAFALSRGFGSGIINSNAPMDKCDAKCQTPQGAINSSLPFQNVHPVTIGECPKYVRSAKLRMVTGLRNIPSIQSRGLFGAIAGFIEGGWTGMVDGWYGYHHQNEQGSGYAADQKSTQNAINGITNKVNSVIEKMNTQFTAVGKEFNKLERRMENLNKKVDDGFIDIWTYNAELLVLLENERTLDFHDSNVKNLYEKVKSQLKNNAKEIGNGCFEFYHKCNDECMESVKNGTYEYPKYSEESKLNREKIDGVKLESMGVYQILAIYSTVASSLVLLVSLGAISFWMCSNGSLQCRICI

SEQ ID NO: 7741 - protein, 565 aa, synthetic construct; identical to SEQ ID NO: 7731
  REGION 1..565: note = hemagglutinin__InfluenzaA__AEQ38197

SEQ ID NO: 7742 - protein, 565 aa, synthetic construct; identical to SEQ ID NO: 7731
  REGION 1..565: note = hemagglutinin__InfluenzaA__AEQ38198

SEQ ID NO: 7743 - protein, 566 aa, synthetic construct; identical to SEQ ID NO: 7050
  REGION 1..566: note = hemagglutinin__InfluenzaA__AEQ62909

SEQ ID NO: 7744 - protein, 566 aa, synthetic construct
  REGION 1..566: note = hemagglutinin__InfluenzaA__AEQ62910
MKAILVVMLYTFATANADTLCIGYHANNSTDTVDTVLEKNVTVTHSVNLLEDKHNGKLCKLRGVAPLHLGKCNIAGWILGNPECESLSTASSWSYIVETASPDNGTCYPGDFIDYEELREQLSSVSSFERFEIFPKTSSWPNHDSNKGVTAACPHAGAKSFYKNLMWLVKKGNSYPKLSKSYINDKGKEVLVLWGIHHPPTSADQQSLYQNADAYVFVGTSRYSKKFKPEIAIRPKVRGQEGRMNYYWTLVEPGDKITFEATGNLVVPRYAFAMERNAGSGIIISDTPVHDCNTTCQSPKGAINTSLPFQNIHPITIGECPKYVKSTKLRLATGLRNVPSVQSRGLFGAIAGFIEGGWTGMVDGWYGYHHQNEQGSGYAADLKSTQNAIDEITNKVNSVIEKMNTQFTAVGKEFNQLEKRIENLNKKVDDGFLDIWTYNAELLVLLENERTLDYHDSNVKNLYEKVRSQLKNNAKEIGNGCFEFYHKCDNTCMESVKNGTYDYPKYSEEAKLNREEIDGVKLESTRIYQILAIYSTVASSLVLVVSLGAISFWMCSNGSLQCRICI

SEQ ID NO: 7745 - protein, 566 aa, synthetic construct; identical to SEQ ID NO: 6867
  REGION 1..566: note = hemagglutinin__InfluenzaA__AEQ62911

SEQ ID NO: 7746 - protein, 566 aa, synthetic construct; identical to SEQ ID NO: 7050
  REGION 1..566: note = hemagglutinin__InfluenzaA__AEQ62912

SEQ ID NO: 7747 - protein, 566 aa, synthetic construct
  REGION 1..566: note = hemagglutinin__InfluenzaA__AEQ62915
MKAILVVLLYTFATANADTLCIGYHANNSTDTVDTVLEKNVTVTHSVNLLEDKHNGKLCKLRGVAPLHLGKCNIAGWILGNPECESLSTASSWSYIVETSSSDNGTCYPGDFINYEELREQLSSVSSFERFEIFPKTSSWPNHDSNKGVTAACPHAGAKSFYKNLIWLVKKGNSYPKLSKSYINDKGKEVLVLWGIHHPSTTADQQSLYQNADAYVFVGTSRYSKKFKPEIAIRPKVRDQEGRMNYYWTLVEPGDKITFEATGNLVVPRYAFAMERNAGSGIIISDTPVHDCNTTCQTPKGAINTSLPFQNIHPITIGKCPKYVKSTKLRLATGLRNVPSIQSRGLFGAIAGFIEGGWTGMVDGWYGYHHQNEQGSGYAADLKSTQNAIDKITNKVNSVIEKMNTQFTAVGKEFNHLEKRIENLNKKVDDGFLDIWTYNAELLVLLENERTLDYHDSNVKNLYEKVRNQLKTNAKEIGNGCFEFYHKCDNTCMESVKNGTYDYPKYSEEAKLNREEIDGVKLESTRIYQILAIYSTVASSLVLVVSLGAISFWMCSNGSLQCRICI

SEQ ID NO: 7748 - protein, 566 aa, synthetic construct; identical to SEQ ID NO: 3411
  REGION 1..566: note = hemagglutinin__InfluenzaA__AER08646

SEQ ID NO: 7749 - protein, 566 aa, synthetic construct; identical to SEQ ID NO: 5419
  REGION 1..566: note = hemagglutinin__InfluenzaA__AER08648

SEQ ID NO: 7750 - protein, 566 aa, synthetic construct
  REGION 1..566: note = hemagglutinin__InfluenzaA__AER08652
MKTIIALSYILCLVFAQKLPGNDNSTATLCLGHHAVPNGTIVKTITNDQIEVTNATELVQSSSTGEICDSPHQILDGKNCTLIDALLGDPQCDGFQNKKWDLFVERSKAYSNCYPYDVPDYASLRSLVASSGTLEFNNESFNWTGVTQNGTSSACIRRSKNSFFSRLNWLTHLNFKYPALNVTMPNNEQFDKLYIWGVHHPGTDKDQIFLYAQASGRITVSTKRSQQTAIPNIGSRPRVRNIPSRISIYWTIVKPGDILLINSTGNLIAPRGYFKIRSGKSSIMRSDAPIGKCNSECITPNGSIPSDKPFQNVNRITYGACPRYVKQNTLKLATGMRNVPEKQTRGIFGAIAGFIENGWEGMVDGWYGFRHQNSEGRGQAADLKSTQAAIDQINGKLNRLIGKTNEKFHQIEKEFSEVEGRIQDLEKYVEDTKIDLWSYNAELLVALENQHTIDLTDSEMNKLFEKTKKQLRENAEDMGNGCFKIYHKCDNACIGSIRNGTYDHDVYRDEALNNRFQIKGVELKSGYKDWILWISFAISCFLLCVALLGFIMWACQKGNIRCNICI

SEQ ID NO: 7751 - protein, 566 aa, synthetic construct; identical to SEQ ID NO: 7750
  REGION 1..566: note = hemagglutinin__InfluenzaA__AER08654

SEQ ID NO: 7752 - protein, 566 aa, synthetic construct
  REGION 1..566: note = hemagglutinin__InfluenzaA__AER08656
MKTIIALSYILCLVFAQKLPGNDNSTATLCLGHHAVPNGTIVKTITNDQIEVTNATELVQSSSTGEICDSPHQILDGKNCTLIDALLGDPQCDGFQNKKWDLFVERSKAYSNCYPYDVPDYASLRSLVASSGTLEFNNESFNWTGVTQNGTSSACIRRSKNSFFSRLNWLTHLNFKYPALNVTMPNNEQFDKLYIWGVHHPGTDKDQIFLYAQASGRITVSTKRSQQTVIPNIGSRPRVRNIPSRISIYWTIVKPGDILLINSTGNLIAPRGYFKMQSGKSSIMRSDAPIGKCNSECITPNGSIPNDKPFQNVNRITYGACPRYVKQNTLKLATGMRNVPEKQTRGIFGAIAGFIENGWEGMVDGWYGFRHQNSEGRGQAADLKSTQAAIDQINGKLNRLIGKTNEKFHQIEKEFSEVEGRIQDLEKYVEDTKIDLWSYNAELLVALENQHTIDLTDSEMNKLFEKTKKQLRENAEDMGNGCFKIYHKCDNACIGSIRNGTYDHDVYRDEALNNRFQIKGVELKSGYKDWILWISFAISCFLLCVALLGFIMWACQKGNIRCNICI

SEQ ID NO: 7753 - protein, 566 aa, synthetic construct
  REGION 1..566: note = hemagglutinin__InfluenzaA__AER08660
MKTIIALSYILCLVFAQKLPGNDNSTATLCLGHHAVPNGTIVKTITNDQIEVTNATELVQSSSTGEICNSPHQILDGENCTLIDALLGDPQCDGFQNKKWDLFVERSKAYSNCYPYDVPDYASLRSLVASSGTLEFNNESFNWTGVTQNGTSSACIRRSNNSFFSRLNWLTHLNFKYPALNVTMPNNEQFDKLYIWGVHHPGTDKDQIFLYAQASGRITVSTKRSQQAVIPNIGSRPRVRNIPSRISIYWTIVKPGDILLINSTGNLIAPRGYFKIRSGKSSIMRSDAPIGKCNSACITPNGSIPNDKPFQNVNRITYGACPRYVKQNTLKLATGMRNVPEKQTRGIFGAIAGFIENGWEGMVDGWYGFRHQNSEGRGQAADLKSTQAAIDQINGKLNRLIGKTNEKFHQIEKEFSEVEGRIQDLEKYVEDTKIDLWSYNAELLVALENQHTIDLTDSEMNKLFEKTKKQLRENAEDMGNGCFKIYHKCDNACIGSIRNGTYDHDVYRDEALNNRFQIKGVELKSGYKDWILWISFAISCFLLCVALLGFIMWACQKGNIRCNICI

SEQ ID NO: 7754 - protein, 566 aa, synthetic construct
  REGION 1..566: note = hemagglutinin__InfluenzaA__AER08664
MKTIIALSYILCLVFAQKLPGNDNSTATLCLGHHAVPNGTIVKTITNDQIEVTNATELVQSSSTGEICDSPHQILDGENCTLIDALLGDPQCDGFQNKKWDLFVERSKAYSNCYPYDVPDYASLRSLVASSGTLEFNSESFNWTGVTQNGTSSACIRRSNNSFFSRLNWLTHLNFKYPALNVTMPNNEQFDKLYIWGVHHPGTDKDQIFLYAQASGRITVSTKRSQQAVIPNIGSRPRVRNIPSRISIYWTIVKPGDILLINSTGNLIAPRGYFKIRSGKSSIMRSDAPIGKCNSECITPNGSIPNDKPFQNVNRITYGACPRYVKQSTLKLATGMRNVPEKQTRGIFGAIAGFIENGWEGMVDGWYGFRHQNSEGRGQAADLKSTQAAIDQINGKLNRLIGKTNEKFHQIEKEFSEVEGRIQDLEKYVEDTKIDLWSYNAELLVALENQHTIDLTDSEMNKLFEKTKKQLRENAEDMGNGCFKIYHKCDNACIGSIRNGTYDHDVYRDEALNNRFQIKGVELKSGYKDWILWISFAISCFLLCVALLGFIMWACQKGNIRCNICI

SEQ ID NO: 7755 - protein, 566 aa, synthetic construct; identical to SEQ ID NO: 6982
  REGION 1..566: note = hemagglutinin__InfluenzaA__AER08668

SEQ ID NO: 7756 - protein, 566 aa, synthetic construct
  REGION 1..566: note = hemagglutinin__InfluenzaA__AER08670
MKTIIALSYILCLVFAQKLPGNDNSTATLCLGHHAVPNGTIVKTITNDQIEVTNATELVQSSSTGEICNSPHQILDGENCTLIDALLGDPQCDGFQNKKWDLFVERSKAHSNCYPYDVPDYASLRSLVASSGTLEFNNESFNWTGVTQNGTSSACIRRSNNSFFSRLNWLTHLNFKYPALNVTMPNNEQFDKLYIWGVHHPGTDKDQIFLYAQASGRITVSTKRSQQAVIPNIGSRPRVRNIPSRVSIYWTIVKPGDILLINSTGNLIAPRGYFKIRSGKSSIMKSDAPIGKCNSACITPNGSIPNDKPFQNVNRITYGACPRYVKQNTLKLATGMRNVPEKQTRGIFGAIAGFIENGWEGMVDGWYGFRHQNSEGRGQAADLKSTQAAIDQINGKLNRLIGKTNEKFHQIEKEFSEVEGRIQDLEKYVEDTKIDLWSYNAELLVALENQHTIDLTDSEMNKLFEKTKKQLRENAEDMGNGCFKIYHKCDNACIGSIRNGTYDHDVYRDEALNNRFQIKGVELKSGYKDWILWISFAISCFLLCVALLGFIMWACQKGNIRCNICI

SEQ ID NO: 7757 - protein, 566 aa, synthetic construct
  REGION 1..566: note = hemagglutinin__InfluenzaA__AER08672
MKTIIALSYILCLVFAQKLPGNDNSTATLCLGHHAVPNGTIVKTITNDQIEVTNATELVQSSSTGGICDSPHQILDGGNCTLIDALLGDPQCDGFQNKKWDLFVERSKAYSNCYPYDVPDYASLRSLVASSGTLEFNSESFNWTGVTQNGTSSACIRRSNNSFFSRLNWLTHLNFKYPALNVTMPNNEQFDKLYIWGVHHPGTDKDQIFLYAQASGRITVSTKRSQQAVIPNIGSRPRVRNIPSRISIYWTIVKPGDILLINSTGNLIAPRGYFKIRSGKSSIMRSDAPIGKCNSECITPNGSIPNDKPFQNVNRITYGACPRYVKQSTLKLATGMRNVPEKQTRGIFGAIAGFIENGWEGMVDGWYGFRHQNSEGRGQAADLKSTQAAIDQINGKLNRLIGKTNEKFHQIEKEFSEVEGRIQDLEKYVEDTKIDLWSYNAELLVALENQHTIDLTDSEMNKLFEKTKKQLRENAEDMGNGCFKIYHKCDNACIGSIRNGTYDHDVYRDEALNNRFQIKGVELKSGYKDWILWISFAISCFLLCVALLGFIMWACQKGNIRCNICI

SEQ ID NO: 7758 - protein, 566 aa, synthetic construct
  REGION 1..566: note = hemagglutinin__InfluenzaA__AER08674
MKTIIALSYILCLVFAQKLPGNDNSTATLCLGHHAVPNGTMVKTITNDQIEVTNATELVQSSSTGEICNSPHQILDGENCTLIDALLGDPQCDGFQNKKWDLFVERSKAHSNCYPYDVPDYASLRSLVASSGTLEFNNESFNWTGVTQNGTSSACIRRSNNSFFSRLNWLTHLNFKYPALNVTMPNNEQFDKLYIWGVHHPGTDKDQIFLYAQASGRITVSTKRSQQAVIPNIGSRPRVRNIPSRVSIYWTIVKPGDILLINSTGNLIAPRGYFKIRSGKSSIMRSDAPIGKCNSACITPNGSIPNDKPFQNVNRITYGACPRYVKQNTLKLATGMRNVPEKQTRGIFGAIAGFIENGWEGMVDGWYGFRHQNSEGRGQAADLKSTQAAIDQINGKLNRLIGKTNEKFHQIEKEFSEVEGRIQDLEKYVEDTKIDLWSYNAELLVALENQHTIDLTDSEMNKLFEKTKKQLRENAEDMGNGCFKIYHKCDNACIGSIRNGTYDHDVYRDEALNNRFQIKGVELKSGYKDWILWISFAISCFLLCVALLGFIMWACQKGNIRCNICI

SEQ ID NO: 7759 - protein, 566 aa, synthetic construct; identical to SEQ ID NO: 6982
  REGION 1..566: note = hemagglutinin__InfluenzaA__AER08676

SEQ ID NO: 7760 - protein, 566 aa, synthetic construct; identical to SEQ ID NO: 6982
  REGION 1..566: note = hemagglutinin__InfluenzaA__AER08678

SEQ ID NO: 7761 - protein, 566 aa, synthetic construct
  REGION 1..566: note = hemagglutinin__InfluenzaA__AER08680
MKTIIALSYILCLVFAQKLPGNDNSTATLCLGHHAVPNGTIVKTITNDQIEVTNATELVQSSSAGEICDSPHQILDGENCTLIDALLGDPQCDGFQNKKWDLFVERSRAHSNCYPYDVPDYASLRSLVASSGTLEFNNESFNWTGVTQNGTSSACIRRSNNSFFSRLNWLTHLNFKYPALNVTMPNNEQFDKLYIWGVHHPGTDKDQIFLYAQASGRITVSTKRSQQAVIPNIGSRPRVRNIPSRISIYWTIVKPGDILLINSTGNLIAPRGYFKIRSGKSSIMRSDAPIGKCNSECITPNGSIPNDKPFQNVNRITYGACPRYVKQSTLKLATGMRNVPEKQTRGIFGAIAGFIENGWEGMMDGWYGFRHQNSEGRGQAADLKSTQAAIDQINGKLNRLIGKTNEKFHQIEKEFSEVEGRIQDLEKYVEDTKIDLWSYNAELLVALENQHTIDLTDSEMNKLFEKTKKQLRENAEDMGNGCFKIYHKCDNACIGSIRNGTYDHDVYRDEALNNRFQIKGVELKSGYKDWILWISFAISCFLLCVALLGFIMWACQKGNIRCNICI

SEQ ID NO: 7762 - protein, 566 aa, synthetic construct
  REGION 1..566: note = hemagglutinin__InfluenzaA__AER08682
MKTVIALSYILCLVFAQKLPGNDNSTATLCLGHHAVPNGTIVKTITNDQIEVTNATELVQSSSTGEICNSPHQILDGENCTLIDALLGDPQCDGFQNKKWDLFVERSKAHSNCYPYDVPDYASLRSLVASSGTLEFNNESFNWTGVTQNGTSSACIRRSNNSFFSRLNWLTHLNFKYPALNVTMPNNEQFDKLYIWGVHHPGTDKDQIFLYAQASGRITVSTKRSQQAVIPNIGSRPRVRNIPSRVSIYWTIVKPGDILLINSTGNLIAPRGYFKIRSGKSSIMRSDAPIGKCNSACITPNGSIPNDKPFQNVNRITYGACPRYVKQNTLKLATGMRNVPEKQTRGIFGAIAGFIENGWEGMVDGWYGFRHQNSEGRGQAADLKSTQAAIDQINGKLNRLIGKTNEKFHQIEKEFSEVEGRIQDLEKYVEDTKIDLWSYNAELLVALENQHTIDLTDSEMNKLFEKTKKQLRENAEDMGNGCFKIYHKCDNACIGSIRNGTYDHDVYRDEALNNRFQIKGVELKSGYKDWILWISFAISCFLLCVALLGFIMWACQKGNIRCNICI

SEQ ID NO: 7763 - protein, 566 aa, synthetic construct
  REGION 1..566: note = hemagglutinin__InfluenzaA__AER08684
MKTIIALSYILCLVFAQKLPGNDNSTATLCLGHHAVPNGTIVKTITNDQIEVTNATELVQSSSTGEICNSPHQILDGENCTLIDALLGDPQCDGFQNKKWDLFVERSKAHSNCYPYDVPDYASLRSLVASSGTLEFNNESFNWTGVTQNGTSSACIRRSNNSFFSRLNWLTHLNFKYPALNVTMPNNEQFDKLYIWGVHHPGTDKDQIFLYAQASGRITVSTKRSQQAVIPNIGSRPRVRNIPSRVSIYWTIVKPGDILLINSTGNLIAPRGYFKIRSGKSSIMRSDAPIGKCNSTCITPNGSIPNDKPFQNVNRITYGACPRYVKQNTLKLATGMRNVPEKQTRGIFGAIAGFIENGWEGMVDGWYGFRHQNSEGRGQAADLKSTQAAIDQINGKLNRLIGKTNEKFHQIEKEFSEVEGRIQDLEKYVEDTKIDLWSYNAELLVALENQHTIDLTDSEMNKLFEKTKKQLRENAEDMGNGCFKIYHKCDNACIGSIRNGTYDHDVYRDEALNNRFQIKGVELKSGYKDWILWISFAISCFLLCVALLGFIMWACQKGNIRCNICI

SEQ ID NO: 7764 - protein, 566 aa, synthetic construct
  REGION 1..566: note = hemagglutinin__InfluenzaA__AER08686
MKTIIALSYILCLVFAQKLPGNDNSTATLCLGHHAVPNGTIVKTITNDQIEVTNATELVQSSSTGEICNSPHQILDGENCTLIDALLGDPQCDGFQNKKWDLFVERSKAHSNCYPYDVPDYASLRSLVASSGTLEFNNESFNWTGVTQNGTSSACIRRSNNSFFSRLNWLTHLNFKYPALNVTMPNNEQFDKLYIWGVHHPGTDKDQIFLYAQASGRITVSTKRSQQAVIPNIGSRPRVRNIPSRVSIYWTIVKPGDILLINSTGNLIAPRGYFKIRSGKSSIMRSDAPIGKCNSTCITPNGSIPNDKPFQNVNRITYGACPRYVKQNTLKLATGMRNVPEKQTRGIFGAIAGFIENGWEGMVDGWYGFRHQNSEGRGQAADLKSTQAAIDQINGKLNRLIGKTNEKFHQIEKEFSEVEGRIQDLEKYIEDTKIDLWSYNAELLVALENQHTIDLTDSEMNKLFEKTKKQLRENAEDMGNGCFKIYHKCDNACIGSIRNGTYDHDVYRDEALNNRFQIKGVELKSGYKDWILWISFAISCFLLCVALLGFIMWACQKGNIRCNICI

SEQ ID NO: 7765 - protein, 566 aa, synthetic construct; identical to SEQ ID NO: 6982
  REGION 1..566: note = hemagglutinin__InfluenzaA__AER08688

SEQ ID NO: 7766 - protein, 566 aa, synthetic construct
  REGION 1..566: note = hemagglutinin__InfluenzaA__AER08690
MKTIIALSYILCLVFAQKLPENDNSTATLCLGHHAVPNGTIVKTITNDQIEVTNATELVQSSSTGEICNSPHQILDGENCTLIDALLGDPQCDGFQNKKWDLFVERSKAHSNCYPYDVPDYASLRSLVASSGTLEFNNESFNWTGVTQNGTSSACIRRSNNSFFSRLNWLTHLNFKYPALNVTMPNNEQFDKLYIWGVHHPGTDKDQIFLYAQASGRITVSTKRSQQAVIPNIGSRPRVRNIPSRVSIYWTIVKPGDILLINSTGNLIAPRGYFKIRSGKSSIMRSDAPIGKCNSTCITPNGSIPNDKPFQNVNRITYGACPRYVKQNTLKLATGMRNVPEKQTRGIFGAIAGFIENGWEGMVDGWYGFRHQNSEGRGQAADLKSTQAAIDQINGKLNRLIGKTNEKFHQIEKEFSEVEGRIQDLEKYVEDTKIDLWSYNAELLVALENQHTIDLTDSEMNKLFEKTKKQLRENAEDMGNGCFKIYHKCDNACIGSIRNGTYDHDVYRDEALNNRFQIKGVELKSGYKDWILWISFAISCFLLCVVLLGFIMWACQKGNIRCNICI

SEQ ID NO: 7767 - protein, 566 aa, synthetic construct; identical to SEQ ID NO: 6982
  REGION 1..566: note = hemagglutinin__InfluenzaA__AER08692

SEQ ID NO: 7768 - protein, 566 aa, synthetic construct
  REGION 1..566: note = hemagglutinin__InfluenzaA__AER08698
MKTTIALSHILCLVFAQKLPGNDNSTATLCLGHHAVPNGTIVKTITNDQIEVTNATELVQSSSAGEICDSPHQILDGENCTLIDALLGDPQCDGFQNKKWDLFVERSRAYSNCYPYDVPDYASLRSLVASSGTLEFNNESFNWTGVTQNGTSSACIRRSNNSFFSRLNWLTHLNFKYPALNVTMPNNEQFDKLYIWGVHHPGTDKDQIFLYAQASGRITVSTKRSQQAVIPNIGSRPRVRNIPSRISIYWTIVKPGDILLINSTGNLIAPRGYFKIRSGKSSIMRSDAPIGKCNSECITPNGSIPNDKPFQNVNRITYGACPRYVKQSTLKLATGMRNVPEKQTRGIFGAIAGFIENGWEGMVDGWYGFRHQNSEGRGQAADLKSTQAAIDQINGKLNRLIGKTNEKFHQIEKEFSEVEGRIQDLEKYVEDTKIDLWSYNAELLVALENQHTIDLTDSEMNKLFEKTKKQLRENAEDMGNGCFKIYHKCDNACIGSIRNGTYDHDVYRDEALNNRFQIKGVELKSGYKDWILWISFAISCFLLCVALLGFIMWACQKGNIRCNICI

SEQ ID NO: 7769 - protein, 566 aa, synthetic construct; identical to SEQ ID NO: 6982
  REGION 1..566: note = hemagglutinin__InfluenzaA__AER08700

SEQ ID NO: 7770 - protein, 566 aa, synthetic construct
  REGION 1..566: note = hemagglutinin__InfluenzaA__AER92712
MKAILVVLLYTFATANADTLCIGYHANNSTDTVDTVLEKNVTVTHSVDLLEDKHNGKLCKLRGVAPLHLGKCNIAGWILGNPECESLSTASSWSYIVETSNSDNGTCYPGDFIDYEELREQLSSVSSFERFEIFPKTSSWPNHDSNKGVTAACPHAGAKSFYKNLIWLVKKGNSYPKLNKSYINDKGKEVLVLWGIHHPSTSTDQQSLYQNADAYVFVGTSRYSKKFKPEIAIRPKVRNQEGRMNYYWTLVEPGDKITFEATGNLVVPRYAFTIERNAGSGIIISDTPIHDCNTTCQTPKGAINTSLPFQNIHPITIGKCPKYVKSTKLRLATGLRNVPSIQSRGLFGAIAGFIEGGWTGMVDGWYGYHHQNEQGSGYAADLKSTQNAIDEITNKVNSVIEKMNTQFTAVGKEFNHLEKRIENLNKKVDDGFLDIWTYNAELLVLLENERTLDYHDSNVKNLYEKVRSQLKNNAKEIGNGCFEFYHKCDNTCMESVKNGTYDYPKYSEEAKLNREEIDGVKLESTRIYQILAIYSTVASSLVLVVSLGAISFWMCSNGSLQCRICI

SEQ ID NO: 7771 - protein, 566 aa, synthetic construct; identical to SEQ ID NO: 5533
  REGION 1..566: note = hemagglutinin__InfluenzaA__AET10090

SEQ ID NO: 7772 - protein, 566 aa, synthetic construct; identical to SEQ ID NO: 5533
  REGION 1..566: note = hemagglutinin__InfluenzaA__AET10091

SEQ ID NO: 7773 - protein, 566 aa, synthetic construct; identical to SEQ ID NO: 5533
  REGION 1..566: note = hemagglutinin__InfluenzaA__AET10092

SEQ ID NO: 7774 - protein, 566 aa, synthetic construct
  REGION 1..566: note = hemagglutinin__InfluenzaA__AET10094
MKTIIALSCILCLVFAQKLPGNDNSTATLCLGHHAVPNGTIVKTITNDQIEVTNATELVQSSSTGEICDSPHQILDGENCTLIDALLGDPQCDGFQNKKWDLFVERSKAYSSCYPYDVPDYASLRSLVASSGTLEFNNESFNWTGVTQNGTSSACIRRSNNSFFSRLNWLTHLNFKYPALNVTMPNNEQFDKLYIWGVHHPGTDKDQIFLYAQASGRITVSTKRSQQAVIPNIGSRPRVRNIPSRISIYWTIVKPGDILLINSTGNLIAPRGYFKIRSGKSSIMRSDAPIGKCNSECITPNGSIPNDKPFQNVNRITYGACPRYVKQSTLKLATGMRNVPEKQTRGIFGAIAGFIENGWEGMVDGWYGFRHQNSEGRGQAADLKSTQAAIDQINGKLNRLIGKTNEKFHQIEKEFSEVEGRIQDLEKYVEDTKIDLWSYNAELLVALENQHTIDLTDSEMNKLFEKTKKQLRENAEDMGNGCFTIYHKCDNACIGSIRNGTYDHNVYRDEALNNRFQIKGVELKSGYKDWILWISFAISCFLLCVALLGFIMWACQKGNIRCNICI

SEQ ID NO: 7775 - protein, 566 aa, synthetic construct
  REGION 1..566: note = hemagglutinin__InfluenzaA__AET10095
MKTIIALSYILCLVFAQKLPGNDNSTATLCLGHHAVPNGTIVKTITNDQIEVTNATELVQSSSTGEICDSPHQILDGENCTLIDALLGDPQCDGFQNKKWDLFVERSKAYSNCYPYDVPDYASLRSLVASSGTLEFNNESFNWTGVTQNGTSSACIRRSNNSFFSRLNWLTHLNFKYPALNVTMPNNEQFDKLYIWGVHHPGTDKDQIFLYAQASGRITVSTKRSQQAVIPNIGSRPRVRNIPSRISIYWTIVKPGDILLINSTGNLIAPRGYFKIRSGKSSIMRSDTPIGKCNSECITPNGSIPNDKPFQNVNRITYGACPRYVKQNTLKLATGMRNVPEKQTRGIFGAIAGFIENGWEGMVDGWYGFRHQNSEGRGQAADLKSTQAAIDQINGKLNRLIGKTNEKFHQIEKEFSEVEGRIQDLEKYVEDTKIDLWSYNAELLVALENQHTIDLTDSEMNKLFEKTKKQLRENAEDMGNGCFKIYHKCDNACIESIRNGTYDHDVYRDEALNNRFQIKGVELKSGYKDWILWISFAISCFLLCVALLGFIMWACQKGNIRCNICI

SEQ ID NO: 7776 - protein, 566 aa, synthetic construct
  REGION 1..566: note = hemagglutinin__InfluenzaA__AET10096
MKTIIALSYILCLVFAQKFPGNDNSTATLCLGHHAVPNGTIVKTITNDQIEVTNATELVQNSSTGEICDSPHQIIDGENCTLIDALLGDPQCDGFQNKKWNLFVERSKAYSNCYPYDVPDYASLRSLVASSGTLEFNNESFNWTGVTQNGTSSACIRRSNNSFFSRLNWLTHLNFKYPALNVTMPNNEQFDKLYIWGVHHPGTDKDQIFLYAQASGRITVSTKRSQQAVIPNIGSRPRVRNIPSRISIYWTIVKPGDILLINSTGNLIAPRGYFKIRSGKSSIMRSDAPIGKCNSECITPNGSIPNDKPFQNVNRITYGACPRYVKQNTLKLATGMRNVPEKQTRGIFGAIAGFIENGWEGMVDGWYGFRHQNSEGRGQAADLKSTQAAIDQINGKLNRLIGKTNEKFHQIEKEFSEVEGRIQDLEKYVEDTKIDLWSYNAELLVALENQHTIDLTDSEMNKLFEKTKKQLRENAEDMGNGCFKIYHKCDNACIGSIRNGTYDHDVYRDEALNNRFQIKGVELKSGYKDWILWISFAISCFLLCVALLGFIMWACQKGNIRCNICI

SEQ ID NO: 7777 - protein, 566 aa, synthetic construct
  REGION 1..566: note = hemagglutinin__InfluenzaA__AET10098
MKTIIALSYILCLVFAQKFPGNDNSTATLCLGHHAVPNGTIVKTITNDQIEVTNATELVQNSSTGEICDSPHQIIDGENCTLIDALLGDPQCDGFQNKKWDLFVERSKAYSNCYPYDVPDYASLRSLVASSGTLEFNNESFNWTGVTQNGTSSACIRRSNNSFFSRLNWLTHLNFKYPALNVTMPNNEQFDKLYIWGVHHPGTDKDQIFLYAQASGRITVSTKRSQQAVIPNIGSRPRVRNIPSRISIYWTIVKPGDILLINSTGNLIAPRGYFKIRSGKSSIMRSDAPIGKCNSECITPNGSIPNDKPFQNVNRITYGACPRYVKQNTLKLATGMRNVPEKQTRGIFGAIAGFIENGWEGMVDGWYGFRHQNSEGRGQAADLKSTQAAIDQINGKLNRLIGKTNEKFHQIEKEFSEVEGRIQDLEKYVEDTKIDLWSYNAELLVALENQHTIDLTDSEMNKLFEKTKKQLRENAEDMGNGCFKIYHKCDNACIGSIRNGTYDHDVYRDEALNNRFQIKGVELKSGYKDWILWISFAISCFLLCVALLGFIMWACQKGNIRCNICI

SEQ ID NO: 7778 - protein, 566 aa, synthetic construct; identical to SEQ ID NO: 6855
  REGION 1..566: note = hemagglutinin__InfluenzaA__AET10099

SEQ ID NO: 7779 - protein, 566 aa, synthetic construct; identical to SEQ ID NO: 6982
  REGION 1..566: note = hemagglutinin__InfluenzaA__AET10100

SEQ ID NO: 7780 - protein, 566 aa, synthetic construct
  REGION 1..566: note = hemagglutinin__InfluenzaA__AET10101
MKTIIALSCILCLVFAQKLPGNDNSTATLCLGHHAVPNGTIVKTITNDQIEVTNATELVQSSSTGEICDSPHQILDGENCTLIDALLGDPQCDGFQNKKWDLFVERSKAYSNCYPYDVPDYASLRSLVASSGTLEFNNESFNWTGVTQNGTSSACIRRSNNSFFSRLNWLTHLNFKYPALNVTMPNNEQFDKLYIWGVHHPGADKDQIFLYAQASGRITVSTKRSQQAVIPNIGSRPRVRNIPSRISIYWTIVKPGDILLINSTGNLIAPRGYFKIRSGKSSIMRSDAPIGKCNSECITPNGSIPNDKPFQNVNRITYGACPRYVKQSTLKLATGMRNVPEKQTRGIFGAIAGFIENGWEGMVDGWYGFRHQNSEGRGQAADLKSTQAAIDQINGKLNRLIGKTNEKFHQIEKEFSEVEGRIQDLEKYVEDTKIDLWSYNAELLVALENQHTIDLTDSEMNKLFEKTKKQLRENAEDMGNGCFTIYHKCDNACIGSIRNGTYDHNVYRDEALNNRFQIKGVELKSGYKDWILWISFAISCFLLCVALLGFIMWACQKGNIRCNICI

SEQ ID NO: 7781 - protein, 566 aa, synthetic construct
  REGION 1..566: note = hemagglutinin__InfluenzaA__AET10102
MKTIIALSYILCLVFTQKLPGNDNSTATLCLGHHAVPNGTIVKTITNDQIEVTNATELVQSSSTGEICDSPHQILDGKNCTLIDALLGDPQCDGFQNKKWDLFVERSKAYSNCYPFDVPDYASLRSLVASSGTLEFNNESFNWTGVTQNGTSSACMRRSKSSFFSRLNWLTHLNFKYPALNVTMPNDEQFDKLYIWGVHHPGTDKDQIFLYAQASGRITVSTKRSQQTVIPNIGSRPRIRNIPSRISIYWTIVKPGDILLINSTGNLIAPRGYFKIRSGKSSIMRSDAPIGKCNSECITPNGSIPNDKPFQNVNRITYGACPRYVKQNTLKLATGMRNVPEKQTRGIFGAIAGFIENGWEGMVDGWYGFRHQNSEGRGQAADLKSTQAAIDQINGKLNRLIGRTNEKFHQIEKEFSEVEGRIQDLEKYVEDTKIDLWSYNAELLVALENQHTIDLTDSEMNKLFEKTRKQLRENAEDMGNGCFKIYHKCDNACIGSIRNGTYDHDVYRDEALNNRFQIKGVELKSGYKDWILWISFAISCFLLCVASLGFIMWACQKGNIRCNICI

SEQ ID NO: 7782 - protein, 566 aa, synthetic construct
  REGION 1..566: note = hemagglutinin__InfluenzaA__AET10103
MKTIIALSYILCLVFAQKLPGNDNSTATLCLGHHAVPNGTIVKTITNDQIEVTNATELVQNSSTGEICDSPHQILDGENCTLIDALLGDPQCDGFQNKKWDLFVERSKAYSNCYPYDVPDYASLRSLVASSGTLEFNNESFNWTGVTQNGTSSACIRRSNNSFFSRLNWLTHLNFKYPALNVTMPNNEQFDKLYIWGVHHPGTDKDQIFLYAQASGRITVSTKRSQQAVIPNIGSRPRVRNIPSRISIYWTIVKPGDILLINSTGNLIAPRGYFKIRSGKSSIMRSDAPIGKCNSECITPNGSIPNDKPFQNVNRITYGACPRYVKQNTLKLATGMRNVPEKQTRGIFGAIAGFIENGWEGMVDGWYGFRHQNSEGRGQAADLKSTQAAIDQINGKLNRLIGKTNEKFHQIEKEFSEVEGRIQDLEKYVEDTKIDLWSYNAELLVALENQHTIDLTDSEMNKLFEKTKKQLRENAEDMGNGCFKIYHKCDNACIGSIRNGTYDHDVYRDEALNNRFQIKGVELKSGYKDWILWISFAISCFLLCVALLGFIMWACQKGNIRCNICI

SEQ ID NO: 7783 - protein, 566 aa, synthetic construct
  REGION 1..566: note = hemagglutinin__InfluenzaA__AET10104
MKTIIALSYILCLVFAQKFPGNDNSTATLCLGHHAVPNGTIVKTITNDQIEVTNATELVQNSSTGEICDSPHQIIDGENCTLIDALLGDPQCDGFQNKKWDLFVERSKAYSNCYPYDVPDYASLRSLVASSGTLEFNNESFNWTGVTQNGTSSACIRRSNNSFFSRLNWLTHLNFKYPALNVTMPNNEQFDKLYIWGVHHPGTDKDQIFLYAQASGRITVSTKRSQQAVIPNIGSRPRVRNIPSRISIYWTIVKPGDILLINSTGNLIAPRGYFKIRSGKSSIMRSDAPIGKCNSECITPNGSIPNDKPFQNVNRITYGACPRYVKQNTLKLATGMRNVPEKQTRGIFGAIAGFIENGWEGMVDGWYGFRHQNSEGRGQAADLKSTQAAIDQINGKLNRLIGKTNEKFHQIEKEFSEVEGRIQDLGKYVEDTKIDLWSYNAELLVALENQHTIDLTDSEMNKLFEKTKKQLRENAEDMGNGCFKIYHKCDNACIGSIRNGTYDHDVYRDEALNNRFQIKGVELKSGYKDWILWISFAISCFLLCVALLGFIMWACQKGNIRCNICI

SEQ ID NO: 7784 - protein, 566 aa, synthetic construct
  REGION 1..566: note = hemagglutinin__InfluenzaA__AET10105
MKTIIALSYILCLVFAQELPGNDNSTATLCLGHHAVPNGTIVKTITNDQIEVTNATELVQSSSTGEICNSPHQILDGENCTLIDALLGDPQCDGFQNKKWDLFVERSKAHSNCYPYDVPDYASLRSLVASSGTLEFNNESFNWTGVTQNGTSSACIRRSNNSFFSRLNWLTHLNFKYPALNVTMPNNEQFDKLYIWGVHHPGTDKDQIFLYAQAAGRITVSTKRSQQAVIPNIGSRPRVRNIPSRVSIYWTIVKPGDILLINSTGNLIAPRGYFKIRSGKSSIMRSDAPIGKCNSACITPNGSIPNDKPFQNVNRITYGACPRYVKQNTLKLATGMRNVPEKQTRGIFGAIAGFIENGWEGMVDGWYGFRHQNSEGRGQAADLKSTQAAIDQINGKLNRLIGKTNEKFHQIEKEFSEVEGRIQDLEKYVEDTKIDLWSYNAELLVALENQHTIDLTDSEMNKLFEKTKKQLRENAEDMGNGCFKIYHKCDNACIGSIRNGTYDHDVYRDEALNNRFQIKGVELKSGYKDWILWISFAISCFLLCVALLGFIMWACQKGNIRCNICI

SEQ ID NO: 7785 - protein, 566 aa, synthetic construct
  REGION 1..566: note = hemagglutinin__InfluenzaA__AET10106
MKTIIALSYILCLVFAQKLPGNYNSTATLCLGHHAVPNGTIVKTITNDQIEVTNATELVQSSSTGEICNSPHQILDGENCTLIDALLGDPQCDGFQNKKWDLFVERSKAHSNCYPYDVPDYASLRSLVASSGTLEFNNESFNWTGVTQNGTSSACIRRSNNSFFSRLNWLTHLNFKYPALNVTMPNNEQFDKLYIWGVHHPGTDKDQIFLYAQASGRITVSTKRSQQAVIPNIGSRPRVRNIPSRVSIYWTIVKPGDILLINSTGNLIAPRGYFKIRSGKSSIMRSDAPIGKCNSACITPNGSIPNDKPFQNVNRITYGACPRYVKQNTLKLATGMRNVPEKQTRGIFGAIAGFIENGWEGMVDGWYGFRHQNSEGRGQAADLKSTQAAIDQINGKLNRLIGKTNEKFHQIEKEFSEVEGRIQDLEKYVEDTKIDLWSYNAELLVALENQHTIDLTDSEMNKLFEKTKKQLRENAEDMGNGCFKIYHKCDNACIGSIRNGTYDHDVYRDEALNNRFQIKGVELKSGYKDWILWISFAISCFLLCVALLGFIMWACQKGNIRCNICI

SEQ ID NO: 7786 - protein, 566 aa, synthetic construct
  REGION 1..566: note = hemagglutinin__InfluenzaA__AET10107
MKTIIALSYILCLVFAQEIPGNDNSTATLCLGHHAVPNGTIVKTITNDQIEVTNATELVQSSSTGEICNSPHQILDGENCTLIDALLGDPQCDGFQNKKWDLFVERSKAHSNCYPYDVPDYASLRSLVASSGTLEFNNESFNWTGVTQNGTSSACIRRSNNSFFSRLNWLTHLNFKYPALNVTMPNNEQFDKLYIWGVHHPGTDKDQIFLYAQASGRITVSTKRSQQAVIPNIGSRPRVRNIPSRVSIYWTIVKPGDILLINSTGNLIAPRGYFKIRSGKSSIMRSDAPIGKCNSACITPNGSIPNDKPFQNVNRITYGACPRYVKQNTLKLATGMRNVPEKQTRGIFGAIAGFIENGWEGMVDGWYGFRHQNSEGRGQAADLKSTQAAIDQINGKLNRLIGKTNEKFHQIEKEFSEVEGRIQDLEKYVEDTKIDLWSYNAELLVALENQHTIDLTDSEMNKLFEKTKKQLRENAEDMGNGCFKIYHKCDNACIGSIRNGTYDHDVYRDEALNNRFQIKGVELKSGYKDWILWISFAISCFLLCVALLGFIMWACQKGNIKCNICI

SEQ ID NO: 7787 - protein, 566 aa, synthetic construct; identical to SEQ ID NO: 3411
  REGION 1..566: note = hemagglutinin__InfluenzaA__AET10108

SEQ ID NO: 7788 - protein, 566 aa, synthetic construct; identical to SEQ ID NO: 6982
  REGION 1..566: note = hemagglutinin__InfluenzaA__AET10109

SEQ ID NO: 7789 - protein, 566 aa, synthetic construct
  REGION 1..566: note = hemagglutinin__InfluenzaA__AET10110
MKTIIALSYILCLVFAQKLPGNDNSTATLCLGHHAVPNGTIVKTITNDQIEVTNATELVQSSSTGEICNSPHQILDGENCTLIDALLGDPQCDGFQNKKWDLFVERSKAYSNCYPYDVPDYASLRSLVASSGTLEFNNESFNWTGVTQNGTSSACIRRSNNSFFSRLNWLTHLNFKYPALNVTMPNNEQFDKLYIWGVHHPGTDKDQIFLYAQASGRITVSTKRSQQAVIPNIGSRPRVRNIPSRVSIYWTIVKPGDILLINSTGNLIAPRGYFKIRSGKSSIMRSDAPIGKCNSACITPNGSIPNDKPFQNVNRITYGACPRYVKQNTLKLATGMRNVPEKQTRGIFGAIAGFIENGWEGMVDGWYGFRHQNSEGRGQAADLKSTQAAIDQINGKLNRLIGKTNEKFHQIEKEFSEVEGRIQDLEKYVEDTKIDLWSYNAELLVALENQHTIDLTDSEMNKLFEKTKKQLRENAEDMGNGCFKIYHKCDNACIGSIRNGTYDHDVYRDEALNNRFQIKGVELKSGYKDWILWISFAISCFLLCVALLGFIMWACQKGNIKCNICI

SEQ ID NO: 7790 - protein, 566 aa, synthetic construct
  REGION 1..566: note = hemagglutinin__InfluenzaA__AET10111
MKTIIALSYILCLVFAQEIPGNDNSTATLCLGHHAVPNGTIVKTITNDQIEVTNATELVQSSSTGEICNSPHQILDGENCTLIDALLGDPQCDGFQNKKWDLFVERSKAHSNCYPYDVPDYASLRSLVASSGTLEFNNESFNWTGVTQNGTSSACIRRSNNSFFSRLNWLTHLNFKYPALNVTMPNNEQFDKLYIWGVHHPGTDKDQIFLYAQASGRITVSTKRSQQAVIPNIGSRPRVRNIPSRVSIYWTIVKPGDILLSNSTGNLIGPRGYFKIRSGKSSIMRSDAPIGKCNSACITPNGSIPNDKPFQNVNRITYGACPRYVKQNTLKLATGMRNVPEKQTRGIFGAIAGFIENGWEGMVDGWYGFRHQNSEGRGQAADLKSTQAAIDQINGKLNRLIGKTNEKFHQIEKEFSEVEGRIQDLEKYVEDTKIDLWSYNAELLVALENQHTIDLTDSEMNKLFEKTKKQLRENAEDMGNGCFKIYHKCDNACIGSIRNGTYDHDVYRDEALNNRFQIKGVELKSGYKDWILWISFAISCFLLCVALLGFIMWACQKGNIRCNICI

SEQ ID NO: 7791 - protein, 566 aa, synthetic construct
  REGION 1..566: note = hemagglutinin__InfluenzaA__AET10113
MKTIIALSYILCLVFAQELPGNDNSTATLCLGHHAVQNGTIVKTITNDQIEVTNATELVQSSSTGEICNSPHQILDGENCTLIDALLGDPQCDGFQNKKWDLFVERSKAHSNCYPYDVPDYASLRSLVASSGTLEFNNESFNWTGVTQNGTSSACIRRSNNSFFSRLNWLTHLNFKYPALNVTMPNNEQFDKLYIWGVHHPGTDKDQIFLYAQASGRITVSTKRSQQAVIPNIGSRPRVRNIPSRVSIYWTIVKPGDILLINSTGNLIAPRGYFKIRSGKSSIMRSDAPIGKCNSACITPNGSIPNDKPFQNVNRITYGACPRYVKQNTLKLATGMRNVPEKQTRGIFGAIAGFIENGWEGMVDGWYGFRHQNSEGRGQAADLKSTQAAIDQINGKLNRLIGKTNEKFHQIEKEFSEVEGRIQDLEKYVEDTKIDLWSYNAELLVALENQHTIDLTDSEMNKLFEKTKKQLRENAEDMGNGCFKIYHKCDNACIGSIRNGTYDHDVYRDEALNNRFQIKGVELKSGYKDWILWISFAISCFLLCVALLGFIMWACQKGNIRCNICI

SEQ ID NO: 7792 - protein, 566 aa, synthetic construct
  REGION 1..566: note = hemagglutinin__InfluenzaA__AET10114
MKTIIALSYILCLVFAQELPGNDDSTATLCLGHHAVPNGTIVKTITNDQIEVTNATELVQSSSTGEICNSPHQILDGENCTLIDALLGDPQCDGFQNKKWDLFVERSKAHSNCYPYDVPDYASLRSLVASSGTLEFNNESFNWTGVTQNGTSSACIRRSNNSFFSRLNWLTHLNFKYPALNVTMPNNEQFDKLYIWGVHHPGTDKDQIFLYAQASGRITVSTKRSQQAVIPNIGSRPRVRNIPSRVSIYWTIVKPGDILLINSTGNLIAPRGYFKIRSGKSSIMRSDAPIGKCNSACITPNGSISNDKPFQNVNRITYGACPRYVKQNTLKLATGMRNVPEKQTRGIFGAIAGFIENGWEGMVDGWYGFRHQNSEGRGQAADLKSTQAAIDQINGKLNRLIGKTNEKFHQIEKEFSEVEGRIQDLEKYVEDTKIDLWSYNAELLVALENQHTIDLTDSEMNKLFEKTKKQLRENAEDMGNGCFKIYHKCDNACIGSIRNGTYDHDVYRDEALNNRFQIKGVELKSGYKDWILWISFAISCFLLCVALLGFIMWACQKGNIMCNICI

SEQ ID NO: 7793 - protein, 565 aa, synthetic construct
  REGION 1..565: note = hemagglutinin__InfluenzaA__AET50439
MKVKLLVLLCTFTATYADTICIGYHANNSTDTVDTVLEKNVTVTHSVNLLENSHNGKLCLLKGIAPLQLGNCSVAGWILGNPECELLISKESWSYIVEKPNPENGTCYPGHFADYEELREQLSSVSSFERFEIFPKESSWPNHTVTGVSASCSHNGESSFYRNLLWLTGKNGLYPNLSKSYANNKEKEVLVLWGVHHPPNIGNQKALYHTENAYVSVVSSHYSRKFTPEIAKRPKVRDQEGRINYYWTLLEPGDTIIFEANGNLIAPRYAFALSRGFGSGIINSNAPMDKCDAKCQTPQGAINSSLPFQNVHPVTIGECPKYVRSAKLRMVTGLRNIPSIQSRGLFGAIAGFIEGGWTGMVDGWYGYHHQNEQGSGYAADQKSTQNAINGITNKVNSVIEKMNTQFTAVGKEFNKLERRMENLNKKVDDGFIDIWTYNAELLVLLENERTLDFHDSNVKNLYEKVKSQLKNNAKEIGNGCFEFYHKCNDECMESVKNGTYDYPKYSEESKLNREKIDGVKLESMGVYQILAIYSTVASSLVLLVSLGAISFWMCSNGSLQCRICI

SEQ ID NO: 7794 - protein, 565 aa, synthetic construct
  REGION 1..565: note = hemagglutinin__InfluenzaA__AET50440
MKVKLLVLLCTFTATYADTICIGYHANNSTDTVDTVLEKNVTVTHSVNLLENSHNGKLCLLKGIAPLQLGNCSVAGWILGNPECELLISKESWSYIVEKPNPENGTCYPGHFADYEELREQLSSVSSFERFEIFPKESSWPTHTVTGVSASCSHNGESSFYRNLLWLTGKNGLYPNLSKSYANNKEKEVLVLWGVHHPPNIGNQKALYHTENAYVSVVSSHYSRKFTPEIAKRPKVRDQEGRINYYWTLLEPGDTIIFEANGNLIAPRYAFALSRGFGSGIINSNAPMDKCDAKCQTPQGAINSSLPFQNVHPVTIGECPKYVRSAKLRMVTGLRNIPSIQSRGLFGAIAGFIEGGWTGMVDGWYGYHHQNEQGSGYAADQKSTQNAINGITNKVNSVIEKMNTQFTAVGKEFNKLERRMENLNKKVDDGFIDIWTYNAELLVLLENERTLDFHDSNVKNLYEKVKSQLKNNAKEIGNGCFEFYHKCNDECMESVKNGTYDYPKYSEESKLNREKIDGVKLESMGVYQILAIYSTVASSLVLLVSLGAISFWMCSNGSLQCRICI

SEQ ID NO: 7795 - protein, 565 aa, synthetic construct
  REGION 1..565: note = hemagglutinin__InfluenzaA__AET50441
MKVKLLVLLCTFTATYADTICIGYHANNSTDTVDTVLEKNVTVTHSVNLLENSHNGKLCLLKGIAPLQLGNCSVAGWILGNPECELLISKESWSYIVEKPNPENGTCYPGHFADYEELREQLSSVSSFERFEIFPKESSWPTHTVTGVSASCSHNGESSFYRNLLWLTGKNGLYPNLSKSYANNKEKEVLVLWGVHHPPNIGNQKALYHTENAYVSVVSSHYSRKFTPEIAKRPKVRGQEGRINYYWTLLEPGDTIIFEANGNLIAPRYAFALSRGFGSGIINSNAPMDKCDAKCQTPQGAINSSLPFQNVHPVTIGECPKYVRSAKLRMVTGLRNIPSIQSRGLFGAIAGFIEGGWTGMVDGWYGYHHQNEQGSGYAADQKSTQNAINGITNKVNSVIEKMNTQFTAVGKEFNKLERRMENLNKKVDDGFIDIWTYNAELLVLLENERTLDFHDSNVKNLYEKVKSQLKNNAKEIGNGCFEFYHKCNDECMESVKNGTYDYPKYSEESKLNREKIDGVKLESMGVYQILAIYSTVASSLVLLVSLGAISFWMCSNGSLQCRICI

SEQ ID NO: 7796 - protein, 565 aa, synthetic construct
  REGION 1..565: note = hemagglutinin__InfluenzaA__AET50442
MKVKLLVLLCTFTATYADTICIGYHANNSTDTVDTVLEKNVTVTHSVNLLENSHNGKLCLLKGIAPLQLGNCSVAGWILGNPECELLISKESWSYIVEKPNPENGICYPGHFADYEELREQLSSVSSFERFEIFPKESSWPTHTVTGVSASCSHNGESSFYRNLLWLTGKNGLYPNLSKSYANNKEKEVLVLWGVHHPPNIGNQKALYHTENAYVSVVSSHYSRKFTPEIAKRPKVRGQEGRINYYWTLLEPGDTIIFEANGNLIAPRYAFALSRGFGSGIINSNAPMDKCDAKCQTPQGAINSSLPFQNVHPVTIGECPKYVRSAKLRMVTGLRNIPSIQSRGLFGAIAGFIEGGWTGMVDGWYGYHHQNEQGSGYAADQKSTQNAINGITNKVNSVIEKMNTQFTAVGKEFNKLERRMENLNKKVDDGFIDIWTYNAELLVLLENERTLDFHDSNVKNLYEKVKSQLKNNAKEIGNGCFEFYHKCNDECMESVKNGTYDYPKYSEESKLNREKIDGVKLESMGVYQILAIYSTVASSLVLLVSLGAISFWMCSNGSLQCRICI

SEQ ID NO: 7797 - protein, 565 aa, synthetic construct
  REGION 1..565: note = hemagglutinin__InfluenzaA__AET84163
MKVKLLVLLCTFTATYADTICIGYHANNSTDTVDTVLEKNVTVTHSVNLLENSHNGKLCLLKGIAPLQLGNCSVAGWILGNPECESLISKESWSYIVEKPNPENGTCYPGHFADYEELREQLSSVSSFERFEIFPKESSWPNHTVTGVSASCSHNGESSFYRNLLWLTGKNGLYPNLSKSYANNKEKEVLVLWGVHHPPSISNQKTLYHTENAYVSVVSSHYSRKFTPEVAKRPKVRDQEGRINYYWTLLEPGDTIIFEANGNLIAPRYAFALSRGFGSGIINSNAPMDKCDAKCQTPQGAINSSLPFQNVHPVTIGECPKYVRSAKLRMVTGLRNIPSIQSRGLFGAIAGFIEGGWTGMVDGWYGYHHQNEQGSGYAADQKSTQNAINGITNKVNSVIEKMNTQFTAVGKEFNKLERRMENLNKKVDDGFIDIWTYNAELLVLLENERTLDFHDSNVKNLYEKVKSQLKNNAKEIGNGCFEFYHKCNDECMESVKNGTYDYPKYSEESKLNREKIDGVKLESMGVYQILAIYSTVASSLVLLVSLGAISFWMCSNGSLQCRICI

SEQ ID NO: 7798 - protein, 565 aa, synthetic construct
  REGION 1..565: note = hemagglutinin__InfluenzaA__AET84174
MKVKLLVLLCTFTATYADTICIGYHANNSTDTVDTVLEKNVTVTHSVNLLENSHNGKLCLLKGIAPLQLGNCSVAGWILGNPECELLISKESWSYIVEKPNPENGTCYPGHFADYEELREQLSSVSSFERFEIFPKESSWPNHTVTGVSASCSHNGESSFYRNLLWLTGKNGLYPNLSKSYANNKEKEVLVLWGVHHPPNIVDQKTLYRTENAYVSVVSSHYSRKFTPEIAKRPKVRDQEGRINYYWTLLEPGDTIIFEANGNLIAPRYAFALIRGFGSGIINSNAPMGKCDAKCQTPQGAINSSLPFQNVHPVTIGECPKYVRSAKLRMVTGLRNIPSIQSRGLFGAIAGFIEGGWTGMVDGWYGYHHQNEQGSGYAADQKSTQNAINGITNKVNSVIEKMNTQFTAVGKEFNKLERRMENLNKKVDDGFIDIWTYNAELLVLLENERTLDFHDSNVKNLYEKVKSQLKNNAKEIGNGCFEFYHKCNDECMESVKNGTYDYPKYSEESKLNREKIDGVKLESMGVYQILAIYSTVASSLVLLVSLGAISFWMCSNGSLQCRICI

SEQ ID NO: 7799 - protein, 565 aa, synthetic construct
  REGION 1..565: note = hemagglutinin__InfluenzaA__AET84196
MKVKLLVLLCTFTATYADTICIGYHANNSTDTVDTVLEKNVTVTHSVNLLENSHNGKLCLLKGIAPLQLGNCSVAGWILGNPECESLISKESWSYIVEKPNPENGTCYPGHFADYEELREQLSSVSSFERFEIFPKESSWPNHTVTGVSASCSHNGESSFYRNLLWLTRKNGLYPTLSKSYANNKEKEVLVLWGVHHPPSINDQKTLYHTENAYVSVVSSHYSRKFTPEIAKRPKVRDQEGRINYYWTLLEPGDTIIFEANGNLIAPRYAFALSRGFGSGIINSSAPMDKCDAKCQTPQGAINSSLPFQNVHPVTIGECPKYVRSAKLRMVTGLRNIPSIQSRGLFGAIAGFIEGGWTGMVDGWYGYHHQNEQGSGYAADQKSTQNAINGITNKVNSVIEKMNTQFTAVGKEFNKLERRMENLNKKVDDGFIDIWTYNAELLVLLENERTLDFHNSNVKNLYEKVKSQLKNNAKEIGNGCFEFYHKCNDECMESVKNGTYDYPKYSEESKLNREKIDGVKLESMGVYQILAIYSTVASSLVLLVSLGAISFWMCSNGSLQCRICI

SEQ ID NO: 7800 - protein, 565 aa, synthetic construct
  REGION 1..565: note = hemagglutinin__InfluenzaA__AET84207
MKVKLLVLLCTFTATYADTICIGYHANNSTDTVDTVLEKNVTVTHSVNLLENSHNGKLCLLKGIAPLQLGNCSVAGWILGNPECELLISKESWSYIVEKPNPENGTCYPGHFADYEELREQLSSVPSFERFEIFPKESSWPNHTVTGVSASCSHNGESSFYRNLLWLTGKNGLYPNLSKSYANNKEKEVLVLWGVHHPPSINDQKTLYHTENAYVSVVSSHYSRKFTPEIAKRPKVRDQEGRINYYWTLLEPRDTIIFEANGNLIAPRYAFALSRGFGSGIINSNAPMDKCDAKCQTPQGAINSSLPFQNVHPVTIGECPKYVRSAKLRMVTGLRNIPSIQSRGLFGAIAGFIEGGWTGMVDGWYGYHHQNEQGSGYAADQKSTQNAINGITNKVNSVIEKMNTQFTAVGKEFNKLERRMENLNKKVDDGFIDIWTYNAELLVLLENERTLDFHDSNVKNLYEKVKSQLKNNAKEIGNGCFEFYHKCNDECMESVKNGTYDYPKYSEESKLNREKIDGVKLESMGVYQILAIYSTVASSLVLLVSLGAISFWMCSNGSLQCRICI

SEQ ID NO: 7801 - protein, 565 aa, synthetic construct
  REGION 1..565: note = hemagglutinin__InfluenzaA__AET84218
MKVKLLVLLCTFTATYADTICIGYHANNSTDTVDTVLEKNVTVTHSVNLLENSHNGKLCLLKGIAPLQLGNCSVAGWILGNPECELLISKESWSYIVEKPNPENGTCYPGHFADYEELREQLSSVSSFERFEIFPKESSWPNHTVTGVSASCSHNGESSFYRNLLWLTGKNGLYPNLSKSYANNKEKEVLVLWGVHHPPNISNQKTLYHTENAYVSVVSSHYSRKFTPEIAKRPKVRDQEGRINYYWTLLEPGDTIIFEASGNLIAPRYAFALSRGFGSGIINSNAPMDKCDAKCQTPQGAINSSLPFQNVHPVTIGECPKYVRSAKLRMVTGLRNIPSIQSRGLFGAIAGFIEGGWTGMVDGWYGYHHQNEQGSGYAADQKSTQNAINGITNKVNSVIEKMNTQFTAVGKEFNKLERRMENLNKKVDDGFIDIWTYNAELLVLLENERTLDFHDSNVKNLYEKVKSQLKNNAKEIGNGCFEFYHKCNDECMESVKNGTYDYPKYSEESKLNREKIDGVKLESMGVYQILAIYSTVASSLVLLVSLGAISFWMCSNGSLQCRICI

SEQ ID NO: 7802 - protein, 565 aa, synthetic construct
  REGION 1..565: note = hemagglutinin__InfluenzaA__AET84229
MKVKLLVLLCTFTATYADTICIGYHANNSTDTVDTVLEKNVTVTHSVNLLENSHNGKLCLLKGIAPLQLGNCSVAGWILGNPECELLISKESWSYIVEKPNPENGTCYPGHFADYEELREQLSSVSSFERFEIFPKESSWPNHTVTGVSASCSHNGESSFYRNLLWLTGKNGLYPTLSKSYANNKEKEVLVLWGVHHPPNIVDQKTLYRTENAYVSVVSSHYSRKFTPEIAKRPKVRDQEGRINYYWTLLEPGDTIIFEANGNLIAPRYAFALSRGFGSGIINSNAPMGKCDAKCQTPQGAINSSLPFQNVHPVTIGECPKYVRSAKLRMVTGLRNIPPIQSRGLFGAIAGFIEGGWTGMVDGWYGYHHQNEQGSGYAADQKSTQNAINGITNKVNSVIEKMNTQFTAVGKEFNKLERRMENLNKKVDDGFIDIWTYNAELLVLLENERTLDFHDSNVKNLYEKVKSQLKNNAKEIGNGCFEFYHKCNDECMESVKNGTYDYPKYSEESKLNREKIDGVKLESMGVYQILAIYSTVASSLVLLVSLGAISFWMCSNGSLQCRICI

SEQ ID NO: 7803 - protein, 565 aa, synthetic construct
  REGION 1..565: note = hemagglutinin__InfluenzaA__AET84240
MKVKLLVLLCTFTATYADTICIGYHANNSTDTVDTVLEKNVTVTHSVNLLENSHNGKLCLLKGIAPLQLGNCSVAGWILGNPECELLISKESWSYIVEKPNPENGTCYPGYFADYEELREQLSSVSSFERFEIFPKESSWPNHTVTGVSASCSHNGESSFYRNLLWLTGKNGLYPNLSKSYANNKEKEVLVLWGVHHPPNIVDQKTLYRTENAYVSVVSSHYSRKFTPEIAKRPKVRDQEGRINYYWTLLEPGDTIIFEANGNLIAPRYAFALSRGFGSGIINSNAPMGKCDAKCQTPQGAINSSLPFQNVHPVTIGECPKYVRSAKLRMVTGLRNIPSIQSRGLFGAIAGFIEGGWTGMVDGWYGYHHQNEQGSGYAADQKSTQNAINGITNKVNSVIEKMNTQFTAVGKEFNKLERRMENLNKKVDDGFIDIWTYNAELLVLLENERTLDFHDSNVKNLYEKVKSQLKNNAKEIGNGCFEFYHKCNNECMESVKNGTYDYPKYSEESKLNREKIDGVKLESMGVYQILAIYSTVASSLVLLVSLGAISFWMCSNGSLQCRICI

SEQ ID NO: 7804 - protein, 565 aa, synthetic construct
  REGION 1..565: note = hemagglutinin__InfluenzaA__AET84251
MKVKLLVLLCTFTATYADTICIGYHANNSTDTVDTVLEKNVTVTHSVNLLENSHNGKLCLLKGIAPLQLGNCSVAGWILGNPECELLISKESWSYIVEKPNPENGTCYPGHFADYEELREQLSSVSSFERFEIFPKESSWPNHTVTGVSASCSHNGESSFYRNLLWLTGKNGLYPNLSKSYANNKEKEVLVLWGVHHPPNIVNQKTLYRTENAYVSVVSSHYSRKFTPEIAKRPKVRDQEGRINYYWTLLEPGDTIIFEANGNLIAPRYAFALSRGFGSGIINSNAPMGKCDAKCQTPHGAINSCLPFQNVHPVTIGECPKYVRSAKLRMVTGLRNIPSIQSRGLFGAIAGFIEGGWTGMVDGWYGYHHQNEQGSGYAADQKSTQNAINGITNKVNSVIEKMNTQFTAVGKEFNKLERRMENLNKKVDDGFIDIWTYNAELLVLLENERTLDFHDSNVKNLYEKVKSQLKNNAKEIGNGCFEFYHKCNDECMESVKNGTYDYPKYSEESKLNKEKIDGVKLESMGVYQILAIYSTVASSLVLLVSLGAISFWMCSNGSLQCRICI

SEQ ID NO: 7805 - protein, 565 aa, synthetic construct
  REGION 1..565: note = hemagglutinin__InfluenzaA__AET84262
MKVKLLVLLCTFTATYADTICIGYHANNSTDTVDTVLEKNVTVTHSVNLLENSHNGKLCLLKGIAPLQLGNCSVAGWILGNPECELLISKESWSYIVEKPNPENGTCYPGHFADYEELREQLSSVSSFERFEIFPKESSWPNHTVTGVSASCSHNGESSFYRNLLWLTGKNGLYPNLSKSYANNKEKEVLVLWGVHHPPNIVDQKTLYRTENAYVSVVSSHYSRKFTPEIAKRPKVRDQEGRINYYWTLLEPGDTIIFEANGNLIAPRYAFALSRGFGSGIINSNAPMDKCDAKCQTPHGAINSCLPFQNVHPVTIGECPKYVRSAKLRMVTGLRNIPSIQSRGLFGAIAGFIEGGWTGMVDGWYGYHHQNEQGSGYAADQKSTQNAINGITNKVNSVIEKMNTQFTAVGKEFNKLERRMENLNKKVDDGFIDIWTYNAELLVLLENERTLDFHDSNVKNLYEKVKSQLKNNAKEIGNGCFEFYHKCNDECMESVKNGTYDYPKYSEESKLNREKIDGVKLESMGVYQILAIYSTVASSLVLLVSLGAISFWMCSNGSLQCRICI

SEQ ID NO: 7806 - protein, 565 aa, synthetic construct; identical to SEQ ID NO: 7733
  REGION 1..565: note = hemagglutinin__InfluenzaA__AET84284

SEQ ID NO: 7807 - protein, 565 aa, synthetic construct
  REGION 1..565: note = hemagglutinin__InfluenzaA__AET84306
MKVKLLVLLCTFTATYADTICIGYHANNSTDTVDTVLEKNVTVTHSVNLLENSHNGKLCLLKGIAPLQLGNCSVAGWILGNPECELLISKESWSYIVEKPNPENGTCYPGHFADYEELREQLSSVSSFERFEIFPKESSWPNHTVTGVSASCSHNGESSFYRNLLWLTGKNGLYPNLSKSYANNKEKEVLVLWGVHHPPNIGNQKALYHTENAYVSVVSSHYSIKFTPEIAKRPKVRDQEGRINYYWTLLEPGDTIIFEANGNLIAPRYAFALSRGFGSGIINSNAPMDKCDAKCQTPQGAINSSLPFQNVHPVTIGECPKYVRSAKLRMVTGLRNIPSIQSRGLFGAIAGFIEGGWTGMVDGWYGYHHQNEQGSGYAADQKSTQNAINGITNKVNSVIEKMNTQFTAVGKEFNKLERRMENLNKKVDDGFIDIWTYNAELLVLLENERTLDFHDSNVKNLYEKVKSQLKNNAKEIGNGCFEFYHKCNDECMESVKNGTYDYPKYSEESKLNREKIDGVKLESMGVYQILAIYSTVASSLVLLVSLGAISFWMCSNGSLQCRICI

SEQ ID NO: 7808 - protein, 565 aa, synthetic construct
  REGION 1..565: note = hemagglutinin__InfluenzaA__AET84339
MKVKLLVLLCTFTATYADTICIGYHANNSTDTVDTVLEKNVTVTHSVNLLENSHNGKLCLLKGIAPLQLGNCSVAGWILGNPECELLISKESWSYIVEKPNPENGTCYPGHFADYEELREQLSSVSSFERFEIFPKESSWPNHTVTGVSASCSHNGERSFYRNLLWLTGKNGLYPNLSKSYANNKEKEVLVLWGVHHPPNIGNQKTLYHTENAYVSVVSSHYSRKFTPEIAKRPKVRDQEGRINYYWTLLEPGDTIIFEANGNLIAPRYAFALSRGFGSGIINSNAPMDKCDAKCQTPQGAINSSLPFQNVHPVTIGECPKYVRSAKLRMVTGLRNIPSIQSRGLFGAIAGFIEGGWTGMVDGWYGYHHQNEQGSGYAADQKSTQNAINGITNKVNSVIEKMNTQFTAVGKEFNKLERRMENLNKKVDDGFIDIWTYNAELLVLLENERTLDFHDSNVKNLYEKVKSQLKNNAKEIGNGCFEFYHKCNDECMESVKNGTYDYPKYSEESKLNREKIDGVKLESMGVYQILAIYSTVASSLVLLVSLGAISFWMCSNGSLQCRICI

SEQ ID NO: 7809 - protein, 565 aa, synthetic construct; identical to SEQ ID NO: 7808
  REGION 1..565: note = hemagglutinin__InfluenzaA__AET84361

SEQ ID NO: 7810 - protein, 565 aa, synthetic construct
  REGION 1..565: note = hemagglutinin__InfluenzaA__AET84372
MKVKLLVLLCTFTATYADTICIGYHANNSTDTVDTVLEKNVTVTHSVNLLENSHNGKLCLLKGIAPLQLGNCSVAGWILGNPECELLISKESWSYIVEKPNPENGTCYPGHFADYEELREQLSSVSSFERFEIFPKESSWPNHTVTGVSASCSHNGERSFYRNLLWLTGKNGLYPNLSKSYANNKEKEVLVLWGVHHPPNIGDQKTLYHTENAYVSVVSSHYSRKFTPEIAKRPKVRDQEGRINYYWTLLEPGDTIIFEANGNLIAPRYAFALSRGFGSGIINSNAPMDKCDAKCQTPQGAINSSLPFQNVHPVTIGECPKYVRSAKLRMVTGLRNIPSIQSRGLFGAIAGFIEGGWTGMVDGWYGYHHQNEQGSGYAADQKSTQNAINGITNKVNSVIEKMNTQFTAVGKEFNKLERRMENLNKKVDDGFIDIWTYNAELLVLLENERTLDFHDSNVKNLYEKVKSQLKNNAKEIGNGCFEFYHKCNDECMESVKNGTYDYPKYSEESKLNREKIDGVKLESMGVYQILAIYSTVASSLVLLVSLGAISFWMCSNGSLQCRICI

SEQ ID NO: 7811 - protein, 565 aa, synthetic construct
  REGION 1..565: note = hemagglutinin__InfluenzaA__AET84394
MKVKLLVLLCTFTATYADTICIGYHANNSTDTVDTVLEKNVTVTHSVNLLENSHNGKLCLLKGIAPLQLGNCSVAGWILGNPECELLISKESWSYIVEKPNPENGTCYPGHFADYEELREQLSSVSSFERFEIFPKESSWPNHTVTGVSASCSHNGERSFYRNLLWLTGKNGLYPNLSKSYANNKEKEVLVLWGVHHPPDIGNQKTLYHTENAYVSVVSSHYSRKFTPEIAKRPKVRDQEGRINYYWTLLEPGDTIIFEANGNLIAPRYAFALSRGFGSGIINSNAPMDKCDAKCQTPQGAINSSLPFQNVHPVTIGECPKYVRSEKLRMVTGLRNIPSIQSRGLFGAIAGFIEGGWTGMVDGWYGYHHQNEQGSGYAADQKSTQNAINGITNKVNSVIEKMNTQFTAVGKEFNKLERRMENLNKKVDDGFIDIWTYNAELLVLLENERTLDFHDSNVKNLYEKVKSQLKNNAKEIGNGCFEFYHKCNDECMESVKNGTYDYPKYSEESKLNREKIDGVKLESMGVYQILAIYSTVASSLVLLVSLGAISFWMCSNGSLQCRICI

SEQ ID NO: 7812 - protein, 565 aa, synthetic construct; identical to SEQ ID NO: 5516
  REGION 1..565: note = hemagglutinin__InfluenzaA__AET84405

SEQ ID NO: 7813 - protein, 565 aa, synthetic construct
  REGION 1..565: note = hemagglutinin__InfluenzaA__AET84416
MKVKLLVLLCTFTATYADTICIGYHANNSTDTVDTVLEKNVTVTHSVNLLENSHNGKLCLLKGIAPLQLGNCSVAGWILGNPECELLISKESWSYIVEKPNPENGTCYPGHFADYEELREQLSSVSSFERFEIFPKESSWPNHTVTGVSASCSHNGERSFYRNLLWLTGKNGLYPTLSKSYANNKEKEVLVLWGVHHPPDIGDQKTLYHTENAYVSVVSSHYSRKFTPEIAKRPKVRDQEGRINYYWTLLEPGDTIIFEANGNLIAPRYAFALSRGFGSGIINSNAPMDKCDAKCQTPQGAINSSLPFQNVHPVTIGECPKYVRSAKLRMVTGLRNIPSIQSRGLFGAIAGFIEGGWTGMVDGWYGYHHQNEQGSGYAADQKSTQNAINGITNKVNSVIEKMNTQFTAVGKEFNKLERRMENLNKKVDDGFIDIWTYNAELLVLLENERTLDFHDSNVKNLYEKVKSQLKNNAKEIGNGCFEFYHKCNDECMESVKNGTYDYPKYSEESKLNREKIDGVKLESMGVYQILAIYSTVASSLVLLVSLGAISFWMCSNGSLQCRICI

SEQ ID NO: 7814 - protein, 565 aa, synthetic construct
  REGION 1..565: note = hemagglutinin__InfluenzaA__AET84427
MKVKLLVLLCTFTATYADTICIGYHANNSTDTVDTVLEKNVTVTHSVNLLENSHNGKLCLLKGIAPLQLGNCSVAGWILGNPECELLISKESWSYIVEKPNPENGTCYPGHFADYEELREQLSSVSSFERFEIFPKESSWPNHTVTGVSASCSHNGESSFYRNLLWLTGKNGLYPNLSKSYANNKEKEVLVLWGVHHPPNIGNQKTLYHTENAYVSVVSSHYSRKFTPEIAKRPKVRDQEGRINYYWTLLEPGDTIIFEANGNLIAPRYAFALSRGFGSGIINSNAPMDKCDAKCQTPQGAINSSLPFQNVHPVTIGECPKYVRSAKLRMVTGLRNIPSIQSRGLFGAIAGFIEGGWTGMVDGWYGYHHQNEQGSGYAADQKSTQNAINGITNKVNSVIEKMNTQFTAVGKEFNKLERRMENLNKKVDDGFIDIWTYNAELLVLLENERTLDFHDSNVKNLYEKVKSQLKNNAKEIGNGCFEFYHKCNDECMESVKNGTYDYPKYSEESKLNREKIDGVKLESMGVYQILAIYSTVASSLVLLVSLGAISFWMCSNGSLQCRICI

SEQ ID NO: 7815 - protein, 565 aa, synthetic construct
  REGION 1..565: note = hemagglutinin__InfluenzaA__AET84438
MKVKLLVLLCTFTATYADTICIGYHANNSTDTVDTVLEKNVTVTHSVNLLENSHNGKLCLLKGIAPLQLGNCSVAGWILGNPECELLISKESWSYIVEKPNPENGTCYPGHFADYEELREQLSSVSSFERFEIFPKESSWPNHTVTGVSASCSHNGESSFYRNLLWLTGKNGLYPNLSKSYANNKEKEVLVLWGVHHPPNIGVQKTLYNTENAYVSVVSSHYSRKFTPEIAKRPKVRDQEGRINYYWTLLEPGDTIMFEANGNLIAPRYAFALSRGFGSGIINSNAPMDKCDAKCQTPQGAINSSLPFQNVHPVTIGECPKYVRSAKLRMVTGLRNIPSIQSRGLFGAIAGFIEGGWTGMVDGWYGYHHQNEQGSGYAADQKSTQNAINGITNKVNSVIEKMNTQFTAVGKEFNKLERRMENLNKKVDDGFIDIWTYNAELLVLLENERTLDFHDSNVKNLYEKVKSQLKNNAKEIGNGCFEFYHKCNDECMESVKNGTYDYPKYSEESKLNREKIDGVKLESMGVYQILAIYSTVASSLVLLVSLGAISFWMCSNGSLQCRICI

SEQ ID NO: 7816 - protein, 565 aa, synthetic construct
  REGION 1..565: note = hemagglutinin__InfluenzaA__AET84449
MKVKLLVLLCTFTATYADTICIGYHANNSTDTVDTVLEKNVTVTHSVNLLEDSHNGKLCLLKGIAPLQLGNCSVAGWILGNPECELLISRESWSYIVEKPNPENGTCYPGHFADYEELREQLSSVSSFERFEIFPKESSWPNHTTTGVSASCSHNGESSFYKNLLWLTGKNGLYPNLSKSYANNKEKEVLVLWGVHHPPNIGDQRALYHTENAYVSVVSSHYSRKFTPEIAKRPKVRDQEGRINYYWTLLEPGDTIIFEANGNLIAPRYAFALSRGFGSGIINSNAPMDGCDAKCQTPQGAINSSLPFQNVHPVTIGECPKYVRSAKLRMVTGLRNIPSIQSRGLFGAIAGFIEGGWTGMVDGWYGYHHQNEQGSGYAADQKSTQNAINGITNKVNSVIEKMNTQFTAVGKEFNKLERRMENLNKKVDDGFIDIWTYNAELLVLLENERTLDFHDSNVKNLYEKVKSQLKNNAKEIGNGCFEFYHKCNDECMESVKNGTYDYPKYSEESKLNREKIDGVKLESMGVYQILAIYSTVASSLVLLVSLGAISFWMCSNGSLQCRICI

SEQ ID NO: 7817 - protein, 566 aa, synthetic construct
  REGION 1..566: note = hemagglutinin__InfluenzaA__AET98600
MKTIIALSYILCLVFAQKLPGNDNSTATLCLGHHAVPNGTIVKTITNDQIEVTNATELVQSSSTGEICDSPHQILDGENCTLIDALLGDPQCDGFQNKKWDLFVERSKAYSNCYPYDVPDYASLRSLVASSGTLEFNNESFNWTGVTQNGTSSACIRRSNNSFFSRLNWLTHLNFKYPALNVTVPNNEQFDKLYIWGVHHPGTDKDQIFLYAQASGRITVSTKRSQQAVIPNIGSRPRVRNIPSRISIYWTIVKPGDILLINSTGNLIAPRGYFKIRSGKSSIMRSDAPIGKCNSECITPNGSIPNDKPFQNVNRITYGACPRYVKQSTLKLATGMRNVPEKQTRGIFGAIAGFIENGWEGMVDGWYGFRHQNSEGRGQAADLKSTQAAIDQINGKLNRLIGKTNEKFHQIEKEFSEVEGRIQDLEKYVEDTKIDLWSYNAELLVALENQHTIDLTDSEMNKLFEKTKKQLRENAEDMGNGCFTIYHKCDNACIGSIRNGTYDHNVYRDEALNNRFQIKGVELKSGYKDWILWISFAISCFLLCVALLGFIMWACQKGNIRCNICI

SEQ ID NO: 7818 - protein, 566 aa, synthetic construct
  REGION 1..566: note = hemagglutinin__InfluenzaA__AEV76874
MKAILVVLLYTFATANADTLCIGYHANNSTDTVDTVLEKNVTVTHSVNLLEDKHNGKLCKLRGVAPLHLGKCNIAGWILGNPECESFSTASSWSYIVETSSSDNGTCYPGDFIDYEELREQLSSVSSFERFEIFPKTSSWPNHDSNKGVTAACPHAGAKGFYKNLIWLVKKGNSYPKLSKSYINDKGKEVLVLWGIHHPSTTADQQSLYQNADTYVFVGTSRYSKKFNPEIEIRPKVRDQEGRMNYYWTLVEPGDKITFEATGNLVVPRYAFAMERNAGSGIIISDTPVHDCNTTCQTPKGAINTSLPFQNIHPITIGKCPKYVKSTKLRLATGLRNVPSIQSRGLFGAIAGFIEGGWTGMVDGWYGYHHQNEQGSGYAADLKSTQNAIDKITNKVNSVIEKMNTQFTAVGKEFNHLEKRIENLNKKVDDGFLDIWTYNAELLVLLENERTLDYHDSNVKNLYEKVRNQLKNNAKEIGNGCFEFYHKCDNTCMESVKNGTYDYPKYSEEAKLNREEIDGVKLESTRIYQILAIYSTVASSLVLVVSLGAISFWMCSNGSLQCRICI

SEQ ID NO: 7819 - protein, 566 aa, synthetic construct; identical to SEQ ID NO: 2669
  REGION 1..566: note = hemagglutinin__InfluenzaA__AEW10574

SEQ ID NO: 7820 - protein, 566 aa, synthetic construct; identical to SEQ ID NO: 2669
  REGION 1..566: note = hemagglutinin__InfluenzaA__AEW10584

SEQ ID NO: 7821 - protein, 566 aa, synthetic construct; identical to SEQ ID NO: 3022
  REGION 1..566: note = hemagglutinin__InfluenzaA__AEW10594

SEQ ID NO: 7822 - protein, 566 aa, synthetic construct; identical to SEQ ID NO: 3022
  REGION 1..566: note = hemagglutinin__InfluenzaA__AEW10604

SEQ ID NO: 7823 - protein, 566 aa, synthetic construct; identical to SEQ ID NO: 3022
  REGION 1..566: note = hemagglutinin__InfluenzaA__AEW10614

SEQ ID NO: 7824 - protein, 566 aa, synthetic construct; identical to SEQ ID NO: 3022
  REGION 1..566: note = hemagglutinin__InfluenzaA__AEW10624

SEQ ID NO: 7825 - protein, 566 aa, synthetic construct; identical to SEQ ID NO: 2669
  REGION 1..566: note = hemagglutinin__InfluenzaA__AEW10634

SEQ ID NO: 7826 - protein, 566 aa, synthetic construct; identical to SEQ ID NO: 2656
  REGION 1..566: note = hemagglutinin__InfluenzaA__AEW10644

SEQ ID NO: 7827 - protein, 566 aa, synthetic construct
  REGION 1..566: note = hemagglutinin__InfluenzaA__AEW10654
MKAILVVLLYTFATANADTLCIGYHANNSTDTVDTVLEKNVTVTHSVNLLEDKHNGKLCKLRGVAPLHLGKCNIAGWILGNPECESLSTASSWSYIVETSSSDNGTCYPGDFIDYEELREQLSSVSSFERFEIFPKTSSWPNHDSNKGVTAACPHAGAKSFYKNLIWLVKKGNSYPKLNKSYINDKGKEVLVLWGIHHPSTSADQQSLYQNADAYVFVGSSRYSKKFKPEIAIRPKVRDQEGRMNYYWTLVEPGDKITFEATGNLVVPRYAFAMERNAGSGIIISDTPVHDCNTTCQTPKGAINTSLPFQNIHPITIGKCPKYVKSTKLRLATGLRNVPSIQSRGLFGAIAGFIEGGWTGMVDGWYGYHHQNEQGSGYAADLKSTQNAIDEITNKVNSVIEKMNTQFTAVGKEFNHLEKRIENLNKKVDDGFLDIWTYNAELLVLLENERTLDYHDSNVKNLYEKVRSQLKNNAKEIGNGCFEFYHKCDNTCMESVKNGTYDYPKYSEEAKLNREEIDGVKLESTRIYQILAIYSTVASSLVLVVSLGAISFWMCSNGSLQCRICI

SEQ ID NO: 7828 - protein, 566 aa, synthetic construct; identical to SEQ ID NO: 2656
  REGION 1..566: note = hemagglutinin__InfluenzaA__AEW10664

SEQ ID NO: 7829 - protein, 566 aa, synthetic construct
  REGION 1..566: note = hemagglutinin__InfluenzaA__AEW10674
MKAILVVLLYTFATANADTLCIGYHANNSTDTVDTVLEKNVTVTHSVNLLEDKHNGKLCKLRGVAPLHLGKCNIAGWILGNPECESLSTASSWSYIVETSSSDNGTCYPGDFIDYEELREQLSSVSSFERFEIFPKTSSWPNHDSNKGVTAACPHAEAKSFYKNLIWLVKKGNSYPKLSKSYINDKGKEVLVLWGIHHPSTSADQQSLYQNADAYVFVGTSRYSKKFKPEIAIRPKVRDQEGRMNYYWTLVEPGDKITFEATGNLVVPRYAFAMERNAGSGIIISDTPVHDCNTTCQTPKGAINTSLPFQNIHPITIGKCPKYVKSTKLRLATGLRNVPSIQSRGLFGAIAGFIEGGWTGMVDGWYGYHHQNEQGSGYAADLKSTQNAIDEITNKVNSVIEKMNTQFTAVGKEFNHLEKRIENLNKKVDDGFLDIWTYNAELLVLLENERTLDYHDSNVKNLYEKVRSQLKNNAKEIGNGCFEFYHKCDNTCMESVKNGTYDYPKYSEEAKLNREEIDGVKLESTRIYQILAIYSTVASSLVLVVSLGAISFWMCSNGSLQCRICI

SEQ ID NO: 7830 - protein, 566 aa, synthetic construct; identical to SEQ ID NO: 2669
  REGION 1..566: note = hemagglutinin__InfluenzaA__AEW10684

SEQ ID NO: 7831 - protein, 566 aa, synthetic construct; identical to SEQ ID NO: 2656
  REGION 1..566: note = hemagglutinin__InfluenzaA__AEW10694

SEQ ID NO: 7832 - protein, 566 aa, synthetic construct; identical to SEQ ID NO: 2656
  REGION 1..566: note = hemagglutinin__InfluenzaA__AEW10704

SEQ ID NO: 7833 - protein, 566 aa, synthetic construct; identical to SEQ ID NO: 7827
  REGION 1..566: note = hemagglutinin__InfluenzaA__AEW10724

SEQ ID NO: 7834 - protein, 566 aa, synthetic construct; identical to SEQ ID NO: 2669
  REGION 1..566: note = hemagglutinin__InfluenzaA__AEW10734

SEQ ID NO: 7835 - protein, 566 aa, synthetic construct
  REGION 1..566: note = hemagglutinin__InfluenzaA__AEW10744
MKAILVVLLYTFATANADTLCIGYHANNSTDTVDTVLEKNVTVTHSVNILEDKHNGKLCKLRGVAPLHLGKCNIAGWILGNPECESLSTASSWSYIVETSSSDNGTCYPGDFIDYEELREQLSSVSSFERFEIFPKTSSWPNHDSNKGVTAACPHAGAKSFYKNLIWLVKKGNSYPKLSKSYINDKGKEVLVLWGIHHPSTSADQQSLYQNADAYVFVGSSRYSKKFKPEIAIRPKVRDQEGRMNYYWTLVEPGDKITFEATGNLVVPRYAFAMERNAGSGIIISDTPVHDCNTTCQTPKGAINTSLPFQNIHPITIGKCPKYVKSTKLRLATGLRNVPSILSRGLFGAIAGFIEGGWTGMVDGWYGYHHQNEQGSGYAADLKSTQNAIDEITNKVNSVIEKMNTQFTAVGKEFNHLEKRIENLNKKVDDGFLDIWTYNAELLVLLENERTLDYHDSNVKNLYEKVRSQLKNNAKEIGNGCFEFYHKCDNTCMESVKNGTYDYPKYSEEAKLNREEIDGVKLESTRIYQILAIYSTVASSLVLVVSLGAISFWMCSNGSLQCRICI

SEQ ID NO: 7836 - protein, 566 aa, synthetic construct; identical to SEQ ID NO: 7835
  REGION 1..566: note = hemagglutinin__InfluenzaA__AEW10754

SEQ ID NO: 7837 - protein, 566 aa, synthetic construct
  REGION 1..566: note = hemagglutinin__InfluenzaA__AEW10764
MKAILVVLLYTFATANADTLCIGYHANNSTDTVDTVLEKNVTVTHSVNILEDKHNGKLCKLRGVAPLHLGKCNIAGWILGNPECESLSTASSWSYIVETSSSDNGTCYPGDFIDYEELREQLSSVSSFERFEIFPKTSSWPNHDSNKGVTAACPHAGAKSFYKNLIWLVKKGNSYPKLSKSYINDKGKEVLVLWGIHHPSTSADQQSLYQNANAYVFVGSSRYSKKFKPEIAIRPKVRDQEGRMNYYWTLVEPGDKITFEATGNLVVPRYAFAMERNAGSGIIISDTPVHDCNTTCQTPKGAINTSLPFQNIHPITIGKCPKYVKSTKLRLATGLRNVPSIQSRGLFGAIAGFIEGGWTGMVDGWYGYHHQNEQGSGYAADLKSTQNAIDEITNKVNSVIEKMNTQFTAVGKEFNHLEKRIENLNKKVDDGFLDIWTYNAELLVLLENERTLDYHDSNVKNLYEKVRSQLKNNAKEIGNGCFEFYHKCDNTCMESVKNGTYDYPKYSEEAKLNREEIDGVKLESTRIYQILAIYSTVASSLVLVVSLGAISFWMCSNGSLQCRICI

SEQ ID NO: 7838 - protein, 566 aa, synthetic construct; identical to SEQ ID NO: 2913
  REGION 1..566: note = hemagglutinin__InfluenzaA__AEW10774

SEQ ID NO: 7839 - protein, 566 aa, synthetic construct; identical to SEQ ID NO: 2656
  REGION 1..566: note = hemagglutinin__InfluenzaA__AEW10784

SEQ ID NO: 7840 - protein, 566 aa, synthetic construct; identical to SEQ ID NO: 2656
  REGION 1..566: note = hemagglutinin__InfluenzaA__AEW10794

SEQ ID NO: 7841 - protein, 566 aa, synthetic construct; identical to SEQ ID NO: 2849
  REGION 1..566: note = hemagglutinin__InfluenzaA__AEW10804

SEQ ID NO: 7842 - protein, 566 aa, synthetic construct; identical to SEQ ID NO: 2667
  REGION 1..566: note = hemagglutinin__InfluenzaA__AEW10814

SEQ ID NO: 7843 - protein, 566 aa, synthetic construct; identical to SEQ ID NO: 2760
  REGION 1..566: note = hemagglutinin__InfluenzaA__AEW10824

SEQ ID NO: 7844 - protein, 566 aa, synthetic construct; identical to SEQ ID NO: 2656
  REGION 1..566: note = hemagglutinin__InfluenzaA__AEW10834

SEQ ID NO: 7845 - protein, 566 aa, synthetic construct; identical to SEQ ID NO: 2849
  REGION 1..566: note = hemagglutinin__InfluenzaA__AEW10844

SEQ ID NO: 7846 - protein, 566 aa, synthetic construct
  REGION 1..566: note = hemagglutinin__InfluenzaA__AEW10854
MKAILVVLLYTFATANADTLCIGYHANNSTDTVDTVLEKNVTVTHSVNILEDKHNGKLCKLRGVAPLHLGKCNIAGWILGNPECESLSTASSWSYIVETSSSDNGTCYPGDFIDYEELREQLSSVSSFERFEIFPKTSSWPNHDSNKGVTAACPHAGAKSFYKNLIWLVKKGNSYPKLSKSYINDKGKEVLVLWGIHHPSTSADQQSLYQNADAYVFVGSSRYSKKFKPEITIRPKVRDQEGRMNYYWTLVEPGDKITFEATGNLVVPRYAFAMERNAGSGIIISDTPVHDCNTTCQTPKGAINTSLPFQNIHPITIGKCPKYVKSTKLRLATGLRNVPSIQSRGLFGAIAGFIEGGWTGMVDGWYGYHHQNEQGSGYAADLKSTQNAIDEITNKVNSVIEKMNTQFTAVGKEFNHLEKRIENLNKKVDDGFLDIWTYNAELLVLLENERTLDYHDSNVKNLYEKVRSQLKNNAKEIGNGCFEFYHKCDNTCMESVKNGTYDYPKYSEEAKLNREEIDGVKLESTRIYQILAIYSTVASSLVLVVSLGAISFWMCSNGSLQCRICI

SEQ ID NO: 7847 - protein, 566 aa, synthetic construct; identical to SEQ ID NO: 2849
  REGION 1..566: note = hemagglutinin__InfluenzaA__AEW10864

SEQ ID NO: 7848 - protein, 566 aa, synthetic construct; identical to SEQ ID NO: 2849
  REGION 1..566: note = hemagglutinin__InfluenzaA__AEW10874

SEQ ID NO: 7849 - protein, 566 aa, synthetic construct; identical to SEQ ID NO: 2849
  REGION 1..566: note = hemagglutinin__InfluenzaA__AEW10884

SEQ ID NO: 7850 - protein, 566 aa, synthetic construct; identical to SEQ ID NO: 2656
  REGION 1..566: note = hemagglutinin__InfluenzaA__AEW10894

SEQ ID NO: 7851 - protein, 566 aa, synthetic construct; identical to SEQ ID NO: 2849
  REGION 1..566: note = hemagglutinin__InfluenzaA__AEW10904

SEQ ID NO: 7852 - protein, 566 aa, synthetic construct; identical to SEQ ID NO: 2849
  REGION 1..566: note = hemagglutinin__InfluenzaA__AEW10914

SEQ ID NO: 7853 - protein, 566 aa, synthetic construct; identical to SEQ ID NO: 2656
  REGION 1..566: note = hemagglutinin__InfluenzaA__AEW10924

SEQ ID NO: 7854 - protein, 566 aa, synthetic construct; identical to SEQ ID NO: 2656
  REGION 1..566: note = hemagglutinin__InfluenzaA__AEW10934

SEQ ID NO: 7855 - protein, 566 aa, synthetic construct; identical to SEQ ID NO: 2849
  REGION 1..566: note = hemagglutinin__InfluenzaA__AEW10944

SEQ ID NO: 7856 - protein, 566 aa, synthetic construct; identical to SEQ ID NO: 2669
  REGION 1..566: note = hemagglutinin__InfluenzaA__AEW10954

SEQ ID NO: 7857 - protein, 566 aa, synthetic construct; identical to SEQ ID NO: 2669
  REGION 1..566: note = hemagglutinin__InfluenzaA__AEW10964

SEQ ID NO: 7858 - protein, 566 aa, synthetic construct; identical to SEQ ID NO: 2849
  REGION 1..566: note = hemagglutinin__InfluenzaA__AEW10974

SEQ ID NO: 7859 - protein, 566 aa, synthetic construct; identical to SEQ ID NO: 2669
  REGION 1..566: note = hemagglutinin__InfluenzaA__AEW10984

SEQ ID NO: 7860 - protein, 566 aa, synthetic construct; identical to SEQ ID NO: 2669
  REGION 1..566: note = hemagglutinin__InfluenzaA__AEW10994

SEQ ID NO: 7861 - protein, 566 aa, synthetic construct; identical to SEQ ID NO: 2669
  REGION 1..566: note = hemagglutinin__InfluenzaA__AEW11004

SEQ ID NO: 7862 - protein, 566 aa, synthetic construct; identical to SEQ ID NO: 2669
  REGION 1..566: note = hemagglutinin__InfluenzaA__AEW11014

SEQ ID NO: 7863 - protein, 566 aa, synthetic construct; identical to SEQ ID NO: 2669
  REGION 1..566: note = hemagglutinin__InfluenzaA__AEW11024

SEQ ID NO: 7864 - protein, 566 aa, synthetic construct; identical to SEQ ID NO: 2669
  REGION 1..566: note = hemagglutinin__InfluenzaA__AEW11034

SEQ ID NO: 7865 - protein, 566 aa, synthetic construct; identical to SEQ ID NO: 2849
  REGION 1..566: note = hemagglutinin__InfluenzaA__AEW11044

SEQ ID NO: 7866 - protein, 566 aa, synthetic construct; identical to SEQ ID NO: 2669
  REGION 1..566: note = hemagglutinin__InfluenzaA__AEW11054

SEQ ID NO: 7867 - protein, 566 aa, synthetic construct; identical to SEQ ID NO: 2656
  REGION 1..566: note = hemagglutinin__InfluenzaA__AEW11064

SEQ ID NO: 7868 - protein, 566 aa, synthetic construct; identical to SEQ ID NO: 2656
  REGION 1..566: note = hemagglutinin__InfluenzaA__AEW11074

SEQ ID NO: 7869 - protein, 566 aa, synthetic construct
  REGION 1..566: note = hemagglutinin__InfluenzaA__AEW11084
MKAILVVLLYTFATANADTLCIGYHANNSTDTVDTVLEKNVTVTHSVNLLEDKHNGKLCKLRGVAPLHLGKCNIAGWILGNPECESLSTASSWSYIVETSSSDNGTCYPGDFIDYEELREQLSSVSSFERFEIFPKTSSWPNHDSNKGVTAACLHAGAKSFYKNLIWLVKKGNSYPKLSKSYINDKGKEVLVLWGIHHPSTSADQQSLYQNADAYVFVGSSRYSKKFKPEIAIRPKVRDQEGRMNYYWTLVEPGDKITFEATGNLVVPRYAFAMERNAGSGIIISDTPVHDCNTTCQTPKGAINTSLPFQNIHPITIGKCPKYVKSTKLRLATGLRNVPSIQSRGLFGAIAGFIEGGWTGMVDGWYGYHHQNEQGSGYAADLKSTQNAIDEITNKVNSVIEKMNTQFTAVGKEFNHLEKRIENLNKKVDDGFLDIWTYNAELLVLLENERTLDYHDSNVKNLYEKVRSQLKNNAKEIGNGCFEFYHKCDNTCMESVKNGTYDYPKYSEEAKLNREEIDGVKLESTRIYQILAIYSTVASSLVLVVSLGAISFWMCSNGSLQCRICI

SEQ ID NO: 7870 - protein, 566 aa, synthetic construct; identical to SEQ ID NO: 2656
  REGION 1..566: note = hemagglutinin__InfluenzaA__AEW11094

SEQ ID NO: 7871 - protein, 566 aa, synthetic construct; identical to SEQ ID NO: 2656
  REGION 1..566: note = hemagglutinin__InfluenzaA__AEW11104

SEQ ID NO: 7872 - protein, 566 aa, synthetic construct; identical to SEQ ID NO: 2669
  REGION 1..566: note = hemagglutinin__InfluenzaA__AEW11114

SEQ ID NO: 7873 - protein, 566 aa, synthetic construct
  REGION 1..566: note = hemagglutinin__InfluenzaA__AEW11124
MKAILVVLLYTFATANADTLCIGYHANNSTDTVDTVLEKNVTVTHSVNLLEDKHNGKLCKLRGVAPLHLGKCNIAGWILGNPECESLSTASSWSYIVETSSSDNGTCYPGDFIDYEELREQLSSVSSFERFEIFPKTSSWPNHDSNKGVTAACPHAGAKSFYKNLIWLVKKGNSYPKLSKSYINDKGKEVLVLWGIHHPSTSADQQSLYQNADAYVFVGSSRYSKKFKPEIAIRPKVRDQEGRMNYYWTLVEPGDKITFEATGNLVVPRYAFAMERNAGSGIIISDTPVHDCNTTCQTPKGAINTSLPFQNIHPITIGKCPKFVKSTKLRLATGLRNVPSIQSRGLFGAIAGFIEGGWTGMVDGWYGYHHQNEQGSGYAADLKSTQNAIDEITNKVNSVIEKMNTQFTAVGKEFNHLEKRIENLNKKVDDGFLDIWTYNAELLVLLENERTLDYHDSNVKNLYEKVRSQLKNNAKEIGNGCFEFYHKCDNTCMESVKNGTYDYPKYSEEAKLNREEIDGVKLESTRIYQILAIYSTVASSLVLVVSLGAISFWMCSNGSLQCRICI

SEQ ID NO: 7874 - protein, 566 aa, synthetic construct
  REGION 1..566: note = hemagglutinin__InfluenzaA__AEW11134
MKAILVVLLYTFATANADTLCIGYHANNSTDTVDTVLEKNVTVTHSVNILEDKHNGKLCKLRGVAPLHLGKCNIAGWILGNPECESLSTASSWSYIVETSSSDNGTCYPGDFIDYEELREQLSSVSSFERFEIFPKTSSWPNHDSNKGVTAACPHAGAKSFYKNLIWLVKKGNSYPKLSKSYINDKGKEVLVLWGIHHPSTSADQQSLYQNADAYVFVGSSRYSKKFKPEIAIRPKVRDQEGRMNYYWTLVEPGDKITFEATGNLVVPRYAFAMERNAGSGIIISDTPVHDCNTTCQTPKGAINTSLPFQNIHPITIGKCPKYVKSTKLRLATGLRNVPSIQSRGLFGAIAGFIEGGWTGMVDGWYGYHHQNEQGSGYAADLKSTQNAIDEITNKVNSVIEKMNTQFTAVGKEFNHLEKRIENLNKKVDDGFLDIWTYNAELLVLLENERTLDYHDSNVKNLYEKVRSQLKNNAKEIGNGCFEFYHKCDNTCMESVKNGTYDYPKYSEEAKLNKEEIDGVKLESTRIYQILAIYSTVASSLVLVVSLGAISFWMCSNGSLQCRICI

SEQ ID NO: 7875 - protein, 566 aa, synthetic construct; identical to SEQ ID NO: 2669
  REGION 1..566: note = hemagglutinin__InfluenzaA__AEW11144

SEQ ID NO: 7876 - protein, 566 aa, synthetic construct; identical to SEQ ID NO: 2669
  REGION 1..566: note = hemagglutinin__InfluenzaA__AEW11154

SEQ ID NO: 7877 - protein, 566 aa, synthetic construct; identical to SEQ ID NO: 7869
  REGION 1..566: note = hemagglutinin__InfluenzaA__AEW11164

SEQ ID NO: 7878 - protein, 566 aa, synthetic construct; identical to SEQ ID NO: 7869
  REGION 1..566: note = hemagglutinin__InfluenzaA__AEW11174

SEQ ID NO: 7879 - protein, 566 aa, synthetic construct; identical to SEQ ID NO: 2669
  REGION 1..566: note = hemagglutinin__InfluenzaA__AEW11184

SEQ ID NO: 7880 - protein, 566 aa, synthetic construct; identical to SEQ ID NO: 2656
  REGION 1..566: note = hemagglutinin__InfluenzaA__AEW11194

SEQ ID NO: 7881 - protein, 566 aa, synthetic construct; identical to SEQ ID NO: 2669
  REGION 1..566: note = hemagglutinin__InfluenzaA__AEW11204

SEQ ID NO: 7882 - protein, 566 aa, synthetic construct; identical to SEQ ID NO: 2669
  REGION 1..566: note = hemagglutinin__InfluenzaA__AEW11214

SEQ ID NO: 7883 - protein, 566 aa, synthetic construct; identical to SEQ ID NO: 2849
  REGION 1..566: note = hemagglutinin__InfluenzaA__AEW11224

SEQ ID NO: 7884 - protein, 566 aa, synthetic construct; identical to SEQ ID NO: 2669
  REGION 1..566: note = hemagglutinin__InfluenzaA__AEW11234

SEQ ID NO: 7885 - protein, 566 aa, synthetic construct; identical to SEQ ID NO: 2669
  REGION 1..566: note = hemagglutinin__InfluenzaA__AEW11244

SEQ ID NO: 7886 - protein, 566 aa, synthetic construct
  REGION 1..566: note = hemagglutinin__InfluenzaA__AEW11254
MKAILVVLLYTFATANADTLCIGYHANNSTDTVDTVLEKNVTVTHSVNLLEDKHNGKLCKLRGVAPLHLGKCNIAGWILGNPECESLSTASSWSYIVETSSSDNGTCYPGDFIDYEELREQLSSVSSFERFEIFPKTSSWPNHDSNKGVTAACLHAGAKSFYKNLIWLVKKGNSYPKLSKSYINDKGKEVLVLWGIHHPSASADQQSLYQNADAYVFVGSSRYSKKVKPEIAIRPKVRDQEGRMNYYWTLVEPGDKITFEATGNLVVPRYAFAMERNAGSGIIISDTPVHDCNTTCQTPKGAINTSLPFQNIHPITIGKCPKYVKSTKLRLATGLRNVPSIQSRGLFGAIAGFIEGGWTGMVDGWYGYHHQNEQGSGYAADLKSTQNAIDEITNKVNSVIEKMNTQFTAVGKEFNHLEKRIENLNKKVDDGFLDIWTYNAELLVLLENERTLDYHDSNVKNLYEKVRSQLKNNAKEIGNGCFEFYHKCDNTCMESVKNGTYDYPKYSEEAKLNREEIDGVKLESTRIYQILAIYSTVASSLVLVVSLGAISFWMCSNGSLQCRICI

SEQ ID NO: 7887 - protein, 566 aa, synthetic construct; identical to SEQ ID NO: 2656
  REGION 1..566: note = hemagglutinin__InfluenzaA__AEW11263

SEQ ID NO: 7888 - protein, 566 aa, synthetic construct; identical to SEQ ID NO: 2656
  REGION 1..566: note = hemagglutinin__InfluenzaA__AEW11273

SEQ ID NO: 7889 - protein, 566 aa, synthetic construct; identical to SEQ ID NO: 2656
  REGION 1..566: note = hemagglutinin__InfluenzaA__AEW11283

SEQ ID NO: 7890 - protein, 566 aa, synthetic construct; identical to SEQ ID NO: 2656
  REGION 1..566: note = hemagglutinin__InfluenzaA__AEW11293

SEQ ID NO: 7891 - protein, 566 aa, synthetic construct
  REGION 1..566: note = hemagglutinin__InfluenzaA__AEW11303
MKAILVVLLYTFATANADTLCIGYHANNSTDTVDTVLEKNVTVTHSVNLLEDKHNGKLCKLRGVAPLHLGKCNIAGWILGNPECESLSTASSWSYIVETSSSDNGTCYPGDFIDYEELREQLSSVSSFERFEIFPKTSSWPNHDSNKGVTTACPHAGAKSFYKNLIWLVKKGNSYPKLSKSYINDKGKEVLVLWGIHHPSTSADQQSLYQNADAYVFVGTSRYSKKFKPEIAIRPKVRDQEGRMNYYWTLVEPGDKITFEATGNLVVPRYAFAMERNAGSGIIISDTPVHDCNTTCQTPKGAINTSLPFQNIHPITIGKCPKYVKSTKLRLATGLRNVPSIQSRGLFGAIAGFIEGGWTGMVDGWYGYHHQNEQGSGYAADLKSTQNAIDEITNKVNSVIEKMNTQFTAVGKEFNHLEKRIENLNKKVDDGFLDIWTYNAELLVLLENERTLDYHDSNVKNLYEKVRSQLKNNAKEIGNGCFEFYHKCDNTCMESVKNGTYDYPKYSEEAKLNREEIDGVKLESTRIYQILAIYSTVASSLVLVVSLGAISFWMCSNGSLQCRVCI

SEQ ID NO: 7892 - protein, 566 aa, synthetic construct; identical to SEQ ID NO: 2656
  REGION 1..566: note = hemagglutinin__InfluenzaA__AEW11313

SEQ ID NO: 7893 - protein, 566 aa, synthetic construct
  REGION 1..566: note = hemagglutinin__InfluenzaA__AEW11323
MKAILVVLLYTFATANADTLCIGYHANNSTDTVDTVLEKNVTVTHSVNLLEDKHNGKLCKLRGVAPLHLGKCNIAGWILGNPECESLSTASSWSYIVETSSSDNGTCYPGDFIDYEELREQLSSVSSFERFEIFPKTSSWPNHDSNKGVTAACPHAGAKSFYKNLIWLVKKGNSYPKLSKSYINDKGKEVLVLWGIHHPSTSADQQSLYQNADAYVFVGTSRYSKKFKPEIAIRPKVRGQEGRMNYYWTLVEPGDKITFEATGNLVVPRYAFAMERNAGSGIIISDTPVHDCNTTCQTPKGAVNTSLPFQNIHPITIGKCPKYVKSTKLRLATGLRNVPSIQSRGLFGAIAGFIEGGWTGMVDGWYGYHHQNEQGSGYAADLKSTQNAIDEITNKVNSVIEKMNTQFTAVGKEFNHLEKRIENLNKKVDDGFLDIWTYNAELLVLLENERTLDYHDSNVKNLYEKVRSQLKNNAKEIGNGCFEFYHKCDNTCMESVKNGTYDYPKYSEEAKLNREEIDGVKLESTRIYQILAIYSTVASSLVLVVSLGAISFWMCSNGSLQCRICI

SEQ ID NO: 7894 - protein, 566 aa, synthetic construct
  REGION 1..566: note = hemagglutinin__InfluenzaA__AEW22712
MKAILVVLLYTFATANADTLCIGYHANNSTDTIDTVLEKNVTVTHSVNLLEDKHNGKLCKLRGVAPLHLGKCNIAGWILGNPECESLSTASSWSYIVETSSSDNGTCYPGDFIDYEELREQLSSVSSFERFEIFPKTSSWPNHDSNKGVTAACPHAGAKGFYKNLIWLVKKGNSYPKLSKSYINDKGKEVLVLWGIHHPSTTADQQSLYQNADTYVFVGTSRYSKKFKPEIAIRPKVRDQEGRMNYYWTLVKPGDKITFEATGNLVVPRYAFAMERNAGSGIIISDTPVHDCNTTCQTPKGAINTSLPFQNIHPITIGKCPKYVKSTKLRLATGLRNVPSIQSRGLFGAIAGFIEGGWTGMVDGWYGYHHQNEQGSGYAADLKSTQNAIDKITNKVNSVIEKMNTQFTAVGKEFNHLEKRIENLNKKVDDGFLDIWTYNAELLVLLENERTLDYHDSNVKNLYEKVRNQLKNNAKEIGNGCFEFYHKCDNTCMESVKNGTYDYPKYSEEAKLNREEIDGVKLESTRIYQILAIYSTVASSLVLVVSLGAISFWMCSNGSLQCRICI

SEQ ID NO: 7895 - protein, 566 aa, synthetic construct
  REGION 1..566: note = hemagglutinin__InfluenzaA__AEW22718
MKAILVVLLYTFATANADTLCIGYHANNSTDTVDTVLEKNVTVTHSVNLLEDKHNGKLCKLRGVAPLHLGKCNIAGWILGNPECESLSTASSWSYIVETSSSDNGTCYPGDFIDYEELREQLSSVSSFERFEIFPKTSSWPNHDSNKGVTAACPHAGAKGFYKNLIWLVKKGNSYPKLSKSYINDKGKEVLVLWGIHHPSTTADQQSLYQNADTYVFVGTSRYSKKFKPEIAIRPKVRDQEGRMNYYWTLVKPGDKITFEATGNLVVPRYAFAMERNAGSGIIISDTPVHDCNTTCQTPKGAINTSLPFQNIHPITIGKCPKYVKSTKLRLATGLRNVPSIQSRGLFGAIAGFIEGGWTGMVDGWYGYHHQNEQGSGYAADLKSTQNAIDKITNKVNSVIEKMNTQFTAVGKEFNHLEKRIENLNKKVDDGFLDIWTYNAELLVLLENERTLDYHDSNVKNLYEKVRNQLKNNAKEIGNGCFEFYHKCDNTCMESVKNGTYDYPKYSEEAKLNREEIDGVKLESTRIYQILAIYSTVASSLVLVVSLGAISFWMCSNGSLQCRICI

SEQ ID NO: 7896 - protein, 566 aa, synthetic construct; identical to SEQ ID NO: 6454
  REGION 1..566: note = hemagglutinin__InfluenzaA__AEW22720

SEQ ID NO: 7897 - protein, 566 aa, synthetic construct; identical to SEQ ID NO: 6454
  REGION 1..566: note = hemagglutinin__InfluenzaA__AEW22722

SEQ ID NO: 7898 - protein, 566 aa, synthetic construct
  REGION 1..566: note = hemagglutinin__InfluenzaA__AEW22724
MKAILVVLLYTFATANADTLCIGYHANNSTDTVDTVLEKNVTVTHSVNLLEDKHNGKLCKLRGVAPLHLGKCNIAGWILGNPECESLSTASSWSYIVETSSSDNGTCYPGDFIDYEELREQLSSVSSFERFEIFPKTSSWPNHDSNKGVTAACPHAGAKGFYKNLIWLVKKGNSYPKLSKSYINDKGKEVLVLWGIHHPSTTADQQSLYQNADTYVFVGTSRYSKKFKPEIAIRPKVRDQEGRMNYYWTLVEPGDKITFEATGNLVVPRYAFAMERNAGSGIIISDTPVHDCNTTCQTPKGAINTSLPFQNIHPITIGKCPKYVKSTKLRLATGLRNVPSIQSRGLFGAIAGFIEGGWTGMVDGWYGYHHQNEQGSGYAADLKSTQNAIDKITNKVNSVIEKMNTQFTAVGKEFNHLEKRIENLNKKVDDGFLDIWTYNAELLVLLENERTLDYHDSNVKNLYEKVRNQLKNNAREIGNGCFEFYHKCDNTCMESVKNGTYDYPKYSEEAKLNREEIDGVKLESTRIYQILAIYSTVASSLVLVVSLGAISFWMCSNGSLQCRICI

SEQ ID NO: 7899 - protein, 566 aa, synthetic construct
  REGION 1..566: note = hemagglutinin__InfluenzaA__AEW25297
MKAILVVLLYTFATANADTLCIGYHANNSTDTVDTVLEKNVTVTHSVNLLEDKHNGKLCKLRGVAPLHLGKCNIAGWIPGNPECESLSTASSWSYIVETSSSDNGTCYPGDFIDYEELREQLSSVSSFERFEIFPKTSSWPNHDPNKGVTAACPHAGAKSFYKNLIWLVKKGNSYPKLSKSYINDKGKEVLVLWGIHHPSTSADQQSLYQNADAYVFVGTSRYSKKFKPEIAIRPKVRDQEGRMNYYWTLVEPGDKITFEATGNLVVPRYAFAMERNAGSGIIISDTPVHDCNTTCQTPRGAINTSLPFQNIHPITIGKCPKYVKSTKLRLATGLRNVPSIQSRGLFGAIAGFIEGGWTGMVDGWYGYHHQNEQGSGYAADLKSTQNAIDEITNKVNSVIEKMNTQFTAVGKEFNHLEKRIENLNKKVDDGFLDIWTYNAELLVLLENERTLDYHDSNVKNLYEKVRSQLKNNAKEIGNGCFEFYHKCDNTCMESVKNGTYDYPKYSEEAKLNREEIDGVKLESTRIYQILAIYSTVASSLVLVVSLGAISFWMCSNGSLQCRICI

SEQ ID NO: 7900 - protein, 566 aa, synthetic construct; identical to SEQ ID NO: 3467
  REGION 1..566: note = hemagglutinin__InfluenzaA__AEW25306

SEQ ID NO: 7901 - protein, 566 aa, synthetic construct
  REGION 1..566: note = hemagglutinin__InfluenzaA__AEW25315
MKAILVVLLYTFATANADTLCIGYHANNSTDTVDTVLEKNVTVTHSVNLLEDKHNGKLCKLRGVAPLHLGKCNIAGWILGNPECESLSTASSWSYIVETSSSDNGTCYPGDFIDYEELREQLSSVSSFERFEIFPKTSSWPNHDPNKGVTAACPHAGAKSFYKNLIWLVKKGNSYPKLSKSYINDKGKEVLVLWGIHHPSTSADQQSLYQNADAYVFVGTSRYSKKFKPEIAIRPKVRDQEGRMNYYWTLVEPGDKITFEATGNLVVPRYAFAMERNAGSGIIISDTPVHDCNTTCQTPKGAINTSLPFQNIHPITIGKCPKYVKSTKLRLATGLRNVPSIQSRGLFGAIAGFIEGGWTGMVDGWYGYHHQNEQGSGYAADLKSTQNAIDEITNKVNSVIEKMNTQFTAVGKEFNHLEKRIENLNKKVDDGFLDIWTYNAELLVLLENERTLDYHDSNVKNLYEKVRSQLKNNAKEIGNGCFEFYHKCDNTCMESVKNGTYDYPKYSEEAKLNREEIDGVKLESTRIYQILAIYSTVASSLVLVVSLGAISFWVCSNGSLQCRICI

SEQ ID NO: 7902 - protein, 566 aa, synthetic construct
  REGION 1..566: note = hemagglutinin__InfluenzaA__AEW25331
MKAILVVLLYTFATANADTLCIGYHANNSTDTVDTVLEKNVTVTHSVNLLEDKHNGKLCKLRGVAPLHLGKCNIAGWILGNPECESFSTSSSWSYIVETSSSDNGTCYPGDFIDYEELREQLSSVSSFERFEIFPKTSSWPNHDSNKGVTAACPHAGAKSFYKNLIWLVKKGNSYPKLSKSYINDKGKEVLVLWGIHHPSTSADQQSLYQNADAYVFVGTSRYSKKFKPEIAIRPKVRDQEGRMNYYWTLVEPGDKITFEATGNLVVPRYAFAMERNAGSGIIISDTPVHDCNTTCQTPKGAINTSLPFQNIPPITIGKCPKYVKSTKLRLATGLRNVPSIQSRGLFGAIAGFIEGGWTGMVDGWYGYHHQNEQGSGYAADLKSTQNAIDEITNKVNSVIEKMNTQFTAVGKEFNHLEKRIENLNKKVDDGFLDIWTYNAELLVLLENERTLDYHDSNVKNLYEKVRSQLKNNAKEIGNGCFEFYHKCDNTCMESVKNGTYDYPKYSEEAKLNREEIDGVKLESTRIYQILAIYSTVASSLVLVVSLGAISFWMCSNGSLQCRICI

SEQ ID NO: 7903 - protein, 566 aa, synthetic construct
  REGION 1..566: note = hemagglutinin__InfluenzaA__AEW25349
MKAILVVLLYTFATANADTLCIGYHANNSTDTVDTVLEKNVTVTHSVNLLEDKHNGKLCKLRGVAPLHLGKCNIAGWILGNPECESFSTSSSWSYIVETSSSDNGTCYPGDFIDYEELREQLSSVSSFERFEIFPKTSSWPNHDSNKGVTAACPHAGAKSFYKNLIWLVKKGNSYPKLSKSYINDKGKEVLVLWGIHHPSTSADQQSLYQNADAYVFVGTSRYSKKFKPEIAIRPKVRDQEGRMNYYWTLVEPGDKITFEATGNLVVPRYAFAMERNAGSGIIISDTPVHDCNTTCQTPKGAINTSLPFQNIHPITIGKCPKYVKSTKLRLATGLRNVPSIQSRGLFGAIAGFIEGGWTGMVDGWYGYHHQNEQGSGYAADLKSTQNAIDEITNKVNSVIEKMNTQFTAVGKEFNHLEKRIENLNKKVDDGFLDIWTYNAELLVLLENERTLDYHDSNVKNLYEKVRSQLKNNAKEIGNGCFEFYHKCDNTCMESVKNGTYDYPKYSEEAKLNREEIDGVKLESTRIYQILAIYSTVASSLVLVVSLGAISFWMCSNGSLQCRICI

SEQ ID NO: 7904 - protein, 566 aa, synthetic construct
  REGION 1..566: note = hemagglutinin__InfluenzaA__AEW25367
MKAILVVLLYTFATANADTLCIGYHANNSTDTVDTVLEKNVTVTHSVNLLEDKHNGKLCKLRGVAPLHLGKCNIAGWILGNPECESFSTSSSWSYIVETSSSDNGTCYPGDFIDYEELREQLSSVSSFERFEIFPKTSSWPNHDSNKGVTAACPHAGAKSFYKNLIWLVKKGNSYPKLSKSYINDKGKEVLVLWGIHHPSTSADQQRLYQNADAYVFVGTSRYSKKFKPEIAIRPKVRDQEGRMNYYWTLVEPGDKITFEATGNLVVPRYAFAMERNAGSGIIISDTPVHDCNTTCQTPKGAINTSLPFQNIHPITIGKCPKYVKSTKLRLATGLRNVPSIQSRGLFGAIAGFIEGGWTGMVDGWYGYHHQNEQGSGYTADLKSTQNAIDEITNKVNSVIEKMNTQFTAVGKEFNHLEKRIENLNKKVDDGFLDIWTYNAELLVLLENERTLDYHDSNVKNLYEKVRSQLKNNAKEIGNGCFEFYHKCDNTCMESVKNGTYDYPKYSEEAKLNREEIDGVKLESTRIYQILAIYSTVASSLVLVVSLGAISFWMCSNGSLQCRICI

SEQ ID NO: 7905 - protein, 566 aa, synthetic construct
  REGION 1..566: note = hemagglutinin__InfluenzaA__AEW25377
MKAILVVLLYTFATANADTLCIGYHANNSTDTVDTVLEKNVTVTHSVNLLEDKHNGKLCKLRGVAPLHLGKCNIAGWILGNPECESLSTASSWSYIVETSSSDNGTCYPGDFIDYEELREQLSSVSSFERFEIFPKTSSWPNHDSNKGVTTACPHAGAKSFYKNLIWLVKKGNSYPKLSKSYINDKGKEVLVLWGIHHPSTSADQQSLYQNADAYVFVGTSRYSKKFKPEIAIRPKVRDQEGRMNYYWTLVEPGDKITFEATGNLVVPRYAFAMERNAGSGIIISDTPVHDCNTTCQTPKGAINTSLPFQNIHPITIGKCPKYVKSTKLRLATGLRNVPSIQSRGLFGAIAGFIEGGWTGMVDGWYGYHHQNEQGSGYAADLKSTQNAIDEITNKVNSVIEKMNTQFTAVGKEFNHLEKRIENLNKKVDDGFLDIWTYNAELLVLLENERTLDYHDSNVKNLYEKVKSQLKNNAKEIGNGCFEFYHKCDNACMESVKNGTYDYPKYSEEAKLNREEIDGVKLESTRIYQILAIYSTVASSLVLVVSLGAISFWMCSNGSLQCRICI

SEQ ID NO: 7906 - protein, 566 aa, synthetic construct
  REGION 1..566: note = hemagglutinin__InfluenzaA__AEW25385
MKAILVVLLYTFATANADTLCIGYHANNSTDTVDTVLEKNVTVTHSVNLLEDKHNGKLCKLRGVAPLHLGKCNIAGWILGNPECESLSTASSWSYIVETSSSDNGTCYPGDFIDYEELREQLSSVPSFERFEIFPKTSSWPNHDSNKGVTAACPHAGAKSFYKNLIWLVKKGNSYPKLSKSYINDKGKEVLVLWGIHHPSTSADQQSLYQNADAYVFVGTSRYSKKFKPEIAIRPKVRDQEGRMNYYWTLVEPGDKITFEATGNLVVPRYAFAMERNAGSGIIISDTPVHDCNTTCQTPKGAINTSLPFQNIHPITIGKCPKYVKSTKLRLATGLRNVPSIQSRGLFGAIAGFIEGGWTGMVDGWYGYHHQNEQGSGYAADLKSTQNAIDKITNKVNSVIEKMNTQFTAVGKEFNHLEKRIENLNKKVDDGFLDIWTYNAELLVLLENERTLDYHDSNVKNLYEKVRSQLKNNAKEIGNGCFEFYHKCDNTCMESVKNGTYDYPKYSEEAKLNREEIDGVKLESTRIYQILAIYSTVASSLVLVVSLGAISFWMCSNGSLQCRICI

SEQ ID NO: 7907 - protein, 566 aa, synthetic construct; identical to SEQ ID NO: 7903
  REGION 1..566: note = hemagglutinin__InfluenzaA__AEW25416

SEQ ID NO: 7908 - protein, 566 aa, synthetic construct
  REGION 1..566: note = hemagglutinin__InfluenzaA__AEW25446
MKAILVVLLYTFATANADTLCIGYHANNSTDTVDTVLEKNVTVTHSVNLLEDKHNGKLCKLRGVAPLHLGKCNIAGWILGNPECESLSTASSWSYIVETSSSDNGTCYPGDFIDYEELREQLSSVSSFERFEIFPKTSSWPNHDPNKGVTAACPHAGAKSFYKNLIWLVKKGNSYPKLSKSYINDKGKEVLVLWGIHHPSTSADQQSLYQNADAYVFVGTSRYSKKFKPEIAIRPKVRDQEGRMNYYWTLVEPGDKITFEATGNLVVPRYAFAMERNAGSGIIISDTPVHDCNTTCQTPKGAINTSLPFQNIHPITIGKCPKYVKSTKLRLATGLRNVPSIQSRGLFGAIAGFIEGGWTGMVDGWYGYHHQNEQGSGYAADLKSTQNAIDEITNKVNSVIEKMNKQFTAVGKEFNHLEKRIENLNKKVDDGFLDIWTYNAELLVLLENERTLDYHDSNVKNLYEKVRSQLKNNAKEIGNGCFEFYHKCDNTCMESVKNGTYDYPKYSEEAKLNREEIDGVKLESTRIYQILAIYSTVASSLVLVVSLGAISFWMCSNGSLQCRICI

SEQ ID NO: 7909 - protein, 566 aa, synthetic construct; identical to SEQ ID NO: 7903
  REGION 1..566: note = hemagglutinin__InfluenzaA__AEW25454

SEQ ID NO: 7910 - protein, 566 aa, synthetic construct
  REGION 1..566: note = hemagglutinin__InfluenzaA__AEW25462
MKAILVVLLYTFATANADTLCIGYHANNSTDTVDTVLEKNVTVTHSVNLLEDKHNGKLCKLRGVAPLHLGKCNIAGWILGNPECESLSTASSWSYIVETSSSDNGTCYPGDFIDYEELREQLSSVSSFERFEIFPKTSSWPNHDPNKGVTAACPHAGAKSFYKNLIWLVKKGNSYPKLSKPYTNDKGKEVLVLWGIHHPSTSADQQSLYQNADAYVFVGTSRYSKKFKPEIAIRPKVRDQEGRMNYYWTLVEPGDKITFEATGNLVVPRYAFAMERNAGSGIIISDTPVHDCNTTCQTPKGAINTSLPFQNIHPITIGKCPKYVKSTKLRLATGLRNVPSIQSRGLFGAIAGFIEGGWTGMVDGWYGYHHQNEQGSGYAADLKSTQNAIDEITNKVNSVIEKMNTQFTAVGKEFNHLEKRIENLNKKVDDGFLDIWTYNAELLVLLENERTLDYHDSNVKNLYEKVRSQLKNNAKEIGNGCFEFYHKCDNTCMESVKNGTYDYPKYSEEAKLNREEIDGVKLESTRIYQILAIYSTVASSLVLVVSLGAISFWMCSNGSLQCRICI

SEQ ID NO: 7911 - protein, 566 aa, synthetic construct; identical to SEQ ID NO: 3467
  REGION 1..566: note = hemagglutinin__InfluenzaA__AEW25472

SEQ ID NO: 7912 - protein, 566 aa, synthetic construct
  REGION 1..566: note = hemagglutinin__InfluenzaA__AEW25482
MKAILVVLLYTFATANADTLCIGYHANNSTDTVDTVLEKKVTVTHSVNLLEDKHNGKLCKLRGVAPLHLGKCNIAGWILGNPECESLSTASSWSYIVETSNSDNGTCYPGDFIDYEELREQLSSVSSFERFEIFPKTSSWPNHDPNKGVTAACPHAGAKSFYKNLIWLVKKGNSYPKLSKSYINDKGKEVLVLWGIHHPSTSADQQSLYQNADAYVFVGTSRYSKKFKPEIAIRPKVRDQGGRMNYYWTLVEPGDKITFEATGNLVVPRYAFAMERNAGSGIIISDTPVHDCNTTCQTPKGAINTSLPFQNIHPITIGKCPKYVKSTKLRLATGLRNVPSIQSRGLFGAIAGFIEGGWTGMVDGWYGYHHQNEQGSGYAADLKSTQNAIDEITNKVNSVIEKMNTQFTAVGKEFNHLEKRIENLNKKVDDGFLDIWTYNAELLVLLENERTLDYHDSNVKNLYEKVRSQLKNNAKEIGNGCFELYHKCDNTCMESVKNGTYDYPKYSEEAKLNREEIDGVKLESTRIYQILAIYSTVASSLVLVVSLGAISFWMCSNGSLQCRICI

SEQ ID NO: 7913 - protein, 566 aa, synthetic construct
  REGION 1..566: note = hemagglutinin__InfluenzaA__AEW25492
MKAILVVLLYTFATANADTLCIGYHANNSTDTVDTVLEKNVTVTHSVNLLEDKHNGKLCKLRGVAPLHLGKCNIAGWILGNPECESLSTASSWSYIVETSSSDNGTCYPGDFIDYEELREQLSSVSSFERFEIFPKTSSWPNHDPNKGVTAACPHAGAKSFYKNLIWLVKKGNSYPKLSKSYINDKGKEVLVLWGIHHPSTSADQQSLYQNADAYIFVGTSRYSKKFKPEIAIRPKVRDQEGRMNYYWTLVEPGDKITFEATGNLVVPRYAFAMERNAGSGIIISDTPVHDCNTTCQTPKGAINTSLPFQNIHPITIGKCPKYVKSTKLRLATGLRNVPSIQSRGLFGAIAGFIEGGWTGMVDGWYGYHHQNEQGSGYAADLKSTQNAIDEITNKVNSVIEKMNTQFTAVGKEFNHLEKRIENLNKKVDDGFLDIWTYNAELLVLLENERTLDYHDSNVKNLYEKVRSQLKNNAKEIGNGCFEFYHKCDNTCMESVKNGTYDYPKYSEEAKLNREEIDGVKLESTRIYQILAIYSTVASSLVLVVSLGAISFWMCSNGSLQCRICI

SEQ ID NO: 7914 - protein, 566 aa, synthetic construct
  REGION 1..566: note = hemagglutinin__InfluenzaA__AEW25501
MKAILVVLLYTFATANADTLCIGYHANNSTDTVDTVLEKNVTVTHSVNLLEDKHNGKLCKLRGVAPLHLGKCNIAGWILGNPECESLSTASSWSYIVETSSSDNGTCYPGDFIDYEELREQLSSVSSFEKFEIFPKTSSWPNHDSNKGVTAACPHAGAKSFYKNLICLVKKGNSYPKLSKSYINDKGKEVLVLWGIHHPSTSADQQSLYQNADAYVFVGTSRYSKKFKPEIAIRPKVRDQEGRMNYYWTLVEPGDKITFEATGNLVVPRYAFAMERNAGSGIIISDTPVHDCNTTCQTPKGAINTSLPFQNIHPITIGKCPKYVKSTKLRLATGLRNVPSIQSRGLFGAIAGFIEGGWTGMVDGWYGYHHQNEQGSGYAADLKSTQNAIDKITNKVNSVIEKMNTQFTAVGKEFNHLEKRIENLNKKVDDGFLDIWTYNAELLVLLENERTLDYHDSNVKNLYEKVRSQLKNNAKEIGNGCFEFYHKCDNTCMESVKNGTYDYPKYSEEAKLNREEIDGVKLESTRIYQILAIYSTVASSLVLVVSLGAISFWMCSNGSLQCRICI

SEQ ID NO: 7915 - protein, 566 aa, synthetic construct; identical to SEQ ID NO: 7903
  REGION 1..566: note = hemagglutinin__InfluenzaA__AEW25509

SEQ ID NO: 7916 - protein, 566 aa, synthetic construct
  REGION 1..566: note = hemagglutinin__InfluenzaA__AEW25519
MKAILVVLLYTFATANADTLCIGYHANNSTDTVDTVLEKNVTVTHSVNLLEDKHNGKLCKLRGVAPLHLGKCNIAGWILGNPECESLSTASSWSYIVETSSSDNGTCYPGDFIDYEELREQLSSVSSFERFEIFPKTSSWPNHDPNKGVTAACPHTGAKSFYKNLIWLVKKGNSYPKLSKSYINDKGKEVLVLWGIHHPSTSADQQSLYQNADAYVFVGTSRYSKKFKPEIAIRPKVRDQEGRMNYYWTLVEPGDKITFEATGNLVVPRYAFAMERNAGSGIIISDTPVHDCNTTCQTPKGAINTSLPFQNIHPITIGKCPKYVKSTKLRLATGLRNVPSIQSRGLFGAIAGFIEGGWTGMVDGWYGYHHQNEQGSGYAADLKSTQNAIDEITNKVNSVIEKMNTQFTAVGKEFNHLEKRIENLNKKVDDGFLDIWTYNAELLVLLENERTLDYHDSNVKNLYEKVRSQLKNNAKEIGNGCFEFYHKCDNTCMESVKNGTYDYPKYSEEAKLNREKIDGVKLESTRIYQILAIYSTVASSLVLVVSLGAISFWMCSNGSLQCRICI

SEQ ID NO: 7917 - protein, 566 aa, synthetic construct
  REGION 1..566: note = hemagglutinin__InfluenzaA__AEW25528
MKAILVVLLYTFATANADTLCIGYHANNSTDTVDTVLEKNVTVTHSVNLLEDKHNGKLCKLRGVAPLHLGKCNIAGWILGNPECESFSTSSSWSYIVETSSSDNGTCYPGDFIDYEELREQLSSVSSFERFEIFPKTSSWPNHDSNKGVTAACPHAGAKSFYKNLIWLVKKGNSYPKLSKSYINDKGKEVLVLWGIHHPSTSADQQSLYQNADAYVFVGTSRYSKKFKPEIAIRPKVRDQERRMNYYWTLVEPGDKITFEATGNLVVPRYAFAMERNAGSGIIISDTPVHDCNTTCQTPKGAINTSLPFQNIHPITIGKCPKYVKSTKLRLATGLRNVPSIQSRGLFGAIAGFIEGGWTGMVDGWYGYHHQNEQGSGYAADLKSTQNAIDEITNKVNSVIEKMNTQFTAVGKEFNHLEKRIENLNKKVDDGFLDIWTYNAELLVLLENERTLDYHDSNVKNLYEKVRSQLKNNAKEIGNGCFEFYHKCDNTCMESVKNGTYDYPKYSEEAKLNREEIDGVKLESTRIYQILAIYSTVASSLVLVVSLGAISFWMCSNGSLQCRICI

SEQ ID NO: 7918 - protein, 566 aa, synthetic construct
  REGION 1..566: note = hemagglutinin__InfluenzaA__AEW25545
MKAILVVLLYTFATANADTLCIGYHANNSTDTVDTVLEKNVTVTHSVNLLEDKHNGKLCKLRGVAPLHLGKCNIAGWILGNPECESLSTASSWSYIVETSSSDNGTCYPGDFIDYEELREQLSSVSSFERFEIFPKTSSWPNHDPNKGVTAACPHAGAKSFYKNLIWLVKKGNSYPKLSKSYINDKGKEVLVLWGIHHPSTSADQQSLYQNADAYVFVGTSRYSKKFKPEIAIRPKVRDQEGRMNYYWTLVEPGDKITFEATGNLVVPRYAFAMERNAGSGIIISDTPVHDCNTTCQTPKGAINTSLPFQNIHPITIGKCPKYVKSTKLRLATGLRNVPSIQSRGLFGAIAGFIEGGWTGMVDGWYGYHHQNEQGSGYAADLKSTQNAIDKITNKVNSVIEKMNTQFTAVGKEFNHLEKRIENLNKKVDDGFLDIWTYNAELLVLLENERTLDYHDSNVKNLYEKVRSQLKNNAKEIGNGCFEFYHKCDNTCMESVKNGSYDYPKYSEEAKLNREEIDGVKLESTRIYQILAIYSTVASSLVMVVSLGAISFWMCSNGSLQCRICI

SEQ ID NO: 7919 - protein, 566 aa, synthetic construct
  REGION 1..566: note = hemagglutinin__InfluenzaA__AEW25555
MKAILVVLLYTFATANADTLCIGYHANNSTDTVDTVLEKNVTVTHSVNLLEDKHNGKLCKLRGVAPLHLGKCNIAGWILGNPECESLSTASSWSYIVETSSSDNGTCYPGDFIDYEELREQLSSVSSFERFEIFPKTSSWPNHDPNKGVTAACPHAGAKSFYKNLIWLVKKGNSYPKLSKSYINDKGKEVLVLWGIHHPSTSADQQSLYQNADAYVFVGTSRYSKKFKPEIAIRPKVRDQEGRMNYYWTLVEPGDKITFEATGNLVVPRYAFAMERNAGSGIIISDTPVHYCNTTCQTPKGAINTSLPFQNIHPITIGKCPKYVKSTKLRLATGLRNVPSIQSRGLFGAIAGFIEGGWTGMVDGWYGYHHQNEQGSGYAADLKSTQNAIDEITNKVNSVIEKMNTQFTAVGKEFNHLEKRIENLNKKVDDGFLDIWTYNAELLVLLENERTLDYHDSNVKNLYEKVRSQLKNNAKEIGNGCFEFYHKCDNTCMESVKNGTYDYPKYSEEAKLNREEIDGVKLESTRIYQILAIYSTVASSLVLVVSLGAISFWMCSNGSLQCRICI

SEQ ID NO: 7920 - protein, 566 aa, synthetic construct
  REGION 1..566: note = hemagglutinin__InfluenzaA__AEW25564
MKAILVVLLYTFATANADTLCIGYHANNSTDTVDTVLEKNVTVTHSVNLLEDKHNGKLCKLRGVAPLHLGKCNIAGWILGNPECESLSTASSWSYIVETSSSDNGTCYPGDFIDYEELREQLSSVSSFERFEIFPKTSSWPNHDSNKGVTAACPHAGAKSFYKNLIWLVKKGNSYPKLSKSYINDKGKEVLVLWGIHHPSTSADQQSLYQNADAYVFVGTSRYSKKFKPEIAIRPKVRDQEGRMNYYWTLVEPGDKITFEATGNLVVPRYAFAMERNAGSGIIISDTPVHDCNTTCQTPKGALNTSLPFQNIHPITIGKCPKYVKSTKLRLATGLRNVPSIQSRGLFGAIAGFIEGGWTGMVDGWYGYHHQNEQGSGYAADLKSTQNAIDEITNKVNSVIEKMNTQFTAVGKEFNHLEKRIENLNRKVDDGFLDIWTYNAELLVLLENERTLDYHDSNVKNLYEKVRSQLKNNAKEIGNGCFEFYHKCDNTCMESVKNGTYDYPKYSEEAKLNREEIDGVKLESTGIYQILAIYSTVASSLVLVVSLGAISFWMCSNGSLQCRICI

SEQ ID NO: 7921 - protein, 566 aa, synthetic construct; identical to SEQ ID NO: 3467
  REGION 1..566: note = hemagglutinin__InfluenzaA__AEW25573

SEQ ID NO: 7922 - protein, 566 aa, synthetic construct
  REGION 1..566: note = hemagglutinin__InfluenzaA__AEW25582
MKAILVVLLYTFATANADTLCIGYHANNSTDTVDTVLEKNVTVTHSVNLLEDKHNGKLCKLRGVAPLHLGKCNIAGWILGNPECESLSTASSWSYIVETSSSDNGTCYPGDFIDYEELREQLSSVSSFERFEIFPKTSSWPNHDSNKGVTAACPHAGAKSFYKNLIWLVKKGNSYPKLSKSYINDKGKEVLVLWGIHHPSTSADQQSLYQNADAYVFVGTSRYSKKFKPEIAIRPKVRDQEGRMNYYWTLVEPGDKITFEATGNLVVPRYAFAMERNAGSGIILSDTPVHDCNTTCQTPKGAINTSLPFQNIHPITIGKCPKYVKSTKLRLATGLRNVPSIQSRGLFGAIAGFIEGGWTGMVDGWYGYHHQNGQGSGYAADLKSTQNAIDKITNKVNSVIEKMNTQFTAVGKEFNHLEKRIENLNKKVDDGFLDIWTYNAELLVLLENERTLDYHDSNVKNLYEKVRSQLKNNAKEIGNGCFEFYHKCDNTCMESVKNGTYDYPKYSEEAKLNREEIDGVKLESTRIYQILAIYSTVASSLVLVVSLGAISFWMCSNGSLQCRICI

SEQ ID NO: 7923 - protein, 566 aa, synthetic construct
  REGION 1..566: note = hemagglutinin__InfluenzaA__AEW25590
MKAILVVLLYTFATANADTLCIGYHANNSTDTVDTVLEKNVTVTQSVNLLEDKHNGKLCKLRGVAPLHLGKCNIAGWILGNPECESLSTASSWSYIVETSSSDNGTCYPGDFIDYEELREQLSSVSSFERFEIFPKTSSWPNHDSNKGVTAACPHAGAKSFYKNLIWLVKKGNSYPKLSKSYINDKGKEVLVLWGIHHPSTSADQQSLYQNADAYVFVGTSRYSKKFKPEIAIRPKVRDQEARMNYYWTLVEPGDKITFEATGNLVVPRYAFAMERDAGSGIIISDTPVHDCNTTCQTPKGAINTSLPFQNIHPITIGKCPKYVKSTKLRLATGLRNVPSIQSRGLFGAIAGFIEGGWTGMVDGWYGYHHQNEQGSGYAADLKSTQNAIDEITNKVNSVIEKMNTQFTAVGKEFNHLEKRIENLNKKVDDGFLDIWTYNAELLVLLENERTLDYHDSNVKNLHEKVRSQLKNNAKEIGNGCFEFYHKCDNTCMESVKNGTYDYPKYSEEAKLNREEIDGVKLESTRIYQILAIYSTVASSLVLVVSLGAISFWMCSNGSLQCRICI

SEQ ID NO: 7924 - protein, 566 aa, synthetic construct; identical to SEQ ID NO: 3467
  REGION 1..566: note = hemagglutinin__InfluenzaA__AEW25600

SEQ ID NO: 7925 - protein, 566 aa, synthetic construct; identical to SEQ ID NO: 3467
  REGION 1..566: note = hemagglutinin__InfluenzaA__AEW25620

SEQ ID NO: 7926 - protein, 566 aa, synthetic construct
  REGION 1..566: note = hemagglutinin__InfluenzaA__AEW25629
MKAILVVLLYTFATANADTLCIGYHANNSTDTVDTVLEKNVTVTHSVNLLEDKHNGKLCKLRGVAPLHLGKCNIAGWILGNPECESLSTASSWSYIVETSSSDNGTCYPGDFIDYEELREQLSSVSSFERFEIFPKTSSWPNHDPNKGVTAACPHAEAKSFYKNLIWLVKKGNSYPKLSKSYINDKGKEVLVLWGIHHPSTSADQQSLYQNADAYVFVGTSRYSKKFKPEIAIRPKVRDQEGRMNYYWTLVEPGDKITFEATGNLVVPRYAFAMERNAGSGIIISDTPVHDCNTTCQTPKGAINTSLPFQNIHPITIGKCPKYVKSTKLRLATGLRNVPSIQSRGLFGAIAGFIEGGWTGMVDGWYGYHHQNEQGSGYAADLKSTQNAIDEITNKVNSVIEKMNTQFTAVGKEFNHLEKRIENLNKKVDDGFLDIWTYNAELLVLLENERTLDYHDSNVKNLYEKVRSQLKNNAKEIGNGCFEFYHKCDNMCMESVKNGTYDYPKYSEEAKLNREEIDGVKLESTRIYQILAIYSTVASSLVLVVSLGAISFWMCSNGSLQCRICI

SEQ ID NO: 7927 - protein, 566 aa, synthetic construct; identical to SEQ ID NO: 2669
  REGION 1..566: note = hemagglutinin__InfluenzaA__AEW25637

SEQ ID NO: 7928 - protein, 566 aa, synthetic construct
  REGION 1..566: note = hemagglutinin__InfluenzaA__AEW25646
MKAILVVLLYTFATANADTLCIGYHANNSTDTVDTVLEKNVTVTHSVNLLEDKHNGKLCKLRGVAPLHLGKCNIAGWILGNPECESLSTASSWSYIVETSSSDNGTCYPGDFIDYEELREQLSSVSSFERFEIFPKTSSWPNHDPNKGVTAACPHAGAKSFYKNLIWLVKKGNSYPKLSKSYINDKGKEVLVLWGIHHPSTSADQQSLYQNADAYVFVGTSRYSKKFKPEIAIRPKVRDQEGRMNYYWTLVEPGDKITFEATGNLVVPRYAFAMERNAGSGIIISDTPVHDCNTTCQTPKGAINTSLPFQNIHPITIGKCPKYVKSTKLRLATGLRNVPSIQSRGLFGAIAGFIEGGWTGMVDGWYGYHHQNEQGSGYAADLKSTQNAIDKITNKVNSVIEKMNTQFTAVGKEFNHLEKRIENLNKKVDDGFLDIWTYNAELLVLLENERTLDYHDSNVKNLYEKVRSQLKNNAKEIGNGCFEFYHKCDNTCMESVKNGTYDYPKYSEEAKLNREEIDGVKLESTRIYQILAIYSTVASSLVLVVSLGAISFWMCSNGSLQCRICI

SEQ ID NO: 7929 - protein, 566 aa, synthetic construct
  REGION 1..566: note = hemagglutinin__InfluenzaA__AEW25654
MKAILVVLLYTFATANADTLCIGYHANNSTDTVDTVLEKNVTVTHSVNLLEDKHNGKLCKLRGVAPLHLGKCNIAGWILGNPECESLSTASSWSYIVETSSSDNGTCYPGDFIDYEELREQLSSVSSFERFEIFPKTSSWPNHDSNKGVTAACPHAGAKSFYKNLIWLVKKGNSYPKLSKSYINDKGKEVLVLWGIHHPSTSADQQSLYQNADAYVFVGTSRYSKKFKPEIAIRPKVRDQEGRMNYYWTLVEPGDKITFEATGNLVVPRYAFAMERNAGSGIIISDTPVHDCNTTCQTPKGAINTSPPFQNIHPITIGKCPKYVKSTKLRLATGLRNIPSIQSRGLFGAIAGFIEGGWTGMVDGWYGYHHQNEQGSGYAADLKSTQNAIDEITNKVNSVIEKMNTQFTAVGKEFNHLEKRIENLNKKVDDGFLDIWTYNAELLVLLENERTLDYHDSNVKNLYEKVRSQLKNNAKEIGNGCFEFYHKCDNTCMESVKNGTYDYPKYSEEAKLNREEIDGVKLESTRIYQILAIYSTVASSLVLVVSLGAISFWMCSNGSLQCRICI

SEQ ID NO: 7930 - protein, 566 aa, synthetic construct
  REGION 1..566: note = hemagglutinin__InfluenzaA__AEW25662
MKAILVVLLYTFATANADTLCIGYHANNSTDTVDTVLEKNVTVTHSVNLLEDKHNGKLCKLRGVAPLHLGKCNIAGWILGNPECESLSTASSWSYIVETSSSDNGTCYPGDFIDYEELREQLSSVSSFERFEIFPKTSSWPNHDPNKGITAACPHAGAKSFYKNLIWLVKKGNSYPKLSKSYINDKGKEVLVLWGIHHPSTSADQQSLYQNADAYVFVGTSRYSKKFKPEIAIRPKVRDQEGRMNYYWTLVEPGDKITFEATGNLVVPRYAFAMERNAGSGIIISDTPVHDCNTTCQTPKGAINTSLPFQNIHPITIGKCPKYVKSTKLRLATGLRNVPSIQSRGLFGAIAGFIEGGWTGMVDGWYGYHHQNEQGSGYAADLKSTQNAIDEITNKVNSVIEKMNTQFTAVGKEFNHLEKRIENLNKKVDDGFLDIWTYNAELLVLLENERTLDYHDSNVKNLYEKVRSQLKNNAKEIGNGCFEFYHKCDNTCMESVKNGTYDYPKYSEEAKLNREEIDGVKLESTRIYQILAIYSTVASSLVLVVSLGAISFWMCSNGSLQCRICI

SEQ ID NO: 7931 - protein, 566 aa, synthetic construct
  REGION 1..566: note = hemagglutinin__InfluenzaA__AEW25669
MKAILVVLLYTFATANADTLCIGYHANNSTDTVDTVLEKNVTVTHSVNLLEDKHNGKLCKLRGVAPLHLGKCNIAGWILGNPECESLSTASSWSYIVETSSSDNGTCYPGDFIDYEELREQLSSVSSFERFEIFPKTSSWPNHDPNKGVTAACPHAGAKSFYKNLIWLVKKGNSYPKLSKSYINDKGKEVLVLWGIHHPSTSADQQSLYQNADAYVFVGTSRYSKKFKPEIAIRPKVRDQEGRMNYYWTLVEPGDKITFEATGNLVVPRYAFAMERNAGSGIIISDTPVHDCNTTCQTPKGAINTSLPFQNIHPITIGKCPKYVKSTKLRLATGLRNVPSIQSRGLFGAIAGFIEGGWTGMVEGWYGYHHQNEQGSGYAADLKSTQNAIDEITNKVNSVIEKMNTQFTAVGKEFNHLEKRIENLNKKVDDGFLDIWTYNAELLVLLENERTLDYHDSNVKNLYEKVRSQLKNNAKEIGNGCFEFYHKCDNTCMESVKNGTYDYPKYSEEAKLNREEIDGVKLESTRIYQILAIYSTVASSLVLVVSLGAISFWMCSNGSLQCRICI

SEQ ID NO: 7932 - protein, 566 aa, synthetic construct
  REGION 1..566: note = hemagglutinin__InfluenzaA__AEW25678
MKAILVVLLYTFATANADTLCIGYHANNSTDTVDTVLEKNVTVTHSVNLLEDKHNGKLCKLRGVAPLHLGKCNIAGWILGNPECESLSTASSWSYIVETSSSDNGTCYPGDFIDYEELREQLSSVSSFEKFEIFPKTSSWPNHDSNKGVTAACPHAGAKSFYKNLIWLVKKGNSYPKLSKSYINDKGKEVLVLWGIHHPSTSADQQSLYQNADAYVFVGTSRYSKKFKPEIAIRPKVRDQEGRMNYYWTLVEPGDKITFEATGNLVVPRYAFAMERNAGSGIIISDTPVHDCNTTCQTPKGAINTSLPFQNIHPITIGKCPKYVKSTKLRLATGLRNVPSIQSRGLFGAIAGFIEGGWTGMVDGWYGYHHQNEQGSGYAADLKSTQNAIDEITNKVNSVIEKMNTQFTAVGKEFNHLEKRIENLNKKVDDGFLDIWTYNAELLVLLENERTLDYHDSNVKNLYEKVRSQLKNNAKEIGNGCFEFYHKCDNTCMESVKNGTYDYPKYSEEAKLNREEIDGVKLESTRIYQILAIYSTVASSLVLVVSLRAISFWMCSNGSLQCRICI

SEQ ID NO: 7933 - protein, 566 aa, synthetic construct
  REGION 1..566: note = hemagglutinin__InfluenzaA__AEW25687
MKAILVVLLYTFATANADTLCIGYHANNSTDTVDTVLEKNVTVTHSVNLLEDKHNGKLCKLRGVAPLHLGKCNIAGWILGNPECESLSTASSWSYIVETSSSDNGTCYPGDFIDYEELREQLSSVSSFERFEIFPKTSSWPNHDPNKGVTAACPYAGAKSFYKNLIWLVKKGNSYPKLSKSYINDKGKEVLVLWGIHHPSTSADQQSLYQNADAYVFVGTSRYSKKFKPEIAIRPKVRDQEGRMNYYWTLVEPGDKITFEATGNLVVPRYAFAMERNAGSGIIISDTPVHDCNTTCQTPKGAINTSLPFQNIHPITIGKCPKYVKSTKLRLATGLRNVPSIQSRGLFGAIAGFIEGGWTGMVDGWYGYHHQNEQGSGYAADLKSTQNAIDKITNKVNSVIEKMNTQFTAVGKEFNHLEKRIENLNKKVDDGFLDIWTYNAELLVLLENERTLDYHDSNVKNLYEKVRSQLKNNAKEIGNGCFEFYHKCDNTCMESVKNGTYDYPKYSEEAKLNREEIDGVKLESTRIYQILAIYSTVASSLVLVVSLGAISFWMCSNGSLQCRICI

SEQ ID NO: 7934 - protein, 566 aa, synthetic construct; identical to SEQ ID NO: 7903
  REGION 1..566: note = hemagglutinin__InfluenzaA__AEW25696

SEQ ID NO: 7935 - protein, 566 aa, synthetic construct; identical to SEQ ID NO: 3467
  REGION 1..566: note = hemagglutinin__InfluenzaA__AEW25706

SEQ ID NO: 7936 - protein, 564 aa, synthetic construct
  REGION 1..564: note = hemagglutinin__InfluenzaA__AEW91908
MEKIVLLFATISLVKSDHICIGYHANNSTEQVDTIMEKNVTVTHAQDILEKTHNGKLCDLNGVKPLILKDCSVAGWLLGNPMCDEFINVPEWSYIVEKANPANDLCYPGNFNDYEELKHLLSRINHFEKIQIIPKNSWSDHEASLGVSAACPYQGKSSFFRNVVWLIKKDNAYPTIKKGYNNTNQEDLLVLWGIHHPNDEAEQTRLYQNPTTYISIGTSTLNQRLVPKIATRSKINGQSGRIDFFWTILKPNDAIHFESNGNFIAPEYAYKIVKKGDSTIMKSEVEYGNCNTRCQTPIGAINSSMPFHNIHPLTIGECPKYVKSNKLVLATGLRNSPQGETRGLFGAIAGFIEGGWQGMVDGWYGYHHSNEQGSGYAADKESTQKAIDGVTNKVNSIIDKMNTQFEAVGREFNNLERRIENLNKKMEDGFLDVWTYNAELLVLMENERTLDFHDSNVRNLYDKVRLQLKDNAKELGNGCFEFYHKCDNECMESVRNGTYDYPQYSEEARLKREEISGVKLESIGIYQILSIYSTVASSLVLAIMMAGLSLWMCSNGSLQCRICI

SEQ ID NO: 7937 - protein, 566 aa, synthetic construct
  REGION 1..566: note = hemagglutinin__InfluenzaA__AEX09175
MKAILVVLLYTFATANADTLCIGYHANNSTDTVDTVLEKNVAVTHSVNLLEDKHNGKLCKLRGVAPLHLGKCNIAGWILGNPECESLSTASSWSYIVETSSSDNGTCYPGDFIDYEELREQLSSVSSFERFEIFPKTSSWPNHDSNKGVTAACPHAGAKSFYKNLIWLVKKGNSYPKLSKSYINDKGKEVLVLWGIHHPSTSADQQSLYQNADAYVFVGTSRYSKKFKPEIAIRPKVRDREGRMNYYWTLVEPGDKITFEATGNLVVPRYAFAMERNAGSGIIISDTPVHDCNTTCQTPKGAINTSLPFQNIHPITIGKCPKYVKSTKLRLATGLRNVPSIQSRGLFGAIAGFIEGGWTGMVDGWYGYHHQNEQGSGYAADLKSTQNAIDEITNKVNSVIEKMNTQFTAVGKEFNHLEKRIENLNKKVDDGFLDIWTYNAELLVLLENERTLDYHDSNVKNLYEKVRSQLKNNAKEIGNGCFEFYHKCDNTCMESVKNGTYDYPKYSEEAKLNREEIDGVKLESTRIYQILAIYSTVASSLVLVVSLGAISFWMCSNGSLQCRICI

SEQ ID NO: 7938 - protein, 566 aa, synthetic construct; identical to SEQ ID NO: 2669
  REGION 1..566: note = hemagglutinin__InfluenzaA__AEX25795

SEQ ID NO: 7939 - protein, 566 aa, synthetic construct
  REGION 1..566: note = hemagglutinin__InfluenzaA__AEX25797
MEAILVVLLYTFATANADTLCIGYHANNSTDTVDTVLEKNVTVTHSVNLLEDKHNGKLCKLRGVAPLHLGKCNIAGWILGNPECESLSTASSWSYIVETSNSDNGTCYPGDFIDYEELREQLSSVSSFERFEIFPKTSSWPNHDSNKGVTAACPHAGAKSFYKNLIWLVKKGNSYPKLSKSYINDKGKEVLVLWGIHHPSTSADQQSLYQNADAYVFVGSSRYSKKFKPEIAIRPKVRDQEGRMNYYWTLVEPGDKITFEATGNLVVPRYAFAMERNAGSGIIISDTPVHDCNTTCQTPKGAINTSLPFHNIHPITIGKCPKYVKSTKLRLATGLRNVPSIQSRGLFGAIAGFIEGGWTGMVDGWYGYHHQNEQGSGYAADLKSTQNAIDEITNKVNSVIEKMNTQFTAVGKEFNHLEKRIENLNKKVDDGFLDIWTYNAELLVLLENERTLDYHDSNVKNLYEKVRSQLKNNAKEIGNGCFEFYHKCDNTCMESVKNGTYDYPKYSEEAKLNREEIDGVKLESTRIYQILAIYSTVASSLVLVVSLGAISFWMCSNGSLQCRICI

SEQ ID NO: 7940 - protein, 566 aa, synthetic construct
  REGION 1..566: note = hemagglutinin__InfluenzaA__AEX25798
MKAILVVLLYTFATANADTLCIGYHANNSTDTVDTVLEKNVTVTHSVNLLEDKHNGKLCKLRGVAPLHLGKCNIAGWILGNPECESLSTASSWSYIVETSSSDNGTCYPGDFINYEELREQLSSVSSFERFEIFPKTSSWPNHDSNKGVTAACPHAGAKSFYKNLIWLVKKGNSYPKLSKSYINDKGKEVLVLWGIHHPSTSADQQSLYQNADAYVFVGTSRYSKKFKPEIAIRPKVRDQEGRMNYYWTLVEPGDKITFEATGNLVVPRYAFAMERNAGSGIIISDTPVHDCNTTCQTPKGAINTSLPFHNIHPITIGKCPKYVKSTKLRLATGLRNVPSIQSRGLFGAIAGFIEGGWTGMVDGWYGYHHQNEQGSGYAADLKSTQNAIDEITNKVNSVIEKMNTQFTAVGKEFNHLEKRIENLNKKVDDGFLDIWTYNAELLVLLENERTLDYHDSNVKNLYEKVRSQLKNNAKEIGNGCFEFYHKCDNTCMESVKNGTYDYPKYSEEAKLNREEIDGVKLESTRIYQILAIYSTVASSLVLVVSLGAISFWMCSNGSLQCRICI

SEQ ID NO: 7941 - protein, 566 aa, synthetic construct; identical to SEQ ID NO: 2669
  REGION 1..566: note = hemagglutinin__InfluenzaA__AEX25800

SEQ ID NO: 7942 - protein, 566 aa, synthetic construct; identical to SEQ ID NO: 2669
  REGION 1..566: note = hemagglutinin__InfluenzaA__AEX25803

SEQ ID NO: 7943 - protein, 566 aa, synthetic construct; identical to SEQ ID NO: 2911
  REGION 1..566: note = hemagglutinin__InfluenzaA__AEX25808

SEQ ID NO: 7944 - protein, 566 aa, synthetic construct; identical to SEQ ID NO: 5639
  REGION 1..566: note = hemagglutinin__InfluenzaA__AEX25810

SEQ ID NO: 7945 - protein, 566 aa, synthetic construct
  REGION 1..566: note = hemagglutinin__InfluenzaA__AEX25811
MEAILVVLLYTFATANADTLCIGYHANNSTDTVDTVLEKNVTVTHSVNLLEDKHNGKLCKLRGVAPLHLGKCNIAGWILGNPECESLFTASSWSYIVETSSSDNGTCYPGDFIDYEELREQLSSVSSFERFEIFPKTSSWPNHDSNKGVTAACPHAGAKSFYKNLIWLVKKGNSYPKLSKSYINDKGKEVLVLWGIHHPSTSADQQSLYQNADAYVFVGSSRYSKKFKPEIAIRPKVRDQEGRMNYYWTLVEPGDKITFEATGNLVVPRYAFAMERKAGSGIIISDTPVHDCNTTCQTPKGAINTSLPFHNIHPITIGKCPKYVKSTKLRLATGLRNVPSIQSRGLFGAIAGFIEGGWTGMVDGWYGYHHQNEQGSGYAADLKSTQNAIDEITNKVNSVIEKMNTQFTAVGKEFNHLEKRIENLNKKVDDGFLDIWTYNAELLVLLENERTLDYHDSNVKNLYEKVRSQLKNNAKEIGNGCFEFYHKCDNTCMESVKNGTYDYPKYSEEAKLNREEIDGVKLESTRIYQILAIYSTVASSLVLVVSLGAISFWMCSNGSLQCRICI

SEQ ID NO: 7946 - protein, 566 aa, synthetic construct; identical to SEQ ID NO: 5639
  REGION 1..566: note = hemagglutinin__InfluenzaA__AEX25814

SEQ ID NO: 7947 - protein, 566 aa, synthetic construct
  REGION 1..566: note = hemagglutinin__InfluenzaA__AEX25816
MKAILVVLLYTFATANADTLCIGYHANNSTDTVDTVLEKNVTVTHSVNLLEDKHNGKLCKLRGVAPLHLGKCNIAGWILGNPECESLSTANSWSYIVETSSSDNGTCYPGDFINYEELREQLSSVSSFERFEIFPKTSSWPNHDSNKGVTAACPHAGAKSFYKNLIWLVKKGNSYPKLSKSYINDKGKEVLVLWGIHHPSTSADQQSLYQNADAYVFVGTSRYSKKFKPEIAIRPKVRDQEGRMNYYWTLVEPGDKITFEATGNLVVPRYAFAMERNAGSGIIISDTPVHDCNTTCQTPKGAINTSLPFQNIHPITIGKCPKYVKSTKLRLATGLRNVPSIQSRGLFGAIAGFIEGGWTGMVDGWYGYHHQNEQGSGYAADLKSTQNAIDEITNKVNSVIEKMNTQFTAVGKEFNHLEKRIENLNKKVDDGFLDIWTYNAELLVLLENERTLDYHDSNVKNLYEKVRSQLKNNAKEIGNGCFEFYHKCDNTCMESVKNGTYDYPKYSEEAKLNREEIDGVKLESTRIYQILAIYSTVASSLVLVVSLGAISFWMCSNGSLQCRICI

SEQ ID NO: 7948 - protein, 566 aa, synthetic construct
  REGION 1..566: note = hemagglutinin__InfluenzaA__AEX25818
MEAILVVLLYTFATANADTLCIGYHANNSTDTVDTVLEKNVTVTHSVNLLEDKHNGKLCKLRGVAPLHLGKCNIAGWILGNPECESLSTASSWSYIVETSNSDNGTCYPGDFIDYEELREQLSSVSSFERFEIFPKTSSWPNHDSNKGVTAACPHAGAKSFYKNLIWLVKKGNSYPKLSKSYINDKGKEVLVLWGIHHQSTSADQQSLYQNADAYVFVGSSRYSKKFKPEIAIRPKVRDQEGRMNYYWTLVEPGDKITFEATGNLVVPRYAFAMERNAGSGIIISDTPVHDCNTTCQTPKGAINTSLPFHNIHPITIGKCPKYVKSTKLRLATGLRNVPSIQSRGLFGAIAGFIEGGWTGMVDGWYGYHHQNEQGSGYAADLKSTQNAIDEITNKVNSVIEKMNTQFTAVGKEFNHLEKRIENLNKKVDDGFLDIWTYNAELLVLLENERTLDYHDSNVKNLYEKVRSQLKNNAKEIGNGCFEFYHKCDNTCMESVKNGTYDYPKYSEEAKLNREEIDGVKLESTRIYQILAIYSTVASSLVLVVSLGAISFWMCSNGSLQCRICI

SEQ ID NO: 7949 - protein, 566 aa, synthetic construct
  REGION 1..566: note = hemagglutinin__InfluenzaA__AEX25824
MKAILVVLLYTFATANADTLCIGYHANNSTDTVDTVLEKNVTVTHSVNLLEDKHNGKLCKLRGVAPLHLGKCNIAGWILGNPECESLSTASSWSYIVETSSSDNGTCYPGDFIDYEELREQLSSVSSFERFEIFPKTSSWPNHDSNKGVTAACPHAGAKSFYKNLIWLVKKGNSYPKLSKSYINDKGKEVLVLWGIHHPSTSADQQSLYQNADAYVFVGTSRYSKKFKPEIAIRPKVRDQEGRMNYYWTLVEPGDKITFEATGNLVVPRYAFAMERNAGSGIIISDTPVHDCNTTCQTPKGAINTSLPFQNIHPITIGKCPKYVESTKLRLATGLRNVPSIQSRGLFGAIAGFIEGGWTGMVDGWYGYHHQNEQGSGYAADLKSTQNAIDEITNKVNSVIEKMNTQFTAVGKEFNHLEKRIENLNKKVDDGFLDIWTYNAELLVLLENERTLDYHDSNVKNLYEKVRSQLKNNAKEIGNGCFEFYHKCDNTCMESVKNGTYDYPKYSEEAKLNREEIDGVKLESTRIYQILAIYSTVASSLVLVVSLGAISFWMCSNGSLQCRICI

SEQ ID NO: 7950 - protein, 565 aa, synthetic construct
  REGION 1..565: note = hemagglutinin__InfluenzaA__AEX33420
MKVKLLVLLCIFTATYADTICIGYHANNSTDTVDTVLEKNVTVTHSVNLLEDSHNGKLCLLKGIAPLQLGNCSVAGWILGNPECELLISKESWSYIVETPNPENGTCYPGYFADYEELREQLSSVSSFERFEIFPKESSWPNHTVTGVSASCSHNGKSSFYRNLLWLTGKSGLYPNLSKSYANNKEKEVLVLWGVHHPPNIGDQRALYHTENAYVSVVSSHYSRRFTPEIAKRPKVRDQEGRINYYWTLLEPGDTIIFEANGNLIAPRYAFALSRGFGSGIITSNAPMDECDAKCQTPQGAINSSLPFQNVHPVTIGECPKYVKSAKLRMVTGLRNIPSIQSRGLFGAIAGFIEGGWTGMVDGWYGYHHQNEQGSGYAADQKSTQNAINGITNKVNSVIEKMNTQFTAVGKEFNKLERRMENLNKKVDDGFLDIWTYNAELLVLLENERTLDFHDSNVKNLYEKVKSQLKNNAKEIGNGCFEFYHKCNDECMESVKNGTYDYPKYSEESKLNREKIDGVKLESMGVYQILAIYSTVASSLVLLVSLGAISFWMCSNGSLQCRICI

SEQ ID NO: 7951 - protein, 566 aa, synthetic construct
  REGION 1..566: note = hemagglutinin__InfluenzaA__AEX33453
MKTIIALSYILCLVFAQKLPGNDNSTATLCLGHHAVPNGTIVKTITNDQIEVTNATELVQSSSTGGICDSPHQILDGENCTLIDALLGDPQCDGFQNKKWDLFVERSKAYSNCYPYDVPDYASLRSLVASSGTLEFNNESFNWTGVTQNGTSSACKRRSDKSFFSRLNWLTHLKYKYPALNVTMPNNEKFDKLYIWGVHHPGTDSDQISLYAQASGRITVSTKRSQQTVIPNIGSRPRVRDVSSRISIYWTIVKPGDILLINSTGNLIAPRGYFKIRSGKSSIMRSDAPIGKCNSECITPNGSIPNDKPFQNVNRITYGACPRYVKQNTLKLATGMRNVPEKQTRGIFGAIAGFIENGWEGMVDGWYGFRHQNSEGTGQAADLKSTQAAINQINGKLNRLIGKTNEKFHQIEKEFSEVEGRIQDLEKYVEDTKIDLWSYNAELLVALENQHTIDLTDSEMNKLFERTKKQLRENAEDMGNGCFKIYHKCDNACIGSIRNGTYDHDVYRDEALNNRFQIKGVELKSGYKDWILWISFAISCFLLCVALLGFIMWACQKGNIRCNICI

SEQ ID NO: 7952 - protein, 566 aa, synthetic construct; identical to SEQ ID NO: 1795
  REGION 1..566: note = hemagglutinin__InfluenzaA__AEX33464

SEQ ID NO: 7953 - protein, 566 aa, synthetic construct; identical to SEQ ID NO: 1795
  REGION 1..566: note = hemagglutinin__InfluenzaA__AEX33475

SEQ ID NO: 7954 - protein, 566 aa, synthetic construct; identical to SEQ ID NO: 1795
  REGION 1..566: note = hemagglutinin__InfluenzaA__AEX33486

SEQ ID NO: 7955 - protein, 566 aa, synthetic construct; identical to SEQ ID NO: 1795
  REGION 1..566: note = hemagglutinin__InfluenzaA__AEX33497

SEQ ID NO: 7956 - protein, 566 aa, synthetic construct; identical to SEQ ID NO: 1795
  REGION 1..566: note = hemagglutinin__InfluenzaA__AEX33508

SEQ ID NO: 7957 - protein, 566 aa, synthetic construct; identical to SEQ ID NO: 1795
  REGION 1..566: note = hemagglutinin__InfluenzaA__AEX33519

SEQ ID NO: 7958 - protein, 566 aa, synthetic construct
  REGION 1..566: note = hemagglutinin__InfluenzaA__AEX33541
MKTIIALSYILCLVFAQKLPGNDNSTATLCLGHHAVPNGTIVKTITNDQIEVTNATELVQISSTGGICDSPHQILDGENCTLIDALLGDPQCDGFQNKKWDLFVERSKAYSNCYPYDVPDYASLRSLVASSGTLEFNNESFDWTGVTQNGTSSSCKRRSNKSFFSRLNWLTHLKYKYPALNVTMPNNEKFDKLYIWGVHHPGTDSDQISLYAQASGRITVSTKRSQQTVIPNIGSRPRVRDVSSRISIYWTIVKPGDILLINSTGNLIAPRGYFKIRSGKSSIMRSDAPIGKCNSECITPNGSIPNDKPFQNVNRITYGACPRYVKQNTLKLATGMRNVPEKQTRGIFGAIAGFIENGWEGMVDGWYGFRHQNSEGTGQAADLKSTQAAINQINGKLNRLIGKTNEKFHQIEKEFSEVEGRIQDLEKYVEDTKIDLWSYNAELLVALENQHTIDLTDSEMNKLFERTKKQLRENAEDMGNGCFKIYHKCDNACIGSIRNGTYDHDVYRDEALNNRFQIKGVELKSGYKDWILWISFAISCFLLCVALLGFIMWACQKGNIRCNICI

SEQ ID NO: 7959 - protein, 566 aa, synthetic construct
  REGION 1..566: note = hemagglutinin__InfluenzaA__AEX33574
MKTIIALSYILCLVFAQKLPGNDNSTATLCLGHHAVPNGTIVKTITNDQIEVTNATELVQSSSTGGICDSPHQILDGENCTLIDALLGDPQCDGFQNKKWDLFVERSKAYSNCYPYDVPDYASLRSLVASSGTLEFNNESFNWTGVTQNGTSSACKRRSNKSFFSRLNWLTHLKFKYPALNVTMPNNEKFDKLYIWGVHHPGTDNDQISLYAQASGRITVSTKRSQQTVIPNIGSRPRVRDVPSRISIYWTIVKPGDILLINSTGNLIAPRGYFKIRSGKSSIMRSDAPIGKCNSECITPNGSIPNDKPFQNVNRITYGACPRYVKQNTLKLATGMRNVPEKQTRGIFGAIAGFIENGWEGMVDGWYGFRHQNSEGTGQAADLKSTQAAINQINGKLNRLIGKTNEKFHQIEKEFSEVEGRIQDLEKYVEDTKIDLWSYNAELLVALENQHTIDLTDSEMNKLFERTKKQLRENAEDMGNGCFKIYHKCDNDCIGSIRNGTYDHDVYRDEALNNRFQIKGVELKSGYKDWILWISFAISCFLLCVALLGFIMWACQKGNIRCNICI

SEQ ID NO: 7960 - protein, 566 aa, synthetic construct; identical to SEQ ID NO: 1795
  REGION 1..566: note = hemagglutinin__InfluenzaA__AEX33585

SEQ ID NO: 7961 - protein, 566 aa, synthetic construct
  REGION 1..566: note = hemagglutinin__InfluenzaA__AEX33596
MKTIIALSYILCLVFAQKLPGNDNSTATLCLGHHAVPNGTIVKTITNDQIEVTNATELVQSSSTGGICDSPHQILDGENCTLIDALLGDPQCDGFQNKKWDLFVERSKAYSNCYPYDVPDYASLRSLVASSGTLEFNNESFNWTGVTQNGTSSACKRRSNKSFFSRLNWLTHLKFKYPALNVTMPNNEKFDKLYIWGVHHPGTDNDQISLYAQASGRITVSTKRSQQTVIPNIGSRPRVRDIPSRISIYWTIVKPGDILLINSTGNLIAPRGYFKIRSGKSSIMRSDAPIGKCNSECITPNGSIPNDKPFQNVNRITYGACPRYVKQNTLKLATGMRNVPEKQTRGIFGAIAGFIENGWEGMVDGWYGFRHQNSEGTGQAADLKSTQAAINQINGKLNRLIGKTNEKFHQIEKEFSEVEGRIQDLEKYVEDTKIDLWSYNAELLVALENQHTIDLTDSEMNKLFERTKKQLRENAEDMGNGCFKIYHKCDNACIGSIRNGTYDHDVYRDEALNNRFQIKGVELKSGYKDWILWISFAISCFLLCVALLGFIMWACQKGNIRCNICI

SEQ ID NO: 7962 - protein, 566 aa, synthetic construct; identical to SEQ ID NO: 1795
  REGION 1..566: note = hemagglutinin__InfluenzaA__AEX33618

SEQ ID NO: 7963 - protein, 566 aa, synthetic construct; identical to SEQ ID NO: 1795
  REGION 1..566: note = hemagglutinin__InfluenzaA__AEX33629

SEQ ID NO: 7964 - protein, 566 aa, synthetic construct; identical to SEQ ID NO: 7961
  REGION 1..566: note = hemagglutinin__InfluenzaA__AEX33640

SEQ ID NO: 7965 - protein, 566 aa, synthetic construct
  REGION 1..566: note = hemagglutinin__InfluenzaA__AEX33836
MKTIIALSYILCLVFAQKLPGNDNSTATLCLGHHAVPNGTIVKTITNDQIEVTNATELVQSSSTGGICDSPHQILDGENCTLIDALLGDPQCDGFQNKKWDLFVERSKAYSNCYPYDVPDYASLRSLVASSGTLEFNNESFNWTGVTQNGTSSACKRRSNNSFFSRLNWLTHLKFKYPALNVTMPNNEKFDKLYIWGVHHPGTDNDQIFLYAQASGRITVSTKRSQQTVIPNIGSRPRVRNIPSRISIYWTIVKPGDIFLINSTGNLIAPRGYFKIRSGKSSIMRSDAPIGKCNSECITPNGSIPNDKPFQNVNRITYGACPRYVKQNTLKLATGMRNVPEKQTRGIFGAIAGFIENGWEGMVDGWYGFRHQNSEGIGQAADLKSTQAAINQINGKLNRLIGKTNEKFHQIEKEFSEVEGRIQDLEKYVEDTKIDLWSYNAELLVALENQHTIDLTDSEMNKLFERTKKQLRENAEDMGNGCFKIYHKCDNACIGSIRNGTYDHDVYRDEALNNRFQIKGVELKSGYKDWILWISFAISCFLLCVALLGFIMWACQKGNIRCNICI

SEQ ID NO: 7966 - protein, 566 aa, synthetic construct; identical to SEQ ID NO: 630
  REGION 1..566: note = hemagglutinin__InfluenzaA__AEX33880

SEQ ID NO: 7967 - protein, 565 aa, synthetic construct
  REGION 1..565: note = hemagglutinin__InfluenzaA__AEX33913
MKVKLLVLLCTFTATYADTICIGYHANNSTDTVDTVLEKNVTVTHSVNLLEDSHNGKLCLLKGIAPLQLGNCSVAGWILGNPECELLISRESWSYIVEKPNPENGTCYPGHFADYEELREQLSSVSSFERFEIFPKENSWPNHTTTGVSASCSHNGESSFYKNLLWLTGKNGLYPNLSKSYANNKKKEVLVLWGVHHPPNIGNQRALYHTENAYVSVVSSHYSRKFTPEIAKRPKVRDQEGRINYYWTLLEPGDTIIFEANGNLIAPRYAFALSRGFGSGIINSNAPMDECDAKCQTPQGAINSSLPFQNVHPVTIGECPKYVRSAKLRMVTGLRNIPSIQSRGLFGAIAGFIEGGWTGMVDGWYGYHHQNEQGSGYAADQKSTQNAINGITNKVNSVIEKMNTQFTAVGKEFNKLERRMENLNKKVDDGFIDIWTYNAELLVLLENERTLDFHDSNVKNLYEKVKSQLKNNAKEIGNGCFEFYHKCNDECMESVKNGTYDYPKYSEESKLNREKIDGVKFESMGVYQILAIYSTVASSLVLLVSLGAISFWMCSNGSLQCRICI

SEQ ID NO: 7968 - protein, 565 aa, synthetic construct
  REGION 1..565: note = hemagglutinin__InfluenzaA__AEX33924
MKVKLLVLLCTFTATYADTICIGYHANNSTDTVDTVLEKNVTVTHSVNLLEDSHNGKLCLLKGIAPLQLGNCSVAGWILGNPECESLISRESWSYIVEKPSPENGTCYPGHFADYEELREQLSSVSSFERFEIFPKESSWPNHTATGVSASCSHNGKSSFYKNLLWLTGKNGLYPNLSKSYANNKEKEVLVLWGVHHPPNIGDQRALYHTENAYVSVVSSHYSRKFTPEIAKRPKVRDQKGRINYYWTLLEPGDTIIFEANGNLIAPRYAFALSRGFGSGIINSNAPMDECDAKCQTPQGAINSSLPFQNVHPVTIGECPKYVRSAKLRMVTGLRNIPSIQSRGLFGAIAGFIEGGWTGMVDGWYGYHHQNEQGSGYAADQKSTQNAINGITNKVNSVIEKMNTQFTAVGKEFNKLERRMENLNKKVDDGFIDIWTYNAELLVLLENERTLDFHDSNVKNLYEKVKSQLKNNAKEIGNGCFEFYHKCNDECMESVKNGTYDYPKYSEESKLNREKIDGVKLESMGVYQILAIYSTVASSLVLLVSLGAISFWMCSNGSLQCRICI

SEQ ID NO: 7969 - protein, 566 aa, synthetic construct
  REGION 1..566: note = hemagglutinin__InfluenzaA__AEX33957
MKTIIALSYILCLVFAQKLPGIDNSTATLCLGHHAVPNGTIVKTITNDQVEVTNATELVQNSSTGGICDSPHQILDGENCTLIDALLGDPQCDGFQNKKWDLFVERSKAYSNCYPYDVPDYASLRSLVASSGTLEFNNESFNWTGVTQNGTSSACKRGSNNSFFSRLNWLTHSKFKYPALNVTMPNNEEFDKLYIWGVHHPGTDNDQIFLYAQASGRITVSTKRSQQTVIPNIGSRPRVRNIPSRISIYWTIVKPGDILLINSTGNLIAPRGYFKIRSGKSSIMRSDAPIGKCNSECITPNGSIPNDKPFQNVNRITYGACPRYVKQNTLKLATGMRNVPEKQTRGIFGAIAGFIENGWEGMVDGWYGFRHQNSEGIGQAADLKSTQAAIDQINGKLNRLIGKTNEKFHQIEKEFSEVEGRIQDLEKYVEDTKIDLWSYNAELLVALENQHTIDLTDSEMNKLFEKTKKQLRENAEDMGNGCFKIYHKCDNACIGSIRNGTYDHDVYRDEALNNRFQIKGVELKSGYKDWILWISFAISCFLLCVALLGFIMWACQKGNIRCNICI

SEQ ID NO: 7970 - protein, 566 aa, synthetic construct
  REGION 1..566: note = hemagglutinin__InfluenzaA__AEX33968
MKTIIALSYILCLVFAQKLPGIDNSTATLCLGHHAVPNGTIVKTITNDQIEVTNATELVQNSSTGGICDSPHQILDGENCTLIDALLGDPQCDGFQNKKWDLFVERSKAYSNCYPYDVPDYASLRSLVASSGTLEFNNESFNWTGVTQNGTSSACKRGSNNSFFSRLNWLTHSKFKYPALNVTMPNNEEFDKLYIWGVHHPGTDNDQIFLHAQASGRITVSTKRSQQTVIPNIGSRPRVRNIPSRISIYWTIVKPGDILLINSTGNLIAPRGYFKIRSGKSSIMRSDAPIGKCNSECITPNGSIPNDKPFQNVNRITYGACPRYVKQNTLKLATGMRNVPEKQTRGIFGAIAGFIENGWEGMVDGWYGFRHQNSEGIGQAADLKSTQAAIDQINGKLNRLIGKTNEKFHQIEKEFSEVEGRIQDLEKYVEDTKIDLWSYNAELLVALENQHTIDLTDSEMNKLFEKTKKQLRENAEDMGNGCFKIYHKCDNACIGSIRNGTYDHDVYRDEALNNRFQIKGVELKSGYKDWILWISFAISCFLLCVALLGFIMWACQKGNIRCNICI

SEQ ID NO: 7971 - protein, 566 aa, synthetic construct
  REGION 1..566: note = hemagglutinin__InfluenzaA__AEX33979
MKTIIALSYILCLVFAQKLPGNDNSTATLCLGHHAVPNGTIVKTITNDQIEVTNATELVQSSSTGEICDSPHQILDGENCTLIDALLGDPQCDGFQNKKWDLFVERSKAYSNCYPYDVPDYASLRSLVASSGTLEFNNESFNWTGVTQNGTSSACIRRSNNSFFSRLNWLTHLKFKYPALNVTMPNNEKFDKLYIWGVHHPGTDNDQIFLYAQASGRITVSTKRSQQTVIPNIGSRPRVRNIPSRISIYWTIVKPGDILLINSTGNLIAPRGYFKIRSGKSSIMRSDAPIGKCNSECITPNGSIPNDKPFQNVNRITYGACPRYVKQNTLKLATGMRNVPEKQTRGIFGAIAGFIENGWEGMVDGWYGFRHQNSEGIGQAADLKSTQAAIDQINGKLNRLIGKTNEKFHQIEKEFSEVEGRIQDLEKYVEDTKIDLWSYNAELLVALENQHTIDLTDSEMNKLFEKTKKQLRENAEDMGNGCFKIYHKCDNACIGSIRNGTYDHDVYRDEALNNRFQINGVELKSGYKDWILWISFAISCFLLCVALLGFIMWACQKGNIRCNICI

SEQ ID NO: 7972 - protein, 566 aa, synthetic construct
  REGION 1..566: note = hemagglutinin__InfluenzaA__AEX33990
MKTIIALSYILYLVFAQKLPGNDNSTATLCLGHHAVPNGTIVKTITNDQIEVTNATELVQSSSTGEICDSPHQILDGENCTLIDALLGDPQCDGFQNKKWDLFVERSKAYSNCYPYDVPDYASLRSLVASSGTLEFNNESFNWTGVTQNGTSSACIRRSNNSFFSRLNWLTHLKFKYPALNVTMPNNEKFDKLYIWGVHHPGTDNDQIFLYAQASGRITVSTKRSQQTVIPNIGSRPRVRNIPSRISIYWTIVKPGDILLINSTGNLIAPRGYFKIQSGKSSIMRSDAPIGKCNSECITPNGSIPNDKPFQNVNRITYGACPRYVKQDTLKLATGMRNVPEKQTRGIFGAIAGFIENGWEGMVDGWYGFRHQNSEGIGQAADLKSTQAAIDQINGKLNRLIGKTNEKFHQIEKEFSEVEGRIQDLEKYVEDTKIDLWSYNAELLVALENQHTIDLTDSEMNKLFEKTKKQLRENAEDMGNGCFKIYHKCDNACIGSIRNGTYDHDVYRDEALNNRFQIKSVELKSGYKDWILWISFAISCFLLCVALLGFIMWACQKGNIRCNICI

SEQ ID NO: 7973 - protein, 566 aa, synthetic construct
  REGION 1..566: note = hemagglutinin__InfluenzaA__AEX34001
MKTIIALSYILCLVFAQKLPGNDNSTATLCLGHHAVPNGTIVKTITNDQIEVTNATELVQSSSTGGICDSPHQILDGENCTLIDALLGDPQCDGFQNKKWDLFVERSKAYSNCYPYDVPDYASLRSLVASSGTLEFNSESFNWTGVTQNGTSSACKRRSNNSFFSRLNWLTHLKFKYPALNVTMPNNEKFDKLYIWGVHHPGTDNDQIFLYAQASGRITVSTKRSQQTVIPNIGSRPRVRNIPSRISIYWTIVKPGDILLINSTGNLIAPRGYFKIRSGKSSIMRSDAPIGKCNSECITPNGSIPNDKPFQNVNRITYGACPRYVKQNTLKLATGMRNVPEKQTRGIFGAIAGFIENGWEGMVDGWYGFRHQNAEGIGQAADLKSTQAAINQINGKLNRLIGKTNEKFHQIEKEFSEVEGRIQDLEKYVEDTKIDLWSYNAELLVALENQHTIDLTDSEMNKLFERTKKQLRENAEDMGNGCFKIYHKCDNACIGSIRNGTYDHDVYRDEALNNRFQIKGVELKSGYKDWILWISFAISCFLLCVALLGFIMWACQKGNIRCNICI

SEQ ID NO: 7974 - protein, 566 aa, synthetic construct
  REGION 1..566: note = hemagglutinin__InfluenzaA__AEX34012
MKTIIALSYILYLVFAQKLPGNDNSTATLCLGHHAVPNGTIVKTITNDQIEVTNATELVQSSSTGEICDSPHQILDGENCTLIDALLGDPQCDGFQNKKWDLFVERSKAYSNCYPYDVPDYASLRSLVASSGTLEFNNESFNWTGVTQNGTSSACIRRSNNSFFSRLNWLTHLKFKYPALNVTMPNNEKFDKLYIWGVHHPGTDNDQIFLYAQASGRITVSTKRSQQTVIPNIGSRPRVRNIPSRISIYWTIVKPGDILLINSTGNLIAPRGYFKIQSGKSSIMRSDAPIGKCNSECITPNGSIPNDKPFQNVNRITYGACPRYVKQNTLKLATGMRNVPEKQTRGIFGAIAGFIENGWEGMVDGWYGFRHQNSEGIGQAADLKSTQAAIDQINGKLNRLIGKTNEKFHQIEKEFSEVEGRIQDLEKYVEDTKIDLWSYNAELLVALENQHTIDLTDSEMNKLFEKTKKQLRENAEDMGNGCFKIYHKCDNACIGSIRNGTYDHDVYRDEALNNRFQIKGVELKSGYKDWILWISFAISCFLLCVALLGFIMWACQKGNIRCNICI

SEQ ID NO: 7975 - protein, 566 aa, synthetic construct; identical to SEQ ID NO: 2434
  REGION 1..566: note = hemagglutinin__InfluenzaA__AEX34023

SEQ ID NO: 7976 - protein, 566 aa, synthetic construct
  REGION 1..566: note = hemagglutinin__InfluenzaA__AEX34044
MKTIIAFSYILCLVFAQKLPGIDNSTATLCLGHHAVPNGTIVKTITNDQIEVTNATELVQSSSTGGICDSPHQILDGENCTLIDALLGDPQCDGFQNKKWDLFVERSKAYSNCYPYDVPDYASLRSLVASSGTLEFNNESFNWTGVTQNGTSSACKRGSNNSFFSRLNWLTHSKFKYPALNVTMPNNEEFDKLYIWGVHHPGTDNDQIFLYAQASGRITVSTKRSQQTVIPNIGSRPRVRNIPSRISIYWTIVKPGDILLINSTGNLIAPRGYFKIRSGKSSIMRSDAPIGKCNSECITPNGSIPNDKPFQNVNRITYGACPRYVKQNTLKLATGMRNVPEKQTRGIFGAIAGFIENGWEGMVDGWYGFRHQNSEGIGQAADLKSTQAAIDQINGKLNRLIGKTNEKFHQIEKEFSEVEGRIQDLEKYVEDTKIDLWSYNAELLVALENQHTIDLTDSEMNKLFEKTKKQLRENAEDMGNGCFKIYHKCDNACIGSIRNGTYDHDVYRDEALNNRFQIKGVELKSGYKDWILWISFAISCFLLCVALLGFIMWACQKGNIRCNICI

SEQ ID NO: 7977 - protein, 566 aa, synthetic construct
  REGION 1..566: note = hemagglutinin__InfluenzaA__AEX34089
MKTIIALSYILCLVFAQKLPGIDNSTATLCLGHHAVPNGTIVKTITNDQIEVTNATELVQNSSTGGICDSPHQILDGENCTLIDALLGDPQCDGFQNKKWDLFVERSKAYSNCYPYDVPDYASLRSLVASSGTLEFNNESFNWTGVTQNGTSSACKRGSSNSFFSRLNWLTHSKFKYPALNVTMPNNEEFDKLYIWGVHHPGTDNDQIFLYAQASGRITVSTKRSQQTVIPNIGSRPRVRNIPSRISIYWTIVKPGDILLINSTGNLIAPRGYFKIRSGKSSIMRSDAPIGKCNSECITPNGSIPNDKPFQNVNRITYGACPRYVKQNTLKLATGMRNVPEKQTRGIFGAIAGFIENGWEGMVDGWYGFRHQNSEGIGQAADLKSTQAAIDQINGKLNRLIGKTNEKFHQIEKEFSEVEGRIQDLEKYVEDTKIDLWSYNAELLVALENQHTIDLTDSEMNKLFEKTKKQLRENAEDMGNGCFKIYHKCDNACIGSIRNGTYDHDVYRDEALNNRFQIKGVELKSGYKDWILWISFAISCFLLCVALLGFIMWACQKGNIRCNICI

SEQ ID NO: 7978 - protein, 566 aa, synthetic construct
  REGION 1..566: note = hemagglutinin__InfluenzaA__AEX34123
MKTIIALSYILCLVFAQKLPGIDNSTATLCLGHHAVPNGTIVKTITNDQIEVTNATELVQNSSTGGICDSPHQILDGENCTLIDALLGDPQCDGFQNKKWDLFVERSKAYSNCYPYDVPDYASLRSLVASSGTLEFNNESFNWTGVTQNGTSSACKRGSNNSFFSRLNWLTHSKFKYPALNVTMPNNEEFDKLYIWGVHHPGTDNDQIFLYAQASGRITVSTKRSQQTVIPNIGSRPRVRNIPSRISIYWTIVKPGDILLINSTGNLIAPRGYFKIRSGKSSIMRSDAPIGKCNSECITPNGSIPNDKPFQNVNRITYGACPRYVKQNTLKLATGMRNVPEKQTRGIFGAIAGFIENGWEGMVDGWYGFRHQNSEGIGQAADLKSTQAAIDQINGKLNRLIGKTNEKFHQIEKEFSEVEGRIQDLEKYVEDTKIDLWSYNAELLVALENQHTIDLTDSEMNKLFEKTKKQLRENAEDMGNGCFKIYHKCDNACIGSIRNGTYDHDVYRDEALNNRFQIKGVELKSGYKDWILWISFAISCFLLCVALLGFIMWACQKGNIRCNICI

SEQ ID NO: 7979 - protein, 566 aa, synthetic construct
  REGION 1..566: note = hemagglutinin__InfluenzaA__AEX34134
MKTIIALSYILCLVFAQKLPGNDNSMATLCLGHHAVPNGTIVKTITNDQIEVTNATELVQSSSTGEICDSPHQILDGENCTLIDALLGDPQCDGFQNKKWDLFVERSKAYSNCYPYDVPDYASLRSLVASSGTLEFNNESFNWTGVTQNGTSSACIRRSNNSFFSRLNWLTHLKFKYPALNVTMPNNEKFDKLYIWGVHHPGTDNDQIFLYAQASGRITVSTKRSQQTVIPNIGSRPRVRNIPSRISIYWTIVKPGDILLINSTGNLIAPRGYFKIRSGKSSIMRSDAPIGKCNSECITPNGSIPNDKPFQNVNRITYGACPRYVKQNTLKLATGMRNVPEKQTRGIFGAIAGFIENGWEGMVDGWYGFRHQNSEGIGQAADLKSTQAAIDQINGKLNRLIGKTNEKFHQIEKEFSEVEGRIQDLEKYVEDTKIDLWSYNAELLVALENQHTIDLTDSEMNKLFEKTKKQLRENAEDMGNGCFKIYHKCDNACIGSIRNGTYDHDVYRDEALNNRFQIKGVELKSGYKDWILWISFAISCFLLCVALLGFIMWACQKGNIRCNICI

SEQ ID NO: 7980 - protein, 566 aa, synthetic construct; identical to SEQ ID NO: 7978
  REGION 1..566: note = hemagglutinin__InfluenzaA__AEX34145

SEQ ID NO: 7981 - protein, 566 aa, synthetic construct
  REGION 1..566: note = hemagglutinin__InfluenzaA__AEX34156
MKTIIALSYILCLVFAQKLPGNDNSTATLCLGHHAVPNGTIVKTITNDQIEVTNATELVQSSSTGEICGSPHQILDGENCTLIDALLGDPQCDGFQNKKWDLFVERSKAYSNCYPYDVPDYASLRSLVASSGTLEFNNESFNWTGVTQNGTSSACIRRSNNSFFSRLNWLTHLKFKYPALNVTMPNNEKFDKLYIWGVHHPGTDNDQIFLYAQASGRITVSTKRSQQTVIPNIGSRPRVRNIPSRISIYWTIVKPGDILLINSTGNLIAPRGYFKIRSGKSSIMRSDAPIGKCNSECITPNGSIPNDKPFQNVNRITYGACPRYVKQNTLKLATGMRNVPEKQTRGIFGAIAGFIENGWEGMVDGWYGFRHQNSEGTGQAADLKSTQAAIDQINGKLNRLIGKTNEKFHQIEKEFSEVEGRIQDLEKYVEDTKIDLWSYNAELLVALENQHTIDLTDSEMNKLFEKTKKQLRENAEDMGNGCFKIYHKCDNACIGSIRNGTYDHDVYRDEALNNRFQIKGVELKSGYKDWILWISFAISCFLLCVVLLGFIMWACQKGNIRCNICI

SEQ ID NO: 7982 - protein, 566 aa, synthetic construct; identical to SEQ ID NO: 1928
  REGION 1..566: note = hemagglutinin__InfluenzaA__AEX34178

SEQ ID NO: 7983 - protein, 566 aa, synthetic construct
  REGION 1..566: note = hemagglutinin__InfluenzaA__AEX34188
MKTIIALSYILCLVFAQKFPGNDNSTATLCLGHHAVPNGTIVKTITNDQIEVTNATELVQSSSTGEICDSPHQILDGENCTLIDALLGDPQCDGFQNKNWDLFVERSKAYSNCYPYDVPDYASLRSLVASSGTLEFNNESFNWTGVTQNGTSSACIRRSNNSFFSRLNWLTHLKFKYPALNVTMPNNENFDKLYIWGVHHPGTDNDQIFLYAQASGRITVSTKRSQQTVIPNIGSRPRVRNIPSRISIYWTIVKPGDILLINSTGNLIAPRGYFKIRSGKSSIMRSDAPIGKCNSECITPNGSIPNDKPFQNVNRITYGACPRYVKQNTLKLATGMRNVPEKQTRGIFGAIAGFIENGWEGMVDGWYGFRHQNSEGIGQAADLKSTQAAIDQINGKLNRLIGKTNEKFHQIEKEFSEVEGRIQDLEKYVEDTKIDLWSYNAELLVALENQHTIDLTDSEMNKLFEKTKKQLRENAEDMGNGCFKIYHKCDNACIGSIRNGTYDHDVYRDEALNNRFQIKGVELKSGYKDWILWISFAISCFLLCIALLGFIMWACQKGNIRCNICI

SEQ ID NO: 7984 - protein, 566 aa, synthetic construct; identical to SEQ ID NO: 2434
  REGION 1..566: note = hemagglutinin__InfluenzaA__AEX34199

SEQ ID NO: 7985 - protein, 566 aa, synthetic construct
  REGION 1..566: note = hemagglutinin__InfluenzaA__AEX34221
MKTIIALSYILCLVFAQKLPGIDNSTATLCLGHHAVPNGTIVKTITNDQIEVTNATELVQSSSTGGICDSPHQILDGENCTLIDALLGDPQCDGFQNKKWDLFVERSKAYSNCYPYDVPDYASLRSLVASSGTLEFNNESFNWTGVTQNGTSSACKRGSNNSFFSRLNWLTHSKFKYPALNVTMPNNEEFDKLYIWGVHHPGTDNDQIFLYAQASGRITVSTKRSQQTVIPNIGSRPRVRNIPSRISIYWTIVKPGDILLINSTGNLIAPRGYFKIRSGKSSIMRSDAPIGKCDSECITPNGSIPNDKPFQNVNRITYGACPRYVKQNTLKLATGMRNVPEKQTRGIFGAIAGFIENGWEGMVDGWYGFRHQNSEGIGQAADLKSTQAAIDQINGKLNRLIGKTNEKFHQIEKEFSEVEGRIQDLEKYVEDTKIDLWSYNAELLVALENQHTIDLTDSEMNKLFEKTKKQLRENAEDMGNGCFKIYHKCDNACIGSIRNGTYDHDVYRDEALNNRFQIKGVELKSGYKDWILWISFAISCFLLCVALLGFIMWACQKGNIRCNICI

SEQ ID NO: 7986 - protein, 566 aa, synthetic construct; identical to SEQ ID NO: 1928
  REGION 1..566: note = hemagglutinin__InfluenzaA__AEX34243

SEQ ID NO: 7987 - protein, 566 aa, synthetic construct; identical to SEQ ID NO: 7983
  REGION 1..566: note = hemagglutinin__InfluenzaA__AEX34254

SEQ ID NO: 7988 - protein, 566 aa, synthetic construct; identical to SEQ ID NO: 1928
  REGION 1..566: note = hemagglutinin__InfluenzaA__AEX34265

SEQ ID NO: 7989 - protein, 566 aa, synthetic construct
  REGION 1..566: note = hemagglutinin__InfluenzaA__AEX34275
MKTIIALSYILCLVFAQKLPGIDNSTATLCLGHHAVPNGTIVKTITNDQIEVTNATELVQNSSTGGICDSPHQILDGENCTLIDALLGDPQCDGFQNKKWDLFVERSKAYSNCYPYDVPDYASLRSLVASSGTLEFNNESFNWTGVTQNGTSSACKRGSNNSFFSRLNWLTHSKFKYPALNVTMPNNEEFDKLYIWGVLHPGTDNDQIFLYAQASGRITVSTKRSQQTVIPNIGSRPRVRNIPSRISIYWTIVKPGDILLINSTGNLIAPRGYFKIRSGKSSIMRSDAPIGKCNSECITPNGSIPNDKPFQNVNRITYGACPRYVKQNTLKLATGMRNVPEKQTRGIFGAIAGFIENGWEGMVDGWYGFRHQNSEGIGQAADLKSTQAAIDQINGKLNRLIGKTNEKFHQIEKEFSEVEGRIQDLEKYVEDTKIDLWSYNAELLVALENQHTIDLTDSEMNKLFEKTKKQLRENAEDMGNGCFKIYHKCDNACIGSIRNGTYDHYVYRDEALNNRFQIKGVELKSGYKDWILWISFAISCFLLCVALLGFIMWACQKGNIRCNICI

SEQ ID NO: 7990 - protein, 565 aa, synthetic construct; identical to SEQ ID NO: 2488
  REGION 1..565: note = hemagglutinin__InfluenzaA__AEX34318

SEQ ID NO: 7991 - protein, 565 aa, synthetic construct
  REGION 1..565: note = hemagglutinin__InfluenzaA__AEX34329
MKVKLLVLLCTFTATYADTICIGYHANNSTDTVDTVLEKNVTVTHSVNLLENSHNGKLCLLKGIAPLQLGNCSVAGWILGNPECELLVSKESWSYIVEKPNPENGTCYPGHFADYEELREQLSSVSSFERFEIFPKESSWPNHTVTGVSASCSHNGESSFYRNLLWLTGKNGLYPNLSKSYANNKEKEVLVLWGVHHPPNIGDQKALYHTENAYVSVVSSHYSRKFTPEIAKRPKVRDQEGRINYYWTLLEPGDTIIFEANGNLIAPRYAFALSRGFGSGIINSNAPMDKCDAKCQTPQGAINSSLPFQNVHPVTIGECPKYVRSAKLRMVTGLRNIPSIQSRGLFGAIAGFIEGGWTGMVDGWYGYHHQNEQGSGYAADQKSTQNAINGITNKVNSVIEKMNTQFTAVGKEFNKLERRMENLNKKVDDGFIDIWTYNAELLVLLENERTLDFHDSNVKNLYEKVKSQLKNNAKEIGNGCFEFYHKCNDECMESVKNGTYDYPKYSEESKLNREKIEGVKLESMGVYQILAIYSTVASSLVLLVSLGAISFWMCSNGSLQCRICI

SEQ ID NO: 7992 - protein, 566 aa, synthetic construct
  REGION 1..566: note = hemagglutinin__InfluenzaA__AEX34352
MKTIIALSYILCLVFAQKLPGNDNSTATLCLGHHAVPNGTIVKTITNDQIEVTNATELVQSSSTGEICDSPHQILDGENCTLIDALLGDPQCDGFQNKKWDLFVERSKAYSNCYPYDVPDYASLRSLVASSGTLEFNNESFNWTGVTQNGTSSACIRRSNNSFFSRLNWLTHLKFKYPALNVTMPNNEKFDKLYIWGVHHPGTDNDQIFLYAQASGRITVSTKRSQQTVIPNIGSRPRVRNIPSRISIYWTIVKPGDILLINSTGNLIAPRGYFKIRSGKSSIMRSDAPIGKCNSECITPNGSILNDKPFQNVNRITYGACPRYVKQNTLKLATGMRNVPEKQTRGIFGAIAGFIENGWEGMVDGWYGFRHQNSEGIGQAADLKSTQAAIDQINGKLNRLIGKTNEKFHQIEKEFSEVEGRIQDLEKYVEDTKIDLWSYNAELLVALENQHTIDLTDSEMNKLFEKTKKQLRENAEDMGNGCFKIYHKCDNACIGSIRNGTYDHDVYRDEALNNRFQIKGVELKSGYKDWILWISFAISCFLLCVALLGFIMWACQKGNIRCNICI

SEQ ID NO: 7993 - protein, 566 aa, synthetic construct; identical to SEQ ID NO: 2434
  REGION 1..566: note = hemagglutinin__InfluenzaA__AEX34364

SEQ ID NO: 7994 - protein, 566 aa, synthetic construct; identical to SEQ ID NO: 2434
  REGION 1..566: note = hemagglutinin__InfluenzaA__AEX34375

SEQ ID NO: 7995 - protein, 566 aa, synthetic construct
  REGION 1..566: note = hemagglutinin__InfluenzaA__AEX34386
MKTIIALSYILCLVFAQKLPGNDNSTATLCLGHHAVPNGTIVKTITNDQIEVTNATELVQSSSTGEICDSPHQILDGENCTLIDALLGDPQCDGFQNKKWDLFIERSKAYSNCYPYDVPDYASLRSLVASSGTLEFNNESFNWTGVTQNGTSSACIRRSNNSFFSRLNWLTHLKFKYPALNVTMPNNEQFDKLYIWGVHHPGTDNDQIFLYAQASGRITVSTKRSQQTVIPNIGSRPRVRNIPSRISIYWTIVKPGDILLINSTGNLIAPRGYFKIRSGKSSIMRSDAPIGKCNSECITPNGSIPNDKPFQNVNRITYGACPRYVKQNTLKLATGMRNVPEKQTRGIFGAIAGFIENGWEGMVDGWYGFRHQNSEGRGQAADLKSTQAAIDQINGKLNRLIGKTNEKFHQIEKEFSEVEGRIQDLEKYVEDTKIDLWSYNAELLVALENQHTIDLTDSEMNKLFEKTKKQLRENAEDMGNGCFKIYHKCDNACIGSIRNGTYDHDVYRDEALNNRFQIKGVELKSGYKDWILWISFAISCFLLCVALLGFIMWACQKGNIRCNICI

SEQ ID NO: 7996 - protein, 566 aa, synthetic construct
  REGION 1..566: note = hemagglutinin__InfluenzaA__AEX34407
MKTIIALSYILCLVFAQKLPGNDNSMATLCLGHHAVPNGTIVKTITNDQIEVTNATELVQSSSTGEICDSPHQILDGENCTLIDALLGDPQCDGFQNKKWDLFVERSKAYSNCYPYDVPDYASLRSLVASSGTLEFNNESFNWTGVTQNGTSSACIRRSNNSFFSRLNWLTHLKFKYPALNVTMPNNEQFDKLYIWGVHHPGTDNDQIFLYAQASGRITVSTKRSQQTVIPNIGSRPRVRNIPSRISIYWTIVKPGDILLINSTGNLIAPRGYFKILSGKSSIMRSDAPIGKCNSECITPNGSIPNDKPFQNVNRITYGACPRYVKQNTLKLATGMRNVPEKQTRGIFGAIAGFIENGWEGMVDGWYGFRHQNSEGRGQAADLKSTQAAIDQINGKLNRLIGKTNEKFHQIEKEFSEVEGRIQDLEKYVEDTKVDLWSYNAELLVALENQHTIDLTDSEMNKLFEKTKKQLRENAEDMGNGCFKIYHKCDNACIGSIRNGTYDHDVYRDEALNNRFQIKGVELKSGYKDWILWISFAISCFLLCVALLGFIMWACQKGNIRCNICI

SEQ ID NO: 7997 - protein, 565 aa, synthetic construct
  REGION 1..565: note = hemagglutinin__InfluenzaA__AEX34440
MKVKLLVLLCTFTATYADTICIGYHANNSTDTVDTVLEKNVTVTHSVNLLEDSHNGKLCLLKGIAPLQLGNCSVAGWILGNPECELLTSRESWSYIVEKPNPENGTCYPGHFADYEELREQLSSVSSFERFEIFPKESSWPNHTTTGVSASCSHNGESSFYKNLLWLTGKNGLYPNLSKSYANNKEKEVLVLWGVHHPPNIGNQRALYHTENAYVSVVSSHYSRKFTPEIAKRPKVRDQEGRINYYWTLLEPGDTIIFEANGNLIAPRYAFALSRGFGSGIINSNAPMDECDAKCQTPQGAINSSLPFQNVHPVTIGECPKYVRSAKLRMVTGLRNIPSIQSRGLFGAIAGFIEGGWTGMVDGWYGYHHQNEQGSGYAADQKSTQNAINGITNKVNSVIEKMNTQFTAVGKEFNKLERRMENLNKKVDDGFIDIWTYNAELLVLLENERTLDFHDSNVKNLYEKVKSQLKNNAKEIGNGCFEFYHKCNDECMESVKNGTYDYPKYSEESKLNREKIDGVKLESMGVYQILAIYSTVASSLVLLVSLGAISFWMCSNGSLQCRICI

SEQ ID NO: 7998 - protein, 565 aa, synthetic construct; identical to SEQ ID NO: 299
  REGION 1..565: note = hemagglutinin__InfluenzaA__AEX34462

SEQ ID NO: 7999 - protein, 565 aa, synthetic construct
  REGION 1..565: note = hemagglutinin__InfluenzaA__AEX34473
MKVKLLVLLCTFTATYADTICIGYHANNSTDTVDTVLEKNVTVTHSVNLLEDSHNGKLCLLKGIAPLQLGNCSVAGWILGNPECELLISKESWSYIVETPNPENGTCYPGYFADYEELREQLSSVSSFERFEIFPKESSWPNHTVTGVSASCSHNGKSSFYRNLLWLTGKSGLYPNLSKSYANNKEKEVLVLWGVHHPPNIGDQRALYHTENAYVSVVSSHYSRRFTPEIAKRPKVRDQEGRINYYWTLLEPGDTIIFEANGNLIAPRYAFALSRGFGSGIITSNAPMDECDAKCQTPQGAINSSLPFQNVHPVTIGECPKYVKSAKLRMVTGLRNIPSIQSRGLFGAIAGFIEGGWTGMVDGWYGYHHQNEQGSGYAADQKSTQSAINGITNKVNSVIEKMNTQFTAVGKEFNKLERRMENLNKKVDDGFLDIWTYNAELLVLLENERTLDFHDSNVKNLYEKVKSQLKNNAKEIGNGCFEFYHKCNDECMESVKNGTYDYPKYSEESKLNREKIDGVKLESMGVYQILAIYSTVASSLVLLVSLGAISFWMCSNGSLQCRICI

SEQ ID NO: 8000 - protein, 565 aa, synthetic construct
  REGION 1..565: note = hemagglutinin__InfluenzaA__AEX34495
MKVKLLVLLCIFTATYADTICIGYHANNSTDTVDTVLEKNVTVTHSVNLLEDSHNGKLCLLKGIAPLQLGNCSVAGWILGNPECELLISKESWSYIVETPNPENGTCYPGYFADYEELREQLSSVSSFERFEIFPKESSWPNHTVTGVSASCSHNGKSSFYRNLLWLTGKSGLYPNLSKSYANNKEKEVLVLWGVHHPPNIGVQRALYHTENAYVSVVSSHYSRRFTPEIAKRPKVRDQEGRINYYWTLLEPGDTIIFEANGNLIAPRYAFALSRGFGSGIITSNAPMDECDAKCQTPQGAINSSLPFQNVHPVTIGECPKYVKSAKLRMVTGLRNIPSIQSRGLFGAIAGFIEGGWTGMVDGWYGYHHQNEQGSGYAADQKSTQNAINGITNKVNSVIEKMNTQFTAVGKEFNKLERRMENLNKKVDDGFLDIWTYNAELLVLLENERTLDFHDSNVKNLYEKVKSQLKNNAKEIGNGCFEFYHKCNDECMESVKNGTYDYPKYSEESKLNREKIDGVKLESMGVYQILAIYSTVASSLVLLVSLGAISFWMCSNGSLQCRICI

SEQ ID NO: 8001 - protein, 565 aa, synthetic construct; identical to SEQ ID NO: 8000
  REGION 1..565: note = hemagglutinin__InfluenzaA__AEX34506

SEQ ID NO: 8002 - protein, 565 aa, synthetic construct; identical to SEQ ID NO: 8000
  REGION 1..565: note = hemagglutinin__InfluenzaA__AEX34517

SEQ ID NO: 8003 - protein, 565 aa, synthetic construct; identical to SEQ ID NO: 8000
  REGION 1..565: note = hemagglutinin__InfluenzaA__AEX34528

SEQ ID NO: 8004 - protein, 565 aa, synthetic construct; identical to SEQ ID NO: 8000
  REGION 1..565: note = hemagglutinin__InfluenzaA__AEX34539

SEQ ID NO: 8005 - protein, 565 aa, synthetic construct; identical to SEQ ID NO: 8000
  REGION 1..565: note = hemagglutinin__InfluenzaA__AEX34550

SEQ ID NO: 8006 - protein, 565 aa, synthetic construct; identical to SEQ ID NO: 8000
  REGION 1..565: note = hemagglutinin__InfluenzaA__AEX34561

SEQ ID NO: 8007 - protein, 565 aa, synthetic construct; identical to SEQ ID NO: 8000
  REGION 1..565: note = hemagglutinin__InfluenzaA__AEX34572

SEQ ID NO: 8008 - protein, 565 aa, synthetic construct; identical to SEQ ID NO: 8000
  REGION 1..565: note = hemagglutinin__InfluenzaA__AEX34583

SEQ ID NO: 8009 - protein, 565 aa, synthetic construct; identical to SEQ ID NO: 8000
  REGION 1..565: note = hemagglutinin__InfluenzaA__AEX34594

SEQ ID NO: 8010 - protein, 565 aa, synthetic construct; identical to SEQ ID NO: 8000
  REGION 1..565: note = hemagglutinin__InfluenzaA__AEX34605

SEQ ID NO: 8011 - protein, 565 aa, synthetic construct; identical to SEQ ID NO: 8000
  REGION 1..565: note = hemagglutinin__InfluenzaA__AEX34616

SEQ ID NO: 8012 - protein, 565 aa, synthetic construct; identical to SEQ ID NO: 8000
  REGION 1..565: note = hemagglutinin__InfluenzaA__AEX34627

SEQ ID NO: 8013 - protein, 565 aa, synthetic construct; identical to SEQ ID NO: 8000
  REGION 1..565: note = hemagglutinin__InfluenzaA__AEX34638

SEQ ID NO: 8014 - protein, 565 aa, synthetic construct
  REGION 1..565: note = hemagglutinin__InfluenzaA__AEX34650
MKVKLLVLLCTFTATYADTICIGYHANNSTDTVDTVLEKNVTVTHSVNLLEDSHNGKLCLLKGIAPLQLGNCSVAGWILGNPECELLISKESWSYIVETPNPENGTCYPGYFADYEELREQLSSVSSFERFEIFPKESSWPNHTVTGVSASCSHNGKSSFYRNLLWLTGKNGLYPNLSKSYANNKEKEVLVLWGVHHPPNIGNQRSLYHTENAYVSVVSSHYSRRFTPEIAKRPKVRDQEGRINYYWTLLEPGDTIIFEANGNLIAPRFAFALSRGFGSGIITSNAPMDECDAKCQTPQGAINSSLPFQNVHPVTIGECPKYVRSAKLRMVTGLRNIPSIQSRGLFGAIAGFIEGGWTGMVDGWYGYHHQNEQGSGYAADQKSTQNAINGITNKVNSVIEKMNTQFTAVGKEFNKLERRMENLNKKVDDGFLDIWTYNAELLVLLENERTLDFHDSNVKNLYEKVKSQLKNNAKEIGNGCFEFYHKCNDECMESVKNGTYDYPKYSEESKLNREKIDGVKLESMGVYQILAIYSTVASSLVLLVSLGAISFWMCSNGSLQCRICI

SEQ ID NO: 8015 - protein, 565 aa, synthetic construct
  REGION 1..565: note = hemagglutinin__InfluenzaA__AEX34661
MKVKLLVLLCTFTATYADTICIGYHANNSTDTVDTVLEKNVTVTHSVNLLEDSHNGKLCLLKGIAPLQLGNCSVAGWILGNPECELLISKESWSYIVETPNPENGTCYPGYFADYEELREQLSSVSSFERFEIFPKESSWPNHTVTGVSASCSHNGKSSFYRNLLWLTGKKGLYPNLSKSYANNKEKEVLVLWGVHHPPNIGDQRALYHTENAYVSVVSSHYSRRFTPEIAKRPKVRDQEGRINYYWTLLEPGDTIIFEANGNLIAPRFAFALSRGFGSGIITSNAPMDECDAKCQTPQGAINSSLPFQNVHPVTIGECPKYVRSAKLRMATGLRNIPSIQSRGLFGAIAGFIEGGWTGMVDGWYGYHHQNEQGSGYAADQKSTQNAINGITKKVNSVIEKMNTQFTAVGKEFSKLERRMENLNKKVDDGFLDIWTYNAELLVLLENERTLDFHDSNVKNLYEKVKSQLKNNAKEIGNGCFEFYHKCNDECMESVKNGTYDYPKYSEESKLNREKIDGVKLESMGVYQILAIYSTVASSLVLLVSLGAISFWMCSNGSLQCRICI

SEQ ID NO: 8016 - protein, 565 aa, synthetic construct
  REGION 1..565: note = hemagglutinin__InfluenzaA__AEX34672
MKVKLLVLLCTFTATYADTICIGYHANNSTDTVDTVLDKNVTVTHSVNLLEDSHNGKLCLLKGIAPLQLGNCSVAGWILGNPECELLISRESWSYIVEKPNPENGTCYPGHFADYEELREQLSSVSSFERFEIFPKESSWPNHTTTGVSASCSHDGESSFYKNLLWLTGKNGLYPNLSKSYANNKEKEVLVLWGVHHPPNIGVQRALYHTENAYVSVVSSHYSRKFTPEIAKRPKVRDQEGRINYYWTLLEPGDTIIFEANGNLIAPRYAFALSRGFGSGIINSNAPMDECDAKCQTPQGAINSSLPFQNVHPVTIGECPKYVRSAKLRMVTGLRNIPSIQSRGLFGAIAGFIEGGWTGMVDGWYGYHHQNEQGSGYAADQKSTQNAINGITNKVNSVIEKMNTQFTAVGKEFNKLERRMENLNKKVDDGFIDIWTYNAELLVLLENERTLDFHDSNVKNLYEKVKSQLKNNAKEIGNGCFEFYHKCNDECMESVKNGTYDYPKYSEESKLNREKIDGVKLESMGVYQILAIYSTVASSLVLLVSLGAISFWMCSNGSLQCRICI

SEQ ID NO: 8017 - protein, 565 aa, synthetic construct
  REGION 1..565: note = hemagglutinin__InfluenzaA__AEX34683
MKVKLLVLLCTFTATYADTICIGYHANNSTDTVDTVLEKNVTVTHSVNLLEDSHNGKLCLLKGIAPLQLGNCSVAGWILGNPECELLISRESWSYIVEKPNPENGTCYPGHFADYEELREQLSSVSSFERFEIFPKESSWPYHTTTGVSASCSHNGESSFYKNLLWLTGKNGLYPNLSKSYANNKEKEVLVLWGVHHPPNIGDQRALYHTENAYVSVVSSHYSRKFTPEIAKRPKVRDQEGRINYYWTLLEPGDTIIFEANGNLIAPRYAFALSRGFGSGIINSNAPMDECDAKCQTPQGAINSSLPFQNVHPVTIGECPKYVRSAKLRMVTGLRNIPSIQSRGLFGAIAGFIEGGWTGMVDGWYGYHHQNEQGFGYAADQKSTQNAINGITNKVNSVIEKMNTQFTAVGKEFNKLERRMENLNKKVDDGFIDIWTYNAELLVLLENERTLDFHDSNVKNLYEKVKSQLKNNAKEIGNGCFEFYHKCNDECMESVKNGTYDYPKYSEESKLNREKIDGVKLESMGVYQILAIYSTVASSLVLLVSLGAISFWMCSNGSLQCRICI

SEQ ID NO: 8018 - protein, 565 aa, synthetic construct
  REGION 1..565: note = hemagglutinin__InfluenzaA__AEX34757
MKVKLLVLLCTFTATYADTICIGYHANNSTDTVDTVLEKNVTVTHSVNLLEDSHNGKLCLLKGIAPLQLGNCSVAGWILGNPECELLISRESWSYIVEKPNPENGTCYPGHFADYEELREQLSSVSSFERFEIFPKESSWPNHTTTGVSASCSHNGGSSFYKNLLWLTRKNGLYPNLSKSYANNKEKEVLVLWGVHHPPNIGDQRALYHTENAYVSVVSSHYSRKFTPEIAKRPKVRDQEGRINYYWTLLEPGDTIIFEANGNLIAPRYAFALSRGFGSGIINSNAPMDECDAKCQTPQGAINSSLPFQNVHPVTIGECPKYVRSAKLRMVTGLRNIPSIQSRGLFGAIAGFIEGGWTGMVDGWYGYHHQNEQGSGYAADQKSTQNAINGITNKVNSVIEKMNTQFTAVGKEFNKLERRMENLNKKVDDGFIDIWTYNAELLVLLENERTLDFHDSNVKNLYEKVKSQLKNNAKEIGNGCFEFYHKCNDECMESVKNGTYDYPKYSEESKLNREKIDGVKLESMGVYQILAIYSTVASSLVLLVSLGAISFWMCSNGSLQCRICI

SEQ ID NO: 8019 - protein, 565 aa, synthetic construct
  REGION 1..565: note = hemagglutinin__InfluenzaA__AEX34768
MKVKLLVLLCTFTATYADTICIGYHANNSTDTVDTVLEKNVTVTHSVNLLEDSHNGKLCLLKGIAPLQLGNCSVAGWILGNPECELLISRESWSYIVEKPNPENGTCYPGHFADYEELREQLSSVSSFERFEIFPKDSSWPNHTTTGVSASCSHNGESSFYKNLLWLTGKNGLYPNLSKSYANNKEKEVLVLWGVHHPPNIGDQRALYHTENAYVSVVSSHYSRKFTPEIAKRPKVRDQGGRINYYWTLLEPGDTIIFEANGNLIAPRYAFALSRGFGSGIINSNAPMDECDAKCQTPQGAINSSLPFQNVHPVTIGECPKYVRSAKLRMVTGLRNIPSIQSRGLFGAIAGFIEGGWTGMVDGWYGYHHQNEQGSGYAADQKSTQNAINGITNKVNSVIEKMNTQFTAVGKEFNKLERRMENLNKKVDDGFIDIWTYNAELLVLLENERTLDFHDSNVKNLYEKVKSQLKNNAKEIGNGCFEFYHKCNDECMESVKNGTYDYPKYSEESKLNREKIDGVKLESMGVYQILAIYSTVASSLVLLVSLGAISFWMCSNGSLQCRICI

SEQ ID NO: 8020 - protein, 565 aa, synthetic construct
  REGION 1..565: note = hemagglutinin__InfluenzaA__AEX34779
MKVKLLVLLCTFTATYADTICIGYHANNSTDTVDTVLEKNVTVTHSVNLLENSHNGKLCLLKGIAPLQLGNCSVAGWILGNPECELLISKESWSYIVEKPNPENGTCYPGHFADYEELREQLSSVSSFERFEIFPKESSWPNHTVTGVSASCSHNGERSFYRNLLWLTGKNGLYPNLSKSYANNKEKEVLVLWGVHHPPNIGNQKALYHTENAYVSVVSSHYSRKFTPEIAKRPKVRDQEGRINYYWTLLEPGDTIIFEANGNLIAPRYAFALSRGFGSGIINSNAPMDKCDAKCQTPQGAINSSLPFQNVHPVTIGECPKYVRSAKLRMVTGLRNIPSIQSRGLFGAIAGFIEGGWTGMVDGWYGYHHQNEQGSGYAADQKSTQNAINGITNKVNSVIEKMNTQFTAVGKEFNKLERRMENLNKKVDDGFIDIWTYNAELLVLLENERTLDFHDSNVKNLYEKVKSQLKNNAKEIGNGCFEFYHKCNDECMESVKNGTYDYPKYSEESKLNREKIDGVKLESMGVYQILAIYSTVASSLVLLVSLGAISFWMCSNGSLQCRICI

SEQ ID NO: 8021 - protein, 565 aa, synthetic construct; identical to SEQ ID NO: 4097
  REGION 1..565: note = hemagglutinin__InfluenzaA__AEX34790

SEQ ID NO: 8022 - protein, 565 aa, synthetic construct
  REGION 1..565: note = hemagglutinin__InfluenzaA__AEX34801
MKVKLLVLLCTFTATYADTICIGYHANNSTDTVDTVLEKNVTVTHSVNLLEDNHNGKLCLLKGIAPLQLGNCSVAGWILGNPECELLISKESWSYIVEKPNPENGACYPGHFADYEELREQLSSVSSFKRFEIFPKESSWPNHTVTGVSASCSHNGESSFYKNLLWLTGKNGLYPNLSKSYANNKEKEVLVLWGVHHPPNIGDQMTLYHKENAYVSVVSSHYSRKFTPEIAKRPKVRDQEGRINYYWTLLEPGDTIIFEASGNLIAPRYAFALSRGFGSGIINSDAPMDECDAKCQTPQGAINSSLPFQNVHPVTIGECPKYVRSAKLRMVTGLRNIPSIQSRGLFGAIAGFIEGGWTGMVDGWYGYHHQNEQGSGYAADQKSTQNAINGITNKVNSVIEKMNTQFTAVGKEFNKLERRMENLNKKVDDGFIDVWTYNAELLVLLENERTLDFHDSNVKNLYEKVKNQLKNNAKEIGNGCFEFYHKCNDECMESVKNGTYDYPKYSEESKLSREKIDGVKLESMGVYQILAIYSTVASSLVLLVSLGAISFWMCSNGSLQCRICI

SEQ ID NO: 8023 - protein, 565 aa, synthetic construct
  REGION 1..565: note = hemagglutinin__InfluenzaA__AEX34812
MKVKLLVLLCTFTATYADTICIGYHANNSTDTVDTVLEKNVTVTHSVNLLENSHNGKLCLLKGIAPLQLGNCSVAGWILGNPECELLISKESWSYIVEKPNPENGTCYPGHFADYEELREQLSSVSSFERFEIFPKESSWPNHTVTGVSASCSHNGESSFYRNLLWLTGKNGLYPNLSKSYANNKEKEVLVLWGVHHPPNIGDQKALYHTENAYVSVVSSHYSRKFTPEIAKRPKVRDQEGRINYYWTLLEPGDTIIFEANGNLIAPRYAFALSRGFGSGIINSNAPMDKCDAKCQTPQGAINSSLPFQNVHPVTIGECPKYVRSAKLRMVTGLRNIPSIQSRGLFGAIAGFIEGGWTGMVDGWYGYHHQNEQGSGYAADQKSTQNAIDGITNKVNSVIEKMNTQFTAVGKEFNKLERRMENLNKKVDDGFIDIWTYNAELLVLLENERTLDFHDSNVKNLYEKVKSQLKNNAKEIGNGCFEFYHKCNDECMESVKNGTYDYPKYSEESKLNREKIDGVKLESMGVYQILAIYSTVASSLVLLVSLGAISFWMCSNGSLQCRICI

SEQ ID NO: 8024 - protein, 565 aa, synthetic construct
  REGION 1..565: note = hemagglutinin__InfluenzaA__AEX34834
MKVKLLVLLCTFTATYADTICIGYHANNSTDTVDTVLEKNVTVTHSVNLLEDNHNGKLCLLKGIAPLQLGNCSVAGWILGNPECELLNSKESWSYIVEKPNPENGTCYPGHFADYEELREQLSSVSSFKRFEIFPKESSWPNHTVTGVSASCSHNGESSFYKNLLWLTGKNGLYPNLSKSYANNKEKEVLVLWGVHHPPNIGDQMTLYHKENAYVSVVSSHYSRKFTPEITKRPKVRDQEGRINYYWTLLEPGDTIIFEASGNLIAPRYAFALSRGFGSGIINSNAPMDECDAKCQTPQGAINSSLPFQNVHPVTIGECPKYVRSAKLRMVTGLRNIPSIQSRGLFGAIAGFIEGGWTGMVDGWYGYHHQNEQGSGYAADQKSTQNAINGITNKVNSVIEKMNTQFTAVGKEFNKLERRMENLNKKVDDGFIDVWTYNAELLVLLENERTLDFHDSNVKNLYEKVKNQLKNNAKEIGNGCFEFYHKCNDECMESVKNGTYDYPKYSEESKLSREKIDGVKLESMGVYQILAIYSTVASSLVLLVSLGAISFWMCSNGSLQCRICI

SEQ ID NO: 8025 - protein, 565 aa, synthetic construct
  REGION 1..565: note = hemagglutinin__InfluenzaA__AEX34845
MKVKLLVLLCTFTATYADTICIGYHANNSTDTVDTVLEKNVTVTHSVNLLENSHNGKLCLLKGIAPLQLGNCSVAGWILGNPECELLVPKESWSYIVEKPNPENGTCYPGHFADYEELREQLSSVSSFERFEIFPKESSWPNHTVTGVSASCSHNGESSFYRNLLWLTGKNGLYPNLSKSYANNKEKEVLVLWGVHHPPNIGDQKALYHTENAYVSVVSSHYSRKFTPEIAKRPKVRDQEGRINYYWTLLEPGDTIIFEANGNLIAPRYAFALSRGFGSGIINSNAPMDKCDAKCQTPQGAINSSLPFQNVHPVTIGECPKYVRSAKLRMVTGLRNIPSIQSRGLFGAIAGFIEGGWTGMVDGWYGYHHQNEQGSGYAADQKSTQNAINGITNKVNSVIEKMNTQFTAVGKEFNKLERRMENLNKKVDDGFIDIWTYNAELLVLLENERTLDFHDSNVKNLYEKVKSQLKNNAKEIGNGCFEFYHKCNDECMESVKNGTYDYPKYSEESKLNREKIEGVKLESMGVYQILAIYSTVASSLVLLVSLGAISFWMCSNGSLQCRICI

SEQ ID NO: 8026 - protein, 565 aa, synthetic construct; identical to SEQ ID NO: 4097
  REGION 1..565: note = hemagglutinin__InfluenzaA__AEX34856

SEQ ID NO: 8027 - protein, 565 aa, synthetic construct
  REGION 1..565: note = hemagglutinin__InfluenzaA__AEX34867
MKVKLLVLLCTFTATYADTICIGYHANNSTDTVDTVLEKNVTVTHSVNLLENSHNGKLCLLKGIAPLQLGNCSVAGWILGNPECELLVSKESWSYIVEKPNPENGTCYPGHFADYEELREQLISVSSFERFEIFPKESSWPNHTVTGVSASCSHNGESSFYRNLLWLTGKNGLYPNLSKSYANNKEKEVLVLWGVHHPPNIGDQKALYHTENAYVSVVSSHYSRKFTPEIAKRPKVRDQEGRINYYWTLLEPGDTIIFEANGNLIAPRYAFALSRGFGSGIINSNAPMDKCDAKCQTPRGAINSSLPFQNVHPVTIGECPKYVRSAKLRMVTGLRNIPSIQSRGLFGAIAGFIEGGWTGMVDGWYGYHHQNEQGSGYAADQKSTQNAINGITNKVNSVIEKMNTQFTAVGKEFNKLERRMENLNKKVDDGFIDIWTYNAELLVLLENERTLDFHDSNVKNLYEKVKSQLKNNAKEIGNGCFEFYHKCNDECMESVKNGTYDYPKYSEESKLNREKIEGVKLESMGVYQILAIYSTVASSLVLLVSLGAISFWMCSNGSLQCRICI

SEQ ID NO: 8028 - protein, 565 aa, synthetic construct; identical to SEQ ID NO: 4097
  REGION 1..565: note = hemagglutinin__InfluenzaA__AEX34878

SEQ ID NO: 8029 - protein, 565 aa, synthetic construct
  REGION 1..565: note = hemagglutinin__InfluenzaA__AEX34889
MKVNLLVLLCTFTATYADTICIGYHANNSTDTVDTVLEKNVTVTHSVNLLENSHNGKLCLLKGIAPLQLGNCSVAGWILGNPECELLISKESWSYIVEKPNPENGTCYPGHFADYEELREQLSSVSSFERFEIFPKESSWPNHTVTGVSASCSHNGESSFYRNLLWLTGKNGLYPNLSKSYANNKEKEVLVLWGVHHPPNIGDQKALYHTENAYVSVVSSHYSRKFTPEIAKRPKVRDQEGRINYYWTLLEPGDTIIFEANGNLIAPRYAFALSRGFGSGIINSNAPMDKCDAKCQTPQGAINSSLPFQNVHPVTIGECPKYVRSAKLRMVTGLRNIPSIQSRGLFGAIAGFIEGGWTGMVDGWYGYHHQNEQGSGYAADQKSTQNAINGITNKVNSVIEKMNTQFTAVGKEFNKLERRMENLNKKVDDGFIDIWTYNAELLVLLENERTLDFHDSNVKNLYEKVKSQLKNNAKEIGNGCFEFYHKCNDECMESVKNGTYDYPKYSEESKLNREKIDGVKLESMGVYQILAIYSTVASSLVLLVSLGAISFWMCSNGSLQCRICI

SEQ ID NO: 8030 - protein, 565 aa, synthetic construct
  REGION 1..565: note = hemagglutinin__InfluenzaA__AEX34900
MKVKLLVLLCTFTATYADTICIGYHANNSTDTVDTVLEKNVTVTHSVNLLEDNHNGKLCLLKGIAPLQLGNCSVAGWILGNPECELLISKESWSYIVEKPNPENGTCYPGHFADYEELREQLSSVSSFERFEIFPKESSWPNHTVTGVSASCSHNGESSFYKNLLWLTGKNGLYPNLSKSYANNKEKEVLVLWGVHHPPNIGDQMTLYHKENAYVSVVSSHYSRKFTPEIAKRPKVRDQEGRINYYWTLLEPGDTIIFEASGNLIAPRYAFALSRGFGSGIINSNAPMDECDAKCQTPQGAINSSLPFQNVHPVTIGECPKYVRSAKLRMVTGLRNIPSIQSRGLFGAIAGFIEGGWTGMVDGWYGYHHQNEQGSGYAADQKSTQNAINGVTNKVNSVIEKMNTQFTAVGKEFNKLERRMENLNKKVDDGFIDVWTYNAELLVLLENERTLDFHDSNVKNLYEKVKNQLKNNAKEIGNGCFEFYHKCNDECMESVKNGTYDYPKYSEESKLSREKIDGVELESMGVYQILAIYSTVASSLVLLVSLGAISFWMCSNGSLQCRICI

SEQ ID NO: 8031 - protein, 565 aa, synthetic construct
  REGION 1..565: note = hemagglutinin__InfluenzaA__AEX34911
MKVKLLVLLCTFTATYADTICIGYHANNSTDTVDTVLEKNVTVTHSVNLLENSHNGKLCLLKGIAPLQLGNCSVAGWILGNPECELLISQESWSYIVEKPNPENGTCYPGHFADYEELREQLSSVSSFERFEIFPKESSWPNHTVTGVSASCSHNGESSFYRNLLWLTGKNGLYPNLSKSYANNKEKEVLVLWGVHHPPNIGDQKALYHTENAYVSVVSSHYSRKFTPEIAKRPKVRDQEGRINYYWTLLEPGDTIIFEANGNLIAPRYAFALSRGFGSGIINSNAPMDKCDAKCQTPQGAINSSLPFQNVHPVTIGECPKYVRSAKLRMVTGLRNIPSIQSRGLFGAIAGFIEGGWTGMVDGWYGYHHQNEQGSGYAADQKSTQNAINGITNKVNSVIEKMNTQFTAVGKEFNKLERRMENLNKKVDDGFIDIWTYNAELLVLLENERTLDFHDSNVKNLYEKVKSQLKNNAKEIGNGCFEFYHKCNDECMESVKNGTYDYPKYSEESKLNREKIDGVKLGSMGVYQILAIYSTVASSLVLLVSLGAISFWMCSNGSLQCRICI

SEQ ID NO: 8032 - protein, 565 aa, synthetic construct
  REGION 1..565: note = hemagglutinin__InfluenzaA__AEX34922
MKVKLLVLLCTFTATYADTICIGYHANNSTDTVDTVLEKNVTVTHSVNLLENSHNGKLCLLKGIAPLQLGNCSVAGWILGNPECELLISKESWSYIVEKPNPENGTCYPGHFADYEELREQLSSVSSFERFEIFPKESSWPNHTVTGVSASCSHNGESSFYRNLLWLTGKNGLYPNLSKSYANNKEKEVLVLWGVHHPPNIGDQKALYHTENAYVSVVSSHYSRRFTPEIAKRPKVRDQEGRINYYWTLLEPGDTIIFEANGNLIAPRYAFALSRGFGSGIINSNAPMDKCDAKCQTPQGAINSSLPFQNVHPVTIGECPKYVRSAKLRMVTGLRNIPSIQSRGLFGAIAGFIEGGWTGMVDGWYGYHHQNEQGSGYAADQKSTQNAINGITNKVNSVIEKMNTQFTAVGKEFNKLERRMENLDKKVDDGFIDIWTYNAELLVLLENERTLDFHDSNVKNLYEKVKSQLKNNAKEIGNGCFEFYHKCNDECMESVKNGTYDYPKYSEESKLNREKIDGVKLESMGVYQILAIYSTVASSLVLLVSLGAISFWMCSNGSLQCRICI

SEQ ID NO: 8033 - protein, 565 aa, synthetic construct; identical to SEQ ID NO: 2488
  REGION 1..565: note = hemagglutinin__InfluenzaA__AEX34933

SEQ ID NO: 8034 - protein, 565 aa, synthetic construct; identical to SEQ ID NO: 2488
  REGION 1..565: note = hemagglutinin__InfluenzaA__AEX34944

SEQ ID NO: 8035 - protein, 565 aa, synthetic construct
  REGION 1..565: note = hemagglutinin__InfluenzaA__AEX34955
MKAKLLVLLCTFTATYADTICIGYHANNSTDTVDTVLEKNVTVTHSVNLLENSHNGKLCLLKGIAPLQLGNCSVAGWILGNPECELLISKESWSYIVEKPNPENGTCYPGHFADYEELREQLSSVSSFERFEIFPKESSWPNHTVTGVSASCSHNGESSFYRNLLWLTGKNGLYPNLSKSYANNKEKEVLVLWGVHHPPNIGDQKALYHTENAYVSVVSSHYSRKFTPEIAKRPKVRDQEGRINYYWTLLEPGDTIIFEANGNLIAPRYAFALSRGFGSGIINSNAPMDKCDAKCQTPQGAINSSLPFQNVHPVTIGECPKYVRSAKLRMVTGLRNIPSIQSRGLFGAIAGFIEGGWTGMVDGWYGYHHQNEQGSGYAADQKSTQNAINGITNKVNSVIEKMNTQFTAVGKEFNKLERRMENLNKKVDDGFIDIWTYNAELLVLLENERTLDFHDSNVKNLYEKVKSQLKNNAKEIGNGCFEFYHKCNDECMESVKNGTYDYPKYSEESKLNREKIDGVKLESMGVYQILAIYSTVASSLVLLVSLGAISFWMCSNGSLQCRICI

SEQ ID NO: 8036 - protein, 565 aa, synthetic construct
  REGION 1..565: note = hemagglutinin__InfluenzaA__AEX34966
MKVKLLVLLCTFTATYADTICIGYHANNSTDTVDTVLEKNVTVTHSVNLLENSHNGKLCLLKGIAPLQLGNCSVAGWILGNPECELLISKESWSYIVEKPNPENGTCYPGHFADYEELREQLSSVSSFERFEIFPKESSWPNHTVTGVSASCSHNGESSFYRNLLWLTGKNGLYPNLSKSYANNKEKEVLVLWGVHHPPNIGDQKALYHTENAYVSVVSSHYSRKFTPEIAKRPKVRDQEGRINYYWTLLEPGDTIMFEANGNLIAPRYAFALSRGFGSGIINSNAPMDKCDAKCQTPQGAINSSLPFQNVHPVTIGECPKYVRSAKLRMVTGLRNIPSIQSRGLFGAIAGFIEGGWTGMVDGWYGYHHQNEQGSGYAADQKSTQNAINGITNKVNSVIEKMNTQFTAVGKEFNKLERRMENLNKKVDDGFIDIWTYNAELLVLLENERTLDFHDSNVKNLYEKVKSQLKNNAKEIGNGCFEFYHKCNDECMESVKNGTYDYPKYSEESKLNREKIDGVKLESMGVYQILAIYSTVASSLVLLVSLGAISFWMCSNGSLQCRICI

SEQ ID NO: 8037 - protein, 565 aa, synthetic construct; identical to SEQ ID NO: 8036
  REGION 1..565: note = hemagglutinin__InfluenzaA__AEX34977

SEQ ID NO: 8038 - protein, 565 aa, synthetic construct; identical to SEQ ID NO: 8036
  REGION 1..565: note = hemagglutinin__InfluenzaA__AEX34988

SEQ ID NO: 8039 - protein, 565 aa, synthetic construct; identical to SEQ ID NO: 4097
  REGION 1..565: note = hemagglutinin__InfluenzaA__AEX34999

SEQ ID NO: 8040 - protein, 565 aa, synthetic construct; identical to SEQ ID NO: 8036
  REGION 1..565: note = hemagglutinin__InfluenzaA__AEX35010

SEQ ID NO: 8041 - protein, 565 aa, synthetic construct; identical to SEQ ID NO: 8036
  REGION 1..565: note = hemagglutinin__InfluenzaA__AEX35032

SEQ ID NO: 8042 - protein, 565 aa, synthetic construct; identical to SEQ ID NO: 8036
  REGION 1..565: note = hemagglutinin__InfluenzaA__AEX35043

SEQ ID NO: 8043 - protein, 565 aa, synthetic construct
  REGION 1..565: note = hemagglutinin__InfluenzaA__AEX35054
MKVKLLVLLCTFTATYADTICIGYHANNSTDTVDTVLEKNVTVTHSVNLLENSHNGKLCLLKGIAPLQLGNCSVAGWILGNPECELLISKESWSYIVEKPNPENGTCYPGHFADYEELREQLSSVSSFERFEIFPKESSWPNHTVTGVSASCSHNGESSFYRNLLWLTGKNGLYPNLSKSYANNKEKEVLVLWGVHHPPNIGDQKALYHTENAYVSVVSSHYSRKFTPEIAKRPKVRDQEGRINYYWTLLEPGDTIMFEANGNLIAPRYAFALNRGFGSGIINSNAPMDKCDAKCQTPQGAINSSLPFQNVHPVTIGECPKYVRSAKLRMVTGLRNIPSIQSRGLFGAIAGFIEGGWTGMVDGWYGYHHQNEQGSGYAADQKSTQNAINGITNKVNSVIEKMNTQFTAVGKEFNKLERRMENLNKKVDDGFIDIWTYNAELLVLLENERTLDFHDSNVKNLYEKVKSQLKNNAKEIGNGCFEFYHKCNDECMESVKNGTYDYPKYSEESKLNREKIDGVKLESMGVYQILAIYSTVASSLVLLVSLGAISFWMCSNGSLQCRICI

SEQ ID NO: 8044 - protein, 565 aa, synthetic construct; identical to SEQ ID NO: 8036
  REGION 1..565: note = hemagglutinin__InfluenzaA__AEX35065

SEQ ID NO: 8045 - protein, 565 aa, synthetic construct; identical to SEQ ID NO: 2488
  REGION 1..565: note = hemagglutinin__InfluenzaA__AEX35076

SEQ ID NO: 8046 - protein, 565 aa, synthetic construct
  REGION 1..565: note = hemagglutinin__InfluenzaA__AEX35087
MKVKLLVLLCTFTATYADTICIGYHANNSTDTVDTVLEKNVTVTHSVNLLEDNHNGKLCLLKGIAPLQLGNCSVAGWILGNPECELLISKESWSYIVEKPNPENGTCYPGHFADYEELREQLSSVSSFKRFEIFPKESSWPNHTVTGVSASCSHNGESSFYKNLLWLTGKNGLYPNLSKSYANNKEKEVLVLWGVHHPPNIGDQMTLYHKENAYVSVVSSHYSRKFTPEIAKRPKVRDQEGRINYYWTLLEPGDTIIFEASGNLIAPRYAFALSRGFGSGIINSNAPMDECDAKCQTPQGAINSSLPFQNVHPVTIGECPKYVRSAKLRMVTGLRNIPSIQSRGLFGAIAGFIEGGWTGMVDGWYGYHHQNEQGSGYAADQKSTQNAINGITNKVNSVIEKMNTQFTAVGKEFNKLERRMENLNKKVDDGFIDVWTYNAELLVLLENERTLDFHDSNVKNLYEKVKNQLKNNAKEIGNGCFEFYHKCNDECMESVKNGTYDYPKYSEESKLSREKIDGVKLESMGVYQILAIYSTVASSLVLLVSLGAISFWMCSNGSLQCRICI

SEQ ID NO: 8047 - protein, 565 aa, synthetic construct
  REGION 1..565: note = hemagglutinin__InfluenzaA__AEX35098
MKVKLLVLLCTFTATYADTICIGYHANNSTDTVDTVLEKNVTVTHSVNLLENSHNGKLCLLKGIAPLQLGNCSVAGWILGNPECELLISKESWSYIVEKPNPENGTCYPGHFADYEELREQLSSVSSFERFEIFPKESSWPNHTVTGVSASCSHNGESSFYRNLLWLTGKNGLYPNLSKSYANNKEKEVLVLWGVHHPPNIGDQKALYHTENAYVSVMSSHYSRKFTPEIAKRPKVRDQEGRINYYWTLLEPGDTIIFEANGNLIAPRYAFALSRGFGSGIINSNAPMDKCDAKCQTPQGAINSSLPFQNVHPVTIGECPKYVRSAKLRMVTGLRNIPSIQSRGLFGAIAGFIEGGWTGMVDGWYGYHHQNEQGSGYAADQKSTQNAINGITNKVNSVIEKMNTQFTAVGKEFNKLERRMENLNKKVDDGFIDIWTYNAELLVLLENERTLDFHDSNVKNLYEKVKSQLKNNAKEIGNGCFEFYHKCNDECMESVKNGTYDYPKYSEESKLNREKIDGVKLESMGVYQILAIYSTVASSLVLLVSLGAISFWMCSNGSLQCRICI

SEQ ID NO: 8048 - protein, 565 aa, synthetic construct
  REGION 1..565: note = hemagglutinin__InfluenzaA__AEX35109
MKVKLLVLLCTFTATYADTICIGYHANNSTDTVDTVLEKNVTVTHSVNLLENSHNGKLCLLKGIAPLQLGNCSVAGWILGNPECELLISKESWSYIVEKPNPENGTCYPGHFADYEELREQLSSVSSFERFEIFPKESSWPNHTVTGVSASCSHNGESSFYRNLLWLTGKNGLYPNLSKSYANNKEKEVLVLWGVHQPPNIGDQKALYHTENAYVSVVSSHYSRKFTPEIAKRPKVRDQEGRINYYWTLLEPGDTIIFEANGNLIAPRYAFALSRGFGSGIINSNAPMDKCDAKCQTPQGAINSSLPFQNVHPVTIGECPKYVRSAKLRMVTGLRNIPSIQSRGLFGAIAGFIEGGWTGMVDGWYGYHHQNEQGSGYAADQKSTQNAINGITNKVNSVIEKMNTQFTAVGKEFNKLERRMENLNKKVDDGFIDIWTYNAELLVLLENERTLDFHDSNVKNLYEKVKSQLKNNAKEIGNGCFEFYHKCNDECMESVKNGTYDYPKYSEESKLNREKIDGVKLESMGVYQILAIYSTVASSLVLLVSLGAISFWMCSNGSLQCRICI

SEQ ID NO: 8049 - protein, 565 aa, synthetic construct
  REGION 1..565: note = hemagglutinin__InfluenzaA__AEX35120
MKVKLLVLLCTFTATYADTICIGYHANNSTDTVDTVLEKNVTVTHSVNLLENSHNGKLCLLKGIAPLQLGNCSVAGWILGNPECELLISKESWSYIVEKPNPENGTCYPGHFADYEELREQLSSVSSFERFEIFPKESSWPNHTVTGVSASCSHNGESSFYRNLLWLTGKNGLYPNLSKSYANNKEKEVLVLWGVHHPPNIGDQKALYHTENAYVSVVSSHYSRKFTPEIAKRPKVRDREGRINYYWTLLEPGDTIIFEANGNLIAPRYAFALSRGFGSGIINSNAPMDKCDAKCQTPQGAINSSLPFQNVHPVTIGECPKYVRSAKLRMVTGLRNIPSIQSRGLFGAIAGFIEGGWTGMVDGWYGYHHQNEQGSGYAADQKSTQNAINGITNKVNSVIEKMNTQFTAVGKEFNKLERRMENLNKKVDDGFIDIWTYNAELLVLLENERTLDFHDSNVKNLYEKVKSQLKNNAKEIGNGCFEFYHKCNDECMESVKNGTYDYPKYSEESKLNREKIDGVKLESMGVYQILAIYSTVASSLVLLVSLGAISFWMCSNGSLQCRICI

SEQ ID NO: 8050 - protein, 565 aa, synthetic construct; identical to SEQ ID NO: 7793
  REGION 1..565: note = hemagglutinin__InfluenzaA__AEX35131

SEQ ID NO: 8051 - protein, 565 aa, synthetic construct; identical to SEQ ID NO: 7793
  REGION 1..565: note = hemagglutinin__InfluenzaA__AEX35142

SEQ ID NO: 8052 - protein, 565 aa, synthetic construct
  REGION 1..565: note = hemagglutinin__InfluenzaA__AEX35153
MKVKLLVLLCTFTATYADTICIGYHANNSTDTVDTVLEKNVTVTHSVNLLEDNHNGKLCLLKGIAPLQLGNCSVAGWILGNPECELLISKESWSYIVEKPNPENGTCYPGHFADYEELREQLSSVSSFERFEIFPKESSWPNHTVTGVSASCSHNGESSFYKNLLWLTGKNGLYPNLSKSYANNKEKEVLVLWGVHHPPNIGNQMTLYHKENAYVSVVSSHYSRKFTPEIAKRPKVRDQEGRINYYWTLLEPGDTIIFEASGNLIAPRYAFALSRGFGSGIINSNAPMDECDAKCQTPQGAINSNLPFQNVHPVTIGECPKYVRSAKLRMVTGLRNIPSIQSRGLFGAIAGFIEGGWTGMVDGWYGYHHQNEQGSGYAADQKSTQNAINGITNKVNSVIEKMNTQFTAVGKEFNKLERRMENLNKKVDDGFIDVWTYNAELLVLLENERTLDFHDSNVKSLYEKVKNQLKNNAKEIGNGCFEFYHKCNDECMESVKNGTYDYPKYSEESKLSREKIDGVKLESMGVYQILAIYSTVASSLVLLVSLGAISFWMCSNGSLQCRICI

SEQ ID NO: 8053 - protein, 565 aa, synthetic construct
  REGION 1..565: note = hemagglutinin__InfluenzaA__AEX35164
MKVKLLVLLCAFTATYADTICIGYHANNSTDTVDTVLEKNVTVTHSVNLLENSHNGKLCLLKGIAPLQLGNCSVAGWILGNPECELLISKESWSYIVEKPNPENGTCYPGHFADYEELREQLSSVSSFERFEIFPKESSWPNHTVTGVSASCSHNGESSFYRNLLWLTGKNGLYPNLSKSYANNKEKEVLVLWGVHHPPNIGVQKALYHTENAYVSVVSSHYSRKFTPEIAKRPKVRDQEGRINYYWTLLEPGDTIIFEANGNLIAPRYAFALSRGFGSGIINSNAPMDKCDAKCQTPQGAINSSLPFQNVHPVTIGECPKYVRSAKLRMVTGLRNIPSIQSRGLFGAIAGFIEGGWTGMVDGWYGYHHQNEQGSGYAADQKSTQNAINGITNKVNSVIEKMNTQFTAVGKEFNKLERRMENLNKKVDDGFIDIWTYNAELLVLLENERTLDFHDSNVKNLYEKVKSQLKNNAKEIGNGCFEFYHKCNDECMESVKNGTYDYPKYSEESKLNREKIDGVKLESMGVYQILAIYSTVASSLVLLVSLGAISFWMCSNGSLQCRICI

SEQ ID NO: 8054 - protein, 565 aa, synthetic construct
  REGION 1..565: note = hemagglutinin__InfluenzaA__AEX35175
MKVKLLVLLCTFTATYADTICIGYHANNSTDTVDTVLEKNVTVTHSVDLLEDSHNGKLCLLKGIAPLQLGNCSVAGWILGNPECELLISKESWSYIVETPNPENGTCYPGYFADYEELREQLSSVSSFERFEIFPKESSWPNHTVTGVTASCSHNGKSSFYRNLLWLTGKNGLYPNLSKSYANNKEKEVLVLWGVHHPPNIGDQRALYHTENAYVSVVSSHYSRRFTPEIAKRPKVRDQEGRINYYWTLLEPGDTIIFEANGNLIAPRFAFALNRGFGSGIITSNAPMDGCDAKCQTPQGAINSSLPFQNVHPVTIGECPKYVRSAKLRMATGLRNIPSIQSRGLFGAIAGFIEGGWTGMVDGWYGYHHQNEQGSGYAADQKSTQNAINGITNKVNSVIEKMNTQFTAVGKEFSKLERRMENLNKKVDDGFLDIWTYNAELLVLLENERTLDFHDSNVKNLYEKVKSQLKNNAKEIGNGCFEFYHKCNDECMESVKNGTYDYPKYSEESKLNREKIDGVKLESMGVYQILAIYSTVASSLVLLVSLGAISFWMCSNGSLQCRICI

SEQ ID NO: 8055 - protein, 565 aa, synthetic construct
  REGION 1..565: note = hemagglutinin__InfluenzaA__AEX35186
MKVKLLVLLCTFTATYADTICIGYHANNSTDTVDTVLEKNVTVTHSVNLLEDSHNGKLCLLKGIAPLQLGNCSVAGWILGNPECELLISRESWSYIVEKPNPENGTCYPGHFADYEELREQLSSVSSFERFEIFPKESSWPNHTTTGVSASCSHNGESSFYKNLLWLTGKNGLYPNLSKSYANNKEKEVLVLWGVHHPPNIGNQRALYHTENAYVSVVSSHYSRKFTPEIAKRPKVRDQEGRINYYWTLLEPGDTIIFEANGNLIAPRYAFALSRGFGSGIINSNAPMDECDAKCQTPQGAINSSLPFQNVHPVTIGECPKYVRSAKLRMVTGLRNIPSIQSRGLFGAIAGFIEGGWTGMVDGWYGYHHQNEQGSGYAADQKSTQNAINGITNKVNSVIEKMNTQFTAVGKEFNKLERRMENLNKKVDDGFIDIWTYNAELLVLLENERTLDFHDSNVKNLYEKVKSQLKNNAKEIGNGCFEFYHKCNDECMESVKNGTYDYPKYSEESKLNREKIDGVKLESMGVYQILAIYSTVASSLVLLVSLGAISFWMCSNGSLQCRICI

SEQ ID NO: 8056 - protein, 565 aa, synthetic construct; identical to SEQ ID NO: 8055
  REGION 1..565: note = hemagglutinin__InfluenzaA__AEX35197

SEQ ID NO: 8057 - protein, 565 aa, synthetic construct; identical to SEQ ID NO: 2488
  REGION 1..565: note = hemagglutinin__InfluenzaA__AEX35208

SEQ ID NO: 8058 - protein, 566 aa, synthetic construct
  REGION 1..566: note = hemagglutinin__InfluenzaA__AEX35219
MKTIIALSYILCLVFAQKLPGNDNSTATLCLGHHAVPNGTLVKTITNDQIEVTNATELVQSSSTGGICDSPHQILDGENCTLIDALLGDPHCDGFQNKEWDLFVERSKAYSNCYPYDVPDYASLRSLVASSGTLEFNNESFNWTGVAQNGTSSACKRRSNKSFFSRLNWLHQLKYKYPALNVTMPNNEKFDKLYIWGVHHPSTDSDQISLYAQASGRVTVSTKRSQQTVIPNIGSRPWVRDVSSRISIYWTIVKPGDILLINSTGNLIAPRGYFKIRSGKSSIMRSDAPIGKCNSECITPNGSIPNDKPFQNVNRITYGACPRYVKQNTLKLATGMRNVPEKQTRGIFGAIAGFIENGWEGMVDGWYGFRHQNSEGTGQAADLKSTQAAINQINGKLNRLIGKTNEKFHQIEKEFSEVEGRIQDLEKYVEDTKIDLWSYNAELLVALENQHTIDLTDSEMNKLFERTKKQLRENAEDMGNGCFKIYHKCDNACIGSIRNGTYDHDVYRDEALNNRFQIKGVELKSGYKDWILWISFAMSCFLLCVVLLGFIMWACQKGNIRCNICI

SEQ ID NO: 8059 - protein, 565 aa, synthetic construct; identical to SEQ ID NO: 8000
  REGION 1..565: note = hemagglutinin__InfluenzaA__AEX35230

SEQ ID NO: 8060 - protein, 566 aa, synthetic construct; identical to SEQ ID NO: 1897
  REGION 1..566: note = hemagglutinin__InfluenzaA__AEX35241

SEQ ID NO: 8061 - protein, 565 aa, synthetic construct; identical to SEQ ID NO: 8000
  REGION 1..565: note = hemagglutinin__InfluenzaA__AEX35263

SEQ ID NO: 8062 - protein, 565 aa, synthetic construct; identical to SEQ ID NO: 8000
  REGION 1..565: note = hemagglutinin__InfluenzaA__AEX35274

SEQ ID NO: 8063 - protein, 566 aa, synthetic construct; identical to SEQ ID NO: 1795
  REGION 1..566: note = hemagglutinin__InfluenzaA__AEX35285

SEQ ID NO: 8064 - protein, 566 aa, synthetic construct; identical to SEQ ID NO: 7961
  REGION 1..566: note = hemagglutinin__InfluenzaA__AEX35296

SEQ ID NO: 8065 - protein, 566 aa, synthetic construct
  REGION 1..566: note = hemagglutinin__InfluenzaA__AEX35307
MKTIIALSYILCLVFAQKIPGNDNSTATLCLGHHAVPNGTIVKTITNDQIEVTNATELVQSSSTGGICDSPHQILDGENCTLIDALLGDPQCDGFQNKKWDLFVERSKAYSNCYPYDVPDYASLRSLVASSGTLEFNNESFNWTGVTQNGTSSACKRRSNKSFFSRLNWLTHLKYKYPALNVTMPNNEKFDKLYIWGVHHPGTDSDQISLYAQASGRITVSTKRSQQTVIPNIGSRPRVRDVSSRISIYWTIVKPGDILLINSTGNLIAPRGYFKIRSGKSSIMRSDAPIGKCNSECITPNGSIPNDKPFQNVNRITYGACPRYVKQNTLKLATGMRNVPEKQTRGIFGAIAGFIENGWEGMVDGWYGFRHQNSEGTGQAADLKSTQAAINQINGKLNRLIGKTNEKFHQIEKEFSEVEGRIQDLEKYVEDTKIDLWSYNAELLVALENQHTIDLTDSEMNKLFERTKKQLRENAEDMGNGCFKIYHKCDNACIGSIRNGTYDHDVYRDEALNNRFQIKGVELKSGYKDWILWISFAISCFLLCVVLLGFIMWACQKGNIRCNICI

SEQ ID NO: 8066 - protein, 566 aa, synthetic construct; identical to SEQ ID NO: 7961
  REGION 1..566: note = hemagglutinin__InfluenzaA__AEX35318

SEQ ID NO: 8067 - protein, 566 aa, synthetic construct
  REGION 1..566: note = hemagglutinin__InfluenzaA__AEX35329
MKTIIALSYFLCLVFAQKLPGNDNSTATLCLGHHAVPNGTIVKTITNDQIEVTNATELVQNSSTGGICDSPHQILDGENCTLIDALLGDPQCDGFQNKKWDLFVERSKAYSNCYPYDVPDYASLRSLVASSGTLEFNNESFNWTGVTQNGTSSACKRRSNKSFFSRLNWLTHLKYKYPALNVTMPNNEKFDKLYIWGVHHPGTDSDQISLYAQASGRITVSTKRSQQTVIPNIGSRPRVRDVSSRISIYWTIVKPGDILLINSTGNLIAPRGYFKIRSGKSSIMRSDAPIGKCNSECITPNGSIPNDKPFQNVNRITYGACPRYVKQNTLKLATGMRNVPEKQTRGIFGAIAGFIENGWEGMVDGWYGFRHQNSEGTGQAADLKSTQAAINQINGKLNRLIGKTNEKFHQIEKEFSEVEGRIQDLEKYVEDTKIDLWSYNAELLVALENQHTIDLTDSEMNKLFERTKKQLRENAEDMGNGCFKIYHKCDNACIGSIRNGTYDHDVYRDEALNNRFQIKGVELKSGYKDWILWISFAISCFLLCVALLGFIMWACQKGNIRCNICI

SEQ ID NO: 8068 - protein, 566 aa, synthetic construct
  REGION 1..566: note = hemagglutinin__InfluenzaA__AEX35340
MKTIIALSYILCLVFAQKLPGNDNSTATLCLGHHAVPNGTIVKTITNDQIEVTNATELVQNSSTGGICDSPHQILDGENCTLIDALLGDPQCDGFQNKKWDLFVERSKAYSNCYPYDVPDYASLRSLVASSGTLEFNNESFNWTGVTQNGTSSACKRRSNKSFFSRLNWLTHLKYKYPALNVTMPNNEKFDKLYIWGVHHPGTDSDQISLYAQASGRITVSTKRSQQTVIPNIGSRPRVRDVSSRISIYWTIVKPGDILLINSTGNLIAPRGYFKIRSGKSSIMRSDAPIGKCNSECITPNGSIPNDKPFQNVNRITYGACPRYVKQNTLKLATGMRNVPEKQTRGIFGAIAGFIENGWEGMVDGWYGFRHQNSEGTGQAADLKSTQAAINQINGKLNRLIGKTNEKFHQIEKEFSEVEGRIQDLEKYVEDTKIDLWSYNAELLVALENQHTIDLTDSEMNKLFERTKKQLRENAEDMGNGCFKIYHKCDNACIGSIRNGTYDHDVYRDEALNNRFQIKGVELKSGYKDWILWISFAISCFLLCVALLGFIMWACQKGNIRCNICI

SEQ ID NO: 8069 - protein, 566 aa, synthetic construct; identical to SEQ ID NO: 7961
  REGION 1..566: note = hemagglutinin__InfluenzaA__AEX35351

SEQ ID NO: 8070 - protein, 566 aa, synthetic construct; identical to SEQ ID NO: 7961
  REGION 1..566: note = hemagglutinin__InfluenzaA__AEX35362

SEQ ID NO: 8071 - protein, 566 aa, synthetic construct; identical to SEQ ID NO: 1795
  REGION 1..566: note = hemagglutinin__InfluenzaA__AEX35373

SEQ ID NO: 8072 - protein, 566 aa, synthetic construct
  REGION 1..566: note = hemagglutinin__InfluenzaA__AEX35384
MKTIIALSYILCLVFAQKLPGNDNSTATLCLGHHAVPNGTIVKTITNDQIEVTNATELVQSSSTGGICDSPHQILDGENCTLIDALLGDPQCDGFQNKKWDLFVERSKAYSNCYPYDVPDYASLRSLVASSGTLEFNNESFNWTGVTQNGTSSACKRRSNKSFFSRLNWLTHLKFKYPALSVTMPNNEKFDKLYIWGVHHPGTDNDQISLYAQASGRITVSTKRSQQTVIPNIGSRTRVRDVPSRISIYWTIVKPGDILLINSTGNLIAPRGYFKIRSGKSSIMRSDAPIGKCNSECITPNGSIPNDKPFQNVNRITYGACPRYVKQNTLKLATGMRNVPEKQTRGIFGAIAGFIENGWEGMVDGWYGFRHQNSEGTGQAADLKSTQAAINQINGKLNRLIGKTNEKFHQIEKEFSEVEGRIQDLEKYVEDTKIDLWSYNAELLVALENQHTIDLTDSEMNKLFERTKKQLRENAEDMGNGCFKIYHKCDNACIGSIRNGTYDHDVYRDEALNNRFQIKGVELKSGYKDWILWISFAISCFLLCVALLGFIMWACQKGNIRCNICI

SEQ ID NO: 8073 - protein, 566 aa, synthetic construct
  REGION 1..566: note = hemagglutinin__InfluenzaA__AEX35395
MKTIIALSYILCLVFAQKLPGNDNSTATLCLGHHAVPNGTIVKTITNDQIEVTNATELVQSSSTGEICDSPHQILDGENCTLIDALLGDPQCDGFQNKKWNLFVERSKAYSNCYPYDVPDYASLRSLVASSGTLEFNNESFNWTGVTQNGTSSACKRRSNKSFFSRLNWLTHLKFKYPALNVTMPNNEKFDKLYIWGVHHPGTDNDQISLYAQASGRITVSTKRSQQTVIPNIGSRPRVRDVPSRISIYWTIVKPGDILLINSTGNLIAPRGYFKIRSGKSSIMRSDAPIGKCNSECITPNGSIPNDKPFQNVNRITYGACPRYVKQNTLKLATGMRNVPEKQTRGIFGAIAGFIENGWEGMVDGWYGFRHQNSEGTGQAADLKSTQAAINQINGKLNRLIGKTNEKFHQIEKEFSEVEGRIQDLEKYVEDTKIDLWSYNAELLVALENQHTIDLTDSEMNKLFERTKKQLRENAEDMGNGCFKIYHKCDNACIGSIRNGTYDHDVYRDEALNNRFQIKGVELKSGYKDWILWISFAISCFLLCVALLGFIMWACQKGNIRCNICI

SEQ ID NO: 8074 - protein, 566 aa, synthetic construct; identical to SEQ ID NO: 1795
  REGION 1..566: note = hemagglutinin__InfluenzaA__AEX35406

SEQ ID NO: 8075 - protein, 566 aa, synthetic construct; identical to SEQ ID NO: 1795
  REGION 1..566: note = hemagglutinin__InfluenzaA__AEX35417

SEQ ID NO: 8076 - protein, 566 aa, synthetic construct
  REGION 1..566: note = hemagglutinin__InfluenzaA__AEX35428
MKTIIALSYILCLVFAQKLPGNDNSTATLCLGHHAVPNGTLVKTITNDQIEVTNATELVQSSSTGGICDSPHQILDGENCTLIDALLGDPHCDGFQNKKWDLFVERSKAYSNCYPYDVPDYASLRSLVASSGTLEFNNESFNWTGVAQNGTSSACKRRSDKSFFSRLNWLHQLKYKYPALNVTMPNNEKFDKLYIWGVHHPGTDSDQISLYAQASGRITVSTKRSQQTVIPNIGSRPRVRDVSSRISIYWTIVKPGDILFINSTGNLIAPRGYFKIRSGKSSIMRSDAPIDKCNSECITPNGSIPNDKPFQNVNRITYGACPRYVKQNTLKLATGMRNVPEKQTRGIFGAIAGFIENGWEGMVDGWYGFRHQNSEGTGQAADLKSTQAAINQINGKLNRLIGKTNEKFHQIEKEFSEVEGRIQDLEKYVEDTKIDLWSYNAELLVALENQHTIDLTDSEMNKLFERTKKQLRENAEDMGNGCFKIYHKCDNACIGSIRNGTYDHDVYRDEALNNRFQIKGVELKSGYKDWILWISFAISCFLLCVALLGFIMWACQKGNIRCNICI

SEQ ID NO: 8077 - protein, 565 aa, synthetic construct
  REGION 1..565: note = hemagglutinin__InfluenzaA__AEX35439
MKVKLLVLLCTFTATYADTICIGYHANNSTDTVDTVLEKNVTVTHSVNLLEDSHNGKLCLLKGIAPLQLGNCSVAGWILGNPECELLISKESWSYIVETPNPENGTCYPGYFADYEELREQLSSVSSFERFEIFPKESSWPNHTVTGVSASCSHNGKSSFYRNLLWLTGKNGLYPNLSKSYANNKEKEVLVLWGVHHPPNIGDQRALYHTENAYVSVVSSHYSRRFTPEIAKRPKVRDQEGRINYYWTLLEPGDTIIFEANGNLIAPRFAFALSRGFGSGIITSNAPMDECDAKCQTPQGAINSSLPFQNVHPVTIGECPKYVRSAKLRMVTGLRNIPSIQSRGLFGAIAGFIEGGWTGMVDGWYGYHHQNEQGSGYAADQKSTQNAINGITNKVNSVIEKMNTQFTAVGKEFNKLERRMENLNKKVDDGFLDIWTYNAELLVLLENERTLDFHDSNVKNLYEKVKSQLKNNAKEIGNGCFEFYHKCNDECMESVKNGTYDYPKYSEESKLNREKIDGVKLESMGVYQILAIYSTVASSLVLLVSLGAISFWMCSNGSLQCRICI

SEQ ID NO: 8078 - protein, 566 aa, synthetic construct
  REGION 1..566: note = hemagglutinin__InfluenzaA__AEX35450
MKTIIALSYILCLVFAQKLPGNDNSTATLCLGHHAVPNGTIVKTITNDQIEVTNATELVQSSSTGGICDSPHQILDGENCTLIDALLGDPQCDGFQNKKWDLFVERSKAYSNCYPYDVPDYASLRSLVASSGTLEFNNENFNWTGVTQNGTSSACKRRSNNSFFSRLNWLTHLKFKYPALNVTMPNNEKFDKLYIWGVHHPGTDNDQIFLYAQASGRITVSTKRSQQTVIPNIGSRPRVRNIPSRISIYWTIVKPGDILLINSTGNLIAPRGYFKIQSGKSSIMRSDAPIGKCNSECITPNGSIPNDKPFQNVNRITYGACPRYVKQNTLKLATGMRNVPEKQTRGIFGAIAGFIENGWEGMVDGWYGFRHQNSEGIGQAADLKSTQAAINQINGKLNRLIGKTNEKFHQIEKEFSEVEGRIQDLEKYVEDTKIDLWSYNAELLVALENQHTIDLTDSEMNKLFERTKKQLRENAEDMGNGCFKIYHKCDNACIGSIRNGTYDHDVYRDEALNNRFQIKGVELKSGYKDWILWISFAISCFLLCVALLGFIMWACQKGNIRCNICI

SEQ ID NO: 8079 - protein, 566 aa, synthetic construct; identical to SEQ ID NO: 630
  REGION 1..566: note = hemagglutinin__InfluenzaA__AEX35461

SEQ ID NO: 8080 - protein, 566 aa, synthetic construct
  REGION 1..566: note = hemagglutinin__InfluenzaA__AEX35472
MKTIIALSYILCLVFAQKLPGNDNSTATLCLGHHAVPNGTIVKTITNDQIEVTNATELVQSSSTGGICDSPHQILDGENCTLIDALLGDPQCDDFQNKKWDLFVERSKAYSNCYPYDVPDYASLRSLVASSGTLEFNNESFNWTGVTQNGTSSACKRRSNNSFFSRLNWLTHLKFKYPALNVTMPNNEKFDKLYIWGVHHPGTDNDQIFLYAQASGRITVSTKRSQQTVIPNIGSRPRVRNIPSRISIYWTIVKPGDILLINSTGNLIAPRGYFKIRSGKSSIMRSDAPIGKCNSECITPNGSIPNDKPFQNVNRITYGACPRYVKQNTLKLATGMRNVPEKQTRGIFGAIAGFIENGWEGMVDGWYGFRHQNSEGIGQAADLKSTQAAINQINGKLNRLIGKTNEKFHQIEKEFSEVEGRIQDLEKYVEDTKIDLWSYNAELLVALENQHTIDLTDSEMNKLFERTKKQLRENAEDMGNGCFKIYHKCDNACIGSIRNGTYDHDVYRDEALNNRFQIKGVELKSGYKDWILWISFAISCFLLCVVLLGFIMWACQKGNIRCNICI

SEQ ID NO: 8081 - protein, 566 aa, synthetic construct; identical to SEQ ID NO: 630
  REGION 1..566: note = hemagglutinin__InfluenzaA__AEX35483

SEQ ID NO: 8082 - protein, 566 aa, synthetic construct
  REGION 1..566: note = hemagglutinin__InfluenzaA__AEX35494
MKTIIALSYILCLVFAQKLPGNDNSTATLCLGHHAVPNGTIVKTITNDQIEVTNATELVQSSSTGGICDSPHQILDGENCTLIDALLGDPQCDGLQNKKWDLFVERSKAYSNCYPYDVPDYASLRSLVASSGTLEFNNESFNWTGVTQNGTSSACKRRSNNSFFSRLNWLTHLKFKYPALNVTMPNNEKFDKLYIWGVHHPGTDNDQIFLYAQASGRITVSTKRSQQTVIPNIGSRPRVRNIPSRISIYWTIVKPGDILLINSTGNLIAPRGYFKIRSGKSSIMRSDAPIGKCNSECITPNGSIPNDKPFQNVNRITYGACPRYVKQNTLKLATGMRNVPEKQTRGIFGAIAGFIENGWEGMMDGWYGFRHQNSEGIGQAADLKSTQAAINQINGKLNRLIGKTNEKFHQIEKEFSEVEGRIQDLEKYVEDTKIDLWSYNAELLVALENQHTIDLTDSEMNKLFERTKKQLRENAEDMGNGCFKIYHKCDNACIGSIRNGTYDHDVYRDEALNNRFQIKGVELKSGYKDWILWISFAISCFLLCVALLGFIMWACQKGNIRCNICI

SEQ ID NO: 8083 - protein, 566 aa, synthetic construct
  REGION 1..566: note = hemagglutinin__InfluenzaA__AEX35505
MKTIIALSYILCLVFAQKLPGNDNSTATLCLGHHAVPNGTIVKTITNDQIEVTNATELVQSSSTGGICDSPHQILDGENCTLIDALLGDPQCDDFQNKKWDLFVERSKAYSNCYPYDVPDYASLRSLVASSGTLEFNNESFNWTGVTQNGTSSACKRRSNNSFFSRLNWLTHLKFKYPALNVTMPNNEKFDKLYIWGVHHPGTDNDQIFLYAQASGRITVSTKRSQQTVIPNIGSRPRVRNIPSRISIYWTIVKPGDILLINSTGNLIAPRGYFKILSGKSSIMRSDAPIGKCNSECITPNGSIPNDKPFQNVNRITYGACPRYVKQNTLKLATGMRNVPEKQTRGIFGAIAGFIENGWEGMVDGWYGFRHQNSEGIGQAADLKSTQAAINQINGKLNRLIGKTNEKFHQIEKEFSEVEGRIQDLEKYVEDTKIDLWSYNAELLVALENQHTIDLTDSEMNKLFERTKKQLRENAEDMGNGCFKIYHKCDNACIGSIRNGTYDHDVYRDEALNNRFQIKGVELKSGYKDWILWISFAISCFLLCVALLGFIMWACQKGNIRCNICI

SEQ ID NO: 8084 - protein, 566 aa, synthetic construct
  REGION 1..566: note = hemagglutinin__InfluenzaA__AEX35516
MKTIIALSYILCLVFAQKLPGNDNSTATLCLGHHAVPNGTIVKTITNDQIEVTNATELVQSSSTGGICDSPHQILDGENCTLIDALLGDPQCDGLQNKKWDLFVERSKAYSNCYPYDVPDYASLRSLVASSGTLEFNNESFNWTGVTQNGTSSACKRRSNNSFFSRLNWLTHLKFKYPALNVTMPNNEKFDKLYIWGVHHPGTDNDQIFLYAQASGRITVSTKRSQQTVIPNIGSRPRVRNIPSRISIYWTIVKPGDILLINSTGNLIAPRGYFKIRSGKSSIMRSDAPIGKCNSECITPNGSIPNDKPFQNVNRITYGACPRYVKQNTLKLATGMRNVPEKQTRGIFGAIAGFIENGWEGMVDGWYGFRHQNSEGIGQAADLKSTQAAINQINGKLNRLIGKTNEKFHQIEKEFSEVEGRIQDLEKYVEDTKIDLWSYNAELLVALENQHTIDLTDSEMNKLFERTKKQLRENAEDMGNGCFKIYHKCDNACIGSIRNGTYDHDVYRDEALNNRFQIKGVELKSGYKDWILWISFAISCFLLCVALLGFIMWACQKGNIRCNICI

SEQ ID NO: 8085 - protein, 566 aa, synthetic construct
  REGION 1..566: note = hemagglutinin__InfluenzaA__AEX35527
MKTIIALSYILCLVFAQKLPGNDNSTATLCLGHHAVPNGTIVKTITNDQIEVTNATELVQSSSTGGICDSPHQILDGENCTLIDALLGDPQCDGFQNKKWDLFVERSKAYSNCYPYDVPDYVSLRSLVASSGTLEFNNESFNWTGVTQNGTSSACKRRSNNSFFSRLNWLTHLKFKYPALNVTMPNNEQFDKLYIWGVHHPGTDNDQISLYAQASGRITVSTKRSQQTVIPNIGSRPRVRDIPSRISIYWTIVKPGDILLINSTGNLIAPRGYFKIRSGKSSIMRSDAPIGKCNSECITPNGSIPNDKPFQNVNRITYGACPRYVKQNTLKLATGMRNVPEKQTRGIFGAIAGFIENGWEGMVDGWYGFRHQNSEGIGQAADLKSTQAAINQINGKLNRLIGKTNEKFHQIEKEFSEVEGRIQDLEKYVEDTKIDLWSYNAELLVALENQHTIDLTDSEMNKLFERTKKQLRENAEDMGNGCFKIYHKCDNACIGSIRNGTYDHDVYRDEALNNRFQIKGVELKSGYKDWILWISFAISCFLLCVALLGFIMWACQKGNIRCNICI

SEQ ID NO: 8086 - protein, 566 aa, synthetic construct
  REGION 1..566: note = hemagglutinin__InfluenzaA__AEX35549
MKTIIALSYILCLVFAQKLPGNDNSTATLCLGHHAVPNGTIVKTITNDQIEVTNATELVQSSSTGGICDSPHQILDGENCTLIDALLGDPQCDGFQNKKWDLFVERSKAYSNCYPYDVPDYASLRSLIASSGTLEFNNESFNWTGVTQNGTSSACKRGSNNSFFSRLNWLTHLKFKYPALNVTMPNNEEFDKLYIWGVHHPGTDNDQISLYAQASGKITVSTKRSQQTVIPNIGSRPRVRDIPSRISIYWTIVKPGDILLINSTGNLIAPRGYFKIRSGKSSIMRSDAPIDKCNSECITPNGSIPNDKPFQNVNKITYGACPRYVKQNTLKLATGMRNVPEKQTRGIFGAIAGFIENGWEGMVDGWYGFRHQNSEGIGQAADLKSTQAAIDQINGKLNRLIGKTNEKFHQIEKEFSEVEGRIQDLEKYVEDTKIDLWSYNAELLVALENQHTIDLTDSEMNKLFERTKKQLRENAEDMGNGCFKIYHKCDNACIGSIRNGTYDHDVYRDEALNNRFQIKGVELKSGYKDWILWISFAISCFLLCVALLGFIMWACQKGNIRCNICI

SEQ ID NO: 8087 - protein, 566 aa, synthetic construct
  REGION 1..566: note = hemagglutinin__InfluenzaA__AEX35560
MKTIIALSYILCLVFAQKLPGNDNSTATLCLGHHAVPNGTIVKTITNDQIEVTNATELVQSSSTGGICDSPHQILDGENCTLIDALLGDPQCDGFQNKKWDLFVERSKAYSNCYPYDVPDYVSLRSLVASSGTLEFNNESFNWTGVTQNGTSSACKRRSNNSFFSRLNWLTHLKFKYPALNVTMPNNEQFDKLYIWGVHHPGTDNDQISLYAQASGRITVSTKRSQQTVIPNIGSRPRVRDIPSRISIYWTIVKPGDILLINSTGNLIAPRGYFKIRSGKSSIMRSDAPIGKCNSECITPNGSIPNDKPFQNVNRITYGACPRYVKQNTLKLATGMRNVPEKQTRGIFGAIAGFIENGWEGMVDGWYGFRHQNSVGIGQAADLKSTQAAINQINGKLNRLIGKTNEKFHQIEKEFSEVEGRIQDLEKYVEDTKIDLWSYNAELLVALENQHTIDLTDSEMNKLFERTKKQLRENAEDMGNGCFKIYHKCDNACIGSIRNGTYDHDVYRDEALNNRFQIKGVELKSGYKDWILWISFAISCFLLCVALLGFIMWACQKGNIRCNICI

SEQ ID NO: 8088 - protein, 566 aa, synthetic construct
  REGION 1..566: note = hemagglutinin__InfluenzaA__AEX35571
MKTIIALSYILCLVFAQKLPGNDNSTATLCLGHHAVPNGTIVKTITNDQIEVTNATELVQSSSTGGICDSPHQILDGENCTLIDALLGDPQCDGFQNKKWDLFVERSRAYSNCYPYDVPDYASLRSLVASSGTLEFNNESFNWTGVTQNGTSSACKRRSNNSFFSRLNWLTHLKFKYPALNVTMPNNEKFDKLYIWGVHHPGTDNDQIFLYAQASGRITVSTKRSQQTVIPNIGSRPRVRNIPSRISIYWTIVKPGDILLINSTGNLIAPRGYFKIRSGKSSIMRSDAPIGKCNSECITPNGSIPNDKPFQNVNRITYGACPRYVKQNTLKLATGMRNVPEKQTRGIFGAIAGFIENGWEGMVDGWYGFRHQNSEGIGQAADLKSTQAAINQINGKLNRLIGKTNEKFHQIEKEFSEVEGRIQDLEKYVEDTKIDLWSYNAELLVALENQHTIDLTDSEMNKLFERTKKQLRENAEDMGNGCFKIYHKCDNACIGSIRNGTYDHDVYRDEALNNRFQIKGVELKSGYKDWILWISFAISCFLLCVALLGFIMWACQKGNIRCNICI

SEQ ID NO: 8089 - protein, 566 aa, synthetic construct; identical to SEQ ID NO: 630
  REGION 1..566: note = hemagglutinin__InfluenzaA__AEX35582

SEQ ID NO: 8090 - protein, 566 aa, synthetic construct
  REGION 1..566: note = hemagglutinin__InfluenzaA__AEX35593
MKTIIALSYILCLVFAQKLPGNDNSTATLCLGHHAVPNGTIVKTITNDQIEVTNATELVQSSSTGGICDSPHQILDGENCTLIDALLGDPQCDGFQNKKWDLFVERSKAYSNCYPYDVPDYASLRSLVASSGTLEFNNESFNWTGVTQNGTSSACKRRSNNSFFSRLNWLTHLKFKYPALNVTMPNNEKFDKLYIWGVHHPGTDNDQIFLYAQASGRITVSTKRSQQTVIPNIGSRPRVRNIPSRISIYWTIVKPGDILLINSTGNLIAPRGYFKIRSGKSSIMRSDAPLGKCNSECITPNGSIPNDKPFQNVNRITYGACPRYVKQNTLKLATGMRNVPEKQTRGIFGAIAGFIENGWEGMVDGWYGFRHQNSEGIGQAADLKSTQAAINQINGKLNRLIGKTNEKFHQIEKEFSEVEGRIQDLEKYVEDTKIDLWSYNAELLVALENQHTIDLTDSEMNKLFERTKKQLRENAEDMGNGCFKIYHKCDNACIGSIRNGTYDHDVYRDEALNNRFQIKGVELKSGYKDWILWISFAISCFLLCVALLGFIMWACQKGNIRCNICI

SEQ ID NO: 8091 - protein, 566 aa, synthetic construct; identical to SEQ ID NO: 2372
  REGION 1..566: note = hemagglutinin__InfluenzaA__AEX35604

SEQ ID NO: 8092 - protein, 566 aa, synthetic construct
  REGION 1..566: note = hemagglutinin__InfluenzaA__AEX35615
MKTIIALSYILCLVFAQKLPGNDNSTATLCLGHHAVPNGTIVKTITNDQIEVTNATELVQSSSTGEICDSPHQILDGENCTLIDALLGDPQCDGFQNKKWDLFVERSKAYSNCYPYDVPDYASLRSLVASSGTLEFNNESFNWTGVTQNGTSSACIRRSNNSFFSRLNWLTHLKFKYPALNVTMPNNEKFDKLYIWGVHHPGTDNDQIFLYAQASGRITVSTKRSQQTVIPNIGSRPRVRNIPSRISIYWTIVKPGDILLINSTGNLIAPRGYFKIRSGKSSIMRSDAPIGKCNSECITPNGSIPNDKPFQNVNRITYGACPRYVKQNTLKLATGMRNVPEKQTRGIFGAIAGFIENGWEGMVDGWYGFRHQNSEGIGQAADLKSTQAAIDQINGKLNRLIGKTNEKFHQIEKEFSEVEGRIQDLEKYIEDTKIDLWSYNAELLVALENQHTIDLTDSEMNKLFEKTKKQLRENAEDMGNGCFKIYHKCDNACIGSIRNGTYDHDVYRDEALNNRFQIKGVELKSGYKDWILWISFAISCFLLCVALLGFIMWACQKGNIRCNICI

SEQ ID NO: 8093 - protein, 566 aa, synthetic construct; identical to SEQ ID NO: 2434
  REGION 1..566: note = hemagglutinin__InfluenzaA__AEX35626

SEQ ID NO: 8094 - protein, 566 aa, synthetic construct
  REGION 1..566: note = hemagglutinin__InfluenzaA__AEX35637
MKTIIALSYILCLVFAQKLPGNDNSTATLCLGHHAVPNGTIVKTITNDQIEVTNATELVQSSSTGGICDSPHQILDGENCTLIDALLGDPQCDGFQNKKWDLFVERSKAYSNCYPYDVPDYASLRSLVASSGTLEFNNESFNWTGVTQNGTSSACKRGSDNSFFSKLNWLTHLKFKYPALNVTMPNNEKFDKLYIWGVHHPGTDNDQIFPYAQASGRITVSTKRSQQTVIPNIGSRPRVRNIPSRISIYWTIVKPGDILLINSTGNLIAPRGYFKIRSGKSSIMRSDAPIGKCNSECITPNGSIPNDKPFQNVNRITYGACPRYVKQNTLKLATGMRNVPEKQTRGIFGAIAGFIENGWEGMVDGWYGFRHQNSEGIGQAADLKSTQAAINQINGKLNRLIGKTNEKFHQIEKEFSEVEGRIQDLEKYVEDTKIDLWSYNAELLVALENQHTIDLTDSEMNKLFERTKKQLRENAEDMGNGCFKIYHKCDNACIGSIRNGTYDHDVYRDEALNNRFQIKGVELKSGYKDWILWISFAISCFLLCVALLGFIMWACQKGNIRCNICI

SEQ ID NO: 8095 - protein, 566 aa, synthetic construct; identical to SEQ ID NO: 2434
  REGION 1..566: note = hemagglutinin__InfluenzaA__AEX35648

SEQ ID NO: 8096 - protein, 566 aa, synthetic construct
  REGION 1..566: note = hemagglutinin__InfluenzaA__AEX36102
MKTIIALSYILCLVFAQKLPGNNNSTATLCLGHHAVPNGTIVKTITNDQIEVTNATELVQSSSTGEICDSPHQILDGENCTLIDALLGDPQCDGFQNKKWDLFVERSKAYSNCYPYDVPDYASLRSLVASSGTLEFNNESFNWTGVTQNGTSSACIRRSNNSFFSRLNWLTHLKFKYPALNVTMPNNEKFDKLYIWGVHHPGTDNDQIFLYAQASGRITVSTKRSQQTVIPNIGSRPRVRNIPSRISIYWTIVKPGDILLINSTGNLIAPRGYFKIRSGKSSIMRSDAPIGKCNSECITPNGSIPNDKPFQNVNRITYGACPRYVKQNTLKLATGMRNVPEKQTRGIFGAIAGFIENGWEGMVDGWYGFRHQNSEGIGQAADLKSTQAAIDQINGKLNRLIGKTNEKFHQIEKEFSEVEGRIQDLEKYVEDTKIDLWSYNAELLVALENQHTIDLTDSEMNKLFEKTKKQLRENAEDMGNGCFKIYHKCDNACIGSIRNGTYDHDVYRDEALNNRFQIKGVELKSGYKDWILWISFAISCFLLCVALLGFIMWACQKGNIRCNICI

SEQ ID NO: 8097 - protein, 566 aa, synthetic construct; identical to SEQ ID NO: 1915
  REGION 1..566: note = hemagglutinin__InfluenzaA__AEX36113

SEQ ID NO: 8098 - protein, 566 aa, synthetic construct; identical to SEQ ID NO: 2434
  REGION 1..566: note = hemagglutinin__InfluenzaA__AEX36124

SEQ ID NO: 8099 - protein, 566 aa, synthetic construct
  REGION 1..566: note = hemagglutinin__InfluenzaA__AEX36146
MKTIIALSYILCLVLAQKLPGDDNSTATLCLGHHAVPNGTIVKTITNDQIEVTNATELVQSSSTGEICDSPHQILDGENCTLIDALLGDPQCDGFQNKKWDLFVERSKAYSNCYPYDVPDYASLRSLVASSGTLEFNNESFNWTGVTQNGTSSACIRRSNNSFFSRLNWLTHLKFKYPALNVTMPNNEQFDKLYIWGVHHPGTDNDQIFLYAQASGRITVSTKRSQQTVIPNIGSRPRVRNIPSRISIYWTIVKPGDILLINSTGNLIAPRGYFKIRSGKSSIMRSDAPIGKCNSECITPNGSIPNDKPFQNVNRITYGACPRYVKQNTLKLATGMRNVPEKQTRGIFGAIAGFIENGWEGMVDGWYGFRHQNSEGRGQAADLKSTQAAIDQINGKLNRLIGKTNEKFHQIEKEFSEVEGRIQDLEKYVEDTKIDLWSYNAELLVALENQHTIDLTDSEMNKLFEKTKKQLRENAEDMGNGCFKIYHKCDNACIGSIRNGTYDHDVYRDEALNNRFQIKGVELKSGYKDWILWISFAISCFLLCVALLGFIMWACQKGNIRCNICI

SEQ ID NO: 8100 - protein, 566 aa, synthetic construct
  REGION 1..566: note = hemagglutinin__InfluenzaA__AEX36168
MKTIIALSYILCLVFAQKLPGIDNSTATLCLGHHAVPNGTIVKTITNDQIEVTNATELVQSSSTGGICDSPHQILDGENCTLIDALLGDPQCDGFQNKKWDLFVERSKAYSNCYPYDVPDYASLRSLVASSGTLEFNNESFNWAGVTQNGTSSACKRGSDNSFFSRLNWLTHLKFKYPALNVTMPNNEEFDKLYIWGVHHPGTDNDQIFLYAQASGRITVSTKRSQQTVIPNIGSRPRVRNIPSRISIYWTIVKPGDILLINSTGNLIAPRGYFKIRSGKSSIMRSDAPIGKCNSECITPNGSIPNDKPFQNVNRITYGACPRYVKQNTLKLATGMRNVPEKQTRGIFGAIAGFIENGWEGMVDGWYGFRHQNSEGIGQAADLKSTQAAIDQINGKLNKLIGKTNEKFHQIEKEFSEVEGRIQDLEKYVEDTKIDLWSYNAELLVALENQHTIDLTDSEMNKLFEKTKKQLRENAEDMGNGCFKIYHKCDNACIGSIRNGTYDHDVYRDEALNNRFKIKGVELKSGYKDWILWISFAISCFLLCVALLGFIMWACQKGNIKCNICI

SEQ ID NO: 8101 - protein, 566 aa, synthetic construct; identical to SEQ ID NO: 2434
  REGION 1..566: note = hemagglutinin__InfluenzaA__AEX36179

SEQ ID NO: 8102 - protein, 566 aa, synthetic construct; identical to SEQ ID NO: 7983
  REGION 1..566: note = hemagglutinin__InfluenzaA__AEX36190

SEQ ID NO: 8103 - protein, 566 aa, synthetic construct; identical to SEQ ID NO: 7978
  REGION 1..566: note = hemagglutinin__InfluenzaA__AEX36201

SEQ ID NO: 8104 - protein, 566 aa, synthetic construct
  REGION 1..566: note = hemagglutinin__InfluenzaA__AEX36212
MKTIIALSYILCLVFAQKLPGIDNSTATLCLGHHAVPNGTIVKTITNDQIEVTNATELVQNSSTGGICDSPHQILDGENCTLIDALLGDPQCDGFQNKKWDLFVERSKAYSNCYPYDVPDYASLRSLVASSGTLEFNNESFNWTGVTQNGTSSACKRGSNNSFFSRLNWLTHSKFKYPALNVTMPNNEEFDKLYIWGVHHPGTDNDQIFLYAQASGRITVSTKISQQTVIPNIGSRPRVRNIPSRISIYWTIVKPGDILLINSTGNLIAPRGYFKIRSGKSSIMRSDAPIGKCNSECITPNGSIPNDKPFQNVNRITYGACPRYVKQNTLKLATGMRNVPEKQTRGIFGAIAGFIENGWEGMVDGWYGFRHQNSEGIGQAADLKSTQAAIDQINGKLNRLIGKTNEKFHQIEKEFSEVEGRIQDLEKYVEDTKIDLWSYNAELLVALENQHTIDLTDSEMNKLFEKTKKQLRENAEDMGNGCFKIYHKCDNACIGSIRNGTYDHDVYRDEALNNRFQIKGVELKSGYKDWILWISFAISCFLLCVALLGFIMWACQKGNIRCNICI

SEQ ID NO: 8105 - protein, 566 aa, synthetic construct; identical to SEQ ID NO: 7978
  REGION 1..566: note = hemagglutinin__InfluenzaA__AEX36223

SEQ ID NO: 8106 - protein, 566 aa, synthetic construct
  REGION 1..566: note = hemagglutinin__InfluenzaA__AEX36234
MKTIIALSYILCLVFAQKLPGNDNSTATLCLGHHAVPNGTIVKTITNDQIEVTNATELVQSSSTGGICDSPHQILDGENCTLIDALLGDPQCDGFQNKKWDLFVERSKAYSNCYPYDVPDYASLRSLVASSGTLEFNNESFNWTGVTQNGTSSACKRGSDNSFFSKLNWLTHLKFKYPALNVTMPNNEKFDKLYIWGVHHPGTDNDQIFLYAQASGRITVSTKRSQQTVIPNIGSRPRVRNIPSRISIYWTIVKPGDILLINSTGNLIAPRGYFKIRSGKSSIMRSDAPIGKCNSECITPNGSIPNDKPFQNVNRITYGACPRYVKQNTLKLATGMRNVPEKQTRGIFGAIAGFIENGWEGMVDGWYGFRHQNSEGIGQAADLKSTQAAINQINGKLNRLIGKTNEKFHQIEKEFSEVEGRIQDLEKYVEDTKIDLWSYNAELLVALENQHTIDLTDSEMNKLFERTKKQLRENAEDMGNGCLKIYHKCDNACIGSIRNGTYDHDVYRDEALNNRFQIKGVELKSGYKDWILWISFAISCFLLCVALLGFIMWACQKGNIRCNICI

SEQ ID NO: 8107 - protein, 566 aa, synthetic construct
  REGION 1..566: note = hemagglutinin__InfluenzaA__AEX36245
MKTIIALSYILCLVFAQKLPGIDNSTATLCLGHHAVPNGTIVKTITNDQIEVTNATELVQNSSTGGICDSPHQILDGENCTLIDALLGDPQCDGFQNKKWDLFVERSKTYSNCYPYDVPDYASLRSLVASSGTLEFNNESFNWTGVTQNGTSSACKRGSNNSFFSRLNWLTHSKFKYPALNVTMPNNEEFDKLYIWGVHHPGTDNDQIFLYAQASGRITVSTKRSQQTVIPNIGSRPRVRNIPSRISIYWTIVKPGDILLINSTGNLIAPRGYFKIRSGKSSIMRSDAPIGKCNSECITPNGSIPNDKPFQNVNRITYGACPRYVKQNTLKLATGMRNVPEKQTRGIFGAIAGFIENGWEGMVDGWYGFRHQNSEGIGQAADLKSTQAAIDQINGKLNRLIGKTNEKFHQIEKEFSEVEGRIQDLEKYVEDTKIDLWSYNAELLVALENQHTIDLTDSEMNKLFEKTKKQLRENAEDMGNGCFKIYHKCDNACIGSIRNGTYDHDVYRDEALNNRFQIKGVELKSGYKDWILWISFAISCFLLCVALLGFIMWACQKGNIRCNICI

SEQ ID NO: 8108 - protein, 566 aa, synthetic construct
  REGION 1..566: note = hemagglutinin__InfluenzaA__AEX36256
MKTIIALSYILCLVFTQKLPGNDNSTATLCLGHHAVPNGTIVKTITNDQIEVTNATELVQSSSTGEICDSPHQILDGENCTLIDALLGDPQCDGFQNKKWDLFVERSKAYSNCYPYDVPDYASLRSLVASSGTLEFNNESFNWTGVTQNGTSSACIRKSNNSFFSRLNWLTHLKFKYPALNVTMPNNEQFDKLYIWGVHHPGTDNDQIFLYAQASGRITVSTKRSQQTVIPNIGSRPRVRNIPSRISIYWTIVKPGDILLINSTGNLIAPRGYFKIRSGKSSIMRSDAPIGKCNSECITPNGSIPNDKPFQNVNRITYGACPRYVKQNTLKLATGMRNVPEKQTRGIFGAIAGFIENGWEGMVDGWYGFRHQNSEGRGQAADLKSTQAAIDQINGKLNRLIGKTNEKFHQIEKEFSEVEGRIQDLEKYVEDTKIDLWSYNAELLVALENQHTIDLTDSEMNKLFEKTKKQLRENAEDMGNGCFKIYHKCDNACIGSIRNGTYDHDVYRDEALNNRFQIKGVELKSGYKDWILWISFAISCFLLCVALLGFIMWACQKGNIRCNICI

SEQ ID NO: 8109 - protein, 566 aa, synthetic construct; identical to SEQ ID NO: 7978
  REGION 1..566: note = hemagglutinin__InfluenzaA__AEX36267

SEQ ID NO: 8110 - protein, 566 aa, synthetic construct
  REGION 1..566: note = hemagglutinin__InfluenzaA__AEX36289
MKTIIALSYILCLVFAQKLPGIDNSTATLCLGHHAVPNGTIVKTITNDQIEVTNATELVQNSSTGGICDSPHQILDGENCTLIDALLGDPQCDGFQNKKWDLFVERSKAYSNCYPYDVPDYASLRSLVASSGTLEFNNESFNWTGVTQNGTSSACKRGSNNSFFSRLNWLTHSKFKYPALNVTMPNNEEFDKLYIWGVHHPGTDNDQIFLYAQASGRITVSTKISQQTVIPNIGSRPRVRNIPSRISIYWTIVKPGDILLINSTGNLIAPRGYFKIRSGKSSIMRSDAPIGKCNSECITPNGSIPNDKPFQNVNRITYGACPRYVKQNTLKLATGMRNVPEKQTRGIFGAIAGFIENGWEGMVDGWYGYRHQNSEGIGQAADLKSTQAAIDQINGKLNRLIGKTNEKFHQIEKEFSEVEGRIQDLEKYVEDTKIDLWSYNAELLVALENQHTIDLTDSEMNKLFEKTKKQLRENAEDMGNGCFKIYHKCDNACIGSIRNGTYDHDVYRDEALNNRFQIKGVELKLGYKDWILWISFAISCFLLCVALLGFIMWACQKGNIRCNICI

SEQ ID NO: 8111 - protein, 566 aa, synthetic construct
  REGION 1..566: note = hemagglutinin__InfluenzaA__AEX36300
MKTIIALSYILCLVFAQKLPGIDNSTATLCLGHHAVPNGTIVKTITNDQIEVTNATELVQNSSTGGICDSPHQILDGENCTLIDALLGDPQCDGFQNKKWDLFVERSKAYSNCYPYDVPDYASLRSLVASSGTLEFSNESFNWTGVTQNGTSSACKRGSNNSFFSKLNWLTHSKFKYPALNVTMPNNEEFDKLYIWGVHHPGTDNDQIFLYAQASGRITVSTKRSQQTVIPNIGSRPRVRNIPSRISIYWTIVKPGDILLINSTGNLIAPRGYFKIRSGKSSIMRSDAPIGKCNSECITPNGSIPNDKPFQNVNRITYGACPRYVKQNTLKLATGMRNVPEKQTRGIFGAIAGFIENGWEGMVDGWYGFRHQNSEGIGQAADLKSTQAAIDQINGKLNRLIGKTNEKFHQIEKEFSEVEGRIQDLEKYVEDTKIDLWSYNAELLVALENQHTIDLTDSEMNKLFEKTKKQLRENAEDMGNGCFKIYHKCDNACIGSIRNGTYDHDVYRDEALNNRFQIKGVELKSGYKDWILWISFAISCFLLCVALLGFIMWACQKGNIRCNICI

SEQ ID NO: 8112 - protein, 566 aa, synthetic construct
  REGION 1..566: note = hemagglutinin__InfluenzaA__AEX36311
MKTIIALSYILCLVFAQKLPGIDNSTATLCLGHHAVPNGTIVKTITNDQIEVTNATELVQSSSTGGICDSPHQILDGENCTLIDALLGDPQCDGFQNKKWDLFVERSKAYSNCYPYDVPDYASLRSLVASSGTLEFNNESFNWAGVTQNGTSSACKRGSNNSFFSRLNWLTHLKFKYPALNVTMPNNEEFDKLYIWGVHHPGTDNDQIFLYAQASGRITVSTKRSQQTVIPNIGSRPRVRNIPSRISIYWTIVKPGDILLINSTGNLIAPRGYFKIRSGKSSIMRSDAPIGKCNSECITPNGSIPNDKPFQNVNRITYGACPRYVKQNTLKLATGMRNVPEKQTRGIFGAIAGFIENGWEGMVDGWYGFRHQNSEGIGQAADLKSTQAAIDQINGKLNRLIGKTNEKFHQIEKEFSEVEGRIQDLEKYVEDTKIDLWSYNAELLVALENQHTIDLTDSEMNKLFEKTKKQLRENAEDMGNGCFKIYHKCDNACIGSIRNGTYDHDVYRDEALNNRFQIKGVELKSGYKDWILWISFAISCFLLCVALLGFIMWACQKGNIRCNICI

SEQ ID NO: 8113 - protein, 566 aa, synthetic construct
  REGION 1..566: note = hemagglutinin__InfluenzaA__AEX36322
MKTIIALSYILCLVFAQKLPGIDNSTATLCLGHHAVPNGTIVKTITNDQIEVTNATELVQNSSTGGICDSPHQILDGENCTLIDALLGDPQCDGFQNKKWDLFVERSKAYSNCYPYDVPDYASLRSLVASSGTLEFNNESFNWTGVTQNGTSSACKRGSNNSFFSRLNWLTHSKFKYPALNVTMPNNEEFDKLYIWGVHHPGTDNDQIFPYAQASGRITVSTKISQQTVIPNIGSRPRVRNIPSRISIYWTIVKPGDILLINSTGNLIAPRGYFKIRSGKSSIMRSDAPIGKCNSECITPNGSIPNDKPFQNVNRITYGACPRYVKQNTLKLATGMRNVPEKQTRGIFGAIAGFIENGWEGMVDGWYGFRHQNSEGIGQAADLKSTQAAIDQINGKLNRLIGKTNEKFHQIEKEFSEVEGRIQDLEKYVEDTKIDLWSYNAELLVALENQHTIDLTDSEMNKLFEKTKKQLRENAEDMGNGCFKIYHKCDNACIGSIRNGTYDHDVYRDEALNNRFQIKGVELKSGYKDWILWISFAISCFLLCIALLGFIMWACQKGNIRCNICI

SEQ ID NO: 8114 - protein, 566 aa, synthetic construct
  REGION 1..566: note = hemagglutinin__InfluenzaA__AEX36333
MKTIIALSYILCLVFAQKLPGIDNSTATLCLGHHAVPNGTIVKTITNDQIEVTNATELVQNSSTGGICDSPHQILDGENCTLIDALLGDPQCDGFQNKKWDLFVERSKAYSNCYPYDVPDYASLRSLVASSGTLEFNNESFNWTGVTQNGTSSACKRGSNNSFFSRLNWLTHSKFKYPALNVTMPNNEEFDKLYIWGVHHPGTDNDQIFLYAQASGRITVSTKRSQQTVIPNIGSRPRVRNIPSRISIYWTIVKPGDILLINSTGNLIAPRGYFKIRSGKSSIMRSDAPIGKCNSECITPNGSIPNDKPFQNVNRITYGACPRYVKQNTLKLATGMRNVPEKQTRGIFGAIAGFIENGWEGMVDGWYGFRHQNSEGIGQAADLKSTQAAIDQINGKLNRLIGKTNEKFHQIEKEFSEVEGRIQDLEKYVEDTKIDLWSYNAELLVALENQHTIDLTDSEMNKLFEKTKKQLRENAEDMGNGCFKIYHKCDNACIGSIRNGTYDHDAYRDEALNNRFQIKGVELKSGYKDWILWISFAISCFLLCVALLGFIMWACQKGNIRCNICI

SEQ ID NO: 8115 - protein, 566 aa, synthetic construct
  REGION 1..566: note = hemagglutinin__InfluenzaA__AEX36344
MKTIIALSYILCLVFAQKLPGIDNSTATLCLGHHAVPNGTIVKTITNDQIEVTNATELVQSSSTGGICDSPHQILDGENCTLIDALLGDPQCDGFQNKKWDLFVERSNAYSNCYPYDVPDYASLRSLVASSGTLEFNNESFNWAGVTQNGTSSACKRGSNNSFFSRLNWLTHLKFKYPALNVTMPNNEEFDKLYIWGVHHPGTDNDQIFLYAQASGRITVSTKRSQQTVIPNIGSRPRVRNIPSRISIYWTIVKPGDILLINSTGNLIAPRGYFKIRSGKSSIMRSDAPIGKCNSECITPNGSIPNDKPFQNVNRITYGACPRYVKQNTLKLATGMRNVPEKQTRGIFGAIAGFIENGWEGMVDGWYGFRHQNSEGIGQAADLKSTQAAIDQINGKLNRLIGKTNEKFHQIEKEFSEVEGRIQDLEKYVEDTKIDLWSYNAELLVALENQHTIDLTDSEMNKLFEKTKKQLRENAEDMGNGCFKIYHKCDNACIESIRNGTYDHDVYRDEALNNRFQIKGVELKSGYKDWILWISFAISCFLLCVALLGFIMWACQKGNIRCNICI

SEQ ID NO: 8116 - protein, 566 aa, synthetic construct
  REGION 1..566: note = hemagglutinin__InfluenzaA__AEX36366
MKTIIALSYILCLVFAQKLSGNDNSTATLCLGHHAVPNGTIVKTITNDQIEVTNATELVQSSSTGEICDSPHQILDGENCTLIDALLGDPQCDGFQNKKWDLFVERSKAYSNCYPYDVPDYASLRSLVASSGTLEFNNESFNWTGVTQNGTSSACIRRSNNSFFSRLNWLTHLKFKYPALNVTMPNNEKFDKLYIWGVHHPGTDNDQIFLYAQASGRITVSTKRSQQTVIPNIGSRPRVRNIPSRISIYWTIVKPGDILLINSTGNLIAPRGYFKIRSGKSSIMRSDAPIGKCNSECITPNGSIPNDKPFQNVNRITYGACPRYVKQNTLKLATGMRNVPEKQTRGIFGAIAGFIENGWEGMVDGWYGFRHQNSEGIGQAADLKSTQAAIDQINGKLNRLIGKTNEKFHQIEKEFSEVEGRIQDLEKYVEDTKIDLWSYNAELLVALENQHTIDLTDSEMNKLFEKTKKQLRENAEDMGNGCFKIYHKCDNACIGSIRNGTYDHDVYRDEALNNRFQIKGVELKSGYKDWILWISFAISCFLLCVALLGFIMWACQKGNIRCNICI

SEQ ID NO: 8117 - protein, 566 aa, synthetic construct; identical to SEQ ID NO: 1928
  REGION 1..566: note = hemagglutinin__InfluenzaA__AEX36377

SEQ ID NO: 8118 - protein, 566 aa, synthetic construct
  REGION 1..566: note = hemagglutinin__InfluenzaA__AEX36388
MKTIIALSYILCLVFAQKLPGNDNSTATLCLGHHAVPNGTIVKTITNDQIEVTNATELVQSSSTGEICDSPHQILDGENCTLIDALLGDPQCDGFQNKKWDLFVERSKAYSNCYPYDVPDYASLRSLVASSGTLEFNNESFNWTGVTQNGTSSACIRRSNNSFFSRLNWLTHLKFKYPALNVTMPNNEKFDKLYIWGVHHPGTDNDQIFLYAQASGRITVSTKRSQQTVIPNIGSRPRVRNIPSRISIYWTIVKPGDILLINSTGNLIAPRGYFKIRSGKSSIMRSDAPIGKCNSECITPNGSIPNDKPFQNVNRITYGACPRYVKQNTLKLATGMRNVPEKQTRGIFGAIAGFIENGWEGMMDGWYGFRHQNSEGIGQAADLKSTQAAIDQINGKLNRLIGKTNEKFHQIEKEFSEVEGRIQDLEKYVEDTKIDLWSYNAELLVALENQHTIDLTDSEMNKLFEKTKKQLRENAEDMGNGCFKIYHKCDNACIGSIRNGTYDHDVYRDEALNNRFQIKGVELKSGYKDWILWISFAISCFLLCVALLGFIMWACQKGNIRCNICI

SEQ ID NO: 8119 - protein, 566 aa, synthetic construct
  REGION 1..566: note = hemagglutinin__InfluenzaA__AEX36399
MKTIIALSYILCLVFAQKLPGNDNSTATLCLGHHAVPNGTIVKTITNDQTEVTNATELVQSSSTGEICDSPHQILDGENCTLIDALLGDPQCDGFQNKKWDLFVERSKAYSNCYPYDVPDYASLRSLVASSGTLEFNNESFNWTGVTQNGTSSACIRRSNNSFFSRLNWLTHLKFKYPALNVTMPNNEKFDKLYIWGVHHPGTDNDQIFLYAQASGRITVSTKRSQQTVIPNIGSRPRVRNIPSRISIYWTIVKPGDILLINSTGNLIAPRGYFKIRSGKSSIMRSDAPIGKCNSECITPNGSIPNDKPFQNVNRITYGACPRYVKQNTLKLATGMRNVPEKQTRGIFGAIAGFIENGWEGMVDGWYGFRHQNSEGIGQAADLKSTQAAIDQINGKLNRLIGKTNEKFHQIEKEFSEVEGRIQDLEKYVEDTKIDLWSYNAELLVALENQHTIDLTDSEMNKLFEKTKKQLRENAEDMGNGCFKIYHKCDNACIGSIRNGTYDHDVYRDEALNNRFQIKGVELKSGYKDWILWISFAISCFLLCVALLGFIMWACQKGNIRCNICI

SEQ ID NO: 8120 - protein, 566 aa, synthetic construct
  REGION 1..566: note = hemagglutinin__InfluenzaA__AEX36410
MKTIIALSYILCLVFAQKLPGNDNSTATLCLGHHAVPNGTIVKTITNDQIEVTNATELVQNSSTGEICDSPHQILDGENCTLIDALLGDPQCDGFQNKKWDLFVERSKAYSNCYPYDVPDYASLRSLVASSGTLEFNNESFNWTGVTQNGTSSACIRRSNNSFFSRLNWLTHLKFKYPALNVTMPNNEKFDKLYIWGVHHPGTDNDQIFLYAQASGRITVSTKRSQQTVIPNIGSRPRVRNIPSRISIYWTIVKPGDILLINSTGNLIAPRGYFKIRSGKSSIMRSDAPIGKCNSECITPNGSIPNDKPFQNVNRITYGACPRYVKQNTLKLATGMRNVPEKQTRGIFGAIAGFIENGWEGMVDGWYGFRHQNSEGIGQAADLKSTQAAIDQINGKLNRLIGKTNEKFHQIEKEFSEVEGRIQDLEKYVEDTKIDLWSYNAELLVALENQHTIDLTDSEMNKLFEKTKKQLRENAEDMGNGCFKIYHKCDNACIGSIRNGTYDHDVYRDEALNNRFQIKGVELKSGYKDWILWISFAISCFLLCVALLGFIMWACQKGNIRCNICI

SEQ ID NO: 8121 - protein, 566 aa, synthetic construct; identical to SEQ ID NO: 2434
  REGION 1..566: note = hemagglutinin__InfluenzaA__AEX36421

SEQ ID NO: 8122 - protein, 566 aa, synthetic construct
  REGION 1..566: note = hemagglutinin__InfluenzaA__AEX36432
MKTIIALSYILCLVFAQKLPGNDNSTATLCLGHHAVPNGTIVKTITNDQIEVTNATELVQSSSTGEICDSPHQVLDGENCTLIDALLGDPQCDGFQNKKWDLFVERSKAYSNCYPYDVPDYASLRSLVASSGTLEFNNESFNWTGVTQNGTSSACIRRSNNSFFSRLNWLTHLKFKYPALNVTMPNNEQFDKLYIWGVHHPGTDNDQIFLYAQASGRITVSTKRSQQTVIPNIGSRPRVRNIPSRISIYWTIVKPGDILLINSTGNLIAPRGYFKIRSGKSSIMRSDAPIGKCNSECITPNGSIPNDKPFQNVNRITYGACPRYVKQNTLKLATGMRNVPEKQTRGIFGAIAGFIENGWEGMVDGWYGFRHQNSEGRGQAADLKSTQAAIDQINGKLNRLIGKTNEKFHQIEKEFSEVEGRIQDLEKYVEDTKIDLWSYNAELLVALENQHTIDLTDSEMNKLFEKTKKQLRENAEDMGNGCFKIYHKCDNACIGSIRNGTYDHDVYRDEALNNRFQIKGVELKSGYKDWILWISFAISCFLLCVALLGFIMWACQKGNIRCNICI

SEQ ID NO: 8123 - protein, 566 aa, synthetic construct
  REGION 1..566: note = hemagglutinin__InfluenzaA__AEX36443
MKTIIALSYILCLVFAQKLPGNDNSTATLCLGHHAVPNGTIVKTITNDQIEVTNATELVQSSSTGEICNSPHQILDGENCTLIDALLGDPQCDGFQNKKWDLFVERSKAYSNCYPYDVPDYASLRSLVASSGTLEFNNESFNWTGVTQNGTSSACIRRSNNSFFSRLNWLTHLKFKYPALNVTMPNNEEFDKLYIWGVHHPGTDNDQIFLYAQASGRITVSTKRSQQTVIPNIGSRPRVRNIPSRISIYWTIVKPGDILLINSTGNLIAPRGYFKIRSGKSSIMRSDAPIGKCNSECITPNGSIPNDKPFQNVNRITYGACPRYVKQNTLKLATGMRNVPEKQTRGIFGAIAGFIENGWEGMVDGWYGFRHQNSEGIGQAADLKSTQAAIDQINGKLNRLIGKTNEKFHQIEKEFSEVEGRIQDLEKYVEDTKIDLWSYNAELLVALENQHTIDLTDSEMNKLFEKTKKQLRENAEDMGNGCFKIYHKCDNACIGSIRNGTYDHDVYRDEALNNRFQIKGVELKSGYKDWILWISFAISCFLLCVALLGFIMWACQKGNIRCNICI

SEQ ID NO: 8124 - protein, 566 aa, synthetic construct
  REGION 1..566: note = hemagglutinin__InfluenzaA__AEX36454
MKTIIALSYILCLVFAQKLPGNDNSTATLCLGHHAVPNGTIVKTITNDQIEVTNATELVQSSSTGEICNSPHQILDGENCTLIDALLGDPQCDGFQNKKWDLFVERSKAYSNCYPYDVPDYASLRSLVASSGTLEFNNESFNWTGVTQNGTSSACIRRSNNSFFSRLNWLTHLKFKYPALNVTMPNNEEFDKLYIWGVHHPGTDNDQIFLYAQASGRITVSTKRSQQTVIPNIGSRPRVRNIPSRISIYWTIVKPGDILLINSTGNLIAPRGYFKIRSGKSSIMRSDAPIGKCNSECITPNGSIPNDKPFQNVNRITYGACPRYVKQNTLKLATGMRNVPEKQTRGIFGAIAGFIENGWEGMVDGWYGFRHQNSEGIGQAADLKSTQAAIDQINGKLNRLIGKTNEKFHQIEKEFSEVEGRIQDLEKYVEDTKIDLWSYNAELLVALENQHTIDLTDSEMNKLFEKTKKQLRENAEDMGNGCFKIYHKCDNACIGSIRNGTYDHDVYRDEALNNRFQIKGVELKSGYKDWILWISFAISCFLLCVVLLGFIMWACQKGNIRCNICI

SEQ ID NO: 8125 - protein, 566 aa, synthetic construct; identical to SEQ ID NO: 1729
  REGION 1..566: note = hemagglutinin__InfluenzaA__AEX36465

SEQ ID NO: 8126 - protein, 566 aa, synthetic construct
  REGION 1..566: note = hemagglutinin__InfluenzaA__AEX36476
MKTIIALSYILCLVFAQKLPGIDNSTATLCLGHHAVPNGTIVKTITNDQIEVTNATELVQSSSTGGICDSPHQILDGENCTLIDALLGDPQCDGFQNKKWDLFVERSKAYSNCYPYDVPDYASLRSLVASSGTLEFNNESFNWTGVTQNGTSSACKRGSNNSFFSRLNWLTHSKFKYPALNVTMPNNEEFDKLYIWGVHHPGTDNDQIFPYAQASGRITVSTKRSQQTVIPNIGSRPRIRNIPSRISIYWTIVKPGDILLINSTGNLIAPRGYFKIRSGKSSIMRSDAPIGKCDSECITPNGSIPNDKPFQNVNRITYGACPRYVKQNTLKLATGMRNVPEKQTRGIFGAIAGFIENGWEGMVDGWYGFRHQNSEGIGQAADLKSTQAAIDQINGKLNRLIGKTNEKFHQIEKEFSEVEGRIQDLEKYVEDTKIDLWSYNAELLVALENQHTIDLTDSEMNKLFEKTKKQLRENAEDMGNGCFKIYHKCDNACIGSIRNGTYDHDVYRDEALNNRFQIKGVELKSGYKDWILWISFAISCFLLCVALLGFIMWACQKGNIRCNICI

SEQ ID NO: 8127 - protein, 566 aa, synthetic construct
  REGION 1..566: note = hemagglutinin__InfluenzaA__AEX36487
MKTIIALSYILCLVFAQKLPGIDNSTATLCLGHHAVPNGTIVKTITNDQIEVTNATELVQSSSTGGICDSPHQILDGENCTLIDALLGDPQCDGFQNKKWDLFVERSKAYSNCYPYDVPDYASLRSLVASSGTLEFNNESFNWTGVTQNGTSSACKRGSNNSFFSRLNWLTHSKFKYPALNVTMPNNEEFDKLYIWGVLHPGTDNDQIFLYAQASGRITVSTKRSQQTVIPNIGSRPRVRNIPSRISIYWTIVKPGDILLINSTGNLIAPRGYFKIRSGKSSIMRSDAPIGKCNSECITPNGSIPNDKPFQNVNRITYGACPRYVKQNTLKLATGMRNVPEKQTRGIFGAIAGFIENGWEGMVDGWYGFRHQNSEGIGQAADLKSTQAAIDQINGKLNRLIGKTNEKFHQIEKEFSEVEGRIQDLEKYVEDTKIDLWSYNAELLVALENQHTIDLTDSEMNKLFEKTKKQLRENAEDMGNGCFKIYHKCDNACIGSIRNGTYDHDVYRDEALNNRFQIKGVELKSGYKDWILWISFAISCFLLCVALLGFIMWACQKGNIRCNICI

SEQ ID NO: 8128 - protein, 566 aa, synthetic construct; identical to SEQ ID NO: 7978
  REGION 1..566: note = hemagglutinin__InfluenzaA__AEX36498

SEQ ID NO: 8129 - protein, 566 aa, synthetic construct
  REGION 1..566: note = hemagglutinin__InfluenzaA__AEX36509
MKTIIALSYILCLVFAQKLPGIDNSTATLCLGHHAVPNGTIVKTITNDQIEVTNATELVQNSSTGGICDSPHQILDGENCTLIDALLGDPQCDGFQNKKWDLFVERSKAYSNCYPYDVPDYASLRSLVASSGTLEFNNESFNWTGVTQNGTSSACKRGSNNSFFSRLNWLTHSKFKYPALNVTMPNNEEFDKLYIWGVHHPGTDNDQIFPYAQASGRITVSTKRSQQTVIPNIGSRPRVRNIPSRISIYWTIVKPGDILLINSTGNLIAPRGYFKIRSGKSSIMRSDAPIGKCNSECITPNGSIPNDKPFQNVNRITYGACPRYVKQNTLKLATGMRNVPEKQTRGIFGAIAGFIENGWEGMVDGWYGFRHQNSEGIGQAADLKSTQAAIDQINGKLNRLIGKTNEKFHQIEKEFSEVEGRIQDLEKYVEDTKIDLWSYNAELLVALENQHTIDLTDSEMNKLFEKTKKQLRENAEDMGNGCFKIYHKCDNACIGSIRNGTYDHDVYRDEALNNRFQIKGVELKSGYKDWILWISFAISCFLLCVALLGFIMWACQKGNIRCNICI

SEQ ID NO: 8130 - protein, 566 aa, synthetic construct
  REGION 1..566: note = hemagglutinin__InfluenzaA__AEX36520
MKTIIALSYILCLVFAQKLPGNDNSTATLCLGHHAVPNGTIVKTITNDQIEVTNATELVQSSSTGEICDSPHQILDGENCTLIDALLGDPQCDGFQNKKWDLFVERSKAYSNCYPYDVPDYASLRSLVASSGTLEFNNESFNWTGVTQNGTSSACIRRSNNSFFSRLNWLTHLKFKYPALNVTMPNNEQFDKLYIWGVHHPGTDNDQIFLYAQASGRITVSTKRSQQTVIPNIGSRPRVRNIPSRISIYWTIVKPGDILLINSTGNLIAPRGYFKIRSGKSSIMRSDAPIGKCNSECITPNGSIPNDKPFQNVNRITYGACPRYVKQNTLKLATGMRNVPEKQTRGIFGAIAGFIENGWEGMVDGWYGFRHQNSEGRGQAADLKSTQAAIDQINGKLNRLIGKTNEKFHQIEKEFSEVEGRIQDLEKYVEDTKIDLWSYNAELLVALENQHTIDLTDSEMNKLFEKTKKQLRENAEDMGNGCFKIYHKCDNACIGSIRNGTYDHNVYRDEALNNRFQIKGVELKSGYKDWILWISFAISCFLLCVALLGFIMWACQKGNIRCNICI

SEQ ID NO: 8131 - protein, 566 aa, synthetic construct
  REGION 1..566: note = hemagglutinin__InfluenzaA__AEX36531
MKTIIALSYILCLVFAQKLPGNDNSTATLCLGHHAVPNGTIVKTITNDQIEVTNATELVQSSSTGEICDSPHQILDGENCTLIDALLGDPQCDGFQNKKWDLFVERSKAYSNCYPYDVPDYASLRSLVASSGTLEFNNESFNWTGVTQNGTSSACIRRSNNSFFSRLNWLTHLKFKYPALNVTMPNNEQFDKLYIWGVHHPGTDNDQIFLYAQASGRITVSTKRSQQTVIPNIGSRPRVRNIPSRISIYWTIVKPGDILLINSTGNLIAPRGYFKIRSGKSSIMRSDAPIGKCNSECITPNGSIPNDKPFQNVNRITYGACPRYVKQNTLKLATGMRNVPEKQTRGIFGAIAGFIENGWEGMVDGWYGFRHQNSEGRGQAADLKSTQAAIDQINGKLNRLIGKTNEKFHQIEKEFSEVEGRIQDLDKYVEDTKIDLWSYNAELLVALENQHTIDLTDSEMNKLFEKTKKQLRENAEDMGNGCFKIYHKCDNACIGSIRNGTYDHDVYRDEALNNRFQIKGVELKSGYKDWILWISFAISCFLLCVALLGFIMWACQKGNIRCNICI

SEQ ID NO: 8132 - protein, 566 aa, synthetic construct
  REGION 1..566: note = hemagglutinin__InfluenzaA__AEX36542
MKTIIALSYILCLVFAQKLPGNDNSTATLCLGHHAVPNGTIVKTITNDQIEVTNATELVQNSSTGEICDSPHQILDGENCTLIDALLGDPQCDGFQNKKWDLFVERSKAYSNCYPYDVPDYASLRSLVASSGTLEFNNESFNWTGVTQNGTSSACIRRSNNSFFSRLNWLTHLKFKYPALNVTMPNNEQFDKLYIWGVHHPGTDNDQIFLYAQASGRITVSTKRSQQTVIPNIGSRPRVRNIPSRISIYWTIVKPGDILLINSTGNLIAPRGYFKIRSGKSSIMRSDAPIGKCNSECITPNGSIPNDKPFQNVNRITYGACPRYVKQNTLKLATGMRNVPEKQTRGIFGAIAGFIENGWEGMVDGWYGFRHQNSEGRGQAADLKSTQAAIDQINGKLNRLIGKTNEKFHQIEKEFSEVEGRIQDLEKYVEDTKIDLWSYNAELLVALENQHTIDLTDSEMNKLFEKTKKQLRENAEDMGNGCFKIYHKCDNACIGSIRNGTYDHDVYRDEALNNRFQIKGVELKSGYKDWILWISFAISCFLLCVALLGFIMWACQKGNIRCNICI

SEQ ID NO: 8133 - protein, 566 aa, synthetic construct; identical to SEQ ID NO: 8132
  REGION 1..566: note = hemagglutinin__InfluenzaA__AEX36553

SEQ ID NO: 8134 - protein, 566 aa, synthetic construct; identical to SEQ ID NO: 8132
  REGION 1..566: note = hemagglutinin__InfluenzaA__AEX36564

SEQ ID NO: 8135 - protein, 566 aa, synthetic construct
  REGION 1..566: note = hemagglutinin__InfluenzaA__AEX36575
MKTIIALSYILCLVFAQKLPGNGNSTATLCLGHHAVPNGTIVKTITNDQIEVTNATELVQSSSTGEICDSPHQILDGENCTLIDALLGDPQCDGFQNKKWDLFVERSKAYSNCYPYDVPDYASLRSLVASSGTLEFNNESFNWTGVTQNGTSSACIRRSNNSFFSRLNWLTHLKFKYPALNVTMPNNEQFDKLYIWGVHHPGTDNDQIFLYAQASGRITVSTKRSQQTVIPNIGSRPRVRNIPSRISIYWTIVKPGDILLINSTGNLIAPRGYFKIRSGKSSIMRSDAPIGKCNSECITPNGSIPNDKPFQNVNRITYGACPRYVKQNTLKLATGMRNVPEKQTRGIFGAIAGFIENGWEGMVDGWYGFRHQNSEGRGQAADLKSTQAAIDQINGKLNRLIGKTNEKFHQIEKEFSEVEGRIQDLEKYVEDTKIDIWSYNAELLVALENQHTIDLTDSEMNKLFEKTKKQLRENAEDMGNGCFKIYHKCDNACIGSIRNGTYDHDVYRDEALNNRFQIKGVELKSGYKDWILWISFAISCFLLCVALLGFIMWACQKGNIRCNICI

SEQ ID NO: 8136 - protein, 566 aa, synthetic construct
  REGION 1..566: note = hemagglutinin__InfluenzaA__AEX36586
MKTIIALSYILCLVFAQKLPGNDNNTATLCLGHHAVPNGTIVKTITNDQIEVTNATELVQSSSTGEICDSPHQILDGENCTLIDALLGDPQCDGFQNKKWDLFVERSKAYSNCYPYDVPDYASLRSLVASSGTLEFNNESFNWTGVTQNGTSSACIRRSNNSFFSRLNWLTHLKFKYPALNVTMPNNEQFDKLYIWGVHHPGTDNDQIFLYAQASGRITVSTKRSQQTVIPNIGSRPRVRNIPSRISIYWTIVKPGDILLINSTGNLIAPRGYFKIRSGKSSIMRSDAPIGKCNSECITPNGSIPNDKPFQNVNRITYGACPRYVKQNTLKLATGMRNVPEKQTRGIFGAIAGFIENGWEGMVDGWYGFRHQNSEGRGQAADLKSTQAAIDQINGKLNRLIGKTNEKFHQIEKEFSEVEGRIQDLEKYVEDTKIDLWSYNAELLVALENQHTIDLTDSEMNKLFEKTKKQLRENAEDMGNGCFKIYHKCDNACIGSIRNGTYDHDVYRDEALNNRFQIKGVELKSGYKDWILWISFAISCFLLCVALLGFIMWACQKGNIRCNICI

SEQ ID NO: 8137 - protein, 566 aa, synthetic construct
  REGION 1..566: note = hemagglutinin__InfluenzaA__AEX36597
MKTIIALSYILCLVFAQKLPGNDNSMATLCLGHHAVPNGTIVKTITNDQIEVTNATELVQSSSTGEICDSPHQILDGENCTLIDALLGDPQCDGFQNKKWDLFVERSKAYSNCYPYDVPDYASLRSLVASSGTLEFNNESFNWTGVTQNGTSSACIRRSNNSFFSRLNWLTHLKFKYPALNVTMPNNEQFDKLYIWGVHHPGTDNDQIFLYAQASGRITVSTKRSQQTVIPNIGSRPRVRNIPSRISIYWTIVKPGDILLINSTGNLIAPRGYFKIRSGKSSIMRSDAPIGKCNSECITPNGSIPNDKPFQNVNRITYGACPRYVKQNTLKLATGMRNVPEKQTRGIFGAIAGFIENGWEGMVDGWYGFRHQNSEGRGQAADLKSTQAAIDQINGKLNRLIGKTNEKFHQIEKEFSEVEGRIQDLEKYVEDTKVDLWSYNAELLVALENQHTIDLTDSEMNKLFEKTKKQLRENAEDMGNGCFKIYHKCDNACIGSIRNGTYDHDVYRDEALNNRFQIKGVELKSGYKDWILWISFAISCFLLCVALLGFIMWACQKGNIRCNICI

SEQ ID NO: 8138 - protein, 566 aa, synthetic construct
  REGION 1..566: note = hemagglutinin__InfluenzaA__AEX36608
MKTIIALSYILCLVFAQKLPGNDNSTATLCLGHHAVPNGTIVKTITNDQIEVTNATELVQSSSTGGICDSPHQILDGENCTLIDALLGDPQCDGFQNKKWDLFVERSKAYSNCYPYDVPDYASLRSLVASSGTLEFNNENFNWTGVTQNGTSSACKRRSNNSFFSRLNWLTHLKFKYPALNVTMPNNEKFDKLYIWGVHHPGTDNDQIFLYAQASGRITVSTKRSQQTVIPNIGSRPRVRNIPSRISIYWTIVKPGDILLINSTGNLIAPRGYFKIRSGKSSIMRSDAPIGKCNSECITPNGSIPNDKPFQNVNRITYGACPRYVKQNTLKLATGMRNVPEKQTRGIFGAIAGFIENGWEGMVDGWYGFRHQNSEGIGQAADLKSTQAAINQINGKLNRLIGKTNEKFHQIEKEFSEVEGRIQDLEKYVEDTKIDLWSYNAELLVALENQHTIDLTDSEMNKLFERTKKQLRENAEDMGNGCFKIYHKCDNACIGSIRNGTYDHDVYRDEALNKRFQIKGVELKSGYKDWILWISFAISCFLLCVALLGFIMWACQKGNIRCNICI

SEQ ID NO: 8139 - protein, 566 aa, synthetic construct; identical to SEQ ID NO: 7961
  REGION 1..566: note = hemagglutinin__InfluenzaA__AEX36619

SEQ ID NO: 8140 - protein, 566 aa, synthetic construct
  REGION 1..566: note = hemagglutinin__InfluenzaA__AEX63617
MEAKLFVLFCAFTALKADTICVGYHANNSTDTVDTILEKNVTVTHSVNLLENSHNGKLCSLNGKIPLQLGNCNVAGWILGNPKCDLLLTANSWSYIIETSNSKNGACYPGEFADYEELKEQLSTVSSFERFEIFPKATSWPNHDTTRGTTVACSHSGANSFYRNLLWIVKKGNSYPKLSKSYTNNKGKEVLVIWGVHHPPTDSVQQTLYQNNHTYVSVGSSKYYKRFTPEIVARPKVREQAGRMNYYWTLLDQGDTITFEATGNLIAPWHAFALKKGSSSGIMRSDAQVHNCTTKCQTPHGALKGNLPFQNVHPVTIGECPKYVKSTQLRMATGLRNIPSIQSRGLFGAIAGFIEGGWTGMVDGWYGYHHRNEQGSGYAADQKSTQIAIDGISNKVNSVIEKMNIQFTSVGKEFNSLEKRMENLNKKVDDGFLDVWTYNAELLILLENERTLDFHDLNVKNLYEKVKSQLRNNAKEIGNGCFEFYHKCDNECMESVKNGTYNYLKYSEESKLNREEIDGVKLESMGIHQILAIYSTVASSLVLLVSLGAISFWMCSNGSLQCRVCI

SEQ ID NO: 8141 - protein, 565 aa, synthetic construct; identical to SEQ ID NO: 3278
  REGION 1..565: note = hemagglutinin__InfluenzaA__AEX92873

SEQ ID NO: 8142 - protein, 566 aa, synthetic construct; identical to SEQ ID NO: 3833
  REGION 1..566: note = hemagglutinin__InfluenzaA__AEY69088

SEQ ID NO: 8143 - protein, 566 aa, synthetic construct; identical to SEQ ID NO: 3430
  REGION 1..566: note = hemagglutinin__InfluenzaA__AEY69098

SEQ ID NO: 8144 - protein, 566 aa, synthetic construct; identical to SEQ ID NO: 3411
  REGION 1..566: note = hemagglutinin__InfluenzaA__AEY69120

SEQ ID NO: 8145 - protein, 566 aa, synthetic construct; identical to SEQ ID NO: 3613
  REGION 1..566: note = hemagglutinin__InfluenzaA__AEY69131

SEQ ID NO: 8146 - protein, 566 aa, synthetic construct; identical to SEQ ID NO: 6988
  REGION 1..566: note = hemagglutinin__InfluenzaA__AEY69153

SEQ ID NO: 8147 - protein, 566 aa, synthetic construct; identical to SEQ ID NO: 3613
  REGION 1..566: note = hemagglutinin__InfluenzaA__AEY69164

SEQ ID NO: 8148 - protein, 566 aa, synthetic construct; identical to SEQ ID NO: 3613
  REGION 1..566: note = hemagglutinin__InfluenzaA__AEY69175

SEQ ID NO: 8149 - protein, 566 aa, synthetic construct; identical to SEQ ID NO: 3613
  REGION 1..566: note = hemagglutinin__InfluenzaA__AEY69186

SEQ ID NO: 8150 - protein, 566 aa, synthetic construct; identical to SEQ ID NO: 3613
  REGION 1..566: note = hemagglutinin__InfluenzaA__AEY69197

SEQ ID NO: 8151 - protein, 566 aa, synthetic construct; identical to SEQ ID NO: 3613
  REGION 1..566: note = hemagglutinin__InfluenzaA__AEY69208

SEQ ID NO: 8152 - protein, 566 aa, synthetic construct; identical to SEQ ID NO: 3613
  REGION 1..566: note = hemagglutinin__InfluenzaA__AEY69219

SEQ ID NO: 8153 - protein, 566 aa, synthetic construct; identical to SEQ ID NO: 3411
  REGION 1..566: note = hemagglutinin__InfluenzaA__AEY69258

SEQ ID NO: 8154 - protein, 566 aa, synthetic construct; identical to SEQ ID NO: 3613
  REGION 1..566: note = hemagglutinin__InfluenzaA__AEY69269

SEQ ID NO: 8155 - protein, 566 aa, synthetic construct; identical to SEQ ID NO: 3411
  REGION 1..566: note = hemagglutinin__InfluenzaA__AEY69291

SEQ ID NO: 8156 - protein, 566 aa, synthetic construct; identical to SEQ ID NO: 3411
  REGION 1..566: note = hemagglutinin__InfluenzaA__AEY69302

SEQ ID NO: 8157 - protein, 566 aa, synthetic construct; identical to SEQ ID NO: 3411
  REGION 1..566: note = hemagglutinin__InfluenzaA__AEY69313

SEQ ID NO: 8158 - protein, 566 aa, synthetic construct; identical to SEQ ID NO: 3411
  REGION 1..566: note = hemagglutinin__InfluenzaA__AEY69785

SEQ ID NO: 8159 - protein, 566 aa, synthetic construct
  REGION 1..566: note = hemagglutinin__InfluenzaA__AEY69807
MKTIIALSYILCLVFAQKLPGNDNSTATLCLGHHAVPNGTIVKTITNDQIEVTNATELVQSSSTGEICDSPHQILDGKNCTLIDALLGDPQCDGLQNKKWDLFVERSKAYSNCYPYDVPDYASLRSLVASSGTLEFNNESFNWTGVTQNGTSSACIRRSKNSFFSRLNWLTHLNFKYPALNVTMPNNEQFDKLYIWGVHHPGTDKDQIFLYAQASGRITVSTKRSQQTAIPNIGSRPRVRNIPSRISIYWTIVKPGDILLINSTGNLIAPRGYFKLRSGKSSIMRSDAPIGKCNSECITPNGSIPNDKPFQNVNRITYGACPRYVKQNTLKLATGMRNVPEKQTRGIFGAIAGFIENGWEGMVDGWYGFRHQNSEGRGQAADLKSTQAAIDQINGKLNRLIGKTNEKFHQIEKEFSEVEGRIQDLEKYVEDTKIDLWSYNAELLVALENQHTIDLTDSEMNKLFEKTKKQLRENAEDMGNGCFKIYHKCDNACIGSIRNGTYDHDVYRDEALNNRFQIKGVELKSGYKDWILWISFAISCFLLCVALLGFIMWACQKGNIRCNICI

SEQ ID NO: 8160 - protein, 566 aa, synthetic construct; identical to SEQ ID NO: 3613
  REGION 1..566: note = hemagglutinin__InfluenzaA__AEY69818

SEQ ID NO: 8161 - protein, 566 aa, synthetic construct; identical to SEQ ID NO: 3613
  REGION 1..566: note = hemagglutinin__InfluenzaA__AEY69829

SEQ ID NO: 8162 - protein, 566 aa, synthetic construct; identical to SEQ ID NO: 3613
  REGION 1..566: note = hemagglutinin__InfluenzaA__AEY69840

SEQ ID NO: 8163 - protein, 566 aa, synthetic construct; identical to SEQ ID NO: 3613
  REGION 1..566: note = hemagglutinin__InfluenzaA__AEY69851

SEQ ID NO: 8164 - protein, 566 aa, synthetic construct; identical to SEQ ID NO: 3613
  REGION 1..566: note = hemagglutinin__InfluenzaA__AEY69873

SEQ ID NO: 8165 - protein, 566 aa, synthetic construct; identical to SEQ ID NO: 3613
  REGION 1..566: note = hemagglutinin__InfluenzaA__AEY69884

SEQ ID NO: 8166 - protein, 566 aa, synthetic construct; identical to SEQ ID NO: 3613
  REGION 1..566: note = hemagglutinin__InfluenzaA__AEY69895

SEQ ID NO: 8167 - protein, 566 aa, synthetic construct; identical to SEQ ID NO: 6988
  REGION 1..566: note = hemagglutinin__InfluenzaA__AEY69906

SEQ ID NO: 8168 - protein, 566 aa, synthetic construct; identical to SEQ ID NO: 3613
  REGION 1..566: note = hemagglutinin__InfluenzaA__AEY69917

SEQ ID NO: 8169 - protein, 566 aa, synthetic construct
  REGION 1..566: note = hemagglutinin__InfluenzaA__AEY69939
MKTIIALSYILCLVFAQKIPGNDNSTATLCLGHHAVPNGTIVKTITNDQIEVTNATELVQSSSTGEICDSPHQILDGKNCTLIDALLGDPQCDGFQNKKWDLFVERSKAYSNCYPYDVPDYASLRSLVASSGTLEFNNESFNWTGVTQNGTSSACIRRSKNSFFSRLNWLTHLNFKYPALNVTMPNNEQFDKLYIWGVHHPGTDKDQIFLYAQASGRITVSTKRSQQTAIPNIGSRPRVRNIPSRISIYWTIVKPGDILLINSTGNLIAPRGYFKIRSGKSSIMRSDAPIGKCNSGCITPNGSIPNDKPFQNVNRITYGVCPRYVKQNTLKLATGMRNVPEKQTRGIFGAIAGFIENGWEGMVDGWYGFRHQNSEGRGQAADLKSTQAAIDQINGKLNRLIGKTNEKFHQIEKEFSEVEGRIQDLEKYVEDTKIDLWSYNAELLVALENQHTIDLTDSEMNKLFEKTKKQLRENAEDMGNGCFKIYHKCDNACIGSIRNGTYDHDVYRDEALNNRFQIKGVELKSGYKDWFLWISFAISCFLLCVALLGFIMWACQKGNIRCNICI

SEQ ID NO: 8170 - protein, 566 aa, synthetic construct; identical to SEQ ID NO: 8169
  REGION 1..566: note = hemagglutinin__InfluenzaA__AEY69950

SEQ ID NO: 8171 - protein, 566 aa, synthetic construct; identical to SEQ ID NO: 8169
  REGION 1..566: note = hemagglutinin__InfluenzaA__AEY69961

SEQ ID NO: 8172 - protein, 566 aa, synthetic construct
  REGION 1..566: note = hemagglutinin__InfluenzaA__AEY69994
MKTIIALSYILCLVFAQKIPGNDNSTATLCLGHHAVPNGTIVKTITNDQIEVTNATELVQSSSTGEICDSPHQILDGKNCTLIDALLGDPQCDGFQNKKWDLFVERSKAYSNCYPYDVPDYASLRSLVASSGTLEFNNESFNWTGVTQNGTSSACIRRSKNSFFSRLNWLTHLNFKYPALNVTMPNNEQFDKLYIWGVHHPGTDKDQIFLYAQASGRITVSTKRSQQTAIPNIGSRPRVRNIPSRISIYWTIVKPGDILLINSTGNLIAPRGYFKIRSGKSSIMRSDAPIGKCNSGCITPNGSIPNDKPFQNVNRITYGACPRYVKQNTLKLATGMRNVPEKQTRGIFGAIAGFIENGWEGMVDGWYGFRHQNSEGRGQAADLKSTQAAIDQINGKLNRLIGKTNEKFHQIEKEFSEVEGRIQDLEKYVEDTKIDLWSYNAELLVALENQHTIDLTDSEMNKLFEKTKKQLRENAEDMGNGCFKIYHKCDNACIGSIRNGTYDHDVYRDEALNNRFQIKGVELKSGYKDWFLWISFAISCFLLCVALLGFIMWACQKGNIRCNICI

SEQ ID NO: 8173 - protein, 566 aa, synthetic construct; identical to SEQ ID NO: 8172
  REGION 1..566: note = hemagglutinin__InfluenzaA__AEY70005

SEQ ID NO: 8174 - protein, 566 aa, synthetic construct; identical to SEQ ID NO: 3613
  REGION 1..566: note = hemagglutinin__InfluenzaA__AEY70016

SEQ ID NO: 8175 - protein, 566 aa, synthetic construct
  REGION 1..566: note = hemagglutinin__InfluenzaA__AEY70256
MKTIIALSYILCLVFAQKLPGNDNSTATLCLGHHAVPNGTIVKTITNDQIEVTNATELVQSSSTGEICDSPHQILDGKNCTLIDALLGDPQCDGFQNKKWDLFVERSKAYGNCYPYDVPDYASLRSLVASSGTLEFNNESFNWTGVTQNGTSSACIRRSKNSFFSRLNWLTHLNFKYPALNVTMPNNEQFDKLYIWGVHHPGTDKDQIFLYAQASGRITVSTKRSQQTAIPNIGSRPRVRNIPSRISIYWTIVKPGDMLLINSTGNLIAPRGYFKIRSGKSSIMRSDAPIGKCNSECITPNGSIPNDKPFQNVNRITYGACPRYVKQNTLKLATGMRNVPEKQTRGIFGAIAGFIENGWEGMVDGWYGFRHQNSEGRGQAADLKSTQAAIDQINGKLNRLIGKTNEKFHQIEKEFSEVEGRIQDLEKYVEDTKIDLWSYNAELLVALENQHTIDLTDSEMNKLFEKTKKQLRENAEDMGNGCFKIYHKCDNACIGSIRNGTYDHDVYRDEALNNRFQIKGVELKSGYKDWILWISFAISCFLLCVALLGFIMWACQKGNIRCNICI

SEQ ID NO: 8176 - protein, 566 aa, synthetic construct; identical to SEQ ID NO: 3613
  REGION 1..566: note = hemagglutinin__InfluenzaA__AEY70267

SEQ ID NO: 8177 - protein, 566 aa, synthetic construct; identical to SEQ ID NO: 3613
  REGION 1..566: note = hemagglutinin__InfluenzaA__AEY70278

SEQ ID NO: 8178 - protein, 566 aa, synthetic construct; identical to SEQ ID NO: 3411
  REGION 1..566: note = hemagglutinin__InfluenzaA__AEY70289

SEQ ID NO: 8179 - protein, 566 aa, synthetic construct; identical to SEQ ID NO: 3613
  REGION 1..566: note = hemagglutinin__InfluenzaA__AEY70300

SEQ ID NO: 8180 - protein, 566 aa, synthetic construct; identical to SEQ ID NO: 3613
  REGION 1..566: note = hemagglutinin__InfluenzaA__AEY70311

SEQ ID NO: 8181 - protein, 566 aa, synthetic construct; identical to SEQ ID NO: 3613
  REGION 1..566: note = hemagglutinin__InfluenzaA__AEY70333

SEQ ID NO: 8182 - protein, 566 aa, synthetic construct; identical to SEQ ID NO: 8172
  REGION 1..566: note = hemagglutinin__InfluenzaA__AEY70344

SEQ ID NO: 8183 - protein, 566 aa, synthetic construct; identical to SEQ ID NO: 5224
  REGION 1..566: note = hemagglutinin__InfluenzaA__AEY70355

SEQ ID NO: 8184 - protein, 566 aa, synthetic construct; identical to SEQ ID NO: 3411
  REGION 1..566: note = hemagglutinin__InfluenzaA__AEY70365

SEQ ID NO: 8185 - protein, 566 aa, synthetic construct; identical to SEQ ID NO: 3613
  REGION 1..566: note = hemagglutinin__InfluenzaA__AEY70376

SEQ ID NO: 8186 - protein, 566 aa, synthetic construct
  REGION 1..566: note = hemagglutinin__InfluenzaA__AFB18656
MKAILVVLLYTFATANADTLCIGYHANNSTDTVDTVLEKNVTVTHSVNLLEDKHNGKLCKLRGVAPLHLGKCNIAGWILGNPECETLSTASSWSYIVETSSSDNGTCYPGDFIDYEELREQLSSVSSFERFEIFPKTSSWPNHDSNKGVTAACPHAGAKGFYKNLIWLVKKGNSYPKLSKSYINDKGKEVLVLWGIHHPSTTADQQSLYQNADTYVFVGTSRYSKKFKPEIAIRPKVRDQEGRMNYYWTLVEPGDKITFEATGNLVVPRYAFAMERDAGSGIIISDTPVHDCNTTCQTPKGAINTSLPFQNIHPITIGKCPKYVKSTKLRLATGLRNVPSIQSRGLFGAIAGFIEGGWTGMVDGWYGYHHQNEQGSGYAADLKSTQNAIDKITNKVNSVIEKMNTQFTAVGKEFNHLEKRIENLNKKVDDGFLDIWTYNAELLVLLENERTLDYHDSNVKNLYEKVRNQLKNNAKEIGNGCFEFYHKCDNTCMESVKNGTYDYPKYSEEAKLNREEIDGVKLESTRIYQILAIYSTAASSLVLVVSLGAISFWMCSNGSLQCRICI

SEQ ID NO: 8187 - protein, 566 aa, synthetic construct; identical to SEQ ID NO: 7050
  REGION 1..566: note = hemagglutinin__InfluenzaA__AFB40597

SEQ ID NO: 8188 - protein, 566 aa, synthetic construct; identical to SEQ ID NO: 7050
  REGION 1..566: note = hemagglutinin__InfluenzaA__AFB40598

SEQ ID NO: 8189 - protein, 566 aa, synthetic construct
  REGION 1..566: note = hemagglutinin__InfluenzaA__AFB40599
MKAILVVLLYTFATANADTLCIGYHANNSTDTVDTVLEKNVTVTHSVNLLEDKHNGKLCKLRGVAPLHLGKCNIAGWILGNPECESLSTASSWSYIVETSSSDNGTCYPGDFIDYEELREQLSSVSSFERFEIFPKTSSWPNHDLNKGVTAACPHAGAKSFYKNLIWLVKKGNSYPKLSKSYINDKGKEVLVLWGIHHPSTSADQQSLYQNADAYVFVGTSRYSKKFKPEIAIRPKVRDQEGRMNYYWTLVEPGDKITFEATGNLVVPRYAFAMERNAGSGIIISDTPVHDCNTTCQTPKGAINTSLPFQNIHPITIGKCPKYVKSTKLRLATGLRNVPSIQSRGLFGAIAGFIEGGWTGMVDGWYGYHHQNEQGSGYAADLKSTQNAIDKITNKVNSVIEKMNTQFTAVGKEFNHLEKRIENLNKKVDDGFLDIWTYNAELLVLLENERTLDYHDSNVKNLYEKVRSQLKNNAKEIGNGCFEFYHKCDNTCMESVKNGTYDYPKYSEEAKLNREEIDGVKLESTRIYQILAIYSTVASSLVLVVSLGAISFWMCSNGSLQCRICI

SEQ ID NO: 8190 - protein, 566 aa, synthetic construct; identical to SEQ ID NO: 3833
  REGION 1..566: note = hemagglutinin__InfluenzaA__AFB40600

SEQ ID NO: 8191 - protein, 566 aa, synthetic construct
  REGION 1..566: note = hemagglutinin__InfluenzaA__AFB40601
MKAILVVLLYTFATANADTLCIGYHANNSTDTVDTVLEKNVTVTHSVNLLEDKHNGKLCKLRGVAPLHLGKCNIAGWILGNPECESLSTASSWSYIVETSSSDNGTCYPGDFIDYEELREQLSSVSSFERFEIFPETSSWPNHDSNKGVTAACPHAGAKSFYKNLIWLVKKGNSYPKLSKSYINDKGKEVLVLWGIHHPSTSADQQSLYQNADAYVFVGTSRYSKKFKPEIAIRPKVRGQEGRMNYYWTLVEPGDKITFEATGNLVVPRYAFAMERNAGSGIIISDTPVHDCNTTCQTPKGAINTSLPFQNIHPITIGKCPKYVKSTKLRLATGLRNVPSIQSRGLFGAIAGFIEGGWTGMVDGWYGYHHQNEQGSGYAADLKSTQNAIDEITNKVNSVIEKMNTQFTAVGKEFNHLEKRIENLNKKVDDGFLDIWTYNAELLVLLENERTLDYHDSNVKNLYEKVRSQLKNNAKEIGNGCFEFYHKCDNTCMESVKNGTYDYPKYSEEAKLNREEIDGVKLESTRIYQILAIYSTVASSLVLVVSLGAISFWMCSNGSLQCRICI

SEQ ID NO: 8192 - protein, 566 aa, synthetic construct; identical to SEQ ID NO: 2669
  REGION 1..566: note = hemagglutinin__InfluenzaA__AFB40602

SEQ ID NO: 8193 - protein, 566 aa, synthetic construct; identical to SEQ ID NO: 3833
  REGION 1..566: note = hemagglutinin__InfluenzaA__AFB40603

SEQ ID NO: 8194 - protein, 566 aa, synthetic construct
  REGION 1..566: note = hemagglutinin__InfluenzaA__AFB40604
MKAILVVLLYTFATANADTLCIGYHANNSTDTVDTVLEKNVTVTHSVNLLEDKHNGKLCKLRGVAPLHLGKCNIAGWILGNPECESLSTASSWSYIVETSSSDNGTCYPGDFIDYEELREQLSSVSSFERFEIFPKTSSWPNHDSNKGVTAACPHAGAKSFYKNLIWLVKEGNSYPKLSKSYINDKGKEVLVLWGIHHPPTTADQQSLYQNADTYVFVGTSRYSKKFKPEIAIRPKVRDQEGRMNYYWTLVEPGDKITFEATGNLVVPRYAFAMERNAGSGIIISDTPVHDCNTTCQTPKGAINTSLPFQNIHPITIGKCPKYVKSTKLRLATGLRNVPSIQSRGLFGAIAGFIEGGWTGMVDGWYGYHHQNEQGSGYAADLKSTQNAIDKITNKVNSVIEKMNTQFTAVDKEFNHLEKRIGNLNKKVDDGFLDIWTYNAELLVLLENERTLDYHDSNVKNLYEKVRNQLKNNAKEIGNGCFEFYHKCDNTCMESVKNGTYDYPKYSEEAKLNREEIDGVKLESTRIYQILAIYSTVASSLVLVVSLGAISFWMCSNGSLQCRICI

SEQ ID NO: 8195 - protein, 566 aa, synthetic construct; identical to SEQ ID NO: 2669
  REGION 1..566: note = hemagglutinin__InfluenzaA__AFB70138

SEQ ID NO: 8196 - protein, 566 aa, synthetic construct
  REGION 1..566: note = hemagglutinin__InfluenzaA__AFB70145
MKAILVVLLYTFATANADTLCIGYHANNSTDTVDTVLEKNVTVTHSVNLLEDKHNGKLCKLRGVAPLHLGKCNIAGWILGNPECESLSTASSWSYIVETSSSDNGTCYPGDFIDYEELREQLSSVSSFERFEIFPKTSSWPNHDSNKGITAACPHAGAKSFYKNLIWLVKKGNSYPKLSKSYINDKGKEVLVLWGIHHPSTSADQQSLYQNADAYVFVGTSRYSKKFKPEIAIRPKVRDQEGRMNYYWTLVEPGDKITFEATGNLVVPRYAFAMERNAGSGIIISDTPVHDCNTTCQTPKGAINTSLPFQNIHPITIGKCPKYVKSTKLRLATGLRNVPSIQSRGLFGAIAGFIEGGWTGMVDGWYGYHHQNEQGSGYAADLKSTQNAIDEITNKVNSVIEKMNTQFTAVGKEFNHLEKRIENLNKKVDDGFLDIWTYNAELLVLLENERTLDYHDSNVKNLYEKVRSQLKNNAKEIGNGCFEFYHKCDNTCMESVKNGTYDYPKYSEEAKLNREEIDGVKLESTRIYQILAIYSTVASSLVLVVSLGAISFWMCSNGSLQCRICI

SEQ ID NO: 8197 - protein, 566 aa, synthetic construct
  REGION 1..566: note = hemagglutinin__InfluenzaA__AFB70154
MKAILVVLLYTFATANADTLCIGYHANNSTDTVDTVLEKNVTVTHSVNLLEDKHNEKLCKLRGVAPLHLGKCNIAGWILGNPECESLSTASSWSYIVETSSSDNGTCYPGDFIDYEELREQLSSVSSFERFEIFPKTSSWPNHDSNKGVTAACPHAGAKSFYKNLIWLVKKGNSYPKLSKSYINDKGKEVLVLWGIHHPSTSADQQSLYQNADAYVFVGTSRYSKKFKPEIAIRPKVRDQEGRMNYYWTLVEPGDKITFEATGNLVVPRYAFAMERNAGSGIIISDTPVHDCNTTCQTPKGAINTSLPFQNIHPITIGKCPKYVKSTKLRLATGLRNVPSIQSRGLFGAIAGFIEGGWTGMVDGWYGYHHQNEQGSGYAADLKSTQNAIDEITNKVNSVIEKMNTQFTAVGKEFNHLEKRIENLNKKVDDGFLDIWTYNAELLVLLENERTLDYHDSNVKNLYEKVRSQLKNNAKEIGNGCFEFYHKCDNTCMESVKNGTYDYPKYSEEAKLNREEIDGVKLESTRIYQILAIYSTVASSLVLVVSLGAISFWMCSNGSLQCRICI

SEQ ID NO: 8198 - protein, 566 aa, synthetic construct; identical to SEQ ID NO: 2669
  REGION 1..566: note = hemagglutinin__InfluenzaA__AFB70156

SEQ ID NO: 8199 - protein, 566 aa, synthetic construct; identical to SEQ ID NO: 2669
  REGION 1..566: note = hemagglutinin__InfluenzaA__AFB70158

SEQ ID NO: 8200 - protein, 566 aa, synthetic construct; identical to SEQ ID NO: 8196
  REGION 1..566: note = hemagglutinin__InfluenzaA__AFB70160

SEQ ID NO: 8201 - protein, 566 aa, synthetic construct; identical to SEQ ID NO: 3863
  REGION 1..566: note = hemagglutinin__InfluenzaA__AFB70162

SEQ ID NO: 8202 - protein, 566 aa, synthetic construct
  REGION 1..566: note = hemagglutinin__InfluenzaA__AFB70167
MKAILVVLLYTFATANADTLCIGYHANNSTDTVDTVLEKNVTVTHSVNLLEDKHNGKLCKLRGVAPLHLGKCNIAGWILGNPECESLSTASSWSYIVETSSSDNGTCYPGDFIDYEELREQLSSVSSFERFEIFPKTSSWPNHDSNKGVTAACPHAGAKSFYKNLIWLVKKGNSYPKLSKSYINDKGKEVLVLWGIHHPSTSADQQSLYQNADAYVFVGTSRYSKKFKPEIAMRPKVRDQEGRMNYYWTLVEPGDKITFEATGNLVVPRYAFAMERNAGSGIIISDTPVHDCNTTCQTPKGAINTSLPFQNIHPITIGKCPKYVKSTKLRLATGLRNVPSIQSRGLFGAIAGFIEGGWTGMVDGWYGYHHQNEQGSGYAADLKSTQNAIDEITNKVNSVIEKMNTQFTAVGKEFNHLEKRIENLNKKVDDGFLDIWTYNAELLVLLENERTLDYHDSNVKNLYEKVRSQLKNNAKEIGNGCFEFYHKCDNTCMESVKNGTYDYPKYSEEAKLNREEIDGVKLESTRIYQILAIYSTVASSLVLVVSLGAISFWMCSNGSLQCRICI

SEQ ID NO: 8203 - protein, 566 aa, synthetic construct; identical to SEQ ID NO: 2669
  REGION 1..566: note = hemagglutinin__InfluenzaA__AFB70177

SEQ ID NO: 8204 - protein, 566 aa, synthetic construct; identical to SEQ ID NO: 3238
  REGION 1..566: note = hemagglutinin__InfluenzaA__AFB70187

SEQ ID NO: 8205 - protein, 566 aa, synthetic construct; identical to SEQ ID NO: 3863
  REGION 1..566: note = hemagglutinin__InfluenzaA__AFB70197

SEQ ID NO: 8206 - protein, 566 aa, synthetic construct; identical to SEQ ID NO: 2669
  REGION 1..566: note = hemagglutinin__InfluenzaA__AFB70207

SEQ ID NO: 8207 - protein, 566 aa, synthetic construct; identical to SEQ ID NO: 2669
  REGION 1..566: note = hemagglutinin__InfluenzaA__AFB70217

SEQ ID NO: 8208 - protein, 566 aa, synthetic construct; identical to SEQ ID NO: 2669
  REGION 1..566: note = hemagglutinin__InfluenzaA__AFB70227

SEQ ID NO: 8209 - protein, 566 aa, synthetic construct
  REGION 1..566: note = hemagglutinin__InfluenzaA__AFB70247
MKAILVVLLYTFATANADTLCIGYHANNSTDTVDTVLEKNVTVTHSVNLLEDKHNGKLCKLRGVAPLHLGKCNIAGWILGNPECESLSTASSWSYIVETSSSDNGTCYPGDFIDYEELREQLSSVSSFERFEIFPKTSSWPNHDSNKGVTAACPHAGAKSFYKNLIWLVKKGNSYPKLSKSYINDKGKEVLVLWGIHHPSTSADQQSLYQNADAYVFVGTSRYSKEFKPEIAIRPKVRDQEGRMNYYWTLVEPGDKITFEATGNLVVPRYAFAMERNAGSGIIISDTPVHDCNTTCQTPKGAINTSLPFQNIHPITIGKCPKYVKSTKLRLATGLRNVPSIQSRGLFGAIAGFIEGGWTGMVDGWYGYHHQNEQGSGYAADLKSTQNAIDEITNKVNSVIEKMNTQFTAVGKEFNHLEKRIENLNKKVDDGFLDIWTYNAELLVLLENERTLDYHDSNVKNLYEKVRSQLKNNAKEIGNGCFEFYHKCDNTCMESVKNGTYDYPKYSEEAKLNREEIDGVKLESTRIYQILAIYSTVASSLVLVVSLGAISFWMCSNGSLQCRICI

SEQ ID NO: 8210 - protein, 566 aa, synthetic construct
  REGION 1..566: note = hemagglutinin__InfluenzaA__AFB70257
MKAILVVLLYTFATANADTLCIGYHANNSTDTVDTVLEKNVTVTHSVNLLEDKHNGKLCKLRGVAPLHLGKCNIAGWILGNPECESLSTASSWSYIVETSSSDNGTCYPGDFVDYEELREQLSSVSSFERFEIFPKTSSWPNHDSNKGVTAACPHAGAKSFYKNLIWLVKKGNSYPKLSKSYINDKGKEVLVLWGIHHPSTSADQQSLYQNADAYVFVGTSRYSKKFKPEIAIRPKVRDQEGRMNYYWTLVEPGDKITFEATGNLVVPRYAFAMERNAGSGIIISDTPVHDCNTTCQTPKGAINTSLPFQNIHPITIGKCPKYVKSTKLRLATGLRNVPSIQSRGLFGAIAGFIEGGWTGMVDGWYGYHHQNEQGSGYAADLKSTQNAIDEITNKVNSVIEKMNTQFTAVGKEFNHLEKRIENLNKKVDDGFLDIWTYNAELLVLLENERTLDYHDSNVKNLYEKVRSQLKNNAKEIGNGCFEFYHKCDNTCMESVKNGTYDYPKYSEEAKLNREEIDGVKLESTRIYQILAIYSTVASSLVLVVSLGAISFWMCSNGSLQCRICI

SEQ ID NO: 8211 - protein, 566 aa, synthetic construct; identical to SEQ ID NO: 7076
  REGION 1..566: note = hemagglutinin__InfluenzaA__AFB70267

SEQ ID NO: 8212 - protein, 566 aa, synthetic construct; identical to SEQ ID NO: 3139
  REGION 1..566: note = hemagglutinin__InfluenzaA__AFB70277

SEQ ID NO: 8213 - protein, 566 aa, synthetic construct; identical to SEQ ID NO: 2669
  REGION 1..566: note = hemagglutinin__InfluenzaA__AFB70287

SEQ ID NO: 8214 - protein, 566 aa, synthetic construct; identical to SEQ ID NO: 2669
  REGION 1..566: note = hemagglutinin__InfluenzaA__AFB70297

SEQ ID NO: 8215 - protein, 566 aa, synthetic construct; identical to SEQ ID NO: 2669
  REGION 1..566: note = hemagglutinin__InfluenzaA__AFB70307

SEQ ID NO: 8216 - protein, 566 aa, synthetic construct; identical to SEQ ID NO: 8196
  REGION 1..566: note = hemagglutinin__InfluenzaA__AFB70317

SEQ ID NO: 8217 - protein, 566 aa, synthetic construct
  REGION 1..566: note = hemagglutinin__InfluenzaA__AFB70327
MKAILVVLLYTFATANADTLCIGYHANNSTDTVDTVLEKNVTVTHSVNLLEDKHNGKLCKLRGVAPLHLGKCNIAGWILGNPECESLSTASSWSYIVETSSSDNGTCYPGDFIDYEELREQLSSVSSFERFEIFPKTSSWPNHDSNKGVTAACPHAGAKSFYKNLIWLVKKGNSYPKLSKSYINDKGKEVLVLWGIHHPSTSADQQSLYQNADAYVFVGTSRYSKKFKPEIAIRPKVRDQEGRMNYYWTLVEPGDKITFEATGNLVVPRYAFAMERNAGSGIIISDTPVHDCNTTCQTPKGAINTSLPFQNIHPITIGKCPKYVKSTKLRLATGLRNVPSIQSRGLFGAIAGFIEGGWTGMVDGWYGYHHQNEQGSGYAADLKSTQNAIDEITNKVNSVIEKMNTQFTAVGKEFNHLGKRIENLNKKVDDGFLDIWTYNAELLVLLENERTLDYHDSNVKNLYEKVRSQLKNNAKEIGNGCFEFYHKCDNTCMESVKNGTYDYPKYSEEAKLNREEIDGVKLESTRIYQILAIYSTVASSLVLVVSLGAISFWMCSNGSLQCRICI

SEQ ID NO: 8218 - protein, 566 aa, synthetic construct; identical to SEQ ID NO: 2669
  REGION 1..566: note = hemagglutinin__InfluenzaA__AFB70337

SEQ ID NO: 8219 - protein, 566 aa, synthetic construct; identical to SEQ ID NO: 4639
  REGION 1..566: note = hemagglutinin__InfluenzaA__AFB70347

SEQ ID NO: 8220 - protein, 566 aa, synthetic construct; identical to SEQ ID NO: 2669
  REGION 1..566: note = hemagglutinin__InfluenzaA__AFB70367

SEQ ID NO: 8221 - protein, 566 aa, synthetic construct; identical to SEQ ID NO: 2669
  REGION 1..566: note = hemagglutinin__InfluenzaA__AFB70377

SEQ ID NO: 8222 - protein, 566 aa, synthetic construct; identical to SEQ ID NO: 3238
  REGION 1..566: note = hemagglutinin__InfluenzaA__AFB70387

SEQ ID NO: 8223 - protein, 566 aa, synthetic construct; identical to SEQ ID NO: 2669
  REGION 1..566: note = hemagglutinin__InfluenzaA__AFB70397

SEQ ID NO: 8224 - protein, 566 aa, synthetic construct; identical to SEQ ID NO: 2669
  REGION 1..566: note = hemagglutinin__InfluenzaA__AFB70407

SEQ ID NO: 8225 - protein, 566 aa, synthetic construct
  REGION 1..566: note = hemagglutinin__InfluenzaA__AFB77618
MKAILVVLLYTFATANADTLCIGYHANNSTDTVDTVLEKNVTVTHSVNLLEDKHNGKLCKLRGIAPLHLGKCNIAGWILGNPECESLSTASSWSYIVETSSSDNGTCYPGDFINYEELREQLSSVSSFERFEIFPKTSSWPNHDSNKGVTAACPHAGAKSFYKNLIWLVKKGNSYPKLSKSYINDKGKEVLVLWGIHHPTTTGDQQSLYQNADGYVFVGTTRYSKKFKPEIGIRPKVKDQEGRMNYYWTLVEPGDKITFEATGNLVVPRYAFAMERNAGSGIIISDTPVHDCNTTCQTPKGAINTSLPFQNIHPITIGKCPKYVKSTKLRLATGLRNVPSIQSRGLFGAIAGFIEGGWTGMVDGWYGYHHQNEQGSGYAADLKSTQNAIDKITNKVNSVIEKMNTQFTAVGKEFNHLEKRIENLNKKVDDGFLDIWTYNAELLVLLENERTLDYHDSNVKNLYEKVRNQLKNNAKEIGNGCFEFYHKCDNTCMESVKNGTYDYPKYSEEAKLNREEIDGVKLESTRIYQILAIYSTVASSLVMVVSLGAISFWMCSNGSLQCRICI

SEQ ID NO: 8226 - protein, 566 aa, synthetic construct; identical to SEQ ID NO: 6867
  REGION 1..566: note = hemagglutinin__InfluenzaA__AFB77619

SEQ ID NO: 8227 - protein, 566 aa, synthetic construct; identical to SEQ ID NO: 6867
  REGION 1..566: note = hemagglutinin__InfluenzaA__AFB77620

SEQ ID NO: 8228 - protein, 566 aa, synthetic construct
  REGION 1..566: note = hemagglutinin__InfluenzaA__AFB77621
MKAILVVLLYTFATANADTLCIGYHANNSTDTVDTVLEKNVTVTHSVNLLEDKHNGKLCKLRGVTPLHLGKCNIAGWILGNPECESLSTASSWSYIVETSSSDNGTCYPGDFINYEELREQLSSVSSFERFEIFPKTSSWPNHDSNKGVTAACPHAGAKSFYKNLIWLVKKGNSYPKLSKSYINDKGKEVLVLWGIHHPSTTADQQSLYQNADAYVFVGTSRYSKKFKPEIAIRPKVRDQEGRMNYYWTLVEPGDKITFEATGNLVVPRYAFAMERNAGSGIIISDTPVHDCNTTCQTPKGAINTSLPFQNIHPITIGKCPKYVKSTKLRLATGLRNIPSIQSRGLFGAIAGFIEGGWTGMVDGWYGYHHQNEQGSGYAADLKSTQNAIDKITNKVNSVIEKMNTQFTAVGKEFNHLEKRIENLNKKVDDGFLDIWTYNAELLVLLENERTLDYHDSNVKNLYEKVRNQLKNNAKEIGNGCFEFYHKCDNTCMESVKNGTYDYPKYSEEAKLNREEIDGVKLESTRIYQILAIYSTVASSLVLVVSLGAISFWMCSNGSLQCRICI

SEQ ID NO: 8229 - protein, 566 aa, synthetic construct
  REGION 1..566: note = hemagglutinin__InfluenzaA__AFB77622
MKAILVVLLYTFATANADTLCIGYHANNSTDTVDTVLEKNVTVTHSVNLLEDKHNGKLCKLRGVAPLHLGKCNIAGWILGNPECESLSTASSWSYIVETSSSDNGTCYPGDFINYEELREQLSSVSSFERFEIFPKTSSWPNHDPNKGVTAACPHAGAKSFYKNLIWLVKKGNSYPKLSKSYINDKGKEVLVLWGIHHPSTTADQQSLYQNADAYVFVGTSRYSKKFKPEIAIRPKVRDQEGRMNYYWTLVEPGDKITFEATGNLVVPRYAFAMERNAGSGIIISDTPVHDCNTTCQTPKGAINTSLPFQNIHPITIGKCPKYVKSTKLRLATGLRNVPSIQSRGLFGAIAGFIEGGWTGMVDGWYGYHHQNEQGSGYAADLKSTQNAIDKITNKVNSVIEKMNTQFTAVGKEFNHLEKRIENLNKKVDDGFLDIWTYNAELLVLLENERTLDYHDSNVKNLYEKVRNQLKNNAKEIGNGCFEFYHKCDNTCMESVKNGTYDYPKYSEEAKLNREEIDGVKLESTRIYQILAIYSTVASSLVLVVSLGAISFWMCSNGSLQCRICI

SEQ ID NO: 8230 - protein, 566 aa, synthetic construct; identical to SEQ ID NO: 6867
  REGION 1..566: note = hemagglutinin__InfluenzaA__AFB77623

SEQ ID NO: 8231 - protein, 566 aa, synthetic construct; identical to SEQ ID NO: 6867
  REGION 1..566: note = hemagglutinin__InfluenzaA__AFB77624

SEQ ID NO: 8232 - protein, 566 aa, synthetic construct
  REGION 1..566: note = hemagglutinin__InfluenzaA__AFB77625
MKAILVVLLYTFTTANADTLCIGYHANNSTDTVDTVLEKNVTVTHSVNLLEDKHNGKLCKLRGVAPLHLGKCNIAGWILGNPECESLSTASSWSYIVETSSSDNGTCYPGDFINYEELREQLSSVSSFERFEIFPKTSSWPNHDSNKGVTAACPHAGAKSFYKNLIWLVKKGNSYPKLSKSYINDKGKEVLVLWGIHHPSTTADQQSLYQNADAYVFVGTSRYSKKFKPEIAIRPKVRDQEGRMNYYWTLVEPGDKITFEATGNLVVPRYAFAMERNAGSGIIISDTPVHDCNTTCQTPKGAINTSLPFQNIHPITIGKCPKYVKSTKLRLATGLRNVPSIQSRGLFGAIAGFIEGGWTGMVDGWYGYHHQNEQGSGYAADLKSTQNAIDKITNKVNSVIEKMNTQFTAVGKEFNHLEKRIENLNKKVDDGFLDIWTYNAELLVLLENERTLDYHDSNVKNLYEKVRNQLKNNAKEIGNGCFEFYHKCDNTCMESVKNGTYDYPKYSEEAKLNREEIDGVKLESTRIYQILAIYSTVASSLVLVVSLGAISFWMCSNGSLQCRICI

SEQ ID NO: 8233 - protein, 566 aa, synthetic construct
  REGION 1..566: note = hemagglutinin__InfluenzaA__AFB77627
MKAILVVLLYTFATANADTLCIGYHANNSTDTVDTVLEKNVTVTHSVNLLEDKHNGKLCKLRGVAPLHLGKCNIAGWILGNPECESLSTASSWSYIVETSSSDNGTCYPGDFINYEELREQLSSVSSFERFEIFSKTSSWPNHDSNKGVTAACPHAGAKSFYKNLIWLVKKGNSYPKLSKSYINDKGKEVLVLWGIHHPSTTADQQSLYQNADAYVFVGTSRYSKKFKPEIAIRPKVRDQEGRMNYYWTLVEPGDKITFEATGNLVVPRYAFAMERNAGSGIIISDTPVHDCNTTCQTPKGAINTSLPFQNIHPITIGKCPKYVKSTKLRLATGLRNVPSIQSRGLFGAIAGFIEGGWTGMVDGWYGYHHQNEQGSGYAADLKSTQNAIDKITNKVNSVIEKMNTQFTAVGKEFNHLEKRIENLNKKVDDGFLDIWTYNAELLVLLENERTLDYHDSNVKNLYEKVRNQLKNNAKEIGNGCFEFYHKCDNTCMESVKNGTYDYPKYSEEAKLNREEIDGVKLESTRIYQILAIYSTVASSLVLVVSLGAISFWMCSNGSLQCRICI

SEQ ID NO: 8234 - protein, 566 aa, synthetic construct; identical to SEQ ID NO: 6867
  REGION 1..566: note = hemagglutinin__InfluenzaA__AFB77628

SEQ ID NO: 8235 - protein, 566 aa, synthetic construct
  REGION 1..566: note = hemagglutinin__InfluenzaA__AFB77629
MKAILVVLLYTFTTANADTLCIGYHANNSTDTVDTVLEKNVTVTHSVNLLEDKHNGKLCKLRGVAPLHLGKCNIAGWILGNPECESLSTASSWSYIVETSSSDNGTCYPGDFINYEELREQLSSVSSFERFEIFPKTSSWPNHDSNKGVTAACPHAGAKSFYKNLIWLVKKGNSYPKLSKSYINDKGKEVLVLWGIHHPSTTADQQSLYQNADAYVFVGTSRYSKKFKPEIAIRPKVRDQEGRMNYYWTLVEPGDKITFEATGNLVVPRYAFAMERNAGSGIIISDTPVHDCNTTCQTPKGAINTSLPFQNIHPITIGKCPKYVKSTKLRLATGLRNVPSIQSRGLFGAIAGFIEGGWTGMVDGWYGYHHQNEQGSGYAADLKSTQNAIDKITNKVNSVIEKMNTQFTAVGKEFNHLEKRIENLNKKVDDGFLDIWTYNEELLVLLENERTLDYHDSNVKNLYEKVRNQLKNNAKEIGNGCFEFYHKCDNTCMESVKNGTYDYPKYSEEAKLNREEIDGVKLESTRIYQILAIYSTVASSLVLVVSLGAISFWMCSNGSLQCRICI

SEQ ID NO: 8236 - protein, 566 aa, synthetic construct
  REGION 1..566: note = hemagglutinin__InfluenzaA__AFB77630
MKAILVVLLYTFATANADTLCIGYHANNSTDTVDTVLEKNVTVTHSVNLLEDKHNGKLCKLRGVAPLHLGKCNIAGWILGNPECESLSTASSWSYIVETSSSDNGTCYPGDFINYEELREQLSSVSSFERFEIFPKTSSWPNHESNKGVTAACPHAGAKSFYKNLIWLVKKGNSYPKLSKSYINDKGKEVLVLWGIHHPSTTADQQSLYQNADAYVFVGTSRYSKKFKPEIAIRPKVRDQEGRMNYYWTLVEPGDKITFEATGNLVVPRYAFAMERNAGSGIIISDTPVHDCNTTCQTPKGAINTSLPFQNIHPITIGKCPKYVKSTKLRLATGLRNVPSIQSRGLFGAIAGFIEGGWTGMVDGWYGYHHQNEQGSGYAADLKSTQNAIDKITNKVNSVIEKMNTQFTAVGKEFNHLEKRIENLNKKVDDGFLDIWTYNAELLVLLENERTLDYHDSNVKNLYEKVRNQLKNNAKEIGNGCFEFYHKCDNTCMESVKNGTYDYPKYSEEAKLNREEIDGVKLESTRIYQILAIYSTVASSLVLVVSLGAISFWMCSNGSLQCRICI

SEQ ID NO: 8237 - protein, 566 aa, synthetic construct
  REGION 1..566: note = hemagglutinin__InfluenzaA__AFB77631
MKAILVVLLYTFTTANADTLCIGYHANNSTDTVDTVLEKNVTVTHSVNLLEDKHNGKLCKLRGVAPLHLGKCNIAGWILGNPECESLSTASSWSYIVETSSSDNGTCYPGDFINYEELREQLSSVSSFERFEIFPKTSSWPNHDSNKGVTAACPHAGAKSFYKNLIWLVKKGNSYPKLSKSYINDKGKEVLVLWGIHHPSTTADQQSLYQNADAYVFVGTSRYSKKFKPEIAIRPKVRDQEGRMNYYWTLVEPGDKITFEATGNLVVPRYAFAMERNAGSGIIISDTPVHDCNTTCQTPKGAINTSLPFQNIHPITIGKCPKYVKSTKLRLATGLRNVPSIQSRGLFGAIAGFIEGGWTGMVDGWYGYHHQNEQGSGYAADLKSTQNAIDKITNKVNSVIEKMNTQFTAVGKEFNHLEKRIENLNKKVDDGFLDIWTYNAELLVLLENERTLDYHDSNVKNLYEKVRNQLKTNAKEIGNGCFEFYHKCDNTCMESVKNGTYDYPKYSEEAKLNREEIDGVKLESTRIYQILAIYSTVASSLVLVVSLGAISFWMCSNGSLQCRICI

SEQ ID NO: 8238 - protein, 566 aa, synthetic construct
  REGION 1..566: note = hemagglutinin__InfluenzaA__AFB77632
MKAILVVLLYTFATANADTLCIGYHANNSTDTVDTVLEKNVTVTHSVNLLEDKHNGKLCKLRGVAPLHLGKCNIAGWILGNPECESLTTASSWSYIVETSSSDNGTCYPGDFINYEELREQLSSVSSFERFEIFPKTSSWPNHDSNKGVTAACPHAGAKSFYKNLIWLVKKGNSYPKLSKSYINDKGKEVLVLWGIHHPSTTADQQSLYQNADAYVFVGTSRYSKKFKPEIAIRPKVRDQEGRMNYYWTLVEPGDKITFEATGNLVVPRYAFAMERNAGSGIIISDTPVHDCNTTCQTPKGAINTSLPFQNIHPITIGKCPKYVKSTKLRLATGLRNVPSIQSRGLFGAIAGFIEGGWTGMVDGWYGYHHQNEQGSGYAADLKSTQNAIDKITNKVNSVIEKMNTQFTAVGKEFNHLEKRIENLNKKVDDGFLDIWTYNAELLVLLENERTLDYHDSNVKNLYEKVRNQLKNNAKEIGNGCFEFYHKCDNTCMESVKNGTYDYPKYSEEAKLNREEIDGVKLESTRIYQILAIYSTVASSLVLVVSLGAISFWMCSNGSLQCKICI

SEQ ID NO: 8239 - protein, 566 aa, synthetic construct
  REGION 1..566: note = hemagglutinin__InfluenzaA__AFB77633
MKAILVVLLYTFATANADTLCIGYHANNSTDTVDTVLEKNVTVTHSVNLLEDKHNGKLCKLRGVAPLHLGKCNIAGWILGNPECESLSTASSWSYIVETSSSDNGTCYPGDFINYEELREQLSSVSSFERFEIFPKTSSWPNHDSNKGVTAACSHAGAKSFYKNLIWLVKKGNSYPKLSKSYINDKGKEVLVLWGIHHPSTTADQQSLYQNADAYVFVGTSRYSKKFKPEIAIRPKVRDQEGRMNYYWTLVEPGDKITFEATGNLVVPRYAFAMERNAGSGIIISDTPVHDCNTTCQTPKGAINTSLPFQNIHPITIGKCPKYVKSTKLRLATGLRNVPSIQSRGLFGAIAGFIEGGWTGMVDGWYGYHHQNEQGSGYAADLKSTQNAIDKITNKVNSVIEKMNTQFTAVGKEFNHLEKRIENLNKKVDDGFLDIWTYNAELLVLLENERTLDYHDSNVKNLYEKVKNQLKNNAKEIGNGCFEFYHKCDNTPIKNVKNGTYDYPKYSEEAKLNREEIDGVKLESTRIYQILAIYSTVASSLVLVVSLGAISFWMCSNGSLQCRICI

SEQ ID NO: 8240 - protein, 566 aa, synthetic construct
  REGION 1..566: note = hemagglutinin__InfluenzaA__AFB77634
MKAILVVLLYTFATANADTLCIGYHANNSTDTVDTVLEKNVTVTHSVNLLEDKHNGKLCKLRGVAPLHLGKCNIAGWILGNPECESLSTASSWSYIVETSSSDNGTCYPGDFINYEELREQLSSVSSFERFEIFPKTSSWPNHDSNKGVTAACPHAGAKSFYKNLIWLVKKGNSYPKLSKSYINDKGKEVLVLWGIHHPSTTADQQSLYQNADAYVFVGTSRYSKKFKPEIAIRPKVRDQEGRMNYYWTLVEPGEKITFEATGNLVVPRYAFAMERNAGSGIIISDTPVHDCNTTCQTPKGAINTSLPFQNIHPITIGKCPKYVKSTKLRLATGLRNVPSIQSRGLFGAIAGFIEGGWTGMVDGWYGYHHQNEQGSGYAADLKSTQNAIDKITNKVNSVIEKMNTQFTAVGKEFNHLEKRIENLNKKVDDGFLDIWTYNAELLVLLENERTLDYHDSNVKNLYEKVRNQLKNNAKEIGNGCFEFYHKCDNTCMESVKNGTYDYPKYSEEAKLNREEIDGVKLESTRIYQILAIYSTVASSLVLVVSLGAISFWMCSNGSLQCRICI

SEQ ID NO: 8241 - protein, 566 aa, synthetic construct
  REGION 1..566: note = hemagglutinin__InfluenzaA__AFB77635
MKAILVVLLYTFATANADTLCIGYHANNSTDTVDTVLEKNVTVTHSVNLLEDKHNGKLCKLRGVAPLHLGKCNIAGWILGNPECESLSTASPWSYIVETSSSDNGTCYPGDFINYEELREQLSSVSSFERFEIFPKTSSWPNHDSNKGVTAACPHAGAKSFYKNLIWLVKKGNSYPKLSKSYINDKGKEVLVLWGIHHPSTTADQQSLYQNADAYVFVGTSRYSKKFKPEIAIRPKVRDQEGRMNYYWTLVEPGDKITFEATGNLVVPRYAFAMERNAGSGIIISDTPVHDCNTTCQTPKGAINTSLPFQNIHPITIGKCPKYVKSTKLRLATGLRNVPSIQSRGLFGAIAGFIEGGWTGMVDGWYGYHHQNEQGSGYAADLKSTQNAIDKITNKVNSVIEKMNTQFTAVGKEFNHLEKRIENLNKKVDDGFLDIWTYNAELLVLLENERTLDYHDSNVKNLYEKVRNQLKNNAKEIGNGCFEFYHKCDNTCMESVKNGTYDYPKYSEEAKLNREEIDGVKLESTRIYQILAIYSTVASSLVLVVSLGAISFWMCSNGSLQCRICI

SEQ ID NO: 8242 - protein, 566 aa, synthetic construct
  REGION 1..566: note = hemagglutinin__InfluenzaA__AFB77636
MKAILVVLLYTFATANADTLCIGYHANNSTDTVDTVLEKNVTVTHSVNLLEDKHNGKLCKLRGVAPLHLGKCNIAGWILGNPECESLSTASSWSYIVETSSSDNGTCYPGDFINYEELREQLSSVSSFERFEIFPKTSSWPNHDSNKGVTAACPHAGAKSFYKNLIWLVKKGNSYPKLSKSYINDKGKEVLVLWGIHHPSTTADQQSLYQNADAYVFVGTSRYSKKFKPEIAIRPKVRDQEGRMNYYWTLVEPGDKITFEATGNLVVPRYAFAMERKAGSGIIISDTPVHDCNTTCQTPKGAINTSLPFQNIHPITIGKCPKYVKSTKLRLATGLRNVPSIQSRGLFGAIAGFIEGGWTGMVDGWYGYHHQNEQGSGYAADLKSTQNAIDKITNKVNSVIEKMNTQFTAVGKEFNHLEKRIENLNKKVDDGFLDIWTYNAELLVLLENERTLDYHDSNVKNLYEKVRNQLKNNAKEIGNGCFEFYHKCDNTCMESVKNGTYDYPKYSEEAKLNREEIDGVKLESTRIYQILAIYSTVASSLVMVVSLGAISFWMCSNGSLQCRICI

SEQ ID NO: 8243 - protein, 566 aa, synthetic construct
  REGION 1..566: note = hemagglutinin__InfluenzaA__AFB77637
MKAILVVLLYTFATANADTLCIGYHANNSTDTVDTVLEKNVTVTHSVNLLEDKHNGKLCKLRGVAPLHLGKCNIAGWILGNPECESLSTASSWSYIVETSSSDNGTCYPGDFINYEELREQLSSVSSFERFEIFPKTSSWPNHDSNKGVTAACPHAGAKSFYKNLIWLVKKGNSYPKLSKSYINDKGKEVLVLWGIHHPSTTADQQSLYQNADAYVFVGTSRYSKKFKPEIAIRPKGRDQEGRMNYYWTLVEPGDKITFEATGNLVVPRYAFAMERNAGSGIIISDTPVHDCNTTCQTPKGAINTSLPFQNIHPITIGKCPKYVKSTKLRLATGLRNVPSIQSRGLFGAIAGFIEGGWTGMVDGWYGYHHQNEQGSGYAADLKSTQNAIDKITNKVNSVIEKMNTQFTAVGKEFNHLEKRIENLNKKVDDGFLDIWTYNAELLVLLENERTLDYHDSNVKNLYEKVRNQLKNNAKEIGNGCFEFYHKCDNTCMESVKNGTYDYPKYSEEAKLNREEIDGVKLESTRIYQILAIYSTVASSLVLVVSLGAISFWMCSNGSLQCRICI

SEQ ID NO: 8244 - protein, 566 aa, synthetic construct
  REGION 1..566: note = hemagglutinin__InfluenzaA__AFB77638
MKAILVVLLYTFATANADTLCIGYHANNSTDTVDTVLEKNVTVTHSVNLLEDKHNGKLCKLRGVAPLHLGKCNIAGWILGNPECESLSTASSWSYIVETSSSDNGTCYPGDFINYEELREQLSSVSSFERFEIFPKTSSWPNHDSNKGVTAACPHAGAKSFYKNLIWLVKKGNSYPKLSKFYINDKGKEVLVLWGIHHPSTTADQQSLYQNADAYVFVGTSRYSKKFKPEIAIRPKVRDQEGRMNYYWTLVEPGDKITFEATGNLVVPRYAFAMERNAGSGIIISDTPVHDCNTTCQTPKGAINTSLPFQNIHPITIGKCPKYVKSTKLRLATGLRNVPSIQSRGLFGAIAGFIEGGWTGMVDGWYGYHHQNEQGSGYAADLKSTQNAIDKITNKVNSVIEKMNTQFTAVGKEFNHLEKRIENLNKKVDDGFLDIWTYNAELLVLLENERTLDYHDSNVKNLYEKVRNQLKNNAKEIGNGCFEFYHKCDNTCMESVKNGTYDYPKYSEEAKLNREEIDGVKLESTRIYQILAIYSTVASSLVLVVSLGAISFWMCSNGSLQCRICI

SEQ ID NO: 8245 - protein, 566 aa, synthetic construct; identical to SEQ ID NO: 6867
  REGION 1..566: note = hemagglutinin__InfluenzaA__AFB77639

SEQ ID NO: 8246 - protein, 566 aa, synthetic construct
  REGION 1..566: note = hemagglutinin__InfluenzaA__AFB77640
MKAILVVLLYTFATANADTLCIGYHANNSTDTVDTVLEKNVTVTHSVNLLEDKHNGKLCKLRGVAPLHLGKCNIAGWILGNPECESLSTASSWSYIVETSSSDNGTCYPGDFINYEELREQLSSVSSFERFEIFPKTSSWPNHDSNKGVTAACPHAGAKSFYKNLIWLVKKGNSYPKLSKSYINDKGKEVLVLWGIHHPSTTADQQGLYQNADAYVFVGTSRYSKKFKPEIAIRPKVRDQEGRMNYYWTLVEPGDKITFEATGNLVVPRYAFAMERNAGSGIIISDTPVHDCNTTCQTPKGAINTSLPFQNIHPITIGKCPKYVKSTKLRLATGLRNVPSIQSRGLFGAIAGFIEGGWTGMVDGWYGYHHQNEQGSGYAADLKSTQNAIDKITNKVNSVIEKMNTQFTAVGKEFNHLEKRIENLNKKVDDGFLDIWTYNAELLVLLENERTLDYHDSNVKNLYEKVRNQLKNNAKEIGNGCFEFYHKCDNTCMESVKNGTYDYPKYSEEAKLNREEIDGVKLESTRIYQILAIYSTVASSLVLVVSLGAISFWMCSNGSLQCRICI

SEQ ID NO: 8247 - protein, 566 aa, synthetic construct
  REGION 1..566: note = hemagglutinin__InfluenzaA__AFB77641
MKAILVVLLYTFATANADTLCIGYHANNSTDTVDTVLEKNVTVTHSVNLLEDKHNGKLCKLRGVAPLHLGKCNIAGWILGNPECESLSTASSWSYIVETSSSDNGTCYPGDFINYEELREQLSSVSSFERFEIFPKTSSWPNHDSNKGVTAACPHAGAKSFYKNLIWLVKKGNSYPKLSKSYINDKGKEVLVLWGIHHPSTTADQQSLYQNADAYVFVGTSRYSKKFKPEIAIRPKVRDQEGRMNYYWTLVEPGDKITFEATGNLVVPRYAFAMERNAGSGIIISDTPVHDCNTTCQTPKGAINTSLPFQNIHPITIGKCPKYVKSTKLRLATGLRNVPSIQSRGLFGAIAGFIEGGWTGMVDGWYGYHHQNEQGSGYAADLKSTQNAIDKITNKVNSVIEKMNTQFTAVGKEFNHLEKRIENLNKKVDDGFLDIWTYNAELLVLLENERTLDYHDSNVKNLYEKVRNQLKNNAKEIGNGCFEFYHKCDNMCMESVKNGTYDYPKYSEEAKLNREEIDGVKLESTRIYQILAIYSTVASSLVLVVSLGAISFWMCSNGSLQCRICI

SEQ ID NO: 8248 - protein, 566 aa, synthetic construct; identical to SEQ ID NO: 6867
  REGION 1..566: note = hemagglutinin__InfluenzaA__AFB77642

SEQ ID NO: 8249 - protein, 566 aa, synthetic construct
  REGION 1..566: note = hemagglutinin__InfluenzaA__AFB77643
MKAILVVLLYTFATANADTLCIGYHANNSTDTVDTVLEKNVTVTHSVNLLEDKHNGKLCKLRGVAPLHLGKCNIAGWILGNPECESLSTASSWSYIVETSSSDNGTCYPGDFINYEELREQLSSVSSFERFEIFPKPSSWPNHDSNKGVTAACPHAGAKSFYKNLIWLVKKGNSYPKLSKSYINDKGKEVLVLWGIHHPSTTADQQSLYQNADAYVFVGTSRYSKKFKPEIAIRPKVRDQEGRMNYYWTLVEPGDKITFEATGNLVVPRYAFAMERNAGSGIIISDTPVHDCNTTCQTPKGAINTSLPFQNIHPITIGKCPKYVKSTKLRLATGLRNVPSIQSRGLFGAIAGFIEGGWTGMVDGWYGYHHQNEQGSGYAADLKSTQNAIDKITNKVNSVIEKMNTQFTAVGKEFNHLEKRIENLNKKVDDGFLDIWTYNAELLVLLENERTLDYHDSNVKNLYEKVRNQLKNNAKEIGNGCFEFYHKCDNTCMESVKNGTYDDTKDSEEAKLNREEIDGVKLESTRIYQILAIYSTVASSLVLVVSLGAISFWMCSNGSLQCRICI

SEQ ID NO: 8250 - protein, 566 aa, synthetic construct
  REGION 1..566: note = hemagglutinin__InfluenzaA__AFB77691
MKTIIALSYILCLVFAQKLPGNDNSTATLCLGHHAVPNGTIVKTITNDQIEVTNATELVQNSSTGEICDSPHQILDGENCTLIDALLGDPQCDGFQNKKWDLFVERSKAYSNCYPYDVPDYASLRSLVASSGTLEFNNESFNWTGVTQNGTSSACIRRSNNSFFSRLNWLTHLNFKYPALNVTMPNNEQFEKLYIWGVHHPGTDKDQIFLYAQASGRITVSTKRSQQAVIPNIGSRLRVRNIPSRISIYWTIVKPGDILLINSTGNLNAPRGYFKIRSGKSSIMRSDAPIGKCNSECITPNGSIPNDKPFQNVNRITYGACPRYVKQNTLKLATGMRNVPEKQTRGIFGAIAGFIENGWEGMVDGWYGFRHQNSEGRGQAADLKSTQAAIDQINGKLNRLIGKTNEKFHQIEKEFSEVEGRIQDLEKYVEDTKIDLWSYNAELLVALENQHTIDLTDSEMNKLFEKTKNQLRENAEDMGNGCFKIYHKCDNTCIGSIRNGTYDHDAYRDEALNNRFQIKGVELKSGYKDWILWISFAISCFLLCVALLGFIMWACQKGNIRCNICI

SEQ ID NO: 8251 - protein, 566 aa, synthetic construct
  REGION 1..566: note = hemagglutinin__InfluenzaA__AFB77692
MKTIIALSYILCLVFAQKLPGNDNSTATLCLGHHAVPNGTIVKTITNDQIEVTNATELVQNSSTGEICDSPHQILDGENCTLIDALLGDPQCDGFQNKKWDLFVERSKAYSNCYPYDVPDYASLRSLVASSGTLEFNNESFNWTGVTQNGTSSACIRRSNNSFFSRLNWLTHLNFKYPALNVTMPNNEQFDKLYIWGVHHPGTDKDQIFLYAQASGRITVSTKRSQQAVIPNTGSRPRVRNIPSRISIYWTIVKPGDILLINSTGNLIAPRGYFKIRSGKSSIMRSDAPIGKCNSECITPNGSIPNDKPFQNVNRITYGACPRYVKQNTLKLATGMRNVPEKQTRGIFGAIAGFIENGWEGMVDGWYGFRHQNSEGRGQAADLKSTQAAIDQINGKLNRLIGKTNEKFHQIEKEFSEVEGRIQDLEKYVEDTKIDLWSYNAELLVALENQHTIDLTDSEMNKLFEKTKKQLRENAEDMGNGCFKIYHKCDNACIGSIRNGTYDHDVYRDEALNNRFQIKGVELKSGYKDWILWISFAISCFLLCVALLGFIMWACQKGNIRCNICI

SEQ ID NO: 8252 - protein, 566 aa, synthetic construct; identical to SEQ ID NO: 7782
  REGION 1..566: note = hemagglutinin__InfluenzaA__AFB77693

SEQ ID NO: 8253 - protein, 566 aa, synthetic construct
  REGION 1..566: note = hemagglutinin__InfluenzaA__AFB77694
MKTIIALSYILCLVFAQKLPGNDNSTATLCLGHHAVPNGTIVKTIANDQIEVTNATELVQNSSTGEICDSPHQILDGENCTLIDALLGDPQCDDFQNKKWDLFVERSKAYSNCYPYDVPDYASLRSLVASSGTLEFNNESFNWTGVTQNGTSSACIRRSNNSFFSRLNWLTHLNFKYPALNVTMPNNEQFDKLYIWGVHHPGTDKDQIFLYAQASGRITVSTKRSQQAVIPNIGSRPRVRNIPSRISIYWTIVKPGDILLINSTGNLIAPRGYFKIRSGKSSIMRSDAPIGKCNSECITPNGSIPNDKPFQNVNRITYGACPRYVKQNTLKLATGMRNVPEKQTRGIFGAIAGFIENGWEGMVDGWYGFRHQNSEGRGQAADLKSTQAAIDQINGKLNRLIGKTNEKFHQIEKEFSEVEGRIQDLEKYVEDTKIDLWSYNAELLVALENQHTIDLTDSEMNKLFEKTKKQLRENAEDMGNGCFKIYHKCDNTCIGSIRNGTYDHDVYRDEALNNRFQIKGVELKSGYKDWILWISFAISCFLLCVALLGFIMWACQKGNIRCNICI

SEQ ID NO: 8254 - protein, 566 aa, synthetic construct
  REGION 1..566: note = hemagglutinin__InfluenzaA__AFB77695
MKTIIALSYILCLVFAQKLPGNDNSTATLCLGHHAVPNGTIVKTITNDQIEVTNATELVQNSSTGEICDSPHQILDGENCTLIDALLGDPQCDDFQNKKWDLFVERSKAYSNCYPYDVPDYASLRSLVASSGTLEFNNESFNWTGVTQNGTSSACIRRSNNSFFSRLNWLTHLNFKYPALNVTMPNNEQFDKLYIWGVHHPGTDKDQIFLYAQASGRITVSTKRSQQAVIPNIGSRPRVRNIPSRISIYWTIVKPGDILLINSTGNLIAPRGYFKIRSGKSSIMRSDAPIGKCNSECITPNGSIPNDKPFQNVNRITYGACPRYVKQNTLKLATGMRNVPEKQTRGIFGAIAGFIENGWEGMVDGWYGFRHQNSEGRGQAADLKSTQAAIDQINGKLNRLIGKTNEKFHQIEKEFSEVEGRIQDLEKYVEDTKIDLWSYNAELLVALENQHTIDLTDSEMNKLFEKTKKQLRENAEDMGNGCFKIYHKCDNACIGSIRNGTYDHDVYRDEALNNRFQIKGVELKSGYKDWILWISFAISCFLLCVALLGFIMWACQKGNIRCNICI

SEQ ID NO: 8255 - protein, 566 aa, synthetic construct
  REGION 1..566: note = hemagglutinin__InfluenzaA__AFB78126
MKTIIALSYILCLVFAQKLPGNDNSTATLCLGHHAVSNGTLVKTITNDQIEVTNATELVQSSSTGRICDSPHQILDGENCTLIDALLGDPHCDGFQNKEWDLFVERSKAYSNCYPYDVPDYASLRSLVASSGTLEFNNESFNWTGVAQDGTSSACKRRSNKSFFSRLNWLHQLKYKYPALNVTMPNNEKFDKLYIWGVHHPSTDSDQISIYAQASGRVTVSTKRSQQTVIPNIGSSPWVRGASSRISIYWTIVKPGDILLINSTGNLIAPRGYFKIRSGKSSIMRSDAPIGKCNSECITPNGSIPNDKPFQNVNRITYGACPRYVKQNTLKLATGMRNVPEKQTRGIFGAIAGFIENGWEGMVDGWYGFRHQNSEGTGQAADLKSTQAATNQINGKLNRLIEKTNEKFHQIEKEFSEVEGRIQDLEKYVEDTKIDLWSYNAELLVALENQHTIDLTDSEMNKLFERTKKQLRENAEDMGNGCFKIYHKCDNACIGSIRNGTYDHDVYRDEALNNRFQIKGVELKSGYKDWILWISFAISCFLLCVVLLGFIMWACQKGNIRCNICI

SEQ ID NO: 8256 - protein, 566 aa, synthetic construct
  REGION 1..566: note = hemagglutinin__InfluenzaA__AFC34056
MKTIIALSYILCLVFAQKLPGNDNSTATLCLGHHAVPNGTIVKTITNDQIEVTNATELVQSSSTGEICDSPHQILDGENCTLIDALLGDPQCDGFQNKKWDLFVERSKAYSNCYPYDVPDYASLRSLVASSGTLEFNNESFNWTGVTQNGTSSACIRRSNSSFFSRLNWLTHLNFKYPALNVTMPNNEQFDKLYIWGVHHPGTDKDQIFLYAQSSGRITVSTKRSQQAVIPNIGSRPRIRNIPSRISIYWTIVKPGDILLINSTGNLIAPRGYFKIRSGKSSIMRSDAPIGKCNSECITPNGSIPNDKPFQNVNRITYGACPRYVKQRTLKLATGMRNVPEKQTRGIFGAIAGFIENGWEGMVDGWYGFRHQNSEGRGQAADLKSTQAAIDQINGKLNRLIGKTNEKFHQIEKEFSEVEGRIQDLEKYVEDTKIDLWSYNAELLVALENQHTIDLTDSEMNKLFEKTKKQLRENAEDMGNGCFKIYHKCDNACIGSIRNGTYNHDVYRDEALNNRFQIKGVELKSGYKDWILWISFAISCFLLCVALLGFIMWACQKGNIRCNICI

SEQ ID NO: 8257 - protein, 566 aa, synthetic construct; identical to SEQ ID NO: 8256
  REGION 1..566: note = hemagglutinin__InfluenzaA__AFC34057

SEQ ID NO: 8258 - protein, 566 aa, synthetic construct
  REGION 1..566: note = hemagglutinin__InfluenzaA__AFD32426
MKANLLVLLSALAAADADTICIGYHANNSTDTVDTVLEKNVTVTHSVNLLEDSHNGKLCKLRGVAPLHLGKCNIAGRILGNPECESLSTASSWSYIVETPSSDNGTCYPGDFIDYEELREQLSSVSSFERFEIFPKTSSWPNHDSNKGVTAACPHAGAKSFYKNLIWLVKKGNSYPKLSKSYINDKGKEVLVLWGIHHPSTSADQQSLYQNADTYVFVGSSRYSKKFKPEIAIRPKVRDQEGRMNYYWTLVEPGDKITFEATGNLVVPRYAFAMERNAGSGIIISDTPVHDCNTKCQTPLGAINSSLPYQNIHPVTIGECPKYVRSAKLRMVTGLRNTPSIQSRGLFGAIAGFIEGGWTGMIDGWYGYHHQNEQGSGYAADQKSTQNAINGITNKVNTVIEKMNIQFTAVGKEFNKLEKRMENLNKKVDDGFLDIWTYNAELLVLLENERTLDFHDSNVKNLYEKVKSQLKNNAKEIGNGCFEFYHKCDNECMESVRNGTYDYPKYSEESKLNREKVDGVKLESMGIYQILAIYSTVASSLVLLVSLGAISFWMCSNGSLQCRICI

SEQ ID NO: 8259 - protein, 565 aa, synthetic construct
  REGION 1..565: note = hemagglutinin__InfluenzaA__AFD32427
MKANLLVLLSALAAADADTICIGYHANNSTDTVDTVLEKNVTVTHSVNLLEDSHNGKLCDLDGVKPLILRDCSVAGWLLGNPMCDEFINVPEWSYIVEKANPVNDLCYPGDFNDYEELKHLLSRINHFEKIQIIPKSSWSSHEASLGVSSACPYQGKSSFFRNVVWLIKKNSTYPTIKRSYNNTNQEDLLVLWGIHHPNDAAEQTKLYQNPTTYISVGTSTLNQRLVPRIATRSKVNGQSGRMEFFWTILKPNDAINFESNGNFIAPEYAYKIVKKGDSTIMKSELEYGNCNTKCQTPLGAINSSLPYQNIHPVTIGECPKYVRSAKLRMVTGLRNTPSIQSRGLFGAIAGFIEGGWTGMIDGWYGYHHQNEQGSGYAADQKSTQNAINGITNKVNTVIEKMNIQFTAVGKEFNKLEKRMENLNKKVDDGFLDIWTYNAELLVLLENERTLDFHDSNVKNLYEKVKSQLKNNAKEIGNGCFEFYHKCDNECMESVRNGTYDYPKYSEESKLNREKVDGVKLESMGIYQILAIYSTVASSLVLLVSLGAISFWMCSNGSLQCRICI

SEQ ID NO: 8260 - protein, 573 aa, synthetic construct
  REGION 1..573: note = hemagglutinin__InfluenzaA__AFD32428
MKTIIALSYILCLVFAQKLPGNDNSTATLCLGHHAVPNGTIVKTITNDQIEVTNATELVQSSSTGEICDLDGVKPLILRDCSVAGWLLGNPMCDEFINVPEWSYIVEKANPVNDLCYPGDFNDYEELKHLLSRINHFEKIQIIPKSSWSSHEASLGVSSACPYQGKSSFFRNVVWLIKKNSTYPTIKRSYNNTNQEDLLVLWGIHHPNDAAEQTKLYQNPTTYISVGTSTLNQRLVPRIATRSKVNGQSGRMEFFWTILKPNDAINFESNGNFIAPEYAYKIVKKGDSTIMKSELEYGNCNSECITPNGSIPNDKPFQNVNRITYGACPRYVKQNTLKLATGMRNVPEKQTRGIFGAIAGFIENGWEGMVDGWYGFRHQNSEGRGQAADLKSTQAAIDQINGKLNRLIGKTNEKFHQIEKEFSEVEGRIQDLEKYVEDTKIDLWSYNAELLVALENQHTIDLTDSEMNKLFEKTKKQLRENAEDMGNGCFKIYHKCDNACIGSIRNGTYDHDVYRDEALNNRFQIKGVELKSGYKDWILWISFAISCFLLCVALLGFIMWACQKGNIRCNICI

SEQ ID NO: 8261 - protein, 567 aa, synthetic construct
  REGION 1..567: note = hemagglutinin__InfluenzaA__AFD32429
MKTIIALSYILCLVFAQKLPGNDNSTATLCLGHHAVPNGTIVKTITNDQIEVTNATELVQSSSTGEICTQGKRPTDLGQCGLLGTLIGPPQCDQFLEFDADLIIERREGTDVCYPGKFTNEESLRQILRGSGGIDKESMGFTYSGIRTNGATSACRRSGSSFYAEMKWLLSNSDNAEFPQMTKSYRNPRNKPALIIWGVHHSGSATEQTKLYGSGNKLITVGSSKYQQSFTPSPGARPQVNGQSGRIDFHWLLLDPNDTVTFTFNGAFIAPDRASFFRGESLGVQSDVPLDSGCNSECITPNGSIPNDKPFQNVNRITYGACPRYVKQNTLKLATGMRNVPEKQTRGIFGAIAGFIENGWEGMVDGWYGFRHQNSEGRGQAADLKSTQAAIDQINGKLNRLIGKTNEKFHQIEKEFSEVEGRIQDLEKYVEDTKIDLWSYNAELLVALENQHTIDLTDSEMNKLFEKTKKQLRENAEDMGNGCFKIYHKCDNACIGSIRNGTYDHDVYRDEALNNRFQIKGVELKSGYKDWILWISFAISCFLLCVALLGFIMWACQKGNIRCNICI

SEQ ID NO: 8262 - protein, 566 aa, synthetic construct; identical to SEQ ID NO: 73
  REGION 1..566: note = hemagglutinin__InfluenzaA__AFD63527

SEQ ID NO: 8263 - protein, 566 aa, synthetic construct
  REGION 1..566: note = hemagglutinin__InfluenzaA__AFD63538
MKTIIALSYILCLVFAQKLPGNDNSTATLCLGHHAVPNGTIVKTITNDQIEVTNATELVQSSSTGGICDSPHQILDGENCTLIDALLGDPQCDGFQNKKWDLFVERSKAYSNCYPYDVPDYASLRSIVASSGTLEFNNESFNWTGVTQNGTSSACKRKSNKSFFSRLNWLTHLKYKYPALNVTMPNNEKFDKLYIWGVHHPGTDNDQISLYAQASGRITVSTKRSQQTVIPNIGSRPRVRDVSSRISIYWTIVKPGDILLINSTGNLIAPRGYFKIRSGKSSIMRSDAPIGKCNSECITPNGSIPNDKPFQNVNRITYGACPRYVKQNTLKLATGMRNVPEKQTRGIFGAIAGFIENGWEGMVDGWYGFRHQNSEGTGQAADLKSTQAAINQINGKLNRLIGKTNEKFHQIEKEFSEVEGRIQDLEKYVEDTKIDLWSYNAELLVALENQHTIDLTDSEMNKLFERTKKQLRENAEDMGNGCFKIYHKCDNACIGSIRNGTYDHDVYRDEALNNRYQIKGVELKSGYKDWILWISFAISCFLLCVALLGFIMWACQKGNIRCNICI

SEQ ID NO: 8264 - protein, 566 aa, synthetic construct
  REGION 1..566: note = hemagglutinin__InfluenzaA__AFD63549
MKTIIALSYILCLVFAQKLPGNDNSTATLCLGHHAVPNGTIVKTITNDQIEVTNATELVQISSTGGICDSPHQILDGENCTLIDALLGDPQCDGFQNKKWDLFVERSKAYSNCYPYDVPDYASLRSLVASSGTLEFNNESFDWTGVTQNGTSSACKRRSNKSFFSRLNWLTHLKYKYPALNVTMPNNEKFDKLYIWGVHHPGTDNDQISLYAQASGRITVSTKRSQQTVIPNIGSRPRVRDVSSRISIYWTIVKPGDILLINSTGNLIAPRGYFKIRSGKSSIMRSDAPIGKCNSECITPNGSIPNDKPFQNVNRITYGACPRYVKQNTLKLATGMRNVPEKQTRGIFGAIAGFIENGWEGMVDGWYGFRHQNSEGTGQAADLKSTQAAINQINGKLNRLIGKTNEKFHQIEKEFSEVEGRIQDLEKYVEDTKIDLWSYNAELLVALENQHTIDLTDSEMNKLFERTKKQLRENAEDMGNGCFKIYHKCDNACIGSIRNGTYDHDVYRDEALNNRFQIKGVELKSGYKDWILWISFAISCFLLCVALLGFIMWACQKGNIRCNICI

SEQ ID NO: 8265 - protein, 566 aa, synthetic construct; identical to SEQ ID NO: 73
  REGION 1..566: note = hemagglutinin__InfluenzaA__AFD63571

SEQ ID NO: 8266 - protein, 566 aa, synthetic construct
  REGION 1..566: note = hemagglutinin__InfluenzaA__AFD63615
MKTIIALSYILCLVFAQKLPGNDNSTATLCLGHHAVPNGTIVKTITNDQIEVTNATELVQSSSTGGICDSPHQILDGENCTLIDALLGDPQCDGFQNKKWDLFVERSKAYSNCYPYDVPDYASLRSLVASSGTLEFNNESFNWTGVTQNGTSSACKRKSNKSFFSRLNWLTHLKYKYPALNVTMPNNEKFDKLYIWGVHHPGTDNDQISLYAQASGRITVSTKRSQQTVIPNIGSRPRVRDVSSRISIYWTIVKPGDILLINSTGNLIAPRGYFKIRSGKSSIMRSDAPIGKCNSECITPNGSIPNDKPFQNVNRITYGACPRYVKQNTLKLATGMRNVPEKQTRGIFGAIAGFIENGWEGMVDGWYGFRHQNSEGTGQAADLKSTQAAINQINGKLNRLIGKTNEKFHQIEKEFSEVEERIQDLEKYVEDTKIDLWSYNAELLVALENQHTIDLTDSEMNKLFERTKKQLRENAEDMGNGCFKIYHKCDNACIGSIRNGTYDHDVYRDEALNNRFQIKGVELKSGYKDWILWISFAISCFLLCVALLGFIMWACQKGNIRCNICI

SEQ ID NO: 8267 - protein, 566 aa, synthetic construct
  REGION 1..566: note = hemagglutinin__InfluenzaA__AFD63626
MKTIIALSYILCLVFAQKLPGNDNSTATLCLGHHAVPNGTIVKTITNDQIEVTNATELVQISSTGGICDSPHQILDGENCTLIDALLGDPQCDGFQNKKWDLFVERSKAYSNCYPYDVPDYASLRSLVASSGTLEFNNESFDWTGVTQNGTSSACKRRSNKSFFSRLNWLTHLKYKYPALNVTMPNNEKFDKLYIWGVHHPGTDSDQISLYAQASGRITVSTKRSQQTVIPNIGSRPRVRDISSRISIYWTIVKPGDILLINSTGNLIAPRGYFKIRSGKSSIMRSDAPIGKCNSECITPNGSIPNDKPFQNVNRITYGACPRYVKQNTLKLATGMRNVPEKQTRGIFGAIAGFIENGWEGMVDGWYGFRHQNSEGTGQAADLKSTQAAINQINGKLNRLIGKTNEKFHQIEKEFSEVEGRIQDLEKYVEDTKIDLWSYNAELLVALENQHTIDLTDSEMNKLFERTKKQLRENAEDMGNGCFKIYHKCDNACIGSIRNGTYDHDVYRDEALNNRFQIKGVELKSGYKDWILWISFAISCFLLCVALLGFIMWACQKGNIRCNICI

SEQ ID NO: 8268 - protein, 566 aa, synthetic construct
  REGION 1..566: note = hemagglutinin__InfluenzaA__AFD63637
MKTIIALSYILCLVFAQKLPGNDNSTATLCLGHHAVPNGTIVKTITNDQIEVTNATELVQISSTGGICDSPHQILDGENCTLIDALLGDPQCDGFQNKKWDLFVERSKAYSNCYPYDVPDYASLRSLVASSGTLEFNNESFDWTGVTQNGTSSTCKRRSNKSFFSRLNWLTHLKYKYPALNVTMPNNEKFDKLYIWGVHHPGTDSDQISLYAQASGRITVSTKRSQQTVIPNIGSRPRVRDVSSRISIYWTIVKPGDILLINSTGNLIAPRGYFKIRSGKSSIMRSDAPIGKCNSECITPNGSIPNDKPFQNVNRITYGACPRYVKQNTLKLATGMRNVPEKQTRGIFGAIAGFIENGWEGMVDGWYGFRHQNSEGTGQAADLKSTQAAINQINGKLNRLIGKTNEKFHQIEKEFSEVEGRIQDLEKYVEDTKIDLWSYNAELLVALENQHTIDLTDSEMNKLFERTKKQLRENAEDMGNGCFKIYHKCDNACIGSIRNGTYDHDVYRDEALNNRFQIKGVELKSGYKDWILWISFAISCFLLCVALLGFIMWACQKGNIRCNICI

SEQ ID NO: 8269 - protein, 566 aa, synthetic construct
  REGION 1..566: note = hemagglutinin__InfluenzaA__AFD63648
MKTIIALSYILCLVFAQKLPGNDNSMATLCLGHHAVPNGTIVKTITNDQIEVTNATELVQISSTGGICDSPHQILDGENCTLIDALLGDPQCDGFQNKKWDLFVERSKAYSNCYPYDVPDYASLRSLVASSGTLEFNNESFDWTGVTQNGTSSACKRRSNKSFFSRLNWLTHLKYKYPALNVTMPNNEKFDKLYIWGVHHPGTDSDQISLYAQASGRITVSTKRSQQTVIPNIGSRPRVRDVSSRISIYWTIVKPGDILLINSTGNLIAPRGYFKIRSGKSSIMRSDAPIGKCNSECITPNGSIPNDKPFQNVNRITYGACPRYVKQNTLKLATGMRNVPEKQTRGIFGAIAGFIENGWEGMVDGWYGFRHQNSEGTGQAADLKSTQAAINQINGKLNRLIGKTNEKFHQIEKEFSEVEGRIQDLEKYVEDTKIDLWSYNAELLVALENQHTIDLTDSEMNKLFERTKKQLRENAEDMGNGCFKIYHKCDNACIGSIRNGTYDHDVYRDEALNNRFQIKGVELKSGYKDWILWISFAISCFLLCVALLGFIMWACQKGNIRCNICI

SEQ ID NO: 8270 - protein, 566 aa, synthetic construct; identical to SEQ ID NO: 73
  REGION 1..566: note = hemagglutinin__InfluenzaA__AFD63659

SEQ ID NO: 8271 - protein, 566 aa, synthetic construct
  REGION 1..566: note = hemagglutinin__InfluenzaA__AFD63681
MKTIIALSYILCLVFAQKLPGNDNSTATLCLGHHAVPNGTIVKTITNDQIEVTNATELVQSSSTGGICDSPHQILDGENCTLIDALLGDPQCDGFQNKKWDLFVERSKAYSNCYPYDVPDYASLRSLVASSGTLEFNNESFNWTGVTQNGTSSACKRKSNKSFFSRLNWLTHLKYKYPALNVTMPNNEKFDKLYIWGVHHPGTDNDQISLYAQASGRITVSTKRSQQTVIPNIGSRPRVRDVSSRISIYWTIVKPGDILLINSTGNLIAPRGYFKVRSGKSSIMRSDAPIGKCNSECITPNGSIPNDKPFQNVNRITYGACPRYVKQNTLKLATGMRNVPEKQTRGIFGAIAGFIENGWEGMVDGWYGFRHQNSEGTGQAADLKSTQAAINQINGKLNRLIGKTNEKFHQIEKEFSEVEGRIQDLEKYVEDTKIDLWSYNAELLVALENQHTIDLTDSEMNKLFERTKKQLRENAEDMGNGCFKIYHKCDNACIGSIRNGTYDHDVYRDEALNNRFQIKGVELKSGYKDWILWISFAISCFLLCVALLGFIMWACQKGNIRCNICI

SEQ ID NO: 8272 - protein, 566 aa, synthetic construct
  REGION 1..566: note = hemagglutinin__InfluenzaA__AFD63692
MKTIIALSYILCLVFAQKLPGNDNSTATLCLGHHAVPNGTIVKTITNDQIEVTNATELVQSSSTGGICDSPHQILDGENCTLIDALLGDPQCDGFQNKKWDLFVERSKAYSNCYPYDVPDYASLRSLVASSGTLEFNNESFDWTGVTQNGTSSACKRRSNKSFFSRLNWLTHLKYKYPALNVTMPNNEKFDKLYIWGVLHPGTDSDQISLYAQASGRITVSTKRSQQTVIPNIGSRPRVRDVSSRISIYWTIVKPGDILLINSTGNLIAPRGYFKIRSGKSSIMRSDAPIGKCNSECITPNGSIPNDKPFQNVNRITYGACPRYVKQNTLKLATGMRNVPEKQTRGIFGAIAGFIENGWEGMVDGWYGFRHQNSEGTGQAADLKSTQAAINQINGKLNRLIGKTNEKFHQIEKEFSEVEGRIQDLEKYVEDTKIDLWSYNAELLVALENQHTIDLTDSEMNKLFERTKKQLRENAEDMGNGCFKIYHKCDNACIGSIRNGTYDHDVYRDEALNNRFQIKGVELKSGYKDWILWISFAISCFLLCVALLGFIMWACQKGNIRCNICI

SEQ ID NO: 8273 - protein, 566 aa, synthetic construct
  REGION 1..566: note = hemagglutinin__InfluenzaA__AFD63703
MKTIIALSYILCLVFAQKLPGNDNSTATLCLGHHAVPNGTIVKTITNDQIEVTNATELVQISSTSGICDSPYQILDGENCTLIDALLGDPQCDGFQNKKWDLFVERSKAYSNCYPYDVPDYASLRSLVASSGTLEFNNESFDWTGVTQNGTSSACKRRSNKSFFSRLNWLTHLKYKYPALNVTMPNNEKFDKLYIWGVHHPGTDSDQISLYAQASGRITVSTKRSQQTVIPNIGSRPRVRDVSSQISIYWTIVKPGDILLINSTGNLIAPRGYFKIRSGKSSIMRSDAPIGKCNSECITPNGSIPNDKPFQNVNRITYGACPRYVKQNTLKLATGMRNVPEKQTRGIFGAIAGFIENGWEGMVDGWYGFRHQNSEGTGQAADLKSTQAAINQINGKLNRLIGKTNEKFHQIEKEFSEVEGRIQDLEKYVEDTKIDLWSYNAELLVALENQHTIDLTDSEMNKLFERTKKQLRENAEDMGNGCFKIYHKCDNACIGSIRNGTYDHDVYRDEALNNRFQIKGVELKSGYKDWILWISFAISCFLLCVALLGFIMWACQKGNIRCNICI

SEQ ID NO: 8274 - protein, 566 aa, synthetic construct
  REGION 1..566: note = hemagglutinin__InfluenzaA__AFD63714
MKTIIALSYILCLVFAQKLPGNDNSTATLCLGHHAVPNGTIVKTITNDQIEVTNATELVQISSTGGICDSPHQILDGENCTLIDALLGDPQCDGFQNKKWDLFVERSKAYSNCYPYDVPDYASLRSLVASSGTLEFNNESFDWTGVTQNGTSSTCKRRSNKSFFSRLNWLTHLKYKYPALNVTMPNNEKFDKLYIWGVHHPGTDNDQISLYAQASGRITVSTKRSQQTVIPNIGSRPRVRDVSSRISIYWTIVKPGDILLINSTGNLIAPRGYFKIRSGKSSIMRSDAPIGKCNSECITPNGSIPNDKPFQNVNRITYGACPRYVKQNTLKLATGMRNVPEKQTRGIFGAIAGFIENGWEGMVDGWYGFRHQNSEGTGQAADLKSTQAAINQINGKLNRLIGKTNEKFHQIEKEFSEVEGRIQDLEKYVEDTKIDLWSYNAELLVALENQQTIDLTDSEMNKLFERTKKQLRENAEDMGNGCFKIYHKCDNACIGSIRNGTYDHDVYRDEALNNRFHIKGVELKSGYKDWILWISFAISCFLLCVALLGFIMWACQKGNIRCNICI

SEQ ID NO: 8275 - protein, 566 aa, synthetic construct
  REGION 1..566: note = hemagglutinin__InfluenzaA__AFD63736
MKTIIALSYILCLVFAQKLPGNDNSTATLCLGHHAVPNGTIVKTITNDQIEVTNATELVQISSTGGICDSPHQILDGENCTLIDALLGDPQCDGFQNKKWDLFVERSKAYSNCYPYDVPDYASLRSLVASSGTLEFNNESFDWTGVTQNGTSSTCKRRSNKSFFSRLNWLTHLKYKYPALNVTMPNNEKFDKLYIWGVHHPGTDNDQISLYAQASGRITVSTKRSQQTVIPNIGSRPRVRDVSSRISIYWTIVKPGDILLINSTGNLIAPRGYFKIRSGKSSIMRSDAPIGKCNSECITPNGSIPNDKPFQNVNRITYGACPRYVKQNTLKLATGMRNVPEKQTRGIFGAIAGFIENGWEGMVDGWYGFRHQNSEGTGQAADLKSTQAAINQINGKLNRLIGKTNEKFHQIEKEFSEVEGRIQDLEKYVEDTKIDLWSYNAELLVALENQHTIDLTDSEMNKLFERTKKQLRENAEDMGNGCFKIYHKCDNACIGSIRNGTYDHDVYRDEALNNRFHIKGVELKSGYKDWILWISFAISCFLLCVALLGFIMWACQKGNIRCNICI

SEQ ID NO: 8276 - protein, 566 aa, synthetic construct
  REGION 1..566: note = hemagglutinin__InfluenzaA__AFD63747
MKTIIALSYILCLVFAQKLPGNDNSTATLCLGHHAVPNGTIVKTITNDQIEVTNATELVQSSSTGGICDSPHQILDGENCTLIDALLGDPQCDGFQNKKWDLFVERSKAYSNCYPYDVPDYASLRSLVASSGTLEFNNESFDWTGVTQNGTSSACKRRSNKSFFSRLNWLTHLKYKYPALNVTMPNNEKFDKLYIWGVHHPGTDSDQISLYAQASGRITVSTKRSQQTVIPNIGSRPRVRDVSSRISIYWTIVKPGDILLINSTGNLIAPRGYFKIRSGKSSIMRSDAPIGKCNSECITPNGSIPNDKPFQNVNRITYGACPRYVKQNTLKLATGMRNVPEKQTRGIFGAIAGFIENGWEGMVDGWYGFRHQNSEGTGQAADLKSTQAAINQINGKLNRLIGKTNEKFHRIEKEFSEVEGRIQDLEKYVEDTKIDLWSYNAELLVALENQHTIDLTDSEMNKLFERTKKQLRENAEDMGNGCFKIYHKCDNACIGSIRNGTYDHDVYRDEALNNRFQIKGVELKSGYKDWILWISFAISCFLLCVALLGFIMWACQKGNIRCNICI

SEQ ID NO: 8277 - protein, 566 aa, synthetic construct
  REGION 1..566: note = hemagglutinin__InfluenzaA__AFD63758
MKTIIALSYILCLVFAQKLPGNDNSTATLCLGHHAVPNGTIVKTITNDQIEVTNATELVQSSSTGGICDSPHQILDGENCTLIDALLGDPQCDGFQNKKWDLFVERSKAYSNCYPYDVPDYASLRSLVASSGTLEFNNESFNWTGVTQNGTSSACKRKSNKSFFSRLNWLTHLKYKYPALNVTMPNNEKFDKLYIWGVHHPGTDNDQISLYAQASGRITVSTKRSQQTVIPNIGSRPRVRDVSSRISIYWTIVKPGDILLINSTGNLIAPRGYFKIRSGKSSIMRSDAPIGKCNSECITPNGSIPNDKPFQNVNRITYGACPRYVKQNTLKLATGMRNVPEKQTRGIFGAIAGFIENGWEGMVDGWYGFRHQNSEGTGQAADLKSTQAAINQINGKLNRLIGKTNEKFHQIEKEFSEVEGRIQDLEKYVEDTKIDLWSYNAELLVALENQHTIDLTDSEMNKLFERTKKQLRENAEDMGNGCFKIYHKCDNACIGSIRNGTYDHDVYRDEALNNRFQIKGVELKSGYKDWILWISFAISCFLLCVALLGFIMWACQKGNIRCNICI

SEQ ID NO: 8278 - protein, 566 aa, synthetic construct
  REGION 1..566: note = hemagglutinin__InfluenzaA__AFD63769
MKTIIALSYILCLVFAQKLPGNDNSTATLCLGHHAVPNGTIVKTITNDQIEVTNATELVQISSTGGICDSPHQILDGENCTLIDALLGDPQCDGFQNKKWDLFVERSKAYSNCYPYDVPDYASLRSLVASSGTLEFNNESFDWTGVTQNGTSSACKRRSNKSFFSRLNWLTHLKYKYPALNVTMPNNEKFDKLYIWGVHHPGTDNDQISLYAQASGRITVSTKRSQQTVIPNIGSRPRVRDVSSRISIYWTIVKPGDILLINSTGNLIAPRGYFKIRSGKSSIMRSDAPIGKCNSECITPNGSIPNDKPFQNVNRITYGACPRYVKQNTLKLATGMRNVPEKQTRGIFGAIAGFIENGWEGMVDGWYGFRHQNSEGTGQAADLKSTQAAINQINGKLNRLIGKTNEKFHQIEKEFSEVEGRIQDLEKYVEDTKIDLWSYNAELLVALENQHTIDLTDSEMNKLFERTKKQLRENAEDMGNGCFKIYHKCDNACIGSIRNGTYDHDVYRDEALNNRFHIKSVELKSGYKDWILWISFAISCFLLCVALLGFIMWACQKGNIRCNICI

SEQ ID NO: 8279 - protein, 566 aa, synthetic construct; identical to SEQ ID NO: 73
  REGION 1..566: note = hemagglutinin__InfluenzaA__AFD63780

SEQ ID NO: 8280 - protein, 566 aa, synthetic construct; identical to SEQ ID NO: 8277
  REGION 1..566: note = hemagglutinin__InfluenzaA__AFD63791

SEQ ID NO: 8281 - protein, 566 aa, synthetic construct; identical to SEQ ID NO: 73
  REGION 1..566: note = hemagglutinin__InfluenzaA__AFD63802

SEQ ID NO: 8282 - protein, 566 aa, synthetic construct
  REGION 1..566: note = hemagglutinin__InfluenzaA__AFD63813
MKTIIALSYILSLVFAQKFPGNDNSTATLCLGHHAVPNGTIVKTITNDQIEVTNATELVQISSTGGICDSPHQILDGENCTLIDALLGDPQCDGFQNKKWDLFVERSKAYSNCYPYDVPDYASLRSLVASSGSLEFNNESFDWTGVTQNGTSSACKRRSNKSFFSRLNWLTHLKYKYPALNVTMPNNEKFDKLYIWGVHHPGTDSDQISLYAQASGRITVSTKRSQQTVIPNIGSRPRVRDISSRISIYWTIVKPGDILLINSTGNLIAPRGYFKIRSGKSSIMRSDAPIGKCNSECITPNGSIPNDKPFQNVNRITYGACPRYVKQNTLKLATGMRNVPEKQTRGIFGAIAGFIENGWEGMVDGWYGFRHQNSEGTGQAADLKSTQAAINQINGKLNRLIGKTNEKFHQIEKEFSEVEGRIQDLEKYVEDTKIDLWSYNAELLVALENQHTIDLTDSEMNKLFERTKKQLRENAEDMGNGCFKIYHKCDNACIGSIRNGTYDHDVYRDEALNNRFQIKGVELKSGYKDWILWISFATSCFLLCVALLGFIMWACQKGNIRCNICI

SEQ ID NO: 8283 - protein, 566 aa, synthetic construct; identical to SEQ ID NO: 8267
  REGION 1..566: note = hemagglutinin__InfluenzaA__AFD63824

SEQ ID NO: 8284 - protein, 566 aa, synthetic construct; identical to SEQ ID NO: 73
  REGION 1..566: note = hemagglutinin__InfluenzaA__AFD63846

SEQ ID NO: 8285 - protein, 566 aa, synthetic construct; identical to SEQ ID NO: 1311
  REGION 1..566: note = hemagglutinin__InfluenzaA__AFD63857

SEQ ID NO: 8286 - protein, 566 aa, synthetic construct; identical to SEQ ID NO: 73
  REGION 1..566: note = hemagglutinin__InfluenzaA__AFD63868

SEQ ID NO: 8287 - protein, 566 aa, synthetic construct; identical to SEQ ID NO: 73
  REGION 1..566: note = hemagglutinin__InfluenzaA__AFD63890

SEQ ID NO: 8288 - protein, 566 aa, synthetic construct; identical to SEQ ID NO: 73
  REGION 1..566: note = hemagglutinin__InfluenzaA__AFD63901

SEQ ID NO: 8289 - protein, 566 aa, synthetic construct; identical to SEQ ID NO: 73
  REGION 1..566: note = hemagglutinin__InfluenzaA__AFD63912

SEQ ID NO: 8290 - protein, 566 aa, synthetic construct
  REGION 1..566: note = hemagglutinin__InfluenzaA__AFD63923
MKTIIALSYILCLVFAQKLPGNDNSTATLCLGHHAVPNGTIVKTITNDQIEVTNATELVQSSSTGGICDSPHQILDGENCTLIDALLGDPQCDGFQNKKWDLFVERSKAYSNCYPYDVPDYASLRSLVASSGTLEFNNESFNWTGVTQNGTSSACKRKSNKSFFSRLNWLTHLKYKYPALNVTMPNNEKFDKLYIWGVHHPGTDNDQISLYAQASGRITVSTKRSQQTVIPNIGSRPRVRDISSRISIYWTIVKPGDILLINSTGNLIAPRGYFKIRSGKSSIMRSDAPIGKCNSECITPNGSIPNDKPFQNVNRITYGACPRYVKQNTLKLATGMRNVPEKQTRGIFGAIAGFIENGWEGMVDGWYGFRHQNSEGTGQAADLKSTQAAINQINGKLNRLIGKTNEKFHQIEKEFSEVEGRIQDLEKYVEDTKIDLWSYNAELLVALENQHTIDLTDSEMNKLFERTKKQLRENAEDMGNGCFKIYHKCDNACIGSIRNGTYDHDVYRDEALNNRFQIKGVELKSGYKDWILWISFAISCFLLCVALLGFIMWACQKGNIRCNICI

SEQ ID NO: 8291 - protein, 566 aa, synthetic construct
  REGION 1..566: note = hemagglutinin__InfluenzaA__AFD63934
MKTIIALSYILCLVFAQKLPGNDNSTATLCLGHHAVPNGTIVKTITNDQIEVTNATELVQSSSTGGICDSPHQILDGENCTLIDALLGDPQCDGFQNKKWDLFVERSKAYSNCYPYDVPDYASLRSLVASSGTLEFNNESFDWTGVTQNGTSSACKRRSNKSFFSRLNWLTHLKYKYPALNVTMPNNEKFDKLYIWGVHHPGTESDQISLYAQASGRITVSTKRSQQTVIPNIGSRPRVRDVSSRISIYWTVVKPGDILLINSTGNLIAPRGYFKIRSGKSSIMRSDAPIGKCNSECITPNGSIPNDKPFQNVNRITYGACPRYVKQNTLKLATGMRNVPEKQTRGIFGAIAGFIENGWEGMVDGWYGFRHQNSEGTGQAADLKSTQAAINQINGKLNRLIGKTNEKFHQIEKEFSEVEGRIQDLEKYVEDTKIDLWSYNAELLVALENQHTIDLTDSEMNKLFERTKKQLRENAEDMGNGCFKIYHKCDNACIGSIRNGTYDHDVYRDEALNNRFQIKGVELKSGYKDWILWISFAISCFLLCVALLGFIMWACQKGNIRCNICI

SEQ ID NO: 8292 - protein, 566 aa, synthetic construct; identical to SEQ ID NO: 8267
  REGION 1..566: note = hemagglutinin__InfluenzaA__AFD63945

SEQ ID NO: 8293 - protein, 566 aa, synthetic construct; identical to SEQ ID NO: 8267
  REGION 1..566: note = hemagglutinin__InfluenzaA__AFD63956

SEQ ID NO: 8294 - protein, 566 aa, synthetic construct; identical to SEQ ID NO: 8267
  REGION 1..566: note = hemagglutinin__InfluenzaA__AFD63967

SEQ ID NO: 8295 - protein, 566 aa, synthetic construct; identical to SEQ ID NO: 73
  REGION 1..566: note = hemagglutinin__InfluenzaA__AFD63989

SEQ ID NO: 8296 - protein, 566 aa, synthetic construct; identical to SEQ ID NO: 73
  REGION 1..566: note = hemagglutinin__InfluenzaA__AFD64000

SEQ ID NO: 8297 - protein, 566 aa, synthetic construct
  REGION 1..566: note = hemagglutinin__InfluenzaA__AFD64011
MKTIIALSYILCLVFAQKLPGNDNSTATLCLGHHAVPNGTIVKTITNDQIEVTNATELVQSSSTGGICDSPHQILDGENCTLIDALLGDPQCDGFQNKKWDLFVERSKAYSNCYPYDVPDYASLRSLVASSGTLEFNNESFDWTGVTQNGTSSACKRRSNKSFFSRLNWLTHLKYKYPALNVTMPNNEKFDKLYIWGVHHPGTDSDQISLYAQAPGKITVSTKRSQQTVIPNIGSRPRVRDVSSRISIYWTIVKPGDILLINSTGNLIAPRGYFKIRSGKSSIMRSDAPIGKCNSECITPNGSIPNDKPFQNVNRITYGACPRYVKQNTLKLATGMRNVPEKQTRGIFGAIAGFIENGWEGMVDGWYGFRHQNSEGTGQAADLKSTQAAINQINGKLNRLIGKTNEKFHQIEKEFSEVEGRIQDLEKYVEDTKIDLWSYNAELLVALENQHTIDLTDSEMNKLFERTKKQLRENAEDMGNGCFKIYHKCDNACIGSIRNGTYDHDVYRDEALNNRFQIKGVELKSGYKDWILWISFAISCFLLCVALLGFIMWACQKGNIRCDICI

SEQ ID NO: 8298 - protein, 566 aa, synthetic construct; identical to SEQ ID NO: 73
  REGION 1..566: note = hemagglutinin__InfluenzaA__AFD64022

SEQ ID NO: 8299 - protein, 566 aa, synthetic construct; identical to SEQ ID NO: 73
  REGION 1..566: note = hemagglutinin__InfluenzaA__AFD64033

SEQ ID NO: 8300 - protein, 566 aa, synthetic construct
  REGION 1..566: note = hemagglutinin__InfluenzaA__AFD64044
MKTIIALSYILCLVFAQKLPGNENSTATLCLGHHAVPNGTIVKTITNDQIEVTNATELVQSSSTGGICDSPHQILDGENCTLIDALLGDPQCDGFQNKKWDLFVERSKAYSNCYPYDVPDYASLRSLVASSGTLEFNNESFDWTGVTQNGTSSACKRRSNKSFFSRLNWLTHLKYKYPALNVTMPNNEKFDKLYIWGVHHPGTDSDQISLYAQASGRITVSTKRSQQTVIPNIGSRPRVRDVSSRISIYWTIVKPGDILLINSTGNLIAPRGYFKIRSGKSSIMRSDAPIGKCNSECITPNGSIPNDKPFQNVNRITYGACPRYVKQNTLKLATGMRNVPEKQTRGIFGAIAGFIENGWEGMVDGWYGFRHQNSEGTGQAADLKSTQAAINQINGKLNRLIGKTNEKFHQIEKEFSEVEGRIQDLEKYVEDTKIDLWSYNAELLVALENQHTIDLTDSEMNKLFERTKKQLRENAEDMGNGCFKIYHKCDNACIGSIRNGTYDHDVYRDEALNNRFQIKGVELKSGYKDWILWISFAISCFLLCVALLGFIMWACQKGNIRCNICI

SEQ ID NO: 8301 - protein, 566 aa, synthetic construct; identical to SEQ ID NO: 8277
  REGION 1..566: note = hemagglutinin__InfluenzaA__AFD64055

SEQ ID NO: 8302 - protein, 566 aa, synthetic construct
  REGION 1..566: note = hemagglutinin__InfluenzaA__AFD64066
MKTIIALSYILCLVFAQKLPGNDNSTATLCLGHHAVPNGTIVKTITNDQIEVTNATELVQSSSTGGICDSPHQILDGENCTLIDALLGDPQCDGFQNKKWDLFVERSKAYSNCYPYDVPDYTSLRSLVASSGTLEFNNESFNWTGVTQNGTSSACKRRSNKSFFSRLNWLTHLKFKYPALNVTMPNNEKFDKLYIWGVHHPGTDNDQISLYAQASGRITVSTKRSQQTVIPNIGSRPRVRDVPSRISIYWTIVKPGDILLINSTGNLIAPRGYFKIRSGKSSIMRSDAPIGKCNSECITPNGSIPNDKPFQNVNRITYGACPRYVKQNTLKLATGMRNVPEKQTRGIFGAIAGFIENGWEGMVDGWYGFRHQNAEGTGQAADLKSTQAAINQINGKLNRLIGKTNEKFHQIEKEFSEVEGRIQDLEKYVEDTKIDLWSYNAELLVALENQHTIDLTDSEMNKLFERTKKQLRENAEDMGNGCFKIYHKCDNACIGSIRNGTYDHDVYRDEALNNRFQIKGVELKSGYKNWILWISFAISCFLLCVALLGFIMWACQKGNIRCNICI

SEQ ID NO: 8303 - protein, 566 aa, synthetic construct
  REGION 1..566: note = hemagglutinin__InfluenzaA__AFD64077
MKTIIALSYILCLVFAQKLPGNDNSTATLCLGHHAVPNGTIVKTITNDQIEVTNATELVQISSTGEICDSPHQILDGENCTLIDALLGDPQCDGFQNKKWDLFVERSKAYSNCYPYDVPDYASLRSLVASSGTLEFNNESFDWTGVTQNGTSSACKRRSNKSFFSRLNWLTHLKYKYPALNVTMPNNEKFDKLYIWGVHHPGTDSDQISLYAQASGRITVSTKRSQQTVIPNIGSRPRIRDVSSRISIYWTIVKPGDILLINSTGNLIAPRGYFKIRSGKSSIMRSDAPIGKCNSECITPNGSIPNDKPFQNVNRITYGACPRYVKQNTLKLATGMRNVPEKQTRGIFGAIAGFIENGWEGMVDGWYGFRHQNSEGTGQAADLKSTQAAINQINGKLNRLIGKTNEKFHQIEKEFSEVEGRIQDLEKYVEDTKIDLWSYNAELLVALENQHTIDLTDSEMNKLFERTKKQLRENAEDMGNGCFKIYHKCDNACIGSIRNGTYDHDVYRDEALNNRFQIKGVELKSGYKDWILWISFAISCFLLCVALLGFIMWACQKGNIRCNICI

SEQ ID NO: 8304 - protein, 566 aa, synthetic construct; identical to SEQ ID NO: 73
  REGION 1..566: note = hemagglutinin__InfluenzaA__AFD64088

SEQ ID NO: 8305 - protein, 566 aa, synthetic construct; identical to SEQ ID NO: 73
  REGION 1..566: note = hemagglutinin__InfluenzaA__AFD64099

SEQ ID NO: 8306 - protein, 566 aa, synthetic construct; identical to SEQ ID NO: 8277
  REGION 1..566: note = hemagglutinin__InfluenzaA__AFD64110

SEQ ID NO: 8307 - protein, 566 aa, synthetic construct
  REGION 1..566: note = hemagglutinin__InfluenzaA__AFD64121
MKTIIALSYILCLVFAQKLPGNDNSTATLCLGHHAVPNGTIVKTITNDQIEVTNATELVQSSSTGGICDSPHQILDGENCTLIDALLGDPQCDGFQNKKWDLFVERSRAYSNCYPYDVPDYASLRSLVASSGTLEFNNESFNWTGVTQNGTSSACKRKSNKSFFSRLNWLTHLKYKYPALNVTMPNNEKFDKLYIWGVHHPGTDNDQISLYAQASGRITVSTKRSQQTVIPNIGSRPRVRDVSSRISIYWTIVKPGDILLINSTGNLIAPRGYFKIRSGKSSIMRSDAPIGKCNSECITPNGSIPNDKPFQNVNRITYGACPRYVKQNTLKLATGMRNVPEKQTRGIFGAIAGFIENGWEGMVDGWYGFRHQNSEGTGQAADLKSTQAAINQINGKLNRLIGKTNEKFHQIEKEFSEVEGRIQDLEKYVEDTKIDLWSYNAELLVALENQHTIDLTDSEMNKLFERTKKQLRENAEDMGNGCFKIYHKCDNACIGSIRNGTYDHDVYRDEALNNRFQIKGVELKSGYKDWILWISFAISCFLLCVALLGFIMWACQKGNIRCNICI

SEQ ID NO: 8308 - protein, 566 aa, synthetic construct; identical to SEQ ID NO: 73
  REGION 1..566: note = hemagglutinin__InfluenzaA__AFD64132

SEQ ID NO: 8309 - protein, 566 aa, synthetic construct; identical to SEQ ID NO: 8267
  REGION 1..566: note = hemagglutinin__InfluenzaA__AFD64143

SEQ ID NO: 8310 - protein, 566 aa, synthetic construct; identical to SEQ ID NO: 73
  REGION 1..566: note = hemagglutinin__InfluenzaA__AFD64154

SEQ ID NO: 8311 - protein, 566 aa, synthetic construct
  REGION 1..566: note = hemagglutinin__InfluenzaA__AFD64179
MKTIIALSYILCLVFAQKLPGNDNSTATLCLGHHAVPNGTIVKTITNDQIEVTNATELVQISSTGGICDSPHQILDGENCTLIDALLGDPQCDGFQNKKWDLFVERSKAYSNCYPYDVPDYASLRSLVASSGTLEFNNESFDWTGVTQNGTSSACKRRSNKSFFSRLNWLTHLKYKYPALNVTMPNNEKFDKLYIWGVHHPGTDSDQISLYAQASGRITVSTKRSQQTVIPNIGSRPRVRDVSSQISIYWTIVKPGDILLINSTGNLIAPRGYFKIRSGKSSIMRSDAPIGKCNSECITPNGSIPNDKPFQNVNRITYGACPRYVKQNTLKLATGMRNVPEKQTRGIFGAIAGFIENGWEGMVDGWYGFRHQNSEGTGQAADLKSTQAAINQINGKLNRLIGKTNEKFHQIEKEFSEVEGRIQDLEKYVEDTKIDLWSYNAELLVALENQHTIDLTDSEMNKLFERTKKQLRENAEDMGNGCFKIYHKCDNACIGSIRNGTYDHDVYRDEALNNRFQIKGVELKSGYKDWILWISFAISCFLLCVALLGFIMWACQKGNIRCNICI

SEQ ID NO: 8312 - protein, 566 aa, synthetic construct; identical to SEQ ID NO: 8311
  REGION 1..566: note = hemagglutinin__InfluenzaA__AFD64190

SEQ ID NO: 8313 - protein, 566 aa, synthetic construct; identical to SEQ ID NO: 8267
  REGION 1..566: note = hemagglutinin__InfluenzaA__AFD64201

SEQ ID NO: 8314 - protein, 566 aa, synthetic construct; identical to SEQ ID NO: 8277
  REGION 1..566: note = hemagglutinin__InfluenzaA__AFD64212

SEQ ID NO: 8315 - protein, 566 aa, synthetic construct
  REGION 1..566: note = hemagglutinin__InfluenzaA__AFD64223
MKTIIALSYILCLVFAQKLPGNDNSTATLCLGHHAVPNGTIVKTITNDQIEVTNATELVQSSSTGGICDSPHQILDGENCTLIDALLGDPQCDGFQNKKWDLFVERSKAYSNCYPYDVPDYASLRSLVASSGTLEFNNESFNWTGVTQNGTSSACKRRSNKSFFSRLNWLTHLKYKYPALNVTMPNNEKFDKLYIWGVLHPGTDSDQIRLYAQASGRITVSTKRSQQTVIPNIGSRPRVRDVSSRISIYWTIVKPGDILLINSTGNLIAPRGYFKIRSGKSSIMRSDAPIGKCNSECITPNGSIPNDKPFQNVNRITYGACPRYIKQNTLKLATGMRNVPEKQTRGIFGAIAGFIENGWEGMVDGWYGFRHQNSEGTGQAADLKSTQAAINQINGKLNRLIGKTNEKFHQIEKEFSEVEGRIQDLEKYVEDTKIDLWSYNAELLVALENQYTIDLTDSEMNKLFERTKKQLRENAEDMGNGCFKIYHKCDNACIGSIRNGTYDHDVYRDEALNNRFQIKGVELKSGYKDWILWISFAISCFLLCVALLGFIMWACQKGNIRCNICI

SEQ ID NO: 8316 - protein, 566 aa, synthetic construct
  REGION 1..566: note = hemagglutinin__InfluenzaA__AFD64315
MKTIIALSYILCLVFAQKLPGNDNSTATLCLGHHAVPNGTIVKTITNDQIEVTNATELVQISSTGGICDSPHQILDGENCTLIDALLGDPQCDGFQNKKWDLFVERSKAYSNCYPYDVPDYASLRSLVASSGTLEFNNESFDWTGVTQNGTSSACKRRSNKSFFSRLNWLTHLKYKYPALNVTMPNNEKFDKLYIWGVHHPGTDSDQISLYAQASGRITVSTKRSQQTVIPNIGSRPRVRDVSSRISIYWTIVKPGDILLINSTGNLIAPRGYFKIRSGKSSIMRSDAPIGKCNSECITPNGSIPNDKPFQNVNRITYGACPRYVKQNTLKLATGMRNVPEKQTRGIFGAIAGFIENGWEGMVDGWYGFRHQNSEGTGQAADLKSTQAAINQINGKLNRLIGKTNEKFHQIEKEFSEVEGRIQDLEKYVEDTKIDLWSYNAELLVALENQHTIDLTDSEMNKLFERTKNQLRENAEDMGNGCFKIYHKCDNACIGSIRNGTYDHDVYRDEALNNRFQIKGVELKSGYKDWILWISFAISCFLLCVALLGFIMWACQKGNIRCNICI

SEQ ID NO: 8317 - protein, 566 aa, synthetic construct; identical to SEQ ID NO: 8307
  REGION 1..566: note = hemagglutinin__InfluenzaA__AFD64326

SEQ ID NO: 8318 - protein, 566 aa, synthetic construct; identical to SEQ ID NO: 8277
  REGION 1..566: note = hemagglutinin__InfluenzaA__AFD64337

SEQ ID NO: 8319 - protein, 566 aa, synthetic construct; identical to SEQ ID NO: 73
  REGION 1..566: note = hemagglutinin__InfluenzaA__AFD64348

SEQ ID NO: 8320 - protein, 566 aa, synthetic construct; identical to SEQ ID NO: 8277
  REGION 1..566: note = hemagglutinin__InfluenzaA__AFD64359

SEQ ID NO: 8321 - protein, 566 aa, synthetic construct
  REGION 1..566: note = hemagglutinin__InfluenzaA__AFD64370
MKTIIALSYILCLVFAQKLPGNDNSTATLCLGHHAVPNGTIVKTITNDQIEVTNATELVQSSSTGGICDSPHQILDGENCTLIDALLGDPHCDGFQNKKWDLFVERSKAYSNCYPYDVPDYASLRSLVASSGTLEFNNESFNWTGVTQNGTSSACKRKSNKSFFSRLNWLTHLKYKYPALNVTMPNNEKFDKLYIWGVHHPGTDNDQISLYAQASGRITVSTKRSQQTVIPNIGSRPRVRDISSRISIYWTIVKPGDILLINSTGNLIAPRGYFKIRSGKSSIMRSDAPIGKCNSECITPNGSIPNDKPFQNVNRITYGACPRYVKQNTLKLATGMRNVPEKQTRGIFGAIAGFIENGWEGMVDGWYGFRHQNSEGTGQAADLKSTQAAINQINGKLNRLIGKTNEKFHQIEKEFSEVEGRIQDLEKYVEDTKIDLWSYNAELLVALENQHTIDLTDSEMNKLFERTKKQLRENAEDMGNGCFKIYHKCDNACIGSIRNGTYDHDVYRDEALNNRFQIKGVELKSGYKDWILWISFAISCFLLCVALLGFIMWACQKGNIRCNICI

SEQ ID NO: 8322 - protein, 566 aa, synthetic construct; identical to SEQ ID NO: 73
  REGION 1..566: note = hemagglutinin__InfluenzaA__AFD64381

SEQ ID NO: 8323 - protein, 566 aa, synthetic construct; identical to SEQ ID NO: 8277
  REGION 1..566: note = hemagglutinin__InfluenzaA__AFD64392

SEQ ID NO: 8324 - protein, 566 aa, synthetic construct; identical to SEQ ID NO: 8267
  REGION 1..566: note = hemagglutinin__InfluenzaA__AFD64403

SEQ ID NO: 8325 - protein, 566 aa, synthetic construct; identical to SEQ ID NO: 8267
  REGION 1..566: note = hemagglutinin__InfluenzaA__AFD64414

SEQ ID NO: 8326 - protein, 566 aa, synthetic construct
  REGION 1..566: note = hemagglutinin__InfluenzaA__AFD64425
MKTIIALSYILCLVFAQKLPGNDNSTATLCLGHHAVPNGTIVKTITNDQIEVTNATELVQISSTGGICDSPHQILDGENCTLIDALLGDPQCDGFQNKKWDLFVERSKAYSNCYPYDVPNYASLRSLVASSGTLEFNNESFDWTGVTQNGTSSACKRRSNKSFFSRLNWLTHLKYKYPALNVTMPNNEKFDKLYIWGVHHPGTDSDQISLYAQASGRITVSTKRSQQTVIPNIGSRPRVRDVSSRISIYWTIVKPGDILLINSTGNLIAPRGYFKIRSGKSSIMRSDAPIGKCNSECITPNGSIPNDKPFQNVNRITYGACPRYVKQNTLKLATGMRNVPEKQTRGIFGAIAGFIENGWEGMVDGWYGFRHQNSEGTGQAADLKSTQAAINQINGKLNRLIGKTNEKFHQIEKEFSEVEGRIQDLEKYVEDTKIDLWSYNAELLVALENQHTIDLTDSEMNKLFERTKKQLRENAEDMGNGCFKIYHKCDNACIGSIRNGTYDHNVYRDEALNNRFQIKGVELKSGYKDWILWISFAISCFLLCVALLGFIMWACQKGNIRCNICI

SEQ ID NO: 8327 - protein, 566 aa, synthetic construct; identical to SEQ ID NO: 73
  REGION 1..566: note = hemagglutinin__InfluenzaA__AFD64436

SEQ ID NO: 8328 - protein, 566 aa, synthetic construct; identical to SEQ ID NO: 73
  REGION 1..566: note = hemagglutinin__InfluenzaA__AFD64447

SEQ ID NO: 8329 - protein, 566 aa, synthetic construct
  REGION 1..566: note = hemagglutinin__InfluenzaA__AFD64458
MKTIIALSYILCLVFAQKLPGNDNSTATLCLGHHAVQNGTIVKTITNDQIEVTNATELVQSSSTGGICDSPHQILDGENCTLIDALLGDPQCDGFQNKKWDLFVERSKAYSNCYPYDVPDYASLRSLVASSGTLEFNNESFDWTGVTQNGTSSACKRRSNKSFFSRLNWLTHLKYKYPALNVTMPNNEKFDKLYIWGVHHPGTDSDQISLYAQASGRITVSTKRSQQTVIPNIGSRPRVRDVSSRISIYWTIVKPGDILLINSTGNLIAPRGYFKIRSGKSSIMRSDAPIGKCNSECITPNGSIPNDKPFQNVNRITYGACPRYVKQNTLKLATGMRNVPEKQTRGIFGAIAGFIENGWEGMVDGWYGFRHQNSEGTGQAADLKSTQAAINQINGKLNRLIGKTNEKFHQIEKEFSEVEGRIQDLEKYVEDTKIDLWSYNAELLVALENQHTIDLTDSEMNKLFERTKKQLRENAEDMGNGCFKIYHKCDNACIGSIRNGTYDHDVYRDEALNNRFQIKGVELKSGYKDWILWISFAISCFLLCVALLGFIMWACQKGNIRCNICI

SEQ ID NO: 8330 - protein, 566 aa, synthetic construct; identical to SEQ ID NO: 6855
  REGION 1..566: note = hemagglutinin__InfluenzaA__AFD64795

SEQ ID NO: 8331 - protein, 566 aa, synthetic construct; identical to SEQ ID NO: 6982
  REGION 1..566: note = hemagglutinin__InfluenzaA__AFD64799

SEQ ID NO: 8332 - protein, 566 aa, synthetic construct
  REGION 1..566: note = hemagglutinin__InfluenzaA__AFD64802
MKTIIALSYILCLVFAQKLPGNDNSTATLCLGHHAVPNGTIVKTITNDQIEVTNATELVQSSSTGEICNSPHQILDGENCTLIDALLGDPQCDGFQNKKWDLFVERSKAHSNCYPYDVPDYASLRSLVASSGTLEFNNESFNWTGVTQNGTSSACIRRSNNSFFSRLNWLTHLNFKYPALNVTMPNNEQFDKLYIWGVHHPGTDKDQTFLYAQASGRITVSTKRSQQAVIPNIGSRPRVRNIPSRVSIYWTIVKPGDILLINSTGNLIAPRGYFKIRSGKSSIMRSDAPIGKCNSACITPNGSIPNDKPFQNVNRITYGACPRYVKQNTLKLATGMRNVPEKQTRGIFGAIAGFIENGWEGMVDGWYGFRHQNSEGRGQAADLKSTQAAIDQINGKLNRLIGKTNEKFHQIEKEFSEVEGRIQDLEKYVEDTKIDLWSYNAELLVALENQHTIDLTDSEMNKLFEKTKKQLRENAEDMGNGCFKIYHKCDNACIGSIRNGTYDHDVYRDEALNNRFQIKGVELKSEYKDWILWISFAISCFLLCVALLGFIMWACQKGNIRCNICI

SEQ ID NO: 8333 - protein, 566 aa, synthetic construct
  REGION 1..566: note = hemagglutinin__InfluenzaA__AFD64804
MKTIIALSYILCLVFAQKLPGNDNSTATLCLGHHAVPNGTIVKTITNDQIEVTNATELVQSSSTGEICNSPHQILDGENCTLIDALLGDPQCDGFQNKKWDLFVERSKAHSNCYPYDVPDYASLRSLVASSGTLEFNNESFNWTGVTQNGTSSACIRRSNNSFFSRLNWLTHLNFKYPALNVTMPNNEQFDKLYIWGVHHPGTDKDQIFLYAQASGRITVSTKRSQQAVIPNIGSRPRVRNIPSRVSIYWTIVKPGDILLINSTGNLIAPRGYFKIRSGKSSIMRSDAPIGKCNSACITPNGSIPNDKPFQNVNRITYGACPRYVKQNTLKLATGMRNVPEKQTRGIFGAIAGFIENGWEGMMDGWYGFRHQNSEGRGQAADLKSTQAAIDQINGKLNRLIGKTNEKFHQIEKEFSEVEGRIQDLEKYVEDTKIDLWSYNAELLVALENQHTIDLTDSEMNKLFEKTKKQLRENAEDMGNGCFKIYHKCDNACIGSIRNGTYDHDVYRDEALNNRFQIKGVELKSGYKDWILWISFAISCFLLCVALLGFIMWACQKGNIRCNICI

SEQ ID NO: 8334 - protein, 566 aa, synthetic construct
  REGION 1..566: note = hemagglutinin__InfluenzaA__AFD64806
MKTIIALSYILCLVFAQKLPGNDNSTATLCLGHHAVPNGTIVKTITNDQIEVTNATELVQSSSTGEICNSPHQILDGENCTLIDALLGDPQCDGFQNKKWDLFVERSKAHSNCYPYDVPDYASLRSLVASSGTLEFNNESFNWTGVTQNGTSSACIRRSNNSFFSRLNWLTHLNFKYPALNVTMPNNEQFDKLYIWGVHHPGTDKDQTFLYAQASGRITVSTKRSQQAVIPNIGSRPRVRNIPSRVSIYWTIVKPGDILLINSTGNLIAPRGYFKIRSGKSSIMRSDAPIGKCNSACITPNGSIPNDKPFQNVNRITYGACPRYVKQNTLKLATGMRNVPEKQTRGIFGAIAGFIENGWEGMVDGWYGFRHQNSEGRGQAADLKSTQAAIDQINGKLNRLIGKTNEKFHQIEKEFSEVEGRIQDLEKYVEDTKIDLWSYNAELLVALENQHTIDLTDSEMNKLFEKTKKQLRENAEDMGNGCFKIYHKCDNACIGSIRNGTYDHDVYRDEALNNRFQIKGVELKSGYKDWILWISFAISCFLLCVALLGFIMWACQKGNIRCNICI

SEQ ID NO: 8335 - protein, 566 aa, synthetic construct
  REGION 1..566: note = hemagglutinin__InfluenzaA__AFD64807
MKTIIALSYILCLVFAQKLPGNDNSTATLCLGHHAVPNGTIVKTITNDQIEVTNATELVQSSSTGEICNSPHQILDGENCTLIDALLGDPQCDGFQNKKWDLFVERSKAHSNCYPYDVPDYASLRSLVASSGTLEFNNESFNWTGVTQNGTSSACIRRSNNSFFSRLNWLTHLNFKYPALNVTMPNNEQFDKLYIWGVHHPGTDKDQTFLYAQASGRITVSTKRSQQAVIPNIGSRPRVRDIPSRVSIYWTIVKPGDILLINSTGNLIAPRGYFKIRSGKSSIMRSDAPLGKCHSACITPNGSIPNDKPFQNVNRITYGACPRYVKQNTLKLATGMRNVPEKQTRGIFGAIAGFIENGWEGMVDGWYGFRHQNSEGRGQAADLKSTQAAIDQINGKLNRLIGKTNEKFHQIEKEFSEVEGRIQDLEKYVEDTKIDLWSYNAELLVALENQHTIDLTDSEMNKLFEKTKKQLRENAEDMGNGCFKIYHKCDNACIGSIRNGTYDHDMYRDEALNNRFQIKGVELKSGYKDWILWISFAISCFLLCVALLGFIMWACQKGNIRCNICI

SEQ ID NO: 8336 - protein, 566 aa, synthetic construct
  REGION 1..566: note = hemagglutinin__InfluenzaA__AFD64810
MKTIIALSYILCLVFAQKLPGNDNSTATLCLGHHAVPNGTIVKTITNDQIEVTNATELVQSSSTGEICNSPHQILDGENCTLIDALLGDPQCDGFQNKKWDLFVERSKAHSNCYPYDVPDYASLRSLVASSGTLEFNNESFNWTGVTQNGTSSACIRRSNNSFFSRLNWLTHLNFKYPALNVTMPNNEQFDKLYIWGVHHPGTDKDQIFLYAQASGRITVSTKRSQQAVIPNIGSRPRVRNIPSRVSIYWTIVKPGDILLINSTGNLIAPRGYFKIRSGKSSIMRSDAPIGKCNSACITPNGSIPNDKPFQNVNRITYGACPRYVKQNTLKLATGMRNVPEKQTRGIFGAIAGFIENGWEGMVDGWYGFRHQNSEGRGQAADLKSTQAAIDQINGKLNRLIGKTNEKFHQIEKEFSEVEGRIQDLEKYVEDTKIDLWSYNAELLVALENQHTIDLTDSEMNKLFEKTKKQLRENAEDMGNGCFKIYHKCDNACIGSIRNGTYDPDVYRDEALNNRFQIKGVELKSGYKDWILWISFAISCFLLCVALLGFIMWACQKGNIRCNICI

SEQ ID NO: 8337 - protein, 566 aa, synthetic construct
  REGION 1..566: note = hemagglutinin__InfluenzaA__AFD64812
MKTIIALSYILCLVFAQKLPGNDNSTATLCLGHHAVPNGTIVKTITNDQIEVTNATELVQSSSTGEICNSPHQILDGENCTLIDALLGDPQCDGFQNKKWDLFVERSKAHSNCYPYDVPDYASLRSLVASSGTLEFNNESFNWTGVTQNGTSSACIRRSNNSFFSRLNWLTHLNFKYPALNVTMPNNEQFDKLYIWGVHHPGTDKDQTFLYAQASGRITVSTKRSQQAVIPNIGSRPRVRNIPSRVSIYWTIVKPGDILLINSTGNLIAPRGYFKIRSGKSSIMRSDAPIGKCNSACITPNGSIPNDKPFQNVNRITYGACPRYVKQNTLKLATGMRNVPEKQTRGIFGAIAGFIENGWEGMVDGWYGFRHQNSEGRGQAADLKSTQAATDQINGKLNRLIGKTNEKFHQIEKEFSEVEGRIQDLEKYVEDTKIDLWSYNAELLVALENQHTIDLTDSEMNKLFEKTKKQLRENAEDMGNGCFKIYHKCDNACIGSIRNGTYDHDVYRDEALNNRFQIKGVELKSGYKDWILWISFAISCFLLCVALLGFIMWACQKGNIRCNICI

SEQ ID NO: 8338 - protein, 566 aa, synthetic construct
  REGION 1..566: note = hemagglutinin__InfluenzaA__AFD64814
MKTIIALSYILCLVFAQKLPGNDNSTATLCLGHHAVPNGTIVKTITNDQIEVTNATELVQSSSTGEICNSPHQILDGENCTLIDALLGDPQCDGFQNKKWDLFVERSKAHSNCYPYDVPDYASLRSLVASSGTLEFNNESFNWTGVTQNGTSSACIRRSNNSFFSRLNWLTHLNFKYPALNVTMPNNEQFDKLYIWGVHHPGTDKDQTFLYAQASGRITVSTKRSQQAVIPNIGSRPRVRNIPSRVSIYWTIVKPGDILLINSTGNLIAPRGYFKIRSGKSSIMRSDAPIGKCNSACITPNGSIPNDKPFQNVNRITYGACPRYVKQNTLKLATGMRNVPEKQTRGIFGAIAGFIENGWEGMVDGWYGFRHQNSEGRGQAADLKSTQAAIDQINGKLNRLIGKTNEKFHQIEKEFSEVEGRIQDLEKYVEDTKIDLWSYNAELLVALENQHTIDLTDSEMNKLFEKTKKQLRENAEDMGNGCFKIYHKCDNACIGSIRNGTYDPDVYRDEALNNRFQIKGVELKSGYKDWILWISFAISCFLLCVALLGFIMWACQKGNIRCNICI

SEQ ID NO: 8339 - protein, 566 aa, synthetic construct
  REGION 1..566: note = hemagglutinin__InfluenzaA__AFD64816
MKTIIALSYILCLVFAQKLPENDNSTATLCLGHHAVPNGTIVKTITNDQIEVTNATELVQSSSTGEICNSPHQILDGENCTLIDALLGDPQCDGFQNKKWDLFVERSKAHSNCYPYDVPDYASLRSLVASSGTLEFNNESFNWTGVTQNGTSSACMRRSNNSFFSRLNWLTHLNFKYPALNVTMPNNEQFDKLYIWGVHHPGTDKDQIFLYAQASGRITVSTKRSQQAVIPNIGSRPRVRNIPSRVSIYWTIVKPGDILLINSTGNLIAPRGYFKIRSGKSSIMRSDAPIGKCNSACITPNGSIPNDKPFQNVNRITYGACPRYVKQNTLKLATGMRNVPEKQTRGIFGAIAGFIENGWEGMVDGWYGFRHQNSEGRGQAADLKSTQAAIDQINGKLNRLIGKTNEKFHQIEKEFSEVEGRIQDLEKYVEDTKIDLWSYNAELLVALENQHTIDLTDSEMNKLFEKTKKQLRENAEDMGNGCFKIYHKCDNACIGSIRNGTYDHDVYRDEALNNRFQIKGVELKSGYKDWILWISFAISCFLLCVALLGFIMWACQKGNIRCNICI

SEQ ID NO: 8340 - protein, 566 aa, synthetic construct
  REGION 1..566: note = hemagglutinin__InfluenzaA__AFD64818
MKTIIALSYILCLVFAQKLPGNDNSTATLCLGHHAVPNGTIVKTITNDQIEVTNATELVQSSSTGEICNSPHQILDGENCTLIDALLGDPQCDGFQNKKWDLFVERSKAHSNCYPYDVPDYASLRSLVASSGTLEFNNESFNWTGVTQNGTSSACIRRSNNSFFSRLNWLTHLNFKYPALNVTMPNNEQFDKLYIWGVHHPGTDKDQTFLYAQASGRITVSTKRSQQAVIPNIGSRPRVRNIPSRVSIYWTIVKPGDILLINSTGNLIAPRGYFKIRSGKSSIMRSDAPLGKCISACITPNGSIPNDKPFQNVNRITYGACPRYVKQNTLKLATGMRNVPEKQTRGIFGAIAGFIENGWEGMVDGWYGFRHQNSEGRGQAADLKSTQAAIDQINGKLNRLIGKTNEKFHQIEKEFSEVEGRIQDLEKYVEDTKIDLWSYNAELLVALENQHTIDLTDSEMNKLFEKTKKQLRENAEDMGNGCFKIYHKCDNACIGSIRNGTYDHDVYRDEALNNRFQIKGVELKSGYKDWILWISFAISCFLLCVALLGFIMWACQKGNIRCNICI

SEQ ID NO: 8341 - protein, 566 aa, synthetic construct
  REGION 1..566: note = hemagglutinin__InfluenzaA__AFD64819
MKTIIALSYILCLVFAQKLPGNDNSTATLCLGHHAVPNGTIVKTITNDQIEVTNATELVQSSSTGEICNSPHQILDGENCTLIDALLGDPQCDGFQNKKWDLFVERSKAHSNCYPYDVPDYASLRSLVASSGTLEFNNESFNWTGVTQNGTSSACIRRSNNSFFSRLNWLTHLNFKYPALNVTMPNNEQFDKLYIWGVHHPGTDKDQTFLYAQASGRITVSTKRSQQAVIPNIGSRPRIRNIPSRVSIYWTIVKPGDILLINSTGNLIAPRGYFKIRSGKSSIMRSDAPIGKCISACITPNGSIPNDKPFQNVNRITYGACPRYVKQNTLKLATGMRNVPEKQTRGIFGAIAGFIENGWEGMVDGWYGFRHQNSEGRGQAADLKSTQAAIDQINGKLNRLIGKTNEKFHQIEKEFSEVEGRIQDLEKYVEDTKIDLWSYNAELLVALENQHTIDLTDSEMNKLFEKTKKQLRENAEDMGNGCFKIYHKCDNACIGSIRNGTYDPDVYRDEALNNRFQIKGVELKSGYKDWILWISFAISCFLLCVALLGFIMWACQKGNIRCNICI

SEQ ID NO: 8342 - protein, 566 aa, synthetic construct; identical to SEQ ID NO: 6982
  REGION 1..566: note = hemagglutinin__InfluenzaA__AFD64820

SEQ ID NO: 8343 - protein, 566 aa, synthetic construct
  REGION 1..566: note = hemagglutinin__InfluenzaA__AFD64822
MKTIIALSYILCLVFAQKLPGNDNSTATLCLGHHAVPNGTIVKTITNDQIEVTNATELVQSSSTGEICNSPHQILDGENCTLIDALLGDPQCDGFQNKKWDLFVERSKAHSNCYPYDVPDYASLRSLVASSGTLEFNNESFNWTGVTQNGTSSACMRRSNNSFFSRLNWLTHLNFKYPALNVTMPNNEQFDKLYIWGVHHPGTDKDQIFLYAQASGRITVSTKRSQQAVIPNIGSRPRVRNIPSRVSIYWTIVKPGDILLINSTGNLIAPRGYFKIRSGKSSIMRSDAPIGKCNSACITPNGSIPNDKPFQNVNRITYGACPRYVKQNTLKLATGMRNVPEKQTRGIFGAIAGFIENGWEGMVDGWYGFRHQNSEGRGQAADLKSTQAAIDQINGKLNRLIGKTNEKFHQIEKEFSEVEGRIQDLEKYVEDTKIDLWSYNAELLVALENQHTIDLTDSEMNKLFEKTKKQLRENAEDMGNGCFKIYHKCDNACIGSIRNGTYDHDVYRDEALNNRFQIKGVELKSGYKDWILWISFAISCFLLCVALLGFIMWACQKGNIRCNICI

SEQ ID NO: 8344 - protein, 566 aa, synthetic construct
  REGION 1..566: note = hemagglutinin__InfluenzaA__AFD64823
MKTIIALSYILCLVFAQKLPGNDNSTATLCLGHHAVPNGTIVKTITNDQIEVTNATELVQSSSTGEICNSPHQILDGENCTLIDALLGDPQCDGFQNKKWDLFVERSKAHSNCYPYDVPDYASLRSLVASSGTLEFNNESFNWTGVTQNGTSSACIRRSNNSFFSRLNWLTHLNFKYPALNVTMPNNEQFDKLYIWGVHHPGTDKDQIFLYAQAAGRITVSTKRSQQAVIPNIGSRPRVRNIPSRVSIYWTIVKPGDILLINSTGNLIAPRGYFKIRSGKSSIMRSDAPIGRCNSACITPNGSIPNDKPFQNVNRITYGACPRYVKQNTLKLATGMRNVPEKQTRGIFGAIAGFIENGWEGMVDGWYGFRHQNSEGRGQAADLKSTQAAIDQINGKLNRLIGKTNEKFHQIEKEFSEVEGRIQDLEKYVEDTKIDLWSYNAELLVALENQHTIDLTDSEMNKLFEKTKKQLRENAEDMGNGCFKIYHKCDNACIGSIRNGTYDHDVYRDEALNNRFQIKGVELKSGYKDWILWISFAISCFLLCVALLGFIMWACQKGNIRCNICI

SEQ ID NO: 8345 - protein, 566 aa, synthetic construct
  REGION 1..566: note = hemagglutinin__InfluenzaA__AFD64824
MKTIIALSYILCLVFAQKLPGNDNSTATLCLGHHAVPNGTIVKTITNDQIEVTNATELVQSSSTGEICNSPHQILDGENCTLIDALLGDPQCDGFQNKKWDLFVERSKAHSNCYPYDVPDYASLRSLVASSGTLEFNNESFNWTGVTQNGTSSACIRRSNNSFFSRLNWLTHLNFKYPALNVTMPNNEQFDKLYIWGVHHPGTDKDQTFLYAQASGRITVSTKRSQQAVIPNIGSRPRVRNIPSRVSIYWTIVKPGDILLINSTGNLIAPRGYFKIRSGKSSIMRSDAPIGKCNSACITPNGSIPNDKPFQNVNRITYGACPRYVKQNTLKLATGMRNVPEKQTRGIFGAIAGFIENGWEGMVDGWYGFRHQNSEGRGQAADLKSTQAAIDQINGKLNRLIGKTNEKFHQIEKEFSEVEGRIQDLEKYVEDTKIDLWSYNAELLVALENQHTIDLTDSEMNKLFEKTKKQLRENAEDMGNGCFKIYHKCDNACIGSIRNGTYDHDVYRDEALNNRFQIKGVELKSGYKDWILWISFATSCFLLCVALLGFIMWACQKGNIRCNICI

SEQ ID NO: 8346 - protein, 566 aa, synthetic construct; identical to SEQ ID NO: 8334
  REGION 1..566: note = hemagglutinin__InfluenzaA__AFD64825

SEQ ID NO: 8347 - protein, 566 aa, synthetic construct; identical to SEQ ID NO: 8334
  REGION 1..566: note = hemagglutinin__InfluenzaA__AFD64827

SEQ ID NO: 8348 - protein, 566 aa, synthetic construct
  REGION 1..566: note = hemagglutinin__InfluenzaA__AFD64828
MKTIIALSYILCLVFAQKLPGNDNSTATLCLGHHAVPNGTIVKTITNDQIEVTNATELVQSSSTGEICNSPHQILDGENCTLIDALLGDPQCDGFQNKKWDLFVERSKAHSNCYPYDVPDYASLRSLVASSGTLEFNNESFNWTGVTQNGTSSACIRRSNNSFFSRLNWLTHLNFKYPALNVTMPNNEQFDKLYIWGVHHPGTDKDQIFLYAQASGRITVSTKRSQQAVIPNIGSRPRVRNIPSRVSIYWTIVKPGDILLINSTGNLIAPRGYFKIRSGKSSIMRSDAPIGKCNSACITPNGSIPNDKPFQNVNRITYGACPRYVKQNTLKLATGMRNVPEKQTRGIFGAIAGFIENGWEGMMDGWYGFRHQNSEGRGQAADLKSTQAAIDQINGKLNRLIGKTNEKFHQIEKEFSEVEGRIQDLEKYVEDTKIDLWSYNAELLVALENQHTIDLTDSEMNKLFEKTKKQLRENAEDMGNGCFKIYHKCDNACIGSIRNGTYDPDVYRDEALNNRFQIKGVELKSGYKDWILWISFAISCFLLCVALLGFIMWACQKGNIRCNICI

SEQ ID NO: 8349 - protein, 566 aa, synthetic construct; identical to SEQ ID NO: 8343
  REGION 1..566: note = hemagglutinin__InfluenzaA__AFD64830

SEQ ID NO: 8350 - protein, 566 aa, synthetic construct; identical to SEQ ID NO: 6982
  REGION 1..566: note = hemagglutinin__InfluenzaA__AFD98095

SEQ ID NO: 8351 - protein, 566 aa, synthetic construct
  REGION 1..566: note = hemagglutinin__InfluenzaA__AFD98106
MKTIIALSYILCLVFAQKLPGNDNSTATLCLGHHAVPNGTIVKTITNDQIEVTNATELVQSSSAGEICDSPHHILDGENCTLIDALLGDPQCDGFQNKKWDLFVERSRAYSNCYPYDVPDYASLRSLVASSGTLEFNNESFNWTGVTQNGTSSACIRRSNNSFFSRLNWLTHLNFKYPALNVTMPNNEQFDKLYIWGVHHPGTDKDQIFLYAQASGRITVSTKRSQQAVIPNIGSRPRVRNIPSRISIYWTIVKPGDILLINSTGNLIAPRGYFKIRSGKSSIMRSDAPIGKCNSECITPNGSIPNDKPFQNVNRITYGACPRYVKQSTLKLATGMRNVPEKQTRGIFGAIAGFIENGWEGMMDGWYGFRHQNSEGRGQAADLKSTQAAIDQINGKLNRLIGKTNEKFHQIEKEFSEVEGRIQDLEKYVEDTKIDLWSYNAELLVALENQHTIDLTDSEMNKLFEKTKKQLRENAEDMGNGCFKIYHKCDNACIGSIRNGTYDHDVYRDEALNNRFQIKGVELKSGYKDWILWISFAISCFLLCVALLGFIMWACQKGNIRCNICI

SEQ ID NO: 8352 - protein, 566 aa, synthetic construct
  REGION 1..566: note = hemagglutinin__InfluenzaA__AFD98128
MKTIIALSYILCLVFAQKLPGNDNSTATLCLGHHAVPNGTIVKTITNDQIEVTNATELVQNSSTGEICNSPHQILDGENCTLIDALLGDPQCDGFQNKKWDLFVERSKAHSNCYPYDVPDYASLRSLVASSGTLEFNNESFNWTGVTQNGTSSACIRKSNNSFFSRLNWLTHLNFKYPALNVTMPNNEQFDKLYIWGVHHPGTDKDQIFLYAQAAGRITVSTKRSQQAVIPNIGSRPRVRNIPSRVSIYWTIVKPGDILLINSTGNLIAPRGYFKIRSGKSSIMRSDAPIGKCNSACITPNGSIPNDKPFQNVNRITYGACPRYVKQNTLKLATGMRNVPEKQTRGIFGAIAGFIENGWEGMVDGWYGFRHQNSEGRGQAADLKSTQAAIDQINGKLNRLIGKTNEKFHQIEKEFSEVEGRIQDLEKYVEDTKIDLWSYNAELLVALENQHTIDLTDSEMNKLFEKTKKQLRENAEDMGNGCFKIYHKCDNACIGSIRNGTYDHDVYRDEALNNRFQIKGVELKSGYKDWILWISFAISCFLLCVALLGFIMWACQKGNIRCNICI

SEQ ID NO: 8353 - protein, 566 aa, synthetic construct; identical to SEQ ID NO: 6982
  REGION 1..566: note = hemagglutinin__InfluenzaA__AFD98139

SEQ ID NO: 8354 - protein, 566 aa, synthetic construct
  REGION 1..566: note = hemagglutinin__InfluenzaA__AFD98161
MKTIIALSYILCLVFAQKLPGNDNSTATLCLGHHAVPNGTIVKTITNDQIEVTNATELVQNSSAGEICDSPHHILDGENCTLIDALLGDPQCDGFQNKKWDLFVERSRAYSNCYPYDVPDYASLRSLVASSGTLEFNNESFNWTGVTQNGTSSACIRRSNNSFFSRLNWLTHLNFKYPALNVTMPNNEQFDKLYIWGVHHPGTDKDQIFLYAQASGRITVSTKRSQQAVIPNIGSRPRVRNIPSRISIYWTIVKPGDILLINSTGNLIAPRGYFKIRSGKSSIMRSDAPIGKCNSECITPNGSIPNDKPFQNVNRITYGACPRYVKQSTLKLATGMRNVPEKQTRGIFGAIAGFIENGWEGMMDGWYGFRHQNSEGRGQAADLKSTQAAIDQINGKLNRLIGKTNEKFHQIEKEFSEVEGRIQDLEKYVEDTKIDLWSYNAELLVALENQHTIDLTDSEMNKLFEKTKKQLRENAEDMGNGCFKIYHKCDNACIGSIRNGTYDHDVYRDEALNNRFQIKGVELKSGYKDWILWISFAISCFLLCVALLGFIMWACQKGNIRCNICI

SEQ ID NO: 8355 - protein, 566 aa, synthetic construct
  REGION 1..566: note = hemagglutinin__InfluenzaA__AFD98172
MKTIIALSYILCLVFAQKLPGNDNSTATLCLGHHAVPNGTIVKTITNDQIEVTNATELVQSSSAGEICDSPHHILDGENCTLIDALLGDPQCDGFQNKKWDLFVERSRAYSNCYPYDVPDYASLRSLVASSGTLEFNNESFNWTGVTQNGTSSACIRRSNNSFFSRLNWLTHLNFKYPALNVTMPNNEQFDKLYIWGVHHPGTDKDQIFLYAQASGRITVSTKRSQQAVIPNIGSRPRVRNIPSRISIYWTIVKPGDILLINSTGNLIAPRGYFKIRSGKSSIMRSDAPIGKCNSECITPNGSIPNDKPFQNVNRITYGACPRYVKQSTLKLATGMRNVPEKQTRGIFGAIAGFIENGWEGMMDGWYGFRHQNSEGRGQAADLKSTQAAIDQINGKLNRLIGKTNEKFHQIEKEFSEVEGRIQDLEKYVEDTKIDLWSYNAELLVALENQHTIDLTDSEMNKLFEKTKKQLRENAEDMGNGCFKIYHKCDNACIGSIRNGTYDHDVYRDEALNNRFQIKGVELKSGYKDWVLWISFAISCFLLCVALLGFIMWACQKGNIRCNICI

SEQ ID NO: 8356 - protein, 566 aa, synthetic construct
  REGION 1..566: note = hemagglutinin__InfluenzaA__AFD98183
MKTIIALSYILCLVFAQKLPGNDNSTATLCLGHHAVPNGTIVKTITNDQIEVTNATELVQSSSTGEICNSPHQILDGENCTLIDALLGDPQCDGFQNKKWDLFVERSKAHSNCYPYDVPDYASLRSLVASSGTLEFNNESFNWTGVTQNGTSSACIRRSNNSFFSRLNWLTHLNFKYPALNVTMPNNEQFDKLYIWGVHHPGTDKDQIFLYAQASGRITVSTKRSQQAVLPNIGSRPRVRNIPSRVSIYWTIVKPGDILLINSTGNLIAPRGYFKIRSGKSSIMRSDAPIGKCNSTCITPNGSIPNDKPFQNVNRITYGACPRYVKQNTLKLATGMRNVPEKQTRGIFGAIAGFIENGWEGMVDGWYGFRHQNSEGRGQAADLKSTQAAIDQINGKLNRLIGKTNEKFHQIEKEFSEVEGRIQDLEKYVEDTKIDLWSYNAELLVALENQHTIDLTDSEMNKLFEKTKKQLRENAEDMGNGCFKIYHKCDNACIGSIRNGTYDHDVYRDEALNNRFQIKGVELKSGYKDWILWISFAISCFLLCVALLGFIMWACQKGNIRCNICI

SEQ ID NO: 8357 - protein, 566 aa, synthetic construct; identical to SEQ ID NO: 6855
  REGION 1..566: note = hemagglutinin__InfluenzaA__AFD98194

SEQ ID NO: 8358 - protein, 566 aa, synthetic construct; identical to SEQ ID NO: 6909
  REGION 1..566: note = hemagglutinin__InfluenzaA__AFD98205

SEQ ID NO: 8359 - protein, 566 aa, synthetic construct; identical to SEQ ID NO: 8351
  REGION 1..566: note = hemagglutinin__InfluenzaA__AFD98215

SEQ ID NO: 8360 - protein, 566 aa, synthetic construct; identical to SEQ ID NO: 6982
  REGION 1..566: note = hemagglutinin__InfluenzaA__AFD98226

SEQ ID NO: 8361 - protein, 566 aa, synthetic construct
  REGION 1..566: note = hemagglutinin__InfluenzaA__AFD98237
MKTIIALSYILCLVSAQKLPGNDNSTATLCLGHHAVPNGTIVKTITNDQIEVTNATELVQSSSTGEICNSPHQILDGENCTLIDALLGDPQCDGFQNKKWDLFVERSKAHSNCYPYDVPDYASLRSLVASSGTLEFNNESFNWTGVTQNGTSSACIRRSNNSFFSRLNWLTHLNFKYPALNVTMPNNEQFDKLYIWGVHHPGTDKDQIFLYAQASGRITVSTKRSQQAVIPNIGSRPRVRNIPSRVSIYWTIVKPGDILLINSTGNLIAPRGYFKIRSGKSSIMRSDAPIGKCNSACITPNGSIPNDKPFQNVNRITYGACPRYVKQNTLKLATGMRNVPEKQTRGIFGAIAGFIENGWEGMVDGWYGFRHQNSEGRGQAADLKSTQAAIDQINGKLNRLIGKTNEKFHQIEKEFSEVEGRIQDLEKYVEDTKIDLWSYNAELLVALENQHTIDLTDSEMNKLFEKTKKQLRENAEDMGNGCFKIYHKCDNACIGSIRNGTYDHDVYRDEALNNRFQIKGVELKSGYKDWILWISFAISCFLLCVALLGFIMWACQKGNIRCNICI

SEQ ID NO: 8362 - protein, 566 aa, synthetic construct; identical to SEQ ID NO: 8354
  REGION 1..566: note = hemagglutinin__InfluenzaA__AFD98248

SEQ ID NO: 8363 - protein, 566 aa, synthetic construct
  REGION 1..566: note = hemagglutinin__InfluenzaA__AFD98259
MKTIIALSYILCLVFAQKLPGNDNSTATLCLGHHAVPNGTIVKTITNDQIEVTNATELVQSSSAGEICDSPHHILDGENCTLIDALLGDPQCDGFQNKKWDLFVERSKAYSNCYPYDVQDYASLRSLVASSGTLEFNNESFNWTGVTQNGTSSACIRRSNNSFFSRLNWLTHLNFKYPALNVTMPNNEQFDKLYIWGVHHPGTDKDQIFLYAQASGRITVSTKRSQQAVIPNIGSRPRVRNIPSRISIYWTIVKPGDILLINSTGNLIAPRGYFKIRSGKSSIMRSDAPIGKCNSECITPNGSIPNDKPFQNVNRITYGACPRYVKQSTLKLATGMRNVPEKQTRGIFGAIAGFIENGWEGMMDGWYGFRHQNSEGRGQAADLKSTQAAIDQINGKLNRLIGKTNEKFHQIEKEFSEVEGRIQDLEKYVEDTKIDLWSYNAELLVALENQHTIDLTDSEMNKLFEKTKKQLRENAEDMGNGCFKIYHKCDNACIGSIRNGTYDHDVYRDEALNNRFQIKGVELKSGYKDWILWISFAISCFLLCVALLGFIMWACQKGNIRCNICI

SEQ ID NO: 8364 - protein, 566 aa, synthetic construct
  REGION 1..566: note = hemagglutinin__InfluenzaA__AFD98270
MKAILVVLLYTFVTANADTLCIGYHANNSTDTVDTVLEKNVTVTHSVNLLEDKHNGKLCKLRGVTPLHLGKCNIAGWILGNPECESLSTASSWSYIVETSSSDNGTCYPGDFINYEELREQLSSVSSFERFEIFPNTSSWPNHDSNKGVTAACPHAGAKSFYKNLIWLVKKGNSYPKLSKSYINDKGKEVLVLWGIHHPSTTADQQSLYQNADAYVFVGTSRYSKKFKPEIAIRPKVRDQEGRMNYYWTLVEPGDKITFEATGNLVVPRYAFAMERNAGSGIIISDTPVHDCNTTCQTPKGAINTSLPFQNIHPITIGKCPKYVKSTKLRLATGLRNVPSIQSRGLFGAIAGFIEGGWTGMVDGWYGYHHQNEQGSGYAADLKSTQNAIDKITNKVNSVIEKMNTQFTAVGKEFNHLEKRIENLNKKVDDGFLDIWTYNAELLVLLENERTLDYHDSNVKNLYEKVRNQLKNNAKEIGNGCFEFYHKCDNTCMESVKNGTYDYPKYSEEAKLNREEIDGVKLESTRIYQILAIYSTVASSLVLVVSLGAISFWMCSNGSLQCRICI

SEQ ID NO: 8365 - protein, 566 aa, synthetic construct
  REGION 1..566: note = hemagglutinin__InfluenzaA__AFD98280
MKAILVVLLYTFATANADTLCIGYHANNSTDTVDTVLEKNVTVTHSVNLLEDKHNGKLCKLRGVAPLHLGKCNIAGWILGNPECDSLSTARSWSYIVETSSSDNGTCYPGDFIDYEELREQLSSVSSFERFEIFPKTSSWPNHDSNKGVTAACPHAGAKGFYKNLIWLVKKGNSYPKLSKSYINDKGKEVLVLWGIHHPSTTADQQSLYQNADTYVFVGTSRYSKKFKPEIAIRPKVRDQEGRMNYYWTLVEPGDKITFEATGNLVVPRYAFAMERNAGSGIIISDTPVHDCNTTCQTPKGAINTSLPFQNIHPITIGKCPKYVKSTKLRLATGLRNVPSIQSRGLFGAIAGFIEGGWTGMVDGWYGYHHQNEQGSGYAADLKSTQNAIDKITNKVNSVIEKMNTQFTAVGKEFNHLEKRIENLNKKVDDGFLDIWTYNAELLVLLENERTLDYHDSNVKNLYEKVRNQLKNNAKEIGNGCFEFYHKCDNTCMESVKNGTYDYPKYSEEAKLNREEIDGVKLESTRIYQILAIYSTVASSLVLVVSLGAISFWMCSNGSLQCRICI

SEQ ID NO: 8366 - protein, 566 aa, synthetic construct; identical to SEQ ID NO: 8343
  REGION 1..566: note = hemagglutinin__InfluenzaA__AFD98290

SEQ ID NO: 8367 - protein, 566 aa, synthetic construct; identical to SEQ ID NO: 7086
  REGION 1..566: note = hemagglutinin__InfluenzaA__AFD98310

SEQ ID NO: 8368 - protein, 566 aa, synthetic construct; identical to SEQ ID NO: 6454
  REGION 1..566: note = hemagglutinin__InfluenzaA__AFD98320

SEQ ID NO: 8369 - protein, 566 aa, synthetic construct; identical to SEQ ID NO: 8354
  REGION 1..566: note = hemagglutinin__InfluenzaA__AFD98340

SEQ ID NO: 8370 - protein, 566 aa, synthetic construct
  REGION 1..566: note = hemagglutinin__InfluenzaA__AFD98351
MKTIIALSYILCLVFAQKLPGNDNSTATLCLGHHAVPNGTIVKTITNDQIEVTNATELVQSSSAGEICDSPHHILDGENCTLIDALLGDPQCDGFQNKKWDLFVERSRAYSNCYPYDVPDYASLRSLVASSGTLEFNNESFNWTGVTQNGTSSACIRRSNNSFFSRLNWLTHLNFKYPALNVTMPNNEQFDKLYIWGVHHPGTDKDQIFLYAQASGRITVSTKRSQQAVIPNIGSRPRVRNIPSRISIYWTIVKPGDILLINSTGNLIAPRGYFKIRSGKSSIMRSDAPIGKCNSECITPNGSIPNDKPFQNVNRITYGACPRYVKQSTLKLATGMRNVPEKQTRGIFGAIAGFIENGWEGMMDGWYGFRHQNSEGRGQAADLKSTQAAIDQINGKLNRLIGKTNEKFHQIEKEFSEVEGRIQDLEKYVEDTKIDLWSYNAELLVALENQHTIDLTDSEMNKLFEKTKKQLRENAEDMGNGCFKIYHKCDNACIGTIRNGTYDHDVYRDEALNNRFQIKGVELKSGYKDWILWISFAISCFLLCVALLGFIMWACQKGNIRCNICI

SEQ ID NO: 8371 - protein, 566 aa, synthetic construct
  REGION 1..566: note = hemagglutinin__InfluenzaA__AFD98362
MKTIIALSYILCLVFAQKLPGNDNSMATLCLGHHAVPNGTIVKTITNDQIEVTNATELVQNSSTGEICDSPHQILDGENCTLIDALLGDPQCDGFQNKKWDLFVERSKAYSNCYPYDVPDYASLRSLVASSGTLEFNNESFNWTGVTQNGTSSACIRRSNNSFFSRLNWLTHLNFKYPALNVTMPNNEQFDKLYIWGVHHPGTDKDQIFLYAQASGRITVSTKRGQQAVIPNIGSRPRVRNIPSRISIYWTIVKPGDILLINSTGNLIAPRGYFKIRSGKSSIMRSDAPIGKCNSECITPNGSIPNDKPFQNVNRITYGACPRYVKQNTLKLATGMRNVPEKQTRGIFGAIAGFIENGWEGMVDGWYGFRHQNSEGRGQAADLKSTQAAIDQINGKLNRLVGKTNEKFHQIEKEFSEVEGRIQDLEKYVEDTKIDLWSYNAELLVALENQHTIDLTDSEMNKLFEKTKKQLRENAEDMGNGCFKIYHKCDNACIGSIRNGTYDHDVYRDEALNNRFQIKGVELKSGYKDWILWISFAISCFLLCVALLGFIMWACQKGNIRCNICI

SEQ ID NO: 8372 - protein, 566 aa, synthetic construct; identical to SEQ ID NO: 8351
  REGION 1..566: note = hemagglutinin__InfluenzaA__AFD98373

SEQ ID NO: 8373 - protein, 566 aa, synthetic construct; identical to SEQ ID NO: 6982
  REGION 1..566: note = hemagglutinin__InfluenzaA__AFD98384

SEQ ID NO: 8374 - protein, 566 aa, synthetic construct
  REGION 1..566: note = hemagglutinin__InfluenzaA__AFD98395
MKTIIALSYILCLVFAQKLPGDDNSTATLCLGHHAVPNGTIVKTITNDQIEVTNATELVQNSSAGEICDSPHHILDGENCTLIDALLGDPQCDGFQNKKWDLFVERSRAYSNCYPYDVPDYASLRSLVASSGTLEFNNESFNWTGVTQNGTSSACIRRSNNSFFSRLNWLTHLNFKYPALNVTMPNNEQFDKLYIWGVHHPGTDKDQIFLYAQASGRITVSTKRSQQAVIPNIGSRPRVRNIPSRISIYWTIVKPGDILLINSTGNLIAPRGYFKIRSGKSSIMRSDAPIGKCNSECITPNGSIPNDKPFQNVNRITYGACPRYVKQSTLKLATGMRNVPEKQTRGIFGAIAGFIENGWEGMMDGWYGFRHQNSEGRGQAADLKSTQAAIDQINGKLNRLIGKTNEKFHQIEKEFSEVEGRIQDLEKYVEDTKIDLWSYNAELLVALENQHTIDLTDSEMNKLFEKTKKQLRENAEDMGNGCFKIYHKCDNACIGSIRNGTYDHDVYRDEALNNRFQIKGVELKSGYKDWILWISFAISCFLLCVALLGFIMWACQKGNIRCNICI

SEQ ID NO: 8375 - protein, 566 aa, synthetic construct; identical to SEQ ID NO: 8351
  REGION 1..566: note = hemagglutinin__InfluenzaA__AFD98406

SEQ ID NO: 8376 - protein, 566 aa, synthetic construct; identical to SEQ ID NO: 8354
  REGION 1..566: note = hemagglutinin__InfluenzaA__AFD98417

SEQ ID NO: 8377 - protein, 566 aa, synthetic construct
  REGION 1..566: note = hemagglutinin__InfluenzaA__AFD98428
MKTIIALSYILCLVFAQKLPGNDNSTATLCLGHHAVPNGTIVKTITNDQIEVTNATELVQSSSTGEICNSPHQILDGENCTLIDALLGDPQCDGFQNKKWDLFVERSKAHSNCYPYDVPDYASLRSLVASSGTLEFNNESFNWTGVTQNGTSSACIRRSNNSFFSRLNWLTHLNFKYPALNVTMPNNEQFDKLYIWGVHHPGTDKDQTFLYAQASGRITVSTKRSQQAVIPNIGSRPRVRNIPSRVSIYWTIVKPGDILLINSTGNLIAPRGYFKIRSGKSSIMRSDAPIGKCNSACITPNGSIPNDKPFQNVNRITYGACPRYVKQNTLKLATGMRNVPEKQTRGIFGAIAGFIENGWEGMVDGWYGFRHQNSEGRGQAADLKSTQAAIDQINGKLNRLIGKTNEKFHQIEKEFSEVEGRIQDLEKYVEDTKIDLWSYNAELLVALENQHTIDLTDSEMNKLFEKTKKQLRENAEDMGNGCFKIYHKCDNACIGSIRNGTYDHDVYRDEALNNRFQIKGVELKSGYKDWILWISFTISCFLLCVALLGFIMWACQKGNIRCNICI

SEQ ID NO: 8378 - protein, 566 aa, synthetic construct; identical to SEQ ID NO: 6867
  REGION 1..566: note = hemagglutinin__InfluenzaA__AFD98439

SEQ ID NO: 8379 - protein, 566 aa, synthetic construct
  REGION 1..566: note = hemagglutinin__InfluenzaA__AFD98449
MKTIIALSYILCLVFAQKLPGNDNSTATLCLGHHAVPNGTIVKTITNDQIEVTNATELVQSSSTGEICDSPHQILDGKNCTLIDALLGDPQCDGFQNKKWDLFVERSKAYSNCYPYDVPDYASLRSLVASSGTLEFNNENFNWTGVTQNGTSSACIRRSKNSFFSRLNWLTHLNFKFPALNVTMPNNEQFDKLYIWGVHHPGTDKDQIFLYAQASGRITVSTKRSQQTAIPNIGSRPRVRNIPSRISIYWTIVKPGDILLINSTGNLIAPRGYFKIRSGKSSIMRSDAPIGKCNSECITPNGSIPNDKPFQNVNRITYGACPRYVKQNTLKLATGMRNVPEKQTRGIFGAIAGFIENGWEGMVDGWYGFRHQNSEGRGQAADLKSTQAAIDQINGKLNRLIGKTNEKFHQIEKEFSEVEGRIQDLEKYVEDTKIDLWSYNAELLVALENQHTIDLTDSEMNKLFEKTKKQLRENAEDMGNGCFKIYHKCDNACIGSIRNGTYNHDVYRDEALNNRFQIKGVELKSGYKDWILWISFAISCFLLCVALLGFIMWACQKGNIRCNICI

SEQ ID NO: 8380 - protein, 566 aa, synthetic construct
  REGION 1..566: note = hemagglutinin__InfluenzaA__AFD98460
MKTIIALSYILCLVFAQKLPGNDNSTATLCLGHHAVPNGTIVKTITNDQIEVTNATELVQSSSAGEICDSPHHILDGENCTLIDALLGDPQCDGFQNKKWDLFVERSRAYSNCYPYDVPDYASLRSLVASSGTLEFNNESFNWTGVTQNGTSSACIRRSNNSFFSKLNWLTHLNFKYPALNVTMPNNEQFDKLYIWGVHHPGTDKDQIFLYAQASGRITVSTKRSQQAVIPNIGSRPRVRNIPSRISIYWTIVKPGDILLINSTGNLIAPRGYFKIRSGKSSIMRSDAPIGKCNSECITPNGSIPNDKPFQNVNRITYGACPRYVKQSTLKLATGMRNVPEKQTRGIFGAIAGFIENGWEGMMDGWYGFRHQNSEGRGQAADLKSTQAAIDQINGKLNRLIGKTNEKFHQIEKEFSEVEGRIQDLEKYVEDTKIDLWSYNAELLVALENQHTIDLTDSEMNKLFEKTKKQLRENAEDMGNGCFKIYHKCDNACIGSIRNGTYDHDVYRDEALSNRFQIKGVELKSGYKDWILWISFAISCFLLCVALLGFIMWACQKGNIRCNICI

SEQ ID NO: 8381 - protein, 566 aa, synthetic construct; identical to SEQ ID NO: 6867
  REGION 1..566: note = hemagglutinin__InfluenzaA__AFD98471

SEQ ID NO: 8382 - protein, 566 aa, synthetic construct
  REGION 1..566: note = hemagglutinin__InfluenzaA__AFD98481
MKTIIALSYILCLVFAQKLPGNDNSTATLCLGHHAVPNGTIVKTITNDQIEVTNATELVQNSSTGEICNSPHQILDGENCTLIDALLGDPQCDGFQNKKWDLFVERSKAHSNCYPYDVPDYASLRSLVASSGTLEFNNESFNWTGVTQNGTSSACIRRSNNSFFSRLNWLTHLNFKYPALNVTMPNNEQFDKLYIWGVHHPGTDKDQIFLYAQAAGRITVSTKRSQQAVIPNIGSRPRVRNIPSRVSIYWTIVKPGDILLINSTGNLIAPRGYFKIRSGKSSVMRSDAPIGKCNSACITPNGSIPNDKPFQNVNRITYGACPRYVKQNTLKLATGMRNVPEKQTRGIFGAIAGFIENGWEGMVDGWYGFRHQNSEGRGQAADLKSTQAAIDQINGKLNRLIGKTNEKFHQIEKEFSEVEGRIQDLEKYVEDTKIDLWSYNAELLVALENQHTIDLTDSEMNKLFEKTKKQLRENAEDMGNGCFKIYHKCDNACIGSIRNGTYDHDVYRDEALNNRFQIKGVELKSGYKDWILWISFAISCFLLCVALLGFIMWACQKGNIRCNICI

SEQ ID NO: 8383 - protein, 566 aa, synthetic construct; identical to SEQ ID NO: 6982
  REGION 1..566: note = hemagglutinin__InfluenzaA__AFD98492

SEQ ID NO: 8384 - protein, 566 aa, synthetic construct
  REGION 1..566: note = hemagglutinin__InfluenzaA__AFD98503
MKTIIALSYILCLVFAQKLPGNDNSTATLCLGHHAVPNGTIVKTITNDQIEVTNATELVQSSSAGEICDSPHHILDGENCTLIDALLGDPQCDGFQNKKWDLFVERSRAYSNCYPYDVPDYASLRSLVASSGTLEFNNESFNWTGVTQNGTSSACIRRSNNSFFSRLNWLTHLNFKYPALNVTMPNNEQFDKLYIWGVHHPGTDKDQIFLYAQASGRITVSTKRSQQAVIPNIGSRPRVRNIPSRISIYWTIVKPGDILLINSTGNLIAPRGYFKIRSGKSSIMRSDAPIGKCNSECITPNGSIPNDKPFQNVNRITYGACPRYVKQSTLKLATGMRNVPEKQTKGIFGAIAGFIENGWEGMMDGWYGFRHQNSEGRGQAADLKSTQAAIDQINGKLNRLIGKTNEKFHQIEKEFSEVEGRIQDLEKYVEDTKIDLWSYNAELLVALENQHTIDLTDSEMNKLFEKTKKQLRENAEDMGNGCFKIYHKCDNACIGSIRNGTYDHDVYRDEALNNRFQIKGVELKSGYKDWILWISFAISCFLLCVALLGFIMWACQKGNIRCNICI

SEQ ID NO: 8385 - protein, 566 aa, synthetic construct; identical to SEQ ID NO: 6982
  REGION 1..566: note = hemagglutinin__InfluenzaA__AFD98514

SEQ ID NO: 8386 - protein, 566 aa, synthetic construct; identical to SEQ ID NO: 8334
  REGION 1..566: note = hemagglutinin__InfluenzaA__AFD98525

SEQ ID NO: 8387 - protein, 566 aa, synthetic construct; identical to SEQ ID NO: 6855
  REGION 1..566: note = hemagglutinin__InfluenzaA__AFD98558

SEQ ID NO: 8388 - protein, 566 aa, synthetic construct
  REGION 1..566: note = hemagglutinin__InfluenzaA__AFD98569
MKTIIALSYILCLVFAQKLPGNDNSTATLCLGHHAVPNGTIVKTITNDQIEVTNATELVQSSSTGEICNSPHQILDGENCTLIDALLGDPQCDGFQNKKWDLFVERSKAHSNCYPYDVPDYASLRSLVASSGTLEFNNESFNWTGVTQNGTSSACIRRSNNSFFSRLNWLTHLNFKYPALNVTMPNNEQFDKLYIWGVHHPGTDKDQTFLYAQASGRITVSTKRSQQAVIPNIGSRPRVRNIPSRVSIYWTIVKPGDILLINSTGNLIAPRGYFKIRSGKSSIMRSDAPIGKCNSACITPNGSIPNDKPFQNVNRITYGACPRYVKQNTLKLATGMRNVPEKQTRGIFGAIAGFIENGWEGMVDGWYGFRHQNSEGRGQAADLKSTQAAIDQINGKLNRLIGKTNEKFHQIEKEFSEVEGRIQDLEKYVEDTKIDLWSYNAELLVALENQHTIDLTDSEMNKLFEKTKKQLRENAEDMGNGCFKIYHECDNACIGSIRNGTYDHDVYRDEALNNRFQIKGVELKSGYKDWILWISFAISCFLLCVALLGFIMWACQKGNIRCNICI

SEQ ID NO: 8389 - protein, 566 aa, synthetic construct; identical to SEQ ID NO: 6855
  REGION 1..566: note = hemagglutinin__InfluenzaA__AFD98580

SEQ ID NO: 8390 - protein, 566 aa, synthetic construct
  REGION 1..566: note = hemagglutinin__InfluenzaA__AFE02942
MKAILVVLLYTFATANADTLCIGYHANNSTDTVDTLLEKNVTVTHSVNLLEDKHNGKLCKLRGVAPLHLGKCNIAGWILGNPECESLSTASSWSYIVETSNSDNGTCYPGDFIDYEELREQLSSVSSFERFEIFPKTSSWPNHDSNKGVTAACPHAGAKSFYKNLIWLVKKGNSYPKLSKSYINDKGKEVLVLWGIHHPSTSADQQSLYQNADAYVFVWTSRYSKKFKPEIAIRPKVRDQEGRMNYYWTLVEPGDKITFEATGNLVVPRYAFAMDRNAGSGIIISDTPVHDCNTTCQTPKGAINTSLPFQNIHPITIGKCPKYVKSTKLRLATGLRNVPSIQSRGLFGAIAGFIEGGWTGMVDGWYGYHHQNEQGSGYAADLKSTQNAIDEITNKVNSVIEKMNTQFTAVGKEFNHLEKRIENLNKKVDDGFLDIWTYNAELLVLLENERTLDYHDSNVKNLYEKVRSQLKNNAKEIGNGCFEFYHKCDNTCMESVKNGTYDYPKYSEEAKLNREEIDGVKLESTRIYQILAIYSTVASSLVLVVSLGAISFWMCSNGSLQCRICI

SEQ ID NO: 8391 - protein, 566 aa, synthetic construct; identical to SEQ ID NO: 3833
  REGION 1..566: note = hemagglutinin__InfluenzaA__AFE18688

SEQ ID NO: 8392 - protein, 566 aa, synthetic construct; identical to SEQ ID NO: 650
  REGION 1..566: note = hemagglutinin__InfluenzaA__AFE47624

SEQ ID NO: 8393 - protein, 566 aa, synthetic construct; identical to SEQ ID NO: 1400
  REGION 1..566: note = hemagglutinin__InfluenzaA__AFE47635

SEQ ID NO: 8394 - protein, 566 aa, synthetic construct; identical to SEQ ID NO: 6982
  REGION 1..566: note = hemagglutinin__InfluenzaA__AFF18506

SEQ ID NO: 8395 - protein, 566 aa, synthetic construct
  REGION 1..566: note = hemagglutinin__InfluenzaA__AFF57124
MKAILVVLLYTFATANADTLCIGYHANNSTDTVDTVLEKNVTVTHSVNLLEDKHNGKLCKLRGVAPLHLGKCNIAGWILGNPECESLSTASSWSYIVETSSSDNGTCYPGDFINYEELREQLSSVSSFERFEIFPKTSSWPNHDSNKGVTAACPHAGAKSFYKNLIWLVKKENSYPKLSKSYINDKGKEVLVLWGIHHPSTTADQQRLYQNADAYVFVGTSRYSKKFKPEIAIRPKVRDQEGRMNYYWTLVEPGDKITFEATGNLVVPRYAFAMERNAGSGIIISDTPVHDCNTTCQTPKGAINTSLPFQNIHPITIGKCPKYVKSTKLRLATGLRNVPSIQSRGLFGAIAGFIEGGWTGMVDGWYGYHHQNEQGSGYAADLKSTQNAIDKITNKVNSVIEKMNTQFTAVGKEFNHLEKRIENLNKKVDDGFLDIWTYNAELLVLLENERTLDYHDSNVKNLYEKVRNQLKNNAKEIGNGCFEFYHKCDNTCMESVKNGTYDYPKYSEEAKLNREEIDGVKLESTRIYQILAIYSTVASSLVLVVSLGAISFWMCSNGSLQCRICI

SEQ ID NO: 8396 - protein, 566 aa, synthetic construct
  REGION 1..566: note = hemagglutinin__InfluenzaA__AFF57128
MKAILVVLLYTFATANADTLCIGYHANNSTDTVDTVLEKNVTVTHSVNLLEDKHNGKLCKLRGVAPLHLGKCNIAGWILGNPECESLSTASSWSYIVETSSSDNGTCYPGDFINYEELREQLSSVSSFERFEIFPKTSSWPNHDSNKGVTAACPHAGAKSFYKNLIWLVKKGNSYPKLSKSYINDKGKEVLVLWGIHHPSTTADQQSIYQNADAYVFVGTSRYSKKFKPEIAIRPKVRDQEGRMNYYWTLVEPGDKITFEATGNLVVPRYAFAMERNAGSGIIISDTPVHDCNTTCQTPKGAINTSLPFQNIHPITIGKCPKYVKSTKLRLATGLRNVPSIQSRGLFGAIAGFIEGGWTGMVDGWYGYHHQNEQGSGYAADLKSTQNAIDKITNKVNSVIEKMNTQFTAVGKEFNHLEKRIENLNKKVDDGFLDIWTYNAELLVLLENERTLDYHDSNVKNLYEKVRNQLKNNAKEIGNGCFEFYHKCDNTCMESVKNGTYDYPKYSEEAKLNREEIDGVKLESTRIYQILAIYSTVASSLVLVVSLGAISFWMCSNGSLQCRICI

SEQ ID NO: 8397 - protein, 566 aa, synthetic construct
  REGION 1..566: note = hemagglutinin__InfluenzaA__AFF57132
MKAILVVLLYTFATANADTLCIGYHANNSTDTVDTVLEKNVTVTHSVNLLEDKHNGKLCKLRGVAPLHLGKCNIAGWILGNPECESLSTASSWSYIVETSSSDNGTCYPGDFIDYEELREQLSSVSSFERFEIFPKTSSWPNHDSNKGVTAACPHAGAKGFYKNLIWLVKKGNSYPKLSKSYINDKGKEVLVLWGIHHPSTTADQQSIYQNADTYVFVGTSRYSKKFKPEIAIRPKVRDQEGRMNYYWTLVEPGDKITFEATGNLVVPRYAFAMERNAGSGIIISDTPVHDCNTTCQTPKGAINTSLPFQNIHPITIGKCPKYVKSTKLRLATGLRNVPSIQSRGLFGAIAGFIEGGWTGMVDGWYGYHHQNEQGSGYAADLKSTQNAIDKITNKVNSVIEKMNTQFTAVGKEFNHLEKRIENLNKKVDDGFLDIWTYNAELLVLLENERTLDYHDSNVKNLYEKVRNQLKNNAKEIGNGCFEFYHKCDNTCMESVKNETYDYPKYSEEAKLNREEIDGVKLESTRIYQILAIYSTVASSLVLVVSLGAISFWMCSNGSLQCRICI

SEQ ID NO: 8398 - protein, 566 aa, synthetic construct
  REGION 1..566: note = hemagglutinin__InfluenzaA__AFF57136
MKAILVVLLYTFATANADTLCIGYHANNSTDTVDTVLEKNVTVTHSVNLLEDKHNGKLCKLRGVAPLHLGKCNIAGWILGNPECESLSTASSWSYIVETSSSDNGTCYPGDFIDYEELREQLSSVSSFERFEIFPKTSSWPNHDSNKGVTAACPHAGAKSFYKNLIWLVKKGNSYPKLSKSYINDKGKEVLVLWGIHHPSTSADQQSLYQNADAYVFVGSSRYSKKFKPEIAIRPKVRDREGRMNYYWTLVEPGDKITFEATGNLVVPRYAFAMERNAGSGIIISDTPVYDCNTTCQTPKGAINTSLPFQNIHPITIGKCPKYVKSTKLRLATGLRNVPSIQSRGLFGAIAGFIEGGWTGMVDGWYGYHHQNEQGSGYAADLKSTQNAIDEITNKVNSVIEKMNTQFTAVGKEFNHLEKRIENLNKKVDDGFLDIWTYNAELLVLLENERTLDYHDSNVKNLYEKVRSQLKNNAKEIGNGCFEFYHKCDNTCMESVKNGTYDYPKYSEEAKLNREEIDGVKLESTRIYQILAIYSTVASSLVLVVSLGAISFWMCSNGSLQCRICI

SEQ ID NO: 8399 - protein, 566 aa, synthetic construct
  REGION 1..566: note = hemagglutinin__InfluenzaA__AFF57144
MKAILVVLLYTFATANADTLCIGYHANNSTDTVDTVLEKNVTVTHSVNLLEDKHNGKLCKLRGVAPLHLGKCNIAGWILGNPECESLSTASSWSYIVETSSSDNGTCYPGDFIDYEELREQLSSVSSFERFEIFPKTSSWPNHDSNKGVTAACPHAGAKSFYKNLIWLVKKGNSYPKLSKSYINDKGKEVLVLWGIHHPSTSDDQQSLYQNEDAYVFVGSSRYSKKFKPEIAIRPKVRDREGRMNYYWTLVEPGDKITFEATGNLVVPRYAFAMERNAGSGIIISDTPVHDCNTTCQTPKGAINTSLPFQNIHPITIGKCPKYVKSTKLRLATGLRNVPSIQSRGLFGAIAGFIEGGWTGMVDGWYGYHHQNEQGSGYAADLKSTQNAIDEITNKVNSVIEKMNTQFTAVGKEFNHLEKRIENLNKKVDDGFLDIWTYNAELLVLLENERTLDYHDSNVKNLYEKVRSQLKNNAKEIGNGCFEFYHKCDNTCMESVKNGTYDYPKYSEEAKLNREEIDGVKLESTRIYQILAIYSTVASSLVLVVSLGAISFWMCSNGSLQCRICI

SEQ ID NO: 8400 - protein, 566 aa, synthetic construct
  REGION 1..566: note = hemagglutinin__InfluenzaA__AFF57148
MKAILVVLLYTFATANADTLCIGYHANNSTDTVDTLLEKNVTVTHSVNLLEDKHNGKLCKLRGVAPLHLGKCNIAGWILGNPECESLSTASSWSYIVETSSSDNGTCYPGDFIDYEELREQLSSVSSFERFEIFPKTSSWPNHDSNKGVTAACPHAGAKSFYKNLIWLVKKGNSYPKLSKSYINDKGKEVLVLWGIHHPSTSDDQQSLYQNEDAYVFVGSSRYSKKFKPEIAIRPKVRDREGRMNYYWTLVEPGDKITFEATGNLVVPRYAFAMERNAGSGIIISDTPVHDCNTTCQTPKGAINTSLPFQNIHPITIGKCPKYVKSTKLRLATGLRNVPSIQSRGLFGAIAGFIEGGWTGMVDGWYGYHHQNEQGSGYAADLKSTQNAIDEITNKVNSVIEKMNTQFTAVGKEFNHLEKRIENLNKKVDDGFLDIWTYNAELLVLLENERTLDYHDSNVKNLYEKVRSQLKNNAKEIGNGCFEFYHKCDNTCMESVKNGTYDYPKYSEEAKLNREEIDGVKLESTRIYQILAIYSTVASSLVLVVSLGAISFWMCSNGSLQCRICI

SEQ ID NO: 8401 - protein, 566 aa, synthetic construct
  REGION 1..566: note = hemagglutinin__InfluenzaA__AFF57160
MKAILVVLLYTFATANADTLCIGYHANNSTDTVDTVLEKNVTVTHSVNLLEDKHNGKLCKLRGVAPLHLGKCNIAGWILGNPECESLSTASSWSYIVETSSSDNGTCYPGDFIDYEELREQLSSVSSFERFEIFPKTSSWPNHDSNKGVTAACPHAGAKSFYKNLIWLVKKGNSYPKLSESYINDKGKEVLVLWGIHHPSTSADQQSLYQNEDAYVFVGSSRYSKKFKPEIAIRPKVRDREGRMNYYWTLVEPGDKITFEATGNLVVPRYAFAMERNAGSGIIISDTPVHDCNTTCQTPKGAINTSLPFQNIHPITIGKCPKYVKSTKLRLATGLRNVPSIQSRGLFGAIAGFIEGGWTGMVDGWYGYHHQNEQGSGYAADLKSTQNAIDEITNKVNSVIEKMNTQFTAVGKEFNHLEKRIENLNKKVDDGFLDIWTYNAELLVLLENERTLDYHDSNVKNLYEKVRSQLKNNAKEIGNGCFEFYHKCDNTCMESVKNGTYDYPKYSEEAKLNREEIDGVKLESTRIYQILAIYSTVASSLVLVVSLGAISFWMCSNGSLQCRICI

SEQ ID NO: 8402 - protein, 566 aa, synthetic construct
  REGION 1..566: note = hemagglutinin__InfluenzaA__AFF57164
MKAILVVLLYTFATANADTLCIGYHANNSTDTVDTVLEKNVTVTHSVNLLEDKHNEKLCKLRGVAPLHLGKCNIAGWILGNPECESLSTASSWSYIVETSSSDNGTCYPGDFIDYEELREQLSSVSSFERFEIFPKTSSWPNHDSNKGVTAACPHAGAKSFYKNLIWLVKKGNSYPKLSKSYINDKGKEVLVLWGIHHPSTSADQQSLYQNADAYVFVGSSRYSKKFKPEIAIRPKVRDREGRMNYYWTLVEPGDKITFEATGNLVVPRYAFAMERNAGSGIIISDTPVHDCNTTCQTPKGAINTSLPFQNIHPITIGKCPKYVKSTKLRLATGLRNVPSIQSRGLFGAIAGFIEGGWTGMVDGWYGYHHQNEQGSGYAADLKSTQNAIDEITNKVNSVIEKMNTQFTAVGKEFNHLEKRIENLNKKVDDGFLDIWTYNAELLVLLENERTLDYHDSNVKNLYEKVRSQLKNNAKEIGNGCFEFYHKCDNTCMESVKNGTYDYPKYSEEAKLNREEIDGVKLESTRIYQILAIYSTVASSLVLVVSLGAISFWMCSNGSLQCRICI

SEQ ID NO: 8403 - protein, 566 aa, synthetic construct; identical to SEQ ID NO: 8402
  REGION 1..566: note = hemagglutinin__InfluenzaA__AFF57168

SEQ ID NO: 8404 - protein, 566 aa, synthetic construct
  REGION 1..566: note = hemagglutinin__InfluenzaA__AFF57172
MKAILVVLLYTFATANADTLCIGYHANNSTDTVDTVLEKNVTVTHSVNLLEDKHNGKLCKLRGVAPLHLGKCNIAGWILGNPECESLSTASSWSYIVETSSSDNGTCYPGDFIDYEELREQLSSVSSFERFEIFPKTSSWPNHDSNKGVTAACPHAGAKSFYKNLIWLVKKGNSYPKLSKSYINDKGKEVLVLWGIHHPSTSADQQSLYQNEDAYVFVGSSRYSKKFKPEIAIRPKVRDREGRMNYYWTLVEPGDKITFEATGNLVVPRYAFAMERNAGSGIIISDTPVHDCNTTCQTPKGAINTSLPFQNIHPITIGKCPKYVKSTKLRLATGLRNVPSIQSRGLFGAIAGFIEGGWTGMVDGWYGYHHQNEQGSGYAADLKSTQNAIDEITNKVNSVIEKMNTQFTAVGKEFNHLEKRIENLNKKVDDGFLDIWTYNAELLVLLENERTLDYHDSNVKNLYEKVRSQLKNNAKEIGNGCFEFYHKCDNTCMESVKNGTYDYPKYSEEAKLNREEIDGVKLESTRIYQILAIYSTVASSLVLVVSLGAISFWMCSNGSLQCRICI

SEQ ID NO: 8405 - protein, 566 aa, synthetic construct
  REGION 1..566: note = hemagglutinin__InfluenzaA__AFF57176
MKAILVVLLYTFATANADTLCIGYHANNSTDTVDTVLEKNVTVTHSVNLLEDKHNGKLCKLRGVAPLHLGKCNIAGWILGNPECESLSTASSWSYIVETSSSDNGTCYPGDFIDYEELREQLSSVSSFERFEIFPKTSSWPNHDSNKGVTAACPHAGAKSFYKNLIWLVKKENSYPKLSKSYINDKGKEVLVLWGIHHPSTSADQQSLYQNADAYVFVGSSRYSKKFKPEIAIRPKVRDREGRMNYYWTLVEPGDKITFEATGNLVVPRYAFAMERNAGSGIIISDTPVHDCNTTCQTPKGAINTSLPFQNIHPITIGKCPKYVKSTKLRLATGLRNVPSIQSRGLFGAIAGFIEGGWTGMVDGWYGYHHQNEQGSGYAADLKSTQNAIDEITNKVNSVIEKMNTQFTAVGKEFNHLEKRIENLNKKVDDGFLDIWTYNAELLVLLENERTLDYHDSNVKNLYEKVRSQLKNNAKEIGNGCFEFYHKCDNTCMESVKNGTYDYPKYSEEAKLNREEIDGVKLESTRIYQILAIYSTVASSLVLVVSLGAISFWMCSNGSLQCRICI

SEQ ID NO: 8406 - protein, 566 aa, synthetic construct
  REGION 1..566: note = hemagglutinin__InfluenzaA__AFF57184
MKAILVVLLYTFATANADTLCIGYHANNSTDTVDTVLEKNVTVTHSVNLLEDKHNGKLCKLRGVAPLHLGKCNIAGWILGNPECESLSTASSWSYIVETSSSDNGTCYPGDFIDYEELREQLSSVSSFERFEIFPKTSSWPNHDSNKGVTAACPHAGAKSFYKNLIWLVKKENSYQKLSKSYINDKGKEVLVLWGIHHPSTSADQQSLYQNADAYVFVGSSRYSKKFKPEIAIRPKVRDREGRMNYYWTLVEPGDKITFEATGNLVVPRYAFAMERNAGSGIIISDTPVHDCNTTCQTPKGAINTSLPFQNIHPITIGKCPKYVKSTKLRLATGLRNVPSIQSRGLFGAIAGFIEGGWTGMVDGWYGYHHQNEQGSGYAADLKSTQNAIDEITNKVNSVIEKMNTQFTAVGKEFNHLEKRIENLNKKVDDGFLDIWTYNAELLVLLENERTLDYHDSNVKNLYEKVRSQLKNNAKEIGNGCFEFYHKCDNTCMESVKNGTYDYPKYSEEAKLNREEIDGVKLESTRIYQILAIYSTVASSLVLVVSLGAISFWMCSNGSLQCRICI

SEQ ID NO: 8407 - protein, 566 aa, synthetic construct; identical to SEQ ID NO: 8399
  REGION 1..566: note = hemagglutinin__InfluenzaA__AFF57188

SEQ ID NO: 8408 - protein, 568 aa, synthetic construct
  REGION 1..568: note = hemagglutinin__InfluenzaA__AFF60787
MEKIVLLFAIVSLVKSDQICIGYHANNSTEQVDTIMEKNVTVTHAQDILEKTHNGKLCDLDGVKPLILRDCSVAGWLLGNPMCDEFINVPEWSYIVEKANPVNDLCYPGDFNDYEELKHLLSRINHFEKIQIIPKSSWSSHEASLGVSSACPYQGKSSFFRNVVWLIKKNSTYPTIKRSYNNTNQEDLLVLWGIHHPNDAAEQTKLYQNPTTYISVGTSTLNQRLVPRIATRSEVNGQSGRMEFFWTILKPNDAINFESNGNFIAPEYAYKIVKKGDSTIMKSELEYGNCNTKCQTPMGAINSSMPFHNIHPLTIGECPKYVKSNRLVLATGLRNSPQRERRRKKRGLFGAIAGFIEGGWQGMVDGWYGYHHSNEQGSGYAADKESTQKAIDGVTNKVNSIIDKMNTQFEAVGREFNNLERRIENLNKKMEDGFLDVWTYNAELLVLMENERTLDFHDSNVKNLYDKVRLQLRDNAKELGNGCFEFYHKCDNECMESVRNGTYDYPQYSEEARLKREEISGVKLESIGIYQILSIYSTVASSLALAIMVAGLSLWMCSNGSLQCRICI

SEQ ID NO: 8409 - protein, 566 aa, synthetic construct
  REGION 1..566: note = hemagglutinin__InfluenzaA__AFG29042
MKAILVVLLYTFATANADTLCIGYHANNSTDTVDTVLEKNVTVTHSVNLLEDKHNGKLCKLRGVAPLHLGKCNIAGWILGNPECESLSTASSWSYIVETFSSDNGTCYPGDFIDYEELREQLSSVSSFERFEIFPKTSSWPNHDSNKGVTAACPHAGAKSFYKNLIWLVKKGNSYPKLSKSYINDKGKEVLVLWGIHHPSTSADQQSLYQNADAYVFVGTSRYSKKFKPEIAIRPKVRDQEGRMNYYWTLIEPGDKITFEATGNLVVPRYAFAMERNAGSGIIISDTPVHDCNTTCQTPKGAINTSLPFQNIHPITIGKCPKYVKSTKLRLATGLRNVPSIQSRGLFGAIAGFIEGGWTGMVDGWYGYHHQNEQGSGYAADLKSTQNAIDEITNKVNSVIEKMNTQFTAVGKEFNHLEKRIENLNKKVDDGFLDIWTYNAELLVLLENERTLDYHDSNVKNLYEKVRSQLKNNAKEIGNGCFEFYHKCDNTCMESVKNGTYDYPKYSEEAKLNREEIDGVKLESTRIYQILAIYSTVASSLVLVVSLGAISFWMCSNGSLQCRICI

SEQ ID NO: 8410 - protein, 566 aa, synthetic construct
  REGION 1..566: note = hemagglutinin__InfluenzaA__AFG29044
MKAILVVLLYTFATANADTLCIGYHANNSTDTVDTVLEKNVTVTHSVNLLEDKHNGKLCKLRGVAPLHLGKCNIAGWILGNPECESLSTASSWSYIVETPNSDNGTCYPGDFIDYEELREQLSSVSSFERFEIFPKTSSWPNHDSNKGVTAACPHAGAKSFYKNLIWLVKKGNSYPKLSKSYINDKGKEVLVLWGIHHPPTSTDQQSLYQNADAYVFVGTSRYSKKFKPEIAIRPKVRGQEGRMNYYWTLVEPGDKITFEATGNLVVPRYAFAMERNAGSGIIISDTPVHDCNTTCQTPKGAINTSLPFQNIHPITIGKCPKYVKSTKLRLATGLRNVPSIQSRGLFGAIAGFIEGGWTGMVDGWYGYHHQNEQGSGYAADLKSTQNAIDKITNKVNSVIEKMNTQFTAVGKEFNHLEKRIENLNKKVDDGFLDIWTYNAELLVLLENERTLDYHDSNVKNLYEKVRSQLKNNAKEIGNGCFEFYHKCDNTCMESVKNGTYDYPKYSEEAKLNREEIDGVKLESTRIYQILAIYSTVASSLVLVVSLGAISFWMCSNGSLQCRICI

SEQ ID NO: 8411 - protein, 566 aa, synthetic construct; identical to SEQ ID NO: 2669
  REGION 1..566: note = hemagglutinin__InfluenzaA__AFG31060

SEQ ID NO: 8412 - protein, 566 aa, synthetic construct; identical to SEQ ID NO: 5224
  REGION 1..566: note = hemagglutinin__InfluenzaA__AFG31070

SEQ ID NO: 8413 - protein, 566 aa, synthetic construct; identical to SEQ ID NO: 2656
  REGION 1..566: note = hemagglutinin__InfluenzaA__AFG31080

SEQ ID NO: 8414 - protein, 566 aa, synthetic construct
  REGION 1..566: note = hemagglutinin__InfluenzaA__AFG31100
MKAILVVLLYTFATANADTLCIGYHANNSTDTVDTVLEKNVTVTHSVNLLEDKHNGKLCKLRGVAPLHLGKCNIAGWILGNPECESLSTASSWSYIVETSSSDNGTCYPGDFIDYEELREQLSSVSSFERFEIFPKTSSWPNHDLNKGVTAACPHAGAKSFYKNLIWLVKKGNSYPKLSKSYINDKGKEVLVLWGIHHPSTSADQQSLYQNADAYVFVGTSRYSKKFKPEIAIRPKVRDQEGRMNYYWTLVEPGDKITFEATGNLVVPRYAFAMERNAGSGIIISDTPVHDCNTTCQTPKGAINTSLPFQNIHPITIGKCPKYVKSTKLRLATGLRNVPSIQSRGLFGAIAGFIEGGWTGMVDGWYGYHHQNEQGSGYAADLKSTQNAIDEITNKVNSVIEKMNTQFTAVGKEFNHLEKRIENLNKKVDDGFLDIWTYNAELLVLLENERTLDYHDSNVKNLYEKVRSQLKNNAKEIGNGCFEFYHKCDNTCMESVKNGTYDYPKYSEEAKLNREEIDGVKLESTRIYQILAIYSTVASSLVLIVSLGAISFWMCSNGSLQCRICI

SEQ ID NO: 8415 - protein, 566 aa, synthetic construct; identical to SEQ ID NO: 2669
  REGION 1..566: note = hemagglutinin__InfluenzaA__AFG31110

SEQ ID NO: 8416 - protein, 566 aa, synthetic construct; identical to SEQ ID NO: 2911
  REGION 1..566: note = hemagglutinin__InfluenzaA__AFG31120

SEQ ID NO: 8417 - protein, 566 aa, synthetic construct; identical to SEQ ID NO: 2911
  REGION 1..566: note = hemagglutinin__InfluenzaA__AFG31130

SEQ ID NO: 8418 - protein, 566 aa, synthetic construct; identical to SEQ ID NO: 2911
  REGION 1..566: note = hemagglutinin__InfluenzaA__AFG31140

SEQ ID NO: 8419 - protein, 566 aa, synthetic construct; identical to SEQ ID NO: 3771
  REGION 1..566: note = hemagglutinin__InfluenzaA__AFG31150

SEQ ID NO: 8420 - protein, 566 aa, synthetic construct; identical to SEQ ID NO: 3771
  REGION 1..566: note = hemagglutinin__InfluenzaA__AFG31160

SEQ ID NO: 8421 - protein, 566 aa, synthetic construct; identical to SEQ ID NO: 2669
  REGION 1..566: note = hemagglutinin__InfluenzaA__AFG31170

SEQ ID NO: 8422 - protein, 566 aa, synthetic construct; identical to SEQ ID NO: 2669
  REGION 1..566: note = hemagglutinin__InfluenzaA__AFG31180

SEQ ID NO: 8423 - protein, 566 aa, synthetic construct; identical to SEQ ID NO: 2669
  REGION 1..566: note = hemagglutinin__InfluenzaA__AFG31190

SEQ ID NO: 8424 - protein, 566 aa, synthetic construct; identical to SEQ ID NO: 2669
  REGION 1..566: note = hemagglutinin__InfluenzaA__AFG31200

SEQ ID NO: 8425 - protein, 566 aa, synthetic construct; identical to SEQ ID NO: 2669
  REGION 1..566: note = hemagglutinin__InfluenzaA__AFG31210

SEQ ID NO: 8426 - protein, 566 aa, synthetic construct; identical to SEQ ID NO: 2669
  REGION 1..566: note = hemagglutinin__InfluenzaA__AFG31220

SEQ ID NO: 8427 - protein, 566 aa, synthetic construct; identical to SEQ ID NO: 5224
  REGION 1..566: note = hemagglutinin__InfluenzaA__AFG31230

SEQ ID NO: 8428 - protein, 566 aa, synthetic construct; identical to SEQ ID NO: 2669
  REGION 1..566: note = hemagglutinin__InfluenzaA__AFG31240

SEQ ID NO: 8429 - protein, 566 aa, synthetic construct; identical to SEQ ID NO: 2669
  REGION 1..566: note = hemagglutinin__InfluenzaA__AFG31250

SEQ ID NO: 8430 - protein, 566 aa, synthetic construct; identical to SEQ ID NO: 2669
  REGION 1..566: note = hemagglutinin__InfluenzaA__AFG31260

SEQ ID NO: 8431 - protein, 566 aa, synthetic construct; identical to SEQ ID NO: 2669
  REGION 1..566: note = hemagglutinin__InfluenzaA__AFG31270

SEQ ID NO: 8432 - protein, 566 aa, synthetic construct; identical to SEQ ID NO: 2669
  REGION 1..566: note = hemagglutinin__InfluenzaA__AFG31280

SEQ ID NO: 8433 - protein, 566 aa, synthetic construct; identical to SEQ ID NO: 2669
  REGION 1..566: note = hemagglutinin__InfluenzaA__AFG31290

SEQ ID NO: 8434 - protein, 566 aa, synthetic construct
  REGION 1..566: note = hemagglutinin__InfluenzaA__AFG31300
MKAILVVLLYTFATANADTLCIGYHANNSTDTVDTVLEKNVTVTHSVNLLEDKHNGKLCKLRGVAPLHLGKCNIAGWILGNPECESLSTASSWSYIVETSSSDNGTCYPGDFIDYEELREQLSSVSSFERFEIFPKTSSWPNHDSNKGVTAACPHAGAKSFYKNLIWLVKKGNSYPKLSKSYINDKGKEVLVLWGIHHPSTSADQQSLYQNADAYVFVGTSRYSKKFKPEIAIRPKVRDQEGRMNYYWTLVEPGDKITFEATGNLVVPRYAFAMERNAGSGIIISDTPVHDCNTTCQTPKGAINTSLPFQNINPITIGKCPKYVKSTKLRLATGLRNVPSIQSRGLFGAIAGFIEGGWTGMVDGWYGYHHQNEQGSGYAADLKSTQNAIDEITNKVNSVIEKMNTQFTAVGKEFNHLEKRIENLNKKVDDGFLDIWTYNAELLVLLENERTLDYHDSNVKNLYEKVRSQLKNNAKEIGNGCFEFYHKCDNTCMESVKNGTYDYPKYSEEAKLNREEIDGVKLESTRIYQILAIYSTVASSLVLVVSLGAISFWMCSNGSLQCRICI

SEQ ID NO: 8435 - protein, 566 aa, synthetic construct; identical to SEQ ID NO: 5224
  REGION 1..566: note = hemagglutinin__InfluenzaA__AFG31310

SEQ ID NO: 8436 - protein, 566 aa, synthetic construct; identical to SEQ ID NO: 2669
  REGION 1..566: note = hemagglutinin__InfluenzaA__AFG31323

SEQ ID NO: 8437 - protein, 566 aa, synthetic construct; identical to SEQ ID NO: 2669
  REGION 1..566: note = hemagglutinin__InfluenzaA__AFG31333

SEQ ID NO: 8438 - protein, 566 aa, synthetic construct; identical to SEQ ID NO: 2669
  REGION 1..566: note = hemagglutinin__InfluenzaA__AFG31343

SEQ ID NO: 8439 - protein, 566 aa, synthetic construct; identical to SEQ ID NO: 2669
  REGION 1..566: note = hemagglutinin__InfluenzaA__AFG31353

SEQ ID NO: 8440 - protein, 566 aa, synthetic construct; identical to SEQ ID NO: 2669
  REGION 1..566: note = hemagglutinin__InfluenzaA__AFG31363

SEQ ID NO: 8441 - protein, 566 aa, synthetic construct; identical to SEQ ID NO: 2669
  REGION 1..566: note = hemagglutinin__InfluenzaA__AFG31376

SEQ ID NO: 8442 - protein, 566 aa, synthetic construct; identical to SEQ ID NO: 2669
  REGION 1..566: note = hemagglutinin__InfluenzaA__AFG31386

SEQ ID NO: 8443 - protein, 566 aa, synthetic construct; identical to SEQ ID NO: 2669
  REGION 1..566: note = hemagglutinin__InfluenzaA__AFG31396

SEQ ID NO: 8444 - protein, 566 aa, synthetic construct; identical to SEQ ID NO: 2669
  REGION 1..566: note = hemagglutinin__InfluenzaA__AFG31406

SEQ ID NO: 8445 - protein, 566 aa, synthetic construct; identical to SEQ ID NO: 2669
  REGION 1..566: note = hemagglutinin__InfluenzaA__AFG31416

SEQ ID NO: 8446 - protein, 566 aa, synthetic construct; identical to SEQ ID NO: 2669
  REGION 1..566: note = hemagglutinin__InfluenzaA__AFG31426

SEQ ID NO: 8447 - protein, 566 aa, synthetic construct; identical to SEQ ID NO: 2669
  REGION 1..566: note = hemagglutinin__InfluenzaA__AFG31436

SEQ ID NO: 8448 - protein, 566 aa, synthetic construct; identical to SEQ ID NO: 2669
  REGION 1..566: note = hemagglutinin__InfluenzaA__AFG31446

SEQ ID NO: 8449 - protein, 566 aa, synthetic construct; identical to SEQ ID NO: 2669
  REGION 1..566: note = hemagglutinin__InfluenzaA__AFG31456

SEQ ID NO: 8450 - protein, 566 aa, synthetic construct; identical to SEQ ID NO: 2669
  REGION 1..566: note = hemagglutinin__InfluenzaA__AFG31466

SEQ ID NO: 8451 - protein, 566 aa, synthetic construct; identical to SEQ ID NO: 3771
  REGION 1..566: note = hemagglutinin__InfluenzaA__AFG31486

SEQ ID NO: 8452 - protein, 566 aa, synthetic construct; identical to SEQ ID NO: 2669
  REGION 1..566: note = hemagglutinin__InfluenzaA__AFG31496

SEQ ID NO: 8453 - protein, 566 aa, synthetic construct; identical to SEQ ID NO: 2669
  REGION 1..566: note = hemagglutinin__InfluenzaA__AFG31506

SEQ ID NO: 8454 - protein, 566 aa, synthetic construct; identical to SEQ ID NO: 2669
  REGION 1..566: note = hemagglutinin__InfluenzaA__AFG31516

SEQ ID NO: 8455 - protein, 566 aa, synthetic construct; identical to SEQ ID NO: 2760
  REGION 1..566: note = hemagglutinin__InfluenzaA__AFG31526

SEQ ID NO: 8456 - protein, 566 aa, synthetic construct; identical to SEQ ID NO: 2669
  REGION 1..566: note = hemagglutinin__InfluenzaA__AFG31536

SEQ ID NO: 8457 - protein, 566 aa, synthetic construct; identical to SEQ ID NO: 5224
  REGION 1..566: note = hemagglutinin__InfluenzaA__AFG31546

SEQ ID NO: 8458 - protein, 566 aa, synthetic construct; identical to SEQ ID NO: 5224
  REGION 1..566: note = hemagglutinin__InfluenzaA__AFG31556

SEQ ID NO: 8459 - protein, 566 aa, synthetic construct; identical to SEQ ID NO: 2669
  REGION 1..566: note = hemagglutinin__InfluenzaA__AFG31566

SEQ ID NO: 8460 - protein, 566 aa, synthetic construct; identical to SEQ ID NO: 2911
  REGION 1..566: note = hemagglutinin__InfluenzaA__AFG31586

SEQ ID NO: 8461 - protein, 566 aa, synthetic construct; identical to SEQ ID NO: 2911
  REGION 1..566: note = hemagglutinin__InfluenzaA__AFG31596

SEQ ID NO: 8462 - protein, 566 aa, synthetic construct; identical to SEQ ID NO: 2911
  REGION 1..566: note = hemagglutinin__InfluenzaA__AFG31606

SEQ ID NO: 8463 - protein, 566 aa, synthetic construct; identical to SEQ ID NO: 2911
  REGION 1..566: note = hemagglutinin__InfluenzaA__AFG31616

SEQ ID NO: 8464 - protein, 566 aa, synthetic construct; identical to SEQ ID NO: 2911
  REGION 1..566: note = hemagglutinin__InfluenzaA__AFG31626

SEQ ID NO: 8465 - protein, 566 aa, synthetic construct; identical to SEQ ID NO: 2669
  REGION 1..566: note = hemagglutinin__InfluenzaA__AFG31636

SEQ ID NO: 8466 - protein, 566 aa, synthetic construct; identical to SEQ ID NO: 2669
  REGION 1..566: note = hemagglutinin__InfluenzaA__AFG31646

SEQ ID NO: 8467 - protein, 566 aa, synthetic construct; identical to SEQ ID NO: 3833
  REGION 1..566: note = hemagglutinin__InfluenzaA__AFG31656

SEQ ID NO: 8468 - protein, 566 aa, synthetic construct; identical to SEQ ID NO: 3833
  REGION 1..566: note = hemagglutinin__InfluenzaA__AFG31666

SEQ ID NO: 8469 - protein, 566 aa, synthetic construct
  REGION 1..566: note = hemagglutinin__InfluenzaA__AFG71865
MKTIIALSYIFCLALGQDLPGNDNSTATLCLGHHAVPNGTLVKTITNDQIEVTNATELVQSSSTGKICNNPHRILDGIDCTLIDALLGDPHCDVFQNETWDLFVERSKAFSNCYPYDVPDYASLRSLVASSGTLEFITEGFTWTGVTQNGGSNACKRGPGIGFFSRLNWLTKSGSTYPVLNVTMPNNDNFDKLYIWGVHHPSTNQEQTSLYVQASGRVTVSTRRSQQTIIPNIGSRPWVRGLSSRISIYWTIVKPGDVLVINSNGNLIAPRGYFKMRTGKSSIMRSDAPIDTCISECITPNGSIPNDKPFQNVNKITYGACPKYVKQNTLKLATGMRNVPEKQTRGLFGAIAGFIENGWEGMIDGWYGFRHQNSEGTGQAADLKSTQAAIDQINGKLNRVIEKTNEKFHQIEKEFSEVEGRIQDLEKYVEDTKIDLWSYNAELLVALENQHTIDLTDSEMNKLFEKTRRQLRENAEDMGNGCFKIYHKCDNACIESIRNGTYDHDVYRDEALNNRFQIKGVELKSGYKDWILWISFAISCFLLCVVLLGFIMWACQRGNIRCNICI

SEQ ID NO: 8470 - protein, 566 aa, synthetic construct; identical to SEQ ID NO: 1556
  REGION 1..566: note = hemagglutinin__InfluenzaA__AFG71876

SEQ ID NO: 8471 - protein, 566 aa, synthetic construct
  REGION 1..566: note = hemagglutinin__InfluenzaA__AFG71898
MKTIIALSYLFCLAFGQDLPGNDNSTATLCLGHHAVPNGTLVKTITDDQIEVTNATELVQSSSTGKICNNPHRILDGIDCTLIDALLGDPHCDVFQNETWDLFVERSKAFSNCYPYDVPDYASLRSLVASSGTLEFTTEGFTWTGVTQNGGSNACKRGPGSGFFSRLNWLTKSGSTYPVLNVTMSNNDNFDKLYIWGVHHPSTNQEQTSLYVQASGRVTVSTRRSQQTIIPNIGSRPWVRGLSSRISIYWTIVKPGDVLVINSNGNLIAPRGYFKMRTGKSSIMRSDAPIDTCVSECITPNGSIPNDKPFQNVNKITYGACPKYVKQNTLKLATGMRNVPEKQTRGLFGAIAGFIENGWEGMIDGWYGFRHQNSEGTGQAADLKSTQAAIDQINGKLNRVIEKTNEKFHQIEKEFSEVEGRIQDLEKYVEDTKIDLWSYNAELLVALENQHTIDLTDSEMNKLFEKTRRQLRENAEDMGNGCFKIYHKCDNACIESIRNGTYDHDVYRDEALNNRFQIKGVELKSGYKDWILWISFAISCFLLCVVLLGFIMWACQRGNIRCNICI

SEQ ID NO: 8472 - protein, 566 aa, synthetic construct
  REGION 1..566: note = hemagglutinin__InfluenzaA__AFG71920
MKTIIALSYIFCLALGQDLPGNDNSTATLCLGHHAVPNGTLVKTITNDQIEVTNATELVQSSSTGKICNNPHRILDGINCTLIDALLGDPHCDVFQDETWDLFVERSKAFSNCYPYDVPDYASLRSLIASSGTLEFITEGFTWTGVTQNGGSNACKRGPGSGFFSRLNWLTKSGSTYPVLNVTMPNNDNFDKLYIWGVHHPSTNQEQTSLYVQASGRVTVSTRRSQQTIIPNIGSRPWVRGLSSRISIYWTIVKPGDVLVINSNGNLIAPRGYFKMRTGKSSIMRSDAPIDTCISECITPNGSIPNDKPFQNVNKITYGACPKYVKQNTLKLATGMRNVPEKQTRGLFGAIAGFIENGWEGMIDGWYGFRHQNSEGTGQAADLKSTQAAIDQINGKLNRVIEKTNEKFHQIEKEFSEVEGRIQDLEKYVEDTKIDLWSYNAELLVALENQHTIDLTDSEMNKLFEKTRRQLRENAEDMGNGCFKIYHKCDNACIESIRNGTYDHDVYRDEALNNRFQIKGVELKSGYKDWILWISFAISCFLLCVVLLGFIMWACQRGNIRCNICI

SEQ ID NO: 8473 - protein, 566 aa, synthetic construct
  REGION 1..566: note = hemagglutinin__InfluenzaA__AFG71931
MKTIIALSYIFCLVIGQDLPGNENSTATLCLGHHAVPNGTLVKTITNDQIEVTNATELVQSSSTGKICNNPHRILDGIDCTLIDALLGDPHCDGFQNETWDLFVERSKAFSNCYPYDVPDYASLRSLVASSGTLEFITEGFTWTGVTQNGGSNACKRGPGIGFFSRLNWLTKSGSTYPVLNVTMPNNDNFDKLYIWGVHHPSTNQEQTSLYVQASGRVTVSTRRSQQTIIPNIGSRPWVRGLSSRISIYWTIVKPGDVLVINSNGNLIAPRGYFKMRTGKSSIMRSDAPIDTCISECITPNGSIPNDKPFQNVNKITYGACPKYVKQNTLKLATGMRNVPEKQTRGLFGAIAGFIENGWEGMIDGWYGFRHQNSEGTGQAADLKSTQAAIDQINGKLNRVIEKTNEKFHQIEKEFSEVEGRIQDLEKYVEDTKIDLWSYNAELLVALENQHTIDLTDSEMNKLFEKTRRQLRENAEDMGNGCFKIYHKCDNACIESIRNGTYDHDVYRDEALNNRFQIKGVELKSGYKDWILWISFAISCFLLCVVLLGFIMWACQRGNIRCNICI

SEQ ID NO: 8474 - protein, 566 aa, synthetic construct
  REGION 1..566: note = hemagglutinin__InfluenzaA__AFG71942
MKTIIALSYIFYLALSQDLPGNDNSKATLCLGHHAVPNGTLVKTITDDQTEVTNATELVQSSSTGKICNNPHRILDGMDCTLIDALLGDPHCDVFQNETWDLFVERSKAFSNCYPYDVPDYASLRSLVASSGTLEFITEGFTWTEVTQNGGSIACKRGPDSGFFSRLNWLTKSGRTYPVLNVTMPNNDNFDKLYIWGVHHPSTDQEQTNLYVQTSGRVTVSTRRSQQTIIPNIGSRPWVRGLSSRISIYWTIVKPGDVLVINSNGNLIAPRGYFKMRTGKSSIMRSDAPIDTCISECITPNGSIPNDKPFQNVNKITYGACPKYVKQNTLKLATGMRNVPEKQTRGLFGAIAGFIENGWEGMIDGWYGFRHQNSEGTGQAADLKSTQAAIDQINGKLNRIIEKTNEKFHQIEKEFSEVEGRIQDLEKYVEDTKIDLWSYNAELLVALENQHTIDLTDSEMNKLFEKTRRQLRENAEDMGNGCFKIYHKCDNACIESIRNGTYDHDVYRDEALNNRFQIKGVELKSGYKDWILWISFAISCFLLCVVLLGFIMWACQRGNIRCNICI

SEQ ID NO: 8475 - protein, 566 aa, synthetic construct
  REGION 1..566: note = hemagglutinin__InfluenzaA__AFG71953
MKTIIALSYIFCLVLGQDLPGNDKSTATLCLGHHAVPNGTLVKTITNDQIEVTNATELVQSSSTGKICNNPHRILDGIDCTLIDALLGDPHCDGFQNETWDLFVERSKAFSNCYPYDVPDYASLRSLVASSGTLEFITEGFTWTGVTQNGGSNACKRGPGSGFFSRLNWLTKSGSTYPVLNVTMPNNDNFDKLYIWGVHHPSTNQEQTSLYVQASGRVTVSTKRSQQTIIPNIGSRPWVRGPSSRISIYWTTVKPGDILIINSNGNLIAPRGYFKMRTGKSSIMRSDAPIGACISECITPNGSIPNDKPFQNVNKITYGACPKYVKQNTLKLATGMRNVPEKQTRGLFGAIAGFIENGWEGMIDGWYGFRHQNSEGTGQAADLKSTQAAIDQINGKLNRVIEKTNEKFHQIEKEFSEVEGRIQDLEKYVEDTKIDLWSYNAELLVALENQHTIDLTDSEMNKLFEKTRRQLRENAEDMGNGCFKIYHKCDNACIGSIRNGTYDHDVYRDEALNNRFQIKGVELKSGYKDWILWISFAISCFLLCVVLLGVIMWACQKGNIRCNICI

SEQ ID NO: 8476 - protein, 566 aa, synthetic construct; identical to SEQ ID NO: 305
  REGION 1..566: note = hemagglutinin__InfluenzaA__AFG71975

SEQ ID NO: 8477 - protein, 566 aa, synthetic construct
  REGION 1..566: note = hemagglutinin__InfluenzaA__AFG71996
MKTIIALSYIFCLVLGQNFPGNDNSTATLCLGHHAVPNGTLVKTITNDQIEVTNATELVQSSSTGKICNNPHRILDGIDCTLIDALLGDPHCDGFQNETWDLFVERSKAFSNCYPYDVPDYASLRSLVASSGTLEFINEGFTWTGVTQNGGSNACKRGPDIGFFSRLNWLYKSGNTYPVLNVSMPNNDNFDKLYIWGVHHPSTDQEQTSLYVQASGRVTVSTKRSQQTIIPNIGSRPWVRGLSSRISIYWTIVKPGDILVINSNGNLIAPRGYFKMRTGKSSIMRSDASIGTCISECITPNGSIPNDKPFQNVNKITYGACPKYVKQNTLKLATGMRNVPEKQTRGIFGAIAGFIENGWEGMIDGWYGFRHQNSEGTGQAADLKSTQAAIDQINGKLNRIIEKTNEKFHQIEKEFSEVEGRIQDLEKYVEDTKIDLWSYNAELLVALENQHTIDLTDSEMNKLFEKTRRQLRENAEDMGNGCFKIYHKCDNACIGSIRNGTYDHDVYRDEALNNRFQIKGVELKSGYKDWILWISFAISCFLLCVVLLGFIMWACQKGNIRCNICI

SEQ ID NO: 8478 - protein, 566 aa, synthetic construct
  REGION 1..566: note = hemagglutinin__InfluenzaA__AFG72007
MKTIIALSYIFCLVLGRDFPRNDNSTATLCLGHHAVPNGTLVKTITNDQIEVTNATELVQSSSTGKICNNPHRILDGMDCTLIDALLGDPHCDGLQNGTWDLFVERSKAFSNCYPYDVPDYASLRSLVASSGTLEFINEGFTWTGVTQNGGSNACKRGPDSGFFSRLNWLYKSGNTYPVLNVTMPNNDNFDKLYIWGVHHPSTDQDQTSLYVQASGRVTVSTKRSQQTVIPNIGPRPWVRGLSSRISIYWTIVKPGDILLINSNGNLIAPRGYFKMRTGKSSIMRSDAPIGTCISECITPNGSIPNDKPFQNVNKITYGACPKYVKQNTLKLATGMRNVPEKQTRGIFGAIAGFIENGWEGMIDGWYGFRHQNSEGTGQAADLKSTQAAIDQINGKLNRVIEKTNEKFHQIEKEFSEVEGRIQDLEKYVEDTKIDLWSYNAELLVALENQHTIDLTDSEMNKLFEKTRRQLRENAEDMGNGCFKIYHRCDNACIGSIRNGTYDHDVYRDEALNNRFQIKGVELKSGYKDWILWISFAISCFLLCVVLLGFIMWACQKGNIRCNICI

SEQ ID NO: 8479 - protein, 566 aa, synthetic construct
  REGION 1..566: note = hemagglutinin__InfluenzaA__AFG72029
MKTIIALSYIFCLVFGQNLPGNDNSTATLCLGHHAVPNGTLVKTITNDQIEVTNATELVQSSSTGRICDSPHRILDGKNCTLIDALLGDPHCDGFQNEKWDLFVERSKAFSNCYPYDVPDYASLRSLIASSGTLEFINEGFNWTGVTQSGGSYACKRGSDNSFFSRLNWLYESESKYPVLNVTMPNNGNFDKLYIWGVHHPSTDKEQTNLYVRASGRVTVSTKRSQQTIIPNIGSRPWVRGLSSRISIYWTIVKPGDILLINSNGNLIAPRGYFKIRTGKSSIMRSDAPIGTCSSECITPNGSIPNDKPFQNVNKITYGACPKYVKQNTLKLATGMRNVPEKQTRGIFGAIAGFIENGWEGMVDGWYGFRHQNSEGTGQAADLKSTQAAIDQINGKLNRVIEKTNEKFHQIEKEFSEVEGRIQDLEKYVEDTKIDLWSYNAELLVALENQHTIDLTDSEMNKLFEKTRRQLRENAEDMGNGCFKIYHKCDNACIGSIRNGTYDHDVYRDEALNNRFQIKGVELKSGYKDWILWISFAISCFLLCVVLLGFIMWACQKGNIRCNICI

SEQ ID NO: 8480 - protein, 566 aa, synthetic construct
  REGION 1..566: note = hemagglutinin__InfluenzaA__AFG72040
MKTIIALSYIFCLVFAQNLPGNDNSTATLCLGHHAVPNGTLVKTITNDQIEVTNATELVQSSSTGRICDSPHRILDGKNCTLVDALLGDPHCDGFQNEKWDLFVERSKAFSNCYPYDVPDYASLRSLVASSGTLEFINESFNWTGVTQSGGSYACKRGSDNSFFSRLNWLYESESKYPVLNVTMPNNGNFDKLYIWGVHHPSTDKEQTNLYVRASGRVTVSTKRSQQTIIPNIGSRPWVRGLSSRISIYWTIVKPGDILLINSNGNLIAPRGYFKIRTGKSSIMRSDAPIGTCSSECITPNGSIPNDKPFQNVNKITYGACPKYVKQNTLKLATGMRNVPEKQTRGIFGAIAGFIENGWEGMVDGWYGFRHQNSEGTGQAADLKSTQAAIDQINGKLNRVIEKTNEKFHQIEKEFSEVEGRIQDLEKYVENTKIDLWSYNAELLVALENQHTIDLTDSEMNKLFEKTRRQLRENAEDMGNGCFKIYHKCDNACIGSIRNGTYDHDVYRDEALNNRFQIKGVELKSGYKDWILWISFAISCFLLCVVLLGFIMWACQKGNIRCNICI

SEQ ID NO: 8481 - protein, 566 aa, synthetic construct
  REGION 1..566: note = hemagglutinin__InfluenzaA__AFG72051
MKTIIALSYIFCLVFAQNLPGNDNSTATLCLGHHAVPNGTLVKTITNDQIEVTNATELVQSSSTGRICDSPHRILDGKNCTLVDALLGDPHCDGFQNEKWDLFVERSKAFSNCYPYDVPDYASLRSLVASSGTLEFINESFNWTGVTQSGGSYACKRGSDNSFFSRLNWLYESESKYPVLNVTMPNNGNFDKLYIWGVHHPSTDKEQTNLYVRASGRVTVSTKRNQQTVIPNIGSRPWVRGLSSRISIYWTIVKPGDILLINSNGNLIAPRGYFKIHNGKSSIMRSDAPIGTCSSECITPNGSIPNDKPFQNVNKITYGACPKYVKQNTLKLATGMRNVPEKQTRGIFGAIAGFIENGWEGMVDGWYGFRHRNSEGTGQAADLKSTQAAIDQINGKLNRVIEKTNEKFHQIEKEFSEVEGRIQDLEKYVEDTKIDLWSYNAELLVALENQHTIDLTDSEMNKLFEKTRRQLRENAEDMGNGCFKIYHKCDNACIGSIRNGTYDHDVYRDEALNNRFQIKGVELKSGYKDWILWISFAISCFLLCVVLLGFIMWACQKGNIRCNICI

SEQ ID NO: 8482 - protein, 566 aa, synthetic construct
  REGION 1..566: note = hemagglutinin__InfluenzaA__AFG72085
MKTIIALSYIFCLVFAQKLPGNDNSTATLCLGHHAVPNGTLVKTITNDQIEVTNATELVQSSSTGRICDSPHRILDGKNCTLIDALLGDPHCDGFQNEKWDLFVERSKAYSNCYPYDVPDYASLRSLVASSGTLEFINEDFNWIGVTQSGGSCACKRGSVNSFFSRLNWLHESEQKYPALNVTMPNNGKFDKLYIWGVHHPSTDREQTNLYVRASGRVTVSTKRSQQTVIPNIGSRPWVRGLSSRISIYWTIVKPGDILLINSIGNLIAPRGYFKIRTGKSSIMRSDAPIGTCSSECITPNGSIPNDKPFQNVNKITYGACPRYVKQNTLKLATGMRNVPEKQTRGIFGAIAGFIENGWEGMVDGWYGFRHQNSEGTGQAADLKSTQAAIDQINGKLNRLIEKTNEKFHQIEKEFSEVEGRIQDLEKYVEDTKIDLWSYNAELLVALENQHTIDLTDSEMNKLFEKTRKQLRENAEDMGNGCFKIYHKCDNACIGSIRNGTYDHDVYRDEALNNRFQIKGVELKSGYKDWILWISFAISCFLLCVVLLGFIMWACQKGNIRCNICI

SEQ ID NO: 8483 - protein, 566 aa, synthetic construct
  REGION 1..566: note = hemagglutinin__InfluenzaA__AFG72107
MKTIIALSYIFCLVFAQKLPGNDNSTATLCLGHHAVPNGTLVKTITNDQIEVTNATELVQSSSTGRICDSPHRILDGKNCTLIDALLGDPHCDGFQNEKWDLFVERSKAFSNCYPYDVPDYASLRSLIASSGTLEFINEEFNWTGVTQNGGSYACKRGSVNSFFSRLNWLHESEYKYPALNVTMPNNGRFDKLYIWGVHHPSTDREQTNLYVRASGRVTVSTKRSQQTVIPNIGPRPWVRGLSSRISIYWTIVKPGDILLINSTGNLIAPRGYFKIHTGKSSIMRSDAPIGTCSSECITPNGSIPNDKPFQNVNKITYGACPRYVKQNTLKLATGMRNVPEKQTRGIFGAIAGFIENGWEGMVDGWYGFRHQNSEGTGQAADLKSTQAAIDQINGKLNRLIEKTNEKFHQIEKEFSEVEGRIQDLEKYVEDTKIDLWSYNAELLVALENQHTIDLTDSEMNKLFEKTRKQLRENAEDMGNGCFKIYHKCDNACIGSIRNGTYDHDVYRDEAVNNRFQIKGVELKSGYKDWILWISFAISCFLLCVILLGFIMWACQKGNIRCNICI

SEQ ID NO: 8484 - protein, 566 aa, synthetic construct
  REGION 1..566: note = hemagglutinin__InfluenzaA__AFG72118
MKTIIALSYIFCLVFAQKLPGNDNSTATLCLGHHAVPNGTLVKTITNDQIEVTNATELVQNSSTGRICNSPHRILDGKNCTLIDALLGDPHCDGFQNKEWDLFVERSKAYSNCYPYDVPDYASLRSLVASSGTLEFINEDFNWTGVAQSGGSYACKRGSVNSFFSRLNWLHESEYKYPALNVTMPNNGKFDKLYIWGVHHPSTDREQTNLYVRASGRVTVSTKRSQQTVIPNIGSRPWVRGLSSRISIYWTIVKPGDILLINSTGNLIAPRGYFKIRTGKSSIMRSDAPIGTCSSECITPNGSIPNDKPFQNVNRITYGACPRYVKQNTLKLATGMRNVPERQTRGIFGAIAGFIENGWEGMVDGWYGFRHQNSEGTGQAADLKSTQAAIDQINGKLNRLIEKTNEKFHQIEKEFSEVEGRIQDLEKYVEDTKIDLWSYNAELLVALENQHTIDLTDSEMNKLFEKTRKQLRENAEDMGNGCFKIYHKCDNACIGSIRNGTYNHDVYRDEALNNRFQIKGVELKSGYKDWILWISFAISCFLLCVVLLGFIMWACQKGNIRCNICI

SEQ ID NO: 8485 - protein, 566 aa, synthetic construct
  REGION 1..566: note = hemagglutinin__InfluenzaA__AFG72129
MKTIIALSYIFCLVFAQKLPGNDNSTATLCLGHHAVPNGTLVKTITNDQIEVTNATELVQSSSTGRICDSPHRILDGKNCTLIDALLGDPHCDGFQNKEWDLFVERSKAYSNCYPYDVPDYASLRSLVASSGTLEFINEDFNWTGVAQSGGSYACKRGSVNSFFSRLNWLHESEYKYPALNVTMPNNGKFDKLYIWGVHHPSTDREQTNLYVRASGRVTVSTKRSQQTVIPNIGSRPWVRGLSSGISIYWTIVKPGDILLINSTGNLIAPRGYFKIRTGKSSIMRSDAPIGTCSSECITPNGSIPNDKPFQNVNRITYGACPRYVKQNTLKLATGMRNVPEKQTRGIFGAIAGFIENGWEGMVDGWYGFRHQNSEGTGQAADLKSTQAAINQINGKLNRLIEKTNEKFHQIEKEFSEVEGRIQDLEKYVEDTKIDLWSYNAELLVALENQHTIDLTDSEMNKLFEKTRKQLRENAEDMGNGCFKIYHKCDNACIGSIRNGTYDHDVYRDEALNNRFQIKGVELKSGYKDWILWISFAISCFLLCVVLLGFIMWACQKGNIRCNICI

SEQ ID NO: 8486 - protein, 566 aa, synthetic construct
  REGION 1..566: note = hemagglutinin__InfluenzaA__AFG72140
MKTIIALSYIFCLVFAQKLPGNDNSTATLCLGHHAVPNGTLVKTITNDQIEVTNATELVQSSSTGRICDSPHRILDGKNCTLIDALLGDPHCDGFQNKEWDLFVERSKAYSNCYPYDVPDYASLRSLVASSGTLEFINEDFNWTGVAQSGGSYACKRGSVNSFFSRLNWLHESEYKYPALNVTMPNNGKFDKLYIWGVHHPSTDREQTNLYVRALGRVTVSTKRSQQTVIPNIGSRPWVRGLSSRISIYWTIVKPGDILLINSTGNLIAPRGYFKIRTGKSSIMRSDAPIGTCSSECITPNGSIPNNKPFQNVNRITYGACPRYVKQNTLKLATGMRNVPEKQTRGIFGAIAGFIENGWEGMVDGWYGFRHQNSEGTGQAADLKSTQAAIDQINGKLNRLIEKTNEKFHQIEKEFSEVEGRIQDLEKYVEDTKIDLWSYNAELLVALENQHTIDLTDSEMNKLFEKTRKQLRENAEDMGNGCFKIYHKCDNACIGSIRNGTYDHDVYRDEALNNRFQIKGVELKSGYKDWILWISFAISCFLLCVVLLGFIMWACQKGNIRCNICI

SEQ ID NO: 8487 - protein, 566 aa, synthetic construct
  REGION 1..566: note = hemagglutinin__InfluenzaA__AFG72151
MKTIIALSYILCLVFAQKLPGNDNSTATLCLGHHAVPNGTLVKTITNDQIEVTNATELVQSSSTGRICDSPHRILDGKNCTLIDALLGDPHCDGFQNKEWDLFVERSKAYSNCYPYDVPDYASLRSLVASSGTLEFTNEDFNWTGVAQSGESYACKRGSVKSFFSRLNWLHESDYKYPALNVTMPNNGKFDKLYIWGVHHPSTDREQTSLYVRASGRVTVSTKRSQQTVIPNIGSRPWVRGLSSRISIYWTIVKPGDILLINSTGNLIAPRGYFKIRTGKSSIMRSDAPIGTCSSECITPNGSIPNDKPFQNVNRITYGACPRYVKQNTLKLATGMRNVPEKQTRGIFGAIAGFIENGWEGMVDGWYGFRHQNSEGTGQAADLKSTQAAIDQINGKLNRLIEKTNEKFHQIEKEFSEVEGRIQDLEKYVEDTKIDLWSYNAELLVALENQHTIDLTDSEMNKLFEKTRKQLRENAEDMGNGCFKIYHKCDNACIGSIRNGTYDHDVYRDEALNNRFQIKGVELKSGYKDWILWISFAISCFLLCVVLLGFIMWACQKGNIRCNICI

SEQ ID NO: 8488 - protein, 566 aa, synthetic construct
  REGION 1..566: note = hemagglutinin__InfluenzaA__AFG72184
MKTIIALSYILCLVFAQKLPGNDNSTATLCLGHHAVPNGTLVKTITNDQIEVTNATELVQSSSTGRICDSPHRILDGKNCTLIDALLGDPHCDDFQNKEWDLFVERSKAYSNCYPYDVPDYASLRSLVASSGTLEFINEDFNWTGVAQSGESYACKRGSVKSFFSRLNWLHESEYKYPALNVTMPNNDKFDKLYIWGVHHPSTEREQTSLYIRASGRVTVSTKRSQQTVIPNIGSRPWVRGLSSRISIYWTIVKPGDILLINSTGNLIAPRGYFKIRTGKSSIMRSDAPIGTCSSECITPNGSIPNDKPFQNVNRITYGACPRYVKQNTLKLATGMRNVPEKQTRGIFGAIAGFIENGWEGMVDGWYGFRHQNSEGTGQAADLKSTQAAIDQINGKLNRLIEKTNEKFHQIEKEFSEVEGRIQDLEKYVEDTKIDLWSYNAELLVALENQHTIDLTDSEMNKLFEKTRKQLRENAEDMGNGCFKIYHKCDNACIGSIRNGTYDHDVYRDEALNNRFQIKGVELKSGYKDWILWISFAISCFLLCVVLLGFIMWACQKGNIRCNICI

SEQ ID NO: 8489 - protein, 566 aa, synthetic construct; identical to SEQ ID NO: 8487
  REGION 1..566: note = hemagglutinin__InfluenzaA__AFG72195

SEQ ID NO: 8490 - protein, 566 aa, synthetic construct
  REGION 1..566: note = hemagglutinin__InfluenzaA__AFG72206
MKTIIALSYILCLVFAQKLPGNDNSTATLCLGHHAVPNGTLVKTITNDQIEVTNATELVQSSSTGKICDSPHRILDGKNCTLIDALLGDPHCDGFQNKEWDLFVERSKAYSNCYPYDVPDYASLRSLVASSGTLEFINEDFNWTGVAQSGESYACKRGSVKSFFSRLNWLHESDYKYPALNVTMPNNGKFDKLYIWGVHHPSTDREQTSLYIRASGRVTVSTKRSQQTVIPNIGSRPWVRGLSSRISIYWTIVKPGDILLINSTGNLIAPRGYFKIRTGKSSIMRSDAPIGTCSSECITPNGSIPNDKPFQNVNRITYGACPRYVKQNTLKLATGMRNVPEKQTRGIFGAIAGFIENGWEGMVDGWYGFRHQNSEGTGQAADLKSTQAAIDQINGKLNRLIEKTNEKFHQIEKEFSEVEGRIQDLEKYVEDTKIDLWSYNAELLVALENQHTIDLTDSEMNKLFEKTRKQLRENAEDMGNGCFKIYHKCDNACIGSIRNGTYDHDVYRDEALNNRFQIKGVELKSGYKDWILWISFAISCFLLCVVLLGFIMWACQKGNIRCNICI

SEQ ID NO: 8491 - protein, 566 aa, synthetic construct
  REGION 1..566: note = hemagglutinin__InfluenzaA__AFG72217
MKTIIALSYILCLVFAQKLPGNDNSTATLCLGHHAVPNGTLVKTITNDQIEVTNATELVQSSSTGRICDSPHRILDGKNCTLIDALLGDPHCDGFQNKEWDLFVERSKAYSNCYPYDVPDYASLRSLVASSGTLEFINEDFNWTGVAQDGGSYACKRGSVNSFFSRLNWLHKLEYKYPALNVTMPNNGKFDKLYIWGVHHPSTDSDQTSLYVRASGRVTVSTKRSQQTVTPNIGSRPWVRGLSSRISIYWTIVKPGDILLISSTGNLIAPRGYFKIRNGKSSIMRSDAPIGNCSSECITPNGSIPNDKPFQNVNRITYGACPRYVKQNTLKLATGMRNVPEKQTRGIFGAIAGFIENGWEGMVDGWYGFRHQNSEGTGQAADIKSTQAAIDQINGKLNRLIEKTNEKFHQIEKEFSEVEGRIQDLEKYVEDTKIDLWSYNAELLVALENQHTIDLTDSEMNKLFEKTRKQLRENAEDMGNGCFKIYHKCDNACIGSIRNGTYDHDVYRDEALNNRFQIKGVELKSGYKDLILWISFAISCFLLCVVLLGFIMWACQKGNIRCNICI

SEQ ID NO: 8492 - protein, 566 aa, synthetic construct
  REGION 1..566: note = hemagglutinin__InfluenzaA__AFG72228
MKTIIALSYILCLVFAQKLPGNDNSTATLCLGHHAVPNGTLVKTITNDQIEVTNATELVQSSSTGRICDSPHRILDGKNCTLIDALLGDPHCDGFQNKEWDLFVERSKAYSNCYPYDVPDYASLRSLVASSGTLEFTNEDFNWTGVAQSGESYACKRGSVKSFFSRLNWLHESDYKYPELNVTMPNNGKFDKLYIWGVHHPSTDREQTSLYVRASGRVTVSTKRSQQTVIPNIGSRPWVRGLSSRISIYWTIVKPGDILLINSTGNLIAPRGYFKIRTGKSSIMRSDAPIGTCSSECITPNGSIPNDKPFQNVNRITYGACPRYVKQNTLKLATGMRNVPEKQTRGIFGAIAGFIENGWEGMVDGWYGFRHQNSEGTGQAADLKSTQAAIDQINGKLNRLIEKTNEKFHQIEKEFSEVEGRIQDLEKYVEDTKIDLWSYNAELLVALENQHTIDLTDSEMNKLFEKTRKQLRENAEDMGNGCFKIYHKCDNACIGSIRNGTYDHDVYRDEALNNRFQIKGVELKSGYKDWILWISFAISCFLLCVVLLGFIMWACQKGNIRCNICI

SEQ ID NO: 8493 - protein, 566 aa, synthetic construct
  REGION 1..566: note = hemagglutinin__InfluenzaA__AFG72239
MKTIIALSYILCLVLAQKLPGSDNSTATLCLGHHAVPNGTLVKTITNDQIEVTNATELVQSSTTGRICDSPHRILDGKNCTLIDALLGDPHCDGFQNKEWDLFVERSKAYSNCYPYDVPDYASLRSLVASSGTLEFTNEDFNWTGVAQSGESYACKRGSVKSFFSRLNWLHESDYKYPALNVTMPNNGKFDKLYIWGVHHPSTDREQTSLYVRASGRVTVSTKRSQQTVIPNIGSRPWVRGLSSRISIYWTIVKPGDILLINSTGNLIAPRGYFKIRTGKSSIMRSDAPIGTCSSECITPNGSIPNDKPFQNVNRITYGACPRYVKQNTLKLATGMRNVPEKQTRGIFGAIAGFIENGWEGMVDGWYGFRHQNSEGTGQAADLKSTQAAIDQINGKLNRLIEKTNEKFHQIEKEFSEVEGRIQDLEKYVEDTKIDLWSYNAELLVALENQHTIDLTDSEMNKLFEKTRKQLRENAEDMGNGCFKIYHKCDNACIGSIRNGTYDHDVYRDEALNNRFQIKGVELKSGYKDWILWISFAISCFLLCVVLLGFIMWACQKGNIRCNICI

SEQ ID NO: 8494 - protein, 566 aa, synthetic construct; identical to SEQ ID NO: 8487
  REGION 1..566: note = hemagglutinin__InfluenzaA__AFG72272

SEQ ID NO: 8495 - protein, 566 aa, synthetic construct
  REGION 1..566: note = hemagglutinin__InfluenzaA__AFG72316
MKTIIALSHILCLVFAQKLPGNDNSTATLCLGHHAVPNGTLVKTITNDQIEVTNATELVQSSSTGRICDSPHRILDGKNCTLIDALLGDPHCDGFQNKEWDLFVERSKAYSNCYPYDVPDYASLRSLVASSGTLEFINEDFNWTGVAQDGGSYACKRGSVNSFFSRLNWLHKLEYKYPALNVTMPNNGKFDKLYIWGVHHPSTDSDQTSLYVRASGRVTVSTKRSQQTVTPNIGSRPWVRGLSSRISIYWTIVKPGDILLINSTGNLIAPRGYFKIRNGKSSIMRSDVPIGNCSSECITPNGSIPNDKPFQNVNRITYGACPRYVKQNTLKLATGMRNVPEKQTRGIFGAIAGFIENGWEGMVDGWYGFRHQNSEGTGQAADLKSTQAAIDQINGKLNRLIEKTNEKFHQIEKEFSEVEGRIQDLEKYVEDTKIDLWSYNAELLVALENQHTIDLTDSEMNKLFEKTRKQLRENAEDMGNGCFKIYHKCDNACIGSIRNGTYDHDVYRDEALNNRFQIKGVELKSGYKDWILWISFAISCFLLCVVLLGFIMWACQKGNIRCNICI

SEQ ID NO: 8496 - protein, 566 aa, synthetic construct
  REGION 1..566: note = hemagglutinin__InfluenzaA__AFG72339
MKTIIALSYILCLVFAQKLPGNDNSTATLCLGHHAVPNGTLVKTITNDQIEVTNATELVQSSSTGRICDSPHRILDGKNCTLIDALLGDPHCDGFQNKEWDLFVERSKAYSNCYPYDVPDYVSLRSLVASSGTLEFINEDFNWTGVAQDGGSYTCKRGSVNSFFSRLNWLHKSEYKYPALNVTMPNNGKFDKLYIWGVHHPSTDSDQTSLYVRASGRVTVSTKRSQQTVTPNIGSRPWVRGLSSRISIYWTIVKPGDILLINSTGNLIAPRGYFKIRNGKSSIMRSDAPIGTCSSECITPNGSIPNDKPFQNVNRITYGACPRYVKQNTLKLATGMRNVPEKQTRGIFGAIAGFIENGWEGMVDGWYGFRHQNSEGTGQAADLKSTQAAIDQINGKLNRLIEKTNEKFHQIEKEFSEVEGRIQDLEKYVEDTKIDLWSYNAELLVALENQHTIDLTDSEMNKLFEKTRKQLRENAEDMGNGCFKIYHKCDNACIGSIRNGTYDHDVYRDEALNNRFQIKGVELKSGYKDWILWISFAISCFLLCVVLLGFIMWACQKGNIRCNICI

SEQ ID NO: 8497 - protein, 566 aa, synthetic construct
  REGION 1..566: note = hemagglutinin__InfluenzaA__AFG72350
MKTIIALSYILCLVFAQKLPGNDNSTATLCLGHHAVPNGTLVKTITNDQIEVTNATELVQSSSTGRICDSPHRILDGKNCTLIDALLGDPHCDGFQNKEWDLFVERSKAYSNCYPYDVPDYVSLRSLVASSGTLEFINEDFNWTGVAQDGRSYACKRGSVNSFFSRLNWLHKSEYKYPALNVTMPNNGKFDKLYIWGVHHPSTDSDQTSLYVRASGRVTVSTKRSQQTVTPNIGSRPWVRGLSSRISIYWTIVKPGDILLINSTGNLIAPRGYFKIRNGKSSIMRSDAPIGICSSECITPNGSIPNDKPFQNVNRITYGACPRYVKQNTLKLATGMRNVPEKQTRGIFGAIAGFIENGWEGMVDGWYGFRHQNSEGTGQAADLKSTQAAIDQINGKLNRLIEKTNEKFHQIEKEFSEVEGRIQDLEKYVEDTKIDLWSYNAELLVALENQHTIDLTDSEMNKLFEKTRKQLRENAEDMGNGCFKIYHKCDNACIGSIRNGTYDHDVYRDEALNNRFQIKGVELKSGYKDWILWISFAISCFLLCVVLLGFIMWACQKGNIRCNICI

SEQ ID NO: 8498 - protein, 566 aa, synthetic construct
  REGION 1..566: note = hemagglutinin__InfluenzaA__AFG72372
MKTIIALSYILCLVFAQKLPGNDNSTATLCLGHHAVPNGTLVKTITNDQIEVTNATELVQSSSTGRICDSPHRILDGKNCTLIDALLGDPHCDGFQNKEWDLFVERSKAYSNCYPYDVPDYASLRSLVASSGTLEFINEDFNWTGVAQDGKSYTCKRGSVNSFFSRLNWLHKLEYKYPALNVTMPNNGKFDKLYIWGVHHPSTDSDQTSLYVRASGRVTVSTKRSQQTVIPNIGSRPWVRGLSSRISIYWTIVKPGDILLINSTGNLIAPRGYFKIRNGKSSIMRSDAPIGNCSSECITPNGSIPNDKPFQNVNRITYGACPRYVKQNTLKLATGMRNVPEKQTRGIFGAIAGFIENGWEGMVDGWYGFRHQNSEGTGQAADLKSTQAAIDQINGKLNRLIEKTNEKFHQIEKEFSEVEGRIQDLEKYVEDTKIDLWSYNAELLVALENQHTIDLTDSEMNKLFERTRKQLRENAEDMGNGCFKIYHKCDNACIGSIRNGTYDHDVYRDEALNNRFQIKGVELKSGYKDWILWISFAISCFLLCVVLLGFIMWACQKGNIRCNICI

SEQ ID NO: 8499 - protein, 566 aa, synthetic construct; identical to SEQ ID NO: 1024
  REGION 1..566: note = hemagglutinin__InfluenzaA__AFG72383

SEQ ID NO: 8500 - protein, 566 aa, synthetic construct
  REGION 1..566: note = hemagglutinin__InfluenzaA__AFG72394
MKTIIALSYILCLVFAQKLPGNDNSTATLCLGHHAVPNGTLVKTITNDQIEVTNATELVQSSSTGRICDSPHRILDGKNCTLIDALLGDPHCDGFQNKEWDLFVERSKAYSNCYPYDVPDYASLRSLVASSGTLEFINEDFNWTGVAQDGKSYACKRGSVNSFFSRLNWLHKLEYKYPALNVTMPNNGKFDKLYIWGVHHPSTDSDQTSLYVRASGRVTVATKRSQQTVIPNIGFRPWVRGQSSGISIYWTIVKPGDILLINSTGNLIAPRGYFKIRNGKSSIMRSDAPIGNCSSECITPNGSIPNDKPFQNVNRITYGACPRYVKQNTLKLATGMRNVPEKQTRGIFGAIAGFIENGWEGMVDGWYGFRHQNSEGTGQAADLKSTQAAIDQINGKLNRLIEKTNEKFHQIEKEFSEVEGRIQDLEKYVEDTKIDLWSYNAGLLVALENQHTIDLTDSEMNKLFERTRKQLRENAEDMGNGCFKIYHKCDNACIGSIRNGTYDHDVYRDEALNNRFQIKGVELKSGYKDWILWISFAISCFLLCVVLLGFIMWACQKGNIRCNICI

SEQ ID NO: 8501 - protein, 566 aa, synthetic construct
  REGION 1..566: note = hemagglutinin__InfluenzaA__AFG72405
MKTIIALSYILCLVFAQKLPGNDNSTATLCLGHHAVPNGTLVKTITNDQIEVTNATELVQSSSTGRICDSPHRILDGKNCTLIDALLGDPNCDGFQNKEWDLFVERSKAYSNCYPYDVPDYASLRSLVASSGTLEFTNEDFNWTGVAQDGGSYACKRGSVKSFFSRLNWLHKLEYKYPALNVTMPNNGKFDKLYIWGVHHPSTDSDQTSLYVRASGRVTVSTKRSQQTVTPNIGSRPWVRGLSSRISIYWTIVKPGDILLINSTGNLIAPRGYFKIRNGKSSIMRSDAPIGTCSSECITPNGSIPNDKPFQNVNRITYGACPRYVKQNTLKLATGMRNVPEKQTRGIFGAIAGFIENGWEGMVDGWYGFRHQNSEGTGQAADLKSTQAAINQINGKLNRLIEKTNEKFHQIEKEFSEVEGRIQDLEKYVEDTKIDLWSYNAELLVALENQHTIDLTDSEMNKLFEKTRKQLRENAEDMGNGCFKIYHKCDNACIGSIRNGTYDHDVYRDEALNNRFQIKGVELKSGYKDWILWISFAISCFLLCVVLLGFIMWACQKGNIRCNICI

SEQ ID NO: 8502 - protein, 566 aa, synthetic construct
  REGION 1..566: note = hemagglutinin__InfluenzaA__AFG72449
MKTIIALSYILCLVFAQKLPGNDNSTATLCLGHHAVPNGTLVKTITNDQIEVTNATELVQSSSTGRICYSPHRILDGNNCTLIDALLGDPHCDGFQNKEWDLFVERSKAYSNCYPYDVPDYASLRSLVASSGTLEFINEDFNWTGVAQDGKSYACKRGSVKGFFSRLNWLHKLEYKYPALNVTMPNNGKFDKLYIWGVHHPSTDSDQTSLYVRASGGVTVSTKRSQQTVIPSIGSRPWVRGLSSRISIYWTIVKPGDILLINSTGNLIAPRGYFKIRNGKSSIMRSDAPIGNCSSECITPNGSIPNDKPFQNVNRITYGACPRYVKQNTLKLATGMRNVPEKQTRGIFGAIAGFIENGWEGMVDGWYGFRHQNSEGTGQAADLKSTQAAIDQINGKLNRLIEKTNEKFHQIEKEFSEVEGRIQDLEKYVEDTKIDLWSYNAELLVALENQHTIDLTDSEMNKLFERTRKQLRENAEDMGNGCFKIYHKCDNACIGSIRNGTYDHDVYRDEALNNRFQIKGVELKSGYKDWILWISFAISCFLLCVVLLGFIMWACQKGNIRCNICI

SEQ ID NO: 8503 - protein, 566 aa, synthetic construct; identical to SEQ ID NO: 1053
  REGION 1..566: note = hemagglutinin__InfluenzaA__AFG72460

SEQ ID NO: 8504 - protein, 566 aa, synthetic construct
  REGION 1..566: note = hemagglutinin__InfluenzaA__AFG72504
MKTIIALSYILCLVFAQKLPGNDNSTATLCLGHHAVPNGTLVKTITNDQIEVTNATELVQSSSTGRICDSPHRILDGKNCTLIDALLGDPHCDGFQNKEWDLFVERSKAYSNCYPYDVPDYASLRSLVASSGTLEFINEDFNWTGVAQDGKSYACKRGSVKSFFSRLNWLHKLEYKYPALNVTMPNNGKFDKLYIWGVHHPSTDSDQTSLYVRASGRVTVSTKRSQQTVIPNIGFRPWVRGLSSRISIYWTIVKPGDILLINSTGNLIAPRGYFKIRNGKSSIIRSDAPIGNCSSECITPNGSIPNDKPFQNVNRITYGACPRYVKQNTLKLATGMRNVPEKQTRGIFGAIAGFIENGWEGMVDGWYGFRHQNSEGTGQAADLKSTQAAIDQINGKLNRLIEKTNEKFHQIEKEFSEVEGRIQDLEKYVEDTKIDLWSYNAGLLVALENQHTIDLTDSEMNKLFERTRKQLRENAEDMGNGCFKIYHKCDNACIGSIRNGTYDHDVYRDEALNNRFQIKGVELKSGYKDWILWISFAISCFLLCVVLLGFIMWACQKGNIRCNICI

SEQ ID NO: 8505 - protein, 566 aa, synthetic construct
  REGION 1..566: note = hemagglutinin__InfluenzaA__AFG72515
MKTIIALSYILCLVFAQKLPGNDNSTATLCLGHHAVPNGTLVKTITNDQIEVTNATELVQSSPTGRICDSPHRILDGKNCTLIDALLGDPHCDGFQNKEWDLFVERSKAYSNCYPYDVPDYASLRSLVASSGTLEFINENFNWTGVAQDGKSYACKRGSVNSFFSRLNWLHKLEYKYPALNVTMPNNGKFDKLYIWGVHHPSTDSDQTSLYVRASGRVTVSTKRSQQTVIPDIGYRPWVRGLSSRISIYWTIVKPGDILLINSTGNLIAPRGYFKIRNGKSSIMRSDAPIGNCSSECITPNGSIPNDKPFQNVNRITYGACPRYVKQNTLKLATGMRNVPEKQTRGIFGAIAGFIENGWEGMVDGWYGFRHQNSEGTGQAADLKSTQAAIDQINGKLNRLVEKTNEKFHQIEKEFSEVEGRIQDLEKYVEDTKIDLWSYNAELLVALENQHTIDLTDSEMNKLFERTRKQLRENAEDMGNGCFKIYHKCDNACIGSIRNGTYDHDVYRDEALNNRFQIKGVELKSGYKDWILWISFAISCFLLCVVLLGFIMWACQKGNIRCNICI

SEQ ID NO: 8506 - protein, 566 aa, synthetic construct
  REGION 1..566: note = hemagglutinin__InfluenzaA__AFG72526
MKTIIALSYILCLVFAQKLPGNDNSTATLCLGHHAVPNGTLVKTITNDQIEVTNATELVQSSSTGRICDSPHRILDGKNCTLIDALLGDPHCDGFQNKEWDLFVERSKAYSSCYPYDVPDYASLRSLVASSGTLEFINEDFNWTGVAQDGKSYACKRGSVNSFFSRLNWLHKLEYKYPALNVTMPNNGKFDKLYIWGVHHPSTDSDQTSLYVRASGRVIVSTKRSQQTVIPNIGSRPWVRGLSSRISIYWTIVKPGDILLINSTGNLIAPRGYFKIRTGKSSIMRSDAPIGNCSSECITPNGSIPNDKPFQNVNRITYGACPRYVKQNTLKLATGMRNVPEKQTRGIFGAIAGFIENGWEGMVDGWYGFRHQNSEGTGQAADLKSTQTAINQINGKLNRLIEKTNEKFHQIEKEFSEVEGRIQDLEKYVEDTKIDLWSYNAELLVALENQHTIDLTDSEMNKLFERTRKQLRENAEDMGNGCFKIYHKCDNACIGSIRNGTYDHDVYRDEALNNRFQIKGVELKSGYKDWILWISFAISCFLLCVVLLGFIMWACQKGNIRCNICI

SEQ ID NO: 8507 - protein, 566 aa, synthetic construct
  REGION 1..566: note = hemagglutinin__InfluenzaA__AFG72581
MKTIIALSYILCLVFAQKLPGNDNSTATLCLGHHAVPNGTLVKTITNDQIEVTNATELVQSSSTGRICDSPHRILDGKNCTLIDALLGDPHCDGFQNKEWDLFVERSKAYSNCYPYDVPDYASLRSLVASSGTLEFINEDFNWTGVAQDGKSYACKRGSVNSFFSRLNWLHKLEYKYPALNVTMPNNGKFDKLYIWGVHHPSTDSDQTSLYVRASGGVTVSTKRSQQTVIPNIGYRPWVRGLSSRISIYWTIVKPGDILLINSTGNLIAPRGYFKIRNGKSSIMRSDAPIGNCSSECITPNGSISNDKPFQNVNRITYGACPRYVKQNTLKLATGMRNVPEKQTRGIFGAIAGFIENGWEGMVDGWYGFRHQNSEGTGQAADLKSTQAAIDQINGKLNRLIEKTNEKFHQIEKEFSEVEGRIQDLEKYVEDTKIDLWSYNAELLVALENQHTIDLTDSEMNKLFERTRKQLRENAEDMGNGCFKIYHKCDNACIGSIRNGTYDHDVYRDEALNNRFQIKGVELKSGYKDWILWISFAISCFLLCVVLLGFIMWACQKGNIRCNICI

SEQ ID NO: 8508 - protein, 566 aa, synthetic construct
  REGION 1..566: note = hemagglutinin__InfluenzaA__AFG72603
MKTIIALSYILCLVFAQKLPGNDNSTATLCLGHHAVPNGTLVKTITNDQIEVTNATELVQSSSTGRICDSPHRILDGKNCTLIDALLGDPHCDGFQNKEWDLFVERSKAYSNCYPYDVPDYASLRSLVASSGTLEFTKEGFNWTGVAQDGKSYACKRGSVNSFFSRLNWLHKLEYKYPALNVTMPNNDKFDKLYIWGVHHPSTDSDQTSLYVQASGRVTVSTKRSQQTVIPNIGSRPWVRGISSRISIYWTIVKPGDILLINSTGNLIAPRGYFKIRNGKSSIMRSDAPIGNCKSECITPNGSIPNDKPFQNVNRITYGACPRYVKQNTLKLATGMRNVPEKQTRGIFGAIAGFIENGWEGMVDGWYGFRHQNSEGTGQAADLKSTQAATDQINGKLNRLIEKTNEKFHQIEKEFSEVEGRIQDLEKYVEDTKIDLWSYNAELLVALENQHTIDLTDSEMNKLFERTRKQLRENAEDMGNGCFKIYHKCDNACIGSIRNGTYDHDVYRDEALNNRFQIKGVELKSGYKDWILWISFAISCFLLCVVLLGFIMWACQKGNIRCNICI

SEQ ID NO: 8509 - protein, 566 aa, synthetic construct
  REGION 1..566: note = hemagglutinin__InfluenzaA__AFG72614
MKTIIALSYILCLVFAQKLPGNDNSTATLCLGHHAVPNGTLVKTITNDQIEVTNATELVQSSSTGRICDSPHRILDGKNCTLIDALLGDPHCDGFQNKEWDLFVERSKAYSNCYPYDVPDYASLRSLVASSGTLEFTNEGFNWTGVAQDGTSYSCKRGSVKSFFSRLNWLHKLEYKYPALNVAMPNNDKFDKLYIWGVHHPSTDSDQTSLYVQASGRVTVSTKRSQQTVIPNIGSRPWVRGVSSRISIYWTIVKPGDILLINSTGNLIAPRGYFKIRSGKSSIMRSDAPIGNCNSECITPNGSIPNDKPFQNVNRITYGACPRYVKQNTLKLATGMRNVPEKQTRGIFGAIAGFIENGWEGMVDGWYGFRHQNSEGTGQAADLKSTQAAINQINGKLNRLIEKTNEKFHQIEKEFSEVEGRIQDLEKYVEDTKIDLWSYNAELLVALENQHTIDLTDSEMNKLFERTRKQLRENAEDMGNGCFKIYHKCDNACIGSIRNGTYDHDVYRDEALNNRFQIKGVELKSGYKDWILWISFAISCFLLCVVLLGFIMWACQKGNIRCNICI

SEQ ID NO: 8510 - protein, 566 aa, synthetic construct
  REGION 1..566: note = hemagglutinin__InfluenzaA__AFG72625
MKTIIALSYILCLVFAQKLPGNDNSTATLCLGHHAVPNGTLVKTITNDQIEVTNATELVQSSSTGRICDSPHRILDGKNCTLIDALLGDPHCDGFQNKEWDLFVERSKAYSNCYPYDVPDYASLRSLVASSGTLEFTNEGFNWTGVAQDGTSYACKRGSVKSFFSRLNWLHKLEYKYPALNVTMPNNDKFDKLYIWGVHHPSTDSDQTSLYVQASGRVTVSTKRSQQTVIPNIGSRPWVRGISSRISIYWTIVKPGDILLIKSTGNLIAPRGYFKIRSGKSSIMRSDAPIGNCNSECITPNGSIPNDKPFQNVNRITYGACPRYVKQNTLKLATGMRNVPEKQTRGIFGAIAGFIENGWEGMVDGWYGFRHQNSEGTGQAADLKSTQAAINQINGKLNRLIEKTNEKFHQIEKEFSEVEGRIQDLEKYVEDTKIDLWSYNAELLVALENQHTIDLTDSEMNKLFERTRKQLRENAEDMGNGCFKIYHKCDNACIGSIRNGTYDHDVYRDEALNNRFQIKGVELKSGYKDWILWISFAISCFLLCVVLLGFIMWACQKGNIRCNICI

SEQ ID NO: 8511 - protein, 566 aa, synthetic construct
  REGION 1..566: note = hemagglutinin__InfluenzaA__AFG72636
MKTIIALSYILCLVFAQKLPGNDNSTATLCLGHHAVPNGTLVKTITNDQIEVTNATELVQSSSTGRICDSPHRILDGKNCTLIDALLGDPHCDGFQNKEWDLFVERSKAYSNCYPYDVPDYASLRSLVASSGTLEFTNEGFNWTGVAQDGKSYACKRGSVKSFFSRLNWLHKLEFKYPALNVTMPNNDKFDKLYIWGVHHPSTDSDQTSLYVQASGRVTVSTKRSQQTVIPNIGSRPWVRGISSRISIYWTIVKPGDILLINSTGNLIAPRGYFKIRNGKSSIMRSDAPIDNCNSECITPNGSIPNDKPFQNVNRITYGACPRYVKQNTLKLATGMRNVPEKQTRGIFGAIAGFIENGWEGMVDGWYGFRHQNSEGTGQAADLKSTQAAIDQINGKLNRLIEKTNEKFHQIEKEFSEVEGRIQDLEKYVEDTKIDLWSYNAELLVALENQHTIDLTDSEMNKLFERTRKQLRENAEDMGNGCFKIYHKCDNACIGSIRNGTYDHDVYRDEALNNRFQIKGVELKSGYKDWILWISFAISCFLLCVVLLGFIMWACQKGNIRCNICI

SEQ ID NO: 8512 - protein, 566 aa, synthetic construct
  REGION 1..566: note = hemagglutinin__InfluenzaA__AFG72658
MKTIIALSYILCLAFAQKLPGNDNSTATLCLGHHAVPNGTLVKTITNDQIEVTNATELVQSSSTGRICDSPHRILDGKNCTLIDALLGDPHCDGFQNKEWDLFVERSKAYSNCYPYDVPDYASLRSLVASSGTLEFTNEGFNWTGVAQDGKSYACKRGSVNSFFSRLNWLHKLEYKYPALNVTMPNNDKFDKLYIWGVHHPSTDSDQTSLYVQASGRVTVSTKRSQQTVIPNIGSRPWVRGISSRISIYWTIVKPGDILLINSTGNLIAPRGYFKIRNGKSSIMRSDAPIDNCNSECITPNGSIPNDKPFQNVNRITYGACPRYVKQNTLKLATGMRNVPEKQTRGIFGAIAGFIENGWEGMVDGWYGFRHQNSEGTGQAADLKSTQAAIDQINGKLNRLIEKTNEKFHQIEKEFSEVEGRIQDLEKYVEDTKIDLWSYNAELLVALENQHTIDLTDSEMNKLFERTRKQLRENAEDMGNGCFKIYHKCDNACIGSIRNGTYDHDVYRDEALNNRFQIKGVELKSGYKDWILWISFAISCFLLCVVLLGFIMWACQKGNIRCNICI

SEQ ID NO: 8513 - protein, 566 aa, synthetic construct
  REGION 1..566: note = hemagglutinin__InfluenzaA__AFG72680
MKTIIALSYILCLVFAQKLPGNDNSTATLCLGHHAVPNGTLVKTITNDQIEVTNATELVQSSSTGIICDSPHRILDGKNCTLIDALLGDPHCDGFQNKEWDLFVERSKAYSNCYPYDVPDYASLRSLVASSGTLEFTNEGFNWTGVAQDGTSYACKRGSVKSFFSRLNWLHKLEYKYPALNVTMPNNDKFDKLYIWGVHHPSTDSDQTSLYVQASGRVTVSTRRSQQTVIPNIGSRPWVRGVSSRISIYWTIVKPGDILLINSTGNLIAPRGYFKIRSGKSSIMRSDAPIGNCNSECITPNGSIPNDKPFQNVNRITYGACPRYVKQNTLKLATGMRNVPEKQTRGIFGAIAGFIENGWEGMVDGWYGFRHQNSEGTGQAADLKSTQAAINQINRKLNRLIEKTNEKFHQIEKEFSEVEGRIQDLEKYVEDTKIDLWSYNAELLVALENQHTIDLTDSEMNKLFERTRKQLRENAEDMGNGCFKIYHKCDNACIGSIRNGTYDHDVYRDEALNNRFQIKGVELKSGYKDWILWISFAISCFLLCVVLLGFIMWACQKGNIRCNICI

SEQ ID NO: 8514 - protein, 566 aa, synthetic construct
  REGION 1..566: note = hemagglutinin__InfluenzaA__AFG72691
MKTIIALSYILCLVFAQKLPGNDNSTATLCLGHHAVPNGTLVKTITNDQIEVTNATELVQSSSTGRICDSPHRILDGKNCTLIDALLGDPHCDGFKNKEWDLFVERSTAYSNCYPYDVPDYASLRSLVASSGTLEFTNEGFNWTGVAQDGTSYACKRGSVKSFFSRLNWLHKLEYKYPALNVTMPNNDKFDKLYIWGVHHPSTDSDQTSLYVQASGRVTVSTKRSQQTVIPNIGSRPWVRGVSSRISIYWTIVKPGDILLINSTGNLIAPRGYFKIRSGKSSIMRSDAPIDNCNSECITPNGSIPNGKPFQNVNRITYGACPRYVKQNTLKLATGMRNVPEKQTRGIFGAIAGFIENGWEGMVDGWYGFRHQNSEGTGQAADLKSTQAAINQINGKLNRLIEKTNEKFHQIEKEFSEVEGRIQDLEKYVEDTKIDLWSYNAELLVALENQHTIDLTDSEMNKLFERTRKQLRENAEDMGNGCFKIYHKCDNACIGSIRNGTYDHDVYRDEALNNRFQIKGVELKSGYKDWILWISFAISCFLLCVVLLGFIMWACQKGNIRCNICI

SEQ ID NO: 8515 - protein, 566 aa, synthetic construct
  REGION 1..566: note = hemagglutinin__InfluenzaA__AFG72713
MKIIIALSYILCLVFAQKLPGNDNSTATLCLGHHAVPNGTLVKTITNDQIEVTNATELVQSSSTGRICDSPHQILDGKNCTLIDALLGDPHCDGFKNKEWDLFVERSTAYSNCYPYDVPDYASLRSLVASSGTLEFTNEGFNWTGVAQDGTSYACKRGSVKSFFSRLNWLHKLEYKYPALNVTMPNNDKFDKLYIWGVHHPSTDSDQTSLYVQASGRVTVSTKRSQQTVIPNIGSRPWVRGISSRISIYWTIVKPGDILLISSTGNLIAPRGYFKIRSGKSSIIRSDAPIDNCNSECITPNGSIPNDKPFQNVNRITYGACPRYVKQNTLKLATGMRNVPEKQTRGIFGAIAGFIENGWEGMVDGWYGFRHQNSEGTGQAADLKSTQAAINQINGKLNRLIEKTNEKFHQIEKEFSEVEGRIQDLEKYVEDTKIDLWSYNAELLVALENQHTIDLTDSEMNKLFERTRKQLRENAEDMGNGCFKIYHKCDNACIGSIRNGTYDHDVYRDEALNNRFQIKGVELKSGYKDWILWISFAISCFLLCVVLLGFIMWACQKGNIRCNICI

SEQ ID NO: 8516 - protein, 566 aa, synthetic construct
  REGION 1..566: note = hemagglutinin__InfluenzaA__AFG72724
MKTIIALSYILCLVFAQKLPGNDNSTATLCLGHHAVPNGTLVKTITNDQIEVTNATELVQSSSTGRICDSPHRILDGKNCTLIDALLGDPHCDGFQNKEWDLFVERSKAYSNCYPYDVPDYASLRSLVASSGTLEFTNEGFNWTGVAQDGTSYACKRGSVKSFFSRLNWLHKLEYKYPALNVTMPNNDKFDKLYIWGVHHPSTDSDQTSLYVQASGRVTVSTKRSQQTVIPNIGSRPWVRGVSSRISIYWTIVKPGDILLINSTGNLIAPRGYFKIRSGKSSIMRSDAPIDNCNSECITPNGSIPNDKPFQNVNRITYGACPRYVKQNTLKLATGMRNVPEKQTRGIFGAIAGFIENGWEGMVDGWYGFRHQNSEGTGQAADLKSTQAAINQINGKLNRLIEKTNEKFHQIEKEFSEVEGRIQDLEKYVEDTKIDLWSYNAELLVALENQHTIDLTDSEMNKLFERTRKQLRENAEDMGNGCFKIYHKCDNVCIGSIRNGTYDHDVYRDEALNNRFQIKGVELKSGYKDWILWISFAISCFLLCVVLLGFIMWACQKGNIRCNICI

SEQ ID NO: 8517 - protein, 566 aa, synthetic construct
  REGION 1..566: note = hemagglutinin__InfluenzaA__AFG72735
MKTIIALSYILCLVFAQKLPGNDNSTATLCLGHHAVPNGTLVKTITNDQIEVTNATELVQSSSTGRICDSPHRILDGKNCTLIDALLGDPHCDGFKNKEWDLFVERSTAYSNCYPYDVPDYASLRSLVASSGTLEFTNEGFNWTGVAQDGTSYACKRGSVKSFFSRLNWLHKLEYKYPALTVTMPNNDKFDKLYIWGVHHPSTDSDQTSIYVQASGRVTVSTKRSQQTVIPNIGSRPWVRGVSSRISIYWTIVKPGDILLINSTGNLIAPRGYFKIRSGKSSIMRSDAPIDNCNSECITPNGSIPNDKPFQNVNRITYGACPRYVKQNTLKLATGMRNVPEKQTRGIFGAIAGFIENGWEGMVDGWYGFRHQNSEGTGQAADLKSTQAAINQINGKLNRLIEKTNEKFHQIEKEFSEVEGRIQDLEKYVEDTKIDIWSYNAELLVALENQHTIDLTDSEMNKLFERTRKQLRENAEDMGNGCFKIYHKCDNACIGSIRNGTYDHDVYRDEALNNRFQIKGVELKSGYKDWILWISFAISCFLLCVVLLGFIMWACQKGNIRCNICI

SEQ ID NO: 8518 - protein, 566 aa, synthetic construct
  REGION 1..566: note = hemagglutinin__InfluenzaA__AFG72757
MKTIIALSYILCLVFAQKIPGNDNSTATLCLGHHAVPNGTLVKTITNDQIEVTNATELVQSSSTGRICDSPHRILDGENCTLIDALLGDPHCDGFQNKEWDLFVERSKAYSNCYPYDVPDYASLRSLVASSGTLEFNNESFNWTGVAQNGTSYACKRSSIKSFFSRLNWLHQLKYKYPALNVTMPNNDKFDKLYIWGVHHPSTDSDQTSIYAQASGRVTVSTKRSQQTVIPNIGSRPWVRGISSRISIHWTIVKPGDILLINSTGNLIAPRGYFKIRSGKSSIMRSDAPIGKCNSECITPNGSIPNDKPFQNVNRITYGACPRYVKQNTLKLATGMRNVPEKQTRGIFGAIAGFIENGWEGMVDGWYGFRHQNSEGTGQAADLKSTQAAINQINGKLNRLIEKTNEKFHQIEKEFSEVEGRIQDLEKYVEDTKIDLWSYNAELLVALENQHTIDLTDSEMNKLFERTRKQLRENAEDMGNGCFKIYHKCDNACIGSIRNGTYDHDVYRDEALNNRFQIKGVELKSGYKDWILWISFAISCFLLCVVLLGFIMWACQKGNIRCNICI

SEQ ID NO: 8519 - protein, 566 aa, synthetic construct
  REGION 1..566: note = hemagglutinin__InfluenzaA__AFG72779
MKTIIALSYILCLVFAQKLPGNDNSTATLCLGHHAVPNGTLVKTITNDQIEVTNATELVQSSSTGRICDSPHRILDGENCTLIDALLGDPHCDGFQNKEWDLFVERSKAYSNCYPYDVPDYASLRSLVASSGTLEFNNESFNWTGVAQNGTSSACKRRSIKSFFSRLNWLHQLKYKYPALNVTMPNNDKFDKLYIWGVHHPSTDSDQTSLYAQASGRVTVSTRRSQQTVIPNIGSRPWVRGVSSGISIYWTIVKPGDILLINSTGNLIAPRGYFKIRSGKSSIMRSDAPIGKCNSECITPNGSIPNDKPFQNVNRITYGACPRYVKQNTLKLATGMRNVPEKQTRGIFGAIAGFIENGWEGMVDGWYGFRHQNSEGTGQAADLKSTQAAINQINGKLNRLIEKTNEKFHQIEKEFSEVEGRIQDLEKYVEDTKIDLWSYNAELLVALENQHTIDLTDSEMNKLFERTRKQLRENAEDMGNGCFKIYHKCDNACIGSIRNGTYDHDVYRDEALNNRFQIKGVELKSGYKDWILWISFAISCFLLCVVLLGFIMWACQKGNIRCNICI

SEQ ID NO: 8520 - protein, 566 aa, synthetic construct
  REGION 1..566: note = hemagglutinin__InfluenzaA__AFG72801
MKTIIALSYILCLVFAQKLPGNDNSTATLCLGHHAVSNGTLVKTITNDQIEVTNATELVQSSSTGRICDSPHQILDGENCTLIDALLGDPHCDGFQNKEWDLFVERSKAYSNCYPYDVPDYASLRSLVASSGTLEFNNESFNWTGVAQNGTSSACKRRSNKSFFSRLNWLHQLKYKYPALNVTMPNNEKFDKLYIWGVHHPSTDSDQISIYAQSSGRVTVSTKRSQQTVIPNIGSSPWVRGVSSRISIYWTIVKPGDILLINSTGNLIAPRGYFKIRSGKSSIMRSDAPIGKCNSECITPNGSIPNDKPFQNVNRITYGACPRYVKQNTLKLATGMRNVPEKQTRGIFGAIAGFIENGWEGMVDGWYGFRHQNSEGTGQAADLKSTQAAINQINGKLNRLIEKTNEKFHQIEKEFSEVEGRIQDLEKYVEDTKIDLWSYNAELLVALENQHTIDLTDSEMNKLFERTKKQLRENAEDMGNGCFKIYHKCDNACIGSIRNGTYDHDVYRDEALNNRFQIKGVELKSGYKDWILWISFAISCFLLCVVLLGFIMWACQKGNIRCNICI

SEQ ID NO: 8521 - protein, 566 aa, synthetic construct
  REGION 1..566: note = hemagglutinin__InfluenzaA__AFG72812
MKTIIALSYILCLVFAQKLPGNDNSTATLCLGHHAVPNGTLVKTITNDQIEVTNATELVQSSSTGRICDSPHQILDGENCTLIDALLGDPHCDGFQNKEWDLFVERSKAYSNCYPYDVPDYVSLRSLVASSGTLEFNNESFNWTGVAQNGTSSACKRRSNKSFFSRLNWLHQLKYKYPALNVTMPNNEKFDKLYIWGVHHPGTDSDQISLYAQASGRVTVSTKRSQQTVIPNIGSRPWVRGVSSRISIYWTIVKPGDILLINSTGNLIAPRGYFKIRSGKSSIMRSDAPIGKCNSECITPNGSIPNDKPFQNVNRITYGACPRYVKQNTLKLATGMRNVPEKQTRGIFGAIAGFIENGWEGMMDGWYGFRHLNSEGTGQAADLKSTQAAINQINGKLNRLIEKTNEKFHQIEKEFSEVEGRIQDLEKYVEDTKIDLWSYNAELLVALENQHTIDLTDSEMNKLFERTKKQLRENAEDMGNGCFKIYHKCDNACIGSIRNGTYDHDVYRDEALNNRFQIKGVELKSGYKDWILWISFAISCFLLCIVLLGFIMWACQKGNIRCNICI

SEQ ID NO: 8522 - protein, 566 aa, synthetic construct
  REGION 1..566: note = hemagglutinin__InfluenzaA__AFG72823
MKTIIALSYILCLVFAQKLPGNDNSTATLCLGHHAVPNGTIVKTITNDQIEVTNATELVQSSSTGGICDSPHQILDGENCTLIDALLGDPQCDGFQNKKWDLFVERSKAYSNCYPYDVPDYASLRSLVASSGTLEFNNESFNWTGVTQNGTSSACKRRSNKSFFSRLNWLTHLKYKYPALNVTMPNNEKFDKLYIWGVLHPGTDSDQISLYAQASGRITVSTKRSQQTVIPNIGSRPRVRGVSSRISIYWTIVKPGDILLINSTGNLIAPRGYFKIRSGKSSIMRSDAPIGKCNSECITPNGSIPNDKPFQNVNRITYGACPRYIKQNTLKLATGMRNVPEKQTRGIFGAIAGFIENGWEGMVDGWYGFRHQNSEGTGQAADLKSTQAAINQINGKLNRLIGKTNEKFHQIEKEFSEVEGRIQDLEKYVEDTKIDLWSYNAELLVALENQHTIDLTDSEMNKLFERTKKQLRENAEDMGNGCFKIYHKCDNACIGSIRNGTYDHDVYRDEALNNRFQIKGVELKSGYKDWILWISFAISCFLLCVALLGFIMWACQKGNIRCNICI

SEQ ID NO: 8523 - protein, 566 aa, synthetic construct
  REGION 1..566: note = hemagglutinin__InfluenzaA__AFG72834
MKTIIALSYILCLVFAQKLPGNDNSTATLCLGHHAVPNGTLVKTITNDQIEVTNATELVQSSSTGRICDSPHQILDGENCTLIDALLGDPHCDGFQNKEWDLFVERSKAYSNCYPYDVPDYVSLRSLVASSGTLEFNNESFNWTGVAQNGTSSACKRRSNKSFFSRLNWLHQLKYKYPALNVTMPNNEKFDKLYIWGVHHPGTDSDQISLYAQASGRVTVSTKRSQQTVIPNIGSRPWVRGVSSRISIYWTIVKPGDILLINSTGNLIAPRGYFKIQSGKSSIMRSDAPIGKCNSECITPNGSIPNDKPFQNVNRITYGACPRYVKQNTLKLATGMRNVPEKQTRGIFGAIAGFIENGWEGMMDGWYGFRHQNSEGTGQAADLKSTQAAINQINGKLNRLIEKTNEKFHQIEKEFSEVEGRIQDLEKYVEDTKIDLWSYNAELLVALENQHTIDLTDSEMNKLFERTKKQLRENAEDMGNGCFKIYHKCDNACIGSIRNGTYDHDVYRDEALNNRFQIKGVELKSGYKDWILWISFAISCFLLCIVLLGFIMWACQKGNIRCNICI

SEQ ID NO: 8524 - protein, 566 aa, synthetic construct
  REGION 1..566: note = hemagglutinin__InfluenzaA__AFG72845
MKTIIALSYILCLVFAQKLPGNDNSTATLCLGHHAVPNGTLVKTITNDQIEVTNATELVQSSSTSRICDSPHQILDGENCTLIDALLGDPHCDGFQNKEWDLFVERSKAYSNCYPYDVPDYVSLRSLVASSGTLEFNNESFNWTGVAQNGTSSACKRRSDKSFFSRLNWLHQLRYKYPALNVTMPNNEKFDKLYIWGVHHPGTDSDQISLYAQASGRVTISTKRSQQTVIPNIGSRPWVRGVSSRISIHWTIVKPGDILLINSTGNLIAPRGYFKIRSGKSSIMRSDAPIGKCNSECITPNGSIPNDKPFQNVNRITYGACPRYVKQKTLKLATGMRNVPEKQTRGIFGAIAGFIENGWEGMMDGWYGFRHQNSEGTGQAADLKSTQAAINQINGKLNRLIEKTNEKFHQIEKEFSEVEGRIQDLEKYVEDTKIDLWSYNAELLVALENQHTIDLTDSEMNKLFERTKKQLRENAEDMGNGCFKIYHKCDNACIGSIRNGTYDHDVYRDEALNNRFQIKGVELKSGYKDWILWISFAISCFLLCIVLLGFIMWACQKGNIRCNICI

SEQ ID NO: 8525 - protein, 566 aa, synthetic construct
  REGION 1..566: note = hemagglutinin__InfluenzaA__AFG72856
MKTIIALSYILCLVFAQKLPGNDNSTATLCLGHHAVPNGTIVKTITNDQIEVTNATELVQSSSTGGICDSPHQILDGENCTLIDALLGDPQCDGFQNKKWDLFVERSKAYSNCYPYDVPDYASLRSLIASSGTLEFTNESFNWTGVTQNGTSSACKRRSNKSFFSRLNWLTHLKYKYPALNVTMPNNEKFDKLYIWGVHHPGTDSDQISLYAQASGRITVSTKRSQQTVIPNIGSRPRVRDISSRISIYWTIVKPGDILLINSTGNLIAPRGYFKIRSGKSSIMRSDAPIGKCNSECITPNGSIPNDKPFQNVNRITYGACPRYVKQNTLKLATGMRNVPEKQTRGIFGAIAGFIENGWEGMVDGWYGFRHQNSEGTGQAADLKSTQAAINQINGKLNKLIGKTNEKFHQIEKEFSEVEGRIQDLEKYVEDTKIDLWSYNAELLVALENQHTIDLTDSEMNKLFERTKKQLRENAEDMGNGCFKIYHKCDNACIGSIRNGTYDHDVYRDEALNNRFQIKGVELKSGYKDWILWISFAISCFLLCVVLLGFIMWACQKGNIRCNICI

SEQ ID NO: 8526 - protein, 566 aa, synthetic construct
  REGION 1..566: note = hemagglutinin__InfluenzaA__AFG72867
MKTIIALSYILCLVFAQKLPGNDNSTATLCLGHHAVPNGTLVKTITNDQIEVTNATELVQSSSTGRICDSPHQILDGENCTLIDALLGDPHCDGFQNKEWDLFVERSKAYSNCYPYDVPDYVSLRSLVASSGTLEFNNESFNWTGVAQNGTSSACKRRSNKSFFSRLNWLHQLKNKYPALNVTMPNNEKFDKLYIWGVHHPGTDSDQISLYAQASGRVTVSTKRSQQTVIPNIGSRPRVRDISSRISIYWTIVKPGDILLINSTGNLIAPRGYFKIRSGKSSIMRSDAPIGKCNSECITPNGSIPNDKPFQNVNRITYGACPRYVKQNTLKLATGMRNVPEKQTRGIFGAIAGFIENGWEGMMDGWYGFRHQNSEGTGQAADLKSTQAAINQINGKLNRLIEKTNEKFHQIEKEFSEVEGRIQDLEKYVEDTKIDLWSYNAELLVALENQHTIDLTDSEMNKLFERTKKQLRENAEDMGNGCFKIYHKCDNACIGSIRNGTYDHDVYRDEALNNRFQIKGVELKSGYKDWILWISFAISCFLLCIVLLGFIMWACQKGNIRCNICI

SEQ ID NO: 8527 - protein, 566 aa, synthetic construct
  REGION 1..566: note = hemagglutinin__InfluenzaA__AFG72922
MKTIIALSYILCLVFAQKLPGDDNSTATLCLGHHAVPNGTIVKTITNDQIEVTNATELVQSSSTGEICDSPHQILDGENCTLIDALLGDPQCDGFQNKKWDLFVERSKAYSNCYPYDVPDYASLRSLVASSGTLEFNNESFNWTGVTQNGTSSSCIRKSNNSFFSRLNWLTHLKFKYPALNVTMPNNEQFDKLYIWGVHHPGTDNDQIFLYAQASGRITVSTKRSQQTVIPNIGSRPRVRNIPSRISIYWTIVKPGDILLINSTGNLIAPRGYFKIRSGKSSIMRSDAPIGKCNSECITPNGSIPNDKPFQNVNRITYGACPRYVKQNTLKLATGMRNVPEKQTRGIFGAIAGFIENGWEGMVDGWYGFRHQNSEGRGQAADLKSTQAAIDQINGKLNRLIGKTNEKFHQIEKEFSEVEGRIQDLEKYVEDTKIDLWSYNAELLVALENQHTIDLTDSEMNKLFEKTKKQLRENAEDMGNGCFKIYHKCDNACIGSIRNGTYDHDVYRDEALNNRFQIKGVELKSGYKDWILWISFAISCFLLCVALLGFIMWACQKGNIRCNICI

SEQ ID NO: 8528 - protein, 566 aa, synthetic construct
  REGION 1..566: note = hemagglutinin__InfluenzaA__AFG72933
MKTIIALSYILCLVFAQKLPGNDNSTATLCLGHHAVPNGTIVKTITNDQIEVTNATELVQSSSTGEICDSPHQILDGENCTLIDALLGDPQCDGFQNKKWDLFVERSKAYSNCYPYDVPDYASLRSLVASSGTLEFNNESFNWTGVTQNGTSSACVRRSNNSFFSRLNWLTHLKFKYPALNVTMPNNEQFDKLYIWGVHHPGTDNDQIFLYAQASGRITVSTKRSQQTVIPNIGSRPRVRNIPSRISIYWTIVKPGDILLINSTGNLIAPRGYFKIRSGKSSIMRSDAPIGKCNSECITPNGSIPNDKPFQNVNRITYGACPRYVKQNTLKLATGMRNVPEKQTRGIFGAIAGFIENGWEGMVDGWYGFRHQNSEGRGQAADLKSTQAAIDQINGKLNRLIGKTNEKFHQIEKEFSEVEGRIQDLEKYVEDTKIDLWSYNAELLVALENQHTIDLTDSEMNKLFEKTKKQLRENAEDMGNGCFKIYHKCDNACIGSIRNGTYDHDVYRDEALNNRFQIKGVELKSGYKDWILWISFAISCFLLCVALLGFIMWACQKGNIRCNICI

SEQ ID NO: 8529 - protein, 566 aa, synthetic construct
  REGION 1..566: note = hemagglutinin__InfluenzaA__AFG72955
MKTIIALSYILCLVFAQKLPGNDNSTATLCLGHHAVPNGTIVKTITNDQIEVTNATELVQSSSTGEICDSPHQILDGENCTLIDALLGDPQCDGFQNKKWDLFVERSKAYSNCYPYDVPDYASLRSLIASSGTLEFNNESFNWTGVTQNGTSSACIRRSNNSFFSRLNWLTHLRFKYPALNVTMPNNEQFDKLYIWGVHHPGTDNDQIFLYAQASGRITVSTKRSQQTVIPNIGSRPRVRNIPSRISIYWTIVKPGDILLINSTGNLIAPRGYFKIRSGKSSIMRSDAPIGKCNSECITPNGSIPNDKPFQNVNRITYGACPRYVKQNTLKLATGMRNVPEKQTRGIFGAIAGFIENGWEGMVDGWYGFRHQNSEGRGQAADLKSTQAAIDQINGKLNRLIGKTNEKFHQIEKEFSEVEGRIQDLEKYVEDTKIDLWSYNAELLVALENQHTIDLTDSEMNKLFEKTKKQLRENAEDMGNGCFKIYHKCDNACIGSIRNGTYDHDVYRDEALNNRFQIKGVELKSGYKDWILWISFAISCFLLCVALLGFIMWACQKGNIRCNICI

SEQ ID NO: 8530 - protein, 566 aa, synthetic construct; identical to SEQ ID NO: 1640
  REGION 1..566: note = hemagglutinin__InfluenzaA__AFG98808

SEQ ID NO: 8531 - protein, 566 aa, synthetic construct; identical to SEQ ID NO: 1640
  REGION 1..566: note = hemagglutinin__InfluenzaA__AFG98819

SEQ ID NO: 8532 - protein, 566 aa, synthetic construct
  REGION 1..566: note = hemagglutinin__InfluenzaA__AFG98830
MKTIIALSYIFCLVLGQDLPGNDKSTATLCLGHHAVPNGTLVKTITNDQIEVTNATELVQSSSTGKICNNPHRILDGIDCTLIDALLGDPHCDGFQNETWDLFVERSKAFSNCYPYDVPDYASLRSLVASSGTLEFITEGFTWTGVTQNGGSSACKRGPGSGFFSRLNWLTKSGSTYPVLNVTMPNNDNFDKLYIWGVHHPSTNQEQTSLYVQASGRVTVSTRRSQQTIIPNIGSRPWVRGLSSRISIYWTIVKPGDILIINSNGNLIAPRGYFKMRTGKSSIMRSDAPIDTCISECITPNGSIPNDKPFQNVNKITYGACPKYVKQNTLKLATGMRNVPEKQTRGLFGAIAGFIENGWEGMIDGWYGFRHQNSEGTGQAADLKSTQAAIDQINGKLNRVIEKTNEKFHQIEKEFSEVEGRIQDLEKYVEDTKIDLWSYNAELLVALENQHTIDLTDSEMNKLFEKTRRQLRENAEDMGNGCFKIYHKCDNACIGSIRNGTYDHDVYRDEALNNRFQIKGVELKSGYKDWILWISFAISCFLLCVVLLGFIMWACQKGNIRCNICI

SEQ ID NO: 8533 - protein, 566 aa, synthetic construct
  REGION 1..566: note = hemagglutinin__InfluenzaA__AFG98841
MKTIIALSYIFCLVLGQDLPGNDKSTATLCLGHHAVPNGTLVKTITNDQIEVTNATELVQSSSTGKICNNPHRILDGIDCTLIDALLGDPHCDGFQNETWDLFVERSKAFSNCYPYDVPDYASLRSLVASSGTLEFITEGFTWTGVTQNGGSNACKRGPGSGFFSRLNWLTKSGSTYPVLNVTMPNNDNFDKLYIWGVHHPSTNQEQTSLYVQASGRVTVSTRRSQQTIIPNIGSRPWVRGLSSRISIYWTIVKPGDILIINSNGNLIAPRGYFKMRTGKSSIMRSDAPIGTCISECITPNGSIPNDKPFQNVNKITYGACPKYVKQNTLKLATGMRNVPEKQTRGLFGAIAGFIENGWEGMIDGWYGFRHQNSEGTGQAADLKSTQAAIDQINGKLNRVIEKTNEKFHQIEKEFSEVEGRIQDLEKYVEDTKIDLWSYNAELLVALENQHTIDLTDSEMNKLFEKTRRQLRENAEDMGNGCFKIYHKCDNACIGSIRNGTYDHDVYRDEALNNRFQIKGVELKSGYKDWILWISFAISCFLLCVVLLGFIMWACQKGNIRCNICI

SEQ ID NO: 8534 - protein, 566 aa, synthetic construct; identical to SEQ ID NO: 305
  REGION 1..566: note = hemagglutinin__InfluenzaA__AFG98852

SEQ ID NO: 8535 - protein, 566 aa, synthetic construct
  REGION 1..566: note = hemagglutinin__InfluenzaA__AFG98863
MKTIIALSYIFCLVLGQDLPGNDNSTATLCLGHHAVPNGTLVKTITNDQIEVTNATELVQSSSTGKICNNPHRILDGIDCTLIDALLGDPHCDGFQNETWDLFVERSKAFSNCYPYDVPDYASLRSLVASSGTLEFINEGFTWTGVTQNGGSSACKRGPDSGFFSRLNWLYKSGSTYPVLNVTMPNNDNFDKLYIWGVHHPSTNQEQTSLYVQASGRVTVSTKRSQQTIIPNIGSRPWVRGLSSRISIYWTIVKPGDILVINSNGNLIAPRGYFKMRTGKSSIMRSDAPIGTCISECITPNGSIPNDKPFQNVNKITYGACPKYVKQNTLKLATGMRNVPEKQTRGLFGAIAGFIENGWEGMIDGWYGFRHQNSEGTGQAADLKSTQAAIDQINGKLNRVIEKTNEKFHQIEKEFSEVEGRIQDLEKYVEDTKIDLWSYNAELLVALENQHTIDLTDSEMNKLFEKTRRQLRENAEDMGNGCFRIYHKCDNACIGSIRNGTYDHDVYRDEALNNRFQIKGVELKSGYKDWILWISFAISCFLLCVVLLGFIMWACQKGNIRCNICI

SEQ ID NO: 8536 - protein, 566 aa, synthetic construct
  REGION 1..566: note = hemagglutinin__InfluenzaA__AFG98874
MKTIIALSYIFCLVLGQDFPGNDNSTATLCLGHHAVPNGTLVKTITNDQIEVTNATELVQSSSTGKICNNPHRILDGIDCTLIDALLGDPHCDGFQNETWDLFVERSKAFSNCYPYDVPDYASLRSLVASSGTLEFINEGFTWTGVTQNGGSNACKRGPDNGFFSRLNWLYKSGSTYPVLNVTMPNNDNFDKLYIWGVHHPSTDQEQTSLYVQASGRVTVSTKRSQQTIIPNIGSRPWVRGLSSRISIYWTIVKPGDILVINSNGNLIAPRGYFKMRTGKSSIMRSDAPIGTCISECITPNGSIPNDKPFQNVNKITYGACPKYVKQNTLKLATGMRNVPEKQTRGLFGAIAGFIENGWEGMIDGWYGFRHQNSEGTGQAADLKSTQAAIDQINGKLNRVIEKTNEKFHQIEKEFSEVEGRIQDLEKYVEDTKIDLWSYNAELLVALENQHTIDLTDSEMNKLFEKTRRQLRENAEDMGNGCFKIYHKCDNACIGSIRNGTYDHDVYRDEALNNRFQIKGVELKSGYKDWILWISFAISCFLLCVVLLGFIMWACQKGNIRCNICI

SEQ ID NO: 8537 - protein, 566 aa, synthetic construct
  REGION 1..566: note = hemagglutinin__InfluenzaA__AFG98885
MKTIIALSYIFCLVLGQDFPGNDNSTATLCLGHHAVPNGTLVKTITNDQIEVTNATELVQSSSTGKICNNPHRILDGIDCTLIDALLGDPHCDGFQNETWDLFVERSKAFSNCYPYDVPDYASLRSLVASSGTLEFINEGFTWTGVTQNGGSNACKRGTDSGFFSRLNWLYKSGSTYPVLNVTMPNNDNFDKLYIWGVHHPSTDQEQTSLYVQASGRVTVSTKRSQQTIIPNIGSRPWVRGLSSRISIYWTIVKPGDILVINSNGNLIAPRGYFKMRTGKSSIMRSDAPIGTCISECITPNGSIPNDKPFQNVNKITYGACPKYVKQNTLKLATGMRNVPEKQTRGLFGAIAGFIENGWEGMIDGWYGFRHQNSEGTGQAADLKSTQAAIDQINGKLNRVIEKTNEKFHQIEKEFSEVEGRIQDLEKYVEDTKIDLWSYNAELLVALENQHTIDLTDSEMNKLFEKTRRQLRENAEDMGNGCFKIYHKCDNACIGSIRNGTYDHDVYRDEALNNRFQIKGVELKSGYKDWILWISFAISCFLLCVVLLGFIMWACQKGNIRCNICI

SEQ ID NO: 8538 - protein, 566 aa, synthetic construct
  REGION 1..566: note = hemagglutinin__InfluenzaA__AFG98896
MKTIIALSYIFCLVLGQDFPGNDNSTATLCLGHHAVPNGTLVKTITNDQIEVTNATELVQSSSTGKICNNPHRILDGINCTLIDALLGDPHCDGFQNETWDLFVERSKAFSNCYPYDVPDYASLRSLVASSGTLEFINEGFTWTGVTQNGGSNACKRGPDSGFFSRLNWLYKSGSAYPVLNVTMPNNDNFDKLYIWGVHHPSTDQEQTNLYVQTSGRVTVSTKRSQQTIIPNIGSRPWVRGLSSRISIYWTIVKPGDILVINSNGNLIAPRGYFKMRTGKSSIMRSDAPIGTCISECITPNGSIPNDKPFQNVNKITYGACPKYVKQNTLKLATGMRNVPEKQTRGIFGAIAGFIENGWEGMIDGWYGFRHQNSEGTGQAADLKSTQAAIDQINGKLNRVIEKTNEKFHQIEKEFSEVEGRIQDLEKYVEDTKIDLWSYNAELLVALENQHTIDLTDSEMNKLFEKTRRQLRENAEDMGNGCFKIYHKCDNACIGSIRNGTYDHDVYRDEALNNRFQIKGVELKSGYKDWILWISFAISCFLLCVVLLGFIMWACQKGNIRCNICI

SEQ ID NO: 8539 - protein, 566 aa, synthetic construct
  REGION 1..566: note = hemagglutinin__InfluenzaA__AFG98907
MKTIIALSYIFCLVLGQDLPGNDNSTATLCLGHHAVPNGTLVKTITNDQIEVTNATELVQSSSTGKICNNPHRILDGINCTLIDALLGDPHCDGFQNEKWDLFVERSKAFSNCYPYDVPDYASLRSLVASSGTLEFINEGFNWTGVTQNGGSNACKRGPDCGFFSRLNWLYKSGSTYPVLNVTMPNNDNFDKLYIWGVHHPSTDQEQTNLYVQASGRVTVSTKRSQQTIIPNIGSRPWVRGLSSRISIYWTIVKPGDILVINSNGNLIAPRGYFKMRTGKSSIMRSDAPIGTCISECITPNGSIPNDKPFQNVNKITYGACPKYVKQNTLKLATGMRNVPEKQTRGIFGAIAGFIENGWEGMIDGWYGFRHQNSEGTGQAADLKSTQAAIDQINGKLNRVIEKTNEKFHQIEKEFSEVEGRIQDLEKYVEDTKIDLWSYNAELLVALENQHTIDLTDSEMNKLFEKTRRQLRENAEDMGNGCFKIYHKCDNACIGSIRNGTYNHDVYRDEALNNRFQIKGVELKSGYKDWILWISFAISCFLLCVVLLGFIMWACQKGNIRCNICI

SEQ ID NO: 8540 - protein, 566 aa, synthetic construct
  REGION 1..566: note = hemagglutinin__InfluenzaA__AFG98918
MKTIIALSYIFCLVLGQDLPGNDNSTATLCLGHHAVPNGTLVKTITNDQIEVTNATELVQSSSTGKICNNPHRILDGINCTLIDALLGDPHCDGFQNEKWDLFVERSKAFSNCYPYDVPDYASLRSLVASSGTLEFINEGFNWTGVTQNGGSNACKRGPDRGFFSRLNWLYKSGSTYPVLNVTMPNNDNFDKLYIWGVHHPSTDQEQTNLYVQASGRVTVSTKRSQQTIIPNIGSRPWVRGLSSRISIYWTIVKPGDILVINSNGNLIAPRGYFKMRTGKSSIMRSDAPIGTCISECITPNGSIPNDKPFQNVNKITYGACPKYVKQNTLKLATGMRNVPEKQTRGIFGAIAGFIENGWEGMIDGWYGFRHQNSEGTGQAADLKSTQAAIDQINGKLNRVIEKTNEKFHQIEKEFSEVEGRIQDLEKYVEDTKIDLWSYNAELLVALENQHTIDLTDSEMNKLFEKTRRQLRENAEDMGNGCFKIYHKCDNACIGSIRNGTYNHDVYRDEALNNRFQIKGVELKSGYKDWILWISFAISCFLLCVVLLGFIMWACQKGNIRCNICI

SEQ ID NO: 8541 - protein, 566 aa, synthetic construct
  REGION 1..566: note = hemagglutinin__InfluenzaA__AFG98929
MKTVIALSYIFCLVLGQDLPGNDNSTATLCLGHHAVPNGTLVKTITNDQIEVTNATELVQSSSTGKICNNPHRILDGINCTLIDALLGDPHCDGFQNEKWDLFVERSKAFSNCYPYDVPDYASLRSLVASSGTLEFINEGFNWTGVTQNGGSNACKRGPDIGFFSRLNWLYKSGSTYPVLNVTMPNNDNFDKLYIWGVHHPSTDQEQTNLYVQASGRVTVSTKRSQQTIIPNIGSRPWVRGLSSRISIYWTIVKPGDILVINSNGNLIAPRGYFKMRTGKSSIMRSDAPIGTCISECITPNGSIPNDKPFQNVNKITYGACPKYVKQNTLKLATGMRNVPEKQTRGIFGAIAGFIENGWEGMIDGWYGFRHQNSEGTGQAADLKSTQAAIDQINGKLNRVIEKTNEKFHQIEKEFSEVEGRIQDLEKYVEDTKIDLWSYNAELLVALENQHTIDLTDSEMNKLFEKTRRQLRENAEDMGNGCFKIYHKCDNACIGSIRNGTYNHDVYRDEALNNRFQIKGVELKSGYKDWILWISFAISCFLLCVVLLGFIMWACQKGNIRCNICI

SEQ ID NO: 8542 - protein, 566 aa, synthetic construct
  REGION 1..566: note = hemagglutinin__InfluenzaA__AFG98940
MKTIIALSYIFCLVLGQDLPGNDNSTATLCLGHHAVPNGTLVKTITNDQIEVTNATELVQSSSTGKICNNPHRILDGINCTLIDALLGDPHCDGFQNEKWDLFVERSKAFSNCYPYDVPDYASLRSLVASSGTLEFINEGFNWTGVTQNGGSNACKRGPDSGFFSRLNWLYKSGSTYPVLNVTMPNKDNFDKLYIWGVHHPSTDQEQTNLYVQASGRVTVSTKRSQQTIIPNIGSRPWVRGMSSRISIYWTIVKPGDILVINSNGNLIAPRGYFKMRTGRSSIMRSDAPIGTCISECITPNGSIPNDRPFQNVNKITYGACPKYVKQNTLKLATGMRNVPEKQTRGIFGAIAGFIENGWEGMIDGWYGFRHQNSEGTGQAADLKSTQAAIDQINGKLNRVIEKTNEKFHQIEKEFSEVEGRIQDLEKYVEDTKIDLWSYNAELLVALENQHTIDLTDSEMNKLFEKTRRQLRENAEDMGNGCFKIYHKCDNACIESIRNGTYNHDVYRDEALNNRFQIKGVELKSGYKDWILWISFAISCFLLCVVLLGFIMWACQKGNIRCNICI

SEQ ID NO: 8543 - protein, 566 aa, synthetic construct
  REGION 1..566: note = hemagglutinin__InfluenzaA__AFG98962
MKTIIALSYIFCLVLAQDLPGNDNSTATLCLGHHAVPNGTLVKTITNDQIEVTNATELVQSSSTGKICNNPHRILDGINCTLIDALLGDPHCDGFQNEKWDLFVERSKAFSNCYPYDVPDYASLRSLVASSGTLEFINEGFNWTGVTQNGGSNACKRGPDSGFFSRLNWLYKSGSTYPVLNVTMPNNDNFDKLYIWGVHHPSTDQEQTNLYVQASGRVTVSTKRSQQTIIPNVGSRPWVRGLSSRISIYWTIVKPGDILVINSNGNLIAPRGYFKMRTGKSSIMRSDAPIGTCSSECITPNGSIPNDKPFQNVNKITYGACPKYVKQNTLKLATGMRNVPEKQTRGIFGAIAGFIENGWEGMIDGWYGFRHQNSEGTGQAADLKSTQAAIDQINGKLNRVIEKTNEKFHQIEKEFSEVEGRIQDLEKYVEDTKIDLWSYNAELLVALENQHTIDLTDSEMNKLFEKTRRQLRENAEDMGNGCFKIYHKCDNACIGSIRNGTYDHDVYRDEALNNRFQIKGVELKSGYKDWILWISFAISCFLLCVVLLGFIMWACQKGNIRCNICI

SEQ ID NO: 8544 - protein, 566 aa, synthetic construct
  REGION 1..566: note = hemagglutinin__InfluenzaA__AFG98973
MKTIIALSYIFCLVLGQDFPRNDNSTATLCLGHHAVPNGTLVKTITNDQIEVTNANELVQSSSTGKICNNPHRILDGMDCTLIDALLGDPHCDGLQNETWDLFVERSKAFSNCYPYDVPDYASLRSLVASSGTLEFINEGFTWTGVTQNGGSNACKRGPDRGFFSRLNWLYKSGNTYPVLNVTMPNNDNFDKLYIWGVHHPSTDQDQTSLYVQASGRVTVSTKRSQQTVIPNIGPRPWVRGLSSGISIYWTIVKPGDILLINSNGNLIAPRGYFKMRTGKSSIMRSDAPIGTCISECITPNGSIPNDKPFQNVNKITYGACPKYVKQNTLKLATGMRNVPEKQTRGIFGAIAGFIENGWEGMIDGWYGFRHQNSEGTGQAADLKSTQAAIDQINGKLNRVIEKTNEKFHQIEKEFSEVEGRIQDLEKYVEDTKIDLWSYNAELLVALENQHTIDLTDSEMNKLFEKTRRQLRENAEDMGNGCFKIYHRCDNACIGSIRNGTYDHDVYRDEALNNRFQIKGVELKSGYKDWILWISFAISCFLLCVVLLGFIMWACQKGNIRCNICI

SEQ ID NO: 8545 - protein, 566 aa, synthetic construct
  REGION 1..566: note = hemagglutinin__InfluenzaA__AFG98984
MKTIIALSYIFCLVLGQDFPRNDNSTATLCLGHHAVPNGTLVKTITNDQIEVTNATELVQSSSTGKICNNPHRILDGMDCTLIDALLGDPHCDGLQNETWDLFVERSKAFSNCYPYDVPDYASLRSLVASSGTLEFINEGFTWTGVTQNGGSNACKRGPDRGFFSRLNWLYKSGNTYPVLNVTMPNNDNFDKLYIWGVHHPSTDQDQTSLYVQASGRVTVSTKRSQQTVIPNIGPRPWVRGLSSGISIYWTIVKPGDILLINSNGNLIAPRGYFKMRTGKSSIMRSDAPIGTCISECITPNGSIPNDKPFQNVNKITYGACPKYVKQNTLKLATGMRNVPEKQTRGIFGAIAGFIENGWEGMIDGWYGFRHQNSEGTGQAADLKSTQAAIDQINGKLNRVIEKTNEKFHQIEKEFSEVEGRIQDLEKYVEDTKIDLWSYNAELLVALENQHTIDLTDSEMNKLFEKTRRQLRENAEDMGNGCFKIYHRCDNACIGSIRNGTYDHDVYRDEALNNRFQIKGVELKSGYKDWILWISFAISCFLLCVVLLGFIMWACQKGNIRCNICI

SEQ ID NO: 8546 - protein, 567 aa, synthetic construct
  REGION 1..567: note = hemagglutinin__InfluenzaA__AFG98995
MKTIIALSYIFCLVFAQDLPGNDNNSTATLCLGHHAVPNGTLVKTITNDQIEVTNATELVQSSSTGKICNNPHRILDGINCTLIDALLGDPHCDGFQNEKWDLFVERSKAFSNCYPYDVPDYASLRSLVASSGTLEFINEGFNWTGVTQNGGSNACKRGPDIGFFSRLNWLYKSGSTYPVQNVTMPNNDNSDKLYIWGVHHPSTDKEQTDLYVQASGKVTVSTKRSQQTIIPNVGSRPWVRGLSSRISIYWTIVKPGDILVINSNGNLIAPRGYFKMRTGKSSIMRSDAPIGTCSSECITPNGSIPNDKPFQNVNKITYGACPKYVKQNTLKLATGMRNVPEKQTRGIFGAIAGFIENGWEGMIDGWYGFRHQNSEGTGQAADLKSTQAAIDQINGKLNRVIEKTNEKFHQIEKEFSEVEGRIQDLEKYVEDTKIDLWSYNAELLVALENQHTIDLTDSEMNKLFEKTRRQLRENAEDMGNGCFKIYHKCDNACIGSIRNGTYDHDVYRDEALNNRFQIKGVELKSGYKDWILWISFAISCFLLCVVLLGFIMWACQKGNIRCNICI

SEQ ID NO: 8547 - protein, 566 aa, synthetic construct
  REGION 1..566: note = hemagglutinin__InfluenzaA__AFG99006
MKTIIALSYIFCLVLGQDFPRNDNSTATLCLGHHAVPNGTLVKTITNDQIEVTNATELVQSSSTGKICNNPHRILDGMDCTLIDALLGDPHCDGLQNETWDLFVERSKAFSNCYPYDVPDYASLRSLVASSGTLEFINEGFTWTGVTQNGGSNACKRGPDRGFFSRLNWLYKSGNTYPVLNVTMPNNDNFDKLYIWGVHHPSTDQDQTSLYVQASGRVTVSTKRSQQTVIPNIGPRPWVRGLSSRISIYWTIVKPGDILLINSNGNLIAPRGYFKMRTGKSSIMRSDAPIGTCISECITPNGSIPNDKPFQNVNKITYGACPKYVKQNTLKLATGMRNVPEKQTRGIFGAIAGFIENGWEGMIDGWYGFRHQNSEGTGQAADLKSTQAAIDQINGKLNRVIEKTNEKFHQIEKEFSEVEGRIQDLEKYVEDTKIDLWSYNAELLVALENQHTIDLTDSEMNKLFEKTRRQLRENAEDMGNGCFKIYHRCDNACIGSIRNGTYDHDVYRDEALNNRFQIKGVELKSGYKDWILWISFAISCFLLCVVLLGFIMWACQKGNIRCNICI

SEQ ID NO: 8548 - protein, 566 aa, synthetic construct; identical to SEQ ID NO: 764
  REGION 1..566: note = hemagglutinin__InfluenzaA__AFG99017

SEQ ID NO: 8549 - protein, 566 aa, synthetic construct
  REGION 1..566: note = hemagglutinin__InfluenzaA__AFG99028
MKTIIALSYIFCLVFAQDLPGNDNSTATLCLGHHAVPNGTLVKTITNDQIEVTNATELVQSSSTGKICGNPHRILDGINCTLIDALLGDPHCDGFQNEKWDLFVERSKAFSNCYPYDVPDYASLRSLVASSGTLEFINEGFNWTGVTQNGGSSACKRGPDNGFFSRLNWLYKSGSTYPVQNVTMPNNDNSDKLYIWGVHHPSTDKEQTDLYVQASGKVTVSTKRSQQTVIPNVGSRPWVRGLSSRVSIYWTIVKPGDILVINSNGNLIAPRGYFKMRTGKSSIMRSDAPIGTCSSECITPNGSIPNDKPFQNVNKITYGACPKYVKQNTLKLATGMRNVPEKQTRGIFGAIAGFIENGWEGMIDGWYGFRHQNSEGTGQAADLKSTQAAIDQINGKLNRVIEKTNEKFHQIEKEFSEVEGRIQDLEKYVEDTKIDLWSYNAELLVALENQHTIDLTDSEMNKLFEKTRRQLRENAEDMGNGCFKIYHKCDNACIGSIRNGTYDHDVYRDEALNNRFQIKGVELKSGYKDWILWISFAISCFLLCVVLLGFIMWACQKGNIRCNICI

SEQ ID NO: 8550 - protein, 566 aa, synthetic construct
  REGION 1..566: note = hemagglutinin__InfluenzaA__AFG99039
MKTIIALSYIFCLVFAQDLPGNDNSTATLCLGHHAVPNGTLVKTITNDQIEVTNATELVQSSSTGKICDNPHRILDGINCTLIDALLGDPHCDGFQNEKWDLFVERSKAFSNCYPYDVPDYASLRSLVASSGTLEFINEGFNWTGVTQNGGSSACKRGPDNGFFSRLNWLYKSGSTYPVQNVAMPNNDNSDKLYIWGVHHPSTDKEQTDLYVQASGKVTVSTKRSQQTVIPNVGSRPWVRGLSSRVSIYWTIVKPGDILVINSNGNLIAPRGYFKMRTGKSSIMRSDAPIGTCSSECITPNGSIPNDKPFQNVNKITYGACPKYVKQNTLKLATGMRNVPEKQTRGIFGAIAGFIENGWEGMIDGWYGFRHQNSEGTGQAADLKSTQAAIDQINGKLNRVIEKTNEKFHQIEKEFSEVEGRIQDLEKYVEDTKIDLWSYNAELLVALENQHTIDLTDSEMNKLFEKTRRQLRENAEDMGNGCFKIYHKCDNACIGSIRNGTYDHDVYRDEALNNRFQIKGVELKSGYKDWILWISFAISCFLLCVVLLGFIMWACQKGNIRCNICI

SEQ ID NO: 8551 - protein, 566 aa, synthetic construct; identical to SEQ ID NO: 764
  REGION 1..566: note = hemagglutinin__InfluenzaA__AFG99050

SEQ ID NO: 8552 - protein, 566 aa, synthetic construct
  REGION 1..566: note = hemagglutinin__InfluenzaA__AFG99061
MKTIIALSYIFCLVFAQDLPGNDNSTATLCLGHHAVPNGTLVKTITNDQIEVTNATELVQSSSTGKICDNPHRILDGINCTLIDALLGDPHCDGFQNEKWDLFVERSKAFSNCYPYDVPDYASLRSLVASSGTLEFINEGFNWTGVTQNGGSSACKRGPDNGFFSRLNWLYKSGSTYPVQNVTMPNNDNSDKLYIWGVHHPSTDKEQTDLYVQASGKVTVSTKRSQQTVIPNVGSRPWVRGLSSRVSIYWTIVKPGDILVINSNGNLIAPRGYFKMRTGKSSIMRSDAPIGTCSSECITPNGSIPNDKPFQNVNKITYGACPKYIKQNTLKLATGMRNVPEKQTRGIFGAIAGFIENGWEGMIDGWYGFRHQNSEGTGQAADLKSTQAAIDQINGKLNKVIEKTNEKFHQIEKEFSEVEGRIQDLEKYVEDTKIDLWSYNAELLVALENQHTIDLTDSEMNKLFEKTRRQLRENAEDMGNGCFKIYHKCDNACIGSIRNGTYDHDVYRDEALNNRFQIKGVELKSGYKDWILWISFAISCFLLCVVLLGFIMWACQKGNIRCNICI

SEQ ID NO: 8553 - protein, 566 aa, synthetic construct
  REGION 1..566: note = hemagglutinin__InfluenzaA__AFG99072
MKTIIALSYIFCLVFAQDLPGNDNSTATLCLGHHAVPNGTLVKTITNDQIEVTNATELVQSSSTGKICDNPHRILDGKNCTLIDALLGDPHCDGFQNEKWDLFVERSKAFSNCYPYDVPDYASLRSLVASSGTLEFINEGFNWTGVTQNGGSSACKRGPDNGFFSRLNWLYKSGSTYPVQNVTMPNNDNSDRLYIWGVHHPSTDKEQTDLYVQASGKVTVSTKRSQQTVIPNVGSRPWVRGLSSRVSIYWTIVKPGDILVINSNGNLIAPRGYFKMRTGKSSIMRSDAPIGTCSSECITPNGSIPNDKPFQNVNKITYGACPKYVKQNTLKLATGMRNVPEKQTRGIFGAIAGFIENGWEGMIDGWYGFRHQNSEGTGQAADLKSTQAAIDQINGKLNRVIEKTNEKFHQIEKEFSEVEGRIQDLEKYVEDTKIDLWSYNAELLVALENQHTIDLTDSEMNKLFEKTRRQLRENAEDMGNGCFKIYHKCDNACIGSIRNGTYNHDVYRDEALNNRFQIKGVELKSGYKDWILWISFAISCFLLCVVLLGFIMWACQKGNIRCNICI

SEQ ID NO: 8554 - protein, 566 aa, synthetic construct
  REGION 1..566: note = hemagglutinin__InfluenzaA__AFG99083
MKTIIALSYIFCLVFAQDLPGNDNSTATLCLGHHAVPNGTLVKTITNDQIEVTNATELVQSSSTGKICDNPHRILDGINCTLIDALLGDPHCDGFQNEKWDLFVERSKAFSNCYPYDVPDYASLRSLVASSGTLEFINEGFNWTGVTQNGGSSACKRGPDKGFFSRLNWLYKSGSTYPVQNVTMPNNDNSDKLYIWGVHHPSTDKEQTDLYVQASGKVTVSTKRSQQTVIPNVGSRPWVRGLSSRVSIYWTIVKPGDILVINSNGNLIAPRGYFKMLTGKSSIMRSDAPIGTCSSECITPNGSIPNDKPFQNVNKITYGACPKYVKQNTLKLATGMRNVPEKQTRGIFGAIAGFIENGWEGMIDGWYGFRHQNSEGTGQAADLKSTQAAIDQINGKLNRVIEKTNEKFHQIEKEFSEVEGRIHDLEKYVEDTKIDLWSYNAELLVALENQHTIDLTDSEMNKLFEKTRRQLRENAEDMGNGCFKIYHKCDNACIGSIRNGTYDHDVYRDEALNNRFQIKGVELKSGYKDWILWISFAISCFLLCVVLLGFIMWACQKGNIRCNICI

SEQ ID NO: 8555 - protein, 566 aa, synthetic construct
  REGION 1..566: note = hemagglutinin__InfluenzaA__AFG99094
MKTIIALSYIFCLVFAQDLPGNDNSTATLCLGHHAVPNGTLVKTITNDQIEVTNATELVQSSSTGKICDNPHRILDGINCTLIDALLGDPHCDGFQNEKWDLFVERSKAFSNCYPYDVPDYASLRSLVASSGTLEFINEGFNWTGVTQNGGSGACKRGPDNGFFSRLNWLYKSGSTYPVQNVTMPNNDNSDKLYIWGVHHPSTDKEQTDLYVQASGKVTVSTKRSQQTVIPNVGSRPWVRGLSSRVSIYWTIVKPGDILVINSNGNLIAPRGYFKMRTGKSSIMRSDAPIGTCSSECITPNGSIPNDKPFQNVNKITYGACPKYVKQNTLKLATGMRNVPEKQTRGIFGAIAGFIENGWEGMIDGWYGFRHQNSEGTGQAADLKSTQAAIDQINGKLNRVIEKTNEKFHQIEKEFSEVEGRIQDLEKYVEDTKIDLWSYNAELLVALENQHTIDLTDSEMNKLFEKTRRQLRENAEDMGNGCFKIYHKCDNACIGSIRNGTYDHDVYRDEALNNRFQIKGVELKSGYKDWILWISFAISCFLLCVVLLGFIMWACQKGNIRCNICI

SEQ ID NO: 8556 - protein, 566 aa, synthetic construct
  REGION 1..566: note = hemagglutinin__InfluenzaA__AFG99116
MKTIIALSYIFCLVFAQNLPGNDNSTATLCLGHHAVPNGTLVKTITNDQIEVTNATELVQSSSTGRICDSPHRILDGKNCTLVDALLGDPHCDGFQNEKWDLFVERSKAFSNCYPYDVPDYASLRSLVASSGTLEFINESFNWTGVTQSGGSYACKRGSDNSFFSRLNWLYESESKYPVLNVTMPNNGNFDKLYIWGVHHPSTDKEQTNLYVRASGRVTVSTKRSQQTIIPNIGSRPWVRGLSSRISIYWTIVKPGDILLINSNGNLIAPRGYFKIRTGKSSIMRSDAPIGTCSSECITPNGSIPNDKPFQNVNKITYGACPKYVKQNTLKLATGMRNVPEKQTRGIFGAIAGFIENGWEGMVDGWYGFRHQNSEGTGQAADLKSTQAAIDQINGKLNRVIEKTNEKFHQIEKEFSEVEGRIQDLEKYVEDTKIDLWSYNAELLVALENQHTIDLTDSEMNKLFEKTRRQLRENAEDMGNGCFKIYHKCDNACIGSIRNGTYDHDVYRDEALNNRFQIKGVELKSGYKDWILWISFAISCFLLCVVLLGFIMWACQKGNIRCNICI

SEQ ID NO: 8557 - protein, 566 aa, synthetic construct
  REGION 1..566: note = hemagglutinin__InfluenzaA__AFG99127
MKTIIALSYILCLVFAQNLPGNDNSTATLCLGHHAVPNGTLVKTITNDQIEVTNATELVQSSSTGRICDSPHRILDGKNCTLVDALLGDPHCDGFQNEKWDLFVERSKAFSNCYPYDVPDYASLRSLVASSGTLEFINESFNWTGVTQSGGSYACKRGSDNSFFSRLNWLYESESKYPVLNVTMPNNGNFDKLYIWGVHHPSTDKEQTNLYVRASGRVTVSTKRSQQTIIPNIGSRPWVRGLSSRISIYWTIVKPGDILLINSNGNLIAPRGYFKIRTGKSSIMRSDAPIGTCSSECITPNGSIPNDKPFQNVNKITYGACPKYVKQNTLKLATGMRNVPEKQTRGIFGAIAGFIENGWEGMVDGWYGFRHQNSEGTGQAADLKSTQAAIDQINGKLNRVIEKTNEKFHQIEKEFSEVEGRIQDLEKYVEDTKIDLWSYNAELLVALENQHTIDLTDSEMNKLFEKTRRQLRENAEDMGNGCFKIYHKCDNACIGSIRNGTYDHDVYRDEALNNRFQIKGVELKSGYKDWILWISFAISCFLLCVVLLGFIMWACQKGNIRCNICI

SEQ ID NO: 8558 - protein, 566 aa, synthetic construct
  REGION 1..566: note = hemagglutinin__InfluenzaA__AFG99138
MKTIIALSYIFCLVFAQNLPGNDNSTATLCLGHHAVPNGTLVKTITNDQIEVTNATELVQSSSTGRICDSPHRILDGKNCTLVDALLGDPHCDGFQNEKWDLFVERSKAFSNCYPYDVPDYASLRSLVASSGTLEFINESFNWTGVTQSGGSSACKRGSDNSFFSRLNWLYESESKYPVLNVTMPNNGNFDKLYIWGVHHPSTDKEQTNLYVRASGRVTVSTKRNQQTVIPNIGSRPWVRGLSSRISIYWTIVKPGDILLINSNGNLIAPRGYFKIRNGKSSIMRSDAPIGTCSSECITPNGSIPNDKPFQNVNKITYGACPKYVKQNTLKLATGMRNVPEKQTRGIFGAIAGFIENGWEGMVDGWYGFRHRNSEGTGQAADLKSTQAAIDQINGKLNRVIEKTNEKFHQIEKEFSEVEGRIQDLEKYVEDTKIDLWSYNAELLVALENQHTIDLTDSEMNKLFEKTRRQLRENAEDMGNGCFKIYHKCDNACIGSIRNGTYDHDVYRDEALNNRFQIKGVELKSGYKDWILWISFAISCFLLCVVLLGFIMWACQKGNIRCNICI

SEQ ID NO: 8559 - protein, 566 aa, synthetic construct
  REGION 1..566: note = hemagglutinin__InfluenzaA__AFG99149
MKTIIALSYILCLVFAQNLPGNDNSTATLCLGHHAVPNGTLVKTITNDQIEVTNATELVQSSSTGRICDSPHRILDGKNCTLIDALLGDPHCDGFQNEKWDLFVERSRAFSNCYPYDVPDYASLRSLVASSGTLEFINEGFNWTGVTQSGGSYACKRGSDNSFFSRLNWLYESESKYPVLNVTMPNNGKFDKLYIWGVHHPSTDKEQTNLYVRASGRVTVSTKRSQQTVIPNIGSRPWVRGLSSRISIYWTIVKPGDILLINSTGNLIAPRGYFKIRTGKSSIMRSDAPIGTCSSECITPNGSIPNDKPFQNVNKITYGACPRYVKQNTLKLATGMRNVPEKQTRGIFGAIAGFIENGWEGMVDGWYGFRHQNSEGTGQAADLKSTQAAIDQINGKLNRVIEKTNEKFHQIEKEFSEVEGRIQDLEKYVEDTKIDLWSYNAELLVALENQHTIDLTDAEMNKLFEKTRKQLRENAEDMGNGCFKIYHKCDNACIGSIRNGTYDHDVYRDEALNNRFQIKGVELKSGYKDWILWISFAISCFLLCVVLLGFIMWACQKGNIRCNICI

SEQ ID NO: 8560 - protein, 566 aa, synthetic construct
  REGION 1..566: note = hemagglutinin__InfluenzaA__AFG99171
MKTIIALSYIFCLVFAQNLPGNDNSTATLCLGHHAVPNGTLVKTITNDQIEVTNATELVQSSSTGRICDSPHRILDGKNCTLVDALLGDPHCDGFQNEKWDLFVERSKAFSNCYPYDVPDYASLRSLVASSGTLEFTNESFNWTGVTQSGGSYACKRGSDNSFFSRLNWLYESESKYPVLNVTMPNNGNFDKLYIWGVHHPSTDKEQTNLYVRASGRVTVSTKRNQQTVIPNIGSRPWVRGLSSRISIYWTIVKPGDILLINSNGNLIAPRGYFKIRNGKSSIMRSDAPIGTCSSECITPNGSIPNDKPFQNVNKITYGACPKYVKQNTLKLATGMRNVPEKQTRGIFGAIAGFIENGWEGMVDGWYGFRHRNSEGTGQAADLKSTQAAIDQINGKLNRVIEKTNEKFHQIEKEFSEVEGRIQDLEKYVEDTKIDLWSYNAELLVALENQHTIDLTDSEMNKLFEKTRRQLRENAEDMGNGCFKIYHKCDNACIGSIRNGTYDHDVYRDEALNNRFQIKGVELKSGYKDWILWISFAISCFLLCVVLLGFIMWACQKGNIRCNICI

SEQ ID NO: 8561 - protein, 566 aa, synthetic construct
  REGION 1..566: note = hemagglutinin__InfluenzaA__AFG99182
MKTIIALSYIFCLVFAQKLPGNDNSTATLCLGHHAVPNGTLVKTITNDQIEVTNATELVQSSSTGRICDSPHRILDGKNCTLIDALLGDPHCDGFQNEKWDLFVERSKAFSNCYPYDVPDYASLRSLVASSGTLEFINEGFNWTGVTQSGGSYACKRGSVNSFFSRLNWLYESEYKYPALNVTMPNNGKFDKLYIWGVHHPSTDKEQTNLYVRASGRVTVSTKRSQQTVIPNIGSRPWVRGLSSRISIYWTIVKPGDILLINSTGNLIAPRGYFKIRTGKSSIMRSDAPIGTCSSECITPNGSIPNDKPFQNVNKITYGACPRYVKQNTLKLATGMRNVPEKQTRGIFGAIAGFIENGWEGMVDGWYGFRHQNSEGTGQAADLKSTQAAIDQINGKLNRLIEKTNEKFHQIEKEFSEVEGRIQDLEKYVEDTKIDLWSYNAELLVALENQHTIDLTDSEMNKLFEKTRKQLRENAEDMGNGCFKIYHKCDNACIGSIRNGTYDHDVYRDEALNNRFQIKGVELKSGYKDWILWISFAISCFLLCVVLLGFIMWACQKGNIRCNICI

SEQ ID NO: 8562 - protein, 566 aa, synthetic construct
  REGION 1..566: note = hemagglutinin__InfluenzaA__AFG99193
MKTIIALSYISCLVFAQKLPGNDNSTATLCLGHHAVPNGTLVKTITNDQIEVTNATELVQSSSTGRICDSPHRILDGKNCTLIDALLGDPHCDGFQNEKWDLFVERSKAFSNCYPYDVPDYASLRSLVASSGTLEFINEGFNWTGVTQSGGSYACKRGSVNSFFSRLNWLYESESKYPALNVTMPNNGKFEKLYIWGVHHPSTDKEQTNLYVRASGRVTVSTKRSQQTVIPNIGPRPWVRGLSSRISIYWTIVKPGDILLINSTGNLIAPRGYFKIRTGKSSIMRSDAPIGTCSSECITPNGSIPNDKPFQNVNKITYGACPRYVKQNTLKLATGMRNVPEKQTRGIFGAIAGFIENGWEGMVDGWYGFRHQNSEGTGQAADLKSTQAAIDQINGKLNRLIEKTNEKFHQIEKEFSEVEGRIQDLEKYVEDTKIDLWSYNAELLVALENQHTIDMTDSEMNKLFEKTRKQLRENAEDMGNGCFKIYHKCDNACIGSIRNGTYDHDVYRDEALNNRFQIKGVELKSGYKDWILWISFAISCFLLCVVLLGFIMWACQKGNIRCNICI

SEQ ID NO: 8563 - protein, 566 aa, synthetic construct
  REGION 1..566: note = hemagglutinin__InfluenzaA__AFG99204
MKTIIALSYIFCLGFAQKLPGNDNSTATLCLGHHAVPNGTLVKTITNDQIEVTNATELVQSSSTGRICDSPHRILDGKNCTLIDALLGDPHCDGFQNEKWDLFVERSKAFSNCYPYDVPDYASLRSLVASSGTLEFINEGFNWTGVTQSGGSYACKRGSVNSFFSRLNWLYKSESKYPALNVTMPNNGKFDKLYIWGVHHPSTDKEQTNLYVRASGRVTVSTKRSQQTVIPNIGSRPWVRGLSSRISIYWTIVKPGDILLINSTGNLIAPRGYFKIRTGKSSIIRSDAPIGTCSSECITPNGSIPNDKPFQNVNKITYGACPRYVKQNTLKLATGMRNVPEKQTRGIFGAIAGFIENGWEGMVDGWYGFRHQNSEGTGQAADLKSTQAAIDQINGKLNRLIEKTNEKFHQIEKEFSEVEGRIQDLEKYVEDTKIDLWSYNAELLVALENQHTIDLTDSEMNKLFEKTRKQLRENAEDMGNGCFKIYHKCDNACIGSIRNGTYDHDVYRDEALNNRFQIKGVELKSGYKDWILWISFAISCFLLCVVLLGFIMWACQKGNIRCNICI

SEQ ID NO: 8564 - protein, 566 aa, synthetic construct
  REGION 1..566: note = hemagglutinin__InfluenzaA__AFG99215
MKTIIALSYIFCLVFAQKLPGNDNSTATLCLGHHAVPNGTLVKTITNDQIEVTNATELVQSSSTGRICDSPHRILDGKNCTLIDALLGDPHCDGFQNEKWDLFIERSKAFSNCYPYDVPDYASLRSLVASSGTLEFINEGFNWTGVTQSGGSYACKRGSVNSFFSRLNWLYESEYKYPALNVTMPNNGKFDKLYIWGVHHPSTEKEQTNLYVRASGRVTVSTKRSQQTVTPNIGSRPWVRGLSSRISIYWTIVKPGDILLINSTGNLIAPRGYFKIRTGKSSIMRSDAPIGTCSSECITPNGSIPNDKPFQNVNKITYGACPRYVKQNTLKLATGMRNVPEKQTRGIFGAIAGFIENGWEGMVDGWYGFRHQNSEGTGQAADLKSTQAAIDQINGKLNRLIEKTNEKFHQIEKEFSEVEGRIQDLEKYVEDTKIDLWSYNAELLVALENQHTIDLTDSEMNKLFEKTRKQLRENAEDMGNGCFKIYHKCDNACIGSIRNGTYDHDVYRDEALNNRFQIKGVELKSGYKDWILWISFAISCFLLCVVLLGFIMWACQKGNIRCNICI

SEQ ID NO: 8565 - protein, 566 aa, synthetic construct
  REGION 1..566: note = hemagglutinin__InfluenzaA__AFG99226
MKTIIALSYIFCLVFAQKLPGNDNSTATLCLGHHAVPNGTLVKTITNDQIEVTNATELVQSSSTGRICDSPHRILDGKNCTLIDALLGDPHCDGFQNEKWDLFVERSKAFSNCYPYDVPDYASLRSLVASSGTLEFINEGFNWTGVTQSGGSYACKRGSVNSFFSRLNWLYESEYKYPALNVTMPNNGKFDKLYIWGVHHPSTDKEQTNLYVRASGRVTVSTKRSQQTVIPNIGSRPWVRGLSSRISIYWTIVKPGDILSINSTGNLIAPRGYFKIRTGKSSIMRSDAPIGTCSSECITPNGSIPNDKPFQNVNKITYGACPRYVKQNTLKLATGMRNVPEKQTRGIFGAIAGFIENGWEGMVDGWYGFRHQNSEGTGQAADLKSTQAAIDQINGKLNRLIEKTNEKFHQIEKEFSEVEGRIQDLEKYVEDTKIDLWSYNAELLVALENQHTIDLTDSEMNKLFEKTRKQLRENAEDMGNGCFKIYHKCDNACIGSIRNGTYDHDVYRDEALNNRFQIKGVELKSGYKDWILWISFAISCFLLCVVLLGFIMWACQKGNIRCNICI

SEQ ID NO: 8566 - protein, 566 aa, synthetic construct
  REGION 1..566: note = hemagglutinin__InfluenzaA__AFG99237
MKTIIALSYIFCLVFAQKLPGNDNSTATLCLGHHAVPNGTLVKTITNDQIEVTNATELVQSSSTGRICDSPHRILDGKNCTLIDALLGDPHCDGFQNEKWDLFVERSKAFSNCYPYDVPDYASLRSLVASSGTLEFINEDFNWTGVTQSGGSYACKRESVNSFFSRLNWLYESEYKYPALNVTMPNNGKFEKLYIWGVHHPSTDKEQTNLYVRASGRVTVSTKRSQQTVIPNIGSRPWVRGLSSRISIYWTIVKPGDILLINSTGNLIAPRGYFKIRTGKSSIMRSDAPIGTCSSECITPNGSIPNDKPFQNVNKITYGACPRYVRQNTLKLATGMRNVPEKQTRGIFGAIAGFIENGWEGMVDGWYGFRHQNSEGTGQAADLKSTQAAIDQINGKLNRLIEKTNEKFHQIEKEFSEVEGRIQDLEKYVEDTKIDLWSYNAELLVALENQHTIDLTDSEMNKLFEKTRKQLRENAEDMGNGCFKIYHKCDNACIGSIRNGTYDHDVYRDEALNNRFQIKGVELKSGYKDWILWISFAISCFLLCVVLLGFIMWACQKGNIRCNICI

SEQ ID NO: 8567 - protein, 566 aa, synthetic construct
  REGION 1..566: note = hemagglutinin__InfluenzaA__AFG99248
MKTIIALSYIFCLVFAQKLPGNDNSTATLCLGHHAVPNGTLVKTITNDQIEVTNATELVQSSSTGRICDSPHRILDGKNCTLIDALLGDPHCDGFQNEKWDLFVERSKAYSNCYPYDVPDYASLRSLVASSGTLEFINEDFNWTGVTQSGGSHACKRGSVNSFFSRLNWLHESEYKYPALNVTMPNNGKFDKLYIWGVHHPITDREQTNLYVRASGRVTVSTKRSQQTVIPNIGFRPWVRGLSSRISIYWTIVKPGDILLINSTGNLIAPRGYFKIRNGKSSIMRSDAPIGTCSSECITPNGSIPNDKPFQNVNKITYGACPRYVKQNTLKLATGMRNVPEKQTRGIFGAIAGFIENGWEGMVDGWYGFRHQNSEGTGQAADLKSTQAAIDQINGKLNRLIEKTNEKFHQIEKEFSEVEGRIQDLEKYVEDTKIDLWSYNAELLVALENQHTIDLTDSEMNKLFEKTRKQLRENAEDMGNGCFKIYHKCDNACIGSIRNGTYDHDVYRDEALNNRFQIKGVELKSGYKDWILWISFAISCFLLCVVLLGFIMWACQKGNIRCNICI

SEQ ID NO: 8568 - protein, 566 aa, synthetic construct
  REGION 1..566: note = hemagglutinin__InfluenzaA__AFG99259
MKTIIALSYIFCLVFAQKLPGNDNSTATLCLGHHAVPNGTLVKTITNDQVEVTNATELVQSSSTGRICDSPHRILDGKNCTLIDALLGDPHCDGFQNEKWDLFVERSKAYSNCYPYDVPDYASLRSLVASSGTLEFINEDFNWTGVTQSGGSYACKRGSVNSFFSRLNWLHKSEYKYPALNVTMPNNGKFDKLYIWGVHHPSTDREQTNLYVRASGRVTVSTKRSQQTVIPNIGSRPWVRGLSSRISIYWTIVKPGDILLINSTGNLIAPRGYFKIRTGKSSIMRSDAPIGTCSSECITPNGSIPNDKPFQNVNKITYGACPRYVKQNTLKLATGMRNVPEKQTRGIFGAIAGFIENGWEGMVDGWYGFRHQNSEGTGQAADLKSTQAAIDQINGKLNRLIEKTNEKFHQIEKEFSEVEGRIQDLEKYVEDTKIDLWSYNAELLVALENQHTIDLTDSEMNKLFEKTRKQLRENAEDMGNGCFKIYHKCDNACIGSIRNGTYDHDVYRDEALNNRFQIKGVELKSGYKDWILWISFAISCFLLCVVLLGFIMWACQKGNIRCNICI

SEQ ID NO: 8569 - protein, 566 aa, synthetic construct
  REGION 1..566: note = hemagglutinin__InfluenzaA__AFG99270
MKTIIALSYIFCLVFAQKLPGNDNSTATLCLGHHAVPNGTLVKTITNDQIEVTNATELVQSSSTGRICDSPHRILDGKNCTLIDALLGDPHCDGFQNKEWDLFVERSKAYSNCYPYDVPDYASLRSLVASSGTLEFINEDFNWTGVAQSGGSYACKRGSVNSFFSRLNWLHKSEYKYPALNVTMPNNGKFDKLYIWGVHHPSTDREQTNLYVRASGRVTVSTKRSQQTVIPNIGSRPWVRGLSSRISIYWTIVKPGDILLINSTGNLIAPRGYFKIRTGKSSIMRSDAPIGTCSSECITPNGSIPNDKPFQNVNRITYGACPRYVKQNTLKLATGMRNVPEKQTRGIFGAIAGFIENGWEGMVDGWYGFRHHNSEGTGQAADLKSTQAAIDQINGKLNRLIEKTNEKFHQIEKEFSEVEGRIQDLEKYVEDTKIDLWSYNAELLVALENQHTIDLTDSEMNKLFEKTRKQLRENAEDMGNGCFKIYHKCDNACIGSIRNGTYDHDVYRDEALNNRFQIKGVELKSGYKDWILWISFAISCFLLCVVLLGFIMWACQKGNIRCNICI

SEQ ID NO: 8570 - protein, 566 aa, synthetic construct
  REGION 1..566: note = hemagglutinin__InfluenzaA__AFG99281
MKTIIALSYIFCLVFAQKLPGNDNSTATLCLGHHAVPNGTLVKTITNDQIEVTNATELVQSSSTGRICDSPHRILDGKNCTLIDALLGDPHCDGFQNEKWDLFVERSKAFSNCYPYDVPDYASLRSLVASSGTLEFINEEFNWTGVTQSGGSYACKRGSVNSFFSRLNWLHKSEYKYPALNVTMPNNGRFDKLYIWGVHHPSTDREQTNLYVRASGRVTVSTKRSQQTVIPNIGPRPWVRGLSSRISIYWTIVKPGDILLINSTGNLIAPRGYFKIHTGKSSIMRSDAPIGTCSSECITPNGSIPNDKPFQNVNKITYGACPRYVKQNTLKLATGMRNVPDKQTRGIFGAIAGFIENGWEGMVDGWYGFRHQNSEGTGQAADLKSTQAAIDQINGKLNRLIEKTNEKFHQIEKEFSEVEGRIQDLEKYVEDTKIDLWSYNAELLVALENQHTIDLTDSEMNKLFEKTRKQLRENAEDMGNGCFKIYHKCDNACIGSIRNGTYDHDVYRDEALNNRFQIKGVELKSGYKDWILWISFAISCFLLCVVLLGFIMWACQKGNIRCNICI

SEQ ID NO: 8571 - protein, 566 aa, synthetic construct
  REGION 1..566: note = hemagglutinin__InfluenzaA__AFG99292
MKTIIALSYIFCLVFAQKLPGNDNSTATLCLGHHAVPNGTLVKTITNDQVEVTNATELVQSSSTGRICDSPHRILDGKNCTLIDALLGDPHCDGFQNEKWDLFVERSKAYSNCYPYDVPDYASLRSLVASSGTLEFINEDFNWTGVTQSGGSYACKRGSVNSFFSRLNWLHESEYKYPALNVTMPNNGKFDKLYIWGVHHPSTDREQTNLYVRASGRVTVSTKRSQQTVIPNIGSRPWVRGLSSRISIYWTIVKPGDILLINSTGNLIAPRGYFKIRTGKSSIMRSDAPIGTCSSECITPNGSIPNDKPFQNVNKITYGACPRYVKQNTLKLATGMRNVPEKQTRGIFGAIAGFIENGWEGMVDGWYGFRHQNSEGTGQAADLKSTQAAIDQINGKLNRLIEKTNEKFHQIEKEFSEVEGRIQDLEKYVEDTKIDLWSYNAELLVALENQHTIDLTDSEMNKLFEKTRKQLRENAEDMGNGCFKIYHKCDNACIGSIRNGTYDHDVYRDEALNNRFQIKGVELKSGYKDWILWISFAISCFLLCVVLLGFIMWACQKGNIRCNICI

SEQ ID NO: 8572 - protein, 566 aa, synthetic construct
  REGION 1..566: note = hemagglutinin__InfluenzaA__AFG99303
MKTIIALSYIFCLVVAQKLPGNDNSTATLCLGHHAVPNGTLVKTITNDQIEVTNATELVQSSSTGRICDSPHRILDGKNCTLIDALLGDPHCDGFQNKEWDLFVERSKAYSNCYPYDVPDYASLRSLVASSGTLEFINEDFNWTGVAQSGGSYACKRGSVNSFFSRLNWLHESEYKYPALNVTMPNNGKFDKLYIWGVHHPSTDREQTNLYVRASGRVTVSTKRSQQTVIPNIGSRPWVRGLSSRISIYWTIVKPGDILLINSTGNLIAPRGYFKIRTGKSSIMRSDAPIGTCSSECITPNGSISNDKPFQNVNRITYGACPRYVKQNTLKLATGMRNVPEKQTRGIFGAIAGFIENGWEGMVDGWYGFRHQNSEGTGQAADLKSTQAAIDQINGKLNRLIEKTNEKFHQIEKEFSEVEGRIQDLEKYVEDTKIDLWSYNAELLVALENQHTIDLTDSEMNKLFEKTRKQLRENAEDMGNGCFKIYHKCDNACIGSIRNGTYDHDVYRDEALNNRFQIKGVELKSGYKDWILWISFAISCFLLCVVLLGFIMWACQKGNIRCNICI

SEQ ID NO: 8573 - protein, 566 aa, synthetic construct
  REGION 1..566: note = hemagglutinin__InfluenzaA__AFG99314
MKTIIALSYIFCLVFAQKLPGNDNSTATLCLGHHAVPNGTLVKTITNDQIEVTNATELVQSSSTGRICDSPHRILDGKNCTLIDALLGDPHCDSFQNEKWDLFVERSKAYSNCYPYDVPDYASLRSLVASSGTLEFINEDFNWTGVTQSGGSYACKRGSVNSFFSRLNWLHESEYKYPALNVTMPNNGKFDKLYIWGIHHPSTDREQTNLYVRASGRVTVSTKRSQQTVIPNIGSRPWVRGLSSRISIYWTIVKPGDILLINSTGNLIAPRGYFKLRTGKSSIMRSDAPIGTCSSECITPNGSIPNDKPFQNVNKITYGACPRYVKQNTLKLATGMRNVPEKQTRGIFGAIAGFIENGWEGMVDGWYGFRHQNSEGTGQAADLKSTQAAIDQINGKLNRLIEKTNEKFHQIEKEFSEVEGRIQDLEKYVEDTKIDLWSYNAELLVALENQHTIDLTDSEMNKLFEKTRKQLRENAEDMGNGCFKIYHKCDNACIGSIRNGTYDHDVYRDEALNNRFQIKGVELKSGYKDWILWISFAISCFLLCVVLLGFIMWACQKGNIRCNICI

SEQ ID NO: 8574 - protein, 566 aa, synthetic construct
  REGION 1..566: note = hemagglutinin__InfluenzaA__AFG99336
MKTIIALSYIFCLVFAQKLPGNDNSTATLCLGHHAVPNGTLVKTITNDQIEVTNATELVQSSSTGRICDSPHRILDGKNCTLIDALLGDPHCDGFQNKEWDLFVERSKAYSNCYPYDVPDYASLRSLVASSGTLEFINEDFNWTGVAQSGGSYACKRGSVNSFFSRLNWLHKSEYKYPALNVTMPNNGKFDKLYIWGVHHPSTDREQTNLYVRASGRVTVSTKRSQQTVIPNIGSRPWVRGLSSRISIYWTIVKPGDILLINSTGNLIAPRGYFKIRTGKSSIMRSDAPIGTCSSECITPNGSIPNDKPFQNVNRITYGACPRYVKQNTLKLATGMRNVPEKQTRGIFGAIAGFIENGWEGMVDGWYGFRHQNSEGTGQAADLKSTQAAIDQINGKLNRLIEKTNEKFHQIEKEFSEVEGRIQDLEKYVEDTKIDLWSYNAELLVALENQHTIDLTDSEMNKLFEKTRKQLRENAEDMGNGCFKIYHKCDNACIGSIRNGTYDHDVYRDEALNNRFQIKGVELKSGYKDWILWISFAISCFLLCVVLLGFIMWACQKGNIRCNICI

SEQ ID NO: 8575 - protein, 566 aa, synthetic construct
  REGION 1..566: note = hemagglutinin__InfluenzaA__AFG99347
MKTIIALSYIFCLVFAQKLPGNDNSTATLCLGHHAVPNGTLVKTITNDQIEVTNATELVQSSSTGRICDSPHRILDGKNCTLIDALLGDPHCDGFQNKEWDLFVERSKAYSNCYPYDVPDYASLRSLVASSGTLEFINEDFNWTGVAQSGGSYACKRGSVNSFFSRLNWLHKPEYKYPALNVTMPNNGKFDKLYIWGVHHPSTDREQTNLYVRASGRVTVSTKRSQQTVIPNIGSRPWVRGLSSRISIYWTIVKPGDILLINSTGNLIAPRGYFKIRTGKSSIMRSDAPIGTCSSECITPNGSIPNDKPFQNVNRITYGACPRYVKQNTLKLATGMRNVPEKQTRGIFGAIAGFIENGWEGMVDGWYGFRHQNSEGTGQAADLKSTQAAIDQINGKLNRLIDKTNEKFHQIEKEFSEVEGRIQDLEKYVEDTKIDLWSYNAELLVALENQHTIDLTDSEMNKLFEKTRKQLRENAEDMGNGCFKIYHKCDNACIGSIRNGTYDHDVYRDEALNNRFQIKGVELKSGYKDWILWISFAISCFLLCVVLLGFIMWACQKGNIRCNICI

SEQ ID NO: 8576 - protein, 566 aa, synthetic construct
  REGION 1..566: note = hemagglutinin__InfluenzaA__AFG99358
MKTIIALSHILCLVFAQKLPGNDNSTATLCLGHHAVPNGTLVKTITNDQIEVTNATELVQSSSTGRICDSPHRILDGKNCTLIDALLGDPHCDGFQNKEWDLFVERSKAYSNCYPYDVPDYASLRSLVASSGTLEFINEDFNWTGVAQDGGSYACKRGSVNSFFSRLNWLHKLEYKYPALNVTMPNNGKFDKLYIWGVHHPSTDSDQTSLYVRASGRVTVSTKRSQQTVTPNIGSRPWVRGLSSRISIYWTIVKPGDILLINSIGNLIAPRGYFKIRNGKSSIMRSDVPIGNCSSECITPNGSIPNDKPFQNVNRITYGACPRYVKQNTLKLATGMRNVPEKQTRGIFGAIAGFIENGWEGMVDGWYGFRHQNSEGTGQAADLKSTQAAIDQINGKLNRLIEKTNEKFHQIEKEFSEVEGRIQDLEKYVEDTKIDLWSYNAELLVALENQHTIDLTDSEMNKLFEKTRKQLRENAEDMGNGCFKIYHKCDNACIGSIRNGTYDHDVYRDEALNNRFQIKGVELKSGYKDWILWISFAISCFLLCVVLLGFIMWACQKGNIRCNICI

SEQ ID NO: 8577 - protein, 566 aa, synthetic construct
  REGION 1..566: note = hemagglutinin__InfluenzaA__AFG99369
MKTIIALSYIFCLVFAQKLPGNDNSTATLCLGHHAVPNGTLVKTITNDQIEVTNATELVQSSSTGRICDSPHRILDGKNCTLIDALLGDPHCDGFQNKEWDLFVERSKAYSNCYPYDVPDYASLRSLVASSGTLEFINEDFNWAGVAQSGGSYACKRGSVNSFFSRLNWLHESEYKYPALNVTMPNNGKFDKLYIWGVHHPSTDREQTNLYVRASGRVTVSTKRSQQTVIPNIGSRPWVRGLSSRISIYWTIVKPGDILLINSTGNLIAPRGYFKIRTGKSSIMRSDAPIGTCSSECITPNGSIPNDKPFQNVNRITYGACPRYVKQNTLKLATGMRNVPEKQTRGIFGAIAGFIENGWEGMVDGWYGFRHQNSEGTGQAADLKSTQAAIDQINGKLNRLIEKTNEKFHQIEKEFSEVEGRIQDLEKYVEDTKIDLWSYNAELLVALENQHTIDLTDSEMNKLFEKTRKQLRENAEDMGNGCFKIYHKCDNACIGSIRNGTYDHDVYRDEALNNRFQIKGVELKSGYKDWILWISFATSCFLLCVVLLGFIMWACQKGNIRCNICI

SEQ ID NO: 8578 - protein, 566 aa, synthetic construct
  REGION 1..566: note = hemagglutinin__InfluenzaA__AFG99380
MKTIIALSYIFCLVFAQKLPGNDNSTATLCLGHHAVPNGTLVKTITNDQIEVTNATELVQSSSTGRICDSPHRILDGKNCTLIDALLGDPHCDGFQNKEWDLFVERSKAYSNCYPYDVPDYASLRSLVASSGTLEFINEDFNWTGVAQSGGSYACKRGSVNSFFSRLNWLHESEYKYPALNVTMPNNGKFDKLYIWGVHHPSTDREQTNLYVRASGRVTVSTKRSQQTVIPNIGSRPWVRGLSSRISIYWTIVKPGDILLINSTGNLIAPRGYFKIRTGKSSIMRSDAPIGTCSSECITPNGSIPNDKPFQNVNRITYGACPRYVKQNTLKLATGMRNVPEKQTRGIFGAIAGFIENGWEGMVDGWYGFRHQNSEGTGQAADLKSTQAAIDQINGKLNRLIEKTNEKFHQIEKEFSEVEGRIQDLEKYVEDTKIDLWSYNAELLVALENQHTIDLTDSEMNKLFEKTRKQLRENAEDMGNGCFKIYHKCDNACIGSIRNGTYDHDVYRDEALNNRFQIKGVELKSGYKDWILWISFAISCFLLCVVLLGFIMWACQKGNIRCNICI

SEQ ID NO: 8579 - protein, 566 aa, synthetic construct; identical to SEQ ID NO: 8578
  REGION 1..566: note = hemagglutinin__InfluenzaA__AFG99391

SEQ ID NO: 8580 - protein, 566 aa, synthetic construct
  REGION 1..566: note = hemagglutinin__InfluenzaA__AFG99402
MKTIIALSYIFCLVFAQKLPGNDNSTATLCLGHHAVPNGTLVKTITNDQIEVTNATELVQSSSTGRICDSPHRILDGKNCTLIDALLGDPHCDGFQNEKWDLFVERSKAYSNCYPYDVPDYASLRSLVASSGTLEFINEDFNWTGVTQSGGSYACKRGSVNSFFSRLNWLHKSEYKYPALNVTMPNNGKFDKLYIWGVHHPVTDREQTNLYVRASGRVTVSTKRSQQTVIPNIGSRPWVRGLSSRISIYWTIVKPGDILLINSTGNLIAPRGYFKIRTGKSSIMRSDAPIGTCSSECITPNGSIPNDKPFQNVNKITYGACPRYVKQNTLKLATGMRNVPEKQTRGIFGAIAGFIENGWEGMVDGWYGFRHQNSEGTGQAADLKSTQAAIDQINGKLNRLIEKTNEKFHQIEKEFSEVEGRIQDLEKYVEDTKIDLWSYNAELLVALENQHTIDLTDSEMNKLFEKTRKQLRENAEDMGNGCFKIYHKCDNACIGSIRNGTYDHDVYRDEALNNRFQIKGVELKSGYKDWILWISFAISCFLLCVVLLGFIMWACQKGNIRCNICI

SEQ ID NO: 8581 - protein, 566 aa, synthetic construct
  REGION 1..566: note = hemagglutinin__InfluenzaA__AFG99413
MKTIIALSYIFCLVFAQKLPGNDNSTATLCLGHHAVPNGTLVKTITNDQIEVTNATELVQSSSTGRICDSPHRILDGKNCTLIDALLGDPHCDGFQNKEWDLFVERSKAYSNCYPYDVPDYASLRSLVASSGTLEFINEDFNWTGVAQSGGSYACKRGSVNSFFSRLNWLHESEYKYPALNVTMPNNGKFDKLYIWGVHHPSTDREQTNLYVRASGRVTVSTKRSQQTVIPNIGSRPWVRGLSSRISIYWTIVKPGDILLINSTGNLIAPRGYFKIRTGKSSIMRSDAPIGTCSSECITPNGSIPNDKPFQNVNRITYGACPRYVKQNTLKLATGMRNVPEKQTRGIFGAIAGFIENGWEGMVDGWYGFRHQNSEGTGQAADLKSTQAAIDQINGKLNRLIEKTNEKFHQIEKEFSEVEGRIQDLEKYVEDTKIDLWSYNAELLVALENQHTIDLTDSEMNKLFEKTRRQLRENAEDMGNGCFKIYHKCDNACIGSIRNGTYDHDVYRDEALNNRFQIKGVELKSGYKDWILWISFAISCFLLCVVLLGFIMWACQKGNIRCNICI

SEQ ID NO: 8582 - protein, 566 aa, synthetic construct
  REGION 1..566: note = hemagglutinin__InfluenzaA__AFG99424
MKTIIALSYIFCLVFAQKLPGNDNSTATLCLGHHAVPNGTLVKTITNDQIEVTNATELVQSSSTGRICDSPHRILDGKNCTLIDALLGDPHCDGFQNKEWDLFVERSKAYSNCYPYDVPDYASLRSLVASSGTLEFINEDFNWTGVAQSGGSYACKRGSVNSFFSRLNWLHKSEYKYPALNVTMPNNGKFDKLYIWGVHHPSTDREQTNLYVRASGRVTVSTKRSQQTVIPNIGSRPWVRGLSSRISIYWTIVKPGDILLINSTGNLIAPRGYFKIRTGKSSIMRSDAPIGTCSSECITPNGSIPNDKPFQNVNRITYGACPRYVKQNTLKLATGMRNVPEKQTRGIFGAIAGFIENGWEGMVDGWYGFRHQNSEGTGQAADLKSTQAAIDQINGKLNRLIEKTNEKFHQIEKEFSEVEGRIQDLEKYVEDTKIDLWSYNAELLVALENQHTIDLTDSEMNKLFEKTRRQLRENAEDMGNGCFKIYHKCDNACIGSIRNGTYDHDVYRDEALNNRFQIKGVELKSGYKDWILWISFAISCFLLCVVLLGFIMWACQKGNIRCNICI

SEQ ID NO: 8583 - protein, 566 aa, synthetic construct
  REGION 1..566: note = hemagglutinin__InfluenzaA__AFG99435
MKTIIALSYIFCLVFAQKLPGNDNSTATLCLGHHAVPNGTLVKTITNDQIEVTNATELVQNSSTGRICDSPHRILDGKNCTLIDALLGDPHCDGLQNKEWDLFVERSKAYSNCYPYDVPDYASLRSLVASSGTLEFTKEDFNWTGVAQSGGSYACKRGSVNSFFSRLNWLHESEYKYPALNVTMPNNGKFDKLYIWGVHHPSTDREQTNLYVRASGRVTVSTKRSQQTVIPNIGSRPWVRGLSSRISIYWTIVKPGDILLINSTGNLIAPRGYFKIRTGKSSIMRSDAPIGTCSSECITPNGSIPNDKPFQNVNRITYGACPRYVKQNTLKLATGMRNVPEKQTRGIFGAIAGFIENGWEGMVDGWYGFRHQNSEGTGQAADLKSTQAAIDQINGKLNRLIEKTNEKFHQIEKEFSEVEGRIQDLEKYVEDTKIDLWSYNAELLVALENQHTIDLTDSEMNKLFEKTRKQLRENAEDMGNGCFKIYHKCDNACIGSIRNGTYDHDVYRDEALNNRFQIKGVELKSGYKDWILWISFAISCFLLCVVLLGFIMWACQKGNIRCNICI

SEQ ID NO: 8584 - protein, 566 aa, synthetic construct; identical to SEQ ID NO: 8583
  REGION 1..566: note = hemagglutinin__InfluenzaA__AFG99446

SEQ ID NO: 8585 - protein, 566 aa, synthetic construct
  REGION 1..566: note = hemagglutinin__InfluenzaA__AFG99457
MKTIIALSYILCLVFAQKLPGNDNSTATLCLGHHAVPNGTLVKTITNDQIEVTNATELVQSSSTGRICDSPHRILDGENCTLIDALLGDPHCDGFQNKEWDLFVERSKAYSNCYPYDVPDYASLRSLVASSGTLEFINEDFNWTGVAQSGGSYACKRGSVNSFFSRLNWLHKSEYKYPALNVTMPNNGKFDKLYIWGVHHPSTDRDQTSLYVRASGRVTVSTKRSQQTVIPNIGSRPWVRGQSSRISIYWTIVKPGDILLINSTGNLIAPRGYFKIRNGKSSIMRSDAPIGTCSSECITPNGSIPNDKPFQNVNRITYGACPRYVKQNTLKLATGMRNVPEKQTRGIFGAIAGFIENGWEGMVDGWYGFRHQNSEGTGQAADLKSTQAAIDQINGKLNRLIEKTNEKFHQIEKEFSEVEGRIQDLEKYVEDTKIDLWSYNAELLVALENQHTIDLTDSEMNKLFEKTRKQLRENAEDMGNGCFKIYHKCDNACIGSIRNGTYDHDVYRDEALNNRFQIKGVELKSGYKDWILWISFAISCFLLCVVLLGFIMWACQKGNIRCNICI

SEQ ID NO: 8586 - protein, 566 aa, synthetic construct
  REGION 1..566: note = hemagglutinin__InfluenzaA__AFG99468
MKTIIALSYIFCLVFAQKLPGNDNSTATLCLGHHAVPNGTLVKTITNDQIEVTNATELVQSSSTGRICDSPHRILDGKNCTLIDALLGDPHCDGFQNKEWDLFVERSKAYSNCYPYDVPDYASLRSLVASSGTLEFINEDFNWTGVAQSGGSYACKRGSVNSFFSRLNWLHESEYKYPALNVTMPNNGKFDKLYIWGVHHPSTDREQTNLYVRASGRVTVSTKRSQQTVIPNIGSRPWVRGLSSRISIYWTIVKPGDILLINSTGNLIAPRGYFKIRTGKSSIMRSDAPIGTCSSECITPNGSIPNDKPFQNVNRITYGACPRYVKQNTLKLATGMRNVPEKQTRGIFGAIAGFIENGWEGMVDGWYGFRHQNSEGTGQAADLKSTQAAIDQINGKLNRLIEKTNEKFHQIEKEFSEVEGRIQDLEKYVEDTKIDLWSYNAELLVALENQHTIDLTDSEMDKLFEKTRKQLRENAEDMGNGCFKIYHKCDNACIGSIRNGTYDHDVYRDEALNNRFQIKGVELKSGYKDWILWISFAISCFLLCVVLLGFIMWACQKGNIRCNICI

SEQ ID NO: 8587 - protein, 566 aa, synthetic construct
  REGION 1..566: note = hemagglutinin__InfluenzaA__AFG99490
MKTIIALSYILCLVFAQKLPGNDNSTATLCLGHHAVPNGTLVKTITNDQIEVTNATELVQSSSTGRICDSPHRILDGKNCTLIDALLGDPHCDGFQNKEWDLFIERSKAYSNCYPYDVPDYASLRSLVASSGTLEFINEDFNWTGVAQSGESYACKRGSVKSFFSRLNWLHESEYKYPALNVTMPNNGKFDKLYIWGVHHPSTDREQTSLYVRASGRVTVSTKRSQQTVIPNIGSRPWVRGLSSRISIYWTIVKPGDILLINSTGNLIAPRGYFKIRTGKSSIMRSDAPIGTCSSECITPNGSIPNDKPFQNVNRITYGACPRYVKQNTLKLATGMRNVPEKQTRGIFGAIAGFIENGWEGMVDGWYGFRHQNSEGTGQAADLKSTQAAIDQINGKLNRLIEKTNEKFHQIEKEFSEVEGRIQDLEKYVEDTKIDLWSYNAELLVALENQHTIDLTDSEMNKLFEKTRKQLRENAEDMGNGCFKIYHKCDNACIGSIRNGTYDHDVYRDEALNNRFQIKGVELKSGYKDWILWISFAISCFLLCVVLLGFIMWACQKGNIRCNICI

SEQ ID NO: 8588 - protein, 566 aa, synthetic construct
  REGION 1..566: note = hemagglutinin__InfluenzaA__AFG99501
MKTIIALSYIFCLVVAQKLPGNDNSTATLCLGHHAVPNGTLVKTITNDQIEVTNATELVQSSSTGRICDSPHRILDGKNCTLIDALLGDPHCDGFQNKEWDLFVERSKAYSNCYPYDVPDYASLRSLVASSGTLEFINEDFNWTGVAQSGGSYTCKRGSVNSFFSRLNWLHESEYKYPALNVTMPNNGKFDKLYIWGVHHPSTDREQTNLYVRASGRVTVSTKRSQQTVIPNIGSRPWVRGLSSRISIYWTIVKPGDILLINSTGNLIAPRGYFKIRTGKSSIMRSDAPIGTCSSECITPNGSISNDKPFQNVNRITYGACPRYVKQNTLKLATGMRNVPEKQTRGIFGAIAGFIENGWEGMVDGWYGFRHQNSEGTGQAADLKSTQAAIDQINGKLNRLIEKTNEKFHQIEKEFSEVEGRIQDLEKYVEDTKIDLWSYNAELLVALENQHTIDLTDSEMNKLFEKTRKQLRENAEDMGNGCFKIYHKCDNACIGSIRNGTYDHDVYRDEALNNRFQIKGVELKSGYKDWILWISFAISCFLLCVVLLGFIMWACQKGNIRCNICI

SEQ ID NO: 8589 - protein, 566 aa, synthetic construct
  REGION 1..566: note = hemagglutinin__InfluenzaA__AFG99512
MKTIIALSYILCLVFAQKLPGNDNSTATLCLGHHAVPNGTLVKTITNDQIEVTNATELVQSSSTGRICDSPHRILDGKNCTLIDALLGDPHCDGFQNKEWDLFVERSKAYSNCYPYDVPDYASLRSLVASSGTLEFINEDFNWTGVAQSGDSYACKRGSVKSFFSRLNWLHESEYKYPALNVTMPNNDKFDKLYIWGVHHPSTDREQTSLYIRASGRVTVSTKRSQQTVIPNIGSRPWVRGLSSRISIYWTIVKPGDILLINSTGNLIAPRGYFKIRTGKSSIMRSDAPIGTCSSECITPNGSIPNDKPFQNVNRITYGACPRYVKQNTLKLATGMRNVPEKQTRGIFGAIAGFIENGWEGMVDGWYGFRHQNSEGTGQAADLKSTQAAIDQINGKLNRLIEKTNEKFHQIEKEFSEVEGRIQDLEKYVEDTKIDLWSYNAELLVALENQHTIDLTDSEMNKLFEKTRKQLRENAEDMGNGCFKIYHKCDNACIGSIRNGTYDHDVYRDEALNNRFQIKGVELKSGYKDWILWISFAISCFLLCVVLLGFIMWACQKGNIRCNICI

SEQ ID NO: 8590 - protein, 566 aa, synthetic construct
  REGION 1..566: note = hemagglutinin__InfluenzaA__AFG99523
MKTIIALSYIFCLVFAQKLPGNDNSTATLCLGHHAVPNGTLVKTITNDQIEVTNATELVQSSSTGRICDSPHRILDGKNCTLIDALLGDPHCDGFQNKEWDLFVERSKAYSNCYPYDVPDYASLRSLVASSGTLEFINEDFNWTGVAQSGGSYACKRGSVNSFFSRLNWLHESQYKYPALNVTMPNNGKFDKLYIWGVHHPSTDREQTNLYVRASGRVTVSTKRSQQTVIPNIGSRPWVRGLSSRISIYWTIVKPGDILLINSTGNLIAPRGYFKIRTGKSSIMRSDAPIGTCSSECITPNGSIPNDKPFQNVNRITYGACPRYVKQNTLKLATGMRNVPEKQTRGIFGAIAGFIENGWEGMVDGWYGFRHQNSEGTGQAADLKSTQAAIDQINGKLNRLIEKTNEKFHQIEKEFSEVEGRIQDLEKYVEDTKIDLWSYNAELLVALENQHTIDLTDSEMNKLFEKTRKQLRENAEDMGNGCFKIYHKCDNACIGSIRNGTYDHDVYRDEALNNRFQIKGVELKSGYKDWILWISFAISCFLLCVVLLGFIMWACQKGNIRCNICI

SEQ ID NO: 8591 - protein, 566 aa, synthetic construct; identical to SEQ ID NO: 8487
  REGION 1..566: note = hemagglutinin__InfluenzaA__AFG99534

SEQ ID NO: 8592 - protein, 566 aa, synthetic construct; identical to SEQ ID NO: 8487
  REGION 1..566: note = hemagglutinin__InfluenzaA__AFG99545

SEQ ID NO: 8593 - protein, 566 aa, synthetic construct
  REGION 1..566: note = hemagglutinin__InfluenzaA__AFG99556
MKTIIALSYILCLVFAQKLPGNDNSTATLCLGHHAVPNGTLVKTITNDQIEVTNATELVQSSSTGRICDSPHRILDGKNCTLIDALLGDPHCDGFQNKEWDLFVERSKAYSNCYPYDVPDYASLRSLVASSGTLEFTNEDFNWTGVAQSGESYACKRGSVKSFFSRLNWLHESDYKYPALNVTMPNNGKFDKLYIWGVHHPSTDREQTSLYVRASGRVTVSTKRSQQTVIPNIGSRPWVRGLSSRISIYWTIVKPGDILLINSTGNLIAPRGYFKIRTGKSSIMRSDAPIGTCSSECITPNGSIPNDKPFQNVNRITYGACPRYVKQNTLKLATGMRNVPEKQTRGIFGAIAGFIENGWEGMVDGWYGFRHQNSEGTGQAADRKSTQAAIDQINGKLNRLIEKTNEKFHQIEKEFSEVEGRIQDLEKYVEDTKIDLWSYNAELLVALENQHTIDLTDSEMNKLFEKTRKQLRENAEDMGNGCFKIYHKCDNACIGSIRNGTYDHDVYRDEALNNRFQIKGVELKSGYKDWILWISFAISCFLLCVVLLGFIMWACQKGNIRCNICI

SEQ ID NO: 8594 - protein, 566 aa, synthetic construct; identical to SEQ ID NO: 8487
  REGION 1..566: note = hemagglutinin__InfluenzaA__AFG99567

SEQ ID NO: 8595 - protein, 566 aa, synthetic construct; identical to SEQ ID NO: 8487
  REGION 1..566: note = hemagglutinin__InfluenzaA__AFG99578

SEQ ID NO: 8596 - protein, 566 aa, synthetic construct; identical to SEQ ID NO: 8487
  REGION 1..566: note = hemagglutinin__InfluenzaA__AFG99589

SEQ ID NO: 8597 - protein, 566 aa, synthetic construct
  REGION 1..566: note = hemagglutinin__InfluenzaA__AFG99600
MKTIIALSYILCLVFAQKLPGNDNSTATLCLGHHAVPNGTLVKTITNDQIEVTNATELVQSSSTGRICDSPHRVLDGKNCTLIDALLGDPHCDGFQNKEWDLFVERSKAYSNCYPYDVPDYASLRSLVASSGTLEFTNEDFNWTGVAQSGESYACKRGSVKSFFSRLNWLHESDYKYPALNVTMPNNGKFDKLYIWGVHHPSTDREQTSLYVRASGRVTVSTKRSQQTVIPNIGSRPWVRGLSSRISIYWTIVKPGDILLINSTGNLIAPRGYFKIRIGKSSIMRSDAPIGTCSSECITPNGSIPNDKPFQNVNRITYGACPRYVKQNTLKLATGMRNVPEKQTRGIFGAIAGFIENGWEGMVDGWYGFRHQNSEGTGQAADLKSTQAAIDQINGKLNRLIEKTNEKFHQIEKEFSEVEGRIQDLEKYVEDTKIDLWSYNAELLVALENQHTIDLTDSEMNKLFEKTRKQLRENAEDMGNGCFKIYHKCDNACIGSIRNGTYDHDVYRDEALNNRFQIKGVELKSGYKDWILWISFAISCFLLCVVLLGFIMWACQKGNIRCNICI

SEQ ID NO: 8598 - protein, 566 aa, synthetic construct; identical to SEQ ID NO: 8487
  REGION 1..566: note = hemagglutinin__InfluenzaA__AFG99611

SEQ ID NO: 8599 - protein, 566 aa, synthetic construct; identical to SEQ ID NO: 8487
  REGION 1..566: note = hemagglutinin__InfluenzaA__AFG99622

SEQ ID NO: 8600 - protein, 566 aa, synthetic construct; identical to SEQ ID NO: 8487
  REGION 1..566: note = hemagglutinin__InfluenzaA__AFG99633

SEQ ID NO: 8601 - protein, 566 aa, synthetic construct
  REGION 1..566: note = hemagglutinin__InfluenzaA__AFG99644
MKTIIALSYILCLVFAQKLPGNDNSTATLCLGHHAVPNGTLVKTITNDQIEVTNATELVQNSSTGRICDSPHRILDGKNCTLIDALLGDPHCDDFQNKEWDLFVERSKAYSNCYPYDVPDYASLRSLVAASGTLEFINEDFNWTGVAQSGESYACKRGSVKSFFSRLNWLHESEYKYPALNVTMPNNGKFDKLYIWGVHHPSTDREQTSLYVRASGRVTVSTKRSQQTVIPNIGSRPWVRGLSSRISIYWTIVKPGDILLINSTGNLIAPRGYFKIRTGKSSIMRSDAPIGTCSSECITPNGSIPNDKPFQNVNRITYGACPRYVKQNTLKLATGMRNVPEKQTRGIFGAIAGFIENGWEGMVDGWYGFRHQNSEGTGQAADLKSTQAAIDQINGKLNRLIEKTNEKFHQIEKEFSEIEGRIQNLEKYVEDTKIDLWSYNAELLVALENQHTIDLTDSEMNKLFEKTRKQLRENAEDMGNGCFKIYHKCDNACIGSIRNGTYDHDVYRDEALNNRFQIKGVELKSGYKDWILWISFAISCFLLCVVLLGFIMWACQKGNIRCNICI

SEQ ID NO: 8602 - protein, 566 aa, synthetic construct
  REGION 1..566: note = hemagglutinin__InfluenzaA__AFG99655
MKTIIALSYILCLVFAQKLPGNDNSTATLCLGHHAVPNGTLVKTITNDQIEVTNATELVQNSSTGRICDSPHRILDGKNCTLIDALLGDPHCDDFQNKEWDLFVERSKAYSNCYPYDVPDYASLRSLVASSGTLEFINEDFNWTGVAQSGESYACKRGSVKSFFSRLNWLHESEYKYPALNVTMPNNGKFDKLYIWGVHHPSTDREQTSLYVRASGRVTVSTKRSQQTVIPNIGSRPWVRGLSSRISIYWTIVKPGDILLINSTGNLIAPRGYFKIRTGKSSIMRSDAPIGTCSSECITPNGSIPNDKPFQNVNRITYGACPRYVKQNTLKLATGMRNVPEKQTRGIFGAIAGFIENGWEGMVDGWYGFRHQNSEGTGQAADLKSTQAAIDQINGKLNRLIEKTNEKFHQIEKEFSEIEGRIQDLEKYVEDTKIDLWSYNAELLVALENQHTIDLTDSEMNKLFEKTRKQLRENAEDMGNGCFKIYHKCDNACIGSIRNGTYDHDVYRDEALNNRFQIKGVELKSGYKDWILWISFAISCFLLCVVLLGFIMWACQKGNIRCNICI

SEQ ID NO: 8603 - protein, 566 aa, synthetic construct; identical to SEQ ID NO: 8602
  REGION 1..566: note = hemagglutinin__InfluenzaA__AFG99666

SEQ ID NO: 8604 - protein, 566 aa, synthetic construct; identical to SEQ ID NO: 2338
  REGION 1..566: note = hemagglutinin__InfluenzaA__AFG99677

SEQ ID NO: 8605 - protein, 566 aa, synthetic construct; identical to SEQ ID NO: 8487
  REGION 1..566: note = hemagglutinin__InfluenzaA__AFG99688

SEQ ID NO: 8606 - protein, 566 aa, synthetic construct
  REGION 1..566: note = hemagglutinin__InfluenzaA__AFG99701
MKTIIALSYILCLVFAQKLPGNDNSTATLCLGHHAVPNGTLVKTITNDQIEVTNATELVQSSSTGRICDSPHRILDGKNCTLIDALLGDPHCDGFQNKEWDLFVERSNAYSNCYPYDVPDYASLRSLVASSGTLEFTNEDFNWTGVAQSGESYACKRGSVKSFFSRLNWLHESDYKYPALNVTMPNNGKFDKLYIWGVHHPSTDREQTSLYVRASGRVTVSTKRSQQTVIPNIGSRPWVRGLSSRISIYWTIVKPGDILLINSTGNLIAPRGYFKIRTGKSSIMRSDAPIGTCSSECITPNGSIPNDKPFQNVNRITYGACPRYVKQNTLKLATGMRNVPEKQTRGIFGAIAGFIENGWEGMVDGWYGFRHQNSEGTGQAADLKSTQAAIDQINGKLNRLIEKTNEKFHQIEKEFSEVEGRIQDLEKYVEDTKIDLWSYNAELLVALENQHTIDLTDSEMNKLFEKTRKQLRENAEDMGNGCFKIYHKCDNACIGSIRNGTYDHDVYRDEALNNRFQIKGAELKSGYKDWILWISFAISCFLLCVVLLGFIMWACQKGNIRCNICI

SEQ ID NO: 8607 - protein, 566 aa, synthetic construct
  REGION 1..566: note = hemagglutinin__InfluenzaA__AFG99712
MKTIIALSYILCLVFAQKLPGNDNSTATLCLGHHAVPNGTLVKTITNDQIEVTNATELVQSSSTGRICDSPHRILDGKNCTLIDALLGDPHCDGFQNKEWDLFVERSKAYSNCYPYEVPDYASLRSLVASSGTLEFTNEDFNWTGVAQSGESYACKRGSVKSFFSRLNWLHESDYKYPALNVTMPNNGKFDKLYIWGVHHPSTDREQTSLYVRASGRVTVSTKRSQQTVIPNIGSRPWVRGLSSRISIYWTIVKPGDILLINSTGNLIAPRGYFKIRTGKSSIMRSDAPIGTCSSECITPNGSIPNDKPFQNVNRITYGACPRYVKQNTLKLATGMRNVPEKQTRGIFGAIAGFIENGWEGMVDGWYGFRHQNSEGTGQAADLKSTQAAIDQINGKLNRLIEKTNEKFHQIEKEFSEVEGRIQDLEKYVEDTKIDLWSYNAELLVALENQHTIDLTDSEMNKLFEKTRKQLRENAEDMGNGCFKIYHKCDNACIGSIRNGTYDHDVYRDEALNNRFQIKGVELKSGYKDWILWISFAISCFLLCVVLLGFIMWACQKGNIRCNICI

SEQ ID NO: 8608 - protein, 566 aa, synthetic construct; identical to SEQ ID NO: 8487
  REGION 1..566: note = hemagglutinin__InfluenzaA__AFG99723

SEQ ID NO: 8609 - protein, 566 aa, synthetic construct; identical to SEQ ID NO: 8602
  REGION 1..566: note = hemagglutinin__InfluenzaA__AFG99734

SEQ ID NO: 8610 - protein, 566 aa, synthetic construct
  REGION 1..566: note = hemagglutinin__InfluenzaA__AFG99745
MKTIIALSYILCLVFAQKLPGNDNSTATLCLGHHAVPNGTLVKTITNDQIEVTNATELVQSSSTGRICDSPHRILDGKNCTLIDALLGDPHCDGFQNKEWDLFVERSKAYSNCYPYDVPDYASLRSLVASSGTLEFINEDFNWTGVAQSGDSYACKRGSVKSFFSRLNWLHESEYKYPALNVTMPNNDKFDKLYIWGVHHPSTEREQTSLYIRASGRVTVSTKRSQQTVIPNIGSKPWVRGLSSRISIYWTIVKPGDILLINSTGNLIAPRGYFKIRTGKSSIMRSDAPIGTCSSECITPNGSIPNDKPFQNVNRITYGACPRYVKQNTLKLATGMRNVPEKQTRGIFGAIAGFIENGWEGMVDGWYGFRHQNSEGTGQAADLKSTQAAIDQINGKLNRLIEKTNEKFHQIEKEFSEVEGRIQDLEKYVEDTKIDLWSYNAELLVALENQHTIDLTDSEMNKLFEKTRKQLRENAEDMGNGCFKIYHKCDNACMGSIRNGTYDHDVYRDEALNNRFQIKGVELKSGYKDWILWISFAISCFLLCVVLLGFIMWACQKGNIRCNICI

SEQ ID NO: 8611 - protein, 566 aa, synthetic construct; identical to SEQ ID NO: 8487
  REGION 1..566: note = hemagglutinin__InfluenzaA__AFG99756

SEQ ID NO: 8612 - protein, 566 aa, synthetic construct
  REGION 1..566: note = hemagglutinin__InfluenzaA__AFG99767
MKTIIALSYILCLVFAQKLPGNDNSTATLCLGHHAVPNGTLVKTITNDQIEVTNATELVQSSSTGRICDSPHRILDGKNCTLIDALLGDPHCDDFQNKEWDLFVERSKAYSNCYPYDVPDYASLRSLVASSGTLEFINEDFNWTGVAQSGESYACKRGSVKSFFSRLNWLHESEYKYPALNVTMPNNDKFDKLYIWGVHHPSTDREQTSLYIRASGRVTVSTKRSQQTVIPNIGSRPWVRGLSSRISIYWTIVKPGDILLINSTGNLIAPRGYFKIRTGKSSIMRSDAPIGTCSSECITPNGSIPNDKPFQNVNRITYGACPRYVKQNTLKLATGMRNVPEKQTRGIFGAIAGFIENGWEGMVDGWYGFRHQNSEGTGQAADLKSTQAAIDQINGKLNRLIEKTNEKFHQIEKEFSEVEGRIQDLEKYVEDTKIDLWSYNAELLVALENQHTIDLTDSEMNKLFEKTRKQLRENAEDMGNGCFKIYHKCDNACIGSIRNGTYDHDVYRDEALNNRFQIKGVELKSGYKDWILWISFAISCFLLCVVLLGFIMWACQKGNIRCNICI

SEQ ID NO: 8613 - protein, 566 aa, synthetic construct
  REGION 1..566: note = hemagglutinin__InfluenzaA__AFG99778
MKTIIALSYILCLVFAQKLPGNDNSTATLCLGHHAVPNGTLVKTLTNDQIEVTNATELVQSSSTGKICDSPHRILDGKNCTLIDALLGDPHCDGLQNKEWDLFVERSKAYSNCYPYDVPDYASLRSLVASSGTLEFINEDFNWTGVAQDGGSYACKRGSVNSFFSRLNWLHKSEYKYPALNVTMPNNGKVDKLYIWGVHHPSTDRDQTSLYVRASGRVTVSTKRSQQTVIPNIGSRPWVRGQSSRISIYWTIVKPGDILLINSTGNLIAPRGYFKIRNGKSSIMRSDAPIGTCSSECITPNGSIPNDKPFQNVNRITYGACPRYVKQNTLKLATGMRNVPEKQTRGIFGAIAGFIENGWEGMVDGWYGFRHQNSEGTGQAADLKSTQAAIDQINGKLNRLIEKTNEKFHQIEKEFSEVEGRIQDLEKYVEDTKIDLWSYNAELLVALENQHTIDLTDSEMNKLFEKTRKQLRENAEDMGNGCFKIYHKCDNACIGSIRNGTYDHDVYRDEALNNRFQIKGVELKSGYKDWILWISFAISCFLLCVVLLGFIMWACQKGNIRCNICI

SEQ ID NO: 8614 - protein, 566 aa, synthetic construct; identical to SEQ ID NO: 8487
  REGION 1..566: note = hemagglutinin__InfluenzaA__AFG99789

SEQ ID NO: 8615 - protein, 566 aa, synthetic construct; identical to SEQ ID NO: 8602
  REGION 1..566: note = hemagglutinin__InfluenzaA__AFG99800

SEQ ID NO: 8616 - protein, 566 aa, synthetic construct
  REGION 1..566: note = hemagglutinin__InfluenzaA__AFG99811
MKTIIALSYILCLVFSQKLPGNDNSTATLCLGHHAVPNGTLVKTITNDQIEVTNATELVQNSSTGRICDSPHRILDGKNCTLIDALLGDPHCDDFQNKEWDLFVERSKAYSNCYPYDVPDYASLRSLVASSGTLEFINEDFNWTGVAQSGESYACKRGSVKSFFSRLNWLHESEYKYPALNVTMPNNGKFDKLYIWGVHHPSTDREQTSLYVRASGRVTVSTKRSQQTVIPNIGSRPWVRGLSSRISIYWTIVKPGDILLINSTGNLIAPRGYFKIRTGKSSIMRSDAPIGTCSSECITPNGSIPNDKPFQNVNRITYGACPRYVKQNTLKLATGMRNVPEKQTRGIFGAIAGFIENGWEGMVDGWYGFRHQNSEGTGQAADLKSTQAAIDQINGKLNRLIEKTNEKFHQIEKEFSEIEGRIQDLEKYVEDTKIDLWSYNAELLVALENQHTIDLTDSEMNKLFEKTRKQLRENAEDMGNGCFKIYHKCDNACIGSIRNGTYDHDVYRDEALNNRFQIKGVELKSGYKDWILWISFAISCFLLCVVLLGFIMWACQKGNIRCNICI

SEQ ID NO: 8617 - protein, 566 aa, synthetic construct; identical to SEQ ID NO: 8487
  REGION 1..566: note = hemagglutinin__InfluenzaA__AFG99822

SEQ ID NO: 8618 - protein, 566 aa, synthetic construct; identical to SEQ ID NO: 8487
  REGION 1..566: note = hemagglutinin__InfluenzaA__AFG99833

SEQ ID NO: 8619 - protein, 566 aa, synthetic construct; identical to SEQ ID NO: 8487
  REGION 1..566: note = hemagglutinin__InfluenzaA__AFG99844

SEQ ID NO: 8620 - protein, 566 aa, synthetic construct
  REGION 1..566: note = hemagglutinin__InfluenzaA__AFG99855
MKTIIALSYILCLVFAQKLPGNDNSTATLCLGHHAVPNGTLVKTITNDQIEVTNATELVQSSSTGRICDSPHRILDGKNCTLIDALLGDPHCDGFQNKEWDLFVERSKAYSNCYPYDVPDYASLRSLVASSGTLEFTNEDFNWTGVAQSGESYACKRGSVKSFFSRLNWLHESDYKYPALNVTMPNNGKFDKLYIWGVHHPSTDREQTSLYVRASGRVTVSTKRSQQTVIPNIGSRPWVRGLSSRISIYWTIVKPGDILLINSTGNLIAPRGYFKIRTGKSSIMRSDAPIGTCSSECITPNGSIPNDKPFQNVNRITYGACPRYVKQNTLKLATGMRNVPGKQTRGIFGAIAGFIENGWEGMVDGWYGFRHQNSEGTGQAADLKSTQAAIDQINGKLNRLIEKTNEKFHQIEKEFSEVEGRIQDLEKYVEDTKIDLWSYNAELLVALENQHTIDLTDSEMNKLFEKTRKQLRENAEDMGNGCFKIYHKCDNACIGSIRNGTYDHDVYRDEALNNRFQIKGVELKSGYKDWILWISFAISCFLLCVVLLGFIMWACQKGNIRCNICI

SEQ ID NO: 8621 - protein, 566 aa, synthetic construct; identical to SEQ ID NO: 8487
  REGION 1..566: note = hemagglutinin__InfluenzaA__AFG99866

SEQ ID NO: 8622 - protein, 566 aa, synthetic construct; identical to SEQ ID NO: 8487
  REGION 1..566: note = hemagglutinin__InfluenzaA__AFG99877

SEQ ID NO: 8623 - protein, 566 aa, synthetic construct
  REGION 1..566: note = hemagglutinin__InfluenzaA__AFG99888
MKTIIALSYILCLVFAQKLPGNDNSTATLCLGHHAVPNGTLVKTITNDQIEVTNATELVQSSSTGRICDSPHRILDGKNCTLIDALLGDPHCDGFQNKEWDLFVERSKAYSNCYPYDVPDYASLRSLVASSGTLEFINEDFNWTGVAQSGESYACKRGSVKSFFSRLNWLHESEYKYPALNVTMPNNDKFDKLYIWGVHHPSTDREQTSLYIRASGRVTVSTKRSQQTVIPNIGSRPWVRGLSSRISIYWTIVKPGDILLINSTGNLIAPRGYFKIRTGKSSIMRSDAPIGTCNSECITPNGSIPNDKPFQNVNRITYGACPRYVKQNTLKLATGMRNVPEKQTRGIFGAIAGFIENGWEGMVDGWYGFRHQNSEGTGQAADLKSTQAAIDQINGKLNRLIEKTNEKFHQIEKEFSEVEGRIQDLEKYVEDTKIDLWSYNAELLVALENQHTIDLTDSEMNKLFEKTRKQLRENAEDMGNGCFKIYHKCDNACIGSIRNGTYNHDVYRDEALNNRFQIKGVELKSGYKDWILWISFAISCFLLCVVLLGFIMWACQKGNIRCNICI

SEQ ID NO: 8624 - protein, 566 aa, synthetic construct; identical to SEQ ID NO: 8487
  REGION 1..566: note = hemagglutinin__InfluenzaA__AFG99899

SEQ ID NO: 8625 - protein, 566 aa, synthetic construct; identical to SEQ ID NO: 8487
  REGION 1..566: note = hemagglutinin__InfluenzaA__AFG99910

SEQ ID NO: 8626 - protein, 566 aa, synthetic construct; identical to SEQ ID NO: 8487
  REGION 1..566: note = hemagglutinin__InfluenzaA__AFG99921

SEQ ID NO: 8627 - protein, 566 aa, synthetic construct
  REGION 1..566: note = hemagglutinin__InfluenzaA__AFG99932
MKTIIALSYILCLVFAQKLPGNDNSTATLCLGHHAVPNGTLVKTITNDQIEVTNATELVQSSSTGRICDSPHRILDGKNCTLIDALLGDPHCDGFQNKEWDLFVERSKAYSNCYPYDVPDYASLRSLVASSGTLEFINEDFNWTGVAQSGESYACKRGSVKSFFSRLNWLHESEYKYPALNVTMPNNDKFDKLYIWGVHHPSTDREQTSLYIRASGRVTVSTKRSQQTVIPNIGSRPWVRGLSSRISIYWTIVKPGDILLINSTGNLIAPRGYFKIRTGKSSIMRSDAPIGTCSSECITPNGSIPNDKPFQNVNRITYGACPRYVKQNTLKLATGMRNVPEKQTRGIFGAIAGFIENGWEGMVDGWYGFRHQNSEGTGQAADLKSTQAAIDQINGKLNRLIEKTNEKFHQIEKEFSEVEGRIQDLEKYVEDTKIDLWSYNAELLVALENQHTIDLTDSEMNKLFEKTRKQLRENAEDMGNGCFKIYHKCDNACIGSIRNGTYDHDVYRDEALNNRFQIKGVELKSGYKDWILWISFAISCFLLCVVLLGFIMWACQKGNIRCNICI

SEQ ID NO: 8628 - protein, 566 aa, synthetic construct; identical to SEQ ID NO: 8487
  REGION 1..566: note = hemagglutinin__InfluenzaA__AFG99943

SEQ ID NO: 8629 - protein, 566 aa, synthetic construct
  REGION 1..566: note = hemagglutinin__InfluenzaA__AFG99954
MKTIIALSYILCLVFAQKLPGNDNSTATLCLGHHAVPNGTLVKTITNDQIEVTNATELVQSSSTGRICDSPHRILDGKNCTLIDALLGDPHCDGFQNKEWDLFVERSKAYSNCYPYDVPDYASLRSLVASSGTLEFINEDFNWTGVAQSGDSYACKRGSVKSFFSRLNWLHESEYKYPALNVTMPNNDKFDKLYIWGVHHPSTEREQTSLYIRASGRVTVSTKRSQQTVIPNIGFKPWVRGLSSRISIYWTIVKPGDILLINSTGNLIAPRGYFKIRTGKSSIMRSDAPIGTCSSECITPNGSIPNDKPFQNVNRITYGACPRYVKQNTLKLATGMRNVPEKQTRGIFGAIAGFIENGWEGMVDGWYGFRHQNSEGTGQAADLKSTQAAIDQINGKLNRLIEKTNEKFHQIEKEFSEVEGRIQDLEKYVEDTKIDLWSYNAELLVALENQHTIDLTDSEMNKLFEKTRKQLRENAEDMGNGCFKIYHKCDNACIGSIRNGTYDHDVYRDEALNNRFQIKGVELKSGYKDWILWISFAISCFLLCVVLLGFIMWACQKGNIRCNICI

SEQ ID NO: 8630 - protein, 566 aa, synthetic construct
  REGION 1..566: note = hemagglutinin__InfluenzaA__AFG99965
MKTIIALSYILCLAFAQKLPGNDNSTATLCLGHHAVPNGTLVKTITNDQIEVTNATELVQSSSTGRICDSPHRILDGKNCTLIDALLGDPHCDGFQNKEWDLFVERSKAYSNCYPYDVPDYASLRSLVASSGTLEFTNEDFNWTGVAQSGESYACKRGSVKSFFSRLNWLHESDYKYPALNVTMPNNGKFDKLYIWGVHHPSTDREQTSLYVRASGRVTVSTKRSQQTVIPNIGSRPWVRGLSSRISIYWTIVKPGDILLINSTGNLIAPRGYFKIRTGKSSIMRSDAPIGTCSSECITPNGSIPNDKPFQNVNRITYGACPRYVKQNTLKLATGMRNVPEKQTRGIFGAIAGFIENGWEGMVDGWYGFRHQNSEGTGQAADLKSTQAAIDQINGKLNRLIEKTNEKFHQIEKEFSEVEGRIQDLEKYVEDTKIDLWSYNAELLVALENQHTIDLTDSEMNKLFEKTRKQLRENAEDMGNGCFKIYHKCDNACIGSIRNGTYDHDVYRDEALNNRFQIKGVELKSGYKDWILWISFAISCFLLCVVLLGFIMWACQKGNIRCNICI

SEQ ID NO: 8631 - protein, 566 aa, synthetic construct; identical to SEQ ID NO: 8487
  REGION 1..566: note = hemagglutinin__InfluenzaA__AFG99976

SEQ ID NO: 8632 - protein, 566 aa, synthetic construct
  REGION 1..566: note = hemagglutinin__InfluenzaA__AFG99987
MKTIIALSYILCLVFAQKLPGNDNSTATLCLGHHAVPNGTLVKTITNDQIEVTNATELVQSSSTGRICDSPHRILDGKNCTLIDALLGDPHCDGFQNKEWDLFVERSKAYSNCYPYDVPDYASLRSLVASSGTLEFINEDFNWTGVAQNGDSYACKRGSVKSFFSRLNWLHESEYKYPALNVTMPNNDKFDKLYIWGVHHPSTDREQTSLYIRASGRVTVSTKRSQQTVIPNIGSRPWVRGLSSRISIYWTIVKPGDILLINSTGNLIAPRGYFKIRTGKSSIMRSDAPIGTCSSECITPNGSIPNDKPFQNVNRITYGACPRYVKQNTLKLATGMRNVPEKQTRGIFGAIAGFIENGWEGMVDGWYGFRHQNSEGTGQAADLKSTQAAIDQINGKLNRLIEKTNEKFHQIEKEFSEVEGRIQDLEKYVEDTKIDLWSYNAELLVALENQHTIDLTDSEMNKLFEKTRKQLRENAEDMGNGCFKIYHKCDNACIGSIRNGTYDHDVYRDEALNNRFQIKGVELKSGYKDWILWISFAISCFLLCVVLLGFIMWACQKGNIRCNICI

SEQ ID NO: 8633 - protein, 566 aa, synthetic construct
  REGION 1..566: note = hemagglutinin__InfluenzaA__AFG99998
MKTIIALSYILCLVFAQKLPGNDNSTATLCLGHHAVPNGTLVKTITNDQIEVTNATELVQSSSTGRICDSPHRILDGKNCTLIDALLGDPHCDGFQNKEWDLFVERSKAYSNCYPYDVPDYASLRSLVASSGTLEFINEDFNWTGVAQDGGSYACKRGSVNSFFSRLNWLHKLEYKYPALNVTMPNNGKFDKLYIWGVHHPSTDSDQTSLYVRASGRVTVSTKRSQQTVTPNIGSRPWVRGLSSRISIYWTIVKPGDILLINSTGNLIAPRGYFKIRNGKSSIMRSDAPIGNCSSECITPNGSIPNDKPFQNVNRITYGACPRYVKQNTLKLATGMRNVPEKQTRGIFGAIAGFIENGWEGMVDGWYGFRHQNSEGTGQAADLKSTQAAIDQINGKLNRLIEKTNEKFHQIEKEFSEVEGRIQDLEKYVEDTKIDLWSYNAELLVALENQHTIDLTDSEMNKLFEKTRKQLRENAEDMGNGCFKIYHKCDNACIGSIRNGTYDHDVYRDEALNNRFQIKGVELKSGYKDWILWISFAISCFLLCVVLLGFIMWACQKGNIRCNICI

SEQ ID NO: 8634 - protein, 566 aa, synthetic construct; identical to SEQ ID NO: 8602
  REGION 1..566: note = hemagglutinin__InfluenzaA__AFH00021

SEQ ID NO: 8635 - protein, 566 aa, synthetic construct
  REGION 1..566: note = hemagglutinin__InfluenzaA__AFH00032
MKTIIALSYILCLVFAQKLPGNDNSTATLCLGHHAVPNGTLVKTITNDQIEVTNATELVQSSSTGKICDSPHRILDGKNCTLIDALLGDPHCDDFQNKEWDLFVERSKAYSNCYPYDVPDYASLRSLVASSGTLEFINEDFNWTGVAQSGDSYACKRGSVKSFFSRLNWLHESEYKYPALNVTMPNNDKFDKLYIWGVHHPSTDREQTSLYIRASGRVTVSTKRSQQTVIPNIGSRPWVRGLSSRISIYWTIVKPGDILLINSTGNLIAPRGYFKIRTGKSSIMRSDAPIGTCSSECITPNGSIPNDKPFQNVNRITYGACPRYVKQNTLKLATGMRNVPEKQTRGIFGAIAGFIENGWEGMVDGWYGFRHQNSEGTGQAADLKSTQAAIDQINGKLNKLIEKTNEKFHQIEKEFSEVEGRIQDLEKYVEDTKIDLWSYNAELLVALENQHTIDLTDSEMNKLFEKTRKQLRENAEDMGNGCFKIYHKCDNACIGSIRNGTYDHDVYRDEALNNRFQIKGVELKSGYKDWILWISFAISCFLLCVVLLGFIMWACQKGNIRCNICI

SEQ ID NO: 8636 - protein, 566 aa, synthetic construct
  REGION 1..566: note = hemagglutinin__InfluenzaA__AFH00043
MKTIIALSYILCLVFAQKLPGNDNSTATLCLGHHAVPNGTLVKTITNDQIEVTNATELVQSSSTGKICDSPHRILDGKNCTLIDALLGDPHCDDFQNKEWDLFVERSKAYSNCYPYDVPDYASLRSLVASSGTLEFINEDFNWTGVAQSGDSYACKRGSVKSFFSRLNWLHESEYKYPALNVTMPNNDKFDKLYIWGVHHPSTDREQTSLYIRASGRVTVSTKRSQQTVIPNIGSRPWVRGLSSRISIYWTIVKPGDILLINSTGNLIAPRGYFKIRTGKSSIMRSDATIGTCSSECITPNGSIPNDKPFQNVNRITYGACPRYVKQNTLKLATGMRNVPEKQTRGIFGAIAGFIENGWEGMVDGWYGFRHQNSEGTGQAADLKSTQAAIDQINGKLNKLIEKTNEKFHQIEKEFSEVEGRIQDLEKYVEDTKIDLWSYNAELLVALENQHTIDLTDSEMNKLFEKTRKQLRENAEDMGNGCFKIYHKCDNACIGSIRNGTYDHDVYRDEALNNRFQIKGVELKSGYKDWILWISFAISCFLLCVVLLGFIMWACQKGNIRCNICI

SEQ ID NO: 8637 - protein, 566 aa, synthetic construct
  REGION 1..566: note = hemagglutinin__InfluenzaA__AFH00054
MKTIIALSYILCLVFAQKLPGNDNSTATLCLGHHAVPNGTLVKTITNDQIEVTNATELVQSSSTGRICDSPHRILDGKNCTLIDALLGDPHCDGFQNKEWDLFVERSKAYSNCYPYDVPDYASLRSLVASSGTLEFINEDFNWTGVAQNGDSYACKRGSVKSFFSRLNWLHESEYKYPALNVTMPNNDKFDKLYIWGVHHPSTDREQTSLYIRASGRVTVSTKRSQQTVIPNIGSRPWVRGLSSRISIYWTIVKPGDILLINSTGNLIAPRGYFKIRTGKSSIMRSDAPIGTCSSECITPNGSIPNDKPFQNVNRITYGACPRYVKQNTLKLATGMRNVPEKQTRGIFGAIAGFIENGWEGMVDGWYGFRHQNSEGTGQAADLKSTQAAIDQINGKLNRLIEKTNEKFHQIEKEFSEVEGRIQDLEKYVEDTKIDLWSYNAELLVALENQHTIDLTDSEMNKLFEKTRKQLRENAEDMGNGCFKIYHKCDNACIGSIRNGTYDHDVYRDEALNNRFHIKGVELKSGYKDWILWISFAISCFLLCVVLLGFIMWACQKGNIRCNICI

SEQ ID NO: 8638 - protein, 566 aa, synthetic construct
  REGION 1..566: note = hemagglutinin__InfluenzaA__AFH00065
MKTIIALSYILCLVFAQKLPGNDNSTATLCLGHHAVPNGTLVKTITNDQIEVTNATELVQSSSTGRICDSPHRILDGKNCTLIDALLGDPHCDGFQNKEWDLFVERSKAYSNCYPYDVPDYASLRSLVASSGTLEFINEDFNWTGVAQDGGSYACKRGSVNSFFSRLNWLHKLEYKYPALNVTMPNNGKFDKLYIWGVHHPSTDSDQTSLYVRASGRVTVSTKRSQQTVIPNIGSRPWVRGQPSRISIYWTIVKPGDILLINSTGNLIAPRGYFKIRNGKSSIMRSDAPIGNCSSECITPNGSIPNDKPFQNVNRITYGACPRYVKQNTLKLATGMRNVPEKQTRGIFGAIAGFIENGWEGMVDGWYGFRHQNSEGTGQAADLKSTQAAIDQINGKLNRLIEKTNEKFHQIEKEFSEVEGRIQDLEKYVEDTKIDLWSYNAELLVALENQHTIDLTDSEMNKLFERTRKQLRENAEDMGNGCFKIYHKCDNACIGSIRNGTYDHDVYRDEALNNRFQIKGVELKSGYKDWILWISFAISCFLLCVVLLGFIMWACQKGNIRCNICI

SEQ ID NO: 8639 - protein, 566 aa, synthetic construct
  REGION 1..566: note = hemagglutinin__InfluenzaA__AFH00076
MKTIIALSYILCLVFAQKLPGNDNSTATLCLGHHAVPNGTLVKTITNDQIEVTNATELVQSSSTGKICDSPHRILDGKNCTLIDALLGDPHCDDFQNKEWDLFVERSKAYSNCYPYDVPDYASLRSLVASSGTLEFINEDFNWTGVAQSGDSYACKRGSVKSFFSRLNWLHESEYKYPALNVTMPNNDKFDKLYIWGVHHPSTDREQTSLYIRASGRVTVSTKRSQQTVIPNIGSRPWVRGLSSRISIYWTIVKPGDILLINSTGNLIAPRGYFKIRTGKSSIMRSDAPIGTCNSECITPNGSIPNDKPFQNVNRITYGACPRYVKQNTLKLATGMRNVPEKQTRGIFGAIAGFIENGWEGMVDGWYGFRHQNSEGTGQAADLKSTQAAIDQINGKLNRLIEKTNEKFHQIEKEFSEVEGRIQDLEKYVEDTKIDLWSYNAELLVALENQHTIDLTDSEMNKLFEKTRKQLRENAEDMGNGCFKIYHKCDNACIGSIRNGTYDHDVYRDEALNNRFQIKGVELKSGYKDWILWISFAISCFLLCVVLLGFIMWACQKGNIRCNICI

SEQ ID NO: 8640 - protein, 566 aa, synthetic construct
  REGION 1..566: note = hemagglutinin__InfluenzaA__AFH00087
MKTIIALSYILCLVFAQKLPGNDNSTATLCLGHHAVPNGTLVKTITNDQIEVTNATELVQSSSTGRICDSPHRILDGKNCTLIDALLGDPHCDGFQNKEWDLFVERSEAYSSCYPYDVPDYASLRSLVASSGTLEFINEDFNWTGVAQDGKSYACKRGSVNSFFSRLNWLHKLEYKYPALNVTMPNNGKFDKLYIWGVHHPSTDSDQTSLYVRASGRVTVSTKRSQQTVIPNIGSRPWVRGQSSRIGIYWTIVKPGDILLINSTGNLIAPRGYFKIRNGKSSIMRSDAPIGNCSSECITPNGSIPNDKPFQNVNKITYGACPRYVKQNTLKLATGMRNVPEKQTRGIFGAIAGFIENGWEGMVDGWYGFRHQNSEGTGQAADLKSTQAAIDQINGKLNRLIEKTNEKFHQIEKEFSEVEGRIQDLEKYVEDTKIDLWSYNAELLVALENQHTIDLTDSEMNKLFERTRKQLRENAEDMGNGCFKIYHKCDNACIGSIRNGTYDHDVYRDEALNNRFQIKGVELKSGYKDWILWISFAISCFLLCVVLLGFIMWACQKGNIRCNICI

SEQ ID NO: 8641 - protein, 566 aa, synthetic construct
  REGION 1..566: note = hemagglutinin__InfluenzaA__AFH00098
MKTIIALSYILCLVFAQKLPGNDNSTATLCLGHHAVPNGTLVKTITNDQIEVTNATELVQSSSTGRICDSPHRILDGKNCTLIDALLGDPHCDGFQNKEWDLFVERSKAYSNCYPYDVPDYASLRSLVASSGTLEFINEDFNWTGVAQDGGSYACKRGSVNSFFSRLNWLHKLEYKYPALNVTMPNNGKFDKLYIWGVHHPSTDSDQTSLYVRASGRVTVSTKRSQQTVIPNIGSRPWVRGLPSRISIYWTIVKPGDILLINSTGNLIAPRGYFKIRNGKSSIMRSDAPIGNCSSECITPNGSIPNDKPFQNVNRITYGACPRYVKQNTLKLATGMRNVPEKQTRGIFGAIAGFIENGWEGMVDGWYGFRHQNSEGTGQAADLKSTQAAIDQINGKLNRLIEKTNEKFHQIEKEFSEVEGRIQDLEKYVEDTKIDLWSYNAELLVALENQHTIDLTDSEMNKLFERTRKQLRENAEDMGNGCFKIYHKCDNACIGSIRNGTYDHDVYRDEALNNRFQIKGVELKSGYKDWILWISFAISCFLLCVVLLGFIMWACQKGNIRCNICI

SEQ ID NO: 8642 - protein, 566 aa, synthetic construct
  REGION 1..566: note = hemagglutinin__InfluenzaA__AFH00109
MKTIIALSYILCLVFAQKLPGNDNSTATLCLGHHAVPNGTLVKTITNDQIEVTNATELVQSSSTGRICDSPHRILDGKNCTLIDALLGDPHCDGFQNKEWDLFVERSKAYSNCYPYDVPDYASLRSLVASSGTLEFINEDFNWTGVAQDGKSYTCKRGSVNSFFSRLNWLHKLEYKYPALNVTMPNNGKFDKLYIWGVHHPSTDSDQTSLYVRASGRVTVSTKRSQQTVIPNIGFRPWVRGLSSRISIYWTIVKPGDILLINSTGNLIAPRGYFKIRNGKSSIMRSDAPIGNCSSECITPNGSIPNDKPFQNVNRITYGACPRYVKQNTLKLATGMRNVPEKQTRGIFGAIAGFIENGWEGMVDGWYGFRHQNSEGTGQAADLKSTQAAIDQINGKLNRLIEKTNEKFHQIEKEFSEVEGRIQDLEKYVEDTKIDLWSYNAGLLVALENQHTIDLTDSEMNKLFERTRKQLRENAEDMGNGCFKIYHKCDNACIGSIRNGTYDHDVYRDEALNNRFQIKGVELKSGYKDWILWISFAISCFLLCVVLLGFIMWACQKGNIRCNICI

SEQ ID NO: 8643 - protein, 566 aa, synthetic construct
  REGION 1..566: note = hemagglutinin__InfluenzaA__AFH00120
MKTIIALSYILCLVFAQKLPGNDNSTATLCLGHHAVPNGTLVKTITNDQIEVTNATELVQSSSTGRICDSPHRILDGKNCTLIDALLGDPHCDGFQNKEWDLFVERSKAYSNCYPYDVPDYASLRSLVASSGTLEFINEDFNWTGVAQDGKSYACKRGSVNSFFSRLNWLHKLEYKYPALNVTMPNNGKFDKLYIWGVHHPSTDSDQTSLYVRASGRVTVSTKRSQQTVIPNIGFRPWVRGLSSRISIYWTIVKPGDILLINSTGNLIAPRGYFKIRNGKSSIMRSDAPIGNCSSECITPNGSIPNDKPFQNVNRITYGACPRYVKQNTLKLATGMRNVPEKQTRGIFGAIAGFIENGWEGMVDGWYGFRHQNSEGTGQAADLKSTQAAIDQINGKLNRLIEKTNEKFHQIEKEFSEVEGRIQDLEKYVEDTKIDLWSYNAGLLVALENQHTIDLTDSEMNKLFERTRKQLRENAEDMGNGCFKIYHKCDNACIGSIRNGTYDHDVYRDEALNNRFQIKGVELKSGYKDWILWISFAISCFLLCVVLLGFTMWACQKGNIRCNICI

SEQ ID NO: 8644 - protein, 566 aa, synthetic construct; identical to SEQ ID NO: 8498
  REGION 1..566: note = hemagglutinin__InfluenzaA__AFH00131

SEQ ID NO: 8645 - protein, 566 aa, synthetic construct
  REGION 1..566: note = hemagglutinin__InfluenzaA__AFH00153
MKTIIALSYILCLVFAQKLPGNDNSTATLCLGHHAVPNGTLVKTITNDQIEVTNATELVQSSSTGRICDSPHRILDGKNCTLIDALLGDPHCDGFQNKEWDLFVERSKAYSNCYPYDVPDYASLRSLVASSGTLEFINEDFNWTGVAQDGKSYACKRGSVNSFFSRLNWLHKLEYKYPALNVTMPNNGKFDKLYIWGVHHPSTDSDQTSLYIRASGRVTVSTKRSQQTVIPNIGSRPWVRGLSSRISIYWTIVKPGDILLINSTGNLIAPRGYFKIRNGKSSIMRSDAPIGNCSSECITPNGSIPNDKPFQNVNRITYGACPRYVKQNTLKLATGMRNVPEKQTRGIFGAIAGFIENGWEGMVDGWYGFRHQNSEGTGQAADLKSTQAAIDQINGKLNRLIEKTNEKFHQIEKEFSEVEGRIQDLEKYVEDTKIDLWSYNAELLVALENQHTIDLTDSEMNKLFERTRKQLRENAEDMGNGCFKIYHKCDNACIGSIRNGTYDHDVYRDEALNNRFQIKGVELKSGYKDWILWISFAISCFLLCVVLLGFIMWACQKGNIRCNICI

SEQ ID NO: 8646 - protein, 566 aa, synthetic construct
  REGION 1..566: note = hemagglutinin__InfluenzaA__AFH00164
MKTIIALSYILCLVFAQKLPGNDNSTATLCLGHHAVPNGTLVKTITNDQIEVTNATELVQSSSTGRICDSPHRILDGKNCTLMDALLGDPHCDGFQNKEWDLFVERSKAYSNCYPYDVPDYASLRSLVASSGTLEFINEDFNWTGVAQNGDSYACKRGSVKSFFSRLNWLHESEYKYPALNVTMPNNDKFDKLYIWGVHHPSTDREQTSLYIRASGRVTVSTKRSQQTVIPNIGSRPWVRGLSSRISIYWTIVKPGDILLINSTGNLIAPRGYFKIRTGKSSIMRSDAPIGTCSSECITPNGSIPNDKPFQNVNRITYGACPRYVKQNTLKLATGMRNVPEKQTRGIFGAIAGFIENGWEGMVDGWYGFRHQNSEGTGQAADLKSTQAAIDQINGKLNRLIEKTNEKFHQIEKEFSEVEGRIQDLEKYVEDTKIDLWSYNAELLVALENQHTIDLTDSEMNKLFEKTRKQLRENAEDMGNGCFKIYHKCDNACIGSIRNGTYDHDVYRDEALNNRFQIKGVELKSGYKDWILWISFAISCFLLCVVLLGFIMWACQKGNIRCNICI

SEQ ID NO: 8647 - protein, 566 aa, synthetic construct
  REGION 1..566: note = hemagglutinin__InfluenzaA__AFH00175
MKTIIALSYILCLVFAQKLPGNDNSTATLCLGHHAVPNGTLVKTITNDQIEVTNATELVQSSSTGRICDSPHRILDGKNCTLIDALLGDPHCDGFQNKEWDLFVERSKAYSNCYPYDVPDYASLRSLVASSGTLEFINEDFNWTGVAQDGKSYACKRGSVKSFFSRLNWLHKLEYKYPALNVTMPNNGKFDKLYIWGVHHPSTDSDQTSLYVRASGRVTVSTKKSQQTVIPNIGSRPWVRGQSSRISIYWTIVKPGDILLINSTGNLIAPRGYFKIRNGKSSIMRSDAPIGNCSSECITPNGSIPNDKPFQNVNRITYGACPRYVKQNTLKLATGMRNVPEKQTRGIFGAIAGFIENGWEGMVDGWYGFRHQNSEGTGQAADLKSTQAAIDQINGKLNRLIEKTNEKFHQIEKEFSEVEGRIQDLEKYVEDTKIDLWSYNAELLVALENQHTIDLTDSEMNKLFERTRKQLRENAEDMGNGCFKIYHKCDNACIGSIRNGTYDHDVYRDEALNNRFQIKGVELKSGYKDWILWISFAISCFLLCVVLLGFIMWACQKGNIRCNICI

SEQ ID NO: 8648 - protein, 566 aa, synthetic construct
  REGION 1..566: note = hemagglutinin__InfluenzaA__AFH00186
MKTIIALSHILCLVFAQKLPGNDNSTATLCLGHHAVPNGTLVKTITNDQIEVTNATELVQSSSTGRICDSPHRILDGKNCTLIDALLGDPHCDGFQNKEWDLFVERSKAYSNCYPYDVPDYASLRSLVASSGTLEFINEDFNWTGVAQDGGSYACKRGSVNSFFSRLNWLHKLEYKYPALNVTMPNNGKFDKLYIWGVHHPSTDSDQTSLYVRASGRVTVSTKRSQQTVTPNIGSRPWVRGQSSRISIYWTIVKPGDILLISSTGNLIAPRGYFKIRNGKSSIMRSDVPIGNCSSECITPNGSIPNDKPFQNVNRITYGACPRYVKQNTLKLATGMRNVPEKQTRGIFGAIAGFIENGWEGMVDGWYGFRHQNSEGTGQAADLKSTQAAIDQINGKLNRLIEKTNEKFHQIEKEFSEVEGRIQDLEKYVEDTKIDLWSYNAELIVALENQHTIDLTDSEMNKLFEKTRKQLRENAEDMGNGCFKIYHKCDNACIGSIRNGTYDHDVYRDEALNNRFQIKGVELKSGYKDWILWISFAISCFLLCVVLLGFIMWACQKGNIRCNICI

SEQ ID NO: 8649 - protein, 566 aa, synthetic construct
  REGION 1..566: note = hemagglutinin__InfluenzaA__AFH00197
MKTIIALSYILCLVFAQKLPGNDNSTATLCLGHHAVPNGTLVKTITNDQIEVTNATELVQSSSTGRICDSPHRILDGKNCTLIDALLGDPHCDGFQNKEWDLFVERSKAYSNCYPYDVPDYASLRSLVASSGTLEFINEDFNWTGVAQDGGSYTCKRGSVNSFFSRLNWLHKLEYKYPALNVTMPNNGKFDKLYIWGVHHPSTDSDQTSLYVRASGRVTVSTKISQQTVIPNIGSRPWVRGLSSRISIYWTIVKPGDILLINSTGNLIAPRGYFKIRNGKSSIMRSDAPIGNCSSECITPNGSIPNDKPFQNVNRITYGACPRYVKQNTLKLATGMRNVPEKQTRGIFGAIAGFIENGWEGMVDGWYGFRHQNSEGTGQAADLKSTQAAIDQINGKLNRLIEKTNEKFHQIEKEFSEVEGRIQDLEKYVEDTKIDLWSYNAELLVALENQHTIDLTDSEMNKLFERTRKQLRENAEDMGNGCFKIYHKCDNACIGSIRNGTYDHDVYRDEALNNRFQIKGVELKSGYKDWILWISFAISCFLLCVVLLGFIMWACQKGNIRCNICI

SEQ ID NO: 8650 - protein, 566 aa, synthetic construct
  REGION 1..566: note = hemagglutinin__InfluenzaA__AFH00208
MKTIIALSYILCLVFAQKLPGNDNSTATLCLGHHAVPNGTLVKTITNDQIEVTNATELVQSSSTGRICDSPHRILDGKNCTLIDALLGDPHCDGFQNKEWDLFVERSKAYSNCYPYDVPDYASLRSLVASSGTLEFINEDFNWTGVAQNGDSYACKRGSVKSFFSRLNWLHESEYKYPALNVTMPNNDKFDKLYIWGVHHPSTDREQTSLYIRASGRVTVSTKRSQQTVIPNIGSRPWVRGLSSRISIYWTIVKPGDILLINSTGNLIAPRGYFKIRTGKSSVMRSDAPIGTCSSECITPNGSIPNDKPFQNVNRITYGACPRYVKQNTLKLATGMRNVPEKQTRGIFGAIAGFIENGWEGMVDGWYGFRHQNSEGTGQAADLKSTQAAIDQINGKLSRLIEKTNEKFHQIEKEFSEVEGRIQDLEKYVEDTKIDLWSYNAELLVALENQHTIDLTDSEMNKLFEKTRKQLRENAEDMGNGCFKIYHKCDNACIGSIRNGTYDHDVYRDEALNNRFQIKGVELKSGYKDWILWISFAISCFLLCVVLLGFIMWACQKGNIRCNICI

SEQ ID NO: 8651 - protein, 566 aa, synthetic construct
  REGION 1..566: note = hemagglutinin__InfluenzaA__AFH00219
MKTIIALSYILCLVFAQKLPGNDNSTATLCLGHHAVPNGTLVKTITNDQIEVTNATELVQSSSTGRICDSPHRILDGKNCTLIDALLGDPNCDGFQNKEWDLFVERSKAYSNCYPYDVPDYASLRSLVASSGTLEFTNEDFNWTGVAQDGGSYACKRGSVNSFFSRLNWLHKLEYKYPALNVTMPNNGKFDKLYIWGVHHPSTDSDQTSLYVRASGRVTVSTKRSQQTVTPNIGSRPWVRGLSSRISIYWTIVKPGDILLINSTGNLIAPRGYFKIRNGKSSIMRSDAPIGTCSSECITPNGSIPNDKPFQNVNRITYGACPRYVKQNTLKLATGMRNVPEKQTRGIFGAIAGFIENGWEGMVDGWYGFRHQNSEGTGQAADLKSTQAAIDQINGKLNRLIDKTNEKFHQIEKEFSEVEGRIQDLEKYVEDTKIDLWSYNAELLVALENQHTIDLTDSEMNKLFEKTRKQLRENAEDMGNGCFKIYHKCDNACIGSIRNGTYDHDVYRDEALNNRFQIKGVELKSGYKDWILWISFAISCFLLCVVLLGFIMWACQKGNIRCNICI

SEQ ID NO: 8652 - protein, 566 aa, synthetic construct
  REGION 1..566: note = hemagglutinin__InfluenzaA__AFH00230
MKTIIALSYILCLVFAQKLPGNDNSTATLCLGHHAVPNGTLVKTITNDQIEVTNATELVQSSSTGRICDSPHRILDGKNCTLIDALLGDPHCDGFQNKEWDLFVERSKAYSNCYPYDVPDYASLRSLVASSGTLEFINEDFNWTGVAQDGKSYACKRGSVKSFFSRLNWLHKLEYKYPALNVTMPNNGKFDKLYIWGVHHPSTNSDQTSLYVRASGRVTVSTKRSQQTVIPNIGFRPWVRGLSSRISIYWTIVKPGDILLINSTGNLIAPRGYFKIRNGKSSIMRSDAPIGNCSSECITPNGSIPNDKPFQNVNRITYGACPRYVKQNTLKLATGMRNVPEKQTRGIFGAIAGFIENGWEGMVDGWYGFRHQNSEGTGQAADLKSTQAAIDQINGKLNRLIEKTNEKFHQIEKEFSEVEGRIQDLEKYVEDTKIDLWSYNAGLLVALENQHTIDLTDSEMNKLFERTRKQLRENAEDMGNGCFKIYHKCDNACIGSIRNGTYDHDVYRDEALNNRFQIKGVELKSGYKDWILWISFAISCFLLCVVLLGFIMWACQKGNIRCNICI

SEQ ID NO: 8653 - protein, 566 aa, synthetic construct; identical to SEQ ID NO: 1024
  REGION 1..566: note = hemagglutinin__InfluenzaA__AFH00241

SEQ ID NO: 8654 - protein, 566 aa, synthetic construct
  REGION 1..566: note = hemagglutinin__InfluenzaA__AFH00252
MKTIIALSYILCLVFAQKLPGNDNSTATLCLGHHAVPNGTLVKTITNDQIEVTNATELVQSSSTGRICDSPHRILDGKNCTLIDALLGDPHCDDFQNKEWDLFVERSKAYSNCYPYDVPDYASLRSLVASSGTLEFINEDFNWTGVAQSGDSYACKRGSVKSFFSRLNWLHESEYKYPALNVTMPNNDKFDKLYIWGVHHPSTDREQTSLYIRASGRVTVSTKRSQQTVIPNIGSRPWVRGLSSRISIYWTIVKPGDILLINSTGNLIAPRGYFKIRTGKSSIMRSDAPIGTCSSECITPNGSIPNDKPFQNVNRITYGACPRYVKQNTLKLATGMRNVPEKQTRGIFGAIAGFIENGWEGMVDGWYGFRHQNSEGTGQAADLKSTQAAIDQINGKLNRLIEKTNEKFHQIEKEFSEVEGRIQDLEKYVEDTKIDLWSYNAELLVALENQHTIDLTDSEMNKLFEKTRKQLRENAEDMGNGCFKIYHKCDNACIGSIRNGTYDHDVYRDEALNNRFQIKGVELKSGYKDWILWISFAISCFLLCVVLLGFIMWACQKGNIRCNICI

SEQ ID NO: 8655 - protein, 566 aa, synthetic construct
  REGION 1..566: note = hemagglutinin__InfluenzaA__AFH00263
MKTIIALSYILHLVFAQKLPGNDNSTATLCLGHHAVPNGTLVKTITNDQIEVTNATELVQSSSTGRICDSPHRILDGKNCTLIDALLGDPNCDGFQNKEWDLFVERSKAYSNCYPYDVPDYASLRSLVASSGTLEFTNEDFNWTGVAQDGGSYACKRGSVNSFFSRLNWLHKLEYKYPALNVTMPNNGKFDKLYIWGVHHPSTDSVQTSLYVRASGKVTVSTKRSQQTVTPNIGSKPWVRGLSSRISIYWTIVKPGDILLINSTGNLIAPRGYFKIRNGKSSIMRSDAPIGTCSSECITPNGSIPNDKPFQNVNRITYGACPRYVKQNTLKLATGMRNVPEKQTRGIFGAIAGFIENGWEGMVDGWYGFRHQNSEGTGQAADLKSTQAAIDQINGKLNRLIEKTNEKFHQIEKEFSEVEGRIQDLEKYVEDTKIDLWSYNAELLVALENQHTIDLTDSEMNKLFEKTRKQLRENAEDMGNGCFKIYHKCDNACIGSIRNGTYDHDVYRDEALNNRFQIKGVELKSGYKDWILWISFAISCFLLCVVLLGFIMWACQKGNIRCNICI

SEQ ID NO: 8656 - protein, 566 aa, synthetic construct
  REGION 1..566: note = hemagglutinin__InfluenzaA__AFH00274
MKTIIALSYILCLVFAQKLPGNDNSTATLCLGHHAVPNGTLVKTITNDQIEVTNATELVQSSSTGRICDSPHRILDGKNCTLIDALLGDPHCDGFQNKEWDLFVERSKAYSNCYPYDVPDYASLRSLVASSGTLEFINEDFNWTGVAQDGKSYACKRGSVNSFFSRLNWLHKLEYKYPALNVTMPNNGKFDKLYIWGVHHPSTDSDQTSLYVRASGRVTVSTKRSQQTVIPNIGFRPWVRGLSSGISIYWTIVKPGDILLINSTGNLIAPRGYFKIRNGKSSIMRSDAPIGNCSSECITPNGSIPNDKPFQNVNRITYGACPRYVKQNTLKLATGMRNVPEKQTRGIFGAIAGFIENGWEGMVDGWYGFRHQNSEGTGQAADLKSTQAAIDQINGKLNRLIEKTNEKFHQIEKEFSEVEGRIQDLEKYVEDTKIDLWSYNAGLLVALENQHTIDLTDSEMNKLFERTRKQLRENAEDMGNGCFKIYHKCDNACIGSIRNGTYDHDVYRDEALNNRFQIKGVELKSGYKDWILWISFAISCFLLCVVLLGFIMWACQKGNIRCNICI

SEQ ID NO: 8657 - protein, 566 aa, synthetic construct
  REGION 1..566: note = hemagglutinin__InfluenzaA__AFH00285
MKTIIALSYILCLVFAQKLPGNDNSTATLCLGHHAVPNGTLVKTITNDQIEVTNATELVQSSSTGRICGSPHRILDGKNCTLIDALLGDPHCDGFQNKEWDLFVERSKAYSNCYPYDVPDYASLRSLVASSGTLEFINEDFNWTGVAQDGGSYACKRGSVNSFFSRLNWLHKLEYKYPALNVTMPNNGKFDKLYIWGVHHPSTDSDQTSLYVRASGRVTVSTKRSQQTVTPNIGSRPWVRGQSSRISIYWTIVKPGDILLINSTGNLIAPRGYFKIRNGKSSIMRSDAPIGNCSSECITPNGSIPNDKPFQNVNRITYGACPRYVKQNTLKLATGMRNVPEKQTRGIFGAIAGFIENGWEGMVDGWYGFRHQNSEGTGQAADLKSTQAAIDQINGKLNRLIEKTNEKFHQIEKEFSEVEGRIQDLEKYVEDTKIDLWSYNAELLVALENQHTIDLTDSEMNKLFEKTRKQLRENAEDMGNGCFKIYHKCDNACIGSIRNGTYDHDVYRDEALNNRFQIKGVELKSGYKDWILWISFAISCFLLCVVLLGFIMWACQKGNIRCNICI

SEQ ID NO: 8658 - protein, 566 aa, synthetic construct
  REGION 1..566: note = hemagglutinin__InfluenzaA__AFH00296
MKTIIALSYIFCLVFAQKLPGNDNSTATLCLGHHAVPNGTLVKTITNDQIEVTNATELVQSSSTGRICDSPHRILDGKNCTLIDALLGDPHCDGFQNKEWDLFVERSKAYSNCYPYDVPDYASLRSLVASSGTLEFINEDFNWTGVAQSGGSYACKRGSVNSFFSRLNWLHESEYKYPALNVTMPNNGKFDKLYIWGVHHPSTDREQTNLYVRASGRVTVSTKRSQQTVIPNIGSRPWVRGLSSRISIYWTIVKPGDILLINSTGNLIAPRGYFKIRTGKSSIMRSDAPIGTCSSECITPNGSIPNDKPFQNVNRITYGACPRYVKQNTLKLATGMRNVPEKQTRGIFGAIAGFIENGWEGMVDGWYGFRHQNSEGTGQAADLKSTQAAIDQINGKLNRLIEKTNEKFHQIEKEFSEVEGRIQDLEKYVEDTKIDLWSYNAELLVALENQHTIDLTDSEMNKLFEKTRKQLRENAEDMGNGCFKIYHKCDNACIGSIRNGTYDHDVYRDEALNNRFQIKGVELKSGYKDWILWISFATSCFLLCVVLLGFIMWACQKGNIRCNICI

SEQ ID NO: 8659 - protein, 566 aa, synthetic construct
  REGION 1..566: note = hemagglutinin__InfluenzaA__AFH00307
MKTIIALSYILCLVFAQKLPGNDNSTATLCLGHHAVPNGTLVKTITNDQIEVTNATELVQSSSTGRICDSPHRILDGKNCTLIDALLGDPHCDGFQNKEWDLFVERSKAYSNCYPYDVPDYASLRSLVASSGTLEFINEDFNWTGVAQDGGSYACKRGSVNSFFSRLNWLHKLEYKYPALNVTMPNNGKFDKLYIWGVHHPSTDSDQTSLYVRASGRVTVSTKRSQQTVTPNIGSRPWVRGQSSRISIYWTIVKPGDILLINSTGNLIAPRGYFKIRNGKSSIMRSDAPIGNCSSECITPNGSIPNDKPFQNVNRITYGACPRYVKQNTLKLATGMRNVPEKQTRGIFGAIAGFIENGWEGMVDGWYGFRHQNSEGTGQAADLKSTQAAIDQINGKLNRLIEKTNEKFHQIEKEFSEVEGRIQDLEKYVEDTKIDLWSYNAELLVALENQHTIDLTDSEMNKLFEKTRKQLRENAEDMGNGCFKIYHKCDNACIGSIRNGTYDHDVYRDEALNNRFQIKGVELKSGYKDWILWISFAISCFLLCVVLLGFIMWACQKGNIRCNICI

SEQ ID NO: 8660 - protein, 566 aa, synthetic construct; identical to SEQ ID NO: 8659
  REGION 1..566: note = hemagglutinin__InfluenzaA__AFH00318

SEQ ID NO: 8661 - protein, 566 aa, synthetic construct
  REGION 1..566: note = hemagglutinin__InfluenzaA__AFH00329
MKTIIALSYILCLVFAQKLPGNDNSTATLCLGHHAVPNGTLVKTITNDQIEVTNATELVQSSSTGRICDSHHRILDGKNCTLIDALLGDPHCDGFQNKEWDLFVERSKAYSNCYPYDVPDYASLRSLVASSGTLEFINEDFNWTGVAQDGKSYACKRGSVNSFFSRLNWLHKLEYKYPALNVTMPNNGKFDKLYIWGVHHPSTDSDQTSIYVRASGRVTVSTKRSQQTVIPNIGSRPWVRGISSRISIYWTIVKPGDILLINSTGNLIAPRGYFKIRNGKSSIMRSDAPIGNCNSECITPNGSIPNDKPFQNVNRITYGACPRYVKQNTLKLATGMRNVPEKQTRGIFGAIAGFIENGWEGMVDGWYGFRHQNSEGTGQAADLKSTQAAIDQINGKLNRLIEKTNEKFHQIEKEFSEVEGRIQDLEKYVEDTKIDLWSYNAELLVALENQHTIDLTDSEMNKLFERTRKQLRENAEDMGNGCFKIYHKCDNACIGSIRNGTYDHDVYRDEALNNRFQIKGVELKSGYKDWILWISFATSCFLLCVVLLGFIMWACQKGNIRCNICI

SEQ ID NO: 8662 - protein, 566 aa, synthetic construct
  REGION 1..566: note = hemagglutinin__InfluenzaA__AFH00340
MKTIIALSYILCLVFAQKLPGNDNSTATLCLGHHAVPNGTLVKTITNDQIEVTNATELVQSSSTGRICDSPHRILDGKNCTLIDALLGDPHCDGFQNKEWDLFVERSKAYSNCYPYDVPDYASLRSLVASSGTLEFINEDFNWTGVAQDGKSYACKRGSVNSFFSRLNWLHKLEYKYPALNVTMPNNGKFDKLYIWGVHHPSTDSDQTSLYVRASGRVTVSTKRSQQTVIPNIGFRPWVRGLSSRISIYWTIVKPGDILLISSTGNLIAPRGYFKIRNGKSSIMRSDAPIGNCSSECITPNGSIPNDKPFQNVNRITYGACPRYVKQNTLKLATGMRNIPEKQTRGIFGAIAGFIENGWEGMVDGWYGFRHQNSEGTGQAADLKSTQAAIDQINGKLNRLIEKTNEKFHQIEKEFSEVEGRIQDLEKYVEDTKIDLWSYNAGLLVALENQHTIDLTDSEMNKLFERTRKQLRENAEDMGNGCFKIYHKCDNACIGSIRNGTYDHDVYRDEALNNRFQIKGVELKSGYKDWILWISFAISCFLLCVVLLGFIMWACQKGNIRCNICI

SEQ ID NO: 8663 - protein, 566 aa, synthetic construct
  REGION 1..566: note = hemagglutinin__InfluenzaA__AFH00351
MKTIIALSYILCLVFAQKLPGNDNSTATLCLGHHAVPNGTLVKTITNDQIEVTNATELVQSSSTGRICDSPHRILDGKNCTLIDALLGDPHCDGFQNKEWDLFVERSKAYSNCYPYDVPDYASLRSLVASSGTLEFTKEGFNWTGVAQDGKSYACKRGSVKSFFSRLNWLHKLEYKYPALNVTMPNNDKFDKLYIWGVHHPSTDSDQTSLYVQASGRVTVSTKRSQQTVIPNIGSRPWVRGISSRISIYWTIVKPGDILLINSTGNLIAPRGYFKIRNGKSSIMRSDAPIGNCNSECITPDGSIPNDKPFQNVNRITYGACPRYVKQNTLKLATGMRNVPEKQTRGIFGAIAGFIENGWEGMVDGWYGFRHQNSEGTGQAADLKSTQAAIDQINGKLNRLIEKTNKKFHQIEKEFSEVEGRIQDLEKYVEDTKIDLWSYNAELLVALENQHTIDLTDSEMNKLFERTRKQLRENAEDMGNGCFKIYHKCDNACIGSIRNGTYDHDVYRDEALNNRFQIKGVELKSGYKDWILWISFAISCFLLCVVLLGFIMWACQKGNIRCNICI

SEQ ID NO: 8664 - protein, 566 aa, synthetic construct
  REGION 1..566: note = hemagglutinin__InfluenzaA__AFH00362
MKTIIALSYILCLVFAQKLPGNDNSTATLCLGHHAVPNGTLVKTITNDQIEVTNATELVQSSSTGRICDSPHRILDGKNCTLIDALLGDPHCDGFQNKEWDLFVERSKAYSNCYPYDVPDYASLRSLVASSGTLEFTNEGFNWTGVAQDGKSYACKRGSVKSFFSRLNWLHKLEYKYPALNVTMPNNDKFDKLYIWGVHHPSTDSDQTSLYVQASGRVTVSTKRSQQTVIPNIGSRPWVRGISSRISIYWTIVKPGDILLINSTGNLIAPRGYFKIRNGKSSIMRSDAPIDNCNSECITPNGSIPNDKPFQNVNRITYGACPRYVKQNTLKLATGMRNVPEKQTRGIFGAIAGFIENGWEGMVDGWYGFRHQNSEGTGQAADLKSTQAAIDQINGKLNRLIEKTNEKFHQIEKEFSEVEGRIQDLEKYVEDTKIDLWSYNAELLVALENQHTIDLTDSEMNKLFERTRKQLRENAEDMGNGCFKIYHKCDNACIGSIRNGTYDHDVYRDEALNNRFQIKGVELKSGYKDWILWISFATSCFLLCVVLLGFIMWACQKGNIRCNICI

SEQ ID NO: 8665 - protein, 566 aa, synthetic construct
  REGION 1..566: note = hemagglutinin__InfluenzaA__AFH00384
MKTIIALSYILCLVFAQKLPGNDNSTATLCLGHHAVPNGTLVKTITNDQIEVTNATELVQSSSTGRICDSPHRILDGKNCTLIDALLGDPHCDGFQNKEWDLFVERSKAYSNCYPYDVPDYASLRSLVASSGTLEFTKEGFNWTGVAQDGKSYACKRGSVNSFFSRLNWLHKLEYKYPALNVTMPNNDKFDKLYIWGVHHPSTDSDQTSLYVQASGRVTVSTKRSQQTVIPNIGSRPWVRGISSRISIYWTIVKPGDILLINSIGNLIAPRGYFKIRNGKSSIMRSDAPIGNCNSECITPNGSIPNDKPFQNVNRITYGACPRYVKQNTLKLATGMRNVPEKQTRGIFGAIAGFIENGWEGMVDGWYGFRHQNSEGTGQAADLKSTQAAIDQINGKLNRLIEKTNEKFHQIEKEFSEVEGRIQDLEKYVEDTKIDLWSYNAGLLVALENQHTIDLTDSEMNKLFERTRKQLRENAEDMGNGCFKIYHKCDNACIGSIRNGTYDHDVYRDEALNNRFQIKGVELKSGYKDWILWISFAISCFLLCVVLLGFIMWACQKGNIRCNICI

SEQ ID NO: 8666 - protein, 566 aa, synthetic construct
  REGION 1..566: note = hemagglutinin__InfluenzaA__AFH00395
MKAIIALSYILCLVFAQKLPGNDNSTATLCLGHHAVPNGTLVKTITNDQIEVTNATELVQSSSTGRICDSPHRILDGKNCTLIDALLGDPHCDGFQNKEWDLFVERSKAYSNCYPYDVPDYASLRSLVASSGTLEFTKEGFNWTGVAQDGKSYACKRGSVNGFFSRLNWLHKLEYKYPALNVTMPNNDKFDKLYIWGVHHPSTDSDQTSLYVQASGRVTVSTKRSQQTVIPNIGSRPWVRGISSRISIYWTIVKPGDILLIKSTGNLIAPRGYFKIRNGKSSIMRSDAPIGNCNSECITPNGSIPNDKPFQNVNRITYGACPRYVKQNTLKLATGMRNVPEKQTRGIFGAIAGFIENGWEGMVDGWYGFRHQNSEGTGQAADLKSTQAAIDQINGKLNRLIEKTNEKFHQIEKEFSEVEGRIQDLEKYVEDTKIDLWSYNAELLVALENQHTIDLTDSEMNKLFERTRKQLRENAEDMGNGCFKIYHKCDNACIGSIRNGTYDHDVYRDEALNNRFQIKGVELKSGYKDWILWISFAISCFLLCVVLLGFIMWACQKGNIRCNICI

SEQ ID NO: 8667 - protein, 566 aa, synthetic construct
  REGION 1..566: note = hemagglutinin__InfluenzaA__AFH00417
MKTIIALSYILCLVFAQKLPGNDNSTATLCLGHHAVPNGTLVKTITNDQIEVTNATELVQSSSTGRICDSPHRILDGKNCTLIDALLGDPHCDGFQNKEWDLFVERSKAYSNCYPYDVPDYASLRSLVASSGTLEFTNEGFNWTGVAQDGKSYACKRGSVKSFFSRLNWLHKLEYKYPALNVTMPNNDKFDKLYIWGVHHPSTDSDQTSLYVQASGRVTVSTKRSQQTVIPNIGSRPWVRGISSRISIYWTIVKPGDILLINSTGNLIAPRGYFKIRNGKSSIMRSDAPIDNCNSECITPNGSIPNDKPFQNVNRITYGACPRYVKQNTLKLATGMRNVPEKQTRGIFGAIAGFIENGWEGMVDGWYGFRHQNSEGTGQAADLKSTQAAIDQINGKLNRLIEKTNEKFHQIEKEFSEVEGRIQDLEKYVEDTKIDLWSYNAELLVALENQHTIDLTDSEMNKLFERTRKQLRENAEDMGNGCFKIYHKCDNACIGSIRNGTYDHDVYRDEALNNRFQIKGVELKSGYKDWILWISFAISCFLLCVVLLGFIMWACQKGNIRCNICI

SEQ ID NO: 8668 - protein, 566 aa, synthetic construct; identical to SEQ ID NO: 988
  REGION 1..566: note = hemagglutinin__InfluenzaA__AFH00428

SEQ ID NO: 8669 - protein, 566 aa, synthetic construct
  REGION 1..566: note = hemagglutinin__InfluenzaA__AFH00439
MKTIIALSYILCLVFAQKLPGNDNSTATLCLGHHAVPNGTLVKTITNDQIEVTNATELVQSSSTGRICDSPHRILDGKNCTLIDALLGDPHCDGFQNKEWDLFVERSKAYSNCYPYDVPDYASLRSLVASSGTLEFTNEGFNWTGVAQDGTSYACKRGSVKSFFSRLNWLHKLEYKYPALNVTMPNNDKFDKLYIWGVHHPSTDSDQTSLYVQASGRVTVSTKRSQQTVIPNIGSRPWVRGVSSRISIYWTIVKPGDILLINSTGNLIAPRGYFKIRSGKSSIMRSDAPIGNCNSECITPNGSIPNDKPFQNVNRITYGACPRYVKQNTLKLATGMRNVPEKQTRGIFGAIAGFIENGWEGMVDGWYGFRHQNSEGTGQAADLKSTQAAINQINGKLNRLIEKTNEKFHQIEKEFSEVEGRIQDLEKYVEDTKIDLWSYNAELLVALENQHTIDLTDSEMSKLFERTRKQLRENAEDMGNGCFKIYHKCDNACIGSIRNGTYDHDVYRDEALNNRFQIKGVELKSGYKDWILWISFAISCFLLCVVLLGFIMWACQKGNIRCNICI

SEQ ID NO: 8670 - protein, 566 aa, synthetic construct
  REGION 1..566: note = hemagglutinin__InfluenzaA__AFH00450
MKTIIALSYILCLVFAQKLPGNDNSTATLCLGHHAVPNGTLVKTITNDQIEVTNATELVQSSSTGRICDGPHRIIDGKNCTLIDALLGDPHCDGFQNKEWDLFVERSKAYSNCYPYDVPDYASLRSLVASSGTLEFTNESFNWTGVAQNGTSYACKRGSVKSFFSRLNWLHKLEYKYPALNVTMPNNDKFDKLYIWGVHHPSTDSDQTSLYVQSSGRVTVSTKRSQQTVIPNIGSRPWVRGVSSRISIYWTIVKPGDILLINSTGNLIAPRGYFKIRSGKSSIMRSDAPIDNCNSECITPNGSIPNDKPFQNVNRITYGACPRYVKQNTLKLATGMRNVPEKQTRGIFGAIAGFIENGWEGMIDGWYGFRHQNSEGTGQAADLKSTQAAINQINGKLNRLIEKTNEKFHQIEKEFSEVEGRIQDLEKYVEDTKIDLWSYNAELLVALENQHTIDLTDSEMNKLFERTRKQLRENAEDMGNGCFKIYHKCDNACIGSIRNGTYDHDVYRDEALNNRFQIKGVELKSGYKDWILWISFAISCFLLCVVLLGFIMWACQKGNIRCNICI

SEQ ID NO: 8671 - protein, 566 aa, synthetic construct
  REGION 1..566: note = hemagglutinin__InfluenzaA__AFH00461
MKTIIALSYILCLVFAQKLPGNDNSTATLCLGHHAVPNGTLVKTITNDQIEVTNATELVQSSPTGRICDSPHRILDGKNCTLIDALLGDPHCDGFQNKEWDLFVERSKAYSNCYPYDVPDYASLRSLVASSGTLEFINENFNWTGVAQDGKSYACKRGSVNSFFSRLNWLHKLDYKYPALNVTMPNNGKFDKLYIWGVHHPSTDSDQISLYVRSSGRVTVSTKRSQQTVIPDIGYRPWVRGLSSRISIYWTIVKPGDILLINSTGNLIAPRGYFKLRNGKSSIMRSDAPIGNCSSGCITPNGSIPNDKPFQNVNRITYGACPRYVKQNTLKLATGMRNVPEKQTRGIFGAIAGFIENGWEGMVDGWYGFRHQNSEGTGQAADLKSTQAAIDQINGKLNRLVEKTNEKFHQIEKEFSEVEGRIQDLEKYVEDTKIDLWSYNAELLVALENQHTIDLTDSEMNKLFERTRKQLRENAEDMGNGCFKIYHKCDNACIGSIRNGTYDHDVYRDEALNNRFQIKGVELKSGYKDWILWISFAISCFLLCVVLLGFIMWACQKGNIRCNICI

SEQ ID NO: 8672 - protein, 566 aa, synthetic construct
  REGION 1..566: note = hemagglutinin__InfluenzaA__AFH00472
MKTIIALSYILCLVFAQKLPGNDNSTATLCLGHHAVPNGTLVKTITNDQIEVTNATELVQSSSTGRICDSPHRILDGKNCTLIDALLGDPHCDGFQNKEWDLFVERSKAYSNCYPYDVSDYASLRSLVASSGTLEFNNESFNWTGVAQNGTSYACKRRSVKSFFSRLNWLHKLEYKYPALNVTMPNNDKFDKLYIWGVHHPSTDSDQTSLYVQASGRVTVSTKRSQQTVIPNIGSRPWVRGVSSRISIYWTIVKPGDILLINSTGNLIAPRGYFKIRSGKSSIMRSDAPIGNCNSECITPNGSIPNDKPFQNVNRITYGACPRYVKQNTLKLATGMRNVPEKQTRGIFGAIAGFIENGWEGMVDGWYGFRHQNSEGTGQAADLKSTQAAINQINGKLNRLIEKTNEKFHQIEKEFSEVEGRIQDLEKYVEDTKIDLWSYNAELLVALENQHTIDLTDSEMNKLFERTRKQLRENAEDMGNGCFKIYHKCDNACIGSIRNGTYDHDVYRDEALNNRFQIKGVELKSGYKDWILWISFAISCFLLCVVLLGFIMWACQKGNIRCNICI

SEQ ID NO: 8673 - protein, 566 aa, synthetic construct
  REGION 1..566: note = hemagglutinin__InfluenzaA__AFH00483
MKTIIALSYILCMVFAQKLPGNDNSTATLCLGHHAVPNGTLVKTITNDQIEVTNATELVQSSSTGKICDSPHRILDGKNCTLIDALLGDPHCDGFQNKEWDLFVERSKAYSNCYPYDVPDYASLRSLVASSGTLEFNNESFNWTGVAQNGTSYACKRGSVKSFFSRLNWLHKLEYKYPALNVTMPNNDKFDKLYIWGVHHPSTDSDQTSLYVQASGRVTVSTKRSQQTVIPNIGSRPWVRGVSSRISIYWTIVKPGDILLINSTGNLIAPRGYFKIRSGKSSIMRSDAPIGNCNSECITPNGSIPNDKPFQNVNRITYGACPRYVKQNTLKLATGMRNVPEKQTRGIFGAIAGFIENGWEGMVDGWYGFRHQNSEGTGQAADLKSTQAAINQINGKLNRLIEKTNEKFHQIEKEFSEVEGRIQDLEKYVEDTKIDLWSYNAELLVALENQHTIDLTDSEMNKLFERTRKQLRENAEDMGNGCFKIYHKCDNACIGSIRNGTYDHDVYRDEALNNRFQIKGVELKSGYKDWILWISFAISCFLLCVVLLGFIMWACQKGNIRCNICI

SEQ ID NO: 8674 - protein, 566 aa, synthetic construct
  REGION 1..566: note = hemagglutinin__InfluenzaA__AFH00494
MKTIIALSYILCLVFAQKLPGNDNSTATLCLGHHAVPNGTLVKTITNDQIEVTNATELVQSSPTGRICDSPHRILDGKNCTLIDALLGDPHCDGFQNKEWDLFVERSKAYSNCYPYDVPDYASLRSLVASSGTLEFINENFNWTGVAQDGKSYACKRGSVNSFFSRLNWLHKLEYKYPALNVTMPNNGKFDKLYIWGVHHPSTDSDQTSLYVRASGRVTVSTKRSQQTVIPDIGYRPWVRGQSSRIGIYWTIVKPGDILLINSTGNLIAPRGYFKIRNGKSSIMRSDAPIGNCSSECITPNGSIPNDKPFQNVNRITYGACPRYVKQNTLKLATGMRNVPEKQTRGIFGAIAGFIENGWEGMVDGWYGFRHQNSEGTGQAADLKSTQAAIDQINGKLNRLVEKTNEKFHQIEKEFSEVEGRIQDLEKYVEDTKIDLWSYNAELLVALENQHTIDLTDSEMNKLFERTRKQLRENAEDMGNGCFKIYHKCDNACIGSIRNGTYNHDVYRDEALNNRFQIKGVELKSGYKDWILWISFAISCFLLCVVLLGFIMWACQKGNIRCNICI

SEQ ID NO: 8675 - protein, 566 aa, synthetic construct
  REGION 1..566: note = hemagglutinin__InfluenzaA__AFH00505
MKTIIALSYILCLVFAQKLPGNDNSTATLCLGHHAVPNGTLVKTITNDQIEVTNATELVQSSSTGRICDSPHRILDGKNCTLIDALLGDPHCDGFQNKEWDLFVERSKAYSNCYPYDVPDYASLRSLVASSGTLEFTNEGFNWTGVAQDGTSYACKRGSVKSFFSRLNWLHKLEYKYPALNVTMPNNDKFDKLYIWGVHHPSTDSDQISLYVQASGRVTVSTKRSQQTVIPNIGSRPWVRGVSSIISIYWTIVKPGDILLINSTGNLIAPRGYFKIRSGKSSIMRSDAPIDNCNSECITPNGSIPNDKPFQNVNRITYGACPRYVKQNTLKLATGMRNVPEKQTRGIFGAIAGFIENGWEGMVDGWYGFRHQNSEGTGQAADLKSTQAAINQINGKLNRLIEKTNEKFHQIEKEFSEVEGRIQDLEKYVEDTKIDLWSYNAELLVALENQHTIDLTDSEMNKLFERTRKQLRENAEDMGNGCFKIYHKCDNACIGSIRNGTYDHDVYRDEALNNRFQIKGVELKSGYKDWILWISFAISCFLLCVVLLGFIMWACQKGNIRCNICI

SEQ ID NO: 8676 - protein, 566 aa, synthetic construct
  REGION 1..566: note = hemagglutinin__InfluenzaA__AFH00516
MKTIIALSYILCQVFAQKLPGNDNSTATLCLGHHAVPNGTLVKTITNDQIEVTNATELVQSSSTGRICDSPHRILDGKNCTLIDALLGDPHCDGFQNKEWDLFVERSKAYSNCYPYDVPDYASLRSLVASSGTLEFTNEGFNWTGVAQDGKSYACKRGSVNSFFSRLNWLHKLEYKYPALNVTMPNNDKFDKLYIWGVHHPSTDSDQTSLYVQASGRVTVSTKRSQQTVIPNIGSRPWVRGISSRISIYWTIVKPGDILLIKSTGNLIAPRGYFKIRNGKSSIMRSDAPIDNCNSECITPNGSIPNDKPFQNVNRITYGACPRYVKQNTLKLATGMRNVPEKQTRGIFGAIAGFIENGWEGMVDGWYGFRHQNSEGTGQAADLKSTQAAIDQINGKLNRLIEKTNEKFHQIEKEFSEVEGRIQDLEKYVEDTKIDLWSYNAELLVALENQHTIDLTDSEMNKLFERTRKQLRENAEDMGNGCFKIYHKCDNACIGSIRNGTYDHDVYRDEALNNRFQIKGVELKSGYKDWILWISFAISCFLLCVVLLGFIMWACQKGNIRCNICI

SEQ ID NO: 8677 - protein, 566 aa, synthetic construct
  REGION 1..566: note = hemagglutinin__InfluenzaA__AFH00527
MKTIIALSYILCLVFAQKIPGNDNSTATLCLGHHAVPNGTLVKTITNDQIEVTNATELVQSSSTGRICDSPHRILDGENCTLIDALLGDPHCDGFQNKEWDLFVERSKAYSNCYPYDVPDYASLRSLVASSGTLEFNNESFNWTGVAQNGTSYACKRRSIKSFFSRLNWLHQLKYKYPALNVTMPNNDKFDKLYIWGVHHPSTDSDQTSLYAQASGRVTVSTKRSQQTVIPNIGSRPWVRGVSSRISIHWTIVKPGDILLINSTGNLIAPRGYFKIRSGKSSIMRSDAPIGKCNSECITPNGSIPNDKPFQNVNRITYGACPRYVKQNTLKLATGMRNVPEKQTRGIFGAIAGFIENGWEGMVDGWYGFRHQNSEGTGQAADLKSTQAAINQINGKLNRLIEKTNEKFHQIEKEFSEVEGRIQDLEKYVEDTKIDLWSYNAELLVALENQHTIDLTDSEMNKLFERTRKQLRENAEDMGNGCFKIYHKCDNACIGSIRNGTYDHDVYRDEALNNRFQIKGVELKSGYKDWILWISFAISCFLLCVVLLGFIMWACQKGNIRCNICI

SEQ ID NO: 8678 - protein, 566 aa, synthetic construct
  REGION 1..566: note = hemagglutinin__InfluenzaA__AFH00538
MKTIIALSYILCLVFAQKIPGNDNSTATLCLGHHAVPNGTLVKTITNDQIEVTNATELVQRSSTGRICDSPHRILDGENCTLIDALLGDPHCDGFQNKEWDLFVERSKAYSNCYPYDVPDYASLRSLVASSGTLEFNNESFNWTGVAQNGTSYACKRRSIKSFFSRLNWLHQLKYKYPALNVTMPNNDKFDKLYIWGVHHPSTDSDQTSLYAQASGRVTVSTKRSQQTVIPNIGSRPWVRGVSSRISIYWTIVKPGDILLINSTGNLIAPRGYFKIRSGKSSIMRSDAPIGKCNSECITPNGSIPNDKPFQNVNRITYGACPRYVKQNTLKLATGMRNVPEKQTRGIFGAIAGFIENGWEGMVDGWYGFRHQNSEGTGQAADLKSTQAAINQINGKLNRLIEKTNEKFHQIEKEFSEVEGRIQDLEKYVEDTKIDLWSYNAELLVALENQHTIDLTDSEMNKLFERTRKQLRENAEDMGNGCFKIYHKCDNACIGSIRNGTYDHDVYRDEALNNRFQIKGVELKSGYKDWILWISFAISCFLLCVVLLGFIMWACQKGNIRCNICI

SEQ ID NO: 8679 - protein, 566 aa, synthetic construct
  REGION 1..566: note = hemagglutinin__InfluenzaA__AFH00549
MKTIIALSYILCLVFAQKLPGNDNSTATLCLGHHAVPNGTLVKTITNDQIEVTNATELVQSSSTGRICDSPHRILDGENCTLIDALLGDPHCDGFQNKEWDLFVERSKAYSNCYPYDVPDYASLRSLVASSGTLEFNNESFNWTGVAQNGTSSACKRRSIKSFFSRLNWLHQLKYKYPALNVTMPNNDKFDKLYIWGVHHPSTDSDQTSLYAQAPGRVTVSTRRSQQTVIPNIGSRPWVRGVSSIISIYWTIVKPGDILLINSTGNLIAPRGYFKIRSGKSSIMRSDAPISKCNSECITPNGSIPNDKPFQNVNRITYGACPRYVKQNTLKLATGMRNVPEKQTRGIFGAIAGFIENGWEGMVDGWYGFRHQNSEGTGQAADLKSTQAAINQINGKLNRLIEKTNEKFHQIEKEFSEVEGRIQDLEKYVEDTKIDLWSYNAELLVALENQHTIDLTDSEMNKLFERTRKQLRENAEDMGNGCFKIYHKCDNACIGSIRNGTYDHDVYRDEALNNRFQIKGVELKSGYKDWILWISFAISCFLLCVVLLGFIMWACQKGNIRCNICI

SEQ ID NO: 8680 - protein, 566 aa, synthetic construct
  REGION 1..566: note = hemagglutinin__InfluenzaA__AFH00560
MKTIIALSYILCLVFAQKLPVNDNSTATLCLGHHAVPNGTLVKTITNDHIEVTNATELVQSSSTGRICDIPHQILDGENCTLIDALLGDPHCDGFQNKEWDLFVERSTAYSNCYPYDVPDYASLRSLVASSGTLEFNNESFNWTGVAQNGTSSACKRRSIKSFFSRLNWLHQLKYKYPALNVTMPNNEKFDKLYIWGVHHPSTDSDQISLYAQAPGRVTVSTKRSQQTVIPNIGSRPWVRGVSSRISIYWTIVKPGDILLINSTGNLIAPRGYFKIRSGKSSIMRSDAPIGKCNSECITPNGSIPNDKPFQNVNRITYGACPRYVKQNTLKLATGMRNVPEKQTRGIFGAIAGFIENGWEGMVDGWYGFRHQNSEGTGQAADLKSTQAAINQINGKLNRLIEKTNEKFHQIEKEFSEAEGRIQDLEKYVEDTKIDLWSYNAELLVALENQHTIDLTDSEMNKLFERTRKQLRENAEDMGNGCFKIYHKCDNACIGSIRNGTYDHDVYRDEALNNRFQIKGVELKSGYKDWILWISFAISCFLLCIVLLGFIMWACQKGNIRCNICI

SEQ ID NO: 8681 - protein, 566 aa, synthetic construct
  REGION 1..566: note = hemagglutinin__InfluenzaA__AFH00571
MKTIIALSYILCLVFAQKLPVNDNSTATLCLGHHAVPNGTLVKTITNDNIEVTNATELVQSSSTGRICDSPHQILDGENCTLIDALLGDPHCDGFQNKEWDLFVERSTAYSNCYPYDVPDYASLRSLVASSGTLEFNNESFNWTGVDQNGTSSACKRRSNKSFFSRLNWLHQLKYKYPALNVTMPNNEKFDKLYIWGVHHPSTDSDQISLYAQASGRVTVSTKRSQQTVIPNIGSRPWVRGVSSRISIYWTIVKPGDILLINSTGNLIAPRGYFKIRSGKSSIMRSNAPIGKCNSECITPNGSIPNDKPFQNVNRITYGACPRYVKQNTLKLATGMRNVPEKQTRGIFGAIAGFIENGWEGMVDGWYGFRHQNSEGTGQAADLKSTQAAINQINGKLNRLIEKTNEKFHQIEKEFSEVEGRIQDLEKYVEDTKIDLWSYNAELLVALENQHTIDLTDSEMNKLFERTRKQLRENAEDMGNGCFKIYHKCDNACIGSIRNGTYDHDVYRDEALNNRFQIKGVELKSGYKDWILWISFAISCFLLCVVLLGFIMWACQKGNIRCNICI

SEQ ID NO: 8682 - protein, 566 aa, synthetic construct
  REGION 1..566: note = hemagglutinin__InfluenzaA__AFH00582
MKTIIALSYILCLVFAQKLPGNDNSTATLCLGHHAVPNGTLVKTITNDQIEVTNATELVQSSSTGGICDSPHQILDGENCTLIDALLGDPHCDGFQNKEWDLFVERSKAYSNCYPYDVPDYASLRSLVASSGTLEFNNESFNWTGVAQNGTSSACKRRSNKSFFSRLNWLHQLKYKYPALNVTMPNNEKFDKLYIWGVHHPSTDSDQISLYAQAPGRVTVSTKRSQQTVIPNIGSRPWVRGVSSRISIYWTIVKPGDILLINCTGNLIAPRGYFKIRSGKSSIMRSDASIGKCNSECITPNGSIPNDKPFQNVNRITYGACPRYVKQNTLKLATGMRNVPEKQTRGIFGAIAGFIENGWEGMVDGWYGFRHQNSEGTGQAADLKSTQAAINQINGKLNRLIEKTNEKFHQIEKEFSEVEGRIQDLEKYVEDTKIDLWSYNAELLVALENQHTIDLTDSEMNKLFERTKKQLRENAEDMGNGCFKIYHKCDNACIGSIRNGTYDHDVYRDEALNNRFQIKGVELKSGYKDWILWISFATSCFLLCVVLLGFIMWACQKGNIRCNICI

SEQ ID NO: 8683 - protein, 566 aa, synthetic construct; identical to SEQ ID NO: 1305
  REGION 1..566: note = hemagglutinin__InfluenzaA__AFH00593

SEQ ID NO: 8684 - protein, 566 aa, synthetic construct; identical to SEQ ID NO: 1305
  REGION 1..566: note = hemagglutinin__InfluenzaA__AFH00604

SEQ ID NO: 8685 - protein, 566 aa, synthetic construct
  REGION 1..566: note = hemagglutinin__InfluenzaA__AFH00615
MKTIIALSYILCLVFAQKLPGNDNSTATLCLGHHAVPNGTIVKTITNDQIEVTNATELVQSSSTGGICNSPHQILDGENCTLIDALLGDPQCDGFQNKKWDLFVERSKAYSNCYPYDVPDYASLRSLVASSGTLEFNNESFNWTGVTQNGTSSACKRRSNKSFFSRLNWLTHLKYKYPALNVTMPNNEKFDKLYIWGVHHPGTDSDQISLYAQASGRITVSTKRSQQTVIPNIGSRPRVRDISSRISIYWTIVKPGDILLINSTGNLIAPRGYFKIRSGKSSIMRSDAPIGKCNSECITPNGSIPNDKPFQNVNRITYGACPRYVKQNTLKLATGMRNVPEKQTRGIFGAIAGFIENGWEGMVDGWYGFRHQNSEGTGQAADLKSTQAAINQINGKLNRLIGKTNEKFHQIEKEFSEVEGRIQDIEKYVEDTKIDLWSYNAELLVALENQHTIDLTDSEMNKLFERTKKQLRENAEDMGNGCFKIYHKCDNACIESIRNGTYDHDVYRDEALNNRFQIKGVELKSGYKDWILWISFAISCFLLCVALLGFIMWACQKGNIRCNICI

SEQ ID NO: 8686 - protein, 566 aa, synthetic construct; identical to SEQ ID NO: 8277
  REGION 1..566: note = hemagglutinin__InfluenzaA__AFH00626

SEQ ID NO: 8687 - protein, 566 aa, synthetic construct
  REGION 1..566: note = hemagglutinin__InfluenzaA__AFH00637
MKTIIALSYILCLVFAQKLPGNDNSTATLCLGHHAVPNGTIVKTITNDQIEVTNATELVQSSSTGGICDSPHQILDGENCTLIDALLGDPQCDGFQNKKWDLFVERSKAYSNCYPYDVPDYASLRSLVASSGTLEFNNESFNWTGVTQNGTSSSCKRRSNNSFFSRLNWLTHLKFKYPALNVTMPNNEKFDKLYIWGVHHPGTNNDQISLYTQASGRITVSTKRSQQTVIPNIGSRPRVRDIPSRISIYWTIVKPGDILLINSTGNLIAPRGYFKIRSGKSSIMRSDAPIGKCNSECITPNGSIPNDKPFQNVNRITYGACPRYVKQNTLKLATGMRNVPEKQTRGIFGAIAGFIENGWEGMVDGWYGFRHQNSEGIGQAADLKSTQAAINQINGKLNRLIGKTNEKFHQIEKEFSEVEGRIQDLEKYVEDTKIDLWSYNAELLVALENQHTIDLTDSEMNKLFERTKKQLRENAEDMGNGCFKIYHKCDNACIGSIRNGTYDHDVYRDEALNNRFQIKGVELKSGYKDWILWISFAISCFLLCVALLGFIMWACQKGNIRCNICI

SEQ ID NO: 8688 - protein, 566 aa, synthetic construct
  REGION 1..566: note = hemagglutinin__InfluenzaA__AFH00648
MKTIIALSYILCLVFAQKLPGNDDSTATLCLGHHAVPNGTIVKTITNDQIEVTNATELVQSSSTGGICDSPHQILDGENCTLIDALLGDPQCDGFQNKKWDLFVERSKAYSNCYPYDVPDYASLRSLVASSGTLEFNDESFNWTGVTQNGTSSSCKRRSNNSFFSRLNWLTHLKFKYPALNVTMPNNEKFDKLYIWGVHHPVTDNDQIFLYAQASGRITVSTKRSQQTVIPNIGSRPRIRNIPSRISIYWTIVKPGDILLINSTGNLIAPRGYFKIRSGKSSIMRSDAPIGKCNSECITPNGSIPNDKPFQNVNRITYGACPRYVKQNTLKLATGMRNVPEKQTRGIFGAIAGFIENGWEGMVDGWYGFRHQNSEGIGQAADLKSTQAAINQINGKLNRLIGKTNEKFHQIEKEFSEVEGRIQDLEKYVEDTKIDLWSYNAELLVALENQHTIDLTDSEMNKLFERTKKQLRENAEDMGNGCFKIYHKCDNACIGSIRNGTYDHDVYRDEALNNRFQIKGVELKSGYKDWILWISFAISCFLLCVALLGFIMWACQKGNIRCNICI

SEQ ID NO: 8689 - protein, 566 aa, synthetic construct
  REGION 1..566: note = hemagglutinin__InfluenzaA__AFH00659
MKTIIALSYILCLVFTQKLPGNDNSTATLCLGHHAVPNGTMVKTITNDQIEVTNATELVQSSSTGEICDSPHQILDGENCTLIDALLGDPQCDGFQNKKWDLFVERSKAHSNCYPYDVPDYASLRSLIASSGTLEFNNESFNWTGVTQNGTSSACKRRSDNSFFSRLNWLTHLKFKYPALNVTMPNNEEFDKLYIWGVHHPGTDNDQISLYAQASGRITVSTKRSQQTVIPNIGSRPRVRDIPSRISIYWTIVKPGDILLINSTGNLIAPRGYFKIRSGKSSIMRSDAPIGKCNSGCITPNGSIPNDKPFQNVNRITYGACPRYVKQNTLKLATGMRNVPEKQTRGIFGAIAGFIENGWEGMVDGWYGFRHQNSEGIGQAADLKSTQAAIDQINGKLNRLIGKTNEKFHQIEKEFSEVEGRIQDLEKYVEDTKIDLWSYNAELLVALENQHTIDLTDSEMNKLFERTKKQLRENAEDMGNGCFKIYHKCDNACIGSIRNGTYDHDVYRDEALNNRFQIKGVELKSGYKDWILWISFAISCFLLCVALLGFIMWACQKGNIRCNICI

SEQ ID NO: 8690 - protein, 566 aa, synthetic construct
  REGION 1..566: note = hemagglutinin__InfluenzaA__AFH00670
MKTIIALSYILCLVFAQKLPGIDNSTATLCLGHHAVPNGTIVKTITNDQIEVTNATELVQNSSTGGICDSPHQILDGENCTLIDALLGDPQCDGFQNKKWDLFVERSKAYSNCYPYDVPDYASLRSLVASSGTLEFNNESFNWTGVTQNGTSSACKRGSNNSFFSRLNWLTHSKFKYPALNVTMPNNEEFDKLYIWGVLHPGTDNDQIFLYAQASGRITVSTKRSQQTVIPNIGSRPRVRNIPSRISIYWTIVKPGDILLINSTGNLIAPRGYFKIRSGKSSIMRSDAPIGKCNSECITPNGSIPNDKPFQNVNRITYGACPRYVKQNTLKLATGMRNVPEKQTRGIFGAIAGFIENGWEGMVDGWYGFRHQNSEGIGQAADLKSTQAAIDQINGKLNRLIGKTNEKFHQIEKEFSEVEGRIQDLEKYVEDTKIDLWSYNAELLVALENQHTIDLTDSEMNKLFEKTKKQLRENAEDMGNGCFKIYHKCDNACIGSIRNGTYDHDVYRDEALNNRFQIKGVELKSGYKDWILWISFAISCFLLCVALLGFIMWACQKGNIRCNICI

SEQ ID NO: 8691 - protein, 566 aa, synthetic construct
  REGION 1..566: note = hemagglutinin__InfluenzaA__AFH00681
MKTIIALSYILCLVFAQKLPGNDNSTATLCLGHHAVPNGTIVKTITNDQIEVTNATELVQSSSTGEICDSPHQILDGENCTLIDALLGDPQCDGFQNKKWDLFIERSKAYSNCYPYDVPDYASLRSLVASSGTLEFNNESFNWTGVTQNGTSSACIRRSNNSFFSRLNWLTHLKFKYPALNVTMPNKEKFDKLYIWGVHHPGTDNDQIFLYAQASGRITVSTKRSQQTVIPNIGSRPRVRNIPSRISIYWTIVKPGDILLINSTGNLIAPRGYFKIRSGKSSIMRSDAPIGKCNSECITPNGSIPNDKPFQNVNRITYGACPRYVKQNTLKLATGMRNVPEKQTRGIFGAIAGFIENGWEGMVDGWYGFRHQNSEGIGQAADLKSTQAAIDQINGKLNRLIGKTNEKFHQIEKEFSEVEGRIQDLEKYVEDTKIDLWSYNAELLVALENQHTIDLTDSEMNKLFEKTKKQLRENAEDMGNGCFKIYHKCDNACIGSIRNGTYDHDVYRDEALNNRFQIKGVELKSGYKDWILWISFAISCFLLCVALLGFIMWACQKGNIRCNICI

SEQ ID NO: 8692 - protein, 566 aa, synthetic construct; identical to SEQ ID NO: 1928
  REGION 1..566: note = hemagglutinin__InfluenzaA__AFH00692

SEQ ID NO: 8693 - protein, 566 aa, synthetic construct
  REGION 1..566: note = hemagglutinin__InfluenzaA__AFH00703
MKTIIALSYILCLVFAQKLPGNDNSTATLCLGHHAVPNGTIVKTITNDQIEVTNATELVQSSSTGKICDSPHQILDGKNCTLIDALLGDPQCDGFQNKKWDLFVERSKAYSNCYPYDVPDYASLRSLVASSGTLEFNNESFNWTGVTQNGTSSACIRRSKNSFFSRLNWLTHLNFKYSALNVTMPNNEQFDKLYIWGVHHPGTDKDQIFLYAQASGRITVSTKRSQQTVIPNIGSRPRVRNIPSRISIYWTIVKPGDILLINSTGNLIAPRGYFKMQSGKSSIMRSDAPIGKCNSECITPNGSIPNDKPFQNVNRITYGACPRYVKQNTLKLATGMRNVPEKQTRGIFGAIAGFIENGWEGMVDGWYGFRHQNSEGRGQAADLKSTQAAIDQINGKLNRLIGKTNEKFHQIEKEFSEVEGRIQDLEKYVEDTKIDLWSYNAELLVALENQHTIDLTDSEMNKLFEKTKKQLRENAEDMGNGCFKIYHKCDNACIGSIRNGTYDHDVYRDEALNNRFQIKGVELKSGYKDWILWISFAISCFLLCVALLGFIMWACQKGNIRCNICI

SEQ ID NO: 8694 - protein, 566 aa, synthetic construct
  REGION 1..566: note = hemagglutinin__InfluenzaA__AFH00714
MKTIIALSYIFCLVFAQNLPGNDNSTATLCLGHHAVPNGTLVKTITNDQIEVTNATELVQSSSTGRICDSPHRILDGKNCTLIDALLGDPHCDGFQNEKWDLFVERSKAFSNCYPYDVPDYASLRSLVASSGTLEFINEGFNWTGVTQSGGSYACKRGSDKSFFSRLNWLYESESKYPVLNVTMPNNGNFDKLYIWGVHHPSTDKEQTNLYVRASGRVTVSTKRSQQTIIPNIGSRPWVRGLSSGISIYWTIVKPGDILLINSNGNLIAPRGYFKIRTGKSSIMRSDAPIGTCSSECITPNGSIPNDKPFQNVNKITYGACPKYVKQNTLKLATGMRNVPEKQTRGIFGAIAGFIENGWEGMVDGWYGFRHQNSEGTGQAADLKSTQAAIDQINGKLNRVIEKTNEKFHQIEKEFSEVEGRIQDLEKYVEDTKIDLWSYNAELLVALENQHTIDLTDSEMNKLFEKTRRQLRENAEDMGNGCFKIYHKCDNACIGSIRNGTYDHDVYRDEALNNRFQIKGVELKSGYKDWILWISFAISCFLLCVVLLGFIMWACQKGNIRCNICI

SEQ ID NO: 8695 - protein, 566 aa, synthetic construct
  REGION 1..566: note = hemagglutinin__InfluenzaA__AFH00725
MKTIIALSYIFCLIFAQNLPGNDNSTATLCLGHHAVPNGTLVKTITNDQIEVTNATELVQSSSTGRICDSPHRILDGKNCTLIDALLGDPHCDGFQNEKWDLFVERSKAFSNCYPYDVPDYASLRSLVASSGTLEFINEGFNWTGVTQSGGSYACKRGSDNSFFSRLNWLYESESKYPVLNVTMPNNGKFDKLYIWGVHHPSTDKEQTKLYVRASGRVTVSTKRSQQTVIPNIGSRPWVRGLSSRISIYWTIVKPGDILLINSTGNLIAPRGYFKIRTGKSSIMRSDAPIGTCSSECITPNGSIPNDKPFQNVNKITYGACPRYVKQNTLKLATGMRNVPEKQTRGIFGAIAGFIENGWEGMVDGWYGFRHQNSEGTGQAADLKSTQAAIDQINGKLNRVIEKTNEKFHQIEKEFSEVEGRIQDLEKYVEDTKIDLWSYNAELLVALENQHTIDLTDSEMNKLFEKTRKQLRENAEDMGNGCFKIYHKCDNACIGSIRNGTYDHDVYRDEALNNRFQIKGVELKSGYKDWILWISFAISCFLLCVVLLGFIMWACQKGNIRCNICI

SEQ ID NO: 8696 - protein, 566 aa, synthetic construct; identical to SEQ ID NO: 7066
  REGION 1..566: note = hemagglutinin__InfluenzaA__AFH00736

SEQ ID NO: 8697 - protein, 566 aa, synthetic construct
  REGION 1..566: note = hemagglutinin__InfluenzaA__AFH00747
MKTIIALSYIFCLVFAQKLPGNDNSTATLCLGHYAVPNGTLVKTITNDQIEVTNATELVQSSSTGRICDSPHRILDGKNCTLIDALLGDPHCDGFQNEKWDLFVERSKAYSNCYPYDVPDYASLRSLVASSGTLEFINEDFNWTGVTQSGGSYACKRGSVKSFFSRLNWLHESEYKYPALNVTMPNNGKFDKLYIWGVHHPSTDREQTNLYVRASGRVTVSTKRSQQTVIPNIGSRPWVRGLSSRISIYWTIVKPGDILLINSTGNLIAPRGYFKIRTGKSSIMRSDAPIGTCSSECITPNGSIPNDKPFQNVNKITYGACPRYVKQNTLKLATGMRNVPEKQTRGIFGAIAGFIENGWEGMVDGWYGFRHQNSEGTGQAADLKSTQAAIDQINGKLNRLIEKTNEKFHQIEKEFSEVEGRIQDLEKYVEDTKIDLWSYNAELLVALENQHTIDLTDSEMNKLFEKTRKQLRENAEDMGNGCFKIYHKCDNACIGSIRNGTYDHDVYRDEALNNRFQIKGVELKSGYKDWILWISFAISCFLLCVVLLGFIMWACQKGNIRCNICI

SEQ ID NO: 8698 - protein, 566 aa, synthetic construct
  REGION 1..566: note = hemagglutinin__InfluenzaA__AFH00758
MKTIIALSYILCLVFAQKLPGNDNSTATLCLGHHAVPNGTLVKTITNDQIEVTNATELVQSSSTGRICDSPHRILDGKNCTLIDALLGDPHCDGFQNKEWDLFVERSKAYSNCYPYDVPDYASLRSLVASSGTLEFINEDFNWTGVAQSGESYACKRGSVKSFFSRLNWLHESEYKYPALNVTMPNNGKFDKLYIWGVHHPSTDREQTKLYVRASGRVTVSTKRSQQTVIPNIGSRPWVRGLSSRISIYWTIVKPGDILLINSTGNLIAPRGYFKIRTGKSSIMRSDAPIGTCSSECITPNGSIPNDKPFQNVNRITYGACPRYVKQNTLKLATGMRNVPEKQTRGIFGAIAGFIENGWEGMVDGWYGFRHQNSEGTGQAADLKSTQAAIDQINGKLNRLIEKTNEKFHQIEKEFSEVEGRIQDLEKYVEDTKIDLWSYNAELLVALENQHTIDLTDSEMNKLFEKTRKQLRENAEDMGNGCFKIYHKCDNACIGSIRNGTYDHDVYRDEALNNRFQIKGVELKSGYKDWILWISFAISCFLLCVVLLGFIMWACQKGNIRCNICI

SEQ ID NO: 8699 - protein, 566 aa, synthetic construct
  REGION 1..566: note = hemagglutinin__InfluenzaA__AFH00769
MKTIIALSYILCLVFAQKLPGNDNSTATLCLGHHAVPNGTLVKTITNDQIEVTNATELVQSSSTGRICDSPHRILDGKNCTLIDALLGDPHCDGFQNKEWDLFVERSKAYSNCYPYDVPDYASLRSLVASSGTLEFINEDFNWTGVAQSGESYTCKRGSVKSFFSRLNWLHESEYKYPALNVTMPNNDKFDKLYIWGVHHPSTDREQTSLYIRASGRVTVSTKRSQQTVIPNIGSRPWVRGLSSRISIYWTIVKPGDILLINSTGNLIAPRGYFKIRTGKSSIMRSDAPIGTCSSECITPNGSIPNDKPFQNVNRITYGACPRYVKQNTLKLATGMRNVPEKQTRGIFGAIAGFIENGWEGMVDGWYGFRHQNSEGTGQAADLKSTQAAIDQINGKLNRLIEKTNEKFHQIEKEFSEVEGRIQDLEKYVEDTKIDLWSYNAELLVALENQHTIDLTDSEMNKLFEKTRKQLRENAEDMGNGCFKIYHKCDNACIGSIRNGTYDHDVYRDEALNNRFQIKGVELKSGYKDWILWISFAISCFLLCVVLLGFIMWACQKGNIRCNICI

SEQ ID NO: 8700 - protein, 566 aa, synthetic construct
  REGION 1..566: note = hemagglutinin__InfluenzaA__AFH00780
MRAIIALSYILCLVFAQKLPGNDNSTATLCLGHHAVPNGTLVKTITNDQIEVTNATELVQSSSTGRICDSPHRILDGKNCTLIDALLGDPHCDGFQNKEWDLFVERSKAYSDCYPYDVPDYASLRSLVASSGTLEFTNEGFNWTGVAQDGTSYACKRGSVKSFFSRLNWLHKLEYKYPALNVTMPNNDKFDKLYIWGVHHPSTDSDQTSLYVQASGRVTVSTKRSQQTVIPNIGSRPWVRGVSSRISIYWTIVKPGDILLINSTGNLIAPRGYFKIRSGKSSIMRSDAPIGNCNSECITPNGSIPNDKPFQNVNRITYGACPRYVKQNTLKLATGMRNVPEKQTRGIFGAIAGFIENGWEGMVDGWYGFRHQNSEGTGQAADLKSTQAAINQINGKLNRLIEKTNEKFHQIEKEFSEVEGRIQDLEKYVEDTKIDLWSYNAELLVALENQHTIDLTDSEMNKLFERTRKQLRENAEDMGNGCFKIYHKCDNACIGSIRNGTYDHDVYRDEALNNRFQIKGVELKSGYKDWILWISFAISCFLLCVVLLGFIMWACQKGNIRCNICI

SEQ ID NO: 8701 - protein, 566 aa, synthetic construct
  REGION 1..566: note = hemagglutinin__InfluenzaA__AFH00791
MKTIIALSYILCLVFAQKLPGNDNSTATLCLGHHAVPNGTLVKTITNDQIEVTNATELVQGSSTGRICDSPHQILDGKNCTLIDALLGDPHCDGFQNKEWDLFVERSTAYSNCYPYDVPDYASLRSLVASSGTLEFTKEGFNWTGVAQDGTSYTCKRGSVKSFFSRLNWLHKLEYKYPALNVTMPNNDKFDKLYIWGVHHPSTDSDQTSLYVQASGRVTVSTKRSQQTVIPNIGSRPWVRGVSSRISIYWTIVKPGDILLINSTGNLIAPRGYFKIRSGKSSIMRSDAPIDNCNSECITPNGSIPNDKPFQNVNRITYGACPRYVKQNTLKLATGMRNVPEKQTRGIFGAIAGFIENGWEGMVDGWYGFRHQNSEGTGQAADLKSTQAAINQINGKLNRLIEKTNEKFHQIEKEFSEVEGRIQDLEKYVEDTKIDLWSYNAELLVALENQHTIDLTDSEMNKLFERTRKQLRENAEDMGNGCFKIYHKCDNACIGSIRNGTYDHDVYRDEALNNRFQIKGVELKSGYKDWILWISFAISCFLLCVVLLGFIMWACQKGNIRCNICI

SEQ ID NO: 8702 - protein, 566 aa, synthetic construct; identical to SEQ ID NO: 1342
  REGION 1..566: note = hemagglutinin__InfluenzaA__AFH00802

SEQ ID NO: 8703 - protein, 566 aa, synthetic construct
  REGION 1..566: note = hemagglutinin__InfluenzaA__AFH00813
MKTIIALSYILCLVFAQKLPGNDNSTATLCLGHHAVPNGTIVKTITNDQIEVTNATELVQSSSTGEICNSPHQILDGENCTLIDALLGDPQCDGFQNKKWDLFVERSKAHSNCYPYDVPDYASLRSLVASSGTLEFNNESFNWTGVTQNGTSSACIRRSNNSFFSRLNWLTHLNFKYPALNVTMPNNEQFDKLYIWGVHHPGTDKDQIFLYAQASGRITVSTKRSQQAVIPNIGSRPRVRDIPSRVSIYWTIVKPGDILLINSTGNLIAPRGYFKIRSGKSSIMRSDAPIGKCNSACITPNGSIPNDKPFQNVNRITYGACPRYVKQNTLKLATGMRNVPEKQTRGIFGAIAGFIENGWEGMVDGWYGFRHQNSEGRGQAADLKSTQAAIDQINGKLNRLIGKTNEKFHQIEKEFSEVEGRIQDLEKYVEDTKIDLWSYNAELLVALENQHTIDLTDSEMNKLFEKTKKQLRENAEDMGNGCFKIYHKCDNACIGSIRNGTYDHDVYRDEALNNRFQIKGVELKSGYKDWILWISFAISCFLLCVALLGFIMWACQKGNIRCNICI

SEQ ID NO: 8704 - protein, 566 aa, synthetic construct
  REGION 1..566: note = hemagglutinin__InfluenzaA__AFH00824
MKTIIALSYILRLVFAQKLPGNDNSTATLCLGHHAVPNGTIVKTITNDQIEVTNATELVQNSSIGEICNSPHQILDGENCTLIDALLGDPQCDGFQNKKWDLFVERSKAYSNCYPYDVPDYASLRSLVASSGTLEFNNESFNWTGVTQNGTSSACIRRSNNSFFSRLNWLTHLNFKYPALNVTMPNNEQFDKLYIWGVHHPGTDKDQIFLYAQSSGRITVSTKRSQQAVIPNIGSRPRIRDIPSRISIYWTIVKPGDILLINSTGNLIAPRGYFKIRSGKSSIMRSDAPIGKCNSECITPNGSIPNDKPFQNVNRITYGACPRYVKQSTLKLATGMRNVPEKQTRGIFGAIAGFIENGWEGMVDGWYGFRHQNSEGRGQAADLKSTQAAIDQINGKLNRLIGKTNEKFHQIEKEFSEVEGRIQDLEKYVEDTKIDLWSYNAELLVALENQHTIDLTDSEMNKLFEKTKKQLRENAEDMGNGCFKIYHKCDNACIGSIRNGTYDHDVYRDEALNNRFQIKGVELKSGYKDWILWISFAISCFLLCVALLGFIMWACQKGNIRCNICI

SEQ ID NO: 8705 - protein, 566 aa, synthetic construct
  REGION 1..566: note = hemagglutinin__InfluenzaA__AFH01407
MKTIIALSYILCLVFAQKLPGNDNSTATLCLGHHAVPNGTIVKTITNDQIEVTNATELVQSSSTGGICNSPHQILDGENCTLIDALLGDPQCDGFQNKKWDLFVERSKAYSNCYPYDVPDYASLRSLVASSGTLEFNNESFNWTGVTQNGTSSACKRRSNKSFFSRLNWLTHLKYKYPALNVTMPNNEKFDKLYIWGVHHPGTDSDQISLYAQASGRITVSTKRSQQTVIPNIGSRPRVRDISSRISIYWTIVKPGDILLINSTGNLIAPRGYFKIRSGKSSIMRSDAPIGKCNSECITPNGSIPNDKPFQNVNRITYGACPRYVKQNTLKLATGMRNVPEKQTRGIFGAIAGFIENGWEGMVDGWYGFRHQNSEGTGQAADLKSTQAAINQINGKLNRLIGKTNEKFHQIEKEFSEVEGRIQDLEKYVEDTKIDLWSYNAELLVALENQHTIDLTDSEMNKLFERTKKQLRENAEDMGNGCFKIYHKCDNACIESIRNGTYDHDVYRDEALNNRFQIKGVELKSGYKDWILWISFAISCFLLCVALLGFIMWACQKGNIRCNICI

SEQ ID NO: 8706 - protein, 566 aa, synthetic construct
  REGION 1..566: note = hemagglutinin__InfluenzaA__AFH34940
MKTIIALSYILCLVFAQKLPGNDNSTATLCLGHHAVPNGTIVKTITNDQIEVTNATELVQSSSTGEICDSPHQILDGENCTLIDALLGDPQCDGFQNKKWDLFVERSKAYSNCYPYDVPDYASLRSLVASSGTLEFNNESFNWTGVTQNGTSSACIRRSNSSFFSRLNWLTHLNFKYPALNVTMPNNEQFDKLYIWGVHHPGTDKDQIFLYAQSSGRITVSTKRSQQAVIPNIGSRPRIRNIPSRISIYWTIVKPGDILLINSTGNLIAPRGYFKIRSGKSSIMRSDAPIGKCNSECITPNGSIPNDKPFQNVNRITYGACPRYVKQSTLKLATGMRNVPEKQTRGIFGAIAGFIENGWEGMVDGWYGFRHQNSEGRGQAADLKSTQAAIDQINGKLNRLIGKTNEKFHQIEKEFSEVEGRIQDLEKYVEDTKIDLWSYNAELLVALENQHTIDLTGSEMNKLFEKTKKQLRENAEDMGNGCFKIYHKCDNACIGSIRNGTYNHDVYRDEALNNRFQIKGVELKSGYKDWILWISFAISCFLLCVALLGFIMWACQKGNIRCNICI

SEQ ID NO: 8707 - protein, 566 aa, synthetic construct
  REGION 1..566: note = hemagglutinin__InfluenzaA__AFH34961
MKTIIALSYILCLVFAQKLPGNDNSTATLCLGHHAVPNGTIVKTITNDQIEVTNATELVQSSSTGEICDSPHQILDGENCTLIDALLGDPQCDGFQNKKWDLFVERSKAYSNCYPYDVPDYASLRSLVAASGTLEFNNESFNWTGVTQNGTSSACIRRSNSSFFSRLNWLTHLNFKYPALNVTMPNNEQFDKLYIWGVHHPGTDKDQIFLYAQSSGRITVSTKRSQQAVIPNIGSRPRIRNIPSRISIYWTIVKPGDILLINSTGNLIAPRGYFKIRSGKSSIMRSDAPIGKCNSECITPNGSIPNDKPFQNVNRITYGACPRYVKQSTLKLATGMRNVPEKQTRGIFGAIAGFIENGWEGMVDGWYGFRHQNSEGRGQAADLKSTQAAIDQINGKLNRLIGKTNEKFHQIEKEFSEVEGRIQDLEKYVEDTKIDLWSYNAELLVALENQHTIDLTDSEMNKLFEKTKKQLRENAEDMGNGCFKIYHKCDNACIGSIRNGTYNHDVYRDEALNNRFQIKGVELKSGYKDWILWISFAISCFLLCVALLGFIMWACQKGNIRCNICI

SEQ ID NO: 8708 - protein, 566 aa, synthetic construct
  REGION 1..566: note = hemagglutinin__InfluenzaA__AFH34968
MKTIIALSYILCLVFAQKLPGNDNSTATLCLGHHAVPNGTIVKTITNDQIEVTNATELVQSSSTGEICDSPHQILDGENCTLIDALLGDPQCDGFQNKKWDLFVERSKAYSNCYPYDVPDYASLRSLVAASGTLEFNNESFNWTGVTQNGTSSACIRRSNSSFFSRLNWLTHLNFKYPALNVTMPNNEQFDKLYIWGVHHPGTDKDQIFLYAQSSGRITVSTKRSQQAVIPNIGSRPRIRDIPSRISIYWTIVKPGDILLINSTGNLIAPRGYFKIRSGKSSIMRSDAPIGKCNSACITPNGSIPNDKPFQNVNRITYGACPRYVKQSTLKLATGMRNVPEKQTRGIFGAIAGFIENGWEGMVDGWYGFRHQNSEGRGQAADLKSTQAAIDQINGKLNRLIGKTNEKFHQIEKEFSEVEGRIQDLEKYVEDTKIDLWSYNAELLVALENQHTIDLTDSEMNKLFEKTKKQLRENAEDMGNGCFKIYHKCDNACIGSIRNGTYNHDVYRDEALNNRFQIKGVELKSGYKDWILWISFAISCFLLCVALLGFIMWACQKGNIRCNICI

SEQ ID NO: 8709 - protein, 566 aa, synthetic construct
  REGION 1..566: note = hemagglutinin__InfluenzaA__AFH34975
MKTIIALSYILCLVFAQKLPGNDNSTATLCLGHHAVPNGTIVKTITNDRIEVTNATELVQNSSIGEICDSPHQILDGENCTLIDALLGDPQCDGFQNKKWDLFVERSKAYSNCYPYDVPDYASLRSLVASSGTLEFNNESFNWNGVTQNGTSSACIRRSNNSFFSRLNWLTHLNFKYPALNVTMPNNEQFDKLYIWGVHHPGTDKDQIFLYAQPSGRITVSTKRSQQAVIPNIGSRPRIRNIPSRISIYWTIVKPGDILLINSTGNLIAPRGYFKIRSGKSSIMRSDAPIGKCKSECITPNGSIPNDKPFQNVNRITYGACPRYVKQSTLKLATGMRNVPEKQTRGIFGAIAGFIENGWEGMVDGWYGFRHQNSEGRGQAADLKSTQAAIDQINGKLNRLIGKTNEKFHQIEKEFSEVEGRIQDLEKYVEDTKIDLWSYNAELLVALENQHTIDLTDSEMNKLFEKTKKQLRENAEDMGNGCFKIYHKCDNACIGSIRNGTYDHDVYRDEALNNRFQIKGVELKSGYKDWILWISFAISCFLLCVALLGFIMWACQKGNIRCNICI

SEQ ID NO: 8710 - protein, 566 aa, synthetic construct; identical to SEQ ID NO: 3411
  REGION 1..566: note = hemagglutinin__InfluenzaA__AFH74464

SEQ ID NO: 8711 - protein, 566 aa, synthetic construct; identical to SEQ ID NO: 2669
  REGION 1..566: note = hemagglutinin__InfluenzaA__AFH74465

SEQ ID NO: 8712 - protein, 566 aa, synthetic construct; identical to SEQ ID NO: 3430
  REGION 1..566: note = hemagglutinin__InfluenzaA__AFH74477

SEQ ID NO: 8713 - protein, 566 aa, synthetic construct
  REGION 1..566: note = hemagglutinin__InfluenzaA__AFH74488
MKTIIALSYILCLVFAQKLPGNDNSTATLCLGHHAVPNGTIVKTITNDQIEVTNATELVQSSSTGEICDNPHQILDGKNCTLIDALLGDPQCDGFQNKKWDLFVERSKAYSNCYPYDVPDYASLRSLVASSGTLEFNNESFNWTGVTQNGTSSACIRRSKNSFFSRLNWLTHLNFKYPALNVTMPNNEQFDKLYIWGVHHPGTDKDQIFLYAQASGRITVSTKRSQQTVIPNIGSRPRVRNIPSRISIYWTIVKPGDILLINSTGNLIAPRGYFKIRSGKSSIMRSDAPIGKCNSECITPNGSIPNDKPFQNVNRITYGACPRYVKQNTLKLATGMRNVPEKQTRGIFGAIAGFIENGWEGMVDGWYGFRHQNSEGRGQAADLKSTQAAIDQINGKLNRLIGKTNEKFHQIEKEFSEVEGRIQDLEKYVEDTKIDLWSYNAELLVALENQHTIDLTDSEMNKLFERTKKQLRENAEDMGNGCFKIYHKCDNACIGSIRNGTYDHDVYRDEALNNRFQIKGVELKSGYKDWILWISFAISCFLLCVALLGFIMWACQKGNIRCNICI

SEQ ID NO: 8714 - protein, 566 aa, synthetic construct; identical to SEQ ID NO: 3411
  REGION 1..566: note = hemagglutinin__InfluenzaA__AFH74499

SEQ ID NO: 8715 - protein, 566 aa, synthetic construct; identical to SEQ ID NO: 3613
  REGION 1..566: note = hemagglutinin__InfluenzaA__AFH74510

SEQ ID NO: 8716 - protein, 566 aa, synthetic construct
  REGION 1..566: note = hemagglutinin__InfluenzaA__AFH74521
MKTIIALSYILCLVFAQKIPGNDNSTATLCLGHHAVPNGTIVKTITNDQIEVTNATELVQSSSTGEICNSPHQILDGENCTLIDALLGDPQCDGFQNKKWDLFVERSKAYSNCYPYDVPDYASLRSLVASSGTLEFNNESFNWTGVTQNGTSSACIRRSNNSFFSRLNWLTHSKSKYPALNVTMPNNEQFDKLYIWGVHHPGTDNDQIFLYAQASGRITVSTKRSQQTVIPNIGSRPRIRDIPSRISIYWTIVKPGDILLINSTGNLIAPRGYFKIRSGKSSIMKSDAPIGKCNSECITPNGSIPNDKPFQNVNRITYGACPRYVKQNTLKLATGMRNVPEKQTRGIFGAIAGFIENGWEGMVDGWYGFRHQNSEGRGQAADLKSTQAAIDQINGKLNRLIGKTNEKFHQIEKEFSEVEGRIQDLEKYVEDTKVDLWSYNAELLVALENQHTIDLTDSEMNKLFEKTKKQLRENAEDMGNGCFKIYHKCDNACIGSIRNGTYDHDVYRDEALNNRFQIKGVELKSGYKDWILWISFAISCFLLCVALLGFIMWACQKGNIRCNICI

SEQ ID NO: 8717 - protein, 566 aa, synthetic construct; identical to SEQ ID NO: 6988
  REGION 1..566: note = hemagglutinin__InfluenzaA__AFH74532

SEQ ID NO: 8718 - protein, 566 aa, synthetic construct; identical to SEQ ID NO: 3613
  REGION 1..566: note = hemagglutinin__InfluenzaA__AFH74543

SEQ ID NO: 8719 - protein, 566 aa, synthetic construct; identical to SEQ ID NO: 3613
  REGION 1..566: note = hemagglutinin__InfluenzaA__AFH74554

SEQ ID NO: 8720 - protein, 566 aa, synthetic construct; identical to SEQ ID NO: 3613
  REGION 1..566: note = hemagglutinin__InfluenzaA__AFH74565

SEQ ID NO: 8721 - protein, 566 aa, synthetic construct; identical to SEQ ID NO: 3613
  REGION 1..566: note = hemagglutinin__InfluenzaA__AFH74576

SEQ ID NO: 8722 - protein, 566 aa, synthetic construct; identical to SEQ ID NO: 3613
  REGION 1..566: note = hemagglutinin__InfluenzaA__AFH74587

SEQ ID NO: 8723 - protein, 566 aa, synthetic construct
  REGION 1..566: note = hemagglutinin__InfluenzaA__AFH74598
MKTIIALSYILCLVFAQKLPENDNSTATLCLGHHAVPNGTIVKTITNDQIEVTNATELVQSSSTGEICDSPHQILDGKNCTLIDALLGDPQCDGFQNKKWDLFVERSKAYSNCYPYDVPDYASLRSLVASSGTLEFNNESFNWTGVTQNGTSSACIRRSKNSFFSRLNWLTHLNFKYPALNVTMPNNEQFDKLYIWGVHHPGTDKDQIFLYAQASGRITVSTKRSQQTAIPNIGSRPRVRNIPSRISIYWTIVKPGDILLINSTGNLIAPRGYFKIRSGKSSIMRSDAPIGKCNSECITPNGSIPNDKPFQNVNRITYGACPRYVKQNTLKLATGMRNVPEKQTRGIFGAIAGFIENGWEGMVDGWYGFRHQNSEGRGQAADLKSTQAAIDQINGKLNRLIGKTNEKFHQIEKEFSEVEGRIQDLEKYVEDTKIDLWSYNAELLVALENQHTIDLTDSEMNKLFEKTKKQLRENAEDMGNGCFKIYHKCDNACIGSIRNGTYDHDVYRDEALNNRFQIKGVELKSGYKDWILWISFAISCFLLCVALLGFIMWACQKGNIRCNICI

SEQ ID NO: 8724 - protein, 566 aa, synthetic construct; identical to SEQ ID NO: 3411
  REGION 1..566: note = hemagglutinin__InfluenzaA__AFH74609

SEQ ID NO: 8725 - protein, 566 aa, synthetic construct; identical to SEQ ID NO: 3613
  REGION 1..566: note = hemagglutinin__InfluenzaA__AFH74620

SEQ ID NO: 8726 - protein, 566 aa, synthetic construct
  REGION 1..566: note = hemagglutinin__InfluenzaA__AFH74631
MKTIIALSYILCLVFAQKLPGNDNSTATLCLGHHAVPNGTIVKTITNDQIEVTNATELVQSSSTGEICDSPHQILDGTNCTLIDALLGDPQCDGFQNKKWDLFVERSKAYSNCYPYDVPDYASLRSLVASSGTLEFNNESFNWTGVTQNGTSSACIRRSKNSFFSRLNWLTHLNFKYPALNVTMPNNEQFDKLYIWGVHHPGTDKDQIFLYAQASGRITVSTKRSQQTAIPNIGSRPRVRNIPSRISIYWTIVKPGDILLINSTGNLIAPRGYFKIRSGKSSIMRSDAPIGKCNSECITPNGSIPNDKPFQNVNRITYGACPRYVKQNTLKLATGMRNVPEKQTRGIFGAIAGFIENGWEGMVDGWYGFRHQNSEGRGQAADLKSTQAAIDQINGKLNRLIGKTNEKFHQIEKEFSEVEGRIQDLEKYVEDTKIDLWSYNAELLVALENQHTIDLTDSEMNKLFEKTKKQLRENAEDMGNGCFKIYHKCDNACIGSIRNGTYDHDVYRDEALNNRFQIKGVELKSGYKDWILWISFAISCFLLCVALLGFIMWACQKGNIRCNICI

SEQ ID NO: 8727 - protein, 566 aa, synthetic construct; identical to SEQ ID NO: 3411
  REGION 1..566: note = hemagglutinin__InfluenzaA__AFH74642

SEQ ID NO: 8728 - protein, 566 aa, synthetic construct; identical to SEQ ID NO: 3411
  REGION 1..566: note = hemagglutinin__InfluenzaA__AFH74653

SEQ ID NO: 8729 - protein, 566 aa, synthetic construct; identical to SEQ ID NO: 3411
  REGION 1..566: note = hemagglutinin__InfluenzaA__AFH74664

SEQ ID NO: 8730 - protein, 566 aa, synthetic construct; identical to SEQ ID NO: 3411
  REGION 1..566: note = hemagglutinin__InfluenzaA__AFH74675

SEQ ID NO: 8731 - protein, 566 aa, synthetic construct; identical to SEQ ID NO: 8159
  REGION 1..566: note = hemagglutinin__InfluenzaA__AFH74686

SEQ ID NO: 8732 - protein, 566 aa, synthetic construct; identical to SEQ ID NO: 8159
  REGION 1..566: note = hemagglutinin__InfluenzaA__AFH74697

SEQ ID NO: 8733 - protein, 566 aa, synthetic construct; identical to SEQ ID NO: 3613
  REGION 1..566: note = hemagglutinin__InfluenzaA__AFH74708

SEQ ID NO: 8734 - protein, 566 aa, synthetic construct; identical to SEQ ID NO: 3613
  REGION 1..566: note = hemagglutinin__InfluenzaA__AFH74719

SEQ ID NO: 8735 - protein, 566 aa, synthetic construct; identical to SEQ ID NO: 3613
  REGION 1..566: note = hemagglutinin__InfluenzaA__AFH74730

SEQ ID NO: 8736 - protein, 566 aa, synthetic construct
  REGION 1..566: note = hemagglutinin__InfluenzaA__AFH74741
MKTIIALSYILCLVFAQKLPGNDNSTATLCLGHHAVPNGTIVKTITNDQIEVTNATELVQNSSTGEICDSPHQILDGKNCTLIDALLGDPQCDGFQNKKWDLFVERSKAYSNCYPYDVPDYASLRSLVASSGTLEFNNESFNWTGVTQNGTSSACIRRSKNSFFSRLNWLTHLNFKYPALNVTMPNNEQFDKLYIWGVHHPGTDKDQIFLYAQASGRITVSTKRSQQTAIPNIGSRPRVRNIPSRISIYWTIVKPGDILLINSTGNLIAPRGYFKIRSGKSSIMRSDAPIGKCNSECITPNGSIPNDKPFQNVNRITYGACPRYVKQNTLKLATGMRNVPEKQTRGIFGAIAGFIENGWEGMVDGWYGFRHQNSEGRGQAADLKSTQAAIDQINGKLNRLIGKTNEKFHQIEKEFSEVEGRIQDLEKYVEDTKIDLWSYNAELLVALENQHTIDLTDSEMNKLFEKTKKQLRENAEDMGNGCFKIYHKCDNACIGSIRNGTYDHDVYRDEALNNRFQIKGVELKSGYKDWILWISFAISCFLLCVALLGFIMWACQKGNIRCNICI

SEQ ID NO: 8737 - protein, 566 aa, synthetic construct; identical to SEQ ID NO: 3613
  REGION 1..566: note = hemagglutinin__InfluenzaA__AFH74752

SEQ ID NO: 8738 - protein, 566 aa, synthetic construct; identical to SEQ ID NO: 3613
  REGION 1..566: note = hemagglutinin__InfluenzaA__AFH74763

SEQ ID NO: 8739 - protein, 566 aa, synthetic construct; identical to SEQ ID NO: 3613
  REGION 1..566: note = hemagglutinin__InfluenzaA__AFH74774

SEQ ID NO: 8740 - protein, 566 aa, synthetic construct; identical to SEQ ID NO: 6988
  REGION 1..566: note = hemagglutinin__InfluenzaA__AFH74785

SEQ ID NO: 8741 - protein, 566 aa, synthetic construct; identical to SEQ ID NO: 3613
  REGION 1..566: note = hemagglutinin__InfluenzaA__AFH74796

SEQ ID NO: 8742 - protein, 566 aa, synthetic construct; identical to SEQ ID NO: 8169
  REGION 1..566: note = hemagglutinin__InfluenzaA__AFH74807

SEQ ID NO: 8743 - protein, 566 aa, synthetic construct; identical to SEQ ID NO: 8169
  REGION 1..566: note = hemagglutinin__InfluenzaA__AFH74818

SEQ ID NO: 8744 - protein, 566 aa, synthetic construct; identical to SEQ ID NO: 8169
  REGION 1..566: note = hemagglutinin__InfluenzaA__AFH74829

SEQ ID NO: 8745 - protein, 566 aa, synthetic construct; identical to SEQ ID NO: 8169
  REGION 1..566: note = hemagglutinin__InfluenzaA__AFH74840

SEQ ID NO: 8746 - protein, 566 aa, synthetic construct
  REGION 1..566: note = hemagglutinin__InfluenzaA__AFH74851
MKTIIALSYILCLVFAQKLPGNDNSTATLCLGHHAVPNGTIVKTITNDQIEVTNATELVQSSSTGEICDSPHQILDGKNCTLIDALLGDPQCDGFQNKKWDLFVERSKAYGNCYPYDVPDYASLRSLVASSGTLEFNNESFNWTGVTQNGTSSACIRRSKNSFFSRLNWLTHLNFKYPALNVTMPNNEQFDKLYIWGVHHPGTDKDQIFLYAQASGRITVSTKRSQQTAIPNIGSRPRVRNIPSRISIYWTIVKPGDILLINSTGNLIAPRGYFKIRSGKSSIMRSDAPIGKCNSECITPNGSIPNDKPFQNVNRITYGACPRYVKQNTLRLATGMRNVPEKQTRGIFGAIAGFIENGWEGMVDGWYGFRHQNSEGRGQAADLKSTQAAIDQINGKLNRLIGKTNEKFHQIEKEFSEVEGRIQDLEKYVEDTKIDLWSYNAELLVALENQHTIDLTDSEMNKLFEKTKKQLRENAEDMGNGCFKIYHKCDNACIGSIRNGTYDHDVYRDEALNNRFQIKGVELKSGYKDWILWISFAISCFLLCVALLGFIMWACQKGNIRCNICI

SEQ ID NO: 8747 - protein, 566 aa, synthetic construct; identical to SEQ ID NO: 8172
  REGION 1..566: note = hemagglutinin__InfluenzaA__AFH74862

SEQ ID NO: 8748 - protein, 566 aa, synthetic construct; identical to SEQ ID NO: 8172
  REGION 1..566: note = hemagglutinin__InfluenzaA__AFH74873

SEQ ID NO: 8749 - protein, 566 aa, synthetic construct; identical to SEQ ID NO: 3613
  REGION 1..566: note = hemagglutinin__InfluenzaA__AFH74884

SEQ ID NO: 8750 - protein, 566 aa, synthetic construct; identical to SEQ ID NO: 3613
  REGION 1..566: note = hemagglutinin__InfluenzaA__AFH74895

SEQ ID NO: 8751 - protein, 566 aa, synthetic construct; identical to SEQ ID NO: 3613
  REGION 1..566: note = hemagglutinin__InfluenzaA__AFH74906

SEQ ID NO: 8752 - protein, 566 aa, synthetic construct; identical to SEQ ID NO: 3411
  REGION 1..566: note = hemagglutinin__InfluenzaA__AFH74917

SEQ ID NO: 8753 - protein, 566 aa, synthetic construct; identical to SEQ ID NO: 3613
  REGION 1..566: note = hemagglutinin__InfluenzaA__AFH74928

SEQ ID NO: 8754 - protein, 566 aa, synthetic construct; identical to SEQ ID NO: 3613
  REGION 1..566: note = hemagglutinin__InfluenzaA__AFH74939

SEQ ID NO: 8755 - protein, 566 aa, synthetic construct
  REGION 1..566: note = hemagglutinin__InfluenzaA__AFH74950
MKTIIALSYILCLVFAQKLPGNDNSTATLCLGHHAVPNGTIVKTITNDQIEVTNATELVQSSSTGEICDSPHQILDGKNCTLIDALLGDPQCDGFQNKKWDLFVERSKAYGNCYPYDVPDYASLRSLVASSGTLEFNNESFNWTGVTQNGTSSACIRRSKNSFFSRLNWLTHLNFKYPALNVTMPNNEQFDKLYIWGVHHPGTDKDQIFLYAQASGRITVSTKRSQQTAIPNIGSRPRVRNIPSRISIYWTIVKPGDILLINSTGNLIAPRGYFKIRSGKSSIMRSDAPIGKCNSECITPNGSIPNDKPFQNVNRITYGACPRYVKQNTLKLATGMRNVPEKQTRGIFGAIAGFIENGWEGMVDGWYGFRHQNSEGRGQAADLKSTQAAIDQINGKLNRLIGKTNEKFHQIEKEFSEVEGRIQDLEKYVEDTKIDLWSYNAELLVALENQHTIDLTDSEMNKLFEKTKKQLRENAEDMGNGCFKIYHKCDNACIGSIRNGTYDHDVYRDEALNNRFQIKGVELKSGYKDWILWISFAISCFLLCVALLGFIMWACQKGNIRCNICI

SEQ ID NO: 8756 - protein, 566 aa, synthetic construct; identical to SEQ ID NO: 8172
  REGION 1..566: note = hemagglutinin__InfluenzaA__AFH74961

SEQ ID NO: 8757 - protein, 566 aa, synthetic construct; identical to SEQ ID NO: 3613
  REGION 1..566: note = hemagglutinin__InfluenzaA__AFH75388

SEQ ID NO: 8758 - protein, 566 aa, synthetic construct
  REGION 1..566: note = hemagglutinin__InfluenzaA__AFH97140
MKAILVVLLYIFATANADTLCIGYHANNSTDTVDTVLEKNVTVTHSVNLLEDKHNGKLCKLRGVAPLHLGKCNIAGWILGNPECESLSTASSWSYIVETSSSDNGTCYPGDFIDYEELREQLSSVSSFERFEIFPKTSSWPNHDSNKGVTAACPHAGAKSFYKNLIWLVKKGNSYPKLSKSYINDKGKEVLVLWGIHHPSTSADQQSLYQNADAYVFVGTSRYSKKFKPEIAIRPKVRDQEGRMNYYWTLVEPGDKITFEATGNLVVPRYAFAMERNAGSGIIISDTPVHDCNTTCQTPKGAINTSLPFQNIHPITIGKCPKYVKSTKLRLATGLRNVPSIQSRGLFGAIAGFIEGGWTGMVDGWYGYHHQNEQGSGYAADLKSTQNAIDEITNKVNSVIEKMNTQFTAVGKEFNHLEKRIENLNKKVDDGFLDIWTYNAELLVLLENERTLDYHDSNVKNLYEKVRSQLKNNAKEIGNGCFEFYHKCDNTCMESVKNGTYDYPKYSEEAKLNREEIDGVKLESTRIYQILAIYSTVASSLVLVVSLGAISFWMCSNGSLQCRICI

SEQ ID NO: 8759 - protein, 566 aa, synthetic construct
  REGION 1..566: note = hemagglutinin__InfluenzaA__AFJ05142
MKTIIALSYILCLVFAQKIPGNDNSTATLCLGHHAVPNGTIVKTITNDQIEVTNATELVQSSSTGEICDSPHQILDGENCTLIDALLGDPQCDGFQNKKWDLFVERSKAYSNCYPYDVPDYASLRSLVASSGTLEFNNECFNWTGVTQNGTSSACIRRSNSSFFSRLNWLTHLNFKYPALNVTMPNNEQFDKLYIWGVHHPGTDKDQIFLYAQSSGRITVSTKRSQQAVIPNIGSRPRIRNIPSRISIYWTIVKPGDILLINSTGNLIAPRGYFKIRSGKSSIMRSDAPIGKCNSGCITPNGSIPNDKPFQNVNRITYGACPRYVKQSTLKLATGMRNVPEKQTRGIFGAIAGFIENGWEGMVDGWYGFRHQNSEGRGQAADLKSTQAAIDQINGKLNRLIGKTNEKFHQIEKEFSEVEGRIQDLEKYVEDTKIDLWSYNAELLVALENQHTIDLTDSEMNKLFEKTKKQLRENAEDMGNGCFKIYHKCDNACIGSIRNGTYNHDVYRDEALNNRFQIKGVELKSGYKDWILWISFAISCFLLCVALLGFIMWACQKGNIRCNICI

SEQ ID NO: 8760 - protein, 566 aa, synthetic construct
  REGION 1..566: note = hemagglutinin__InfluenzaA__AFJ05144
MKTIIALSYILCLVFAQKLPGNDNSTATLCLGHHAVPNGTIVKTITNDQIEVTNATELVQSSSTGEICDSPHQILDGENCTLIDALLGDPQCDGFQNKKWDLFVERSKAYSNCYPYDVPDYASLRSLVASSGTLEFNNESFNWTGVTQNGTSSACIRRSNSSFFSRLNWLTHLNFKYPALNVTMPNNEQFDKLYIWGVHHPGTDKDQIFLYAQSSGRITVSTKRSQQAVIPNIGSRPRVRNIPSRISIYWTIVKPGDILLINSTGNLIAPRGYFKIRSGKSSIMRSDAPIGKCNSECITPNGSIPNDKPFQNVNRITYGACPRYVKQSTLKLATGMRNVPEKQTRGIFGAIAGFIENGWEGMVDGWYGFRHQNSEGRGQAADLKSTQAAIDQINGKLNRLIGKTNEKFHQIEKEFSEVEGRIQDLEKYVEDTKIDLWSYNAELLVALENQHTIDLTDSEMNKLFEKTKKQLRENAEDMGNGCFKIYHKCDNACIGSIRNGTYNHDVYRDEALNNRFQIKGVELKSGYKDWILWISFAISCFLLCVALLGFIMWACQKGNIRCNICI

SEQ ID NO: 8761 - protein, 566 aa, synthetic construct
  REGION 1..566: note = hemagglutinin__InfluenzaA__AFJ11706
MKTIIALSYILCLVFAQKLPGNDNSTATLCLGHHAVPNGTIVKTITNDQIEVTNATELVQSSSTGEICDSPHQILDGENCTLIDALLGDPQCDGFQNKKWDLFVERSKAYSNCYPYDVPDYASLRSLVASSGTLEFNNESFNWTGVTQNGTSSACIRSSNNSFFSRLNWLTHLNFKYPALNVTMPNNEQFDKLYIWGVHHPGTDKDQIFLYAQASGRITVSTKRSQQAVIPNIGSRPRVRNIPSRISIYWTIVKPGDILLINSTGNLIAPRGYFKIRSGKSSIMRSDAPIGKCNSECITPNGSIPNDKPFQNVNRITYGACPRYVKQSTLKLATGMRNVPEKQTRGIFGAIAGFIENGWEGMVDGWYGFRHQNSEGRGQAADLKSTQAAIDQINGKLNRLIGKTNEKFHQIEKEFSEVEGRIQDLEKYVEDTKIDLWSYNAELLVALENQHTIDLTDSEMNKLFEKTKKQLRENAEDMGNGCFTIYHKCDNACIGSIRNGTYDHNVYRDEALNNRFQIKGVELKSGYKDWILWISFAISCFLLCVALLGFIMWACQKGNIRCNICI

SEQ ID NO: 8762 - protein, 566 aa, synthetic construct; identical to SEQ ID NO: 6982
  REGION 1..566: note = hemagglutinin__InfluenzaA__AFJ11728

SEQ ID NO: 8763 - protein, 566 aa, synthetic construct
  REGION 1..566: note = hemagglutinin__InfluenzaA__AFJ19842
MKTIIALSYILCLVFAQKLPGNDNSTATLCLGHHAVPNGTIVKTITNDQIEVTNATELVQSSSAGEICDSPHHILDGENCTLIDALLGDPQCDGFQNKKWDLFVERSRAYSNCYPYDVPDYASLRSLVASSGTLEFNNESFNWTGVTQNGTSSACIRRSNNSFFSRLNWLTHLNFKYPALNVTMPNNEQFDKLYIWGVHHPGTDKDQIFLYAQASGRITVSTKRSQQAVIPNIGSRPRVRNIPSRISIYWTIVKPGDILLINSTGNLIAPRGYFKIRSGKSSIMRSDAPIGKCNSECITPNGSIPNDKPFQNVNRITYGACPRYVKQSTLKLATGMRNVPEKQTRGIFGAIAGFIENGWEGMMDGWYGFRHQNSEGRGQAADLKSTQAAIDQINGKLNRLIGKTNEKFHQIEKEFSEVEGRIQDLEKYVEDTKIDLWSYNAELLVALENQHTIDLTDSEMNKLFEKTKKQLRENAEDMGNGCFKIYHKCDNACIGSIRNGTYDHDVYRDEALNNRFQIKGIELKSGYKDWILWISFAISCFLLCVALLGFIMWACQKGNIRCNICI

SEQ ID NO: 8764 - protein, 566 aa, synthetic construct; identical to SEQ ID NO: 8361
  REGION 1..566: note = hemagglutinin__InfluenzaA__AFJ20171

SEQ ID NO: 8765 - protein, 566 aa, synthetic construct; identical to SEQ ID NO: 6982
  REGION 1..566: note = hemagglutinin__InfluenzaA__AFJ20182

SEQ ID NO: 8766 - protein, 566 aa, synthetic construct
  REGION 1..566: note = hemagglutinin__InfluenzaA__AFJ74386
MKAKLLVLLCAFTATYADTICIGYHANNSTDTVDTVLEKNVTVTHSVNLLEDSHNGKLCRLKGTAPLQLGNCSVAGWILGNPECESLFSKESWSYIAETPNPENGTCYPGYFADYEELREQLSSVSSFERFEIFPKESSWPNHTVTKGVTASCSHNGKSSFYKNLLWLTEKNGLYPNLSKSYVNNKEKEVLVLWGVHHPSNIGDQRAIYHTENAYVSVMSSHYSRRFTPEIAKRPKVRDQEGRINYYWTLLEPGDTIIFEANGNLIAPWYAFALSRGFGSGIITSNASMGECDAKCQTPQGAINSSLPFQNVHPVTIGECPKYVRSTKLRMVTGLRNIPSIQSRGLFGAIAGFIEGGWTGMIDGWYGYHHQNEQGSGYAADQKSTQNAIDGITNKVNSVIEKMNTQFTAVGKEFNKLERRMENLNKKVDDGFLDIWTYNAELLVLLENERTLDFHDSNVKNLYEKVKNQLKNNAKEIGNGCFEFYHKCNNECMESVKNGTYDYPKYSGESKLNREKIDGVKLESMGVYQILAIYSTVASSLVLLVSLGAISFWMCSNGSLQCRICI

SEQ ID NO: 8767 - protein, 566 aa, synthetic construct
  REGION 1..566: note = hemagglutinin__InfluenzaA__AFJ74407
MKTIIALSYILCLVFAQKLPGNDNSTATLCLGHHAVPNGTLVKTITNDQIEVTNATELVQSSSTGRICDSPHRILDGKNCTLIDALLGDPHCDGFQNKEWDLFVERSKAYSNCYPYDVPDYASLRSLVASSGTLEFTNEGFNWTGVAQDGTSYACKRGSVKSFFSRLNWLHKLEYKYPALNVTMPNNDKFDKLYIWGVHHPSTDSDQTSLYVQASGRVTVSTKRSQQTVIPNIGSRPWVRGVSSRISIYWTIVKPGDILLINSTGNLIAPRGYFKIRSGKSSIMRSDAPIGNCSSECITPNGSIPNDKPFQNVNRITYGACPRYVKQNTLKLATGMRNVPEKQTRGIFGAIAGFIENGWEGMVDGWYGFRHQNSEGTGQAADLKSTQAAINQINGKLNRLIEKTNEKFHQIEKEFSEVEGRIQDLEKYVEDTKIDLWSYNAELLVALENQHTIDLTDSEMNKLFERTRKQLRENAEDMGNGCFKIYHKCDNACIGSIRNGTYDHDVYRDEALNNRFQIKGVELKSGYKDWILWISFAISCFLLCVVLLGFIMWACQKGNIRCNICI

SEQ ID NO: 8768 - protein, 566 aa, synthetic construct
  REGION 1..566: note = hemagglutinin__InfluenzaA__AFJ74418
MKTIIALSYILCLVFAQKLPGNDNSTATLCLGHHAVPNGTLVKTITNDQIEVTNATELVQSSSTGRICDSPHQILDGENCTLIDALLGDPHCDGFQNKEWDLFVERSKAYSNCYPYDVPDYASLRSLVASSGTLEFNNESFNWTGVAQNGTSSACKRRSIKSFFSRLNWLHQLKYKYPALNVTMPNNEKFDKLYIWGVHHPSTDSDQISLYAQASGRVTVSTKRSQQTVIPNIGSRPWVRGVSSRISIYWTIVKPGDILLINSTGNLIAPRGYFKIRSGKSSIMRSDAPIGKCNSECITPNGSIPNDKPFQNVNRITYGACPRYVKQNTLKLATGMRNVPEKQTRGIFGAIAGFIENGWEGMVDGWYGFRHQNSEGTGQAADLKSTQAAINQINGKLNRLIEKTNEKFHQIEKEFSEVEGRIQDLEKYVEDTKIDLWSYNAELLVALENQHTIDLTDSEMNKLFERTKKQLRENAEDMGNGCFKIYHKCDNACIGSIRNGTYDHDVYRDEALNNRFQIKGVELKSGYKDWILWISFAISCFLLCVVLLGFIMWACQKGNIRCNICI

SEQ ID NO: 8769 - protein, 566 aa, synthetic construct
  REGION 1..566: note = hemagglutinin__InfluenzaA__AFJ74437
MKTIIALSYILCKVFAQKLPGNDNSTATLCLGHHAVPNGTLVKTITNDQIEVTNATELVQSSSTGRICDSPHQILDGENCTLIDALLGDPHCDGFQNKEWDLFVERSKAYSNCYPYDVPDYASLRSLVASSGTLEFNNESFNWTGVAQNGTSSACKRRSIKSFFSRLNWLHQLKYKYPALNVTMPNNEKFDKLYIWGVHHPSTDSDQISLYAQASGRVTVSTKRSQQTVIPNIGSRPWVRGVSSRISIYWTIVKPGDILLINSTGNLIAPRGYFKIRSGKSSIMRSDAPIGKCNSECITPNGSIPNDKPFQNVNRITYGACPRYVKQNTLKLATGMRNVPEKQTRGIFGAIAGFIENGWEGMVDGWYGFRHQNSEGTGQAADLKSTQAAINQINGKLNRLIEKTNEKFHQIEKEFSEVEGRIQDLEKYVEDTKIDLWSYNAELLVALENQHTIDLTDSEMNKLFERTKKQLRENAEDMGNGCFKIYHKCDNACIGSIRNGTYDHDVYRDEALNNRFQIKGVELKSGYKDWILWISFAISCFLLCVVLLGFIMWACQKGNIRCNICI

SEQ ID NO: 8770 - protein, 566 aa, synthetic construct
  REGION 1..566: note = hemagglutinin__InfluenzaA__AFJ74448
MKTIIALSYILCLVFAQKLPGNDNSTATLCLGHHAVPNGTLVKTITNDQIEVTNATELVQSSSTGRICDSPHQILDGENCTLIDALLGGPHCDGFQNKEWDLFVERSKAYSNCYPYDVPDYASLRSLVASSGTLEFNNESFNWTGVAQNGTSSACKRRSNKSFFSRLNWLHQLKYKYPALNVTMPNNEKFDKLYIWGVHHPSTDSDQISLYAQASGRVTVSTKRSQQTVIPNIGSRPWVRGVSSRISIYWTIVKPGDILLINSTGNLIAPRGYFKIRSGKSSIMRSDAPIGKCNSECITPNGSIPNDKPFQNVNRITYGACPRYVKQNTLKLATGMRNVPEKQTRGIFGAIAGFIENGWEGMVDGWYGFRHQNSEGTGQAADLKSTQAAINQINGKLNRLIEKTNEKFHQIEKEFSEVEGRIQDLEKYVEDTKIDLWSYNAELLVALENQHTIDLTDSEMNKLFERTKKQLRENAEDMGNGCFKIYHKCDNACIGSIRNGTYDHDVYRDEALNNRFQIKGVELKSGYKDWILWISFAISCFLLCVVLLGFIMWACQKGNIRCNICI

SEQ ID NO: 8771 - protein, 566 aa, synthetic construct
  REGION 1..566: note = hemagglutinin__InfluenzaA__AFJ74459
MEAKLLVLLCAFTATYADTICIGYHANNSTDTVDTVLEKNVTVTHSVNLLEDSHNGKLCRLKGTAPLQLGNCSIAGWILGNPECESLFSKESWSYIAETPNPENGTCYPGYFADYEELREQLSSVSSFERFEIFPKESSWPNHTVTKGVTASCSHNGKSSFYKNLLWLTEKNGLYPNLSKSYVNNKEKEVLVLWGVHHPSNIGDQRAIYHTENAYVSVVSSHYSRRFTPEIAKRPKVRNQEGRINYYWTLLEPGDTIIFEANGNLIAPWYAFALSRGFGSGIITSNASMGECDAKCQTPQGAINSSLPFQNVHPVTIGECPKYVRSTKLRMVTGLRNIPSIQSRGLFGAIAGFIEGGWTGMIDGWYGYHHQNEQGSGYAADQKSTQNAINGITNKVNSIIEKMNTQFTAVGKEFNKLERRMENLNKKVDDGFLDIWTYNAELLVLLENERTLDFHDSNVKNLYEKVKNQLKNNAKEIGNGCFEFYHKCNNECMESVKNGTYDYPKYSKESKLNREKIDGVKLESMGVYQILAIYSTVASSLVLLVSLGAISFWMCSNGSLQCRICI

SEQ ID NO: 8772 - protein, 566 aa, synthetic construct
  REGION 1..566: note = hemagglutinin__InfluenzaA__AFJ74470
MKTIIALSYILCLVFAQKLPGNDNSTATLCLGHHAVPNGTLVKTITNDQIEVTNATELVQSSSTGRICDSPHRILDGKNCTLIDALLGDPHCDGFQNKEWDLFVERSKAYSNCYPYDVPDYASLRSLVASSGTLEFNNESFNWTGVAQNGTSYACKRRSVKSFFSRLNWLHKLEYKYPALNVTMPNNDKFDKLYIWGVHHPSTDSDQISLYAQTSGRVTVSTKRSQQTVIPNIGSRPWVRGVSSRISIYWTIVKPGDILLINSTGNLIAPRGYFKIRSGKSSIMRSDAPIGNCSSECITPNGSIPNDKPFQNVNRITYGACPRYVKQNTLKLATGMRNVPEKQTRGIFGAIAGFIENGWEGMVDGWYGFRHQNSEGTGQAADLKSTQAAINQINGKLNRLIEKTNEKFHQIEKEFSEVEGRIQDLEKYVEDTKIDLWSYNAELLVALENQHTIDLTDSEMNKLFERTRKQLRENAEDMGNGCFKIYHKCDNACIGSIRNGTYNHDVYRDEALNNRFQIKGVELKSGYKDWILWISFAISCFLLCVVLLGFIMWACQKGNIRCNICI

SEQ ID NO: 8773 - protein, 566 aa, synthetic construct
  REGION 1..566: note = hemagglutinin__InfluenzaA__AFJ74492
MKTIIALSYILCLVFAQKLPGNDNSTATLCLGHHAVPNGTLVKTITNDQIEVTNATELVQSSSTGRICDSPHQILDGENCTLIDALLGDPHCDGFQNKEWDLFVERSKAYSNCYPYDVPDYASLRSLVASSGTLEFNNESFNWTGVAQNGTSSACKRRSNKSFFSRLNWLHQLKYKYPALNVTMPNNKKFDKLYIWGVHHPSTDSDQISLYAQASGRVTVSTKRSQQTVIPNIGSRPWVRGVSSIISIYWTIVKPGDILLINSTGNLIAPRGYFKIRNGKSSIMRSDAPIGKCNSECITPNGSIPNDKPFQNVNRITYGACPRYVKQNTLKLATGMRNVPEKQTRGIFGAIAGFIENGWEGMVDGWYGFRHQNSEGTGQAADLKSTQAAINQINGKLNRLIGKTNEKFHQIEKEFSEVEGRIQDLEKYVEDTKIDLWSYNAELLVALENQHTIDLTDSEMNKLFERTKKQLRENAEDMGNGCFKIYHKCDNACIGSIRNGTYDHDVYRDEALNNRFKIKGVELKSGYKDWILWISFAISCFLLCVVLLGFIMWACQKGNIRCNICI

SEQ ID NO: 8774 - protein, 566 aa, synthetic construct
  REGION 1..566: note = hemagglutinin__InfluenzaA__AFJ74525
MKTIIALSYILCLVFAQKLPGNDNSTATLCLGHHAVPNGTLVKTITNDQIEVTNATELVQSSSTGRICDSPHRILDGENCTLIDALLGDPHCDGFQNKEWDLFVERSKAYSNCYPYDVPDYASLRSLVASSGTLEFNNESFNWTGVAQDGTSSACKRRSIKSFFSRLNWLHQLKYKYPALNVTMPNNDKFDKLYIWGVHHPSTDSDQTSLYAQASGRVTVSTKRSQQTVIPNIGSRPWVRGVSSIISIYWTIVKPGDILLINSTGNLIAPRGYFKIRSGKSSIMRSDAPIGKCNSECITPNGSIPNDKPFQNVNRITYGTCPRYVKQNTLKLATGMRNVPEKQTRGIFGAIAGFIENGWEGMVDGWYGFRHQNSEGTGQAADLKSTQAAINQINGKLNRLIEKTNEKFHQIEKEFSEVEGRIQDLEKYVEDTKIDLWSYNAELLVALENQHTIDLTDSEMNKLFERTRKQLRENAEDMGNGCFKIYHKCDNACIGSIRNGTYDHDVYRDEALNNRFQIKGVELKSGYKDWILWISFAISCFLLCVVLLGFIMWACQKGNIRCNICI

SEQ ID NO: 8775 - protein, 566 aa, synthetic construct; identical to SEQ ID NO: 8773
  REGION 1..566: note = hemagglutinin__InfluenzaA__AFJ74535

SEQ ID NO: 8776 - protein, 566 aa, synthetic construct
  REGION 1..566: note = hemagglutinin__InfluenzaA__AFJ74560
MKTIIALSYILCLVFAQKLPGNDNSTATLCLGHHAVPNGTLVKTITNDQIEVTNATELVQSSSTGRICDSPHQILDGENCTLIDALLGDPHCDGFQNKEWDLFVERSKAYSNCYPYDVPDYVSLRSLVASSGTLEFNNESFNWTGVAQNGTSSACKRRSDKSFFSRLNWLHQLKYKYPALNVTMPNNEKFDKLYIWGVHHPGTDSDQISLYAQTSGRVTVSTKRSQQTVIPNIGSGPWVRGVSSRISIYWTIVKPGDILLINSTGNLIAPRGYFKIRSGKSSIMRSDAPIGKCNSECITPNGSIPNDKPFQNVNRITYGPCPRYVKQNTLKLATGMRNVPEKQTRGIFGAIAGFIENGWEGMMDGWYGFRHQNSEGTGQAADLKSTQAAINQINGKLNRLVEKTNEKFHQIEKEFSEVEGRIQDLEKYVEDTKIDLWSYNAELLVALENQHTIDLTDSEMNKLFERTKKQLRENAEDMGNGCFKIYHKCDNACIGSIRNGTYDHDVYRDEALNNRFQIKGVELKSGYKDWILWISFAISCFLLCIVLLGFIMWACQKGNIRCNICI

SEQ ID NO: 8777 - protein, 566 aa, synthetic construct
  REGION 1..566: note = hemagglutinin__InfluenzaA__AFJ74634
MKTIIALSYILCLVFAQKLPGNDNSTATLCLGHHAVPNGTIVKTITNDQIEVTNATELVQSSSTGGICDSPHQILDGENCTLIDALLGDPQCDGFQNKKWDLFVERSKAYSNCYPYDVPDYASLRSLVASSGTLEFNNESFNWTGVTQNGTSSACKRRSNKSFFSRLNWLTQLKYKYPALNVTMPNNEKFDKLYIWGVHHPGTDSDQISLYAQASGRITVSTKRSQQTVIPNIGSRPRVRDVSSRISIYWTIVKPGDILLINSTGNLIAPRGYFKIRSGKSSIMRSDAPIGKCNSECITPNGSIPNDKPFQNVNRITYGACPRYVKQNTLKLATGMRNVPEKQTRGIFGAIAGFIENGWEGMVDGWYGFRHQNSEGTGQAADLKSTQAAINQINGKLNRLIGKTNEKFHQIEKEFSEVEGRIQDLEKYVEDTKIDLWSYNAELLVALENQHTIDLTDSEMNKLFERTKKQLRENAEDMGNGCFKIYHKCDNACIGSIRNGTYDHDVYRDEALNNRFQIKGVELKSGYKDWILWISFAISCFLLCVALLGFIMWACQKGNIRCNICI

SEQ ID NO: 8778 - protein, 565 aa, synthetic construct
  REGION 1..565: note = hemagglutinin__InfluenzaA__AFJ74653
MKVKLLVLLCTFTATYADTICIGYHANNSTDTVDTVLEKNVTVTHSVNLLEDSHNGKLCLLKGIAPLQLGNCSVAGWILGNPECELLISKESWSYIVEKPNPENGTCYPGYFADYEELREQLSSVSSFERFEIFPKESSWPNHTVTGVSASCSHNGKSSFYKNLLWLTGKNGLYPNLSKSYANNKEKEVLVLWGVHHPPNIGDQRALYHTDNAYVSVVSSHYSRKFTPEIAKRPKVRDQEGRINYYWTLLEPGDTIIFEANGNLIAPRYAFALSRGFGSGIINSNAPMDECDAKCQTPQGAINSSLPFQNVHPVTIGECPKYVRSAKLRMVTGLRNIPSIQSRGLFGAIAGFIEGGWTGMVDGWYGYHHQNEQGSGYAADQKSTQNAINGITNKVNSVIEKMNTQFTAVGKEFNKLERRMENLNKKVDDGFIDIWTYNAELLVLLENERTLDFHDSNVKNLYEKVKSQLKNNAKEIGNGCFEFYHKCNDECMESVKNGTYDYPKYSEESKLNREKIDGVKLESMGVYQILAIYSTVASSLVLLVSLGAISFWMCSNGSLQCRICI

SEQ ID NO: 8779 - protein, 565 aa, synthetic construct
  REGION 1..565: note = hemagglutinin__InfluenzaA__AFJ74673
MKVKLLVLLCTFTATYADTICIGYHANNSTDTVDTVLEKNVTVTHSVNLLEDSHNGKLCLLKGIAPLQLGNCSVAGWILGNPECELLISKESWSYIVEKPNPENGTCYPGYFADYEELREQLSSVSSFERFEIFPKESSWPNHTVTGVSASCSHNGKSSFYKNLLWLTGKNGLYPNLRKSYANNKEKEVLVLWGVHHPPNIGDQRALYHTDNAYVSVVSSHYSRKFTPEIAKRPKVRDQEGRINYYWTLLEPGDTIIFEANGNLIAPRYAFALSRGFGSGIINSNAPMDECDAKCQTPQGAINSSLPFQNVHPVTIGECPKYVRSAKLRMVTGLRNIPSIQSRGLFGAIAGFIEGGWTGMVDGWYGYHHQNEQGSGYAADQKSTQNAINGITNKVNSVIEKMNTQFTAVGKEFNKLERRMENLNKKVDDGFIDIWTYNAELLVLLENERTLDFHDSNVKNLYEKVKSQLKNNAKEIGNGCFEFYHKCNDECMESVKNGTYDYPKYSEESKLNREKIDGVKLESMGVYQILAIYSTVASSLVLLVSLGAISFWMCSNGSLQCRICI

SEQ ID NO: 8780 - protein, 566 aa, synthetic construct
  REGION 1..566: note = hemagglutinin__InfluenzaA__AFJ74674
MKTIIALSYILCLVFAQKLPGNDNSTATLCLGHHAVPNGTLVKTITNDQIEVTNATELVQSSSTGGICDSPHQILDGENCTLIDALLGDPHCDGFQNKKWDLFVERSKAYSNCYPYDVPDYASLRSLVASSGTLEFNNESFNWTGVAQNGTSSACKRRSNKSFFSRLNWLHQLKYKYPALNVTMPNNEKFDKLYIWGVHHPGTDSDQISLYAQASGRITVSTKRSQQTVIPNIGSRPRVRDVSSRISIYWTIVKPGDILLINSTGNLIAPRGYFKIRSGRSSIMRSDAPIGKCNSECITPNGSIPNDKPFQNVNRITYGACPRYVKQNTLKLATGMRNVPEKQPRGIFGAIAGFIENGWEGMVDGWYGFRHQNSEGTGQAADLKSTQAAINQINGKLNRLIGKTNEKFHQIEKEFSEVEGRIQDLEKYVEDTKIDLWSYNAELLVALENQHTIDLTDSEMNKLFERTKKQLRENAEDMGNGCFKIYHKCDNACIGSIRNGTYDHDVYRDEALNNRFQIKGVELKSGYKDWILWISFAISCFLLCVALLGFIMWACQKGNIRCNICI

SEQ ID NO: 8781 - protein, 565 aa, synthetic construct; identical to SEQ ID NO: 8778
  REGION 1..565: note = hemagglutinin__InfluenzaA__AFJ74694

SEQ ID NO: 8782 - protein, 566 aa, synthetic construct
  REGION 1..566: note = hemagglutinin__InfluenzaA__AFJ74695
MKTIIALSYILCLVFAQKLPGNDNSTATLCLGHHAVPNGTLVKTITNDQIEVTNATELVQNSSTGRICDSPHQILDGENCTLIDALLGDPHCDGFQNKEWDLFVERSKAYSNCYPYDVPDYVSLRSLVASSGTLEFNNESFNWTGVAQDGTSSACKRRSDKSFFSRLNWLHQLKYKYPALNVTMPNNEKFDKLYIWGVHHPGTDSDQISLYARASGRVTVSTKRSQQTVIPNIGSRPWVRGVSSKISIYWTIVKPGDILLINSTGNLIAPRGYFKIRSGKSSIMRSDAPIGKCNSECITPNGSIPNDKPFQNVNRITYGPCPRYVKQNTLKLATGMRNVPEKQTRGIFGAIAGFIENGWEGMVDGWYGFRHQNSEGTGQAADLKSTQAAINQINGKLNRLIEKTNEKFHQIEKEFSEVEGRIQDLEKYVEDTKIDLWSYNAELLVALENQHTIDLTDSEMNKLFERTKKQLRENAEDMGNGCFKIYHKCDNACIGSIRNGTYDHDVYRDEALNNRFQIKGVELKSGYKDWILWISFAISCFLLCIVLLGFIMWACQKGNIRCNICI

SEQ ID NO: 8783 - protein, 566 aa, synthetic construct
  REGION 1..566: note = hemagglutinin__InfluenzaA__AFJ74727
MKTIIALSYILCLVFAQKLPGNDNSTATLCLGHHAVPNGTIVKTITNDQIEVTNATELVQSSSTGGICDSPHQILDGENCTLIDALLGDPQCDGFQNKKWDLFVERSKAYSNCYPYDVPDYASLRSLVASSGTLEFNNESFNWTGVTQNGTSSACKRRSNKSFFSRLNWLTQLKYKYPALNVTMPNNEKFDKLYIWGVHHPGTDSDQISLYAQASGRITVSTKRSQQTVIPNIGSRPRVRDISSRISIYWTIVKPGDILLINSTGNLIAPRGYFKIRSGKSSIMRSDAPIGKCNSECITPNGSIPNDKPFQNVNRITYGACPRYVKQNTLKLATGMRNVPEKQTRGIFGAIAGFIENGWEGMVDGWYGFRHQNSEGTGQAADLKSTQAAINQINGKLNRLIGKTNEKFHQIEKEFSEVEGRIQDLEKYVEDTKIDLWSYNAELLVALENQHTIDLTDSEMNKLFERTKKQLRENAEDMGNGCFKIYHKCDNACIGSIRSGTYDHDVYRDEALNNRFQIKGVELKSGYKDWILWISFAISCFLLCVALLGFIMWACQKGNIRCNICI

SEQ ID NO: 8784 - protein, 565 aa, synthetic construct; identical to SEQ ID NO: 8778
  REGION 1..565: note = hemagglutinin__InfluenzaA__AFJ74743

SEQ ID NO: 8785 - protein, 566 aa, synthetic construct; identical to SEQ ID NO: 8777
  REGION 1..566: note = hemagglutinin__InfluenzaA__AFJ74744

SEQ ID NO: 8786 - protein, 565 aa, synthetic construct; identical to SEQ ID NO: 8778
  REGION 1..565: note = hemagglutinin__InfluenzaA__AFJ74760

SEQ ID NO: 8787 - protein, 566 aa, synthetic construct
  REGION 1..566: note = hemagglutinin__InfluenzaA__AFJ74761
MKTIIALSYILCLVFAQKLPGNDNSTATLCLGHHAVPNGTIVKTITNDQIEVTNATELVQSSSTGGICDSPHQILDGENCTLIDALLGDPQCDGFQNKKWDLFVERSKAYSNCYPYDVPDYASLRSLVASSGTLEFNNESFNWTGVTQNGTSSACKRRSNKSFFSRLNWLTQLKYKYPALNVTMPNNEKFDKLYIWGVHHPGTDSDQISLYAQASGRITVSTKRSQQTVIPNIGSRPRVRDISSRISIYWTIVKPGDILLINSTGNLIAPRGYFKIRSGKSSIMRSDAPIGKCNSECITPNGSIPNDKPFQNVNRITYGACPRYVKQNTLKLATGMRNVPEKQTRGIFGAIAGFIENGWEGMVDGWYGFRHQNSEGTGQAADLKSTQAAINQINGKLNRLIGKTNEKFHQIEKEFSEVEGRIQDLEKYVEDTKIDLWSYNAELLVALENQHTIDLTDSEMNKLFERTKKQLRENAEDMGNGCFKIYHKCDNACIGSIRNGTYDHDVYRDEALNNRFQIKGVELKSGYKDWILWISFAISCFLLCVALLGFIMWACQKGNIRCNICI

SEQ ID NO: 8788 - protein, 565 aa, synthetic construct; identical to SEQ ID NO: 8778
  REGION 1..565: note = hemagglutinin__InfluenzaA__AFJ74779

SEQ ID NO: 8789 - protein, 566 aa, synthetic construct; identical to SEQ ID NO: 8777
  REGION 1..566: note = hemagglutinin__InfluenzaA__AFJ74780

SEQ ID NO: 8790 - protein, 566 aa, synthetic construct
  REGION 1..566: note = hemagglutinin__InfluenzaA__AFJ74804
MKTIIALSYILCLVFAQKLPGNDNSTATLCLGHHAVPNGTIVKTITNDQIEVTNATELVQSSSTGGICDSPHQILDGENCTLIDALLGDPQCDGFQNRKWDLFVERSKAYSNCYPYDVPDYASLRSLVASSGTLEFNNESFDWTGVTQNGTSSACKRRSNKSFFSRLNWLTHLKYKYPALNVTMPNNEKFDKLYIWGVHHPGTDSDQISLYAQASGRITVSTKRSQQTVIPNIGSRPRVRDVSSRISIYWTIVKPGDILLINSTGNLIAPRGYFKIRSGKSSIMRSDAPIGKCNSECITPNGSIPNDKPFQNVNRITYGACPRYVKQNTLKLATGMRNVPEKQTRGIFGAIAGFIENGWEGMVDGWYGFRHQNSEGTGQAADLKSTQAAINQINGKLNRLIGKTNEKFHQIEKEFSEVEGRIQDLEKYVEDTKIDLWSYNAELLVALENQHTIDLTDSEMNKLFERTKKQLRENAEDMGNGCFKIYHKCDNACIGSIRNGTYDHDVYRDEALNNRFQIKGVELKSGYKDWILWISFAISCFLLCVALLGFIMWACQKGNIRCNICI

SEQ ID NO: 8791 - protein, 566 aa, synthetic construct
  REGION 1..566: note = hemagglutinin__InfluenzaA__AFJ74819
MKTIIALSYILCLVFAQKLPGNDNSTATLCLGHHAVPNGTIVKTITNDQIEVTNATELVQSSSTGGICDSPHQILDGENCTLIDALLGDPQCDGFQNKKWDLFVERSKAYSNCYPYDVPDYASLRSLVASSGTLEFNNESFDWTGVTQNGTSSACKRRSNKSFFSRLNWLTHLKYKYPALNVTMPNNEKFDKLYIWGVHHPGTDSDQINLYAQASGRITVSTKRSQQTVIPNIGSRPRVRDVSSRISIYWTIVKPGDILLINSTGNLIAPRGYFKIRSGKSSIMRSDAPIGKCNSECITPNGSIPNDKPFQNVNRITYGACPRYVKQNTLKLATGMRNVPEKQTRGIFGAIAGFIENGWEGMVDGWYGFRHQNSEGTGQAADLKSTQAAINQINGKLNRLIGKTNEKFHQIEKEFSEVEGRIQDLEKYVEDTKIDLWSYNAELLVALENQHTIDLTDSEMNKLFERTKKQLRENAEDMGNGCFKIYHKCDNACIGSIRNGTYDHDVYRDEALNNRFQIKGVELKSGYKDWILWISFAISCFLLCVALLGFIMWACQKGNIRCNICI

SEQ ID NO: 8792 - protein, 566 aa, synthetic construct; identical to SEQ ID NO: 2645
  REGION 1..566: note = hemagglutinin__InfluenzaA__AFJ74842

SEQ ID NO: 8793 - protein, 565 aa, synthetic construct
  REGION 1..565: note = hemagglutinin__InfluenzaA__AFJ75036
MKVKLLVLLCTFTATYADTICIGYHANNSTDTVDTVLEKNVTVTHSVNLLEDSHNGKLCLLKGIAPLQLGNCSVAGWILGNPECELLISRESWSYIVEKPNPENGTCYPGHFADYEELREQLSSVSSFERFEIFPKENSWPNHTVTGVSASCSHNGKSSFYKNLLWLTGKNGLYPNLSKSYANNKEKEVLVLWGVHHPPNIGDQRALYHTENAYVSVVSSHYSRKFTPEIAKRPKVRDQEGRINYYWTLLEPGDTIIFEANGNLIAPRYAFALSRGFGSGIINSNAPMDECDAKCQTPQGAINSSLPFQNVHPVTIGECPKYVRSAKLRMVTGLRNIPSIQSRGLFGAIAGFIEGGWTGMVDGWYGYHHQNEQGSGYAADQKSTQNAINGITNKVNSVIEKMNTQFTAVGKEFNKLERRMENLNKKVDDGFIDIWTYNAELLVLLENERTLDFHDSNVKNLYEKVKSQLKNNAKEIGNGCFEFYHKCNDECMESVKNGTYDYPKYSEESKLNREKIDGVKLESMGVYQILAIYSTVASSLVLLVSLGAISFWMCSNGSLQCRICI

SEQ ID NO: 8794 - protein, 566 aa, synthetic construct; identical to SEQ ID NO: 630
  REGION 1..566: note = hemagglutinin__InfluenzaA__AFJ75047

SEQ ID NO: 8795 - protein, 565 aa, synthetic construct
  REGION 1..565: note = hemagglutinin__InfluenzaA__AFJ75058
MKVKLLVLLCTFTATYADTICIGYHANNSTDTVDTVLEKNVTVTHSVNLLEDSHNGKLCLLKGIAPLQLGNCSVAGWILGNPECELLISRESWSYIVEKPNPENGTCYPGHFADYEELREQLSSVSSFERFEIFPKESSWPNHTVTGVSASCSHNGKSSFYKNLLWLTGKNGLYPNLSKSYANNKEKEVLVLWGVHHPPNIGDQRALYHTENAYVSVVSSHYSRKFTPEIAKRPKVRDQEGRINYYWTLLEPGDTIIFEANGNLIAPRYAFALSRGFGSGIINSNAPMDECDAKCQTPQGAINSSLPFQNVHPVTIGECPKYVRSAKLRMVTGLRNIPSIQSRGLFGAIAGFIEGGWTGMVDGWYGYHHQNEQGSGYAADQKSTQNAINGITNKVNSVIEKMNTQFTAVGKEFNKLERRMENLNKKVDDGFIDIWTYNAELLVLLENERTLDFHDSNVKNLYEKVKSQLKNNAKEIGNGCFEFYHKCNDECMESVKNGTYDYPKYSEESKLNREKIDGVKLESMGVYQILAIYSTVASSLVLLVSLGAISFWMCSNGSLQCRICI

SEQ ID NO: 8796 - protein, 565 aa, synthetic construct
  REGION 1..565: note = hemagglutinin__InfluenzaA__AFJ75069
MKVKLLVLLCTFTATYADTICIGYHANNSTDTVDTVLEKNVTVTHSVNLLEDSHNGKLCLLKGIAPLQLGNCSVAGWILGNPECELLISRESWSYIVEKSNPENGTCYPGHFADYEELREQLSSVSSFERFEIFPKESSWPNHTTTGVSASCSHNGESSFYKNLLWLTGKNGLYPNLSKSYANNKEKEVLVLWGVHHPPNIGDQRALYHTENAYVSVVSSHYSRKFTPEIAKRPKVRDQEGRINYYWTLLEPGDTIIFEANGNLIAPRYAFALSRGFGSGIINSNAPMDECDAKCQTPQGAINSSLPFQNVHPVTIGECPKYVRSAKLRMVTGLRNIPSIQSRGLFGAIAGFIEGGWTGMVDGWYGYHHQNEQGSGYAADQKSTQNAINGITNKVNSVIEKMNTQFTAVGKEFNKLERRMENLNKKVDDGFIDIWTYNAELLVLLENERTLDFHDSNVKNLYEKVKSQLKNNAKEIGNGCFEFYHKCNDECMESVKNGTYDYPKYSEESKLNREKIDGVKLESMGVYQILAIYSTVASSLVLLVSLGAISFWMCSNGSLQCRICI

SEQ ID NO: 8797 - protein, 566 aa, synthetic construct
  REGION 1..566: note = hemagglutinin__InfluenzaA__AFJ75091
MKTIIALSYILCLVFAQKLPGNDNSTATLCLGHHAVPNGTIVKTITNDQIEVTNATELVQSSSTGGICDSPHQILDGENCTLIDALLGDPQCDGFQNKKWDLFVERSKAYSNCYPYDVPDYASLRSLVASSGTLEFNNESFNWTGVTQNGTSSACKRRSNNSFFSRLNWLTHLKFKYPALNVTMPNNEKFDKLYIWGVHHPGTDNDQIFLYAQASGRITVSTKISQQTVIPNIGSRPRVRNIPSRISIYWTIVKPGDILLINSTGNLIAPRGYFKIRSGKSSIMRSDAPIGKCNSECITPNGSIPNDKPFQNVNRITYGACPRYVKQNTLKLATGMRNVPEKQTRGIFGAIAGFIENGWEGMVDGWYGFRHQNSEGIGQAADLKSTQAAIDQINGKLNRLIGKTNEKFHQIEKEFSEVEGRIQDLEKYVEDTKIDLWSYNADLLVALENQHTIDLTDSEMNKLFEKTKKQLRENAEDMGNGCFKIYHKCDNACIGSIRNGTYDHDVYRDEALNNRFQIKGVELKSGYKDWILWISFAISCFLLCVALLGFIMWACQKGNIRCNICI

SEQ ID NO: 8798 - protein, 566 aa, synthetic construct
  REGION 1..566: note = hemagglutinin__InfluenzaA__AFJ75449
MKTIIALSYILCLVFAQKLPGNDNSTATLCLGHHAVPNGTIVKTITNDQIEVTNATELVQSSSTGEICDSPHQILDGENCTLIDALLGDPQCDGFQNKKWDLFVERSKAYSNCYPYDVPDYASLRSLVASSGTLEFNNESFNWTGVTQNGTSSACIRRSNNSFFSRLNWLTHLKFKYPALNVTMPNNEKFDKLYIWGVHHPGTDNDQIFLYAQASGKITVSTKRSQQTVIPNIGSRPRVRNIPSRISIYWTIVKPGDILLINSTGNLIAPRGYFKIRSGKSSIMRSDAPIGKCNSECITPNGSIPNDKPFQNVNRITYGACPRYVKQNTLKLATGMRNVPEKQTRGIFGAIAGFIENGWEGMVDGWYGFRHQNSEGTGQAADLKSTQAAIDQINGKLNRLIGKTNEKFHQIEKEFSEVEGRIQDLEKYVEDTKIDLWSYNAELLVALENQHTIDLTDSEMNKLFEKTKKQLRENAEDMGNGCFKIYHKCDNACIGSIRNGTYDHDVYRDEALNNRFQIKGVELKSGYKDWILWISFAISCFLLCVALLGFIMWACQKGNIRCNICI

SEQ ID NO: 8799 - protein, 566 aa, synthetic construct
  REGION 1..566: note = hemagglutinin__InfluenzaA__AFJ75460
MKTIIALSYILCLVFTQKLPGNDNSTATLCLGHHAVPNGTIVKTITNDQIEVTNATELVQSSSTGEICDSPHQILDGENCTLIDALLGDPQCDGFQNKKWDLFVERSKAYSNCYPYDVPDYASLRSLVASSGTLEFNNESFNWTGVTQNGTSSACIRRSNNSFFSRLNWLTHLKFKYPALNVTMPNNENFDKLYIWGVHHPGTDNDQIFLYAQASGRITVSTKRSQQTVIPNIGSRPRVRNIPSRISIYWTIVKPGDILLINSTGNLIAPRGYFKIRSGKSSIMRSDAPIGKCNSECITPNGSIPNDKPFQNVNRITYGACPRYVKQNTLKLATGMRNVPEKQTRGIFGAIAGFIENGWEGMVDGWYGFRHQNSEGIGQAADLKSTQAAVDQINGKLNRLIGKTNEKFHQIEKEFSEVEGRIQDLEKYVEDTKIDLWSYNAELLVALENQHTIDLTDSEMNKLFEKTKKQLRENAEDMGNGCFKIYHKCDNACIGSIRNGTYDHDVYRDEALNNRFQIKGVELKSGYKDWILWISFAISCFLLCVALLGFIMWACQKGNIRCNICI

SEQ ID NO: 8800 - protein, 565 aa, synthetic construct
  REGION 1..565: note = hemagglutinin__InfluenzaA__AFJ75517
MKVKLLVLLCTFTATYADTICIGYHANNSTDTVDTVLEKNVTVTYSVNLLEDNHNGKLCLLKGIAPLQLGNCSVAGWILGNPECELLISKESWSYIVERPNPENGTCYPGHFADYEELREQLSSVSSFERFEIFPKESSWPNHTVTGVSASCSHNGESSFYKNLLWLTGKNGLYPNLSKSYANNKEKEVLVLWGVHHPPNIGDQMTLYHKKNAYVSVVSSHYSRKFTPEIAKRPKVRDQEGRINYYWTLLEPGDTIIFEANGNLIAPRYAFALNRGFGSGIINSNAPMDECDAKCQTPQGAINSSLPFQNVHPVTIGECPKYVRSAKLRMVTGLRNIPSIQSRGLFGAIAGFIEGGWTGMVDGWYGYHHQNEQGSGYAADQKSTQNAINGITNKVNSVIEKMNTQFTAVGKEFNKLERRMENLNKKVDDGFIDVWTYNAELLVLLENERTLDFHDSNVKNLYEKVKTQLKNNAKEIGNGCFEFYHKCNDECMESVKNGTYDYPKYSEESKLSREKIDGVKLESMGVYQILAIYSTVASSLVLLVSLGAISFWMCSNGSLQCRICI

SEQ ID NO: 8801 - protein, 565 aa, synthetic construct
  REGION 1..565: note = hemagglutinin__InfluenzaA__AFJ75560
MKVKLLVLLCTFTATYADTICIGYHANNSTDTVDTVLEKNVTVTHSVNLLEDNHNGKLCLLKGIAPLQLGNCSVAGWILGNPECELLISKESWSYIVERPNPENGTCYPGHFADYEELREQLSSVSSFERFEIFPKESSWPNHTVTGVSASCSHNGESSFYKNLLWLTGKNGLYPNLSKSYANNKEKEVLVLWGVHHPPNIGDQMTLYHKENAYVSVVSSHYSRKFTPEIAKRPKVRDQEGRINYYWTLLEPGDTIIFEANGNLIAPRYAFALSRGFGSGIINSNAPMDECDAKCQTPQGAINSSLPFQNVHPVTIGECPKFVRSAKLRMVTGLRNIPSIQSRGLFGAIAGFIEGGWTGMVDGWYGYHHQNEQGSGYAADQKSTQNAINGITNKVNSVIEKMNTQFTAVGKEFNKLERRMENLNKKVDDGFIDVWTYNAELLVLLENERTLDFHDSNVKNLYEKVKNQLRNNAKEIGNGCFEFYHKCNDECMESVKNGTYDYPKYSEESKLSREKIDGVKLESMGVYQILAIYSTVASSLVLLVSLGAISFWMCSNGSLQCRICI

SEQ ID NO: 8802 - protein, 565 aa, synthetic construct
  REGION 1..565: note = hemagglutinin__InfluenzaA__AFJ75571
MKVKLLVLLCTFTATYADTICIGYHANNSTDTVDTVLEKNVTVTHSVNLLEDNHNGKLCLLKGIAPLQLGNCSVAGWILGNPECELLISKESWSYIVERPNPENGTCYPGHFADYEELREQLSSVSSFERFEIFPKESSWPNHTVTGVSASCSHNGENSFYKNLLWLTGKNGLYPNLSKSYANNKEKEVLVLWGVHHPPNIGDQMTLYHKENAYVSVVSSHYSRKFTPEIAKRPKVRDQEGRINYYWTLLEPGDTIIFEANGNLIAPRYAFALSRGFGSGIINSNAPMDECDAKCQTPQGAINSSLPFQNVHPVTIGECPKYVRSAKLRMVTGLRNIPSIQSRGLFGAIAGFIEGGWTGMVDGWYGYHHQNEQGSGYAADQKSTQNAINGITNKVNSVIEKMNTQFTAVGKEFNKLERRMENLNKKVDDGFIDVWTYNAELLVLLENERTLDFHDSNVKNLYEKVKNQLKNNAKEIGNGCFEFYHKCNDECMESVKNGTYDYPKYSEESKLSRERIDGVKLESMGVYQILAIYSTVASSLVLLVSLGAISFWMCSNGSLQCRICI

SEQ ID NO: 8803 - protein, 566 aa, synthetic construct
  REGION 1..566: note = hemagglutinin__InfluenzaA__AFJ75593
MKTIIALSYILCLVFAQKLPGNDSSTATLCLGHHAVPNGTIVKTITNDQIEVTNATELVQSSSTGEICNSPHQILDGENCTLIDALLGDPQCDGFQNKKWDLFVERSKAYSNCYPYDVPDYASLRSLVASSGTLEFNNESFNWTGVTQNGTSSACIRRSNNSFFSRLNWLTHLKFKYPALNVTMPNNEKFDKLYIWGVHHPGTDNDQIFLYAQASGRITVSTKRSQQTVIPNIGSRPRVRNIPSRISIYWTIVKPGDILLINSTGNLIAPRGYFKIRSGKSSIMRSDAPIGKCNSECITPNGSIPNDKPFQNVNRITYGACPRYVKQNTLKLATGMRNVPEKQTRGIFGAIAGFIENGWEGMVDGWYGFRHQNSEGIGQAADLKSTQAAIDQINGKLNRLIGKTNEKFHQIEKEFSEVEGRIQDLEKYVEDTKVDLWSYNAELLVALENQHTIDLTDSEMNKLFEKTKKQLRENAEDMGNGCFKIYHKCDNACIGSIRNGTYDHDVYRDEALNNRFQIKGVELKSGYKDWILWISFAISCFLLCVALLGFIMWACQKGNIRCNICI

SEQ ID NO: 8804 - protein, 565 aa, synthetic construct
  REGION 1..565: note = hemagglutinin__InfluenzaA__AFJ75615
MKVKLLVLLCTFTATYADTICVGYHANNSTDTVDTVLEKNVTVTHSVNLLENSHNGKLCLLKGIAPLQLGNCSVAGWILGNPECELLISKESWSYIVEKPNPENGTCYPGHFADYEELREQLSSVSSFERFEIFPKESSWPNHTVTGVSASCSHNGESSFYRNLLWLTGKNGLYPNLSKSYANNKEKEVLVLWGVHHPPNIGDQKALYHTENAYVSVVSSHYSRKFTPEIAKRPKVRDQEGRINYYWTLLEPGDTIIFEANGNLIAPRYAFALSRGFGSGIINSNAPMDKCDAKCQTPQGAINSSLPFQNVHPVTIGECPKYVRSAKLRMVTGLRNIPSIQSRGLFGAIAGFIEGGWTGMVDGWYGYHHQNEQGSGYAADQKSTQNAINGITNKVNSVIEKMNTQFTEVGKEFNKLERRMENLNKKVDDGFIDIWTYNAELLVLLENERTLDFHDSNVKNLYEKVKSQLKNNAKEIGNGCFEFYHKCNDECMESVKNGTYDYPKYSEESKLNREKIDGVKLESMGVYQILAIYSTVASSLVLLVSLGAISFWMCSNGSLQCRICI

SEQ ID NO: 8805 - protein, 566 aa, synthetic construct; identical to SEQ ID NO: 5352
  REGION 1..566: note = hemagglutinin__InfluenzaA__AFJ75630

SEQ ID NO: 8806 - protein, 566 aa, synthetic construct; identical to SEQ ID NO: 5352
  REGION 1..566: note = hemagglutinin__InfluenzaA__AFJ75641

SEQ ID NO: 8807 - protein, 565 aa, synthetic construct
  REGION 1..565: note = hemagglutinin__InfluenzaA__AFJ75651
MKVKLLVLLCTFTATYADTICIGYHANNSTDTVDTVLEKNVTVTHSVNLLENSHNGKLCLLKGIAPLQLGNCSVAGWILGNPECELLISKESWSYIVEKPNPENGTCYPGHFADYEELREQLSSVSSFERFEIFPKESSWPNHTVTGVSASCSHNGESSFYRNLLWLTGKNGLYPNLSKSYANNKEKEVLVLWGVHHPPNIGDQKALYRTENAYVSVVSSHYSRKFTPEIAKRPKVRDQEGRINYYWTLLEPGDTIIFEANGNLIAPRYAFALSRGFGSGIINSDAPMDKCDAKCQTPQGAINSSLPFQNVHPVTIGECPKYVRSAKLRMVTGLRNIPSIQSRGLFGAIAGFIEGGWTGMVDGWYGYHHQNEQGSGYAADQKSTQNAINGITNKVNSVIEKMNTQFTAVGKEFNKLERRMENLNKKVDDGFIDIWTYNAELLVLLENERTLDFHDSNVKNLYEKVKSQLKNNAKEIGNGCFEFYHKCNDECMESVKNGTYDYPKYSEESKLNREKIDGVKLESMGVYQILAIYSTVASSLVLLVSLGAISFWMCSNGSLQCRICI

SEQ ID NO: 8808 - protein, 566 aa, synthetic construct
  REGION 1..566: note = hemagglutinin__InfluenzaA__AFJ75662
MKTIIALSYILCLVFAQKLPGNDNSTATLCLGHHAVPNGTIVKTITNDQIEVTNATELVQSSSTGEICDSPHQILDGENCTLIDALLGDPQCDGFQNKKWDLFVERSKAYSNCYPYDVPDYASLRSLVASSGTLEFNNESFNWTGVTQNGTSSACIRRSNNSFFSRLNWLTHLKFKYPALNVTMPNNEEFDKLYIWGVHHPGTDNDQIFLYAQASGRITVSTKRSQQTVIPNIGSRPRVRNIPSRISIYWTIVKPGDILLINSTGNLIAPRGYFKIRSGKSSIMRSDAPIGKCNSECITPNGSIPNDKPFQNVNRITYGACPRYVKQNTLKLATGMRNVPEKQTRGIFGAIAGFIENGWEGMVDGWYGFRHQNSEGTGQAADLKSTQAAIDQINGKLNRLIGKTNEKFHQIEKEFSEVEGRIQDLEKYVEDTKIDLWSYNAELLVALENQHTIDLTDSEMNKLFEKTKKQLRENAEDMGNGCFKIYHKCDNACIGSIRNGTYDHDVYRDEALNNRFQIKGVELKSGYKDWILWISFAISCFLLCVALLGFIMWACQKGNIRCNICI

SEQ ID NO: 8809 - protein, 565 aa, synthetic construct
  REGION 1..565: note = hemagglutinin__InfluenzaA__AFJ75673
MKVKLLVLLCTFTATYADTICIGYHANNSTDTVDTVLEKNVTVTYSVNLLEDNHNGKLCLLKGIAPLQLGNCSVAGWILGNPECELLISKESWSYIVERPNPENGTCYPGHFADYEELREQLSSVSSFERFEIFPKESSWPNHTVTGVSASCSHNGESSFYKNLLWLTGKNGLYPNLSKSYANNKEKEVLVLWGVHHPPNIGNQMTLYHKENAYVSVVSSHYSRKFTPEIAKRPKVRDQEGRINYYWTLLEPGDTIIFEANGNLIAPRYAFALNRGFGSGIINSNAPMDECDAKCQTPQGAINSSLPFQNVHPVTIGECPKYVRSAKLRMVTGLRNIPSIQSRGLFGAIAGFIEGGWTGMVDGWYGYHHQNEQGSGYAADQKSTQNAINGITNKVNSVIEKMNTQFTAVGKEFNKLERRMENLNKKVDDGFIDVWTYNAELLVLLENERTLDFHDSNVKNLYEKVKTQLKNNAKEIGNGCFEFYHKCNDECMESVKNGTYDYPKYSEESKLSREKIDGVKLESMGVYQILAIYSTVASSLVLLVSLGAISFWMCSNGSLQCRICI

SEQ ID NO: 8810 - protein, 566 aa, synthetic construct; identical to SEQ ID NO: 2669
  REGION 1..566: note = hemagglutinin__InfluenzaA__AFJ76119

SEQ ID NO: 8811 - protein, 566 aa, synthetic construct; identical to SEQ ID NO: 3022
  REGION 1..566: note = hemagglutinin__InfluenzaA__AFJ76131

SEQ ID NO: 8812 - protein, 566 aa, synthetic construct
  REGION 1..566: note = hemagglutinin__InfluenzaA__AFJ76155
MKAILVVLLYTFATANADTLCIGYHANNSTDTVDTVLEKNVTVTHSVNLLEDKHNGKLCKLRGIAPLHLGKCNIAGWILGNPECESLSTASSWSYIVETSSSDNGTCYPGDFIDYEELREQLSSVSSFERFEIFPKTSSWPNHDSNKGVTAACPHAGAKSFYKNLIWLVKKGNSYPKLSKSYINDKGKEVLVLWGIHHPSTSADQQSLYQNADAYVFVGTSRYSKKFKPEIAIRPKVREQEGRMNYYWTLVEPGDKITFEATGNLVVPRYAFAMERKAGSGIIISDTPVHDCNTTCQTPKGAINTSLPFQNIHSITIGKCPKYVKSTKLRLATGLRNVPSIQSRGLFGAIAGFIEGGWTGMVDGWYGYHHQNEQGSGYAADLKSTQNAIDEITNKVNSVIEKMNTQFTAVGKEFNHLEKRIENLNKKVDDGFLDIWTYNAELLVLLENERTLDYHDSNVKNLYEKVRSQLKNNAKEIGNGCFEFYHKCDNTCMESVKNGTYDYPKYSEEAKLNREEIDGVKLESTRIYQILAIYSTVASSLVLVVSLGAISFWMCSNGSLQCRICI

SEQ ID NO: 8813 - protein, 565 aa, synthetic construct
  REGION 1..565: note = hemagglutinin__InfluenzaA__AFJ76186
MKVKLLVLLCTFTATYADTICIGYHANNSTDTVDTVLEKNVTVTHSVNLLENSHNGKLCLLKGIAPLQLGNCSVAGWILGNPECELLISKESWSYIVEKPNPENGTCYPGHFADYEELREQLSSVSSFERFEIFPKESSWPNHTVTGVSASCSHNGESSFYRNLLWLTGKNGLYPNLSKSYANNKEKEVLVLWGVHHPPNIGDQKALYHTENAYVSVVSSHYSRKFTPEITKRPKVRDQEGRINYYWTLLEPGDTIIFEANGNLIAPRYAFALSRGFGSGIINSDAPMDKCDAKCQTPQGAINSSLPFQNVHPVTIGECPKYVRSAKLRMVTGLRNIPSIQSRGLFGAIAGFIEGGWTGMVDGWYGYHHQNEQGSGYAADQKSTQNAINGITNKVNSVIEKMNTQFTAVGKEFNKLERRMENLNKKVDDGFIDIWTYNAELLVLLENERTLDFHDSNVKNLYEKVKSQLKNNAKEIGNGCFEFYHKCNDECMESVKNGTYDYPKYSEESKLNREKIDGVKLESMGVYQILAIYSTVASSLVLLVSLGAISFWMCSNGSLQCRICI

SEQ ID NO: 8814 - protein, 566 aa, synthetic construct; identical to SEQ ID NO: 2669
  REGION 1..566: note = hemagglutinin__InfluenzaA__AFJ76203

SEQ ID NO: 8815 - protein, 566 aa, synthetic construct
  REGION 1..566: note = hemagglutinin__InfluenzaA__AFJ76213
MKTIIALSYILCLVFAQKLPGNDNSTATLCLGHHAVPNGTIVKTITNDQIEVTNATELVQSSSTGGICDSPHQILDGENCTLIDALLGDPQCDGFQNKKWDLFVERSKAYSNCYPYDVPDYASLRSLVASSGTLEFNNESFDWTGVTQNGTSSACKRRSNKSFFSRLNWLTHSKYKYPALNVTMPNNEKFDKLYIWGVHHPGTDSDQISLYAQASGRITVSTKRSQQTVIPNIGSRPRVRDVSSRISIYWTIVKPGDILLINSTGNLIAPRGYFKIRSGKSSIMRSDAPIGKCNSECITPNGSIPNDKPFQNVNRITYGACPRYVKQNTLKLATGMRNVPEKQTRGIFGAIAGFIENGWEGMVDGWYGFRHQNSEGTGQAADLKSTQAAINQINGKLNRLIGKTNEKFHQIEKEFSEVEGRIQDLEKYVEDTKIDLWSYNAELLVALENQHTIDLTDSEMNKLFERTKKQLRENAEDMGNGCFKIYHKCDNACIGSIRNGTYDHDVYRDEALNNRFQIKGVELKSGYKDWILWISFAISCFLLCVALLGFIMWACQKGNIRCNICI

SEQ ID NO: 8816 - protein, 566 aa, synthetic construct
  REGION 1..566: note = hemagglutinin__InfluenzaA__AFJ77408
MKTIIALSYILCLIFAQKLPGNDNSTATLCLGHHAVPNGTLVKTITNDQIEVTNATELVQSSSTGRICNSPHRILDGENCTLIDALLGDPHCDGFQNKEWDLFVERSKAYSNCYPYDVPDYASLRSLVASSGTLEFTKEGFNWTGVAQDGKSYSCKRGSVNSFFSRLNWLHKLEYKYPALNVTMPNNDKFDKLYIWGVHHPSTDSDQTSLYVQASGRVTVSTKRSQQTVIPNIGSRPWVRGISSRISIYWTIVKPGDILLINSTGNLIAPRGYFKIRNGKSSIMRSDAPIGNCNSECITPNGSIPNDKPFQNVNRITYGACPRYVKQNTLKLATGMRNVPEKQTRGIFGAIAGFIENGWEGMVDGWYGFRHQNSEGTGQAADLKSTQAAINQINGKLNRLIEKTNEKFHQIEKEFSEVEGRIQDLEKYVEDTKIDLWSYNAELLVALENQHTIDLTDSEMNKLFERTRKQLRENAEDMGNGCFKIYHKCDNACIGSIRNGTYDHDVYRDEALNNRFQIKGVELKSGYKDWILWISFAISCFLLCVVLLGFIMWACQKGNIRCNICI

SEQ ID NO: 8817 - protein, 566 aa, synthetic construct
  REGION 1..566: note = hemagglutinin__InfluenzaA__AFJ77430
MKTIIALSYILCLIFAQKLPGNDNSTATLCLGHHAVPNGTLVKTITNDQIEVTNATELVQSSSTGRICDSPHRILDGENCTLIDALLGDPNCDGFQNKEWDLFVERSKAYSNCYPYDVPDYASLRSLVASSGTLEFTKEGFNWTGVAQDGKSYSCKRGSVNSFFSRLNWLHKLEYKYPALNVTMPNNDKFDKLYIWGVHHPSTDSDQISLYAQASGRVTVSTKRSQQTVIPNIGSRPWVRGISSRISIYWTIVKPGDILLINSTGNLIAPRGYFKIRNGKSSIMRSDAPIGNCNSECITPNGSIPNDKPFQNVNRITYGACPRYVKQNTLKLATGMRNVPEKQTRGIFGAIAGFIENGWEGMVDGWYGFRHQNSEGTGQAADLKSTQAAINQINGKLNRLIEKTNEKFHQIEKEFSEVEGRIQDLEKYVEDTKIDLWSYNAELLVALENQHTIDLTDSEMNKLFERTRRQLRENAEDMGNGCFKIYHKCDNACIGSIRNGTYDHDVYRDEALNNRFQIKGVELKSGYKDWILWISFAISCFLLCVVLLGFIMWACQKGNIRCNICI

SEQ ID NO: 8818 - protein, 566 aa, synthetic construct
  REGION 1..566: note = hemagglutinin__InfluenzaA__AFJ77440
MKTIIALSYILCLVFAQKLPGNDNSTATLCLGHHAVPNGTLVKTITNDQIEVTNATELVQSSSTGRICDSPHRILDGKNCTLIDALLGDPHCDGFQNKEWDLFVERSKAYSNCYPYDVPDYASLRSLVASSGTLEFTSEGFNWTGVAQDGTSYACKRGSVKSFFSRLNWLHKLEYKYPALNVTMPNNDKFDKLYIWGVHHPSTDSDQTSLYVQASGRVTVSTKRSQQTVIPNIGSRPWVRGVSSRISIYWTIVKPGDILLINSTGNLIAPRGYFKIRSGKSSIMRSDAPIGNCNSECITPNGSIPNDKPFQNVNRITYGACPRYVKQNTLKLATGMRNVPEKQTRGIFGAIAGFIENGWEGMVDGWYGFRHQNSEGTGQAADLKSTQAAINQINGKLNRLIEKTNEKFHQIEKEFSEVEGRIQDLEKYVEDTKIDLWSYNAELLVALENQHTIDLTDSEMNKLFERTRKQLRENAEDMGNGCFKIYHKCDNACIGSIRNGTYDHDVYRDEALNNRFQIKGVELKSGYKDWILWISFAISCFLLCVVLLGFIMWACQKGNIRCNICI

SEQ ID NO: 8819 - protein, 566 aa, synthetic construct
  REGION 1..566: note = hemagglutinin__InfluenzaA__AFJ77451
MKTIIALSYILCLVFAQKLPGNDNSTATLCLGHHAVPNGTLVKTITNDQIEVTNATELVQSSSTGRICDSPHRILDGKNCTLIDALLGDPHCDGFQNKEWDLFVERSKAYSNCYPYDVPDYASLRSLVASSGTLEFNNESFNWTGVAQNGTSYACKRRSVKSFFSRLNWLHKLEYKYPALNVTMPNNDKFDKLYIWGVHHPSTDSDQTSLYVQASGRVTVSTKRSQQTVIPNIGSRPWVRGVSSRISIYWTIVKPGDILLINSTGNLIAPRGYFKIRSGKSSIMRSDAPIGNCNSECITPNGSIPNDKPFQNVNRITYGACPRYVKQNTLKLATGMRNVPEKQTRGIFGAIAGFIENGWEGMVDGWYGFRHQNSEGTGQAADLKSTQAAINQINGKLNRLIEKTNGKFHQIEKEFSEVEGRIQDLEKYVEDTKIDLWSYNAELLVALENQHTIDLTDSEMNKLFERTRKQLRENAEDMGNGCFKIYHKCDNACIGSIRNGTYDHDVYRDEALNNRFQIKGVELKSGYKDWILWISFAISCFLLCVVLLGFIMWACQKGNIRCNICI

SEQ ID NO: 8820 - protein, 566 aa, synthetic construct
  REGION 1..566: note = hemagglutinin__InfluenzaA__AFJ77462
MKTIIALSYILCLVFAQKLPGNDNSTATLCLGHHAVPNGTLVKTITNDQIEVTNATELVQSSSTGRICDSPHRILDGKNCTLIDALLGDPHCDGFQNKEWDLFVERSKAYSNCYPYDVPDYASLRSLVASSGTLEFTNEGFNWTGVAQDGTSYACKRGSVKSFFSRLNWLHKLEYKYPALNVTMPNNDKFDKLYIWGVHHPSTDSDQTSLYVQASGRVTVSTKRSQQTVIPNIGSRPWVRGVSSRISIYWTIVKPGDILLINSTGNLIAPRGYFKIRSGKSSIMRSDAPIGNCNSECITPNGSIPNDKPFQNVNRITYGACPRYVKQNTLKLATGMRNVPEKQTRGIFGAIAGFIENGWEGMVDGWYGFRHQNSEGTGQAADLKSTQAAINQINGKLNRLIEKTNEKFHQIEKEFSEVEGRIQDLEKYVEDTKIDLWSYNAELLVALENQHTIDLTDSEMNKLFERTRKQLRENAEDMGNGCFKIYHKCDNACIGSIRNGTYDHDVYRDEALNNRFQIKGVELKSGYKDWILWISFAISCFLLCVVLLGFIMWACQKGNIRCNICI

SEQ ID NO: 8821 - protein, 566 aa, synthetic construct
  REGION 1..566: note = hemagglutinin__InfluenzaA__AFJ77473
MKTIIALSYILCQVFAQKLPGNDNSTATLCLGHHAVPNGTLVKTITNDQIEVTNATELVQSSSTGRICDSPHQILDGENCTLIDALLGDPHCDGFQNKEWDLFVERSKAYSNCYPYDVPDYASLRSLVASSGTLEFNNESFNWTGVAQNGTSSACKRRSIKSFFSRLNWLHQLKYKYPALNVTMPNNEKFDKLYIWGVHHPSTDSDQISLYAQASGRVTVSTKRSQQTVIPNIGSRPWVRGVSSRISIYWTIVKPGDILLINSTGNLIAPRGYFKIRSGKSSIMRSDAPIGKCNSECITPNGSIPNDKPFQNVNRITYGACPRYVKQNTLKLATGMRNVPEKQTRGIFGAIAGFIENGWEGMVDGWYGFRHQNSEGTGQAADLKSTQAAINQINGKLNRLIEKTNEKFHQIEKEFSEVEGRIQDLEKYVEDTKIDLWSYNAELLVALENQHTIDLTDSEMNKLFERTKKQLRENAEDMGNGCFKIYHKCDNACIGSIRNGTYDHDVYRDEALNNRFQIKGVELKSGYKDWILWISFAISCFLLCVVLLGFIMWACQKGNIRCNICI

SEQ ID NO: 8822 - protein, 566 aa, synthetic construct; identical to SEQ ID NO: 186
  REGION 1..566: note = hemagglutinin__InfluenzaA__AFJ77484

SEQ ID NO: 8823 - protein, 566 aa, synthetic construct; identical to SEQ ID NO: 188
  REGION 1..566: note = hemagglutinin__InfluenzaA__AFJ77495

SEQ ID NO: 8824 - protein, 566 aa, synthetic construct; identical to SEQ ID NO: 186
  REGION 1..566: note = hemagglutinin__InfluenzaA__AFJ77506

SEQ ID NO: 8825 - protein, 566 aa, synthetic construct
  REGION 1..566: note = hemagglutinin__InfluenzaA__AFJ77517
MKTIIALSYILCLVFAQKIPGNDNSTATLCLGHHAVPNGTLVKTITNDQIEVTNATELVQSSSTGRICDSPHRILDGENCTLIDALLGDPHCDGFQNKEWDLFVERSKAYSNCYPYDVPDYASLRSLVASSGTLEFNNESFNWTGVAQNGTSNACKRRSMKSFFSRLNWLHQLKYKYPALNVTMPNNDKFDKLYIWGVHHPSTDSDQTSLYAQASGRVTVSTQRSQQTVIPNIGSRPWVRGVSSRISIYWTIVKPGDILLINSTGNLIAPRGYFKIRSGKSSIIRSDAPIGKCNSECITPNGSIPNDKPFQNVNRITYGACPRYVKQNTLKLATGMRNVPEKQTRGIFGAIAGFIENGWEGMVDGWYGFRHQNSEGTGQAADLKSTQAAINQINGKLNRLIEKTNEKFHQIEKEFSEVEGRIQDLEKYVEDTKIDLWSYNAELLVALENQHTIDLTDSEMNKLFERTRKQLRENAEDMGNGCFKIYHKCDNACIGSIRNGTYDHDVYRDEALNNRFQIKGVELKSGYKDWILWISFAMSCFLLCVVLLGFIMWACQKGNIRCNICI

SEQ ID NO: 8826 - protein, 566 aa, synthetic construct; identical to SEQ ID NO: 23
  REGION 1..566: note = hemagglutinin__InfluenzaA__AFJ77528

SEQ ID NO: 8827 - protein, 565 aa, synthetic construct
  REGION 1..565: note = hemagglutinin__InfluenzaA__AFJ77550
MKTIIALSYILCQVFAQKLPGNDNSTATLCLGHHAVPNGTLVKTITNDQIEVTNATELVQSSSTGRICDSPHQILDGENCTLIDALLGDPHCDGFQNKEWDLFVERSKAYSNCYPYDVPDYASLRSLVASSGTLEFNNESFNWTGVAQNGTSSACKRRSIKSFFSRLNWLHQLKYKYPALNVTMPNNEKFDKLYIWGVHHPSTDSDQISLYAQASGRVTVSTKRSQQTVIPNIGSRPWVRGVSSRISIYWTIVKPGDILLINSTGNLIAPRGYFKIRSGKSSIMRSDAPIGKCNSECITPNGSIPNDKPFQNVNRITYGACPRYVKQNTLKLATGMRNVPEKTRGIFGAIAGFIENGWEGMVDGWYGFRHQNSEGTGQAADLKSTQAAINQINGKLNRLIEKTNEKFHQIEKEFSEVEGRIQDLEKYVEDTKIDLWSYNAELLVALENQHTIDLTDSEMNKLFERTKKQLRENAEDMGNGCFKIYHKCDNACIGSIRNGTYDHDVYRDEALNNRFQIKGVELKSGYKDWILWISFAISCFLLCVVLLGFIMWACQKGNIRCSICI

SEQ ID NO: 8828 - protein, 566 aa, synthetic construct
  REGION 1..566: note = hemagglutinin__InfluenzaA__AFJ77561
MKTIIALSYILCLVFAQKLPGNDNSTATLCLGHHAVPNGTLVKTITNDQIEVTNATELVQSSSTGRICDSPHRILDGKNCTLIDALLGDPHCDGFQNKEWDLFVERSKAYSNCYPYDVPDYASLRSLVASSGTLEFNNESFNWTGVAQNGTSYACKRRSVKSFFSRLNWLHKLEYKYPALNVTMPNNDKFDKLYIWGVHHPSTDSDQTSLYAQASGRVTVSTKRSQQTVIPNIGSRPWVRGVSSRISIYWTIVKPGDILLIYSTGNLIAPRGYFKIRSGKSSIMRSDAPIGNCSSECITPNGSIPNDKPFQNVNRITYGACPRYVKQNTLKLATGMRNVPEKQTRGIFGAIAGFIENGWEGMVDGWYGFRHQNSEGTGQAADLKSTQAAINQINGKLNRLIEKTNEKFHQIEKEFSEVEGRIQDLEKYVEDTKIDLWSYNAELLVALENQHTIDLTDSEMNKLFERTRKQLRENAEDMGNGCFKIYHKCDNACIGSIRNGTYDHDVYRDEALNNRFQIKGVELKSGYKDWILWISFAISCFLLCVVLLGFIMWACQKGNIRCNICI

SEQ ID NO: 8829 - protein, 565 aa, synthetic construct
  REGION 1..565: note = hemagglutinin__InfluenzaA__AFJ77572
MKTIIALSYILCQVFAQKLPGNDNSTATLCLGHHAVPNGTLVKTITNDQIEVTNATELVQSSSTGRICDSPHQILDGENCTLIDALLGDPHCDGFQNKEWDLFVERSKAYSNCYPYDVPDYASLRSLVASSGTLEFNNESFNWTGVAQNGTSSACKRRSIKSFFSRLNWLHQLKYKYPALNVTMPNNEKFDKLYIWGVHHPSTDSDQISLYAQASGRVTVSTKRSQQTVIPNIGSGPWVRGVSSRISIYWTIVKPGDILLINSTGNLIAPRGYFKIRSGKSSIMRSDAPIGKCNSECITPNGSIPNDKPFQNVNRITYGACPRYVKQNTLKLATGMRNVPEKTRGIFGAIAGFIENGWEGMVDGWYGFRHQNSEGTGQAADLKSTQAAINQINGKLNRLIEKTNEKFHQIEKEFSEVEGRIQDLEKYVEDTKIDLWSYNAELLVALENQHTIDLTDSEMNKLFERTKKQLRENAEDMGNGCFKIYHKCDNACIGSIRNGTYDHDVYRDEALNNRFQIKGVELKSGYKDWILWISFAISCFLLCVVLLGFIMWACQKGNIRCSICI

SEQ ID NO: 8830 - protein, 566 aa, synthetic construct
  REGION 1..566: note = hemagglutinin__InfluenzaA__AFJ77583
MKTIITLSYILCLVFAQKLPVKDNSTATLCLGHHAVPNGTLVKTITNDHIEVTNATELVQSSSTGRICDSPHQILDGENCTLIDALLGDPHCDGFQNKEWDLFVERSTAYSNCYPYDVPDYASLRSLVASSGTLEFNNESFNWTGVAQNGTSSACKRRSIKSFFSRLNWLHQLKYKYPALNVTMPNNEKFDKLYIWGVHHPSTDSDQISLYAQASGRVTVSTKRSQQTVIPNIGSRPWVRGVSSRISIYWTIVKPGDILLINSTGNLIAPRGYFKIRSGKSSIMRSNAPIGKCNSECITPNGSIPNDKPFQNVNRITYGACPRYVKQNTLKLATGMRNVPEKQTRGIFGAIAGFIENGWEGMVDGWYGFRHQNSEGTGQAADLKSTQAAINQINGKLNRLIEKTNEKFHQIEKEFSEVEGRIQDLEKYVEDTKIDLWSYNAELLVALENQHTIDLTDSEMNKLFERTRKQLRENAEDMGNGCFKIYHKCDNACIGSIRNGTYDHDVYRDEALNNRFQIKGVELKSGYKDWILWISFAISCFLLCVVLLGFIMWACQKGNIRCNICI

SEQ ID NO: 8831 - protein, 566 aa, synthetic construct
  REGION 1..566: note = hemagglutinin__InfluenzaA__AFJ77594
MKTIIALSYILCLVFAQKLPVKDNSTATLCLGHHAVPNGTLVKTITNDHIEVTNATELVQSSSTGRICDSPHQILDGENCTLIDALLGDPHCDGFQNKEWDLFVERSTAYSNCYPYDVPDYASLRSLVASSGTLEFNNESFNWTGVAQNGTSSACKRRSIKSFFSRLNWLHQLKYKYPALNVTMPNNEKFDKLYIWGVHHPSTDSDQISLYAQASGRVTVSTKRSQQTVIPNIGSRPWVRGVSSRISIYWTIVKPGDILLINSTGNLIAPRGYFKIRSGKSSIMRSNAPIGKCNSECITPNGSIPNDKPFQNVNRITYGACPRYVKQNTLKLATGMRNVPEKQTRGIFGAIAGFIENGWEGMVDGWYGFRHQNSEGTGQAADLKSTQAAINQINGKLNRLIEKTNEKFHQIEKEFSEVEGRIQDLEKYVEDTKIDLWSYNAELLVALENQHTIDLTDSEMNKLFERTRKQLRENAEDMGNGCFKIYHKCDNACIGSIRNGTYDHDVYRDEALNNRFQIKGVELKSGYKDWILWISFAISCFLLCVVLLGFIMWACQKGNIRCNICI

SEQ ID NO: 8832 - protein, 566 aa, synthetic construct
  REGION 1..566: note = hemagglutinin__InfluenzaA__AFJ77605
MKTIIALSYILCLIFAQKLPGNDNSTATLCLGHHAVPNGTLVKTITNDQIEVTNATELVQSSSTGKICDSPHQILDGENCTLIDALLGDPHCDGFQNKEWDLFVERSKAYSNCYPYDVPDYASLRSLVASSGTLEFNNESFNWTGVAQNGTSSACKRRSNKSFFSRLNWLHQLKYKYPALNVTMPNNEKFDKLYIWGVHHPSTDSDQISLYAQASGRVTVSTKRSQQTVIPNIGSRPWVRGVSSRISIYWTIVKPGDILLINSTGNLIAPRGYFKIRSGKSSIMRSDAPIGKCNSECITPNGSIPNDKPFQNVNRITYGACPRYVKQNTLKLATGMRNVPEKQTRGIFGAIAGFIENGWEGMVDGWYGFRHQNSEGTGQAADLKSTQAAINQINGKLNRLIEKTNEKFHQIEKEFSEVEGRIQDLEKYVEDTKIDLWSYNAELLVALENQHTIDLTDSEMNKLFERTKKQLRENAEDMGNGCFKIYHKCDNACIGSIRNGTYDHDVYRDEAVNNRFQIKGVELKSGYKDWILWISFAISCFLLCVVLLGFIMWACQKGNIRCNICI

SEQ ID NO: 8833 - protein, 566 aa, synthetic construct
  REGION 1..566: note = hemagglutinin__InfluenzaA__AFJ77616
MKTIIALSYILCMVLAQKLPVKDNSTATLCLGHHAVPNGTLVKTITNDHIEVTNATELVQSSSTGRICDSPHQILDGENCTLIDALLGDPHCDGFQNKEWDLFVERSTAYSNCYPYDVPDYASLRSLVASSGTLEFNNESFNWTGVAQNGTSSACKRRSIKSFFSRLNWLHQLKYKYPALNVTMPNNEKFDKLYIWGVHHPSTDSDQISLYAQASGRVTVSTKRSQQTVIPNIGSRPWVRGVSSRISIYWTIVKPGDILLINSTGNLIAPRGYFKIRSGKSSIMRSNASIGKCNSECITPNGSIPNDKPFQNVNRITYGACPRYVKQNTLKLATGMRNVPEKQTRGIFGAIAGFIENGWEGMVDGWYGFRHQNSEGTGQAADLKSTQAAINQINGKLNRLIEKTNEKFHQIEKEFSEVEGRIQDLEKYVEDTKIDLWSYNAELLVALENQHTIDLTDSEMNKLFERTRKQLRENAEDMGNGCFKIYHKCDNACIGSIRNGTYDHDVYRDEALNNRFQIKGVELKSGYKDWILWISFAISCFLLCVVLLGFIMWACQKGNIRCNICI

SEQ ID NO: 8834 - protein, 566 aa, synthetic construct
  REGION 1..566: note = hemagglutinin__InfluenzaA__AFJ77627
MKTIIALSYILCLVLAQKLPVKDNSTATLCLGHHAVPNGTLVKTITNDHIEVTNATELVQSSSTGRICDSPHQILDGENCTLIDALLGDPHCDGFQNKEWDLFVERSTAYSNCYPYDVPDYASLRSLVASSGTLEFNNESFNWTGVAQNGTSSACKRRSIKSFFSRLNWLHQLKYKYPALNVTMPNNEKFDKLYIWGVHHPSTDSDQISLYAQASGRVTVSTKRSQQTVIPNIGSRPWVRGVSSRISIYWTIVKPGDILLINSTGNLIAPRGYFKIRSGKSSIMRSNASIGKCNSECITPNGSIPNDKPFQNVNRITYGACPRYVKQNTLKLATGMRNVPEKQTRGIFGAIAGFIENGWEGMVDGWYGFRHQNSEGTGQAADLKSTQAAINQINGKLNRLIEKTNEKFHQIEKEFSEVEGRIQDLEKYVEDTKIDLWSYNAELLVALENQHTIDLTDSEMNKLFERTRKQLRENAEDMGNGCFKIYHKCDNACIGSIRNGTYDHDVYRDEALNNRFQIKGVELKSGYKDWILWISFAISCFLLCVVLLGFIMWACQKGNIRCNICI

SEQ ID NO: 8835 - protein, 566 aa, synthetic construct
  REGION 1..566: note = hemagglutinin__InfluenzaA__AFJ77638
MKTIIALSYILCLVFAQKLPGNDNSTATLCLGHHAVPNGTLVKTITNDQIEVTNATELVQSSSTGRICDSPHQILDGENCTLIDALLGDPHCDGFQNKEWDLFVERSKAYSNCYPYDVPDYASLRSLVASSGTLEFNNESFNWTGVAQNGTSSACKRRSNKSFFSRLNWLHQLKYKYPALNVTMPNNEKFDKLYIWGVHHPSTDSDQISLYAQASGRVTVSTKRSQQTVIPNIGSRPWVRGVSSRISIYWTIVKPGDILLINSTGNLIAPRGYFKIRSGKSSIMRSDAPIGKCNSECTTPNGSIPNDKPFQNVNRITYGACPRYVKQNTLKLATGMRNVPEKQTRGIFGAIAGFIENGWEGMVDGWYGFRHQNSEGTGQAADLKSTQAAINQINGKLNRLIGKTNEKFHQIEKEFSEVEGRIQDLEKYVEDTKIDLWSYNAELLVALENQHTIDLTDSEMNKLFERTKKQLRENAEDMGNGCFKIYHKCDNACIGSIRNGTYDHDVYRDEALNNRFQIKGVELKSGYKDWILWISFAISCFLLCVVLLGFIMWACQKGNIRCNICI

SEQ ID NO: 8836 - protein, 566 aa, synthetic construct
  REGION 1..566: note = hemagglutinin__InfluenzaA__AFJ77649
MKTIIALSYILCLVFAQKLPGNDNSTATLCLGHHAVPNGTLVKTITNDQIEVTNATELVQSSSTGRICDSPHQILDGENCTLIDALLGDPHCDGFQNKEWDLFVERSKAYSNCYPYDVPDYASLRSLVASSGTLEFNNESFNWTGVAQNGTSSACKRRSNKSFFSRLNWLHQLKYKYPALNVTMPNNEKFDKLYIWGVHHPSTDSDQISLYAQASGRVTVSTKRSQQTVIPNIGSRPWVRGVSSRISIYWTIVKPGDILLINNTGNLIAPRGYFKIRNGKSSIMRSDAPIGKCNSECITPNGSIPNDKPFQNVNRITYGACPRYVKQNTLKLATGMRNVPEKQTRGIFGAIAGFIENGWEGMVDGWYGFRHQNSEGTGQAADLKSTQAAINQINGKLNRLIGKTNEKFHQIEKEFSEVEGRIQDLEKYVEDTKIDLWSYNAELLVALENQHTIDLTDSEMNKLFERTKKQLRENAEDMGNGCFKIYHKCDNACIGSIRNGTYDHDVYRDEALNNRFKIKGVELKSGYKDWILWISFAISCFLLCVVLLGFIMWACQKGNIRCNICI

SEQ ID NO: 8837 - protein, 566 aa, synthetic construct; identical to SEQ ID NO: 203
  REGION 1..566: note = hemagglutinin__InfluenzaA__AFJ77660

SEQ ID NO: 8838 - protein, 566 aa, synthetic construct; identical to SEQ ID NO: 203
  REGION 1..566: note = hemagglutinin__InfluenzaA__AFJ77671

SEQ ID NO: 8839 - protein, 566 aa, synthetic construct; identical to SEQ ID NO: 203
  REGION 1..566: note = hemagglutinin__InfluenzaA__AFJ77682

SEQ ID NO: 8840 - protein, 566 aa, synthetic construct
  REGION 1..566: note = hemagglutinin__InfluenzaA__AFJ77693
MKTIIALSYILCLVFAQKLPVNDNSTATLCLGHHTVPNGTLVKTITNDNIEVTNATELVQSSSTGRICDSPHQILDGENCTLIDALLGDPHCDGFQNKEWDLFVERSTAYSNCYPYDVPDYASLRSLVASSGTLEFNNESFNWTGVDQNGTSSACKRRSNKSFFSRLNWLHQLKYKYPALNVTMPNNEKFDKLYIWGVHHPSTDSDQISLYAQASGRVTVSTKRSQQTVIPNIGSRPWVRGVSSRISIYWTIVKPGDILLINSTGNLIAPRGYFKIRSGKSSIMRSNAPIGKCNSECITPNGSIPNDKPFQNVNRITYGACPRYVKQNTLKLATGMRNVPEKQTRGIFGAIAGFIENGWEGMVDGWYGFRHQNFEGTGQAADLKSTQAAINQINGKLNRLIEKTNEKFHQIEKEFSEVEGRIQDLEKYVEDTKIDLWSYNAELLVALENQHTIDLTDSEMNKLFERTRKQLRENAEDMGNGCFKIYHKCDNACIGSIRNGTYDHDVYRDEALNNRFQIKGVELKSGYKDWILWISFAISCFLLCVVLLGFIMWACQKGNIRCNICI

SEQ ID NO: 8841 - protein, 566 aa, synthetic construct; identical to SEQ ID NO: 203
  REGION 1..566: note = hemagglutinin__InfluenzaA__AFJ77704

SEQ ID NO: 8842 - protein, 566 aa, synthetic construct; identical to SEQ ID NO: 8681
  REGION 1..566: note = hemagglutinin__InfluenzaA__AFJ77715

SEQ ID NO: 8843 - protein, 566 aa, synthetic construct; identical to SEQ ID NO: 8681
  REGION 1..566: note = hemagglutinin__InfluenzaA__AFJ77726

SEQ ID NO: 8844 - protein, 566 aa, synthetic construct; identical to SEQ ID NO: 8777
  REGION 1..566: note = hemagglutinin__InfluenzaA__AFJ77737

SEQ ID NO: 8845 - protein, 566 aa, synthetic construct; identical to SEQ ID NO: 32
  REGION 1..566: note = hemagglutinin__InfluenzaA__AFJ77748

SEQ ID NO: 8846 - protein, 566 aa, synthetic construct; identical to SEQ ID NO: 32
  REGION 1..566: note = hemagglutinin__InfluenzaA__AFJ77759

SEQ ID NO: 8847 - protein, 566 aa, synthetic construct
  REGION 1..566: note = hemagglutinin__InfluenzaA__AFJ77781
MKTIIALSYILCLVFAQKLPGNDNSTATLCLGHHAVPNGTIVKTITNDQIEVTNATELVQSSSTGGICDSPHQILDGENCTLIDALLGDPQCDGFQNKKWDLFVERSKAYSNCYPYDVPDYASLRSLVASSGTLEFNSESFDWTGVTQNGTSSACKRRSNKSFFSRLNWLTHLKYKYPALNVTMPNNEKFDKLYIWGVHHPGTDSDQISLYAQASGRITVSTKRSQQTVIPNIGSRPRVRDVSSRISIYWTIVKPGDILLINSTGNLIAPRGYFKIRSGKSSIMRSDAPIGKCNSECITPNGSIPNDKPFQNVNRITYGACPRYVKQNTLKLATGMRNVPEKQTRGIFGAIAGFIENGWEGMVDGWYGFRHQNSEGTGQAADLKSTQAAINQINGKLNRLIGKTNEKFHQIEKEFSEVEGRIQDLEKYVEDTKIDLWSYNAELLVALENQHTIDLTDSEMNKLFERTKKQLRENAEDMGNGCFKIYHKCDNACIGSIRNGTYDHDVYRDEALNNRFQIKGVELKSGYKDWILWISFAISCFLLCVALLGFIMWACQKGNIRCNICI

SEQ ID NO: 8848 - protein, 566 aa, synthetic construct; identical to SEQ ID NO: 1795
  REGION 1..566: note = hemagglutinin__InfluenzaA__AFJ77792

SEQ ID NO: 8849 - protein, 566 aa, synthetic construct; identical to SEQ ID NO: 1795
  REGION 1..566: note = hemagglutinin__InfluenzaA__AFJ77803

SEQ ID NO: 8850 - protein, 566 aa, synthetic construct; identical to SEQ ID NO: 1795
  REGION 1..566: note = hemagglutinin__InfluenzaA__AFJ77814

SEQ ID NO: 8851 - protein, 566 aa, synthetic construct; identical to SEQ ID NO: 1795
  REGION 1..566: note = hemagglutinin__InfluenzaA__AFJ77825

SEQ ID NO: 8852 - protein, 566 aa, synthetic construct; identical to SEQ ID NO: 1795
  REGION 1..566: note = hemagglutinin__InfluenzaA__AFJ77836

SEQ ID NO: 8853 - protein, 566 aa, synthetic construct; identical to SEQ ID NO: 1795
  REGION 1..566: note = hemagglutinin__InfluenzaA__AFJ77847

SEQ ID NO: 8854 - protein, 566 aa, synthetic construct
  REGION 1..566: note = hemagglutinin__InfluenzaA__AFJ77858
MKTIIALSYILCLVFAQKLPGNDNSTATLCLGHHAVPNGTIVKTITNDQIEVTNATELVQSSSTGGICDSPHQILDGENCTLIDALLGDPQCDGFQNKKWDLFVERSKAYSNCYPYDVPDYASLRSLVASSGTLEFNNESFNWTGVTQNGTSSACKRRSNNSFFSRLNWLTHLKFKYPALNVTMPNNEKFDKLYIWGVHHPGTDNDQISLYAQASGRITVSTQRSQQTVIPNIGSRPRVRDIPSRISIYWTIVKPGDMLLINSTGNLIAPRGYFKIRSGKSSIMRSDAPIGKCNSECITPNGSIPNDKPFQNVNRITYGACPRYVKQNTLKLATGMRNVPEKQTRGIFGAIAGFIENGWEGMVDGWYGFRHQNSEGTGQAADLKSTQAAINQINGKLNKLIGKTNEKFHQIEKEFSEVEGRIQDLEKYVEDTKIDLWSYNAELLVALENQHTIDLTDSEMNKLFERTKKQLRENAEDMGNGCFKIYHKCDNACIGSIRNGTYDHDVYRDEALNNRFQIKGVELKSGYKDWILWISFAISCFLFCVALLGFIMWACQKGNIRCNICI

SEQ ID NO: 8855 - protein, 566 aa, synthetic construct
  REGION 1..566: note = hemagglutinin__InfluenzaA__AFJ77869
MKTIIAFSYILCLVFAQKLPGNDNSTATLCLGHHAVPNGTIVKTITNDQIEVTNATELVQSSSTGGICDSPHQILDGENCTLIDALLGDPQCDGFQNKKWDLFVERSKAYSNCYPYDVPDYASLRSLVASSGTLEFNNESFNWTGVTQNGTSSACKRRSNNSFFSRLNWLTHLKFKYPALNVTMPNNEKFDKLYIWGVHHPGTDNDQISLYAQASGRITVSTKRSQQTVIPNIGSRPRVRDIPSRISIYWTIVKPGDILLINSTGNLIAPRGYFKIRSGKSSIMRSDAPIGKCNSECITPNGSIPNDKPFQNVNRITYGACPRYVKQNTLKLATGMRNVPEKQTRGIFGAIAGFIENGWEGMVDGWYGFRHQNSEGTGQAADLKSTQAAINQINGKLNRLIGKTNEKFHQIEKEFSEVEGRIQDLEKYVEDTKIDLWSYNAELLVALENQHTIDLTDSEMNKLFERTKKQLRENAEDMGNGCFKIYHKCDNACIGSIRNGTYDHDVYRDEALNNRFQIKGVELKSGYKDWILWISFAISCFLLCVALLGFIMWACQKGNIRCNICI

SEQ ID NO: 8856 - protein, 566 aa, synthetic construct
  REGION 1..566: note = hemagglutinin__InfluenzaA__AFJ77880
MKTIIALSYILCLVFAQKLPGNDNSTATLCLGHHAVPNGTIVKTITNDQIEVTNATELVQSSSTGGICNSPHQILDGENCTLIDALLGDPQCDGFQNKKWDLFVERSKAYSNCYPYDVPDYASLRSLVASSGTLEFNNESFNWTGVTQNGTSSACKRRSNKSFFSRLNWLTHLKFKYPALNVTMPNNEKFDKLYIWGVHHPGTDNDQISLYAQASGRITVSTKRSQQTVIPNIGSRPRVRDVPSRISIYWTIVKPGDILLINSTGNLIAPRGYFKIRSGKSSIMRSDAPIGKCNSECITPNGSIPNDKPFQNVNRITYGACPRYVKQNTLKLATGMRNVPEKQTRGIFGAIAGFIENGWEGMVDGWYGFRHQNSEGTGQAADLKSTQAAINQINGKLNRLIGKTNEKFHQIEKEFSEVEGRIQDLEKYVEDTKIDLWSYNAELLVALENQHTIDLTDSEMNKLFERTKKQLRENAEDMGNGCFKIYHKCDNACIGSIRNGTYDHDVYRDEALNNRFQIKGVELKSGYKDWILWISFAISCFLLCVALLGFIMWACQKGNIRCNICI

SEQ ID NO: 8857 - protein, 566 aa, synthetic construct
  REGION 1..566: note = hemagglutinin__InfluenzaA__AFJ77902
MKTIIALSYILCLVFAQKLPGNDNSTATLCLGHHAVPNGTIVKTITNDQIEVTNATELVQSSSTGGICDSPHQILDGENCTLIDALLGDPQCDGFQNKKWDLFVERSKAYSNCYPYDVPDYASLRSLVASSGTLEFNNESFNWTGVTQNGTSSACKRRSNNSFFSRLNWLTHLKFKYPALNVTMPNNEKFDKLYIWGVHHPGTDNDQIGLYAQASGRITVSTKRSQQTVIPNIGSRPRVRDIPSRISIYWTIVKPGDMLLINSTGNLIAPRGYFKIRSGKSSIMRSDAPIGKCNSECITPNGSIPNDKPFQNVNRITYGACPRYVKQNTLKLATGMRNVPEKQTRGIFGAIAGFIENGWEGMVDGWYGFRHQNSEGTGQAADLKSTQAAINQINGKLNRLIGKTNEKFHQIEKEFSEVEGRIQDLEKYVEDTKIDLWSYNAELLVALENQHTIDLTDSEMNKLFERTKKQLRENAEDMGNGCFKIYHKCDNACIGSIRNGTYDHDVYRDEALNNRFQIKGVELKSGYKDWILWISFAISCFLLCVALLGFIMWACQKGNIRCNICI

SEQ ID NO: 8858 - protein, 566 aa, synthetic construct
  REGION 1..566: note = hemagglutinin__InfluenzaA__AFJ77913
MKTIIALSYILCLVFAQKLPGNDNSTATLCLGHHAVPNGTIVKTITNDQIEVTNATELVQSSSTGGICDSPHQILDGENCTLIDALLGDPQCDGFQNKKWDLFVERSKAYSNCYPYDVQDYASLRSLVASSGTLEFNNESFNWTGVTQNGTSSACKRRSNNSFFSRLNWLTHLKFKYPALNVTMPNNEKFDKLYIWGVHHPGTDNDQISLYAQASGRITVSTKRSQQTVIPNIGSRPRVRDIPSRISIYWTIVKPGDMLLINSTGNLIAPRGYFKIRSGKSSIMRSDAPIGKCNSECITPNGSIPNDKPFQNVNRITYGACPRYVKQNTLKLATGMRNVPEKQTRGIFGAIAGFIENGWEGMVDGWYGFRHQNSEGTGQAADLKSTQAAINQINGKLNRLIGKTNEKFHQIEKEFSEVEGRIQDLEKYVEDTKIDLWSYNAELLVALENQHTIDLTDSEMNKLFERTKKQLRENAEDMGNGCFKIYHKCDNACIGSIRNGTYDHDVYRDEALNNRFQIKGVELKSGYKDWILWISFAISCFLLCVALLGFIMWACQKGNIRCNICI

SEQ ID NO: 8859 - protein, 566 aa, synthetic construct; identical to SEQ ID NO: 1113
  REGION 1..566: note = hemagglutinin__InfluenzaA__AFJ77924

SEQ ID NO: 8860 - protein, 566 aa, synthetic construct
  REGION 1..566: note = hemagglutinin__InfluenzaA__AFJ77935
MKTIIALSYILCLVFAQKLPGNDNSTATLCLGHHAVPNGTVVKTITNDQIEVTNATELVQSSSTGGICDSPHQILDGENCTLMDALLGDPQCDGFQNKKWDLFVERSKAYSNCYPYDVPDHASLRSLVASSGTLEFNNESFNWTGVTQNGTSSACKRRSNNSFFSRLNWLTHLKFKYPALNVTMPNNETFDKLYIWGVHHPGTDNDQISLYAQASGRITVSTKRSQQTVIPNIGSRPRVRDIPSRISIYWTIVKPGDILLINSTGNLIAPRGYFKIRSGKSSIMRSDAPIGKCNSECITPNGSIPNDKPFQNVNRITYGACPRYVKQNTLKLATGMRNVPEKQTRGIFGAIAGFIENGWEGMVDGWYGFRHQNSEGTGQAADLKSTQAAINQINGKLNRLIGKTNEKFHQIEKEFSEVEGRIQDLEKYVEDTKIDLWSYNAELLVALENQHTIDLTDSEMNKLFERTKKQLRENAEDMGNGCFKIYHKCDNACIGSIRNGTYDHDVYRDEALNNRFQIKGVELKSGYKDWILWISFAISCFLLCVALLGFIMWACQKGNIRCNICI

SEQ ID NO: 8861 - protein, 566 aa, synthetic construct
  REGION 1..566: note = hemagglutinin__InfluenzaA__AFJ77946
MKTIIALSYILCLVFAQKLPGNDNSTATLCLGHHAVPNGTIVKTITNDQIEVTNATELVQSSSTGGICDSPHQILDGENCTLIDALLGDPQCDGFQNKKWDLFVERSKAYSNCYPYDVPDYASLRSLVASSGTLEFNNESFNWTGVTQNGTSSACKRRSNNSFFSRLNWLTHLKFKYPALNVTMPNNEKFDKLYIWGVHHPGTDNDQISLYAQASGRITVSTKRSQQTVIPNIGSRPRVRDIPSRISIYWTIVKPGDMLLINSTGNLIAPRGYFKIRSGKSSIMRSDAPIGKCNSECITPNGSIPNDKPFQNVNRITYGACPRYIKQNTLKLATGMRNVPEKQTRGIFGAIAGFIENGWEGMVDGWYGFRHQNSEGTGQAADLKSTQAAINQINGKLNRLIGKTNEKFHQIEKEFSEVEGRIQDLEKYVEDTKIDLWSYNAELLVALENQHTIDLTDSEMNKLFERTKKQLRENAEDMGNGCFKIYHKCDNACIGSIRNGTYDHDVYRDEALNNRFQIKGVELKSGYKDWIIWISFAISCFLLCVALLGFIMWACQKGNIRCNICI

SEQ ID NO: 8862 - protein, 566 aa, synthetic construct; identical to SEQ ID NO: 1753
  REGION 1..566: note = hemagglutinin__InfluenzaA__AFJ77957

SEQ ID NO: 8863 - protein, 566 aa, synthetic construct; identical to SEQ ID NO: 630
  REGION 1..566: note = hemagglutinin__InfluenzaA__AFJ77968

SEQ ID NO: 8864 - protein, 566 aa, synthetic construct
  REGION 1..566: note = hemagglutinin__InfluenzaA__AFJ77979
MKTIIALSYILCLVFAQKLPGNDNSTATLCLGHHAVPNGTIVKTITNDQIEVTNATELVQSSSTGGICDSPHQILDGENCTLIDALLGDPQCDGFQNKKWDLFVERSKAYSNCYPYDVPDYASLRSLVASSGTLEFNNESFNWTGVTQNGTSSACKRRSNNSFFSRLNWLTHLKFKYPALNVTMPNNEKFDKLYIWGVHHPGTDNDQIFLYAQASGRITVSTKRSQQTVIPNIGSRPRVRNIPSRISIYWTIVKPGDILLINSTGNLIAPRGYFKIRSGKSSIMRSDAPIGKCNSECITPNGSIPNDKPFQNVNRITYGACPRYVKQNTLKLATGMRNVPEKQTRGIFGAIAGFIENGWEGMVDGWYGFRHQNSEGIGQAADLKSTQAAINQINGKLNRLIGKTNEKFHQIEKEFSEVEGRIQDLEKYVEDTKIDLWSYNAELLVALENQHTIDLTDSEMNKLFERTKKQLRENAEDMGNGCFKIYHKCDNACIGSIRNGTYDHDVYRDEALNNRFQIKGVELRSGYKDWILWISFAISCFLLCVALLGFIMWACQKGNIRCNICI

SEQ ID NO: 8865 - protein, 566 aa, synthetic construct
  REGION 1..566: note = hemagglutinin__InfluenzaA__AFJ77990
MKTIIALSYILCLVFAQKLPGNDNSTATLCLGHHAVPNGTIVKTITNDQIEVTNATELVQSSSTGGICDSPHQILDGENCTLIDALLGDPQCDGFQNKKWDLFVERSKAYSNCYPYDVPDYASLRSLVASSGTLEFNNESFNWTGVTQNGTSSACKRRSNNSFFSRLNWLTHLKFKYPALNVTMPNNEKFDKLYIWGVHHPGTDNDQIFLYAQASGRITVSTKRSQQTVIPNIGSRPRVRNIPSRISIYWTIVKPGDILLINSTGNLIAPRGYFKIRSGKSSIMRSDAPIGKCNSECITPNGSIPNDKPFQNVNRITYGACPRYVKQNTLKLATGMRNVPEKQTRGIFGAIAGFIENGWEGMVDGWYGFRHQNSEGIGQAADLKSTQAAINQINGKLNRLIGKTNEKFHQIEKEFSEVEGRIQDLEKYVEDTKIDLWSYNAELLVALENQHTIDLTDSEMNKLFERTKKQLRENAEDMGNGCFKIYHKCDNACIGSIRNGTYDHDEYRDEALNNRFQIKGVELKSGYKDWILWISFAISCFLLCVTLLGFIMWACQKGNIRCNICI

SEQ ID NO: 8866 - protein, 566 aa, synthetic construct
  REGION 1..566: note = hemagglutinin__InfluenzaA__AFJ78001
MKTIIALSYILCLVFAQKLPGNDNSTATLCLGHHAVPNGTIVKTITNDQIEVTNATELVQSSSTGGICDSPHQILDGKNCTLIDALLGDPQCDDFQNKKWDLFVERSKAYSNCYPYDVPDYASLRSLVASSGTLEFNNESFNWTGVTQNGTSSACKRRSNNSFFSRLNWLTHLKFKYPALNVTMPNNEKFDKLYIWGVHHPGTDNDQIFLYAQASGRITVSTKRSQQTVIPNIGSRPRVRNIPSRISIYWTIVKPGDILLINSTGNLIAPRGYFKIRSGKSSIMRSDAPIGKCNSECITPNGSIPNDKPFQNVNRITYGACPRYVKQNTLKLATGMRNVPEKQTRGIFGAIAGFIENGWEGMVDGWYGFRHQNSEGIGQAADLKSTQAAINQINGKLNRLIGKTNEKFHQIEKEFSEVEGRIQDLEKYVEDTKIDLWSYNAELLVALENQHTIDLTDSEMNKLFERTKKQLRENAEDMGNGCFKIYHKCDNACIGSIRNGTYDHDVYRDEALNNRFQIKGVELKSGYKDWILWISFAISCFLLCVTLLGFIMWACQKGNIRCNICI

SEQ ID NO: 8867 - protein, 566 aa, synthetic construct
  REGION 1..566: note = hemagglutinin__InfluenzaA__AFJ78012
MKTIIALSYILCLVFAQKLPGNDNSTATLCLGHHAVPNGTIVKTITNDQIEVTNATELVQSSSTGGICDSPHQILDGENCTLIDALLGDPQCDGFQNKKWDLFVERSKAHSNCYPYDVPDYASLRSLVASSGTLEFNNESFNWTGVTQNGTSSACKRRSNNSFFSRLNWLTHLKFKYPALNVTMPNNEKFDKLYIWGVHHPGTDNDQIFLYAQASGRITVSTKRSQQTVIPNIGSRPRVRNIPSRISIYWTIVKPGDILLINSTGNLIAPRGYFKIRSGKSSIMRSDAPIGKCNSECITPNGSIPNDKPFQNVNRITYGACPRYVKQNTLKLATGMRNVPEKQTRGIFGAIAGFIENGWEGMVDGWYGFRHQNSEGIGQAADLKSTQAAIDQINGKLNRLIGKTNEKFHQIEKEFSEVEGRIQDLEKYVEDTKIDLWSYNAELLVALENQHTIDLTDSEMNKLFERTKKQLRENAEDMGNGCFKIYHKCDNACIGSIRNGTYDHDVYRDEALNNRFQIKGVELKSGYKDWILWISFAISCFLLCVALLGFIMWACQKGNIRCNICI

SEQ ID NO: 8868 - protein, 566 aa, synthetic construct
  REGION 1..566: note = hemagglutinin__InfluenzaA__AFJ78023
MKTIIALSYILCLVFAQKLPGNDNSTATLCLGHHAVPNGTIVKTITNDQIEVTNATELVQSSSTGGICDSPHQILDGENCTLIDALLGDPQCDGFQNKKWDLFVERSKAYSNCYPYDVPDYASLRSLVASSGTLEFNNESFNWTGVTQNGTSSACKRKSNNSFFSRLNWLTHLKFKYPALNVTMPNNEKFDKLYIWGVHHPGTDNDQIFLYAQASGRITVSTKRSQQTVIPNIGSRPRVRNIPSRISIYWTIVKPGDILLINSTGNLIAPRGYFKIRSGKSSIMRSDAPIGKCNSECITPNGSIPNDKPFQNVNRITYGACPRYVKQNTLKLATGMRNVPEKQTRGIFGAIAGFIENGWEGMVDGWYGFRHQNSEGIGQAADLKSTQAAINQINGKLNRLIGKTNEKFHQIEKEFSEVEGRIQDLEKYVEDTKIDLWSYNAELLVALENQHTIDLTDSEMNKLFERTKKQLRENAEDMGNGCFKIYHKCDNACIGSIRNGTYDHDVYRDEALNNRFQIKGVELKSGYKDWILWISFAISCFLLCVALLGFIMWACQKGNIRCNICI

SEQ ID NO: 8869 - protein, 566 aa, synthetic construct; identical to SEQ ID NO: 630
  REGION 1..566: note = hemagglutinin__InfluenzaA__AFJ78034

SEQ ID NO: 8870 - protein, 566 aa, synthetic construct
  REGION 1..566: note = hemagglutinin__InfluenzaA__AFJ78045
MKTIIALSYILCLVFAQKLPGNDNSTATLCLGHHAVPNGTIVKTITNDQIEVTNATELVQSSSTGGICDSPHQILDGENCTLIDALLGDPQCDGFQNKKWDLFVERSRAYSNCYPYDVPDYASLRSLVASSGTLEFNNESFNWTGVTQNGTSSACKRRSNNSFFSRLNWLTHLKFKYPALNVTMPNNEKFDKLYIWGVHHPGTDNDQIFLYAQASGRITVSTKRSQQTVIPNIGSRPRVRNIPSRISIYWTIVKPGDILLINSTGNLIAPRGYFKIRSGKSSIMRSDAPIGKCNSECITPNGSIPNDKPFQNVNRITYGACPRYVKQNTLKLATGMRNVPEKQTRGIFGAIAGFIENGWEGMVDGWYGFRHQNSEGMGQAADLKSTQAAINQINGKLNRLIGKTNEKFHQIEKEFSEVEGRIQDLEKYVEDTKIDLWSYNAELLVALENQHTIDLTDSEMNKLFERTKKQLRENAEDMGNGCFKIYHKCDNACIGSIRNGTYDHDVYRDEALNNRFQIKGVELKSGYKDWILWISFAISCFLLCVALLGFIMWACQKGNIKCNICI

SEQ ID NO: 8871 - protein, 566 aa, synthetic construct; identical to SEQ ID NO: 630
  REGION 1..566: note = hemagglutinin__InfluenzaA__AFJ78056

SEQ ID NO: 8872 - protein, 566 aa, synthetic construct
  REGION 1..566: note = hemagglutinin__InfluenzaA__AFJ78067
MKTIIALSYILCLVFAQKLPGNDNSTATLCLGHHAVPNGTIVKTITNDQIEVTNATELVQSSSTGGICDSPHQILDGENCTLIDALLGDPQCDGFQNKKWDLFVERSKAYSNCYPYDVPDYASLRSLVASSGTLEFNNESFNWTGVTQNGTSSACKRRSNNSFFSRLNWLTHLKFKYPALNVTMPNNEKFDKLYIWGVHHPGTDNDQIFLYAQASGRITVSTKRSQQTVIPNIGSRPRVRNIPSRISIYWTIVKPGDILLINSTGNLIAPRGYFKIRSGRSSIMRSDAPIGKCNSECITPNGSIPNDKPFQNVNRITYGACPRYVKQNTLKLATGMRNVPEKQTRGIFGAIAGFIENGWEGMVDGWYGFRHQNSEGIGQAADLKSTQAAINQINGKLNRLIGKTNEKFHQIEKEFSEVEGRIQDLEKYVEDTKIDLWSYNAELLVALENQHTIDLTDSEMNKLFERTKKQLRENAEDMGNGCFKIYHKCDNACIGSIRNGTYDHDVYRDEALNNRFQIKGVELKSGYKDWILWISFAISCFLLCVALLGFIMWACQKGNIRCNICI

SEQ ID NO: 8873 - protein, 566 aa, synthetic construct
  REGION 1..566: note = hemagglutinin__InfluenzaA__AFJ78078
MKTIIALSYILCLVFAQKLPGNDNSTATLCLGHHAVPNGTIVKTITNDQIEVTNATELVQSSSTGGICDSPHQILDGENCTLIDALLGDPQCDGFQNKKWDLFVERSKAYSNCYPYDVPDYASLRSLVASSGTLEFNNESFNWTGVTQNGTSSACKRRSNNSFFSRLNWLTHLKFKYPALNVTMPNNEKFDKLYIWGVHHPGTDNDQIFLYAQASGRITVSTKRSQQTVIPNIGSRPRVRNIPSRISIYWTIVKPGDILLINSTGNLIAPRGYFKIRSGKSSIMRSDAPIDKCNSECITPNGSIPNDKPFQNVNRITYGACPRYVKQNTLKLATGMRNVPEKQTRGIFGAIAGFIENGWEGMVDGWYGFRHQNSEGIGQAADLKSTQAAIDQINGKLNRLIGKTNEKFHQIEKEFSEVEGRIQDLEKYVEDTKIDLWSYNAELLVALENQHTIDLTDSEMNKLFEKTKKQLRENAEDMGNGCFKIYHKCDNACIGSIRNGTYDHDVYRDEALNNRFQIKGVELKSGYKDWILWISFAISCFLLCVALLGFIMWACQKGNIRCNICI

SEQ ID NO: 8874 - protein, 566 aa, synthetic construct; identical to SEQ ID NO: 8797
  REGION 1..566: note = hemagglutinin__InfluenzaA__AFJ78089

SEQ ID NO: 8875 - protein, 566 aa, synthetic construct; identical to SEQ ID NO: 1828
  REGION 1..566: note = hemagglutinin__InfluenzaA__AFJ78100

SEQ ID NO: 8876 - protein, 566 aa, synthetic construct
  REGION 1..566: note = hemagglutinin__InfluenzaA__AFJ78111
MKTIIALSYILCLVFAQKLPGNDNSTATLCLGHHAVPNGTIVKTITNDQIEVTNATELVQSSSTGGICDSPHQILDGENCTLIDALLGDPQCDGFQNKKWDLFVERSKAYSNCYPYDVPDYASLRSLVASSGTLEFNNESFNWTGVTQNGTSSACKRRSNNSFFSRLNWLTHLKFKYPALNVTMPNNENFDKLYIWGVHHPGTDNDQIFLYAQASGRITVSTKRSQQTVIPNIGSRPRVRNIPSRISIYWTIVKPGDILLINSTGNLIAPRGYFKIRSGKSSIMRSDAPIGKCNSECITPNGSIPNDKPFQNVNRITYGACPRYVKQNTLKLATGMRNVPEKQTRGIFGAIAGFIENGWEGMVDGWYGFRHQNSEGIGQAADLKSTQAAIDQINGKLNRLIGKTNEKFHQIEKEFSEVEGRIQDLEKYVEDTKIDLWSYNAELLVALENQHTIDLTDSEMNKLFEKTKKQLRENAEDMGNGCFKIYHKCDNACIGSIRNGTYDHDVYRDEALNNRFQIKGVELKSGYKDWILWISFAISCFLLCVALLGFIMWACQKGNIRCNICI

SEQ ID NO: 8877 - protein, 566 aa, synthetic construct
  REGION 1..566: note = hemagglutinin__InfluenzaA__AFJ78122
MKTIIALSYILCLIFAQKLPGNDNSTATLCLGHHAVPNGTIVKTITNDQIEVTNATELVQSSSTGGICDSPHQILDGENCTLIDALLGDPQCDGFQNKKWDLFVERSKAYSNCYPYDVPDYASLRSLVASSGTLEFNNESFNWTGVTQNGTSSACKRRSNNSFFSRLNWLTHLKFKYPALNVTMPNNEKFDKLYIWGVHHPGTDNDQIFLYAQASGRITVSTKRSQQTVIPNIGSRPRVRNIPSRISIYWTIVKPGDILLINSTGNLIAPRGYFKIRSGRSSIMRSDAPIDKCNSECITPNGSIPNDKPFQNVNRITYGACPRYVKQNTLKLATGMRNVPEKQTRGIFGAIAGFIENGWEGMVDGWYGFRHQNSEGIGQAADLKSTQAAIDQINGKLNRLIRKTNEKFHQIEKEFSEVEGRIQDLEKYVEDTKIDLWSYNAELLVALENQHTIDLTDSEMNKLFEKTKKQLRENAEDMGNGCFKIYHKCDNACIGSIRNGTYDHDVYRDEALNNRFQIKGVELKSGYKDWILWISFAISCFLLCVALLGFIMWACQKGNIRCNICI

SEQ ID NO: 8878 - protein, 566 aa, synthetic construct
  REGION 1..566: note = hemagglutinin__InfluenzaA__AFJ78144
MKTIIALSYILCLVFAQKLPGNDNSTATLCLGHHAVPNGTIVKTITNDQIEVTNATELVQSSSTGEICDSPHQILDGENCTLIDALLGDPQCDGFQNKKWDLFVERSKAYSNCYPYDVPDYASLRSLVASSGTLEFNNESFNWTGVTQNGTSSSCIRRSNNSFFSRLNWLTHLKFKYPALNVTMPNNEKFDKLYIWGVHHPGTDNDQIFLYAQASGRITVSTKRSQQTVIPNIGSRPRVRNIPSRISIYWTIVKPGDILLINSTGNLIAPRGYFKIRSGKSSIMRSDAPIGKCNSECITPNGSIPNDKPFQNVNRITYGACPRYVKQNTLKLATGMRNVPEKQTRGIFGAIAGFIENGWEGMVDGWYGFRHQNSEGIGQAADLKSTQAAIDQINGKLNRLIGKTNEKFHQIEKEFSEVEGRIQDLEKYVEDTKVDLWSYNAELLVALENQHTIDLTDSEMNKLFEKTKKQLRENAEDMGNGCFKIYHKCDNACIGSIRNGTYDHDVYRDEALNNRFQIKGVELKSGYKDWILWISFAISCFLLCVALLGFIMWACQKGNIRCNICI

SEQ ID NO: 8879 - protein, 566 aa, synthetic construct; identical to SEQ ID NO: 8878
  REGION 1..566: note = hemagglutinin__InfluenzaA__AFJ78155

SEQ ID NO: 8880 - protein, 566 aa, synthetic construct
  REGION 1..566: note = hemagglutinin__InfluenzaA__AFJ78166
MKTIIALSYILCLVFAQKLPGNDNSTATLCLGHHAVPNGTIVKTITNDQIEVTNATELVQSSSTGEICDSPHQILDGENCTLIDALLGDPQCDGFQNKKWDLFVERSKAYSNCYPYDVPDYASLRSLVASSGTLEFNNESFNWTGVTQNGTSSACIRRSNNSFFSRLNWLTHLKFKYPALNVTMPNNEEFDKLYIWGVHHPGTDNDQIFLYAQASGRITVSTKRSQQTVIPNIGSRPRVRNIPSRISIYWTIVKPGDILLINSTGNLIAPRGYFKIRSGKSSIMRSDAPIGKCNSECITPNGSIPNDKPFQNVNRITYGACPRYVKQNTLKLATGMRNVPEKQTRGIFGAIAGFIENGWEGMVDGWYGFRHQNSEGIGQAADLKSTQAAIDQINGKLNRLIGKTNEKFHQIEKEFSEVEGRIQDLEKYVEDTKIDLWSYNAELLVALENQHTIDLTDSEMNKLFEKTKRQLRENAEDMGNGCFKIYHKCDNACIGSIRNGTYDHDVYRDEALNNRFQIKGVELKSGYKDWILWISFAISCFLLCVALLGFIMWACQKGNIRCNICI

SEQ ID NO: 8881 - protein, 566 aa, synthetic construct; identical to SEQ ID NO: 1729
  REGION 1..566: note = hemagglutinin__InfluenzaA__AFJ78177

SEQ ID NO: 8882 - protein, 566 aa, synthetic construct
  REGION 1..566: note = hemagglutinin__InfluenzaA__AFJ78188
MKTIIALSYILCLVFAQKLPGNDNSTATLCLGHHAVPNGTIVKTITNDQIEVTNATELVQSSSTGEICDSPHQILDGENCTLIDALLGDPQCDGFQNKKWDLFVERSKAYSNCYPYDVPDYASLRSLVASSGTLEFNNESFNWTGVTQNGTSSACIRRSNNSFFSRLNWLTHLKFKYPALNVTMPNNEKFDKLYIWGVHHPGTDNDQIFLYAQASGRITVSTKRSQQTVIPNIGSRPRIRNIPSRISIYWTIVKPGDILLINSTGNLIAPRGYFKIRSGKSSIMRSDAPIGKCNSECITPNGSIPNDKPFQNVNRITYGACPRYVKQNTLKLATGMRNVPEKQTRGIFGAIAGFIENGWEGMVDGWYGFRHQNSEGTGQAADLKSTQAAIDQINGKLNRLIGKTNEKFHQIEKEFSEVEGRIQDLEKYVEDTKIDLWSYNAELLVALENQHTIDLTDSEMNKLFEKTKKQLRENAEDMGNGCFKIYHKCDNACIGSIRNGTYDHDVYRDEALNNRFQIKGVELKSGYKDWILWISFAISCFLLCVALLGFIMWACQKGNIRCNICI

SEQ ID NO: 8883 - protein, 566 aa, synthetic construct
  REGION 1..566: note = hemagglutinin__InfluenzaA__AFJ78210
MKTIIALSYILCLVFAQKLPGNDNSTATLCLGHHAVPNGTIVKTITNDQIEVTNATELVQSSSTGEICDSPHQILDGENCTLIDALLGDPQCDGFQNKKWDLFVERSKAYSNCYPYDVPDYASLRSLVASSGTLEFNNESFNWTGVTQNGTSSACIRRSNNSFFSRLNWLTHLKFKYPALNVTMPNNEKFDKLYIWGVHHPGTDNDQIFLYAQASGRITVSTKRSQQTVIPNIGSRPRVRNIPSRISIYWTIVKPGDILLINSTGNLIAPRGYFKIRSGKSSIMRSDAPIGKCNSECITPNGSIPNDKPFQNVNRITYGACPRYVKQNTLKLATGMRNVPEKQTRGIFGAIAGFIENGWEGMVDGWYGFRHQNSEGTGQAADLKSTQAAIDQINGKLNRLIGKTNEKFHQIEKEFSEVEGRIQDLEKYVEDTKIDLWSYNAELLVALENQHTIDLTDSEMNKLFEKTKKQLRENAEDMGNGCFKIYHKCDNACIGSIRNGTYDHDVYRDEALNNRFQIKGIELKSGYKDWILWISFAISCFLLCVALLGFIMWACQKGNIRCNICI

SEQ ID NO: 8884 - protein, 566 aa, synthetic construct; identical to SEQ ID NO: 8808
  REGION 1..566: note = hemagglutinin__InfluenzaA__AFJ78221

SEQ ID NO: 8885 - protein, 566 aa, synthetic construct
  REGION 1..566: note = hemagglutinin__InfluenzaA__AFJ78232
MKTIIALSYILCLVFAQKLPGNDNSTATLCLGHHAVPNGTIVKTITNDQIEVTNATELVQSSSTGKICDSPHQILDGENCTLIDALLGDPQCDGFQNKKWDLFVERSKAYSNCYPYDVPDYASLRSLVASSGTLEFNNESFNWTGVTQNGTSSACIRRSNNSFFSRLNWLTHLKFKYPALNVTMPNNEEFDKLYIWGVHHPGTDNDQIFLYAQASGRITVSTKRSQQTVIPNIGSRPRVRNIPSRISIYWTIVKPGDILLINSTGNLIAPRGYFKIRSGKSSIMRSDAPIGKCNSECITPNGSIPNDKPFQNVNRITYGACPRYVKQNTLKLATGMRNVPEKQTRGIFGAIAGFIENGWEGMVDGWYGFRHQNSEGTGQAADLKSTQAAIDQINGKLNRLIGKTNEKFHQIENEFSEVEGRIQDLEKYVEDTKIDLWSYNAELLVALENQHTIDLTDSEMNKLFEKTKKQLRENAEDMGNGCFKIYHKCDNACIGSIRNGTYDHDVYRDEALNNRFQIKGVELKSGYKDWILWISFAISCFLLCVALLGFIMWACQKGNIRCNICI

SEQ ID NO: 8886 - protein, 566 aa, synthetic construct
  REGION 1..566: note = hemagglutinin__InfluenzaA__AFJ78243
MKTIIALSYILCLVFAQKLPGNDNSTATLCLGHHAVPNGTIVKTITNDQIEVTNATELVQSSSTGEICDSPHQILDGENCTLIDALLGDPQCDGFQNKKWDLFVERSKAYSNCYPYDVPDYASLRSLVASSGTLEFNNESFNWTGVTQNGTSSACIRRSNNSFFSRLNWLTHLKFKYPALNVTMPNNEEFDKLYIWGVHHPGTDNDQIFLYAKASGRITVSTKRSQQTVIPNIGSRPRVRNIPSRISIYWTIVKPGDILLINSTGNLIAPRGYFKIRSGKSSIMRSDAPVGKCNSECITPNGSIPNDKPFQNVNRITYGACPRYVKQNTLKLATGMRNVPEKQTRGIFGAIAGFIENGWEGMVDGWYGFRHKNSEGTGQAADLKSTQAAIDQINGKLNRLIGKTNEKFHQIEKEFSEVEGRIQDLEKYVEDTKIDLWSYNAELLVALENQHTIDLTDSEMNKLFEKTKKQLRENAEDMGNGCFKIYHKCDNACIGSIRNGTYDHDVYRDEALNNRFQIKGVELKSGYKDWILWISFAISCFLLCVALLGFIMWACQKGNIRCNICI

SEQ ID NO: 8887 - protein, 566 aa, synthetic construct
  REGION 1..566: note = hemagglutinin__InfluenzaA__AFJ78254
MKTIIALSYILCLVFAQKLPGNDNSTATLCLGHHAVPNGTIVKTITNDQIEVTNATELVQSSSTGEICDSPHQILDGENCTLIDALLGDPQCDGFQNKKWDLFVERSKAYSNCYPYDVPDYASLRSLVASSGTLEFNNESFNWTGVTQNGTSSACIRRSNNSFFSRLNWLTHLKFKYPALNVTMPNNEEFDKLYIWGVHHPGTDNDQIFLYAQASGRITVSTKRSQQTVIPNIGSRPRVRNIPSRISIYWTIVKPGDILLINSTGNLIAPRGYFKIRSGKSSIMRSDAPIGKCNSECITPNGSIPNDKPFQNVNRITYGACPRYVKQNTLKLATGMRNVPEKQTRGIFGAIAGFIENGWEGMVDGWYGFRHQNSEGIGQAADLKSTQAAIDQINGKLNRLIGKTNEKFHQIEKEFSEVEGRIQDLEKYVEDTKVDLWSYNAELLVALENQHTIDLTDSEMNKLFEKTKKQLRENAEDMGNGCFKIYHKCDNACIGSIRNGTYDHDVYRDEALNNRFQIKGVELKSGYKDWILWISFAISCFLLCVALLGFIMWACQKGNIRCNICI

SEQ ID NO: 8888 - protein, 566 aa, synthetic construct; identical to SEQ ID NO: 8887
  REGION 1..566: note = hemagglutinin__InfluenzaA__AFJ78265

SEQ ID NO: 8889 - protein, 566 aa, synthetic construct
  REGION 1..566: note = hemagglutinin__InfluenzaA__AFJ78276
MKTIIALSYILCLVFAQKLPGNDNSTATLCLGHHAVPNGTIVKTITNDQIEVTNATELVQSSSTGEICDSPHQILDGENCTLIDALLGDPQCDGFQNKKWDLFVERSKAYSNCYPYDVPDYASLRSLVASSGTLEFNNESFNWTGVTQNGTSSACIRRSNNSFFSRLNWLTHLKFKYPALNVTMPNNEKFDKLYIWGVHHPGTDNDQIFLYAQASGRITVSTKRSQQTVIPNIGSRPRVRNIPSRISIYWTIVKPGDILLINSTGNLIAPRGYFKIRSGKSSIMRSDAPIGKCNSECITPNGSIPNDKPFQNVNRITYGACPRYVKQNTLKLATGMRNVPEKQTRGIFGAIAGFIENGWEGMVDGWYGFRHQNSEGIGQAADLKSTQAAIDQINGKLNRLIGKTNEKFHQIEKEFSEVEGRIQDLEKYVEDTKVDLWSYNAELLVALENQHTIDLTDSEMNKLFEKTKKQLRENAEDMGNGCFKIYHKCDNACIGSIRNGTYDHDVYRDEALNNRFQIKGVELKSGYKDWILWISFAISCFLLCVALLGFIMWACQKGNIRCNICI

SEQ ID NO: 8890 - protein, 566 aa, synthetic construct
  REGION 1..566: note = hemagglutinin__InfluenzaA__AFJ78287
MKTIIALSYILCLVFAQKLPGNDNSTATLCLGHHAVPNGTIVKTITNDQIEVTNATELVQSSSTGEICDSPHQILDGKNCTLMDALLGDPQCDGFQNKKWDLFVERSKAYSNCYPYDVPDYASLRSLVASSGTLEFNNESFNWTGVTQNGTSSACIRRSKNSFFSRLNWLTHLNFKYPALNVTMPNNEQFDKLYIWGVHHPGTDKDQIFPYAQASGRITVSTKRSQQTVIPNIGSRPRVRNIPSRISIYWTIVKPGDILLINSTGNLIAPRGYFKIRSGKSSIMRSDAPIGKCNSECITPNGSIPNDKPFQNVNRITYGACPRYVKQNTLKLATGMRNVPEKQTRGIFGAIAGFIENGWEGMVDGWYGFRHQNSEGRGQAADLKSTQAAIDQINGKLNRLIGKTNEKFHQIEKEFSEVEGRIQDLEKYVEDTKIDLWSYNAELLVALENQHTIDLTDSEMNKLFEKTKKQLRENAEDMGNGCFKIYHKCDNACIGSIRNGTYDHDVYRDEALNNRFQIKGVELKSGYKDWILWISFAISCFLLCVALLGFIMWACQKGNIRCNICI

SEQ ID NO: 8891 - protein, 565 aa, synthetic construct
  REGION 1..565: note = hemagglutinin__InfluenzaA__AFJ78309
MKAKLLVLLCTFTATYADTICIGYHANNSTDTVDTVLEKNVTVTHSVNLLEDSHNGKLCLLKGIAPLQLGNCSVAGWILGNPECESLISKESWSYIVETPNPENGTCYPGYFADYEELREQLSSVSSFERFEIFPKESSWPNHTVTGVSASCSHNGKSSFYRNLLWLTEKNGLYPNLSKSYVNNKEKEVLVLWGVHHPSNIGDQRAIYHTENAYVSVVSSHYSRRFTPEIAKRPKVRDQEGRINYYWTLLEPGDTIIFEANGNLIAPWYAFALSRGFGSGIITSNAPMDECDAKCQTPQGAINSSLPFQNVHPITIGECPKYVRSAKLRMVTGLRNIPSIQSRGLFGAIAGFIEGGWTGMIDGWYGYHHQNEQGSGYAADQKSTQNAINGITNKVNSVIEKMNTQFTAVGKEFNKLERRMENLNKKVDDGFLDIWTYNAELLVLLENERTLDFHDSNVKNLYEKVKSQLKNNAKEIGNGCFEFYHKCNNECMESVKNGTYDYPKYSEESKLNREKIDGVKLESMGVYQILAIYSTVASSLVLLVSLGAISFWMCSNGSLQCRICI

SEQ ID NO: 8892 - protein, 566 aa, synthetic construct
  REGION 1..566: note = hemagglutinin__InfluenzaA__AFJ78320
MKTIIALSYILCLVFAQKLPGNDNSTATLCLGHHAVPNGTLVKTITNDQIEVTNATELVQSSSTGRICDSPHQILDGENCTLIDALLGDPHCDGFQNKEWDLFVERSKAYSNCYPYDVPDYASLRSLVASSGTLEFNNESFNWTGVAQNGTSSACKRRSNKSFFSRLNWLHQLKYKYPALNVTMPNNEKFDKLYIWGVHHPSTDSDQISLYAQASGRVTVSTKRSQQTVIPNIGSRPWVRGVSSRISIYWTIVKPGDILLINSTGNLIAPRGYFKIRSGKSSIMRSDAPIGKCNSECITPNGSIPNDKPFQNVNRITYGACPRYVKQNTLKLATGMRNVPEKQTRGIFGAIAGFIENGWEGMVDGWYGFRHQNSEGTGQAADLKSTQAAINQINGKLNRLIGKTNEKFHQIEKEFSEVEGRIQDLEKYVEDTKIDLWSYNAELLVALENQHTIDLTDSEMNKLFERTKKQLRENAEDMGNGCFKIYHKCDNACIGSIRNGTYDHDVYRDEALNNRFQIKGVELKSGYKDWILWISFAISCFLLCVVLLGFIMWACQKGNIRCNICI

SEQ ID NO: 8893 - protein, 565 aa, synthetic construct
  REGION 1..565: note = hemagglutinin__InfluenzaA__AFJ78331
MKAKLLVLLCTFTATYADTICIGYHANNSTDTVDTVLEKNVTVTHSVNLLEDSHNGKLCLLKGIAPLQLGNCSVAGWILGNPECELLISKESWSYIVETPNPENGTCYPGYFADYEELREQLSSVSSFERFEIFPKESSWPNHTVTGVSASCSHNGKSSFYRNLLWLTGKNGLYPNLSKSYVNNKEKEVLVLWGVHHPPNIGDQRALYHTENAYVSVVSSHYSRRFTPEIAKRPKVRDQEGRINYYWTLLEPGDTIIFEANGNLIAPWYAFALSRGFGSGIITSNAPMDECDAKCQTPQGAINSSLPFQNVHPVTIGECPKYVRSAKLRMVTGLRNIPSIQSRGLFGAIAGFIEGGWTGMVDGWYGYHHQNEQGSGYAADQKSTQNAINGITNKVNSVIEKMNTQFTAVGKEFNKLERRMENLNKKVDDGFLDIWTYNAELLVLLENERTLDFHDSNVKNLYEKVKSQLKNNAKEIGNGCFEFYHKCNNECMESVKNGTYDYPKYSEESKLNREKIDGVKLESMGVYQILAIYSTVASSLVLLVSLGAISFWMCSNGSLQCRICI

SEQ ID NO: 8894 - protein, 565 aa, synthetic construct; identical to SEQ ID NO: 8893
  REGION 1..565: note = hemagglutinin__InfluenzaA__AFJ78342

SEQ ID NO: 8895 - protein, 565 aa, synthetic construct; identical to SEQ ID NO: 8893
  REGION 1..565: note = hemagglutinin__InfluenzaA__AFJ78353

SEQ ID NO: 8896 - protein, 565 aa, synthetic construct
  REGION 1..565: note = hemagglutinin__InfluenzaA__AFJ78364
MKAKLLVLLCTFTATYADTICIGYHANNSTDTVDTVLEKNVTVTHSVNLLEDSHNGKLCLLKGIAPLQLGNCSVAGWILGNPECESLISKESWSYIVETPNPENGTCYPGYFADYEELREQLSSVSSFERFEIFPKESSWPNHTVTGVSASCSHNGKSSFYRNLLWLTEKNGLYPNLSKSYVNNKEKEVLVLWGVHHPSNIGDQRAIYHTENAYVSVVSSHYNRRFTPEIAKRPKVRNQEGRINYYWTLLEPGDTIIFEANGNLIAPWYAFALSRGFGSGIITSNAPMDECDAKCQTPQGAINSSLPFQNVHPITIGECPKYVRSAKLRMVTGLRNIPSIQSRGLFGAIAGFIEGGWTGMIDGWYGYHHQNEQGSGYAADQKSTQNAINGITNKVNSVIEKMNTQFTAVGKEFNKLERRMENLNKKVDDGFLDIWTYNAELLVLLENERTLDFHDSNVKNLYEKVKSQLKNNAKEIGNGCFEFYHKCNNECMESVKNGTYDYPKYSEESKLNREKIDGVKLESMGVYQILAIYSTVASSLVLLVSLGAISFWMCSNGSLQCRICI

SEQ ID NO: 8897 - protein, 565 aa, synthetic construct
  REGION 1..565: note = hemagglutinin__InfluenzaA__AFJ78375
MKAKLLVLLCTFTATYADTICIGYHANNSTDTVDTVLEKNVTVTHSINLLENSHNGKLCLLKGIAPLQLGNCSVAGWILGNPECELLISKESWSYIVETPNPENGTCYPGHFADYEELREQLSSVSSFERFEIFPKESSWPNHTVTGVSASCSHNGKSSFYRNLLWLTEKNGLYPNLSKSYVNNKEKEVLVLWGVHHPSNIGDQRAIYHTENAYVSVVSSHYSRRFTPEIVKRPKVRDQEGRINYYWTLLEPGDTIIFEANGNLIAPWYAFALSRGFGSGIITSNAPMDECDAKCQTPQGAINSSLPFQNVHPVTIGECPKYVRSAKLRMVTGLRNIPSIQSRGLFGAIAGFIEGGWTGMIDGWYGYHHQNEQGSGYAADQKSTQNAINGITNKVNSIIEKMNTQFTAVGKEFNKLERRMENLNKKVDDGFLDIWTYNAELLVLLENERTLDFHDSNVKNLYEKVKSQLKNNAKEIGNGCFEFYHKCNNECMESVKNGTYDYPKYSEESKLNREKIDGVKLESMGVYQILAIYSTVASSLVLLVSLGAISFWMCSNGSLQCRICI

SEQ ID NO: 8898 - protein, 565 aa, synthetic construct; identical to SEQ ID NO: 1385
  REGION 1..565: note = hemagglutinin__InfluenzaA__AFJ78386

SEQ ID NO: 8899 - protein, 565 aa, synthetic construct; identical to SEQ ID NO: 1385
  REGION 1..565: note = hemagglutinin__InfluenzaA__AFJ78397

SEQ ID NO: 8900 - protein, 565 aa, synthetic construct; identical to SEQ ID NO: 8077
  REGION 1..565: note = hemagglutinin__InfluenzaA__AFJ78408

SEQ ID NO: 8901 - protein, 565 aa, synthetic construct
  REGION 1..565: note = hemagglutinin__InfluenzaA__AFJ78419
MKVKLLVLLCTFTATYADTICIGYHANNSTDTVDTVLEKNVTVTHSVNLLEDSHNGKLCLLKGIAPLQLGNCSVAGWILGNPECELLISKESWSYIVEKPNPENGTCYPGYFADYEELREQLSSVSSFERFEIFPKESSWPNHTVTGVSASCSHNGKSSFYKNLLWLTGKNGLYPNLSKSYANNKEKEVLVLWGVHHPPNIGDQRALYHTENAYVSVVSSHYSRKFTPEIAKRPKVRDQEGRINYYWTLLEPGDTVIFEANGNLIAPRYAFALSRGFGSGIINSNAPMDECDAKCQTPQGAINSSLPFQNVHPVTIGECPKYVRSAKLRMVTGLRNIPSIQSRGLFGAIAGFIEGGWTGMVDGWYGYHHQNEQGSGYAADQKSTQNAINGITNKVNSVIEKMNTQFTAVGKEFNKLERRMENLNKKVDDGFIDIWTYNAELLVLLENERTLDFHDSNVKNLYEKVKSQLKNNAKEIGNGCFEFYHKCNDECMESVKNGTYDYPKYSEESKLNREKIDGVKLESMGVYQILAIYSTVASSLVLLVSLGAISFWMCSNGSLQCRICI

SEQ ID NO: 8902 - protein, 565 aa, synthetic construct
  REGION 1..565: note = hemagglutinin__InfluenzaA__AFJ78430
MKVKLLVLLCTFTATYADTICIGYHANNSTDTVDTVLEKNVTVTHSVNLLEDSHNGKLCLLKGIAPLQLGNCSVAGWILGNPECELLISRESWSYIVENPNPENGTCYPGHFADYEELREQLSSVSSFERFEIFPKESSWPNHTVTGVSASCSHNGKSSFYKNLLWLTGKNGLYPNLSKSYANNKEKEVLVLWGVHHPPNIGDQRALYHTENAYVSVVSSHYSRKFTPEIAKRPKVRDQEGRINYYWTLLGPGDTIIFEANGNLIAPRYAFALSRGFGSGIINSNAPMDECDAKCQTPQGAINSSLPFQNVHPVTIGECPKYVRSAKLRMVTGLRNIPSIQSRGLFGAIAGFIEGGWTGMVDGWYGYHHQNEQGSGYAADQKSTQNAINGITNKVNSVIEKMNTQFTAVGKEFNKLERRMENLNKKVDDGFIDIWTYNAELLVLLENERTLDFHDSNVKNLYEKVKSQLKNNAKEIGNGCFEFYHKCNDECMESVKNGTYDYPKYSEESKLNREKIDGVKLESMGVYQILAIYSTVASSLVLLVSLGAISFWMCSNGSLQCRICI

SEQ ID NO: 8903 - protein, 565 aa, synthetic construct
  REGION 1..565: note = hemagglutinin__InfluenzaA__AFJ78441
MKVKLMVLLCTFTATYADTICIGYHANNSTDTVDTVLEKNVTVTHSVNLLEDSHNGKLCLLKGIAPLQLGNCSVAGWILGNPECELLISRESWSYIVEKPNPENGTCYPGHFADYEELREQLSSVSSFERFEIFPKESSWPNHTVTGVSASCSHNGKSSFYKNLLWLTGKNGLYPNLSKSYANNKEKEVLVLWGVHHPPNIGDQKALYHTENAYVSVVSSHYSRKFTPEIAKRPKVRDQEGRINYYWTLLEPGDTIIFEANGNLIAPRYAFALSRGFGSGIINSNAPMDECDAKCQTPQGAINSSLPFQNVHPVTIGECPKYVRSAKLRMVTGLRNIPSIQSRGLFGAIAGFIEGGWTGMVDGWYGYHHQNEQGSGYAADQKSTQNAINGITNKVNSVIEKMNTQFTAVDKEFNKLERRMENLNKKVDDGFIDIWTYNAELLVLLENERTLDFHDSNVKNLYEKVKSQLKNNAKEIGNGCFEFYHKCNDECMESVKNGTYDYPKYSEESKLNREKIDGVKLESMGVYQILAIYSTVASSLVLLVSLGAISFWMCSNGSLQCRICI

SEQ ID NO: 8904 - protein, 565 aa, synthetic construct
  REGION 1..565: note = hemagglutinin__InfluenzaA__AFJ78452
MKVKLLVLLCTFTATYADTICIGYHANNSTDTVDTVLEKNVTVTHSVNLLEDSHNGKLCLLKGIAPLQLGNCSVAGWILGNPECELLISKESWSYIVEKPNPENGTCYPGHFADYEELREQLSSVSSFERFEIFPKESSWPNHTVTGVSASCSHNGKSSFYKNLLWLTGKNGLYPNLSKSYANNKEKEVLVLWGVHHPPNIGDQKALYHTENAYVSVVSSHYSRKFIPEIAKRPKVRDQEGRINYYWTLLEPGDTIIFEANGNLIAPRYAFALSRGFGSGIINSNAPMDECDAKCQTPQGAINSSLPFQNVHPVTIGECPKYVRSAKLRMVTGLRNIPSIQSRGLFGAIAGFIEGGWTGMVDGWYGYHHQNEQGSGYAADQKSTQNAINGITNKVNSVIEKMNTQFTAVGKEFNKLERRMENLNKKVDDGFIDIWTYNAELLVLLENERTLDFHDSNVKNLYEKVKSQLKNNAKEIGNGCFEFYHKCNDECMESVKNGTYDYPKYSEESKLNREKIDGVKLESMGVYQILAIYSTVASSLVLLVSLGAISFWMCSNGSLQCRICI

SEQ ID NO: 8905 - protein, 565 aa, synthetic construct
  REGION 1..565: note = hemagglutinin__InfluenzaA__AFJ78463
MKVKLLVLLCTFTATYADTICIGYHANNSTDTVDTVLEKNVTVTHSVNLLEDSHNGKLCLLKGIAPLQLGNCSVAGWILGNPECELLISKESWSYIVEKPNPENGTCYPGHFADYEELREQLSSVSSFERFEIFPKESSWPNHTVTGVSASCSHNGKSSFYKNLLWLTGKNGLYPNLGKSYANNKEKEVLVLWGVHHPPNIGDQKALYHTENAYVSVVSSHYSRKFIPEIAKRPKVRDQEGRINYYWTLLEPGDTIIFEANGNLIAPRYAFALSRGFGSGIINSNAPMDECDAKCQTPQGAINSSLPFQNVHPVTIGECPKYVRSAKLRMVTGLRNIPSIQSRGLFGAIAGFIEGGWTGMVDGWYGYHHQNEQGSGYAADQKSTQNAINGITNKVNSVIEKMNTQFTAVGKEFNKLERRMENLNKKVDDGFIDIWTYNAELLVLLENERTLDFHDSNVKNLYEKVKSQLKNNAKEIGNGCFEFYHKCNDECMESVKNGTYDYPKYSEESKLNREKIDGVKLESMGVYQILAIYSTVASSLVLLVSLGAISFWMCSNGSLQCRICI

SEQ ID NO: 8906 - protein, 565 aa, synthetic construct
  REGION 1..565: note = hemagglutinin__InfluenzaA__AFJ78474
MKVKLLVLLCTFTATYADTICIGYHANNSTDTVDTVLEKNVTVTHSVNLLEDSHNGKLCLLKGIAPLQLGNCSVAGWILGNPECELLISRESWSYIVEKPNPENGTCYPGHFADYEELREQLSSVSSFERFEIFPKESSWPNHTVTGVSASCSYNGKSSFYKNLLWLTGKNGLYPNLSKSYANNKEKEVLVLWGVHHPPNIGDQRALYHTENAYVSVVSSHYSRKFTPEIAKRPKVRDQEGRINYYWTLLEPGDTIIFEANGNLIAPRYAFALSRGFGSGIINSNAPMDECDAKCQTPQGAINSSLPFQNVHPVTIGECPKYVRSAKLRMVTGLRNIPSIQSRGLFGAIAGFIEGGWTGMVDGWYGYHHQNEQGSGYAADQKSTQNAINGITNKVNSVIEKMNTQFTAVGKEFNKLERRMENLNKKVDDGFIDIWTYNAELLVLLENERTLDFHDSNVKNLYEKVKSQLKNNAKEIGNGCFEFYHKCNDECMESVKNGTYDYPKYSEESKLNREKIDGVKLESMGVYQILAIYSTVASSLVLLVSLGAISFWMCSNGSLQCRICI

SEQ ID NO: 8907 - protein, 565 aa, synthetic construct
  REGION 1..565: note = hemagglutinin__InfluenzaA__AFJ78485
MKVKLLVLLCTFTATYADTICIGYHANNSTDTVDTVLEKNVTVTHSVNLLEDSHNGKLCLLKGIAPLQLGNCSVAGWILGNPECELLISRESWSYIVEKPNPENGTCYPGHFADYEELREQLSSVSSFERFEIFPKESSWPNHTTTGVSASCSHNGESSFYKNLLWLTGKNGLYPNLSKSYANNKEKEVLVLWGVHHPPNIGDQRALYHTENAYVSVVSSHYSRKFTPEIAKRPKVRDQEGRINYYWTLLEPGDTIIFEANGNLIAPRYAFALSRGFGSGIINSNAPMDECDAKCQTPQGAINSSLPFQNVHPVTIGECPKYVRSAKLRMVTGLRNIPSIQSRGLFGAIAGFIEGGWTGMVDGWYGYHHQNEQGSGYAADQKSTQNAINGITNKVNSVIEKMNTQFTAVGKEFNKLERRMENLNKKVEDGFIDIWTYNAELLVLLENERTLDFHDSNVKNLYEKVKSQLKNNAKEIGNGCFEFYHKCNDECMESVKNGTYDYPKYSEESKLNREKIDGVKLESMGVYQILAIYSTVASSLVLLVSLGAISFWMCSNGSLQCRICI

SEQ ID NO: 8908 - protein, 565 aa, synthetic construct
  REGION 1..565: note = hemagglutinin__InfluenzaA__AFJ78496
MKVKLLVLLCTFTATYADTICIGYHANNSTDTVDTVLEKNVTVTHSVNLLEDSHNGKLCLLKGIAPLQLGNCSVAGWILGNPECELLISRESWSYIVEKPNPENGTCYPGHFADYEELREQLSSVSSFERFEIFPKESSWPNHTTTGVSASCSHNGESSFYKNLLWLTGKNGLYPNLSKSYANNKEKEVLVLWGVHHPPNIGGQRALYHTENAYVSVVSSHYSRKFTPEIAKRPKVRDQEGRINYYWTLLEPGDTIIFEANGNLIAPRYAFALSRGFGSGIINSNAPMDECDAKCQTPQGAINSSLPFQNVHPVTIGECPKYVRSAKLRMVTGLRNIPSIQSRGLFGAIAGFIEGGWTGMVDGWYGYHHQNEQGSGYAADQKSTQNAINGITNKVNSVIEKMNTQFTAVGKEFNKLERRMENLNKKVDDGFIDIWTYNAELLVLLENERTLDFHDSNVKNLYEKVKSQLKNNAKEIGNGCFEFYHKCNDECMESVKNGTYDYPKYSEESKLNREKIDGVKLESMGVYQILAIYSTVASSLVLLVSLGAISFWMCSNGSLQCRICI

SEQ ID NO: 8909 - protein, 565 aa, synthetic construct
  REGION 1..565: note = hemagglutinin__InfluenzaA__AFJ78518
MKVKLLVLLCTFTATYADTICIGYHANNSTDTVDTVLEKNVTVTHSVNLLEDSHNGKLCLLKGIAPLQLGNCSVAGWILGNPECELLISRESWSYIVEKPNPENGTCYPGHFADYEELREQLSSVSSFERFEIFPKESSWPNHTTTGVSASCSHNGESSFYKNLLWLTGKNGLYPNLSKSYANNKEKEVLVLWGVHHPPNIGDQRALYHTENAYVSVVSSHYSRKFTPEIAKRPKVRDQEGRINYYWTLLEPGDTIIFEANGNLIAPRYAFALSRGFGSGIINSNAPMDECDAKCQTPQGAINSSLPFQNVHPVTIGECPKYVRSAKLRMVTGLRNIPSIQSRGLFGAIAGFIEGGWTGMVDGWYGYHHQNEQGSGYAADQKSTQNAINGITNKVNSVIEKMNTQFTAVGKEFNKLERRMENLNKKVDDGFIDIWTYNAELLVLLENERTLDFHDSNVKNLYEKVKSQLKNNAKEIGNGCFEFYHKCNDECMESVKNGTYDYPKYSEESKLNREKIDGVKLESMGVYQILAIYSTVASSLVLLVSLGAISFWMCSNGSLQCRICI

SEQ ID NO: 8910 - protein, 565 aa, synthetic construct
  REGION 1..565: note = hemagglutinin__InfluenzaA__AFJ78529
MKVKLLVLLCTFTATYADTICIGYHANNSTDTVDTVLEKNVTVTHSVNLLEDNHNGKLCLLKGIAPLQLGNCSVAGWILGNPECELLISKESWSYIVERPNPENGTCYPGHFADYEELREQLSSVSSFERFEIFPKESSWPNHTVTGVSASCSHNGESSFYKNLLWLTGKNGLYPNLSKSYANNKEKEVLVLWGVHHPPNIGDQMTLYHKENAYVSVVSSHYSRKFTPEIAKRPKVRDQEGRINYYWTLLEPGDTIIFEANGNLIAPRYAFALSRGFGSGIINSNAPMDECDAKCQTPQGAINSSLPFQNVHPVTIGECPKYVRSAKLRMVTGLRNIPSIQSRGLFGAIAGFIEGGWTGMVDGWYGYHHQNEQGSGYAADQKSTQNAINGITNKVNSVIEKMNTQFTAVGKEFNKLERRMENLNKKVDDGFIDVWTYNAELLVLLENERTLDFHDSNVKNLYEKVKNQLKNNAKEIGNGCFEFYHKCNDECMESVKNGTYDYPKYSEESKLSREKIDGVKLESMGVYQILAIYSTVASSLVLLVSLGAISFWMCSNGSLQCRICI

SEQ ID NO: 8911 - protein, 565 aa, synthetic construct; identical to SEQ ID NO: 8910
  REGION 1..565: note = hemagglutinin__InfluenzaA__AFJ78540

SEQ ID NO: 8912 - protein, 565 aa, synthetic construct; identical to SEQ ID NO: 8910
  REGION 1..565: note = hemagglutinin__InfluenzaA__AFJ78551

SEQ ID NO: 8913 - protein, 565 aa, synthetic construct
  REGION 1..565: note = hemagglutinin__InfluenzaA__AFJ78562
MKVKLLVLLCTFTATYADTICIGYHANNSTDTVDTVLEKNVTVTHSVNLLEDNHNGKLCLLKGIAPLQLGNCSVAGWILGNPECELLISKESWSYIVERPNPENGTCYPGHFADYEELREQLSSVSSFERFEIFPKESSWPNHTVTGVSASCSHNGESSFYKNLLWLTGKNGLYPTLSKSYANNKEKEVLVLWGVHHPPNIGDQMTLYHKENAYVSVVSSHYSRKFTPEIAKRLKVRDQEGRINYYWTLLEPGDTIIFEANGNLIAPRYAFALSRGLGSGIINSNAPMDECDAKCQTPQGAINSSLPFQNVHPVTIGECPKYVRSAKLRMVTGLRNIPSIQSRGLFGAIAGFIEGGWTGMVDGWYGYHHQNEQGSGYAADQKSTQNAINGITNKVNSVIEKMNTQFTAVGKEFNKLERRMENLNKKVDDGFIDVWTYNAELLVLLENERTLDFHDSNVKNLYEKVKNQLKNNAKEIGNGCFEFYHKCNDECMESVKNGTYDYPKYSEESKLSREKIDGVKLESMGVYQILAIYSTVASSLVLLVSLGAISFWMCSNGSLQCRICI

SEQ ID NO: 8914 - protein, 565 aa, synthetic construct
  REGION 1..565: note = hemagglutinin__InfluenzaA__AFJ78573
MKVKLLVLLCTFTATYADTICIGYHANNSTDTVDTVLEKNVTVTHSVNLLEDNHNGKLCLLKGIAPLQLGNCSVAGWILGNPECELLISKESWSYIVERPNPENGTCYPGHFADYEELREQLSSVSSFERFEIFPKESSWPNHTVTGVSASCSHNGESSFYKNLLWLTGKNGLYPNLSKSYANNKEKEVLVLWGVHHPPNIGDQMTLYHKENAYVSVVSSHYSRKFTPEIAKRPKVRDQEGRINYYWTLLEPGDTIIFEANGNLIAPRYAFALSRGFGSGIINSNASMDECDAKCQTPQGAINSSLPFQNVHPVTIGECPKYVRSAKLRMVTGLRNIPSIQSRGLFGAIAGFIEGGWTGMVDGWYGYHHQNEQGSGYAADQKSTQNAINGITNKVNSVIEKMNTQFTAVGKEFNKLERRMENLNKKVDDGFIDVWTYNAELLVLLENERTLDFHDSNVKNLYEKVKNQLKNNAKEIGNGCFEFYHKCNDECMESVKNGTYDYPKYSEEAKLSREKIDGVKLESMGVYQILAIYSTVASSLVLLVSLGAISFWMCSNGSLQCRICI

SEQ ID NO: 8915 - protein, 565 aa, synthetic construct
  REGION 1..565: note = hemagglutinin__InfluenzaA__AFJ78584
MKVKLLVLLCTFTATYADTICIGYHANNSTDTVDTVLEKNVTVTHSVNLLENSHNGKLCLLKGIAPLQLGNCSVAGWILGNPECELLISKESWSYIVEKPNPENGTCYPGHFADYEELREQLSSVSSFERFEIFPKESSWPNHTVTGVSASCSHNGENSFYRNLLWLTRKNGLYPNLSKSYANNKEKEVLVLWGVHHPPNIGDQKALYHTENAYVSVVSSHYSRKFTPEIAKRPKVRDQEGRINYYWTLLEPGDTIIFEANGNLIAPRYAFALSRGFGSGIINSNAPMDKCDAKCQTPQGAINSSLPFQNVHPVAIGECPKYVRSAKLRMVTGLRNIPSIQSRGLFGAIAGFIEGGWTGMVDGWYGYHHQNEQGSGYAADQKSTQNAINGITNKVNSVIEKMNTQFTAVGKEFNKLERRMENLNKKVDDGFIDIWTYNAELLVLLENERTLDFHDSNVKNLYEKVKSQLKNNAKEIGNGCFEFYHKCNDECMESVKNGTYDYPKYSEESKLNREKIDGVKLESMGVYQILAIYSTVASSLVLLVSLGAISFWMCSNGSLQCRICI

SEQ ID NO: 8916 - protein, 565 aa, synthetic construct
  REGION 1..565: note = hemagglutinin__InfluenzaA__AFJ78595
MKVKLLVLLCTFTATYADTICIGYHANNSTDTVDTVLEKNVTVTHSVNLLENSHNGKLCLLKGIAPLQLGNCSVAGWILGNPECELLISKESWSYIVEKPNPENGTCYPGHFADYEELREQLSSVSSFERFEIFPKESSWPNHTVTGVSASCSHNGESSFYRNLLWLTGKNGLYPNLSKSYANNREKEVLVLWGVHHPPNIGDQKALYHTENAYVSVVSSHYSRKFTPEIAKRPKVRDQEGRINYYWTLLEPGDTIIFEANGNLIAPRYAFALSRGFGSGIINSNAPMDKCDAKCQTPQGAINSSLPFQNVHPVTIGECPKYVRSAKLRMVTGLRNIPSIQSRGLFGAIAGFIEGGWTGMVDGWYGYHHQNEQGSGYAADQKSTQNAINGITNKVNSVIEKMNTQFTAVGKEFNKLERRMENLNKKVDDGFIDIWTYNAELLVLLENERTLDFHDSNVKNLYEKVKSQLKNNAKEIGNGCFEFYHKCNDECMESVKNGTYDYPKYSEESKLNREKIDGVKLESMGVYQILAIYSTVASSLVLLVSLGAISFWMCSNGSLQCRICI

SEQ ID NO: 8917 - protein, 565 aa, synthetic construct
  REGION 1..565: note = hemagglutinin__InfluenzaA__AFJ78617
MKVKLLVLLCTFTATYADTICIGYHANNSTDTVDTVLEKNVTVTHSVNLLENSHNGKLCLLKGIAPLQLGNCSVAGWILGNPECELLISKESWSYIVEKPNPENGTCYPGHFADYEELREQLSSVSSFERFEIFPKESSWPNHTVTGVSASCSHDGESSFYRNLLWLTGKNGLYPNLSKSYANNKEKEVLVLWGVHHPPSISDQKTLYHTENAHVSVVSSHYSRKFTPEIAKRPKVRDQEGRINYYWTLLEPGDTIIFEANGNLIAPRYAFALSRGFGSGIINSNAPMDKCDAKCQTPQGAINSSLPFQNVHPVTIGECPKYVRSAKLRMVTGLRNIPSIQSRGLFGAIAGFIEGGWTGMVDGWYGYHHQNEQGSGYAADQKSTQNAINGITNKVNSVIEKMNTQFTAVSKEFNKLERRMENLNKKVDDGFIDIWTYNAELLVLLENERTLDFHDSNVKNLYEKVKSQLKNNAKEIGNGCFEFYHKCNDECMESVKNGTYDYPKYSEESKLNREKIDGVKLESMGVYQILAIYSTVASSLVLLVSLGAISFWMCSNGSLQCRICI

SEQ ID NO: 8918 - protein, 565 aa, synthetic construct
  REGION 1..565: note = hemagglutinin__InfluenzaA__AFJ78628
MKVKLLVLLCTFTATYADTICIGYHANNSTDTVDTVLEKNVTVTHSVNLLEDNHNGKLCLLKGIAPLQLGNCSVAGWILGNPECELLISKESWSYIVERPNPENGTCYPGHFADYEELREQLSSVSSFERFEIFPKESSWPNHTVTGVSASCSHNGESSFYKNLLWLTGKNGLYPNLSKSYANNKEKEVLVLWGVHHPPNIGNQMTLYHKENAYVSVVSSHYSRKFTPEIAKRPKVRDQEGRINYYWTLLEPGDTIIFEANGNLIAPRYAFALSRGFGSGIINSNAPMDECDAKCQTPQGAINSSLPFQNVHPVTIGECPKYVRSAKLRMVTGLRNIPSIQSRGLFGAIAGFIEGGWTGMVDGWYGYHHQNEQGSGYAADQKSTQNAINGITNKVNSVIEKMNTQFTAVGKEFNKLERRMENLNKKVDDGFIDVWTYNAELLVLLENERTLDFHDSNVKNLYEKVKNQLKNNAKEIGNGCFEFYHKCNDECMESVKNGTYDYPKYSEESKLSREKIDGVKLESMGVYQILAIYSTVASSLVLLVSLGAISFWMCSNGSLQCRICI

SEQ ID NO: 8919 - protein, 565 aa, synthetic construct
  REGION 1..565: note = hemagglutinin__InfluenzaA__AFJ78639
MKVKLLVLLCTFTATYADTICIGYHANNSTDTVDTVLEKNVTVTHSVNLLENSHNGKLCLLKGIAPLQLGNCSVAGWILGNPECELLISKESWSYIVEKPNPENGTCYPGHFADYEELREQLSSVSSFERFEIFPKESSWPNHTVTGVSASCSHNGESSFYRNLLWLTGKNGLYPNLSKSYANNKEKEVLVLWGVHHPPSISNQKTLYHTENAYVSVVSSHYSRKFTPEIAKRPKVRDQEGRINYYWTLLEPGDTIIFEANGNLIAPRYAFALSRGFGSGIINSNAPMDKCDAKCQTPQGAINSSLPFQNVHPVTIGECPKYVRSAKLRMVTGLRNIPSIQSRGLFGAIAGFIEGGWTGMVDGWYGYHHQNEQGSGYAADQKSTQNAINGITNKVNSVIEKMNTQFTAVGKEFNKLERRMENLNKKVDDGFIDIWTYNAELLVLLENERTLDFHDSNVKNLYEKVKSQLKNNAKEIGNGCFEFYHKCNDECMESVKNGTYDYPKYSEESKLNREKIDGVKLESMGVYQILAIYSTVASSLVLLVSLGAISFWMCSNGSLQCRICI

SEQ ID NO: 8920 - protein, 565 aa, synthetic construct; identical to SEQ ID NO: 8919
  REGION 1..565: note = hemagglutinin__InfluenzaA__AFJ78650

SEQ ID NO: 8921 - protein, 566 aa, synthetic construct; identical to SEQ ID NO: 2669
  REGION 1..566: note = hemagglutinin__InfluenzaA__AFJ78661

SEQ ID NO: 8922 - protein, 566 aa, synthetic construct
  REGION 1..566: note = hemagglutinin__InfluenzaA__AFJ78681
MKAILVVLLYTFATVNADTLCIGYHANNSTDTVDTVLEKNVTVTHSVNLLEDKHNGKLCKLRGVAPLHLGKCNIAGWILGNPECESLSTASSWSYIVETSSSDNGTCYPGDFIDYEELREQLSSVSSFERFEIFPKTSSWPNHDSNKGVTAACPHAGAKSFYKNLIWLVKKGNSYPKLSKSYINDKGKEVLVLWGIHHPSTSADQQSLYQNADAYVFVGTSRYSKKFKPEIAIRPKVRDQEGRMNYYWTLVEPGDKITFEATGNLVVPRYAFAMERNAGSGIIISDTPVHDCNTTCQTPKGAINTSLPFQNIHPITIGKCPKYVKSTKLRLATGLRNVPSIQSRGLFGAIAGFIEGGWTGMVDGWYGYHHQNEQGSGYAADLKSTQNAIDEITNKVNSVIEKMNTQFTAVGKEFNHLEKRIENLNKKVDDGFLDIWTYNAELLVLLENERTLDYHDSNVKNLYEKVRSQLKNNAKEIGNGCFEFYHKCDNTCMESVKNGTYDYPKYSEEAKLNREEIDGVKLESTRIYQILAIYSTVASSLVLVVSLGAISFWMCSNGSLQCRICI

SEQ ID NO: 8923 - protein, 566 aa, synthetic construct; identical to SEQ ID NO: 2669
  REGION 1..566: note = hemagglutinin__InfluenzaA__AFJ78691

SEQ ID NO: 8924 - protein, 566 aa, synthetic construct; identical to SEQ ID NO: 2669
  REGION 1..566: note = hemagglutinin__InfluenzaA__AFJ78701

SEQ ID NO: 8925 - protein, 566 aa, synthetic construct; identical to SEQ ID NO: 7197
  REGION 1..566: note = hemagglutinin__InfluenzaA__AFJ78711

SEQ ID NO: 8926 - protein, 566 aa, synthetic construct; identical to SEQ ID NO: 2669
  REGION 1..566: note = hemagglutinin__InfluenzaA__AFJ78721

SEQ ID NO: 8927 - protein, 566 aa, synthetic construct
  REGION 1..566: note = hemagglutinin__InfluenzaA__AFJ78731
MKAILVVLLYTFATANADTLCIGYHANNSTDTVDTVLEKNVTVTHSVNLLEDKHNGKLCKLRGVAPLHLGKCNIAGWILGNPECESLSTASSWSYIVETSSSDNGTCYPGDFIDYEELREQLSSVSSFERFEIFPKTSSWPNHDSNKGVTAACPHAGAKSFYKNLIWLVKKGNSYPKLSKSYINDKGKEVLVLWGIHHPSTSADQQSLYQNADAYVFVGTSRYSKKFKPEIAIRPKVRDQEGRMNYYWTLVEPGDKITFEATGNLVVPRYAFAMERNAGSGIIISDTPVHDCNTTCQTPKGSINTSLPFQNIHPITIGKCPKYVKSTKLRLATGLRNVPSIQSRGLFGAIAGFIEGGWTGMVDGWYGYHHQNEQGSGYAADLKSTQNAIDEITNKVNSVIEKMNTQFTAVGKEFNHLEKRIENLNKKVDDGFLDIWTYNAELLVLLENERTLDYHDSNVKNLYEKVRSQLKNNAKEIGNGCFEFYHKCDNTCMESVKNGTYDYPKYSEEAKLNREEIDGVKLESTRIYQILAIYSTVASSLVLVVSLGAISFWMCSNGSLQCRICI

SEQ ID NO: 8928 - protein, 566 aa, synthetic construct; identical to SEQ ID NO: 3833
  REGION 1..566: note = hemagglutinin__InfluenzaA__AFJ78741

SEQ ID NO: 8929 - protein, 566 aa, synthetic construct; identical to SEQ ID NO: 2669
  REGION 1..566: note = hemagglutinin__InfluenzaA__AFJ78751

SEQ ID NO: 8930 - protein, 566 aa, synthetic construct; identical to SEQ ID NO: 2669
  REGION 1..566: note = hemagglutinin__InfluenzaA__AFJ78761

SEQ ID NO: 8931 - protein, 566 aa, synthetic construct; identical to SEQ ID NO: 2669
  REGION 1..566: note = hemagglutinin__InfluenzaA__AFJ78771

SEQ ID NO: 8932 - protein, 566 aa, synthetic construct; identical to SEQ ID NO: 2669
  REGION 1..566: note = hemagglutinin__InfluenzaA__AFJ78781

SEQ ID NO: 8933 - protein, 566 aa, synthetic construct; identical to SEQ ID NO: 2669
  REGION 1..566: note = hemagglutinin__InfluenzaA__AFJ78791

SEQ ID NO: 8934 - protein, 566 aa, synthetic construct; identical to SEQ ID NO: 2669
  REGION 1..566: note = hemagglutinin__InfluenzaA__AFJ78801

SEQ ID NO: 8935 - protein, 566 aa, synthetic construct; identical to SEQ ID NO: 3530
  REGION 1..566: note = hemagglutinin__InfluenzaA__AFJ78811

SEQ ID NO: 8936 - protein, 566 aa, synthetic construct; identical to SEQ ID NO: 2669
  REGION 1..566: note = hemagglutinin__InfluenzaA__AFJ78821

SEQ ID NO: 8937 - protein, 566 aa, synthetic construct; identical to SEQ ID NO: 2669
  REGION 1..566: note = hemagglutinin__InfluenzaA__AFJ78831

SEQ ID NO: 8938 - protein, 566 aa, synthetic construct; identical to SEQ ID NO: 3867
  REGION 1..566: note = hemagglutinin__InfluenzaA__AFJ78841

SEQ ID NO: 8939 - protein, 566 aa, synthetic construct; identical to SEQ ID NO: 2669
  REGION 1..566: note = hemagglutinin__InfluenzaA__AFJ78851

SEQ ID NO: 8940 - protein, 566 aa, synthetic construct
  REGION 1..566: note = hemagglutinin__InfluenzaA__AFJ78861
MKAILVVLLYTFATANADTLCIGYHANNSTDTVDTVLEKNVTVTHSVNLLEDKHNGKLCRLRGVAPLHLGKCNIAGWILGNPECESLSTASSWSYIVETSSSDNGTCYPGDFIDYEELREQLSSVSSFERFEIFPKTSSWPNHDSNKGVTAACPHAGAKSFYKNLIWLVKKGNSYPKLSKSYINDKGKEVLVLWGIHHPSTSADQQSLYQNADAYVFVGTSRYSKKFKPEIAIRPKVRDQEGRMNYYWTLVEPGDKITFEATGNLVVPRYAFAMERNAGSGIIISDTPVHDCNTTCQTPKGAINTSLPFQNIHPITIGKCPKYVKSTKLRLATGLRNVPSIQSRGLFGAIAGFIEGGWTGMVDGWYGYHHQNEQGSGYAADLKSTQNAIDEITNKVNSVIEKMNTQFTAVGKEFNHLEKRIENLNKKVDDGFLDIWTYNAELLVLLENERTLDYHDSNVKNLYEKVRSQLKNNAKEIGNGCFEFYHKCDNTCMESVKNGTYDYPKYSEEAKLNREEIDGVKLESTRIYQILAIYSTVASSLVLVVSLGAISFWMCSNGSLQCRICI

SEQ ID NO: 8941 - protein, 566 aa, synthetic construct
  REGION 1..566: note = hemagglutinin__InfluenzaA__AFJ78881
MKAILVVLLYTFATANADTLCIGYHANNSTDTVDTVLEKNVTVTHSVNLLEDKHNGKLCKLRGVAPLHLGKCNIAGWILGNPECESLSTSSSWSYIVETSSSDNGTCYPGDFIDYEELREQLSSVSSFERFEIFPKTSSWPNHDSNKGVTAACPHAGAKSFYKNLIWLVKKGNSYPKLSKSYINDKGKEVLVLWGIHHPSTSADQQSLYQNADAYVFVGTSRYSKKFKPEIAIRPKVRDQEGRMNYYWTLVEPGDKITFEATGNLVVPRYAFAMERNAGSGIIISDTPVHDCNTTCQTPKGAINTSLPFQNIHPITIGKCPKYVKSTKLRLATGLRNVPSIQSRGLFGAIAGFIEGGWTGMVDGWYGYHHQNEQGSGYAADLKSTQNAIDEITNKVNSVIEKMNTQFTAVGKEFNHLEKRIENLNKKVDDGFLDIWTYNAELLVLLENERTLDYHDSNVKNLYEKVRSQLKNNAKEIGNGCFEFYHKCDNTCMESVKNGTYDYPKYSEEAKLNREEINGVKLESTRIYQILAIYSTAASSLVLVVSLGAISFWMCSNGSLQCRICI

SEQ ID NO: 8942 - protein, 566 aa, synthetic construct; identical to SEQ ID NO: 2669
  REGION 1..566: note = hemagglutinin__InfluenzaA__AFJ78891

SEQ ID NO: 8943 - protein, 566 aa, synthetic construct; identical to SEQ ID NO: 2669
  REGION 1..566: note = hemagglutinin__InfluenzaA__AFJ78901

SEQ ID NO: 8944 - protein, 566 aa, synthetic construct; identical to SEQ ID NO: 2669
  REGION 1..566: note = hemagglutinin__InfluenzaA__AFJ78911

SEQ ID NO: 8945 - protein, 566 aa, synthetic construct; identical to SEQ ID NO: 2669
  REGION 1..566: note = hemagglutinin__InfluenzaA__AFJ78921

SEQ ID NO: 8946 - protein, 566 aa, synthetic construct
  REGION 1..566: note = hemagglutinin__InfluenzaA__AFJ97567
MKAILVVLLYTFATANADTLCIGYHANNSTDTVDTVLEKNVTVTHSVDLLEDKHNGKLCKLRGVAPLHLGKCNIAGWILGNPECESLSTASSWSYIVETSSSDNGTCYPGDFIDYEELREQLSSVSSFERFEIFPKTSSWPNHDSNKGVTAACPHAGAKSFYKNLIWLVKKGNSYPKLNKSYINDKGKEVLVLWGIHHPSTSTDQQSLYQNADAYVFVGTSRYSKKFKPEIAIRPKVRDQEGRMNYYWTLVEPGDKITFEATGNLVVPRYAFTMERNAGSGIIISDTPVHDCNTTCQTPKGAINTSFPFQNIHPITIGKCPKYVKSTKLRLATGLRNVPSIQSRGLFGAIAGFIEGGWTGMVDGWYGYHHQNEQGSGYAADLKSTQNAIDEITNKVNSVIEKMNTQFTAVGKEFNHLEKRIENLNKKVDDGFLDIWTYNAELLVLLENERTLDYHDSNVKNLYEKVRSQLKNNAKEIGNGCFEFYHKCDNTCMESVKNGTYDYPKYSEEAKLNREEIDGVKLESTRIYQILAIYSTVASSLVLVVSLGAISFWMCSNGSLQCRICI

SEQ ID NO: 8947 - protein, 566 aa, synthetic construct; identical to SEQ ID NO: 2669
  REGION 1..566: note = hemagglutinin__InfluenzaA__AFK14115

SEQ ID NO: 8948 - protein, 566 aa, synthetic construct; identical to SEQ ID NO: 2669
  REGION 1..566: note = hemagglutinin__InfluenzaA__AFK14131

SEQ ID NO: 8949 - protein, 566 aa, synthetic construct; identical to SEQ ID NO: 4351
  REGION 1..566: note = hemagglutinin__InfluenzaA__AFK14139

SEQ ID NO: 8950 - protein, 566 aa, synthetic construct
  REGION 1..566: note = hemagglutinin__InfluenzaA__AFK14148
MKAILVVLLYTFATANADTLCIGYHANNSTDTVDTVLEKNVTVTHSVNLLEDKHNGKLCKLRGVAPLHLGKCNIAGWILGNPECESLSTASSWSYIVETSSSDNGTCYPGDFIDYEELREQLSSVSSFERFEIFPKTSSWPNHDSNKGVTAACPHAGAKSFYKNLIWLVKKGNSYPKLSKSYINDKGKEVLVLWGIHHPSTSADQQSLYQNADAYVFVGTSRYSKKFKPEIAIRPKVRDQEGRMNYYWTLVEPGDKITFEATGNLVVPRYAFAMERNAGSGIIISDTPVHDCNTTCQTPKGAINTSLPFQNIHPITIGKCPKYVKSTKLRLATGLRNVPSIQSRGLFGAIAGFIEGGWTGMVDGWYGYHHQNEQGSGYAADLKSTQNAIDKITNKVNSVIEKMNTQFTAVGKEFNHLEKRIENLNKKVDDGFLDIWTYNAELLVLLENERTLDYHDSNVKNLYEKVRNQLKNNAKEIGNGCFEFYHKCDNTCMESVKNGTYDYPKYSEEAKLNREEIDGVKLESTRIYQILAIYSTVASSLVLVVSLGAISFWMCSNGSLQCRICI

SEQ ID NO: 8951 - protein, 566 aa, synthetic construct; identical to SEQ ID NO: 4296
  REGION 1..566: note = hemagglutinin__InfluenzaA__AFK14157

SEQ ID NO: 8952 - protein, 566 aa, synthetic construct; identical to SEQ ID NO: 2669
  REGION 1..566: note = hemagglutinin__InfluenzaA__AFK14166

SEQ ID NO: 8953 - protein, 566 aa, synthetic construct; identical to SEQ ID NO: 3997
  REGION 1..566: note = hemagglutinin__InfluenzaA__AFK14175

SEQ ID NO: 8954 - protein, 566 aa, synthetic construct; identical to SEQ ID NO: 5574
  REGION 1..566: note = hemagglutinin__InfluenzaA__AFK14184

SEQ ID NO: 8955 - protein, 566 aa, synthetic construct; identical to SEQ ID NO: 3022
  REGION 1..566: note = hemagglutinin__InfluenzaA__AFK14193

SEQ ID NO: 8956 - protein, 566 aa, synthetic construct; identical to SEQ ID NO: 4266
  REGION 1..566: note = hemagglutinin__InfluenzaA__AFK14202

SEQ ID NO: 8957 - protein, 566 aa, synthetic construct; identical to SEQ ID NO: 3022
  REGION 1..566: note = hemagglutinin__InfluenzaA__AFK14211

SEQ ID NO: 8958 - protein, 566 aa, synthetic construct
  REGION 1..566: note = hemagglutinin__InfluenzaA__AFK14220
MKAILVVLLYTFATANADTLCIGYHANNSTDTVDTVLEKNVTVTHSVNLLEDKHNGKLCKLRGVAPLHLGKCNIAGWILGNPECESLSTASSWSYIVETSSSDNGTCYPGDFIDYEELREQLSSASSFERYEIFPKTSSWPNHDSNKGVTAACPHAGAKSFYKNLIWLVKKGNSYPKLSKSYINDKGKEVLVLWGIHHPSTSADQQSLYQNADAYVFVGTSRYSKKFKPEIAIRPKVRDQEGRMNYYWTLVEPGDKITFEATGNLVVPRYAFAMERNAGSGIIISDTPVHDCNTTCQTPKGAINTSLPFQNIHPITIGKCPKYVKSTKLRLATGLRNVPSIQSRGLFGAIAGFIEGGWTGMVDGWYGYHHQNEQGSGYAADLKSTQNAIDKITNKVNSVIEKMNTQFTAVGKEFNHLEKRIENLNKKVDDGFLDIWTYNAELLVLLENERTLDYHDSNVKNLYEKVRNQLKNNAKEIGNGCFEFYHKCDNTCMESVKNGTYDYPKYSEEAKLNREEIDGVKLESTRIYQILAIYSTVASSLVLVVSLGAISFWMCSNGSLQCRICI

SEQ ID NO: 8959 - protein, 566 aa, synthetic construct; identical to SEQ ID NO: 4296
  REGION 1..566: note = hemagglutinin__InfluenzaA__AFK14229

SEQ ID NO: 8960 - protein, 566 aa, synthetic construct; identical to SEQ ID NO: 7434
  REGION 1..566: note = hemagglutinin__InfluenzaA__AFK14238

SEQ ID NO: 8961 - protein, 566 aa, synthetic construct
  REGION 1..566: note = hemagglutinin__InfluenzaA__AFK14247
MKAILVVLLYTFATANADTLCIGYHANNSTDTVDTVLEKNVTVTHSVNLLEDKHNGKLCKLRGVAPLHLGKCNIAGWILGNPECESLSTASSWSYIVETSSSDNGTCYPGDFIDYEELREQLSSVSSFERFEIFPKTSSWPNHDSNKGVTAACPHAGAKSFYKNLIWLVKKGNSYPKLSKSYINDKGKEVLVLWGIHHPSTSADQQSLYQNADAYVFVGTSRYSKKFKPEIAIRPKVRDQEGRMNYYWTLVEPGDKITFEATGNLVVPRYAFAMERNAGSGIIISDTPVHDCNTTCQTPKGAMNTSLPFQNIHPITIGKCPKYVKSTKLRMATGLRNVPSIQSRGLFGAIAGFIEGGWTGMVDGWYGYHHQNEQGSGYAADLKSTQNAIDEITNKVNSVIEKMNTQFTAVGKEFNHLEKRIENLNKKVDDGFLDIWTYNAELLVLLENERTLDYHDSNVKNLYEKVRSQLKNNAKEIGNGCFEFYHKCDNTCMESVKNGTYDYPKYSEEAKLNREEIDGVKLESTRIYQILAIYSTVASSLVLVVSLGAISFWMCSNGSLQCRICI

SEQ ID NO: 8962 - protein, 566 aa, synthetic construct
  REGION 1..566: note = hemagglutinin__InfluenzaA__AFK14272
MKAILIVLLYTFATANADTLCIGYHANNSTDTVDTVLEKNVTVTHSVNLLEDKHNGKLCKLTGVAPLHLGKCDIAGWILGNPECESLSTASSWSYIVETSSSDNGTCYPGDFIDYEELREQLSSVSSFERFEIFPKTSSWPNHDSNKGVTAACPHAGAKSFYKNLIWLVKKGNSYPKLSKSYINDKGKEVLVLWGIHHPSTSADQQSLYQNADAYVFVGTSRYSKKFKPEIAIRPKVRDQEGRMNYYWTLVEPGDKITFEATGNLVVPRYAFAMERNAGSGIIISDTPVHDCNTTCQTPKGAINTSLPFQNIHPITIGKCPKYVKSTKLRLATGLRNVPSIQSRGLFGAIAGFIEGGWTGMVDGWYGYHHQNEQGSGYAADLKSTQHAIDEITNKVNSVIEKMNTQFTAVGKEFNHLEKRIENLNKKVDDGFLDIWTYNAELLVLLENERTLDYHDSNVKNLYEKVRSQLKNNAKEIGNGCFEFYHKCDNTCMESVKNGTYDYPKYSEEAKLNREEIDGVKLESTRIYQILAIYSTVASSLVLVVSLGAISFWMCSNGSLQCRICI

SEQ ID NO: 8963 - protein, 566 aa, synthetic construct; identical to SEQ ID NO: 3022
  REGION 1..566: note = hemagglutinin__InfluenzaA__AFK14314

SEQ ID NO: 8964 - protein, 566 aa, synthetic construct
  REGION 1..566: note = hemagglutinin__InfluenzaA__AFK14323
MKAILVVLLYTFATANADTLCIGYHANNSTDTVDTVLEKNVTVTHSVNLLEDKHNGKLCKLRGVAPLHLGKCNIAGWILGNPECESLSTASSWSYIVETSNSDNGTCYPGDFINYEELREQLSSVSSFERFEIFPKTSSWPNHDSNKGVTAACPHAGAKSFYKNLIWLVKKGNSYPKLSKSYINDKGKEVLVLWGIHHPSTSADQQSLYQNADAYVFVGTSRYSKKFKPEIAIRPKVRDQEGRMNYYWTLVEPGDKITFEATGNLVVPRYAFAMERNAGSGIIISDTPVHDCNTTCQTPKGAINTSLPFQNIHPITIGKCPKYVKSTKLRLATGLRNVPSIQSRGLFGAIAGFIEGGWTGMVDGWYGYHHQNEQGSGYAADLKSTQNAIDKITNKVNSVIEKMNTQFTAVGKEFNHLEKRIENLNKKVDDGFLDIWTYNAELLVLLENERTLDYHDSNVKNLYEKVRSQLKNNAKEIGNGCFEFYHKCDNTCMESVKNGTYDYPKYSEEAKLNREEIDGVKLESTRIYQILAIYSTVASSLVLVVSLGAISFWMCSNGSLQCRICI

SEQ ID NO: 8965 - protein, 566 aa, synthetic construct; identical to SEQ ID NO: 7434
  REGION 1..566: note = hemagglutinin__InfluenzaA__AFK14332

SEQ ID NO: 8966 - protein, 566 aa, synthetic construct
  REGION 1..566: note = hemagglutinin__InfluenzaA__AFK14341
MKAILVVLLYTFATANADTLCIGYHANNSTDTVDTVLEKNVTVTHSVNLLEDKHNGKLCKLRGVAPLHLGKCNIAGWILGNPECESLSTASSWSYIVETSSSDNGTCYPGDFIDYEELREQLSSVSSFERFEIFPKTSSWPNHDSNKGVTAACPHAGAKSFYKNLIWLVKKGNSYPKLSKSYINDKGKEVLVLWGIHHPSTSADQQSLYQNADAYVFVGTSRYSKKFKPEIAIRPKVREQEGRMNYYWTLVEPGDKITFEATGNLVVPRYAFAMERNAGSGIIISDTPVHDCNTTCQTPKGAINTSLPFQNIHPITIGKCPKYVKSTKLRLATGLRNVPSIQSRGLFGAIAGFIEGGWTGMVDGWYGYHHQNEQGSGYAADLKSTQNAIDEITNKVNSVIEKMNTQFTAVGKEFNHLEKRIENLNKKVDDGFLDIWTYNAELLVLLENEKTLDYHDSNVKNLYEKVRSQLKNNAKEIGNGCFEFYHKCDNTCMESVKNGTYDYPKYSEEAKLNREEIDGVKLESTRIYQILAIYSTVASSLVLVVSLGAISFWMCSNGSLQCRICI

SEQ ID NO: 8967 - protein, 566 aa, synthetic construct; identical to SEQ ID NO: 4089
  REGION 1..566: note = hemagglutinin__InfluenzaA__AFK14350

SEQ ID NO: 8968 - protein, 566 aa, synthetic construct
  REGION 1..566: note = hemagglutinin__InfluenzaA__AFK14358
MKAILVVLLYTFATANADTLCIGYHANNSTDTVDTVLEKNVTVTHSVNLLEDKHNGKLCKLRGVAPLHLGKCNIAGWILGNPECESLSTASSWSYIVETSSSDNGACYPGDFIDYEELREQLSSVSSFERFEIFPKTSSWPNHDSNKGVTAACPHAGAKSFYKNLIWLVKKGNSYPKLSKSYINDKGKEVLVLWGIHHPSTSADQQSLYQNADAYVFVGTSRYSKKFKPEIAIRPKVREQEGRMNYYWTLVEPGDKITFEATGNLVVPRYAFAMERNAGSGIIISDTPVHDCNTTCQTPKGAINTSLPFQNIHPITIGKCPKYVKSTKLRLATGLRNVPSIQSRGLFGAIAGFIEGGWTGMVDGWYGYHHQNEQGSGYAADLKSTQNAIDEITNKVNSVIEKMNTQFTAVGKEFNHLEKRIENLNKKVDDGFLDIWTYNAELLVLLENEKTLDYHDSNVKNLYEKVRSQLKNNAKEIGNGCFEFYHKCDNTCMESVKNGTYDYPKYSEEAKLNREEIDGVKLESTRIYQILAIYSTVASSLVLVVSLGAISFWMCSNGSLQCRICI

SEQ ID NO: 8969 - protein, 566 aa, synthetic construct
  REGION 1..566: note = hemagglutinin__InfluenzaA__AFK14395
MKAILVVLLYTFATANADTLCIGYHANNSTDTVDTVLEKNVTVTHSVNILEDKHNGKLCKLRGVAPLHLGKCNIAGWILGNPECESLSTASSWSYIVETSSSENGMCCPRDFIDYEELREQLSSVSSFERFEIFPKTSSWPNHDSNKGVTAACPHAGAKSFYKNLIWLVKKGNSYPKLSKSYINDKGKEVLVLWGIHHPSTSADQQSLYQNADAYVFVGSSRYSKKFKPEIAIRPKVRDQEGRMNYYWTLVEPGDKITFEATGNLVVPRYAFAMERNAGSGIIISDTPVHDCNTTCQTPKGAINTSLPFQNIHPITIGKCPKYVKSTKLRLATGLRNVPSIQSRGLFGAIAGFIEGGWTGMVDGWYGYHHQNEQGSGYAADLKSTQNAIDEITNKVNSVIEKMNTQFTAVGKEFNHLEKRIENLNKKVDDGFLDIWTYNAELLVLLENERTLDYHDSNVKNLYEKVRSQLKNNAKEVGNGCFEFYHKCDNTCMESVKNGTYDYPKYSEEAKLNREEIDGVKLESTRIYQILAIYSTAASSLVLVVSLGAISFWMCSNGSLQCRICI

SEQ ID NO: 8970 - protein, 566 aa, synthetic construct
  REGION 1..566: note = hemagglutinin__InfluenzaA__AFK14431
MKAILVVLLYTFATANADTLCIGYHANNSTDTVDTVLEKNVTVTHSVNLLEDKHNGKLCKLRGVAPLHLGKCNIAGWILGNPECESLSTASSWSYIVETSNSDNGTCYPGDFLDYEELRKQLSSVSSFERVEIFPKTSSWPNHDSNKGVTAACPHAGAKSFYKNLIWLVKKGNSYPKLSKSYINDKGKEVLVLWGIHHPSTSADQQSLYQNADAYVFVGTSRYSKKFKPEIAIRPKVRDQEGRMNYYWTLVEPGDKITFEATGNLVVPRYAFAMERNAGSGIIISDTPVHDCNTTCQTPKGAINTSLPFQNIHPITIGKCPKYVKSTKLRLATGLRNVPSIQSRGLFGAIAGFIEGGWTGMVDGWYGYHHQNEQGSGYAADLKSTQNAIDKITNKVNSVIEKMNTQFTAVGKEFNHLEKRIENLNKKVDDGFLDIWTYNAELLVLLENERTLDYHDSNVKNLYEKVRSQLKNNAKEIGNGCFEFYHKCDNTCMESVKNGTYDYPKYSEEAKLNREEIDGVKLESTRIYQILAIYSTVASSLVLVVSLGAISFWMCSNGSLQCRICI

SEQ ID NO: 8971 - protein, 566 aa, synthetic construct; identical to SEQ ID NO: 2669
  REGION 1..566: note = hemagglutinin__InfluenzaA__AFK14456

SEQ ID NO: 8972 - protein, 566 aa, synthetic construct; identical to SEQ ID NO: 2669
  REGION 1..566: note = hemagglutinin__InfluenzaA__AFK14465

SEQ ID NO: 8973 - protein, 566 aa, synthetic construct
  REGION 1..566: note = hemagglutinin__InfluenzaA__AFK14536
MKAILVVLLYTFATANADTLCIGYHANNSTDTVDTVLEKNVTVTHSVNLLEDKHNGKLCKLRGVAPLHLGKCNIAGWILGNPECESLSTASSWSYIVETYSSDNGTCYPGDFIDYEELREQLSSVSSFERFEIFPKTSSWPNHDSNKGVTAACPHAGAKSFYKNLIWLVKKGNSYPKLSKSYINDKGKEVLVLWGIHHPSTSADQQSLYQNADAYVFVGTSRYSKKFKPEIAIRPKVRDQEGRMNYYWTLVEPGDKITFEATGNLVVPRYAFAMERNAGSGIIISDTPVHDCNTTCQTPKGAINTSLPFQNIHPITIGKCPKYVKSTKLRLATGLRNVPSIQSRGLFGAIAGFIEGGWTGMVDGWYGYHHQNEQGSGYAADLKSTQHAIDEITNKVNSVIEKMNTQFTAVGKEFNHLEKRIENLNKKVDDGFLDIWTYNAELLVLLENERTLDYHDSNVKNLYEKVRSQLKNNAKEIGNGCFEFYHKCDNTCMESVKNGTYDYPKYSEEAKLNREEIDGVKLESTRIYQILAIYSTVASSLVLVVSLGAISFWMCSNGSLQCRICI

SEQ ID NO: 8974 - protein, 566 aa, synthetic construct; identical to SEQ ID NO: 2669
  REGION 1..566: note = hemagglutinin__InfluenzaA__AFK14571

SEQ ID NO: 8975 - protein, 566 aa, synthetic construct; identical to SEQ ID NO: 7178
  REGION 1..566: note = hemagglutinin__InfluenzaA__AFK14586

SEQ ID NO: 8976 - protein, 566 aa, synthetic construct
  REGION 1..566: note = hemagglutinin__InfluenzaA__AFK14595
MKAILVVLLYTFATANADTLCIGYHANNSTDTVDTVLEKNVTVTHSVNLLEDKHNGKLCKLKGVAPLHLGKCNIAGWILGNPKCESLSTASSWSYIGETSSSNNGTCYPGNFIDFEELKKQLSSVSSFERFEIFPKTSSWPNHDSNKGVTAACPHAGAKSFYKNLIWLVKKGNSYPKLSKSYINDKGKEVLVLWGIHHPSTSADQQSLYQNADAYVFVGTSRYSKKFKPEIAIRPKVRDQEGRMNYYWTLVEPGDKITFEATGNLVVPRYAFAMERNAGSGIIISDTPVHDCNTTCQTPKGAINTSLPFQNIHPITIGKCPKYVKSTKLRLATGLRNVPSIQSRGLFGAIAGFIEGGWTGMVDGWYGYHHQNEQGSGYAADLKSTQNAIDEITNKVNSVIEKMNTQFTAVGKEFNHLEKRIENLNKKVDDGFLDIWTYNAELLVLLENERTLDYHDSNVKNLYEKVRSQLKNNAKEIGNGCFEFYHKCDNTCMESVKNGTYDYPKYSEEAKLNREEIDGVKLESTRIYQILAIYSTVASSLVLVVSLGAISFWMCSNGSLQCRICI

SEQ ID NO: 8977 - protein, 566 aa, synthetic construct; identical to SEQ ID NO: 7178
  REGION 1..566: note = hemagglutinin__InfluenzaA__AFK14612

SEQ ID NO: 8978 - protein, 566 aa, synthetic construct; identical to SEQ ID NO: 2669
  REGION 1..566: note = hemagglutinin__InfluenzaA__AFK14621

SEQ ID NO: 8979 - protein, 566 aa, synthetic construct
  REGION 1..566: note = hemagglutinin__InfluenzaA__AFK14630
MKAILVVLLYTFATANADTLCIGYHANNSTDTVDTVLEKNVTVTHSVNLLEDKHNGKLCKLRGVAPLHLGKCNIAGWILGNPECESLSTASSWSYIVETSSSDNGTCYPGDFIDYEELREQLSSVSSFERFEIFPKTSSWPNHDSNKGVTAACPHAGAKSFYKNLIWLVKKGNSYPKLSKSYINDKGKEVLVLWGIHHPSTRADLQSINQNADAYVFVGTSRYSKKFKPEIAIRPKVRDQEGRMNYYWTLVEPGDKITFEATGNLVVPRYAFAMERNAGSGIIISDTPVHDCNTTCQTPKGAINTSLPFQNIHPITIGKCPKYVKSTKLRLATGLRNVPSIQSRGLFGAIAGFIEGGWTGMVDGWYGYHHQNEQGSGYAADLKSTQNAIDEITNKVNSVIEKMNTQFTAVGKEFNHLEKRIENLNKKVDDGFLDIWTYNAELLVLLENERTLDYHDSNVKNLYEKVRSQLKNNAKEIGNGCFEFYHKCDNTCMESVKNGTYDYPKYSEEAKLNREEIDGVKLESTRIYQILAIYSTVASSLVLVVSLGAISFWMCSNGSLQCRICI

SEQ ID NO: 8980 - protein, 566 aa, synthetic construct
  REGION 1..566: note = hemagglutinin__InfluenzaA__AFK14639
MKAILVVLLYTFATANADTLCIGYHANNSTDTVDTVLEKNVTVTHSVNILEDKHNGKLCKLRGVAPLHLGKCNIAGWILGNPECESLSTASSWSYIVETSSSDNGTCYPGDFIDYEELREQLSSVSSFERFEIFPKTSSWPNHDSNKGVTAACPHAGAKSFYKNLIWLVKKGNSYPKLSKSYINDKGKEVLVLWGIHHPSTSADQQSLYQNADAYVFVGSSRYSKKFKPEIAIRPKVRDQEGRMNYYWTLVEPGDKITFEATGNLVVPRYAFAMERNAGSGIIISDTPVHDCNTTCQTPKGAINTSLPFQNIHPITIGKCPKYVKSTKLRLATGLRNVPSIQSRGLFGAIAGFIEGGWTGMVDGWYGYHHQNEQGSGYAADLKSTQNAIDEITNKVNSVIEKMNTQFTAVGKEFNHLEKRIENLNKKVDDGFLDIWTYNAELLVLLENERTLDYHDSNVKNLYEKVRGQLKNNAKEIGNGCFEFYHKCDNTCMESVKNGTYDYPKYSEEAKLNREEIDGVKLESTRIYQILAIYSTVASSLVLVVSLGAISFWMCSNGSLQCRICI

SEQ ID NO: 8981 - protein, 566 aa, synthetic construct; identical to SEQ ID NO: 2669
  REGION 1..566: note = hemagglutinin__InfluenzaA__AFK14661

SEQ ID NO: 8982 - protein, 566 aa, synthetic construct; identical to SEQ ID NO: 7178
  REGION 1..566: note = hemagglutinin__InfluenzaA__AFK14670

SEQ ID NO: 8983 - protein, 566 aa, synthetic construct; identical to SEQ ID NO: 7178
  REGION 1..566: note = hemagglutinin__InfluenzaA__AFK14678

SEQ ID NO: 8984 - protein, 566 aa, synthetic construct
  REGION 1..566: note = hemagglutinin__InfluenzaA__AFK14688
MKAILVVLLYTFATANADTLCIGYHANNSTDTVDTVLEKNVTVTHSVNLLEDKHNGKLCKLRGVAPLHLGKCNIAGWILGNPECESLSTASSWSYIVETSSSDNGTCYPGDFIHDEELRKQLSSVSSFERFEIFPKTSSWPNHDSNKGVTAACPHAGAKSFYKNLIWLVKKGNSYPKLSKSYINDKGKEVLVLWGIHHPSTSADQQSLYQNADAYVFVGTSRYSKKFKPEIAIRPKVRDQEGRMNYYWTLVEPGDKITFEATGNLVVPRYAFAMERKAGSGIIILDTPVHDWNTTCETPKGAVNTSLPFQNIHPITIGKCPKYVKSTKLRLATGLRNVPSIQSRGLFGAIAGFIEGGWTGMVDGWYGYHHQNEQGSGYAADLKSTQNAIDEITNKVNSVIEKMNTQFTAVGKEFNHLEKRIENLNKKVDDGFLDIWTYNAELLVLLENERTLDYHDSNVKNLYEKVRSQLKNNAKEIGNGCFEFYHKCDNTCMESVKNGTYDYPKYSEEAKLNREEIDGVKLESTRIYQILAIYSTVASSLVLVVSLGAISFWMCSNGSLQCRICI

SEQ ID NO: 8985 - protein, 566 aa, synthetic construct; identical to SEQ ID NO: 7178
  REGION 1..566: note = hemagglutinin__InfluenzaA__AFK14697

SEQ ID NO: 8986 - protein, 566 aa, synthetic construct; identical to SEQ ID NO: 7178
  REGION 1..566: note = hemagglutinin__InfluenzaA__AFK14713

SEQ ID NO: 8987 - protein, 566 aa, synthetic construct; identical to SEQ ID NO: 7178
  REGION 1..566: note = hemagglutinin__InfluenzaA__AFK14722

SEQ ID NO: 8988 - protein, 566 aa, synthetic construct
  REGION 1..566: note = hemagglutinin__InfluenzaA__AFK14731
MKAILVVLLYTFATANADTLCIGYHANNSTDTVDTVLEKNVTVTHSVNLLEDKHNGKLCKLRGVAPLHLGKCNIAGWILGNPECESLSTASSWSYIVETSSSDNGTCYPGDFIDYEELRKQLSSVSSFERVEIFPKTSSWPNHDSNKGVTAACPHAGAKSFYKNLIWLVKKGNSYPKLSKSYINDKGKEVLVLWGIHHPSTSADQQSLYQNADAYVFVGTSRYSKKFKPEIAIRPKVRDQEGRMNYYWTLVEPGDKITFEATGNLVVPRYAFAMERNAGSGIIISDTPVHDCNTTCQTPKGAVNTSLPFQNIHPITIGKCPKYVKSTKLRLATGLRNVPSIQSRGLFGAIAGFIEGGWTGMVDGWYGYHHQNEQGSGYAADLKSTQNAIDEITNKVNSVIEKMNTQFTAVGKEFNHLEKRIENLNKKVDDGFLDIWTYNAELLVLLENERTLDYHDSNVKNLYEKVRSQLKNNAKEIGNGCFEFYHKCDNTCMESVKNGTYDYPKYSEEAKLNREEIDGVKLESTRIYQILAIYSTVASSLVLVVSLGAISFWMCSNGSLQCRICI

SEQ ID NO: 8989 - protein, 566 aa, synthetic construct; identical to SEQ ID NO: 7178
  REGION 1..566: note = hemagglutinin__InfluenzaA__AFK14740

SEQ ID NO: 8990 - protein, 566 aa, synthetic construct; identical to SEQ ID NO: 7178
  REGION 1..566: note = hemagglutinin__InfluenzaA__AFK14749

SEQ ID NO: 8991 - protein, 566 aa, synthetic construct; identical to SEQ ID NO: 7178
  REGION 1..566: note = hemagglutinin__InfluenzaA__AFK14756

SEQ ID NO: 8992 - protein, 566 aa, synthetic construct; identical to SEQ ID NO: 7178
  REGION 1..566: note = hemagglutinin__InfluenzaA__AFK14764

SEQ ID NO: 8993 - protein, 566 aa, synthetic construct
  REGION 1..566: note = hemagglutinin__InfluenzaA__AFK14779
MKAILVVLLYTFATANADTLCIGYHANNSTDTVDTVLEKNVTVTHSVNLLEDKHNGKLCKLGGVAPLHLGKCNIAGWILGNPECESLSTASSWSYIVETSSSDNGTCYPGNFIDYEELREQLSSVSSFERFEIFPKTSSWPNHDSNKGVTAACPHAGAKSFYKNLIWLVKKGNSYPKLSKSYINDKGKEVLVLWGIHHPSTSADQQSLYQNADAYVFVGTSRYSKKFKPEIAIRPKVRDQEGRMNYYWTLVEPGDKITFEATGNLVVPRYAFAMERNAGSGIIISDTPVHDCNTTCQTPKGAINTSLPFQNIHPITIGKCPKYVKSTKLRLATGLRNVPSIQSRGLFGAIAGFIEGGWTGMVDGWYGYHHQNEQGSGYAADLKSTQNAIDEITNKVNSVIEKMNTQFTAVGKEFNHLEKRIENLNKKVDDGFLDIWTYNAELLVLLENERTLDYHDSNVKNLYEKVRSQLKNNAKEIGNGCFEFYHKCDNTCMESVKNGTYDYPKYSEEAKLNREEIDGVKLESTRIYQILAIYSTVASSLVLVVSLGAISFWMCSNGSLQCRICI

SEQ ID NO: 8994 - protein, 566 aa, synthetic construct
  REGION 1..566: note = hemagglutinin__InfluenzaA__AFK14788
MKAILVVLLYTFATANADTLCIGYHANNSTDTVDTVLEKNVTVTHSVNILEDKHNGKLCKLRGVAPLHLGKCNIAGWILGNPECESLSTASSWSYIVETSSSDNGTCYPGDFIDYEELREQLSSVSSFERFEIFPKTSSWPNHDSNKGVTAACPHAGAKSFYKNLIWLVKKGNSYPKLRKSYINDKGKEVLVLWGIHHPSTSADQQSLYQNADAYVFVGSSRYSKKFKPEIAIRPKVRDQEGRMNYYWTLVEPGDKITFEATGNLVVPRYAFAMERNAGSGIIISDTPVHDCNTTCQTPKGAINTSLPFQNIHPITIGKCPKYVKSTKLRLATGLRNVPSIQSRGLFGAIAGFIEGGWTGMVDGWYGYHHQNEQGSGYAADLKSTQNAIDEITNKVNSVIEKMNTQFTAVGKEFNHLEKRIENLNKKVDDGFLDIWTYNAELLVLLENERTLDYHDSNVKNLYEKVRSQLKNNAKEVGNGCFEFYHKCDNTCMESVKNGTYDYPKYSEEAKLNREEIDGVKLESTRIYQILAIYSTAASSLVLVVSLGAISFWMCSNGSLQCRICI

SEQ ID NO: 8995 - protein, 566 aa, synthetic construct
  REGION 1..566: note = hemagglutinin__InfluenzaA__AFK14798
MKAILVVLLYTFATANADTLCIGYHANNSTDTVDTVLEKNVTVTHSVNLLEDKHNGKLCKLRGVAPLHLGKCNIAGWILGNPECESLSTASSWSYIVETSSSDNGTCYPGDFINYEELRKQLSSVSSFERVEIFPKTSSWPNHDSNKGVTAACPHAGAKSFYKNLIWLVKKGNSYPKLSKSYINDKGKEVLVLWGIHHPSTSADQQSLYQNADAYVFVGTSRYSKKFKPEIAIRPKVRDQEGRMNYYWTLVEPGDKITFEATGNLVVPRYAFAMERNAGSGIIISDTPVHDCNTTCQTPNGAINTSLPFQNIHPITIGKCPKYVKSTKLRLATGLRNVPSIQSRGLFGAIAGFIEGGWTGMVDGWYGYHHQNEQGSGYAADLKSTQNAIDKITNKVNSVIEKMNTQFTAVGKEFNHLEKRIENLNKKVDDGFLDIWTYNAELLVLLENERTLDYHDSNVKNLYEKVRSQLKNNAKEIGNGCFEFYHKCDNTCMESVKNGTYDYPKYSEEAKLNREEIDGVKLESTRIYQILAIYSTVASSLVLVVSLGAISFWMCSNGSLQCRICI

SEQ ID NO: 8996 - protein, 566 aa, synthetic construct
  REGION 1..566: note = hemagglutinin__InfluenzaA__AFK14814
MKAILVVLLYTFATANADTLCIGYHANNSTDTVDTVLEKNVTVTHSVNLLEDKHNGKLCKLRGVAPLHLGKCNIAGWILGNPECESLSTASSWSYIVETSSSDNGTCYPGDFIDYEELREQLSSVSSYERYEIFPKTSSWPNHDSNKGVTAACPHAGAKSFYKNLIWLVKKGNSYPKLSKSYINDKGKEVLVLWGIHHPSTSADQQSLYQNADAYVFVGTSRYSKKFKPEIAIRPKVREQEGRMNYYWTLVEPGDKITFEATGNLVVPRYAFAMERNAGSGIIISDTPVHDCNTTCQTPKGAINTSLPFQNIHPITIGKCPKYVKSTKLRLATGLRNVPSIQSRGLFGAIAGFIEGGWTGMVDGWYGYHHQNEQGSGYAADLKSTQNAIDEITNKVNSVIEKMNTQFTAVGKEFNHLEKRIENLNKKVDDGFLDIWTYNAELLVLLENERTLDYHDSNVKNLYEKVRSQLKNNAKEIGNGCFEFYHKCDNTCMESVKNGTYDYPKYSEEAKLNREEIDGVKLESTRIYQILAIYSTVASSLVLVVSLGAISFWMCSNGSLQCRICI

SEQ ID NO: 8997 - protein, 566 aa, synthetic construct
  REGION 1..566: note = hemagglutinin__InfluenzaA__AFK14831
MKAILVVLLYTFATANADTLCIGYHANNSTDTVDTVLEKNVTVTHSVNLLEDKHNGKLCKLRGVAPLHLGKCNIAGWILGNPECESLSTASSWSYIVETSSSDNGTCYPGDFSDYEELREQLSSVSSFERFEIFPKTSSWPNHDSNKGVTAACPHAGAKSFYKNLIWLVKKGNSYPKLSKSYINDKGKEVLVLWGIHHPSTSADQQSLYQNADAYVFVGTSRYSKKFKPEIAIRPKVRDQEGRMNYYWTLVEPGDKITFEATGNLVVPRYAFAMERNAGSGIIISDTPVHDCNTTCQTPKGAINTSLPFQNIHPITIGKCPKYVKSTKLRLATGLRNVPSIQSRGLFGAIAGFIEGGWTGMVDGWYGYHHQNEQGSGYAADLKSTQNAIDEITNKVNSVIEKMNTQFTAVGKEFNHLEKRIENLNKKVDDGFLDIWTYNAELLVLLENERTLDYHDSNVKNLYEKVRSQLKNNAKEIGNGCFEFYHKCDNTCMESVKNGTYDYPKYSEEAKLNREEIDGVKLESTRIYQILAIYSTVASSLVLVVSLGAISFWMCSNGSLQCRICI

SEQ ID NO: 8998 - protein, 566 aa, synthetic construct; identical to SEQ ID NO: 2669
  REGION 1..566: note = hemagglutinin__InfluenzaA__AFK14839

SEQ ID NO: 8999 - protein, 566 aa, synthetic construct
  REGION 1..566: note = hemagglutinin__InfluenzaA__AFK14847
MKAILVVLLYTFATANADTLCIGYHANNSTDTVDTVLEKNVTVTHSVNLLEDKHNGKLCKLRGVAPLHLGKCNIAGWILGNPECESLSTASSWSYIVETSSSDNGTCYPGDFIDYEELREQLSSASSFERYEIFPKTSSWPNHDSNKGVTAACPHAGAKSFYKNLIWLVKKGNSYPKLSKSYINDKGKEVLVLWGIHHPSTSADQQSLYQNADAYVFVGTSRYSKKFKPEIAIRPKVRDQEGRMNYYWTLVEPGDKITFEATGNLVVPRYAFAMERNAGSGIIISDTPVHDCNTTCQTPKGAINTSLPFQNIHPITIGKCPKYVKSTKLRLATGLRNVPSIQSRGLFGAIAGFIEGGWTGMVDGWYGYHHQNEQGSGYAADLKSTQNAIDEITNKVNSVIEKMNTQFTAVGKEFNHLEKRIENLNKKVDDGFLDIWTYNAELLVLLENERTLDYHDSNVKNLYEKVRSQLKNNAKEIGNGCFEFYHKCDNTCMESVKNGTYDYPKYSEEAKLNREEIDGVKLESTRIYQILAIYSTVASSLVLVVSLGAISFWMCSNGSLQCRICI

SEQ ID NO: 9000 - protein, 566 aa, synthetic construct; identical to SEQ ID NO: 7178
  REGION 1..566: note = hemagglutinin__InfluenzaA__AFK14868

SEQ ID NO: 9001 - protein, 566 aa, synthetic construct; identical to SEQ ID NO: 3833
  REGION 1..566: note = hemagglutinin__InfluenzaA__AFK14884

SEQ ID NO: 9002 - protein, 566 aa, synthetic construct; identical to SEQ ID NO: 3833
  REGION 1..566: note = hemagglutinin__InfluenzaA__AFK14892

SEQ ID NO: 9003 - protein, 566 aa, synthetic construct; identical to SEQ ID NO: 3833
  REGION 1..566: note = hemagglutinin__InfluenzaA__AFK14901

SEQ ID NO: 9004 - protein, 566 aa, synthetic construct; identical to SEQ ID NO: 3833
  REGION 1..566: note = hemagglutinin__InfluenzaA__AFK14910

SEQ ID NO: 9005 - protein, 566 aa, synthetic construct; identical to SEQ ID NO: 2669
  REGION 1..566: note = hemagglutinin__InfluenzaA__AFK14919

SEQ ID NO: 9006 - protein, 566 aa, synthetic construct; identical to SEQ ID NO: 2669
  REGION 1..566: note = hemagglutinin__InfluenzaA__AFK14929

SEQ ID NO: 9007 - protein, 566 aa, synthetic construct; identical to SEQ ID NO: 8186
  REGION 1..566: note = hemagglutinin__InfluenzaA__AFK25599

SEQ ID NO: 9008 - protein, 566 aa, synthetic construct
  REGION 1..566: note = hemagglutinin__InfluenzaA__AFK25601
MKAILVVLLYTFATANADTLCIGYHANNSTDTVDTVLEKNVTVTHSVNLLEDKHNGKLCKLRGVAPLHLGKCNIAGWILGNPECVTLSTASSWSYIVETSSSDNGTCYPGDFIDYEELREQLSSVSSFERFEIFPKTSSWPNHDSNKGVTAACPHAGAKGFYKNLIWLVKKGNSYPKLSKSYINDKGKEVLVLWGIHHPSTTADQQSLYQNADTYVFVGTSRYSKKFKPEIAIRPKVRDQEGRMNYYWTLVEPGDKITFEATGNLVVPRYAFAMERDAGSGIIISDTPVHDCNTTCQTPKGAINTSLPFQNIHPITIGKCPKYVKSTKLRLATGLRNVPSIQSRGLFGAIAGFIEGGWTGMVDGWYGYHHQNEQGSGYAADLKSTQNAIDKITNKVNSVIEKMNTQFTAVGKEFNHLEKRIENLNKKVDDGFLDIWTYNAELLVLLENERTLDYHDSNVKNLYEKVRNQLKNNAKEIGNGCFEFYHKCDNTCMESVKNGTYDYPKYSEEAKLNREEIDGVKLESTRIYQILAIYSTAASSLVLVVSLGAISFWMCSNGSLQCRICI

SEQ ID NO: 9009 - protein, 566 aa, synthetic construct; identical to SEQ ID NO: 8186
  REGION 1..566: note = hemagglutinin__InfluenzaA__AFK25603

SEQ ID NO: 9010 - protein, 566 aa, synthetic construct
  REGION 1..566: note = hemagglutinin__InfluenzaA__AFK25605
MKAILVVLLYTFATANADTLCIGYHANNSTDTVDTVLEKNVTVTHSVNLLEDKHNGKLCKLRGVAPLHLGKCNIAGWILGNPECETLSTASSWSYIVETSSSDNGTCYPGDFIDYEELREQLSSVSSFERFEIFPKTSSWPNHDSNKGVTAACPHAGAKGFYKNLIWLVKKGNSYPKLSKSYINDKGKEVLVLWGIHHPSTTADQQSLYQNADTYVFVGTSRYSKKFKPEIAIRPKVRDQEGRMNYYWTLVEPGDKITFEATGNLVVPRYAFAMERDAGSGIIISDTPVHDCNTTCQTPKGAINTSLPFQNIHPITIGKCPKYVRSTKLRLATGLRNVPSIQSRGLFGAIAGFIEGGWTGMVDGWYGYHHQNEQGSGYAADLKSTQNAIDKITNKVNSVIEKMNTQFTAVGKEFNHLEKRIENLNKKVDDGFLDIWTYNAELLVLLENERTLDYHDSNVKNLYEKVRNQLKNNAKEIGNGCFEFYHKCDNTCMESVKNGTYDYPKYSEEAKLNREEIDGVKLESTRIYQILAIYSTAASSLVLVVSLGAISFWMCSNGSLQCRICI

SEQ ID NO: 9011 - protein, 566 aa, synthetic construct; identical to SEQ ID NO: 8414
  REGION 1..566: note = hemagglutinin__InfluenzaA__AFK74526

SEQ ID NO: 9012 - protein, 566 aa, synthetic construct; identical to SEQ ID NO: 2669
  REGION 1..566: note = hemagglutinin__InfluenzaA__AFK74534

SEQ ID NO: 9013 - protein, 566 aa, synthetic construct; identical to SEQ ID NO: 2669
  REGION 1..566: note = hemagglutinin__InfluenzaA__AFK74544

SEQ ID NO: 9014 - protein, 566 aa, synthetic construct; identical to SEQ ID NO: 2669
  REGION 1..566: note = hemagglutinin__InfluenzaA__AFK74554

SEQ ID NO: 9015 - protein, 566 aa, synthetic construct; identical to SEQ ID NO: 2911
  REGION 1..566: note = hemagglutinin__InfluenzaA__AFK74564

SEQ ID NO: 9016 - protein, 566 aa, synthetic construct; identical to SEQ ID NO: 5224
  REGION 1..566: note = hemagglutinin__InfluenzaA__AFK74575

SEQ ID NO: 9017 - protein, 566 aa, synthetic construct; identical to SEQ ID NO: 2656
  REGION 1..566: note = hemagglutinin__InfluenzaA__AFK74585

SEQ ID NO: 9018 - protein, 566 aa, synthetic construct
  REGION 1..566: note = hemagglutinin__InfluenzaA__AFK74595
MKAILVVLLYTFATANADTLCIGYHANNSTDTVDTVLEKNVTVTHSVNLLEDKHNGKLCKLRGVAPLHLGKCNIAGWILGNPECESLSTASSWSYIVETSSSDNGTCYPGDFIDYEELREQLSSVSSFERFEIFPKTSSWPNHDLNKGVTAACPHAGAKSFYKNLIWLVKKGNSYPKLSKSYINDKGKEVLVLWGIHHPSTSADQQSLYQNADAYVFVGTSRYSKKFKPEIAIRPKVRDQEGRMNYYWTLVEPGDKITFEATGNLVVPRYAFAMERNAGSGIIISDTPVHDCNTTCQTPKGAINTSLPFQNIHPITIGKCPKYVKSTKLRLATGLRNVPSIQSRGLFGAIAGFIEGGWTGMVDGWYGYHHQNEQGSGYAADLKSTQNAIDEITNKVNSVIEKMNTQFTAVGKEFNHLEKRIENLNKKVDDGFLDIWTYNAELLVLLENERTLDYHDSNVKNLYEKVRSQLKNNAKEIGNGCFEFYHKCDNTCMESVKNGTYDYPKYSEEAKLNREEIDGVKLESTRIYQILAIYSTVASSLVLVVSLGAISFWMCSNGSLQCRICI

SEQ ID NO: 9019 - protein, 566 aa, synthetic construct; identical to SEQ ID NO: 2669
  REGION 1..566: note = hemagglutinin__InfluenzaA__AFK74605

SEQ ID NO: 9020 - protein, 566 aa, synthetic construct; identical to SEQ ID NO: 2911
  REGION 1..566: note = hemagglutinin__InfluenzaA__AFK74615

SEQ ID NO: 9021 - protein, 566 aa, synthetic construct; identical to SEQ ID NO: 2911
  REGION 1..566: note = hemagglutinin__InfluenzaA__AFK74625

SEQ ID NO: 9022 - protein, 566 aa, synthetic construct; identical to SEQ ID NO: 3771
  REGION 1..566: note = hemagglutinin__InfluenzaA__AFK74635

SEQ ID NO: 9023 - protein, 566 aa, synthetic construct; identical to SEQ ID NO: 3771
  REGION 1..566: note = hemagglutinin__InfluenzaA__AFK74645

SEQ ID NO: 9024 - protein, 566 aa, synthetic construct; identical to SEQ ID NO: 2669
  REGION 1..566: note = hemagglutinin__InfluenzaA__AFK74655

SEQ ID NO: 9025 - protein, 566 aa, synthetic construct; identical to SEQ ID NO: 2669
  REGION 1..566: note = hemagglutinin__InfluenzaA__AFK74665

SEQ ID NO: 9026 - protein, 566 aa, synthetic construct; identical to SEQ ID NO: 2669
  REGION 1..566: note = hemagglutinin__InfluenzaA__AFK74675

SEQ ID NO: 9027 - protein, 566 aa, synthetic construct; identical to SEQ ID NO: 2669
  REGION 1..566: note = hemagglutinin__InfluenzaA__AFK74685

SEQ ID NO: 9028 - protein, 566 aa, synthetic construct; identical to SEQ ID NO: 5224
  REGION 1..566: note = hemagglutinin__InfluenzaA__AFK74695

SEQ ID NO: 9029 - protein, 566 aa, synthetic construct; identical to SEQ ID NO: 2669
  REGION 1..566: note = hemagglutinin__InfluenzaA__AFK74705

SEQ ID NO: 9030 - protein, 566 aa, synthetic construct; identical to SEQ ID NO: 2669
  REGION 1..566: note = hemagglutinin__InfluenzaA__AFK74715

SEQ ID NO: 9031 - protein, 566 aa, synthetic construct; identical to SEQ ID NO: 2669
  REGION 1..566: note = hemagglutinin__InfluenzaA__AFK74725

SEQ ID NO: 9032 - protein, 566 aa, synthetic construct; identical to SEQ ID NO: 2669
  REGION 1..566: note = hemagglutinin__InfluenzaA__AFK74735

SEQ ID NO: 9033 - protein, 566 aa, synthetic construct; identical to SEQ ID NO: 2669
  REGION 1..566: note = hemagglutinin__InfluenzaA__AFK74745

SEQ ID NO: 9034 - protein, 566 aa, synthetic construct; identical to SEQ ID NO: 2669
  REGION 1..566: note = hemagglutinin__InfluenzaA__AFK74755

SEQ ID NO: 9035 - protein, 566 aa, synthetic construct; identical to SEQ ID NO: 5224
  REGION 1..566: note = hemagglutinin__InfluenzaA__AFK74765

SEQ ID NO: 9036 - protein, 566 aa, synthetic construct; identical to SEQ ID NO: 2669
  REGION 1..566: note = hemagglutinin__InfluenzaA__AFK74775

SEQ ID NO: 9037 - protein, 566 aa, synthetic construct; identical to SEQ ID NO: 2669
  REGION 1..566: note = hemagglutinin__InfluenzaA__AFK74785

SEQ ID NO: 9038 - protein, 566 aa, synthetic construct; identical to SEQ ID NO: 2669
  REGION 1..566: note = hemagglutinin__InfluenzaA__AFK74795

SEQ ID NO: 9039 - protein, 566 aa, synthetic construct; identical to SEQ ID NO: 2669
  REGION 1..566: note = hemagglutinin__InfluenzaA__AFK74805

SEQ ID NO: 9040 - protein, 566 aa, synthetic construct; identical to SEQ ID NO: 2669
  REGION 1..566: note = hemagglutinin__InfluenzaA__AFK74815

SEQ ID NO: 9041 - protein, 566 aa, synthetic construct; identical to SEQ ID NO: 2669
  REGION 1..566: note = hemagglutinin__InfluenzaA__AFK74825

SEQ ID NO: 9042 - protein, 566 aa, synthetic construct; identical to SEQ ID NO: 2669
  REGION 1..566: note = hemagglutinin__InfluenzaA__AFK74835

SEQ ID NO: 9043 - protein, 566 aa, synthetic construct; identical to SEQ ID NO: 2669
  REGION 1..566: note = hemagglutinin__InfluenzaA__AFK74845

SEQ ID NO: 9044 - protein, 566 aa, synthetic construct; identical to SEQ ID NO: 2669
  REGION 1..566: note = hemagglutinin__InfluenzaA__AFK74895

SEQ ID NO: 9045 - protein, 566 aa, synthetic construct; identical to SEQ ID NO: 2669
  REGION 1..566: note = hemagglutinin__InfluenzaA__AFK74905

SEQ ID NO: 9046 - protein, 566 aa, synthetic construct; identical to SEQ ID NO: 2669
  REGION 1..566: note = hemagglutinin__InfluenzaA__AFK74915

SEQ ID NO: 9047 - protein, 566 aa, synthetic construct
  REGION 1..566: note = hemagglutinin__InfluenzaA__AFK74925
MKAILVVLLYTFATANADTLCIGYHANNSTDTVDTVLEKNVTVTHSVNLLEDKHNGKLCKLRGVVPLHLGKCNIAGWILGNPECESLSTASSWSYIVETSSSDNGTCYPGDFIDYEELREQLSSVSSFERFEIFPKTSSWPNHDSNKGVTAACPHAGAKSFYKNLIWLVKKGNSYPKLSKSYINDKGKEVLVLWGIHHPSTSADQQSLYQNADAYVFVGTSRYSKKFKPEIAIRPKVRDQEGRMNYYWTLVEPGDKITFEATGNLVVPRYAFTMERNAGSGIIISDTPVHDCNTTCQTPKGAINTSLPFQNIHPITIGKCPKYVKSTKLRLATGLRNVPSIQSRGLFGAIAGFIEGGWTGMVDGWYGYHHQNEQGSGYAADLKSTQNAIDGITNKVNSVIEKMNTQFTAVGKEFNHLEKRIENLNKKIDDGFLDIWTYNAELLVLLENERTLDYHDSNVKNLYEKVRSQLKNNAKEIGNGCFEFYHKCDNTCMESVKNGTYDYPKYSEEAKLNREEIDGVKLESTRIYQILAIYSTVASSLVLVVSLGAISFWMCSNGSLQCRICI

SEQ ID NO: 9048 - protein, 566 aa, synthetic construct; identical to SEQ ID NO: 3771
  REGION 1..566: note = hemagglutinin__InfluenzaA__AFK74935

SEQ ID NO: 9049 - protein, 566 aa, synthetic construct; identical to SEQ ID NO: 2669
  REGION 1..566: note = hemagglutinin__InfluenzaA__AFK74945

SEQ ID NO: 9050 - protein, 566 aa, synthetic construct; identical to SEQ ID NO: 2669
  REGION 1..566: note = hemagglutinin__InfluenzaA__AFK74955

SEQ ID NO: 9051 - protein, 566 aa, synthetic construct; identical to SEQ ID NO: 2669
  REGION 1..566: note = hemagglutinin__InfluenzaA__AFK74965

SEQ ID NO: 9052 - protein, 566 aa, synthetic construct; identical to SEQ ID NO: 2760
  REGION 1..566: note = hemagglutinin__InfluenzaA__AFK74975

SEQ ID NO: 9053 - protein, 566 aa, synthetic construct; identical to SEQ ID NO: 2669
  REGION 1..566: note = hemagglutinin__InfluenzaA__AFK74985

SEQ ID NO: 9054 - protein, 566 aa, synthetic construct; identical to SEQ ID NO: 5224
  REGION 1..566: note = hemagglutinin__InfluenzaA__AFK74995

SEQ ID NO: 9055 - protein, 566 aa, synthetic construct; identical to SEQ ID NO: 2669
  REGION 1..566: note = hemagglutinin__InfluenzaA__AFK75005

SEQ ID NO: 9056 - protein, 566 aa, synthetic construct
  REGION 1..566: note = hemagglutinin__InfluenzaA__AFK75015
MKAILVVLLYTFATANADTLCIGYHANNSTDTVDTVLEKNVTVTHSVNLLEDKHNGKLCKLRGVAPLHLGKCNIAGWILGNPECESLSTASSWSYIVETSSSDNGTCYPGDFIDYEELREQLSSVSSFERFEIFPKTSSWPNHDSNKGVTAACPHAGAKSFYKNLIWLVKKGNSYPKLSKSYINDKGKEVLVLWGIHHPSTSADQQSLYQNADAYVFVGTSRYSKKFKPEIAIRPKVRDQEGRMNYYWTLVEPGDKITFEATGNLVVPRYAFAMERNAGSGIIISDTPVHDCNTTCQTPKGAINTSLPFQNIHPITIGKCPKYVKSTKLRLATGLRNVPSIQSRGLFGAIAGFIEGGWTGMVDGWYGYHHQNEQGSGYAADLKSTQNAIDEITNKVNSVIEKMNTQFTAVGKEFNHLEKRIENLNKKVDDGFLDIWTYNAELLVLLENERTLDYHDSNVKNLYEKVRSQLKNNAKEIGNGCFEFYHKCDNTCMESVKNGTYDYPKYSEEAKLNREEIDGVKLESTRIYQILAIYSTVASSLVLVVSLGAISFWMCSNGSLQCRICV

SEQ ID NO: 9057 - protein, 566 aa, synthetic construct; identical to SEQ ID NO: 2911
  REGION 1..566: note = hemagglutinin__InfluenzaA__AFK75025

SEQ ID NO: 9058 - protein, 566 aa, synthetic construct; identical to SEQ ID NO: 2911
  REGION 1..566: note = hemagglutinin__InfluenzaA__AFK75035

SEQ ID NO: 9059 - protein, 566 aa, synthetic construct; identical to SEQ ID NO: 2911
  REGION 1..566: note = hemagglutinin__InfluenzaA__AFK75045

SEQ ID NO: 9060 - protein, 566 aa, synthetic construct; identical to SEQ ID NO: 2911
  REGION 1..566: note = hemagglutinin__InfluenzaA__AFK75055

SEQ ID NO: 9061 - protein, 566 aa, synthetic construct; identical to SEQ ID NO: 2669
  REGION 1..566: note = hemagglutinin__InfluenzaA__AFK75065

SEQ ID NO: 9062 - protein, 566 aa, synthetic construct; identical to SEQ ID NO: 2669
  REGION 1..566: note = hemagglutinin__InfluenzaA__AFK75075

SEQ ID NO: 9063 - protein, 566 aa, synthetic construct; identical to SEQ ID NO: 3833
  REGION 1..566: note = hemagglutinin__InfluenzaA__AFK75085

SEQ ID NO: 9064 - protein, 566 aa, synthetic construct; identical to SEQ ID NO: 3833
  REGION 1..566: note = hemagglutinin__InfluenzaA__AFK75095

SEQ ID NO: 9065 - protein, 566 aa, synthetic construct; identical to SEQ ID NO: 2669
  REGION 1..566: note = hemagglutinin__InfluenzaA__AFK75105

SEQ ID NO: 9066 - protein, 566 aa, synthetic construct; identical to SEQ ID NO: 2911
  REGION 1..566: note = hemagglutinin__InfluenzaA__AFK77857

SEQ ID NO: 9067 - protein, 566 aa, synthetic construct; identical to SEQ ID NO: 2911
  REGION 1..566: note = hemagglutinin__InfluenzaA__AFK77867

SEQ ID NO: 9068 - protein, 566 aa, synthetic construct; identical to SEQ ID NO: 8197
  REGION 1..566: note = hemagglutinin__InfluenzaA__AFK77877

SEQ ID NO: 9069 - protein, 566 aa, synthetic construct; identical to SEQ ID NO: 2669
  REGION 1..566: note = hemagglutinin__InfluenzaA__AFK77887

SEQ ID NO: 9070 - protein, 566 aa, synthetic construct
  REGION 1..566: note = hemagglutinin__InfluenzaA__AFK77897
MKAILVVLLYTFATANADTLCIGYHANNSTDTVDTVLEKNVTVTHSINLLEDKHNGKLCKLRGVAPLHLGKCNIAGWILGNPECESLSTASSWSYIVETSSSDNGTCYPGDFINYEELREQLSSVSSFERFEIFPKTSSWPNHDSNKGVTAACPHAGAKSFYKNLIWLVKKGNSYPKLSKSYINDKGKEVLVLWGIHHPSTSADQQSLYQNADAYVFVGTSKYSKKFKPEIAVRPKVRDQEGRMNYYWTLVEPGDKITFEATGNLLVPRYAFAMERNAGSGIIISDTPVHDCNTTCQTPKGAINTSLPFQNIHPITIGKCPKYVKSTKLRLATGLRNVPSIQSRGLFGAIAGFIEGGWTGMVDGWYGYHHQNEQGSGYAADLKSTQNAIDKITNKVNSVIEKMNTQFTAVGKEFNHLEKRIENLNKKVDDGFLDIWTYNAELLVLLENERTLDYHDSNVKNLYEKVRSQLKNNAKEIGNGCFEFYHKCDNTCMESVKNGTYDYPKYSEEAKLNREEIDGVKLESTRIYQILAIYSTVASSLVLVVSLGAISFWMCSNGSLQCRICI

SEQ ID NO: 9071 - protein, 566 aa, synthetic construct; identical to SEQ ID NO: 7050
  REGION 1..566: note = hemagglutinin__InfluenzaA__AFK78028

SEQ ID NO: 9072 - protein, 566 aa, synthetic construct; identical to SEQ ID NO: 2911
  REGION 1..566: note = hemagglutinin__InfluenzaA__AFK78187

SEQ ID NO: 9073 - protein, 566 aa, synthetic construct; identical to SEQ ID NO: 6855
  REGION 1..566: note = hemagglutinin__InfluenzaA__AFM45476

SEQ ID NO: 9074 - protein, 566 aa, synthetic construct
  REGION 1..566: note = hemagglutinin__InfluenzaA__AFM45487
MKTIIALSYILCLVFAQKLPGNDNSTATLCLGHHAVPNGTIVKTITNDQIEVTNATELVQSSSTGEICDSPHQILDGENCTLIDALLGDPQCDGFQNKKWDLFVERSKAYSNCYPYDVPDYASLRSLVASSGTLEFNNESFNWTGVTQNGTSSACIRRSNSSFFSRLNWLTHLNFKYPALNVTMPNNEQFDKLYIWGVHHPGTDKDQIFLYAQSSGRITVSTKRSQQAVIPNIGSRPRIRNIPSRISIYWTIVKPGDILLINSTGNLIAPRGYFKIRSGKSSIMRSDAPIGKCNSECITPNGSIPNDKPFQNVNRITYGACPRYVKQSTLKLATGMRNVPEKQTRGIFGAIAGFIENGWEGMVDGWYGFRHQNSEGRGQAADLKSTQAAIDQINGKLNRLIGKTNEKFHQIEKEFSEVEGRIQDLEKYVEDTKIDLWSYNAELLVALENQHTIDLTDSEMNKLFEKTKKQLRENAEDMGNGCFKIYHKCDNACIGSIRNGTYNHDVYRDEALNNRFQIKGVELKSGYKDWILWISFAISCFLLCVALLGFIMWACQKGNIRCNICI

SEQ ID NO: 9075 - protein, 566 aa, synthetic construct; identical to SEQ ID NO: 6855
  REGION 1..566: note = hemagglutinin__InfluenzaA__AFM45489

SEQ ID NO: 9076 - protein, 566 aa, synthetic construct; identical to SEQ ID NO: 9074
  REGION 1..566: note = hemagglutinin__InfluenzaA__AFM45494

SEQ ID NO: 9077 - protein, 566 aa, synthetic construct
  REGION 1..566: note = hemagglutinin__InfluenzaA__AFM68954
MKARLLVLLCALAATDADTICIGYHANNSTDTVDTLLEKNVTVTHSVNLLEDSHNGKLCKLKGIAPLQLGKCNIAGWLLGNPECDSLLPARSWSYIVETPNSENGACYPGDFIDYEELKEQLSSVSSLERFEIFPKESSWPNHNTLKGVTASCSHGGKSSFYRNLLWLTKTEDSYPKLSNSYVNNKGKEVLVLWGVHHPSSSDEQQSLYHNVNAYVSVVSSNYNGRFTPEIAARPKVRNQPGRMNYYWTLLEPGDTIIFEATGNLIAPWYAFALSRGFGSGIITSNASMHECNTKCQTPQGAINSSLPFQNIHPVTIGECPKYVRSTKLRMVTGLRNIPSIQFRGLFGAIAGFIEGGWTGMIDGWYGYHHQNEQGSGYAADQKSTQNAINGITNKVNSVIEKMNTQFTAVSKEFNNLEKRMENLNKKVDDGFLDIWTYNAELLVLLENERTLDFHDLNVKNLYEKVKSQLKNNAKEIGNGCFEFYHKCDNKCMESVRNGTYDYPKYSEESKLNREKIDGVKLESMGVYQILAIYSTVASSLVLLVSLGAISFWMCSNGSLQCRICI

SEQ ID NO: 9078 - protein, 566 aa, synthetic construct
  REGION 1..566: note = hemagglutinin__InfluenzaA__AFM68965
MKTIIALSYIFCQVLAQNLPGNDNSTATLCLGHHAVPNGTLVKTITNDQIEVTNATELVQSSSTGRICDSPHRILDGKNCTLIDALLGDPHCDGFQNEKWDLFVERSKAFSNCYPYDVPDYASLRSLVASSGTLEFINEGFNWTGVTQNGGSYACKRGPDNSFFSRLNWLYKSESTYPVLNVTMPNNDNFDKLYIWGVHHPSTDKEQTNLYVQASGRVTVSTKRSQQTIIPNVGSRPWVRGLSSGISIYWTIVKPGDILLINSNGNLIAPRGYFKIRTGKSSIMRSDAPIGTCSSECITPNGSIPNDKPFQNVNKITYGACPKYVKQNTLKLATGMRNVPEKQTRGIFGAKAGFIENGWEGMIDGWYGFRHQNSEGTGQAADLKSTQAAIDQINGKLNRVIEKTNEKFHQIEKEFSEVEGRIQDLEKYVEDTKIDLWSYNAELLVALENQHTIDLTDSEMNKLFEKTRRQLRENAEDMGNGCFKIYHKCDNACIGSIRNGTYDHDVYRDEALNNRFQIKGVELKSGYKDWILWISFAISCFLLCVVLLGFIMWACQKGNIRCNICI

SEQ ID NO: 9079 - protein, 566 aa, synthetic construct
  REGION 1..566: note = hemagglutinin__InfluenzaA__AFM68987
MKTIIALSYIFCLVFAQNLPGNDNSTATLCLGHHAVPNGTLVKTITNDQIEVTNATELVQSSSTGRICDSPHRILDGKNCTLIDALLGDPHCDGFQNEKWDLFVERSKAFSNCYPYDVPDYASLRSLVASSGTLEFINEGFNWTGVTQSGGSYACKRGSDKSFFSRLNWLYESESKYPVLNVTMPNNGNFDKLYIWGVHHPSTDKEQTNLYVRASGRVTVSTKRSQQTVIPNIGSRPWVRGLSSRISIYWTIVKPGDILLINSNGNLIAPRGYFKIRTGKSSIMRSDAPIGTCSSECITPNGSIPNDKPFQNVNKITYGACPKYVKQNTLKLATGMRNVPEKQTRGIFGAIAGFIENGWEGMVDGWYGFRHQNSEGTGQAADLKSTQAAIDQINGKLNRVIEKTNEKFHQIEKEFSEVEGRIQDLEKYVEDTKIDLWSYNAELLVALENQHTIDLTDSEMNKLFEKTRRQLRENAEDMGNGCFKIYHKCDNACIGSIRNGTYDHDVYRDEALNNRFQIKGVELKSGYKDWILWISFAISCFLLCVVLLGFIMWACQKGNIRCNICI

SEQ ID NO: 9080 - protein, 566 aa, synthetic construct
  REGION 1..566: note = hemagglutinin__InfluenzaA__AFM71720
MKTIIALSYIFCLVFAQKLPGNDNSTATLCLGHHAVPNGTLVKTITNDQIEVTNATELVQSSSTGRICDSPHRILDGKNCTLIDALLGDPHCDGFQNEKWDLFVERSKAYSNCYPYDVPDYASLRSLVASSGTLEFINEDFNWTGVTQSGGSYACKRGSVNSFFSRLNWLHESEYKYPALNVAMPNNGKFDKLYIWGVHHPITDREQTNLYVRASGRVTVSTKRSQQTVIPNIGSRPWVRGLSSRISIYWTIVKPGDILFINSTGNLIAPRGYFKIRTGKSSIMRSDAPIGTCSSECITPNGSIPNDKPFQNVNKITYGACPRYVKQNTLKLATGMRNVPEKQTRGIFGAIAGFIENGWEGMVDGWYGFRHQNSEGTGQAADLKSTQAAIDQINGKLNRLIEKTNEKFHQIEKEFSEVEGRIQDLEKYVEDTKIDLWSYNAELLVALENQHTIDLTDSEMNKLFEKTRKQLRENAEDMGNGCFKIYHKCDNACIGSIRNGTYDHDVYRDEALNNRFQIKGVELKSGYKDWILWISFAISCFLLCVVLLGFIMWACQKGNIRCNICI

SEQ ID NO: 9081 - protein, 566 aa, synthetic construct
  REGION 1..566: note = hemagglutinin__InfluenzaA__AFM71731
MKTIIALSYILCLVFAQKLPGNDNSTATLCLGHHAVPNGTLVKTITNDQIEVTNATELVQSSSTGRICDSPHRILDGKNCTLIDALLGDPHCDGFQNKEWDLFVERSKAYSNCYPYDVPDYASLRSLVASSGTLEFINEDFNWTGVAQSGESYACKRGSVKSFFSRLNWLHKSEYKYPALNVTMPNNGKFDKLYIWGVHHPSTDREQTNLYVRASGRVTVSTKRSQQTVIPNIGSRPWVRGLSSRISIYWTIVKPGDILLINSTGNLIAPRGYFKIRTGKSSIMRSDAPIGTCSSECITPNGSIPNDKPFQNVNRITYGACPRYVKQNTLKLATGMRNVPEKQTRGIFGAIAGFIENGWEGMVDGWYGFRHQNSEGTGQAADLKSTQAAIDQINGKLNRLIEKTNEKFHQIEKEFSEVEGRIQDLEKYVEDTKIDLWSYNAELLVALENQHTIDLTDSEMNKLFEKTRKQLRENAEDMGNGCFKIYHKCDNACIGSIRNGTYDHDVYRDEALNNRFQIKGVELKSGYKDWILWISFAISCFLLCVVLLGFIMWACQKGNIRCNICI

SEQ ID NO: 9082 - protein, 566 aa, synthetic construct
  REGION 1..566: note = hemagglutinin__InfluenzaA__AFM71754
MKTIIALSYILCLVFAQKLPGNDNSTATLCLGHHAVPNGTIVKTITNDQIEVTNATELVQSSSTGEICDSPHQILDGKNCTLIDALLGDPQCDGFQNKKWDLFVERSKAYSNCYPYDVPDYASLRSLVASSGTLEFNNESFNWTGVTQNGTSSACIRRSKNSFFSRLNWLTHLNFKYPALNVTMPNNEQFDKLYIWGVHHPGTDKDQIFPYAQASGRITVSTKRSQQTAIPNIGSRPRVRNIPSRISIYWTIVKPGDILLINSTGNLIAPRGYFKIRSGKSSIMRSDAPIGKCNSECITPNGSIPNDKPFQNVNRITYGACPRYVKQNTLKLATGMRNVPEKQTRGIFGAIAGFIENGWEGMVDGWYGFRHQNSEGRGQAADLKSTQAAIDQINGKLNRLIGKTNEKFHQIEKEFSEVEGRIQDLEKYVEDTKIDLWSYNAELLVALENQHTIDLTDSEMNKLFEKTKKQLRENAEDMGNGCFKIYHKCDNACIGSIRNGTYAHDVYRDEALNNRFQIKGVELKSGYKDWILWISFAISCFLLCVALLGFIMWACQKGNIRCNICI

SEQ ID NO: 9083 - protein, 566 aa, synthetic construct
  REGION 1..566: note = hemagglutinin__InfluenzaA__AFM71768
MKTIIALSYILCLVFAQKLPGNDNSTATLCLGHHAVPNGTIVKTITNDQIEVTNATELVQSSSTGEICDSPHQILDGKNCTLIDALLGDPQCDDFQNKKWDLFVERSKAYSNCYPYDVPDYASLRSLVASSGTLEFNNESFNWTGVTQNGTSSACIRRSKNSFFSRLNWLTHLNFKYPALNVTMPNNEQFDKLYIWGVHHPGTDKDQIFPYAQASGRITVSTKRSQQTAIPNIGSRPRVRNIPSRISIYWTIVKPGDILLINSTGNLIAPRGYFKIRSGKSSIMRSDAPIGKCNSECITPNGSIPNDKPFQNVNRITYGACPRYVKQNTLKLATGMRNVPEKQTRGIFGAIAGFIENGWEGMVDGWYGFRHQNSEGRGQAADLKSTQAAIDQINGKLNRLIGKTNEKFHQIEKEFSEVEGRIQDLEKYVEDTKIDLWSYNAELLVALENQHTIDLTDSEMNKLFEKTKKQLRENAEDMGNGCFKIYHKCDNACIGSIRNGTYAHDVYRDEALNNRFQIKGVELKSGYKDWILWISFAISCFLLCVALLGFIMWACQKGNIRCNICI

SEQ ID NO: 9084 - protein, 566 aa, synthetic construct
  REGION 1..566: note = hemagglutinin__InfluenzaA__AFM71791
MKTIIALSYTLCLVFAQKLPGNDNSTATLCLGHHAVPNGTIVKTITNDQIEVTNATELVQSSSTGEICDSPHQILDGKNCTLIDALLGDPQCDGFQNKKWDLFVERSKAYSNCYPYDVPDYASLRSLVASSGTLEFNNESFNWTGVTQNGTSSACIRRSKNSFFSRLNWLTHLNFKYPALNVTMPNNEQFDKLYIWGVHHPGTDKDQIFPYAQASGRITVSTKRSQQTVIPNIGSRPRVRNIPSRISIYWTIVKPGDILLINSTGNLIAPRGYFKIRSGKSSIMRSDAPIGKCNSECITPNGSIPNDKPFQNVNRITYGACPRYVKQNTLKLATGMRNVPEKQTRGIFGAIAGFIENGWEGMVDGWYGFRHQNSEGRGQAADLKSTQAAIDQINGKLNRLIGKTNEKFHQIEKEFSEVEGRIQDLEKYVEDTKIDLWSYNAELLVALENQHTIELTDSEMNKLFEKTKKQLRENAEDMGNGCFKIYHKCDNACIGSIRNGTYDHDVYRDEALNNRFQIKGVELKSGYKDWILWISFAISCFLLCVALLGFIMWACQKGNIRCNICI

SEQ ID NO: 9085 - protein, 566 aa, synthetic construct
  REGION 1..566: note = hemagglutinin__InfluenzaA__AFM71824
MKTIIALSYILCLVFAQKLPGNDNSTATLCLGHHAVPNGTIVKTITNDQIEVTNATELVQSSSTGEICDSPHQILDGKNCTLIDALLGDPQCDGFQNKKWDLFVERSKAYSNCYPYDVPDYASLRSLVASSGTLEFNNESFNWTGVTQDGTSSACIRRSKNSFFSRLNWLTHLNFKYPALNVTMPNNEQFDKLYIWGVHHPGTDKDQIFPYAQASGRITVSTKRSQQTAIPNIGSRPRVRNIPSRISIYWTIVKPGDILLINSTGNLIAPRGYFKIRSGKSSIMRSDAPIGKCNSECITPNGSIPNDKPFQNVNRITYGACPRYVKQNTLKLATGMRNVPEKQTRGIFGAIAGFIENGWEGMVDGWYGFRHQNSEGRGQAADLKSTQAAIDQINGKLNRLIGKTNEKFHQIEKEFSEVEGRIQDLEKYVEDTKIDLWSYNAELLVALENQHTIDLTDSEMNKLFEKTKKQLRENAEDMGNGCFKIYHKCDNACIGSIRNGTYDHDVYRDEALNNRFQIKGVELKSGYKDWILWISFAISCFLLCVALLGFIMWACQKGNIRCNICI

SEQ ID NO: 9086 - protein, 566 aa, synthetic construct
  REGION 1..566: note = hemagglutinin__InfluenzaA__AFM71835
MKTIIALSYILCLVFAQKLPGNDNSTATLCLGHHAVPNGTIVKTITNDQIEVTNATELVQSSSTGEICDSPHQILDGENCTLIDALLGDPQCDGFQNKKWDLFVERSKAYSSCYPYDVPDYASLRSLVASSGTLEFNSESFNWTGVTQNGTSSACIRRSYNSFFSRLNWLTHLNFKYPALNVTMPNNEQFDKLYIWGVHHPGTDKDQIFPYAQASGRITVSTKRSQQAVIPNIGSRPRVRNIPSRISIYWTIVKPGDILLINSTGNLIAPRGYFKIRSGKSSIMRSDAPIGKCNSECITPNGSIPNDKPFQNVNRITYGACPRYIKQSTLKLATGMRNVPEKQTRGIFGAIAGFIENGWEGMVDGWYGFRHQNSEGRGQAADLKSTQAAIDQINGKLNRLIGKTNEKFHQIEKEFSEVEGRIQDLEKYVEDTKIDLWSYNAELLVALENQHTIDLTDSEMNKLFEKTKKQLRENAEDMGNGCFKIYHKCDNACIGSIRNGTYDHDVYRDEALNNRFQIKGVELKSGYKDWILWISLAISCFLLCVALLGFIMWACQKGNIRCNICI

SEQ ID NO: 9087 - protein, 565 aa, synthetic construct
  REGION 1..565: note = hemagglutinin__InfluenzaA__AFM71846
MKANLLVLLCALAAADADTICIGYHANNSTDTVDTVLEKNVTVTHSVNLLEDSHNGKLCRLKGIAPLQLGKCNIAGWLLGNPECDPLLPVRSWSYIVETPNSENGICYPGDFIDYEELREQLSSVSSFERFEIFPKESSWPNHNTNGVTAACSHEGKSSFYRNLLWLTEKEGSYPKLKNSYVNKKGKEVLVLWGIHHPSNSKEQQNLYQNENAYVSVVTSNYNRRFTPEIAERPKVRDQAGRMNYYWTLLKPGDTIIFEANGNLIAPMYAFALSRGFGSGIITSNASMHECNTKCQTPLGAINSSLPYQNIHPVTIGECPKYVRSAKLRMVTGLRNIPSIQSRGLFGAIAGFIEGGWTGMIDGWYGYHHQNEQGSGYAADQKSTQNAINGITNKVNTVIEKMNIQFTAVGKEFNKLEKRMENLNKKVDDGFLDIWTYNAELLVLLENERTLDFHDSNVKNLYEKVKSQLKNNAKEIGNGCFEFYHKCDNECMESVRNGTYDYPKYSEESKLNREKVDGVKLESMGIYQILAIYSTVASSLVLLVSLGAISFWMCSNGSLQCRICI

SEQ ID NO: 9088 - protein, 566 aa, synthetic construct; identical to SEQ ID NO: 2318
  REGION 1..566: note = hemagglutinin__InfluenzaA__AFM71857

SEQ ID NO: 9089 - protein, 566 aa, synthetic construct
  REGION 1..566: note = hemagglutinin__InfluenzaA__AFM71868
MKTIIALSYILCLVFAQKLPGNDNSTATLCLGHHAVPNGTIVKTITNDQIEVTNATELVQSSSTGGICDSPHQILDGENCTLIDALLGDPQCDGFQNKKWDLFVERSKAYSNCYPYDVPDYASLRSLVASSGTLEFNNESFNWTGVTQNGTSSSCKRRSNNSFFSRLNWLTHLKFKYPALNVTMPNNEKFDKLYIWGVHHPVTDNDQIRLYAQASGRITVSTKRSQQTVIPNIGSRPRVRDIPSRISIYWTIVKPGDILLINSTGNLIAPRGYFKIRSGKSSIMRSDAPIGKCNSECITPNGSIPNDKPFQNVNRITYGACPRYVKQNTLKLATGMRNVPEKQTRGIFGAIAGFIENGWEGMVDGWYGFRHQNSEGIGQAADLKSTQAAINQINGKLNRLIGKTNEKFHQIEKEFSEVEGRIQDLEKYVEDTKIDLWSYNAELLVALENQHTIDLTDSEMNKLFERTKKQLRENAEDMGNGCFKIYHKCDNACIGSIRNGTYDHDVYRDEALNNRFQIKGVELKSGYKDWILWISFAISCFLLCVVLLGFIMWACQKGNIRCNICI

SEQ ID NO: 9090 - protein, 566 aa, synthetic construct; identical to SEQ ID NO: 6998
  REGION 1..566: note = hemagglutinin__InfluenzaA__AFM71879

SEQ ID NO: 9091 - protein, 566 aa, synthetic construct
  REGION 1..566: note = hemagglutinin__InfluenzaA__AFM71890
MKARLLVLLCALAATDADTICIGYHANNSTDTVDTLLEKNVTVTHSVNLLEDSHNGKLCKLKGIAPLQLGKCNIAGWLLGNPECDSLLPARSWSYIVETPNSENGACYPGDFIDYEELKEQLSSVSSLERFEIFPKESSWPNHNTLKGVTASCSHGGKSSFYRNLLWLTKTEDSYPKLSNSYVNNKGKEVLVLWGVHHPSSSDEQQSLYHNVNAYVSVVSSNYNRRFTPEIAARPKVRNQPGRMNYYWTLLEPGDTIIFEATGNLIAPWYAFALSRGFGSGIITSNASMHECNTKCQTPQGAINSSLPFQNIHPVTIGECPKYVRSTKLRMVTGLRNIPSIQFRGLFGAIAGFIEGGWTGMIDGWYGYHHQNEQGSGYAADQKSTQNAINGITNKVNSVIEKMNTQFTAVSKEFNNLEKRMENLNKKVDDGFLDIWTYNAELLVLLENERTLDFHDLNVKNLYEKVKSQLKNNAKEIGNGCFEFYHKCDNKCMESVRNGTYDYPKYSEESKLNREKIDGVKLESMGVYQILAIYSTVASSLVLLVSLGAISFWMCSNGSLQCRICI

SEQ ID NO: 9092 - protein, 566 aa, synthetic construct; identical to SEQ ID NO: 9077
  REGION 1..566: note = hemagglutinin__InfluenzaA__AFM71901

SEQ ID NO: 9093 - protein, 566 aa, synthetic construct
  REGION 1..566: note = hemagglutinin__InfluenzaA__AFM71923
MKTIIALSYIFCLVLGQDLPGNDNSTATLCLGHHAVPNGTLVKTITNDQIEVTNATELVQSSSTGKICNNPHRILDGIDCTLIDALLGDPHCDSFQNETWDLFVERSKAFSNCYPYDVPDYASLRSLVASSGTLEFINEGFTWTGVTQNGGSNACKRGPDSGFFSRLNWLYKSGSTYPVLNVTMPNNDNFDKLYIWGVHHPSTNQEQTSLYVQASGRVTVSTKRSQQTIIPNIGSRPWVRGLSSRISIYWTIVKPGDILVINSNGNLIAPRGYFKMRTGKSSIMRSDAPIGTCISECITPNGSIPNDKPFQNVNKITYGACPKYVKQNTLKLATGMRNVPEKQTRGLFGAIAGFIENGWEGMIDGWYGFRHQNSEGTGQAADLKSTQAAIDQINGKLNRVIEKTNEKFHQIEKEFSEVEGRIQDLEKYVEDTKIDLWSYNAELLVALENQHTIDLTDSEMNKLFEKTRRQLRENAEDMGNGCFRIYHKCDNACIGSIRNGTYDHDVYRDEALNNRFQIKGVELKSGYKDWILWISFAISCFLLCVVLLGFIMWACQKGNIRCNICI

SEQ ID NO: 9094 - protein, 566 aa, synthetic construct
  REGION 1..566: note = hemagglutinin__InfluenzaA__AFM71934
MKTIIALSYIFCLVLGQDLPGNDNSTATLCLGHHAVPNGTLVKTITNDQIEVTNATELVQSSSTGKICNNPHRILDGIDCTLIDALLGDPHCDGFQNETWDLFVERSKAFSNCYPYDVPDYASLRSLVASSGTLEFINEGFTWTGVTQNGGSNACKRGPDSGFFSRLNWLYKSGSTYPVLNVTMPNNDNFDKLYIWGVHHPSTNQEQTSLYVQASGRVTVSTKGSQQTIIPNIGSRPWVRGLSSRISIYWTIVKPGDILVINSNGNLIAPRGYFKMRTGKSSIMRSDAPIGTCISECITPNGSIPNDKPFQNVNKITYGACPKYVKQNTLKLATGMRNVPEKQTRGLFGAIAGFIENGWEGMIDGWYGFRHQNSEGTGQAADLKSTQAAIDQINGKLNRVIEKTNEKFHQIEKEFSEVEGRIQDLEKYVEDTKIDLWSYNAELLVALENQHTIDLTDSEMNKLFEKTRRQLRENAEDMGNGCFRIYHKCDNACIGSIRNGTYDHDVYRDEALNNRFQIKGVELKSGYKDWILWISFAISCFLLCVVLLGFIMWACQKGNIRCNICI

SEQ ID NO: 9095 - protein, 566 aa, synthetic construct
  REGION 1..566: note = hemagglutinin__InfluenzaA__AFM71945
MKTIIALSYIFCLVLGQDFPGNDNSTATLCLGHHAVPNGTLVKTITNDQIEVTNATELVQSSSTGKICNNPHRILDGINCTLIDALLGDPHCDGFQNETWDLFVERSKAFSNCYPYDVPDYASLRSLVASSGTLEFINEGFTWTGVTQNGGSNACKRGPDSGFFSRLNWLYKSGSAYPVLNVTMPNNDNFDKLYIWGVHHPSTDQEQTNLYVQASGRVTVSTKRSQQTIIPNIGSRPWVRGLSSRISIYWTIVKPGDILVINSNGNLIAPRGYFKMRTGKSSIMRSDAPIGTCISECITPNGSIPNDKPFQNVNKITYGACPKYVKQNTLKLATGMRNVPEKQTRGIFGAIAGFIENGWEGMIDGWYGFRHQNSEGTGQAADLKSTQAAIDQINGKLNRVIEKTNEKFHQIEKEFSEVEGRIQDLEKYVEDTKIDLWSYNAELLVALENQHTIDLTDSEMNKLFEKTRRQLRENAEDMGNGCFKIYHKCDNACIGSIRNGTYDHDVYRDEALNNRFQIKGVELKSGYKDWILWISFAISCFLLCVVLLGFIMWACQKGNIRCNICI

SEQ ID NO: 9096 - protein, 566 aa, synthetic construct; identical to SEQ ID NO: 9095
  REGION 1..566: note = hemagglutinin__InfluenzaA__AFM71956

SEQ ID NO: 9097 - protein, 567 aa, synthetic construct
  REGION 1..567: note = hemagglutinin__InfluenzaA__AFM71978
MKTIIALSYIFCLVFAQDLPGNDNNSTATLCLGHHAVPNGTLVKTITNDQIEVTNATELVQSSSTGKICNNPHRILDGINCTLIDALLGDPHCDGFQNEKWDLFVERSKAFSNCYPYDVPDYASLRSLVASSGTLEFINEGFNWTGVTQNGGSNACKRGPDSGFFSRLNWLYKSGSTYPVQNVTMPNNDNSDKLYIWGVHHPSTDKEQTNLYVQASGKVTVSTKRSQQTIIPNVGSRPWVRGLSSRISIYWTIVKPGDILVINSNGNLIAPRGYFKMRTGKSSIMRSDAPIGTCSSECITPNGSIPNDKPFQNVNKITYGACPKYVKQNTLKLATGMRNVPEKQTRGIFGAIAGFIENGWEGMIDGWYGFRHQNSEGTGQAADLKSTQAAIDQINGKLNRVIEKTNEKFHQIEKEFSEVEGRIQDLEKYVEDTKIDLWSYNAELLVALENQHTIDLTDSEMNKLFEKTRRQLRENAEDMGNGCFKIYHKCDNACIGSIRNGTYDHDVYRDEALNNRFQIKGVELKSGYKDWILWISFAISCFLLCVVLLGFIMWACQKGNIRCNICI

SEQ ID NO: 9098 - protein, 566 aa, synthetic construct
  REGION 1..566: note = hemagglutinin__InfluenzaA__AFM71989
MKTIIALSYILCLVFAQKLPGNDNSTATLCLGHHAVPNGTIVKTITNDQIEVTNATELVQSSSTGEICNSPHQILDGENCTLIDALLGDPQCDGFQNKKWDLFVERSKAHSNCYPYDVPDYASLRSLVASSGTLEFNNESFNWTGVTQNGTSSACIRRSNNSFFSRLNWLTHLNFKYPALNVTMPNNEQFDKLYIWGVHHPSTDKDQIFLYTQAAGRITVSTKRSQQAVIPNIGSRPRVRNIPSRVSIYWTIVKPGDILLINSTGNLIAPRGYFKIRSGKSSIMRSDAPIGKCNSACITPNGSIPNDKPFQNVNRITYGACPRYVKQNTLKLATGMRNVPEKQTRGIFGAIAGFIENGWEGMVDGWYGFRHQNSEGRGQAADLKSTQAAIDQINGKLNRLIGKTNEKFHQIEKEFSEVEGRIQDLEKYVEDTKIDLWSYNAELLVALENQHTIDLTDSEMNKLFEKTKKQLRENAEDMGNGCFKIYHKCDNACIGSIRNGTYDHDVYRDEALNNRFQIKGVELKSGYKDWILWISFAISCFLLCVALLGFIMWACQKGNIRCNICI

SEQ ID NO: 9099 - protein, 566 aa, synthetic construct
  REGION 1..566: note = hemagglutinin__InfluenzaA__AFM72010
MKTIIALSYIFCQVLAQNLPGNDNSTATLCLGHHAVPNGTLVKTITNDQIEVTNATELVQSSSTGRICDSPHRILDGKNCTLIDALLGDPHCDGFQNEKWDLFVERSKAFSNCYPYDVPDYASLRSLVASSGTLEFINEGFNWTGVTQNGGSYACKRGPDKSFFSRLNWLYESESTYPVLNVTMPNNDNFDKLYIWGVHHPSTDKEQTKLYVQASGRVTVSTKRSQQTIIPNVGSRPWVRGLSSRISIYWTIVKPGDILLINSNGNLIAPRGYFKIRTGKSSIMRSDAPIGTCSSECITPNGSIPNDKPFQNVNKITYGACPKYVKQNTLKLATGMRNVPEKQTRGIFGAIAGFIENGWEGMIDGWYGFRHQNSEGTGQAADLKSTQAAIDQINGKLNRVIEKTNEKFHQIEKEFSEVEGRIQDLEKYVEDTKIDLWSYNAELLVALENQHTIDLTDSEMNKLFEKTRRQLRENAEDMGNGCFKIYHKCDNACIGSIRNGTYDHDVYRDEALNNRFQIKGVELKSGYKDWILWISFAISCFLLCVVLLGFIMWACQKGNIRCNICI

SEQ ID NO: 9100 - protein, 566 aa, synthetic construct; identical to SEQ ID NO: 915
  REGION 1..566: note = hemagglutinin__InfluenzaA__AFM72021

SEQ ID NO: 9101 - protein, 566 aa, synthetic construct
  REGION 1..566: note = hemagglutinin__InfluenzaA__AFM72032
MKTIIALSYMFCLVFAQNLPGNDNSTATLCLGHHAVPNGTLVKTITNDQIEVTNATELVQSSSTGRICDSPHRILDGKNCTLIDALLGDPHCDGFQNEKWDLFVERSKAFSNCYPYDVPDYASLRSLVASSGTLEFINEGFNWTGVTQSGGSYTCKRGSNNSFFSRLNWLYESESKYPVLNVTMPNNGKFDKLYIWGIHHPSTDKEQTNLYIRASGRVTVSTKRSQQTVIPNIGSRPWVRGLSSRISIYWTIVKPGDILLINSTGNLIAPRGYFKIRTGKSSIMRSDAPIGTCSSECITPNGSIPNDKPFQNVNKITYGACPRYVKQNTLKLATGMRNVPEKQTRGIFGAIAGFIENGWEGMVDGWYGFRHQNSEGTGQAADLKSTQAAIDQINGKLNRVIEKTNEKFHQIEKEFSEVEGRIQDLEKYVEDTKIDLWSYNAELLVALENQHTIDLTDSEMNKLFEKTRKQLRENAEDMGNGCFKIYHKCDNACIGSIRNGTYDHDVYRDEALNNRFQIKGVELKSGYKDWILWISFAISCFLLCVVLLGFIMWACQKGNIRCNICI

SEQ ID NO: 9102 - protein, 566 aa, synthetic construct
  REGION 1..566: note = hemagglutinin__InfluenzaA__AFM72043
MKTIIALSYMFCLVFAQNLPGNDNSTATLCLGHHAVPNGTLVKTITNDQIEVTNATELVQSSSTGRICDSPHRILDGKNCTLIDALLGDPHCDGFQNEKWDLFVERSKAFSNCYPYDVPDYASLRSLVASSGTLEFINEGFNWTGVTQSGGSSTCKRGSNNSFFSRLNWLYESESKYPVLNVTMPNNGKFDKLYIWGIHHPSTDKEQTNLYIRASGRVTVSTKRSQQTVIPNIGSRPWVRGLSSRISIYWTIVKPGDILLINSTGNLIAPRGYFKIRTGKSSIMRSDAPIGTCSSECITPNGSIPNDKPFQNVNKITYGACPRYVKQNTLKLATGMRNVPEKQTRGIFGAIAGFIENGWEGMVDGWYGFRHQNSEGTGQAADLKSTQAAIDQINGKLNRVIEKTNEKFHQIEKEFSEVEGRIQDLEKYVEDTKIDLWSYNAELLVALENQHTIDLTDSEMNKLFEKTRKQLRENAEDMGNGCFKIYHKCDNACIGSIRNGTYDHDVYRDEALNNRFQIKGVELKSGYKDWILWISFAISCFLLCVVLLGFIMWACQKGNIRCNICI

SEQ ID NO: 9103 - protein, 566 aa, synthetic construct
  REGION 1..566: note = hemagglutinin__InfluenzaA__AFM72054
MKAKLLVLLCALSATDADTICIGYHANNSTDTVDTVLEKNVTVTHSVNLLEDNHNGKLCKLKGIAPLQLGKCSIAGWILGNPECESLFSKKSWSYIAETPNSENGTCYPGYFADYEELREQLSSVSSFERFEIFPKESSWPKHNVTKGVTAACSHKGKSSFYRNLLWLTEKNGSYPNLSKSYVNNKEKEVLVLWGVHHPSNIEDQKTIYRKENAYVSVVSSHYNRRFTPEIAKRPKVRNQEGRINYYWTLLEPGDTIIFEANGNLIAPWYAFALSRGFGSGIITSNASMDECDAKCQTPQGAINSSLPFQNVHPVTIGECPKYVRSTKLRMVTGLRNIPSIQSRGLFGAIAGFIEGGWTGMIDGWYGYHHQNEQGSGYAADQKSTQNAINGITNKVNSIIEKMNTQFTAVGKEFNKLEKRMENLNKKVDDGFLDIWTYNAELLVLLENERTLDFHDSNVKNLYEKVKSQLKNNAKEIGNGCFEFYHKCNNECMESVKNGTYDYPKYSEESKLNREKIDGVKLESMGVYQILAIYSTVASSLVLLVSLGAISFWMCSNGSLQCRICI

SEQ ID NO: 9104 - protein, 566 aa, synthetic construct; identical to SEQ ID NO: 9103
  REGION 1..566: note = hemagglutinin__InfluenzaA__AFM72065

SEQ ID NO: 9105 - protein, 566 aa, synthetic construct
  REGION 1..566: note = hemagglutinin__InfluenzaA__AFM72087
MKTIIALSYIFCLVFAQKLPGNDNSTATLCLGHHAVPNGTLVKTITNDQIEVTNATELVQSSSTGRICDSPHRILDGKNCTLIDALLGDPHCDGFQNEKWDLFIERSKAFSNCYPYDVPDYASLRSLVASSGTLEFINEGFNWTGVTQSGGSYTCKRGSVNSFFSRLNWLYESEYKYPALNVTMPNNGKFDKLYIWGVHHPSTEKEQTNLYVRASGRVTVSTKRSQQTVIPNIGSSPWVRGLSSRISIYWTIVKPGDILLINSTGNLIAPRGYFKIRTGKSSIMRSDAPIGTCSSECITPNGSIPNDKPFQNVNKITYGACPRYVKQNTLKLATGMRNVPEKQTRGIFGAIAGFIENGWEGMVDGWYGFRHQNSEGTGQAADLKSTQAAIDQINGKLNRLIEKTNEKFHQIEKEFSEVEGRIQDLEKYVEDTKIDLWSYNAELLVALENQYTIDLTDSEMNKLFEKTRKQLRENAEDMGNGCFKIYHKCDNACIGSIRNGTYDHDVYRDEALNNRFQIKGVELKSGYKDWILWISFAISCFLLCVVLLGFIMWACQKGNIRCNICI

SEQ ID NO: 9106 - protein, 566 aa, synthetic construct
  REGION 1..566: note = hemagglutinin__InfluenzaA__AFM72098
MKTIIALSYIFCLVFAQKLPGNDNSTATLCLGHHAVPNGTLVKTITNDQIEVTNATELVQSSSTGRICDSPHRILDGKNCTLIDALLGDPHCDGFQNEKWDLFVERSKAYSNCYPYDVPDYASLRSLVASSGTLEFINEDFNWTGVTQSGGSYACKRGSVNSFFSRLNWLYKSEYKYPALNVTMPNNGKFDKLYIWGVHHPVTDREQTNLYVRASGRVTVSTKRSQQTVIPNIGSRPWVRGLSSRISIYWTIVKPGDILLINSTGNLIAPRGYFKIRTGKSSIMRSDAPIGTCSSECITPNGSIPNDKPFQNVNKITYGACPRYVKQNTLKLATGMRNVPEKQTRGIFGAIAGFIENGWEGMVDGWYGFRHQNSEGTGQAADLKSTQAAIDQINGKLNRLIEKTNEKFHQIEKEFSEVEGRIQDLEKYVEDTKIDLWSYNAELLVALENQHTIDLTDSEMNKLFEKTRKQLRENAEDMGNGCFKIYHKCDNACIGSIRNGTYDHDVYRDEALNNRFQIKGVELKSGYKDWILWISFAISCFLLCVVLLGFIMWACQKGNIRCNICI

SEQ ID NO: 9107 - protein, 566 aa, synthetic construct
  REGION 1..566: note = hemagglutinin__InfluenzaA__AFM72109
MKTIIALSYIFCLVFAQKLPGNDNSTATLCLGHHAVPNGTLVKTITNDQIEVTNATELVQSSSTGRICDSPHRILDGKNCTLIDALLGDPHCDGFQNEKWDLFVERSKAYSNCYPYDVPDYASLRSLVASSGTLEFINEDFNWTGVTQSGGSYACKRGSVNSFFSRLNWLHKSEYKYPALNVTMPNNGKFDKLYIWGVHHPITDREQTNLYVRASGRVTVSTKRSQQTVIPNIGSRPWVRGLSSRISIYWTIVKPGDILLINSTGNLIAPRGYFKIRTGKSSIMRSDAPIGTCSSECITPNGSIPNDKPFQNVNKITYGACPRYVKQNTLKLATGMRNVPEKQTRGIFGAIAGFIENGWEGMVDGWYGFRHQNSEGTGQAADLKSTQAAIDQINGKLNRLIEKTNEKFHQIEKEFSEVEGRIQDLEKYVEDTKIDLWSYNAELLVALENQHTIDLTDSEMNKLFEKTRRQLRENAEDMGNGCFKIYHKCDNACIGSIRNGTYDHDVYRDEALNNRFQIKGVELKSGYKDWILWISFAISCFLLCVVLLGFIMWACQKGNIRCNICI

SEQ ID NO: 9108 - protein, 566 aa, synthetic construct
  REGION 1..566: note = hemagglutinin__InfluenzaA__AFM72120
MKTIIALSYIFCLVFAQKLPGNDNSTATLCLGHHAVPNGTLVKTITNDQIEVTNATELVQSSSTGRICDSPHRILDGKNCTLIDALLGDPHCDGFQNEKWDLFVERSKAYSNCYPYDVPDYASLRSLVASSGTLEFINEDFNWTGVTQSGGSYACKRGSVNSFFSRLNWLHESEYKYPALNVTMPNNGKFDKLYIWGVHHPITDREQTNLYVRASGRVTVSTKRSQQTVIPNIGFRPWVRGLSSRISIYWTIVKPGDILLINSTGNLIAPRGYFKIRNGKSSIMRSDAPIGTCSSECITPNGSIPNDKPFQNVNKITYGACPRYVKQNTLKLATGMRNVPEKQTRGIFGAIAGFIENGWEGMVDGWYGFRHQNSEGTGQAADLKSTQAAIDQINGKLNRLIEKTNEKFHQIEKEFSEVEGRIQDLEKYVEDTKIDLWSYNAELLVALENQHTIDLTDSEMNKLFEKTRKQLRENAEDMGNGCFKIYHKCDNACIGSIRNGTYDHDVYRDEALNNRFQIKGVELKSGYKDWILWISFAISCFLLCVVLLGFIMWACQKGNIRCNICI

SEQ ID NO: 9109 - protein, 566 aa, synthetic construct
  REGION 1..566: note = hemagglutinin__InfluenzaA__AFM72131
MKTIIALSYILCLVFAQKLPGNDNSTATLCLGHHAVPNGTLVKTITNDQIEVTNATELVQSSSTGRICDSPHRILDGKDCTLIDALLGDPHCDGFQNKEWDLFVERSKAYSNCYPYDVPDYASLRSLVASSGTLEFINEDFNWNGVAQSGESYACKRGSVKSFFSRLNWLHESEYKYPALNVTMPNNGKFDKLYIWGVHHPSTDREQTKLYVRASGRVTVSTKRSQQTVIPNIGSRPWVRGLSSRISIYWTIVKPGDILLINSTGNLIAPRGYFKIRTGKSSIMRSDAPIGTCSSECITPNGSIPNDKPFQNVNRITYGACPRYVKQNTLKLATGMRNVPEKQTRGIFGAIAGFIENGWEGMVDGWYGFRHQNSEGTGQAADLKSTQAAIDQINGKLNRLIEKTNEKFHQIEKEFSEVEGRIQDLEKYVEDTKIDLWSYNAELLVALENQHTIDLTDSEMNKLFEKTRKQLRENAEDMGNGCFKIYHKCDNACIGSIRNGTYDHDVYRDEALNNRFQIKGVELKSGYKDWILWISFAISCFLLCVVLLGFIMWACQKGNIRCNICI

SEQ ID NO: 9110 - protein, 566 aa, synthetic construct
  REGION 1..566: note = hemagglutinin__InfluenzaA__AFM72142
MKTIIALSYISCLVFAQKLPGNDNSTATLCLGHHAVPNGTLVKTITNDQIEVTNATELVQSSSTGRICDSPHRILDGKNCTLIDALLGDPHCDGFQNKEWDLFVERSKAYSNCYPYDVPDYASLRSLVASSGTLEFINEDFNWTGVAQDGGSYACKRGSVNSFFSRLNWLHKLEYKYPALNVTMPNNGKFDKLYIWGVHHPSTDRDQTSLYVRASGRVTVSTKRSQQTVIPNIGSRPWVRGQSSRISIYWTIVKPGDILLINSTGNLIAPRGYFKIRNGKSSIMRSDAPIGNCSSECITPNGSIPNDKPFQNVNRITYGACPRYVKQNTLKLATGMRNVPEKQTRGIFGAIAGFIENGWEGMVDGWYGFRHQNSEGTGQAADLKSTQAAIDQINGKLNRLIEKTNEKFHQIEKEFSEVEGRIQDLEKYVEDTKIDLWSYNAELLVALENQHTIDLTDSEMNKLFERTRKQLRENAEDMGNGCFKIYHKCDNACIGSIRNGTYDHDVYRDEALNNRFQIKGVELKSGYKDWILWISFAISCFLLCVVLLGFIMWACQKGNIRCNICI

SEQ ID NO: 9111 - protein, 566 aa, synthetic construct
  REGION 1..566: note = hemagglutinin__InfluenzaA__AFM72153
MKTIIALSYILCLVFAQKLPGNDNSTATLCLGHHAVPNGTLVKTITNDQIEVTNATELVQSSSTGRICGSPHRILDGKNCTLIDALLGDPHCDGFQNKEWDLFVERSKAYSNCYPYDVPDYASLRSLVASSGTLEFINEDFNWTGVAQDGGSYACKRGSVNSFFSRLNWLHKLEYKYPALNVTMPNNGKFDKLYIWGVHHPSTDSDQTSLYVRASGRVTVSTKRSQQTVTPNIGSRPWVRGQSSRIGIYWTIVKPGDILLINSTGNLIAPRGYFKIRNGKSSIMRSDAPIGNCSSECITPNGSIPNDKPFQNVNRITYGACPRYVKQNTLKLATGMRNVPEKQTRGIFGAIAGFIENGWEGMVDGWYGFRHQNSEGTGQAADLKSTQAAIDQINGKLNRLIEKTNEKFHQIEKEFSEVEGRIQDLEKYVEDTKIDLWSYNAELLVALENQHTIDLTDSEMNKLFEKTRKQLRENAEDMGNGCFKIYHKCDNACIGSIRNGTYDHDVYRDEALNNRFQIKGVELKSGYKDWILWISFAISCFLLCVVLLGFIMWACQKGNIRCNICI

SEQ ID NO: 9112 - protein, 566 aa, synthetic construct
  REGION 1..566: note = hemagglutinin__InfluenzaA__AFM72164
MKTIIALSYILCLVFAQKLPGNDNSTATLCLGHHAVPNGTLVKTITNDQIEVTNATELVQSSPTGRICDSPHRILDGKNCTLIDALLGDPHCDGFQNKEWDLFVERSKAYSNCYPYDVPDYASLRSLVASSGTLEFINENFNWTGVAQDGKSYACKRGSVNSFFSRLNWLHKLEYKYPALNVTMPNNGKFDKLYIWGVHHPSTDSDQTSLYVRASGRVTVSTKRSQQTVIPDIGYRPWVRGQSSRISIHWTIVKPGDILLINSTGNLIAPRGYFKIRNGKSSIMRSDAPIGNCSSECITPNGSIPNDKPFQNVNRITYGACPRYVKQNTLKLATGMRNVPEKQTRGIFGAIAGFIENGWEGMVDGWYGFRHQNSEGTGQAADLKSTQAAIDQINGKLNRLVEKTNEKFHQIEKEFSEVEGRIQDLEKYVEDTKIDLWSYNAELLVALENQHTIDLTDSEMNKLFERTRKQLRENAEDMGNGCFKIYHKCDNACIGSIRNGTYDHDVYRDEALNNRFQIKGVELKSGYKDWILWISFAISCFLLCVVLLGFIMWACQKGNIRCNICI

SEQ ID NO: 9113 - protein, 566 aa, synthetic construct
  REGION 1..566: note = hemagglutinin__InfluenzaA__AFM72175
MKTIIALSYILCLVFAQKLPGNDNSTATLCLGHHAVPNGTLVKTITNDQIEVTNATELVQSSPTGRICDSPHRILDGKNCTLIDALLGDPHCDGFQNKEWDLFVERSKAYSNCYPYDVPDYASLRSLVASSGTLEFINENFNWTGVAQDGKSYACKRGSVNSFFSRLNWLHKLEYKYPALNVTMPNNGKFDKLYIWGVHHPSTDSDQTNLYVRASGRVTVSTKRSQQTVIPDIGYRPWVRGQSSRISIHWTIVKPGDILLINSTGNLIAPRGYFKIRNGKSSIMRSDAPIGNCSSECITPNGSIPNDKPFQNVNRITYGACPRYVKQNTLKLATGMRNVPEKQTRGIFGAIAGFIENGWEGMVDGWYGFRHQNSEGTGQAADLKSTQAAIDQINGKLNRLVEKTNEKFHQIEKEFSEVEGRIQDLEKYVEDTKIDLWSYNAELLVALENQHTIDLTDSEMNKLFERTRKQLRENAEDMGNGCFKIYHKCDNACIGSIRNGTYDHDVYRDEALNNRFQIKGVELKSGYKDWILWISFAISCFLLCVVLLGFIMWACQKGNIRCNICI

SEQ ID NO: 9114 - protein, 566 aa, synthetic construct
  REGION 1..566: note = hemagglutinin__InfluenzaA__AFM72197
MKTIIALSYILCMVFAQKLPGNDNSTATLCLGHHAVPNGTLVKTITNDQIEVTNATELVQSSSTGRICDSPHRILDGKNCTLIDALLGDPHCDGFQNKEWDLFVERSKAYSNCYPYDVPDYASLRSLVASSGTLEFNNESFNWTGVAQNGTSYACKRRSVKSFFSRLNWLHKLEYKYPALNVTMPNNDKFDKLYIWGVHHPITDSEQTSLYVQASGRVTVSTKRSQQTVIPNIGYRPWVRGVSSRISIYWTIVKPGDILLINSTGNLIAPRGYFKIRSGKSSIMRSDAPIGNCNSECITPNGSIPNDKPFQNVNRITYGACPRYVKQNTLKLATGMRNVPEKQTRGIFGAIAGFIENGWEGMVDGWYGFRHQNSEGTGQAADLKSTQAAINQINGKLNRLIEKTNEKFHQIEKEFSEVEGRIQDLEKYVEDTKIDLWSYNAELLVALENQHTIDLTDSEMNKLFERTRKQLRENAEDMGNGCFKIYHKCDNACIGSIRNGTYDHDVYRDEALNNRFQIKGVELKSGYKDWILWISFAISCFLLCVVLLGFIMWACQKGNIKCNICI

SEQ ID NO: 9115 - protein, 566 aa, synthetic construct
  REGION 1..566: note = hemagglutinin__InfluenzaA__AFM72208
MKTIIALSYILCLVFAQKLPGNDNSTATLCLGHHAVPNGTLVKTITNDQIEVTNATELVQSSSTGRICDSPHQILDGENCTLIDALLGDPHCDGFQNKEWDLFVERSKAYSNCYPYDVPDYASLRSLVASSGTLEFNNESFNWTGVAQNGTSSACKRRSINSFFSRLNWLHQLKYRYPALNVTMPNNDKFDKLYIWGVHHPSTDSDQTSLYTQASGRVTVSTKRSQQTVIPNIGSRPWVRGISSRISIYWTIVKPGDILLINSTGNLIAPRGYFKIRSGKSSIMRSDAPIGKCNSECITPNGSIPNDKPFQNVNRITYGACPRYVKQNTLKLATGMRNVPEKQTRGIFGAIAGFIENGWEGMMDGWYGFRHQNSEGTGQAADLKSTQAAINQINGKLNRLIEKTNEKFHQIEKEFSEVEGRIQDLEKYVEDTKIDLWSYNAELLVALENQHTIDLTDSEMNKLFERTRKQLRENAEDMGNGCFKIYHKCDNACIGSIRNGTYDHDVYRDEALNNRFQIKGVELKSGYKDWILWISFAISCFLLCVVLLGFIMWACQKGNIRCNICI

SEQ ID NO: 9116 - protein, 566 aa, synthetic construct
  REGION 1..566: note = hemagglutinin__InfluenzaA__AFM72219
MKTIIALSYILCLVFAQKLPGNDNSTATLCLGHHAVPNGTLVKTITNDQIEVTNATELVQSSSTGRICDSPHQILDGENCTLIDALLGDPHCDGFQNKEWDLFVERSKAYSNCYPYDVPDYASLRSLVASSGTLEFNNESFNWTGVAQNGTSSACKRRSINSFFSRLNWLHQLKYRYPALNVTMPNNDKFDKLYIWGVHHPSTDSDQTSLYTQASGRVTVSTKRSQQTVIPNIGSRPWVRGISSRISIYWTIVKPGDILLIKSTGNLIAPRGYFKIRSGKSSIMRSDAPIGKCNSECITPNGSIPNDKPFQNVNRITYGACPRYVKQNTLKLATGMRNVPEKQTRGIFGAIAGFIENGWEGMMDGWYGFRHQNSEGTGQAADLKSTQAAINQINGKLNRLIEKTNEKFHQIEKEFSEVEGRIQDLEKYVEDTKIDLWSYNAELLVALENQHTIDLTDSEMNKLFERTRKQLRENAEDMGNGCFKIYHKCDNACIGSIRNGTYDHDVYRDEALNNRFQIKGVELKSGYKDWILWISFAISCFLLCVVLLGFIMWACQKGNIRCNICI

SEQ ID NO: 9117 - protein, 565 aa, synthetic construct
  REGION 1..565: note = hemagglutinin__InfluenzaA__AFM72230
MKAKLLVLLCTFTATYADTICIGYHANNSTDTVDTVLEKNVTVTHSVNLLEDSHNGKLCLLKGIAPLQLGNCSVAGWILGNPECELLISKKSWSYIVETPNPENGTCYPGYFADYEELREQLSSVSSFERFEIFPKESSWPNHTVTGVSASCSHNGKSSFYRNLLWLTGKNGLYPNLSKSYVNNKEKEVLVLWGVHHPPNIGNQRALYHTENAYVSVVSSHYSRRFTPEIAKRPKVRDQEGRINYYWTLLEPGDTIIFEANGNLIAPWYAFALSRGFGSGIITSNAPMDECDAKCQTPQGAINSSLPFQNVHPVTIGECPKYVRSAKLRMVTGLRNIPSIQSRGLFGAIAGFIEGGWTGMVDGWYGYHHQNEQGSGYAADQKSTQNAINGITNKVNSVIEKMNTQFTAVGKEFNKLERRMENLNKKVDDGFLDIWTYNAELLVLLENERTLDFHDSNVKNLYEKVKSQLKNNAKEIGNGCFEFYHKCNNECMESVKNGTYDYPKYSEESKLNREKIDGVKLESMGVYQILAIYSTVASSLVLLVSLGAISFWMCSNGSLQCRICI

SEQ ID NO: 9118 - protein, 566 aa, synthetic construct
  REGION 1..566: note = hemagglutinin__InfluenzaA__AFM72246
MKTIIALSYILCLVFAQKLPGNDNSTATLCLGHHAVSNGTLVKTITNDQIEVTNATELVQSSSTGRICDSPHQILDGENCTLIDALLGDPHCDGFQNKEWDLFVERSKAYSNCYPYDVPDYASLRSLVASSGTLEFNNESFNWTGVAQNGTSSACKRRSNKSFFSRLNWLHQLKYKYPALNVTMPNNEKFDKLYIWGVHHPSTDSDQISIYAQASGRVTVSTKRSQQTVIPNIGSSPWVRGVSSRISIYWTIVKPGDILLINSTGNLIAPRGYFKIRSGKSSIMRSDAPIGKCNSECITPNGSIPNDKPFQNVNRITYGACPRYVKQNTLKLATGMRNVPEKQTRGIFGAIAGFIENGWEGMVDGWYGFRHQNSEGTGQAADLKSTQAAINQINGKLNRLIEKTNEKFHQIEKEFSEVEGRIQDLEKYVEDTKIDLWSYNAELLVALENQHTIDLTDSEMNKLFERTKKQLRENAEDMGNGCFKIYHKCDNACIGSIRNGTYDHDVYRDEALNNRFQIKGVELKSGYKDWILWISFAISCFLLCVVLLGFIMWACQKGNIRCNICI

SEQ ID NO: 9119 - protein, 566 aa, synthetic construct
  REGION 1..566: note = hemagglutinin__InfluenzaA__AFM72257
MKTIIALSYILCLVFAQKLPVNDNSTATLCLGHHAVPNGTLVKTITNDHIEVTNATELVQSSSTGRICDSPHQILDGENCTLIDALLGDPHCDGFQNKEWDLFVERSTAYSNCYPYDVPDYASLRSLVASSGTLEFNNESFNWTGVAQNGTSSACKRRSIKSFFSRLNWLHQLNYKYPALNVTMPNNEKFDKLYIWGVHHPSTDSDQISIYAQASGRVTVSTKRSQQTVIPNIGSRPWVRGVSSGISIYWTIVKPGDILLINSTGNLIAPRGYFKIRSGKSSIMRSNAPIGKCNSECITPNGSIPNDKPFQNVNRITYGACPRYVKQNTLKLATGMRNVPEKQTRGIFGAIAGFIENGWEGMVDGWYGFRHQNSEGTGQAADLKSTQAAINQINGKLNRLIEKTNEKFHQIEKEFSEVEGRIQDLEKYVEDTKIDLWSYNAELLVALENQHTIDLTDSEMNKLFERTRKQLRENAEDMGNGCFKIYHKCDNACIGSIRNGTYDHDVYRDEALNNRFQIKGVELKSGYKDWILWISFAISCFLLCVVLLGFIMWACQKGNIRCNICI

SEQ ID NO: 9120 - protein, 566 aa, synthetic construct
  REGION 1..566: note = hemagglutinin__InfluenzaA__AFM72268
MKTIIALSYILCLVFAQKLPVNDNSTATLCLGHHAVPNGTLVKTITNDHIEVTNATELVQSSSTGRICDSPHQILDGENCTLIDALLGDPHCDGFQNKEWDLFVERSTAYSNCYPYDVPDYASLRSLVASSGTLEFNNESFNWTGVAQNGTSSACKRRSIKSFFSRLNWLHQLNYKYPALNVTMPNNEKFDKLYIWGVHHPNTDSDQISIYAQASGRVTVSTKRSQQTVIPNIGSRPWVRGVSSGISIYWTIVKPGDILLINSTGNLIAPRGYFKIRSGKSSIMRSNAPIGKCNSECITPNGSIPNDKPFQNVNRITYGACPRYVKQNTLKLATGMRNVPEKQTRGIFGAIAGFIENGWEGMVDGWYGFRHQNSEGTGQAADLKSTQAAINQINGKLNRLIEKTNEKFHQIEKEFSEVEGRIQDLEKYVEDTKIDLWSYNAELLVALENQHTIDLTDSEMNKLFERTRKQLRENAEDMGNGCFKIYHKCDNACIGSIRNGTYDHDVYRDEALNNRFQIKGVELKSGYKDWILWISFAISCFLLCVVLLGFIMWACQKGNIRCNICI

SEQ ID NO: 9121 - protein, 566 aa, synthetic construct
  REGION 1..566: note = hemagglutinin__InfluenzaA__AFM72279
MKTIIALSYILCLVFAQKLPVNDNSTATLCLGHHAVPNGTLVKTITNDHIEVTNATELVQSSSTGRICDSPHQILDGENCTLIDALLGDPHCDGFQNKEWDLFVERSTAYSNCYPYDVPDYASLRSLVASSGTLEFNNESFNWTGVAQNGTSSACKRRSIKSFFSRLNWLHQLKYKYPALNVTMPNNEKFDKLYIWGVHHPSTDSDQISIYAQASGRVTVSTKRSQQTVIPNIGSKHWVRGVSSRISIYWTIVKPGDILLINSTGNLIAPRGYFKIRSGKSSIMRSNAPIGKCNSECITPNGSIPNDKPFQNVNRITYGACPRYVKQNTLKLATGMRNVPEKQTRGIFGAIAGFIENGWEGMVDGWYGFRHQNSEGTGQAADLKSTQAAINQINGKLNRLIEKTNEKFHQIEKEFSEVEGRIQDLEKYVEDTKIDLWSYNAELLVALENQHTIDLTDSEMNKLFERTRKQLRENAEDMGNGCFKIYHKCDNACIGSIRNGTYDHDVYRDEALNNRFQIKGVELKSGYKDWILWISFAISCFLLCVVLLGFIMWACQKGNIRCNICI

SEQ ID NO: 9122 - protein, 566 aa, synthetic construct
  REGION 1..566: note = hemagglutinin__InfluenzaA__AFM72290
MKTIIALSYILCLVFAQKLPVNDNSTATLCLGHHAVPNGTLVKTITNDHIEVTNATELVQSSSTGRICDSPHQILDGENCTLIDALLGDPHCDGFQNKEWDLFVERSTAYSNCYPYDVPDYASLRSLVASSGTLEFNNESFNWTGVAQNGTSSACKRRSIKSFFSRLNWLHQLKDKYPALNVTMPNNEKFDKLYIWGVHHPSTDSDQISIYAQASGRVTVSTKRSQQTVIPNIGSKHWVRGVSSRISIYWTIVKPGDILLINSTGNLIAPRGYFKIRSGKSSIMRSNAPIGKCNSECITPNGSIPNDKPFQNVNRITYGACPRYVKQNTLKLATGMRNVPEKQTRGIFGAIAGFIENGWEGMVDGWYGFRHQNSEGTGQAADLKSTQAAINQINGKLNRLIEKTNEKFHQIEKEFSEVEGRIQDLEKYVEDTKIDLWSYNAELLVALENQHTIDLTDSEMNKLFERTRKQLRENAEDMGNGCFKIYHKCDNACIGSIRNGTYDHDVYRDEALNNRFQIKGVELKSGYKDWILWISFAISCFLLCVVLLGFIMWACQKGNIRCNICI

SEQ ID NO: 9123 - protein, 566 aa, synthetic construct
  REGION 1..566: note = hemagglutinin__InfluenzaA__AFM72301
MKTIIALSYILCLVFSQKLPGNDNSTATLCLGHHAVPNGTIVKTITNDQIEVTNATELVQSSSTGGICDSPHQILDGENCTLIDALLGDPQCDGFQNKKWDLFVERSKAYSNCYPYDVPDYASLRSLVASSGTLEFNNESFNWAGVTQNGTSSACKRRSNKSFFSRLNWLTQLKYKYPALNVTMPNNEKFDKLYIWGVHHPVTDSDQISLYAQASGRITVSTKRSQQTVIPNIGYRPRVRDISSRISIYWTIVKPGDILLINSTGNLIAPRGYFKIRSGKSSIMRSDAPIGKCNSECITPNGSIPNDKPFQNVNRITYGACPRYVKQNTLKLATGMRNVPEKQTRGIFGAIAGFIENGWEGMVDGWYGFRHQNSEGTGQAADLKSTQAAINQINGKLNRLIGKTNEKFHQIEKEFSEVEGRIQDLEKYVEDTKIDLWSYNAELLVALENQHTIDLTDSEMNKLFERTKKQLRENAEDMGNGCFKIYHKCDNACIESIRNGTYDHDVYRDEALNNRFQIKGVELKSGYKDWILWISFAISCFLLCVALLGFIMWACQKGNIRCNICI

SEQ ID NO: 9124 - protein, 566 aa, synthetic construct
  REGION 1..566: note = hemagglutinin__InfluenzaA__AFM72312
MKTIIALSYILCLVFAQKLPGNDNSTATLCLGHHAVPNGTIVKTITNDQIEVTNATELVQSSSTGGICDSPHQILDGENCTLIDALLGDPQCDGFQNKKWDLFVERSKAYSNCYPYDVPDYASLRSLVASSGTLEFNNESFNWTGVTQNGTSSACKRRSNKSFFSRLNWLTHLKYKYPALNVTMPNNEKFDKLYIWGVHHPVTDSDQINLYAQASGRITVSTKRSQQTVIPNIGYRPRVRDIPSRISIYWTIVKPGDILLINSTGNLIAPRGYFKIRSGKSSIMRSDAPIGKCNSECITPNGSIPNDKPFQNVNRITYGACPRYVKQNTLKLATGMRNVPEKQTRGIFGAIAGFIENGWEGMVDGWYGFRHQNSEGTGQAADLKSTQAAINQINGKLNRLIGKTNEKFHQIEKEFSEVEGRIQDLEKYVEDTKIDLWSYNAELLVALENQHTIDLTDSEMNKLFERTKKQLRENAEDMGNGCFKIYHKCDNACIGSIRNGTYDHDVYRDEALNNRFQIKGVELKSGYKDWILWISFAISCFLLCVALLGFIMWACQKGNIRCNICI

SEQ ID NO: 9125 - protein, 566 aa, synthetic construct
  REGION 1..566: note = hemagglutinin__InfluenzaA__AFM72323
MKAIIALSYILCLVFAQKLPGNDNSTATLCLGHHAVPNGTIVKTITNDQIEVTNATELVQSSSTGGICDSPHQILDGENCTLIDALLGDPQCDGFQNKKWDLFVERSKAYSNCYPYDVPDYASLRSLVASSGTLEFNNESFNWTGVTQNGTSSACKRRSNKSFFSRLNWLTHLKYKYPALNVTMPNNEKFDKLYIWGVHHPVTDSDQINLYAQASGRITVSTKRSQQTVIPNIGYRPRVRDNPSRISIYWTIVKPGDILLINSTGNLIAPRGYFKIRSGKSSIMRSDAPIGKCNSECITPNGSIPNDKPFQNVNRITYGACPRYVKQNTLKLATGMRNVPEKQTRGIFGAIAGFIENGWEGMVDGWYGFRHQNSEGTGQAADLKSTQAAINQINGKLNRLIGKTNEKFHQIEKEFSEVEGRIQDLEKYVEDTKIDLWSYNAELLVALENQHTIDLTDSEMNKLFERTKKQLRENAEDMGNGCFKIYHKCDNACIGSIRNGTYDHDVYRDEALNNRFQIKGVELKSGYKDWILWISFAISCFLLCVALLGFIMWACQKGNIRCNICI

SEQ ID NO: 9126 - protein, 566 aa, synthetic construct
  REGION 1..566: note = hemagglutinin__InfluenzaA__AFM72334
MKTIIALSYILCLVFAQKLPGNDNSTATLCLGHHAVPNGTIVKTITNDQIEVTNATELVQSSSTGEICNSPHQILDGENCTLIDALLGDPQCDGFQNKKWDLFVERSKAHSNCYPYDVPDYASLRSLVASSGTLEFNNESFNWTGVTQNGTSSACIRRSNNSFFSRLNWLTHLNFKYPALNVTMPNNEQFDKLYIWGVLHPGTYKDQIFLYAQASGRITVSTKRSQQAVIPNIGSRPRVRNIPSRVSIYWTIVKPGDILLINSTGNLIAPRGYFKIRSGKSSIMRSDAPIGKCNSACITPNGSIPNDKPFQNVNRITYGACPRYVKQNTLKLATGMRNVPEKQTRGIFGAIAGFIENGWEGMVDGWYGFRHQNSEGRGQAADLKSTQAAIDQINGKLNRLIGKTNEKFHQIEKEFSEVEGRIQDLEKYVEDTKIDLWSYNAELLVALENQHTIDLTDSEMNKLFEKTKKQLRENAEDMGNGCFKIYHKCDNACIGSIRNGTYDHDVYRDEALNNRFQIKGVELKSGYKDWILWISFAISCFLLCVALLGFIMWACQKGNIRCNICI

SEQ ID NO: 9127 - protein, 566 aa, synthetic construct
  REGION 1..566: note = hemagglutinin__InfluenzaA__AFM72345
MKTIIALSYILCLVFAQKLPGNDNSTATLCLGHHAVPNGTIVKTITNDQIEVTNATELVQSSSTGGICDSPHQILDGENCTLIDALLGDPQCDGFQNKKWDLFVERSKAYSNCYPYDVPDYASLRSLVASSGTLEFNNESFDWTGVTQNGTSSACKRRSNKSFFSRLNWLTHLKYKYPALNVTMPNNEKFDKLYIWGVHHPVTDSDQISLYTQASGRITVSTKRSQQTVIPNIGFRPRVRDISSRISIYWTIVKPGDILLINSTGNLIAPRGYFKIRSGKSSIMRSDAPIGKCNSECITPNGSIPNDKPFQNVNRITYGACPRYVKQNTLKLATGMRNVPEKQTRGIFGAIAGFIENGWEGMVDGWYGFRHQNSEGTGQAADLKSTQAAINQINGKLNRLIGKTNEKFHQIEKEFSEVEGRIQDLEKYVEDTKIDLWSYNAELLVALENQHTIDLTDSEMNKLFERTKKQLRENAEDMGNGCFKIYHKCDNACIGSIRNGTYDHDVYRDEALNNRFQIKGVELKSGYKDWILWISFAISCFLLCVALLGFIMWACQKGNIRCNICI

SEQ ID NO: 9128 - protein, 566 aa, synthetic construct
  REGION 1..566: note = hemagglutinin__InfluenzaA__AFM72356
MKTIIALSYILCLVFAQKLPGNDNSTATLCLGHHAVPNGTIVKTITNDQIEVTNATELVQSSSTGGICDSPHQILDGENCTLIDALLGDPQCDGFQNKKWDLFVERSKAYSNCYPYDVPDYASLRSLVASSGTLEFNNESFNWTGVTQNGTSSACKRRSNKSFFSRLNWLTHLKFKYPALNVTMPNNEKFDKLYIWGVHHPGTDNDQINLYVQASGRITVSTKRSQQTVIPNIGSRPRVRDVPSRISIYWTIVKPGDILLISSTGNLIAPRGYFKIRSGKSSIMRSDAPIGKCNSECITPNGSIPNDKPFQNVNRITYGACPRYVKQNTLKLATGMRNVPEKQTRGIFGAIAGFIENGWEGMVDGWYGFRHQNSEGTGQAADLKSTQAAINQINGKLNRLIGKTNEKFHQIEKEFSEVEGRIQDLEKYVEDTKIDLWSYNAELLVALENQHTIDLTDSEMNKLFERTKKQLRENAEDMGNGCFKIYHKCDNACIGSIRNGTYDHDVYRDEALNNRFQIKGVELKSGYKDWILWISFAISCFLLCVALLGFIMWACQKGNIRCNICI

SEQ ID NO: 9129 - protein, 566 aa, synthetic construct
  REGION 1..566: note = hemagglutinin__InfluenzaA__AFM72367
MKTIIALSYILCLVFAQKLPGNDNSTATLCLGHHAVPNGTIVKTITNDQIEVTNATELVQSSSTGGICDSPHQILDGENCTLIDALLGDPQCDGFQNKKWDLFVERSKAYSNCYPYDVPDYASLRSLVASSGTLEFNNESFNWTGVTQNGTSSACKRRSNKSFFSRLNWLTHLKFKYPALNVTMPNNEKFDKLYIWGVHHPVTDNDQINLYAQASGRITVSTKRSQQTVIPNIGSRPRVRDVPSRISIYWTIVKPGDILLISSTGNLIAPRGYFKIRSGKSSIMRSDAPIGKCNSECITPNGSIPNDKPFQNVNRITYGACPRYVKQNTLKLATGMRNVPEKQTRGIFGAIAGFIENGWEGMVDGWYGFRHQNSEGTGQAADLKSTQAAINQINGKLNRLIGKTNEKFHQIEKEFSEVEGRIQDLEKYVEDTKIDLWSYNAELLVALENQHTIDLTDSEMNKLFERTKKQLRENAEDMGNGCFKIYHKCDNACIGSIRNGTYDHDVYRDEALNNRFQIKGVELKSGYKDWILWISFAISCFLLCVALLGFIMWACQKGNIRCNICI

SEQ ID NO: 9130 - protein, 566 aa, synthetic construct
  REGION 1..566: note = hemagglutinin__InfluenzaA__AFM72378
MKTIIALSYILCLVFAQKLPGNDNSTATLCLGHHAVPNGTIVKTITNDQIEVTNATELVQSSSTGEICNSPHQILDGENCTLIDALLGDPQCDGFQNKKWDLFVERSKAHSNCYPYDVPDYASLRSLVASSGTLEFNNESFNWTGVTQNGTSSACIRRSNNSFFSRLNWLTQLNFKYPALNVTMPNNEQFDKLYIWGVHHPVTDKDQIFLYAQASGRITVSTKRSQQAVIPNIGYRPRVRNIPSRVSIYWTIVKPGDILLINSTGNLIAPRGYFKIRSGKSSIMRSDAPIGKCNSACITPNGSIPNDKPFQNVNRITYGACPRYVKQNTLKLATGMRNVPEKQTRGIFGAIAGFIENGWEGMVDGWYGFRHQNSEGRGQAADLKSTQAAIDQINGKLNRLIGKTNEKFHQIEKEFSEVEGRIQDLEKYVEDTKIDLWSYNAELLVALENQHTIDLTDSEMNKLFEKTKKQLRENAEDMGNGCFKIYHKCDNACIGSIRNGTYDHDVYRDEALNNRFQIKGVELKSGYKDWILWISFAISCFLLCVALLGFIMWACQKGNIRCNICI

SEQ ID NO: 9131 - protein, 566 aa, synthetic construct
  REGION 1..566: note = hemagglutinin__InfluenzaA__AFM72389
MKTIIALSYILCLVFAQKLPGNDNSTATLCLGHHAVPNGTIVKTITNDQIEVTNATELVQSSSTGEICNSPHQILDGENCTLIDALLGDPQCDGFQNKKWDLFVERSKAHSNCYPYDVPDYASLRSLVASSGTLEFNNESFNWTGVTQNGTSSACIRRSNNSFFSRLNWLTHLNFKYPALNVTMPNNEQFDKLYIWGVHHPVTDKDQIFLYAQASGRITVSTKRSQQAVIPNIGYRPRVRNNPSRVSIYWTIVKPGDILLINSTGNLIAPRGYFKIRSGKSSIMRSDAPIGKCNSACITPNGSIPNDKPFQNVNRITYGACPRYVKQNTLKLATGMRNVPEKQTRGIFGAIAGFIENGWEGMVDGWYGFRHQNSEGRGQAADLKSTQAAIDQINGKLNRLIGKTNEKFHQIEKEFSEVEGRIQDLEKYVEDTKIDLWSYNAELLVALENQHTIDLTDSEMNKLFEKTKKQLRENAEDMGNGCFKIYHKCDNACIGSIRNGTYDHDVYRDEALNNRFQIKGVELKSGYKDWILWISFAISCFLLCVALLGFIMWACQKGNIRCNICI

SEQ ID NO: 9132 - protein, 566 aa, synthetic construct
  REGION 1..566: note = hemagglutinin__InfluenzaA__AFM72400
MKTIIALSYILCLVFAQKLPGIDNSTATLCLGHHAVPNGTIVKTITNDQIEVTNATELVQSSSTGEICDSPHQILDGENCTLIDALLGDPQCDGFQNKKWDLFVERSKAYSNCYPYDVPDYASLRSLVASSGTLEFNNESFNWAGVTQNGTSSACKRGSNNSFFSRLNWLTHSKFKYPALNVTMPNNEEFDKLYIWGVLHPGTDNDQIFLYAQASGRITVSTKRSQQTVIPNIGSRPRVRNIPSRISIYWTIVKPGDILLINSTGNLIAPRGYFKIRSGKSSIMRSDAPIGKCNSECITPNGSIPNDKPFQNVNRITYGACPRYVKQNTLKLATGMRNVPEKQTRGIFGAIAGFIENGWEGMVDGWYGFRHQNSEGIGQAADLKSTQAAIDQINGKLNRLIGKTNEKFHQIEKEFSEVEGRIQDLEKYVEDTKIDLWSYNAELLVALENQHTIDLTDSEMNKLFEKTKKQLRENAEDMGNGCFKIYHKCDNACIGSIRNGTYDHDVYRDEALNNRFQIKGVELKSGYKDWILWISFAISCFLLCVALLGFIMWACQKGNIRCNICI

SEQ ID NO: 9133 - protein, 566 aa, synthetic construct
  REGION 1..566: note = hemagglutinin__InfluenzaA__AFM72411
MKTIIALSYILCLVFAQKLPGIDNSTATLCLGHHAVPNGTIVKTITNDQIEVTNATELVQSSSTGEICDSPHQILDGENCTLIDALLGDPQCDGFQNKKWDLFVERSKAYSNCYPYDVPDYASLRSLVASSGTLEFNNESFNWAGVTQNGTSSACKRGSNNSFFSRLNWLTQSKFKYPALNVTMPNNEEFDKLYIWGVHHPVTDNDQIFLYAQASGRITVSTKRSQQTVIPNIGSRPRVRNIPSRISIYWTIVKPGDILLINSTGNLIAPRGYFKIRSGKSSIMRSDAPIGKCNSECITPNGSIPNDKPFQNVNRITYGACPRYVKQNTLKLATGMRNVPEKQTRGIFGAIAGFIENGWEGMVDGWYGFRHQNSEGIGQAADLKSTQAAIDQINGKLNRLIGKTNEKFHQIEKEFSEVEGRIQDFEKYVEDTKIDLWSYNAELLVALENQHTIDLTDSEMNKLFEKTKKQLRENAEDMGNGCFKIYHKCDNACIGSIRNGTYDHDVYRDEALNNRFQIKGVELKSGYKDWILWISFAISCFLLCVALLGFIMWACQKGNIRCNICI

SEQ ID NO: 9134 - protein, 566 aa, synthetic construct
  REGION 1..566: note = hemagglutinin__InfluenzaA__AFM72422
MKTIIALSYILCLVFAQKLPGNDNSTATLCLGHHAVPNGTIVKTITNDQIEVTNATELVQSSSTGEICDSPHQILDGENCTLIDALLGDPQCDGFQNKKWDLFVERSKAYSNCYPYDVPDYASLRSLVASSGTLEFNNESFNWTGVTQNGTSSACIRRSNNSFFSRLNWLTHLKFKYPALNVTMPNNEEFDKLYIWGVHHPVTDNDQIFLYAQASGRITVSTKRSQQTVIPNIGFRPRVRNIPSRISIYWTIVKPGDILLINSTGNLIAPRGYFKIRSGKSSIMRSDAPIGKCNSECITPNGSIPNDKPFQNVNRITYGACPRYVKQNTLKLATGMRNVPEKQTRGIFGAIAGFIENGWEGMVDGWYGFRHQNSEGIGQAADLKSTQAAIDQINGKLNRLIGKTNEKFHQIEKEFSEVEGRIQDLEKYAEDTKIDLWSYNAELLVALENQHTIDLTDSEMNKLFEKTKKQLRENAEDMGNGCFKIYHKCDNACIGSIRNGTYDHDVYRDEALNNRFQIKGVELKSGYKDWILWISFAISCFLLCVALLGFIMWACQKGNIRCNICI

SEQ ID NO: 9135 - protein, 566 aa, synthetic construct
  REGION 1..566: note = hemagglutinin__InfluenzaA__AFM72433
MKTIIALSYILCLVFAQKLPGNDNSTATLCLGHHAVPNGTIVKTITNDQIEVTNATELVQSSSTGEICDSPHQILDGENCTLIDALLGDPQCDGFQNKKWDLFVERSKAYSNCYPYDVPDYASLRSLVASSGTLEFNNESFNWTGVTQNGTSSACIRRSNNSFFSRLNWLTHLKFKYPALNVTMPNNEEFDKLYIWGVHHPVTDNDQIFLYAQASGRITVSTKRSQQTVIPNIGFRPRVRNNPSRISIYWTIVKPGDILLINSTGNLIAPRGYFKIRSGKSSIMRSDAPIGKCNSECITPNGSIPNDKPFQNVNRITYGACPRYVKQNTLKLATGMRNVPEKQTRGIFGAIAGFIENGWEGMVDGWYGFRHQNSEGIGQAADLKSTQAAIDQINGKLNRLIGKTNEKFHQIEKEFSEVEGRIQDLEKYAEDTKIDLWSYNAELLVALENQHTIDLTDSEMNKLFEKTKKQLRENAEDMGNGCFKIYHKCDNACIGSIRNGTYDHDVYRDEALNNRFQIKGVELKSGYKDWILWISFAISCFLLCVALLGFIMWACQKGNIRCNICI

SEQ ID NO: 9136 - protein, 566 aa, synthetic construct
  REGION 1..566: note = hemagglutinin__InfluenzaA__AFM72444
MKTIIALSYILCLVFAQKLPGNDNSTATLCLGHHAVPNGTIVKTITNDQIEVTNATELVQSSSTGEICDSPHQILDGENCTLIDALLGDPQCDGFQNKKWDLFVERSKAYSNCYPYDVPDYASLRSLVASSGTLEFNNESFNWTGVTQNGTSSACIRRSNNSFFSRLNWLTHLKFKYPALNVTMPNNEEFDKLYIWGVHHPVTDNDQILLYAQASGRITVSTKRSQQTVIPNIGFRPRVRNNPSRISIYWTIVKPGDILLINSTGNLIAPRGYFKIRSGKSSIMRSDAPIGKCNSECITPNGSIPNDKPFQNVNRITYGACPRYVKQNTLKLATGMRNVPEKQTRGIFGAIAGFIENGWEGMVDGWYGFRHQNSEGIGQAADLKSTQAAIDQINGKLNRLIGKTNEKFHQIEKEFSEVEGRIQDLEKYAEDTKIDLWSYNAELLVALENQHTIDLTDSEMNKLFEKTKKQLRENAEDMGNGCFKIYHKCDNACIGSIRNGTYDHDVYRDEALNNRFQIKGVELKSGYKDWILWISFAISCFLLCVALLGFIMWACQKGNIRCNICI

SEQ ID NO: 9137 - protein, 566 aa, synthetic construct
  REGION 1..566: note = hemagglutinin__InfluenzaA__AFM72455
MKTIIALSYILCLVFAQKLPGNDNSTATLCLGHHAVPNGTIVKTITNDQIEVTNATELVQSSSTGEICDSPHQILDGENCTLIDALLGDPQCDGFQNKKWDLFVERSKAYSNCYPYDVPDYASLRSLVASSGTLEFNNESFNWTGVTQNGTSSACIRRSNNSFFSRLNWLTQLKFKYPALNVTMPNNEEFDKLYIWGVHHPVTDNDQIFLYAQASGRITVSTKRSQQTVIPNIGFRPRVRNNPSRISIYWTIVKPGDILLINSTGNLIAPRGYFKIRSGKSSIMRSDAPIGKCNSECITPNGSIPNDKPFQNVNRITYGACPRYVKQNTLKLATGMRNVPEKQTRGIFGAIAGFIENGWEGMVDGWYGFRHQNSEGIGQAADLKSTQAAIDQINGKLNRLIGKTNEKFHQIEKEFSEVEGRIQDLEKYAEDTKIDLWSYNAELLVALENQHTIDLTDSEMNKLFEKTKKQLRENAEDMGNGCFKIYHKCDNACIGSIRNGTYDHDVYRDEALNNRFQIKGVELKSGYKDWILWISFAISCFLLCVALLGFIMWACQKGNIRCNICI

SEQ ID NO: 9138 - protein, 566 aa, synthetic construct
  REGION 1..566: note = hemagglutinin__InfluenzaA__AFM72466
MKTIIALSYILCLVFAQKLPGNDNSTATLCLGHHAVPNGTIVKTITNDQIEVTNATELVQSSSTGEICDSPHQILDGENCTLIDALLGDPQCDGFQNKKWDLFVERSKAYSNCYPYDVPDYASLRSLVASSGTLEFNNESFNWTGVTQNGTSSACIRRSNNSFFSRLNWLTHLKFKYPALNVTMPNNEEFDKLYIWGVHHPVTDKDQIFLYAQASGRITVSTKRSQQTVIPNIGFRPRVRNNPSRISIYWTIVKPGDILLINSTGNLIAPRGYFKIRSGKSSIMRSDAPIGKCNSECITPNGSIPNDKPFQNVNRITYGACPRYVKQNTLKLATGMRNVPEKQTRGIFGAIAGFIENGWEGMVDGWYGFRHQNSEGIGQAADLKSTQAAIDQINGKLNRLIGKTNEKFHQIEKEFSEVEGRIQDLEKYAEDTKIDLWSYNAELLVALENQHTIDLTDSEMNKLFEKTKKQLRENAEDMGNGCFKIYHKCDNACIGSIRNGTYDHDVYRDEALNNRFQIKGVELKSGYKDWILWISFAISCFLLCVALLGFIMWACQKGNIRCNICI

SEQ ID NO: 9139 - protein, 566 aa, synthetic construct
  REGION 1..566: note = hemagglutinin__InfluenzaA__AFM72488
MKTIIALSYILCLVFAQKLPGNDNSTATLCLGHHAVPNGTIVKTITNDQIEVTNATELVQSSSTGGICDSPHQILDGENCTLIDALLGDPQCDGFQNKKWDLFVERSKAYSNCYPYDVPDYASLRSLVASSGTLEFNNESFNWTGVTQNGTSSACKRRSNNSFFSRLNWLTQLKFKYPALNVTMPNNEKFDKLYIWGVHHPVTDNEQIFLYAQASGRITVSTKRSQQTVIPNIGFRPRVRNIPSRISIYWTIVKPGDILLINSTGNLIAPRGYFKIRSGKSSIMRSDAPIGKCNSKCITPNGSIPNDKPFQNVNRITYGACPRYVKQNTLKLATGMRNVPEKQTRGIFGAIAGFIENGWEGMVDGWYGFRHQNSEGIGQAADLKSTQAAIDQINGKLNRLIGKTNEKFHQIEKEFSEVEGRIQDLEKYVEDTKIDLWSYNAELLVALENQHTIDLTDSEMNKLFEKTKKQLRENAEDMGNGCFKIYHKCDNACIGSIRNGTYDHDVYRDEALNNRFQIKGVELKSGYKDWILWISFAISCFLLCVALLGFIMWACQKGNIRCNICI

SEQ ID NO: 9140 - protein, 566 aa, synthetic construct
  REGION 1..566: note = hemagglutinin__InfluenzaA__AFM72499
MKTIIALSYILCLVFAQKLPGNDNSTATLCLGHHAVPNGTIVKTITNDQIEVTNATELVQSSSTGGICDSPHQILDGENCTLIDALLGDPQCDGFQNKKWDLFVERSKAYSNCYPYDVPDYASLRSLVASSGTLEFNNESFNWTGVTQNGTSSACKRRSNNSFFSRLNWLTQLKFKYPALNVTMPNNEKFDKLYIWGVHHPVTDNDQIFLYAQASGRITVSTKRSQQTVIPNIGSRPRVRNIPSRISIYWTIVKPGDILLINSTGNLIAPRGYFKIRSGKSSIMRSDAPIGKCNSECITPNGSIPNDKPFQNVNRITYGACPRYVKQNTLKLATGMRNVPEKQTRGIFGAIAGFIENGWEGMVDGWYGFRHQNSEGIGQAADLKSTQAAIDQINGKLNRLIGKTNEKFHQIEKEFSEVEGRIQDLEKYVEDTKIDLWSYNAELLVALENQHTIDLTDSEMNKLFEKTKKQLRENAEDMGNGCFKIYHKCDNACIGSIRNGTYDHDVYRDEALNNRFQIKGVELKSGYKDWILWISFAISCFLLCVALLGFIMWACQKGNIRCNICI

SEQ ID NO: 9141 - protein, 565 aa, synthetic construct
  REGION 1..565: note = hemagglutinin__InfluenzaA__AFM72521
MKVKLLVLLCTFTATYADTICIGYHANNSTDTVDTVLEKNVTVTHSVNLLENSHNGRLCLLKGIAPLQLGNCSVAGWILGNPECELLISKESWSYIVEKPNPENGTCYPGHFADYEELREQLSSVSSLERFEIFPKESSWPNHTVTGVSASCSHNGESSFYRNLLWLTGKNGLYPNLSKSYANNKEKEVLVLWGVHHPPNIGNQKALYHTENAYVSVVSSHYSRKFTPEIAKRPKVRDQEGRINYYWTLLEPGDTIIFEANGNLIAPRYAFALSRGFGSGIINSNAPMDKCDAKCQTPQGAINSSLPFQNVHPVTIGECPKYVRSAKLRMVTGLRNIPSIQSRGLFGAIAGFIEGGWTGMVDGWYGYHHQNEQGSGYAADQKSTQNAINGITNKVNSVIEKMNTQFTAVGKEFNKLERRMENLNKKVDDGFIDIWTYNAELLVLLENERTLDFHDSNVKNLYEKVKSQLKNNAKEIGNGCFEFYHKCNDECMESVKNGTYDYPKYSEESKLNREKIDGVKLESMGVYQILAIYSTVASSLVLLVSLGAISFWMCSNGSLQCRICI

SEQ ID NO: 9142 - protein, 565 aa, synthetic construct; identical to SEQ ID NO: 9141
  REGION 1..565: note = hemagglutinin__InfluenzaA__AFM72532

SEQ ID NO: 9143 - protein, 565 aa, synthetic construct; identical to SEQ ID NO: 9141
  REGION 1..565: note = hemagglutinin__InfluenzaA__AFM72543

SEQ ID NO: 9144 - protein, 565 aa, synthetic construct
  REGION 1..565: note = hemagglutinin__InfluenzaA__AFM72554
MKVKLLVLLCTFTATYADTICIGYHANNSTDTVDTVLEKNVTVTHSVNLLENSHNGRLCLLKGIAPLQLGNCSVAGWILGNPECELLISKESWSYIVEKPNPENGTCYPGHFADYEELREQLSSVSSLERFEIFPKESSWPNHTVTGVSASCSHNGESSFYRNLLWLTGKNGLYPNLSKSYANNKEKEVLVLWGVHHPPNIGNQKALYHTENAYVSVVSSHYSRKFTPEIAKRPKVRDQEGRINYYWTLLEPGDTIIFEANGNLIAPRYAFALSRGFGSGIINSNAPMDKCDAKCQTPQGAINSSLPFQNVHPVTIGECPKYVRSAKLRMVTGLRNIPSIQSRGLFGAIAGFIEGGWTGMVDGWYGYHHQNEQGSGYAADQKSTQNAINGITNKVNSVIEKMNTQFTAVGKEFNKLERRMENLNKKVDDGFIDIWTYNAELLVLLENERTLDFHDSNVKNLYEKVKSQLKNNAKEIGNGCFEFYHKCNDECMESVKNGTYDYPKYSEESKLNREKIDEVKLESMGVYQILAIYSTVASSLVLLVSLGAISFWMCSNGSLQCRICI

SEQ ID NO: 9145 - protein, 566 aa, synthetic construct
  REGION 1..566: note = hemagglutinin__InfluenzaA__AFM72565
MKTIIALSYILCLVFAQKLPGNDNSTATLCLGHHAVPNGTIVKTITNDQIEVTNATELVQSSSTGEICDSPHQILDGENCTLIDALLGDPQCDGFQNKKWDLFVERSKAYSNCYPYDVPDYASLRSLVASSGTLEFNNESFNWTGVTQNGTSSSCIRRSNNSFFSRLNWLTHLKFKYPALNVTMPNNEKFDKLYIWGVHHPGTDNDQIFPYAQASGRITVSTKRSQQTVIPNIGSRPRVRNIPSRISIYWTIVKPGDILLINSTGNLIAPRGYFKIRSGKSSIMRSDAPIGKCNSECITPNGSIPNDKPFQNVNRITYGACPRYVKQNTLKLATGMRNVPEKQTRGIFGAIAGFIENGWEGMVDGWYGFRHQNSEGIGQAADLKSTQAAIDQINGKLNRLIGKTNEKFHQIEKEFSEVEGRIQDLEKYVEDTKIDLWSYNAELLVALENQHTIDLTDSEMNKLFEKTKKQLRENAEDMGNGCFKIYHKCDNACIGSIRNGTYDHDVYRDEALNNRFQIKGVELKSGYKDWILWISFAISCFLLCVALLGFIMWACQKGNIRCNICI

SEQ ID NO: 9146 - protein, 566 aa, synthetic construct
  REGION 1..566: note = hemagglutinin__InfluenzaA__AFM72576
MKTIIALSYILCLVFAQKLPGNDNSTATLCLGHHAVPNGTIVKTITNDQIEVTNATELVQSSSTGEICDSPHQILDGENCTLIDALLGDPQCDGFQNKKWDLFVERSKAYSNCYPYDVPDYASLRSLVASSGTLEFNNESFNWTGVTQNGTSSSCIRGSNNSFFSRLNWLTHLKFKYPALNVTMPNNEKFDKLYIWGVHHPGTDNDQIFPYAQASGRITVSTKRSQQTVIPNIGSRPRVRNIPSRISIYWTIVKPGDILLINSTGNLIAPRGYFKIRSGKSSIMRSDAPIGKCNSECITPNGSIPNDKPFQNVNRITYGACPRYVKQNTLKLATGMRNVPEKQTRGIFGAIAGFIENGWEGMVDGWYGFRHQNSEGIGQAADLKSTQAAIDQINGKLNRLIGKTNEKFHQIEKEFSEVEGRIQDLEKYVEDTKIDLWSYNAELLVALENQHTIDLTDSEMNKLFEKTKKQLRENAEDMGNGCFKIYHKCDNACIGSIRNGTYDHDVYRDEALNNRFQIKGVELKSGYKDWILWISFAISCFLLCVALLGFIMWACQKGNIRCNICI

SEQ ID NO: 9147 - protein, 565 aa, synthetic construct
  REGION 1..565: note = hemagglutinin__InfluenzaA__AFM72799
MKVKLLVLLCTFTATYADTICIGYHANNSTDTVDTVLEKNVTVTHSVNLLEDNHNGKLCLLKGKAPLQLGNCSVAGWILGNPECGLLISKESWSYIVERPNPENGTCYPGHFADYEELREQLSSVSSFERFEIFPKESSWPNHTVTGVSASCSHNGESSFYKNLLWLTGKNGLYPNLSKSYANNKEKEVLVLWGVHHPPNIGNQMTLYHKENAYVSVVSSHYSRKFTPEIAKRPKVRDQEGRINYYWTLLEPGDTIIFEANGNLIAPRYAFALSRGFGSGIINSNAPMDECDAKCQTPQGAINSSLPFQNVHPVTIGECPKYVRSAKLRMVTGLRNIPSIQSRGLFGAIAGFIEGGWTGMVDGWYGYHHQNEQGSGYAADQKSTQNAINGITNKVNSVIEKMNTQFTAVGKEFNKLERRMENLNKKVDDGFIDVWTYNAELLVLLENERTLDFHDSNVKNLYEKVKNQLKNNAKEIGNGCFEFYHKCNDECMESVKNGTYDYPKYSEESKLSREKIDGVKLESMGVYQILAIYSTVASSLVLLVSLGAISFWMCSNGSLQCRICI

SEQ ID NO: 9148 - protein, 565 aa, synthetic construct; identical to SEQ ID NO: 9147
  REGION 1..565: note = hemagglutinin__InfluenzaA__AFM72810

SEQ ID NO: 9149 - protein, 565 aa, synthetic construct; identical to SEQ ID NO: 9147
  REGION 1..565: note = hemagglutinin__InfluenzaA__AFM72821

SEQ ID NO: 9150 - protein, 566 aa, synthetic construct
  REGION 1..566: note = hemagglutinin__InfluenzaA__AFM72852
MKAILVVLLYTFATANADTLCIGYHANNSTDTVDTVLEKNVTVTHSVNLLEDKHNGKLCKLRGVAPLHLGKCNIAGWILGNPECESLSTASSWSYIVETPSSDNGTCYPGDFIDYEELREQLSSVSSFERFEIFPKTSSWPNHDSDKGVTAACPHAGAKSFYKNLIWLVKKGNSYPKLSKSYINDKGKEVLVLWGIHHPSTSADQQSLYQNADAYVFVGSSRYSKTFKPEIAIRPKVRDREGRMNYYWTLVEPGDKITFEATGNLVVPRYAFAMERNAGSGIIISDTPVHDCNTTCQTPKGAINTSLPFQNIHPITIGKCPKYVKSTKLRLATGLRNIPSIQSRGLFGAIAGFIEGGWTGMVDGWYGYHHQNEQGSGYAADLKSTQNAIDEITNKVNSVIEKMNTQFTAVGKEFNHLEKRIENLNKKVDDGFLDIWTYNAELLVLLENERTLDYHDSNVKNLYEKVRSQLKNNAKEIGNGCFEFYHKCDNTCMESVKNGTYDYPKYSEEAKLNREEIDGVKLESTRIYQILAIYSTVASSLVLVVSLGAISFWMCSNGSLQCRICI

SEQ ID NO: 9151 - protein, 566 aa, synthetic construct
  REGION 1..566: note = hemagglutinin__InfluenzaA__AFM72862
MKAILVVLLYTFATANADTLCIGYHANNSTDTVDTVLEKNVTVTHSVNLLEDKHNGKLCKLRGVAPLHLGKCNIAGWILGNPECESLSTASSWSYIVETPSSDNGTCYPGDFIDYEELREQLSSVSSFERFEIFPKTSSWPNHDSNKGVTAACPHAGAKSFYKNLIWLVKKGNSYPKLSNSYINDKGKEVLVLWGIHHPSTSADQQSLYQNADAYVFVGSSRYSKTFKPEIAIRPKVRDREGRMNYYWTLVEPGDKITFEATGNLVVPRYAFAMERNAGSGIIISDTPVHDCNTTCQTPKGAINTSLPFQNIHPITIGKCPKYVKSTKLRLATGLRNIPSIQSRGLFGAIAGFIEGGWTGMVDGWYGYHHQNEQGSGYAADLKSTQNAIDEITNKVNSVIEKMNTQFTAVGKEFNHLEKRIENLNKKVDDGFLDIWTYNAELLVLLENERTLDYHDSNVKNLYEKVRSQLKNNAKEIGNGCFEFYHKCDNTCMESVKNGTYDYPKYSEEAKLNREEIDGVKLESTRIYQILAIYSTVASSLVLVVSLGAISFWMCSNGSLQCRICI

SEQ ID NO: 9152 - protein, 566 aa, synthetic construct
  REGION 1..566: note = hemagglutinin__InfluenzaA__AFM72872
MKTIIALSYTLCLVFAQKLPGNDNSTATLCLGHHAVPNGTIVKTITNDQIEVTNATELVQSSSTGEICDSPHQILDGKNCTLIDALLGDPQCDGFQNKKWDLFVERSKAYSNCYPYDVPDYASLRSLVASSGTLEFNNESFNWTGVTQNGTSSACIRRSKNSFFSRLNWLTHLNFKYPALNVTMPNNEQFDKLYIWGVHHPGTDKDQIFPYAQASGRITVSTKRSQQTAIPNIGSRPRVRNIPSRISIYWTIVKPGDILLINSTGNLIAPRGYFKIRSGKSSIMRSDAPIGKCNSECITPNGSIPNDKPFQNVNRITYGACPRYVKQNTLKLATGMRNVPEKQTRGIFGAIAGFIENGWEGMVDGWYGFRHQNSEGRGQAADLKSTQAAIDQINGKLNRLIGKTNEKFHQIEKEFSEVEGRIQDLEKYVEDTKIDLWSYNAELLVALENQHTIDLTDSEMNKLFEKTKKQLRENAEDMGNGCFKIYHKCDNACIGSIRNGTYDHDVYRDEALNNRFQIKGVELKSGYKDWILWISFAISCFLLCVALLGFIMWACQKGNIRCNICI

SEQ ID NO: 9153 - protein, 566 aa, synthetic construct
  REGION 1..566: note = hemagglutinin__InfluenzaA__AFM72883
MKTIIALSYILCLVFAQKLPGNDNSTATLCLGHHAVPNGTIVKTITNDQIEVTNATELVQNSSTGEICDSPHQILDGKNCTLIDALLGDPQCDGFQNKKWDLFVERSKAYSNCYPYDVPDYASLRSLVASSGTLEFNNESFNWTGVTQNGTSSACIRRSKNSFFSRLNWLTHLNFKYPALNVTMPNNEQFDKLYIWGVHHPVTDKDQIFLYAQASGRITVSTKRSQQTVIPNIGSRPRVRNIPTRISIYWTIVKPGDILLINSTGNLIAPRGYFKMQSGKSSIMRSDAPIGKCNSECITPNGSIPNDKPFQNVNRITYGACPRYVKQNTLKLATGMRNVPEKQTRGIFGAIAGFIENGWEGMVDGWYGFRHQNSEGRGQAADLKSTQAAIDQINGKLNRLIGKTNEKFHQIEKEFSEVEGRIQDLEKYVEDTKIDLWSYNAELLVALENQHTIDLTDSEMNKLFEKTKKQLRENAEDMGNGCFKIYHKCDNACIGSIRNGTYDHNVYRDEALNNRFQIKGVELKSGYKDWILWISFAISCFLLCVALLGFIMWACQKGNIRCNICI

SEQ ID NO: 9154 - protein, 566 aa, synthetic construct
  REGION 1..566: note = hemagglutinin__InfluenzaA__AFM72894
MKTIIALSYILCLVFAQKLPGNDNSTATLCLGHHAVPNGTIVKTITNDQIEVTNATELVQNSSTGEICDSPHQILDGKNCTLIDALLGDPQCDGFQNKKWDLFVERSKAYSNCYPYDVPDYASLRSLVASSGTLEFNNESFNWTGVTQNGTSSACIRRSKNSFFSRLNWLTQLNFKYPALNVTMPNNEQFDKLYIWGVHHPVTDKDQIFLYAQASGRITVSTKRSQQTVIPNIGSRPRVRNIPSRISIYWTIVKPGDILLINSTGNLIAPRGYFKMQSGKSSIMRSDAPIGKCNSECITPNGSIPNDKPFQNVNRITYGACPRYVKQNTLKLATGMRNVPEKQTRGIFGAIAGFIENGWEGMVDGWYGFRHQNSEGRGQAADLKSTQAAIDQINGKLNRLIGKTNEKFHQIEKEFSEVEGRIQDLEKYVEDTKIDLWSYNAELLVALENQHTIDLTDSEMNKLFEKTKKQLRENAEDMGNGCFKIYHKCDNACIGSIRNGTYDHNVYRDEALNNRFQIKGVELKSGYKDWILWISFAISCFLLCVALLGFIMWACQKGNIRCNICI

SEQ ID NO: 9155 - protein, 566 aa, synthetic construct
  REGION 1..566: note = hemagglutinin__InfluenzaA__AFM72916
MKTIIALSYILCLVFAQKIPGNDNSTATLCLGHHAVPNGTIVKTITNDQIEVTNATELVQSSSTGEICDSPHQILDGKNCTLIDALLGDPQCDGFQNKKWDLFVERSKAYSNCYPYDVPDYASLRSLVASSGTLEFNNESFNWTGVTQNGTSSACIRRSKNSFFSRLNWLTHLNFKYPALNVTMPNNEQFDKLYIWGVHHPGTDKDQIFPYAQASGRITVSTKRSQQTAIPNIGSRPRVRNIPSRISIYWTIVKPGDILLINSTGNLIAPRGYFKIRSGKSSIMRSDAPIGKCNSGCITPNGSIPNDKPFQNVNRITYGACPRYVKQNTLKLATGMRNVPEKQTRGIFGAIAGFIENGWEGMVDGWYGFRHQNSEGRGQAADLKSTQAAIDQINGKLNRLIGKTNEKFHQIEKEFSEVEGRIQDLEKYVEDTKIDLWSYNAELLVALENQHTIDLTDSEMNKLFEKTKKQLRENAEDMGNGCFKIYHKCDNACIGSIRNGTYDHDVYRDEALNNRFQIKGVELKSGYKDWFLWISFAISCFLLCVALLGFIMWACQKGNIRCNICI

SEQ ID NO: 9156 - protein, 566 aa, synthetic construct
  REGION 1..566: note = hemagglutinin__InfluenzaA__AFM72927
MKTIIALSYILCLVFAQKLPGNDNSTATLCLGHHAVPNGTIVKTITNDQIEVTNATELVQSSSTGEICDSPHQILDGENCTLIDALLGDPQCDGFQNKKWDLFVERSKAYSNCYPYDVPDYASLRSLVASSGTLEFNNESFNWTGVTQNGTSSACIRRSNNSFFSRLNWLTHLKFKYPALNVTMPNNEQFDKLYIWGVHHPGTDNDQTSLYAQASGRITVSTKRSQQTVIPNIGSRPRVRNIPSRISIYWTIVKPGDILLINSIGNLIAPRGYFKIRSGKSSIMRSDAPIGKCNSECITPNGSIPNDKPFQNVNRITYGACPRYVKQNTLKLATGMRNVPEKQTRGIFGAIAGFIENGWEGMVDGWYGFRHQNSEGRGQAADLKSTQAAIDQINGKLNRLIGKTNEKFHQIEKEFSEVEGRIQDLEKYVEDTKIDLWSYNAELLVALENQHTIDLTDSEMNKLFEKTKKQLRENAEDMGNGCFKIYHKCDNACIGSIRNGTYDHNVYRDEALNNRFQIKGVELKSGYKDWILWISFAISCFLLCVALLGFIMWACQKGNIRCNICI

SEQ ID NO: 9157 - protein, 566 aa, synthetic construct
  REGION 1..566: note = hemagglutinin__InfluenzaA__AFM72938
MKTIIALSYILCLVFAQKLPGNDNSTATLCLGHHAVPNGTIVKTITNDQIEVTNATELVQSSSTGEICDSPHQILDGENCTLIDALLGDPQCDGFQNKKWDLFVERSKAYSNCYPYDVPDYASLRSLVASSGTLEFNNESFNWTGVTQNGTSSACIRRSNNSFFSRLNWLTHLKFKYPALNVTMPNNEQFDKLYIWGVHHPGTDNDQTSLYAQASGRITVSTKRSQQTVIPNIGSRPRVRNNPSRISIYWTIVKPGDILLINSIGNLIAPRGYFKIRSGKSSIMRSDAPIGKCNSECITPNGSIPNDKPFQNVNRITYGACPRYVKQNTLKLATGMRNVPEKQTRGIFGAIAGFIENGWEGMVDGWYGFRHQNSEGRGQAADLKSTQAAIDQINGKLNRLIGKTNEKFHQIEKEFSEVEGRIQDLEKYVEDTKIDLWSYNAELLVALENQHTIDLTDSEMNKLFEKTKKQLRENAEDMGNGCFKIYHKCDNACIGSIRNGTYDHNVYRDEALNNRFQIKGVELKSGYKDWILWISFAISCFLLCVALLGFIMWACQKGNIRCNICI

SEQ ID NO: 9158 - protein, 566 aa, synthetic construct
  REGION 1..566: note = hemagglutinin__InfluenzaA__AFM72949
MKTIIALSYILCLVFAQKLPGNDNSTATLCLGHHAVPNGTIVKTITNDQIEVTNATELVQSSSTGEICDSPHQILDGENCTLIDALLGDPQCDGFQNKKWDLFVERSKAYSNCYPYDVPDYASLRSLVASSGTLEFNNESFNWTGVTQNGTSSACIRRSNNSFFSRLNWLTQLKFKYPALNVTMPNNEQFDKLYIWGVHHPGTDNDQTSLYAQASGRITVSTKRSQQTVIPNIGSRPRVRNNPSRISIYWTIVKPGDILLINSIGNLIAPRGYFKIRSGKSSIMRSDAPIGKCNSECITPNGSIPNDKPFQNVNRITYGACPRYVKQNTLKLATGMRNVPEKQTRGIFGAIAGFIENGWEGMVDGWYGFRHQNSEGRGQAADLKSTQAAIDQINGKLNRLIGKTNEKFHQIEKEFSEVEGRIQDLEKYVEDTKIDLWSYNAELLVALENQHTIDLTDSEMNKLFEKTKKQLRENAEDMGNGCFKIYHKCDNACIGSIRNGTYDHNVYRDEALNNRFQIKGVELKSGYKDWILWISFAISCFLLCVALLGFIMWACQKGNIRCNICI

SEQ ID NO: 9159 - protein, 566 aa, synthetic construct
  REGION 1..566: note = hemagglutinin__InfluenzaA__AFM72960
MKTIIALSYILCLVFAQKLPGNDNSTATLCLGHHAVPNGTIVKTITNDQIEVTNATELVQSSSTGEICDSPHQILDGENCTLIDALLGDPQCDGFQNKKWDLFVERSKAYSNCYPYDVPDYASLRSLVASSGTLEFNNESFKWTGVTQNGTSSACIRRSNNSFFSRLNWLTHLKFKYPALNVTMPNNEQFDKLYIWGVHHPGTDNDQTSLYAQASGRITVSTKRSQQTVIPNIGSRPRVRNIPSRISIYWTIVKPGDILLINSIGNLIAPRGYFKIRSGKSSIMRSDAPIGKCNSECITPNGSIPNDKPFQNVNRITYGACPRYVKQNTLKLATGMRNVPEKQTRGIFGAIAGFIENGWEGMVDGWYGFRHQNSEGRGQAADLKSTQAAIDQINGKLNRLIGKTNEKFHQIEKEFSEVEGRIQDLEKYVEDTKIDLWSYNAELLVALENQHTIDLTDSEMNKLFEKTKKQLRENAEDMGNGCFKIYHKCDNACIGSIRNGTYDHNVYRDEALNNRFQIKGVELKSGYKDWILWISFAISCFLLCVALLGFIMWACQKGNIRCNICI

SEQ ID NO: 9160 - protein, 566 aa, synthetic construct
  REGION 1..566: note = hemagglutinin__InfluenzaA__AFM72971
MKTIIALSYILCLVFAQKLPGNDNSTATLCLGHHAVPNGTIVKTITNDQIEVTNATELVQSSSTGEICDSPHQILDGENCTLIDALLGDPQCDGFQNKKWDLFVERSKAYSNCYPYDVPDYASLRSLVASSGTLEFNNESFKWTGVTQNGTSSACIRRSNNSFFSRLNWLTQLNFKYPALNVTMPNNEQFDKLYIWGVHHPGTDNDQTSLYAQASGRITVSTKRSQQTVIPNIGSRPRVRNIPSRISIYWTIVKPGDILLINSIGNLIAPRGYFKIRSGKSSIMRSDAPIGKCNSECITPNGSIPNDKPFQNVNRITYGACPRYVKQNTLKLATGMRNVPEKQTRGIFGAIAGFIENGWEGMVDGWYGFRHQNSEGRGQAADLKSTQAAIDQINGKLNRLIGKTNEKFHQIEKEFSEVEGRIQDLEKYVEDTKIDLWSYNAELLVALENQHTIDLTDSEMNKLFEKTKKQLRENAEDMGNGCFKIYHKCDNACIGSIRNGTYDHNVYRDEALNNRFQIKGVELKSGYKDWILWISFAISCFLLCVALLGFIMWACQKGNIRCNICI

SEQ ID NO: 9161 - protein, 566 aa, synthetic construct
  REGION 1..566: note = hemagglutinin__InfluenzaA__AFM72982
MKTIIALSYILCLVFAQKLPGNDNSTATLCLGHHAVPNGTIVKTITNDQIEVTNATELVQSSSTGEICDSPHQILDGENCTLIDALLGDPQCDGFQNKKWDLFVERSKAYSNCYPYDVPDYASLRSLVASSGTLEFNSESFNWTGVTQNGTSSACIRRSNNSFFSRLNWLTHLNFKYPALNVTMPNNEQFDKLYIWGVHHPGTDKDQIFPYAQASGRITVSTKRSQQAVIPNIGSRPRVRNIPSRISIYWTIVKPGDILLINSTGNLIAPRGYFKIRSGKSSIMRSDAPIGKCNSECITPNGSIPNDKPFQNVNRITYGACPRYIKQSTLKLATGMRNVPEKQTRGIFGAIAGFIENGWEGMVDGWYGFRHQNSEGRGQAADLKSTQAAIDQINGKLNRLIGKTNEKFHQIEKEFSEVEGRIQDLEKYVEDTKIDLWSYNAELLVALENQHTIDLTDSEMNKLFEKTKKQLRENAEDMGNGCFKIYHKCDNACIGSIRNGTYDHDVYRDEALNNRFQIKGVELKSGYKDWILWISLAISCFLLCVALLGFIMWACQKGNIRCNICI

SEQ ID NO: 9162 - protein, 566 aa, synthetic construct
  REGION 1..566: note = hemagglutinin__InfluenzaA__AFM72993
MKTIIALSYILCLVFAQKLPGNDNSTATLCLGHHAVPNGTIVKTITNDQIEVTNATELVQSSSAGEICDSPHQILDGENCTLIDALLGDPQCDGFQNKKWDLFVERSRAYSNCYPYDVPDYASLRSLVASSGTLEFNNESFNWTGVTQNGTSSACIRRSNNSFFSRLNWLTHLNFKYPALNVTMPNNEQFDKLYIWGVLHPGTYKDQIFLYAQASGRITVSTKRSQQAVIPNIGSRPRVRNIPSRISIYWTIVKPGDILLINSTGNLIAPRGYFKIRSGKSSIMRSDAPIGKCNSECITPNGSIPNDKPFQNVNRITYGACPRYVKQSTLKLATGMRNVPEKQTRGIFGAIAGFIENGWEGMVDGWYGFRHQNSEGRGQAADLKSTQAAIDQINGKLNRLIGKTNEKFHQIEKEFSEVEGRIQDLEKYVEDTKIDLWSYNAELLVALENQHTIDLTDSEMNKLFEKTKKQLRENAEDMGNGCFKIYHKCDNACIGSIRNGTYDHDVYRDEALNNRFQIKGVELKSGYKDWILWISFAISCFLLCVALLGFIMWACQKGNIRCNICI

SEQ ID NO: 9163 - protein, 566 aa, synthetic construct
  REGION 1..566: note = hemagglutinin__InfluenzaA__AFM73004
MKTIIALSYILCLVFAQKLPGNDNSTATLCLGHHAVPNGTIVKTITNDQIEVTNATELVQSSSAGEICDSPHQILDGENCTLIDALLGDPQCDGFQNKKWDLFVERSRAYSNCYPYDVPDYASLRSLVASSGTLEFNNESFNWTGVTQNGTSSACIRRSNNSFFSRLNWLTHLNFKYPALNVTMPNNEQFDKLYIWGVLHPGTYKDQIFLYAQASGRVTVSTKRSQQAVIPNIGSRPRVRNIPSRISIYWTIVKPGDILLINSTGNLIAPRGYFKIRSGKSSIMRSDAPIGKCNSECITPNGSIPNDKPFQNVNRITYGACPRYVKQSTLKLATGMRNVPEKQTRGIFGAIAGFIENGWEGMVDGWYGFRHQNSEGRGQAADLKSTQAAIDQINGKLNRLIGKTNEKFHQIEKEFSEVEGRIQDLEKYVEDTKIDLWSYNAELLVALENQHTIDLTDSEMNKLFEKTKKQLRENAEDMGNGCFKIYHKCDNACIGSIRNGTYDHDVYRDEALNNRFQIKGVELKSGYKDWILWISFAISCFFLCVALLGFIMWACQKGNIRCNICI

SEQ ID NO: 9164 - protein, 566 aa, synthetic construct
  REGION 1..566: note = hemagglutinin__InfluenzaA__AFM73015
MKAILVVLLYTFATANADTLCIGYHANNSTDTVDTVLEKNVTVTHSVNLLEDKHNGKLCKLRGVAPLHLGKCNIAGWILGNPECESLSTASSWSYIVETSSSDNGTCYPGDFIDYEELREQLSSVSSFERFEIFPKTSSWPNHDSNKGVTAACPHAGAKGFYKNLIWLVKKGNSYPKLSKSYINDKGKEVLVLWGIHHPSTTADQQSLYQNADTYVFVGTSRYSKKFKPEIAIRPKVRDREGRMNYYWTLVEPGDKITFEATGNLVVPRYAFAMERNAGSGIIISDTPVHDCNTTCQTPKGAINTSLPFQNIHPITIGKCPKYVKSTKLRLATGLRNVPSIQSRGLFGAIAGFIEGGWTGMVDGWYGYHHQNEQGSGYAADLKSTQNAIDKITNKVNSVIEKMNTQFTAVGKEFNHLEKRIENLNKKVDDGFLDIWTYNAELLVLLENERTLDYHDSNVKNLYEKVRNQLKNNAKEIGNGCFEFYHKCDNTCMESVKNGTYDYPKYSEEAKLNREEIDGVKLESTRIYQILAIYSTVASSLVLVVSLGAISFWMCSNGSLQCRICI

SEQ ID NO: 9165 - protein, 566 aa, synthetic construct
  REGION 1..566: note = hemagglutinin__InfluenzaA__AFM73025
MKAILVVLLYTFATANADTLCIGYHANNSTDTVDTVLEKNVTVTHSVNLLEDKHNGKLCKLRGVAPLHLGKCNIAGWILGNPECESLSTASSWSYIVETSSSDNGTCYPGDFIDYEELREQLSSVSSFERFEIFPKTSSWPNHDSNKGVTAACPHAGAKGFYKNLIWLVKKGNSYPKLSKSYINDKGKEVLVLWGIHHPSTTDDQQSLYQNADTYVFVGTSRYSKKFKPEIAIRPKVRDREGRMNYYWTLVEPGDKITFEATGNLVVPRYAFAMERNAGSGIIISDTPVHDCNTTCQTPKGAINTSLPFQNIHPITIGKCPKYVKSTKLRLATGLRNVPSIQSRGLFGAIAGFIEGGWTGMVDGWYGYHHQNEQGSGYAADLKSTQNAIDKITNKVNSVIEKMNTQFTAVGKEFNHLEKRIENLNKKVDDGFLDIWTYNAELLVLLENERTLDYHDSNVKNLYEKVRNQLKNNAKEIGNGCFEFYHKCDNTCMESVKNGTYDYPKYSEEAKLNREEIDGVKLESTRIYQILAIYSTVASSLVLVVSLGAISFWMCSNGSLQCRICI

SEQ ID NO: 9166 - protein, 566 aa, synthetic construct; identical to SEQ ID NO: 9165
  REGION 1..566: note = hemagglutinin__InfluenzaA__AFM73035

SEQ ID NO: 9167 - protein, 566 aa, synthetic construct
  REGION 1..566: note = hemagglutinin__InfluenzaA__AFM73045
MKAILVVLLYTFATANADTLCIGYHANNSTDTVDTVLERNVTVTHSVNLLEDKHNGKLCKLRGVAPLHLGKCNIAGWILGNPECESLSTASSWSYIVETSSSDNGTCYPGDFIDYEELREQLSSVSSFERFEIFPKTSSWPNHESNKGVTAACPHAGAKSFYKNLIWLVKKGNSYPKLSKSYINDKGKEVLVLWGIHHPSTSADQQSLYQNADAYVFVGTSRYSKKFKPEIAIRPKVRDQEGRMNYYWTLVEPGDKITFEATGNLVVPRYAFAMERNAGSGIIISDTPVHDCNTTCQTPKGAINTSLPFQNIHPITIGKCPKYVKSTKLRLATGLRNVPSIQSRGLFGAIAGFIEGGWTGMVDGWYGYHHQNEQGSGYAADLKSTQNAIDEITNKVNSVIEKMNTQFTAVGKEFNHLEKRIENLNKKVDDGFLDIWTYNAELLVLLENERTLDYHDSNVKNLYEKVRSQLKNNAKEIGNGCFEFYHKCDNTCMESVKNGTYDYPKYSEEAKLNREEIDGVKLESTRIYQILAIYSTVASSLVLVVSLGAISFWMCSNGSLQCRICI

SEQ ID NO: 9168 - protein, 566 aa, synthetic construct
  REGION 1..566: note = hemagglutinin__InfluenzaA__AFM73055
MKAILVVLLYTFATANADTLCIGYHANNSTDTVDTVLERNVTVTHSVNLLEDKHNGKLCKLRGVAPLHLGKCNIAGWILGNPECESLSTASSWSYIVETSSSDNGTCYPGDFIDYEELREQLSSVSSFERFEIFPKTSSWPNHDSNKGVTAACPHAGAKSFYKNLIWLVEKGNSYPKLSKSYINDKGKEVLVLWGIHHPSTSADQQSLYQNADAYVFVGTSRYSKKFKPEIAIRPKVRDREGRMNYYWTLVEPGDKITFEATGNLVVPRYAFAMERNAGSGIIISDTPVHDCNTTCQTPKGAINTSLPFQNIHPITIGKCPKYVKSTKLRLATGLRNVPSIQSRGLFGAIAGFIEGGWTGMVDGWYGYHHQNEQGSGYAADLKSTQNAIDEITNKVNSVIEKMNTQFTAVGKEFNHLEKRIENLNKKVDDGFLDIWTYNAELLVLLENERTLDYHDSNVKNLYEKVRSQLKNNAKEIGNGCFEFYHKCDNTCMESVKNGTYDYPKYSEEAKLNREEIDGVKLESTRIYQILAIYSTVASSLVLVVSLGAISFWMCSNGSLQCRICI

SEQ ID NO: 9169 - protein, 566 aa, synthetic construct
  REGION 1..566: note = hemagglutinin__InfluenzaA__AFM73065
MKAILVVLLYTFATANADTLCIGYHANNSTDTVDTVLERNVTVTHSVNLLEDKHNGKLCKLRGVAPLHLGKCNIAGWILGNPECESLSTASSWSYIVETSSSDNGTCYPGDFIDYEELREQLSSVSSFERFEIFPKTSSWPNHDSNKGVTAACPHAGAKSFYKNLIWLVKEGNSYPKLSKSYINDKGKEVLVLWGIHHPSTSADQQSLYQNADAYVFVGTSRYSKKFKPEIAIRPKVRDREGRMNYYWTLVEPGDKITFEATGNLVVPRYAFAMERNAGSGIIISDTPVHDCNTTCQTPKGAINTSLPFQNIHPITIGKCPKYVKSTKLRLATGLRNVPSIQSRGLFGAIAGFIEGGWTGMVDGWYGYHHQNEQGSGYAADLKSTQNAIDEITNKVNSVIEKMNTQFTAVGKEFNHLEKRIENLNKKVDDGFLDIWTYNAELLVLLENERTLDYHDSNVKNLYEKVRSQLKNNAKEIGNGCFEFYHKCDNTCMESVKNGTYDYPKYSEEAKLNREEIDGVKLESTRIYQILAIYSTVASSLVLVVSLGAISFWMCSNGSLQCRICI

SEQ ID NO: 9170 - protein, 566 aa, synthetic construct; identical to SEQ ID NO: 915
  REGION 1..566: note = hemagglutinin__InfluenzaA__AFM73477

SEQ ID NO: 9171 - protein, 568 aa, synthetic construct
  REGION 1..568: note = hemagglutinin__InfluenzaA__AFM78567
MEKIVLLLAIVSLVKSDQICIGYHANNSTEQVDTIMEKNVTVTHAQDILEKTHNGKLCDLDGVKPLILRDCSVAGWLLGNPMCDEFINVPEWSYIVEKANPTNDLCYPGSFNDYEELKHLLSRINHFEKIQIIPKSSWSDHEASSGVSSACPYLGSPSFFRNVVWLIKKNSTYPTIKKSYNNTNQEDLLVLWGIHHPNDAAEQTRLYQNPTTYISIGTSTLNQRLVPKIATRSKVNGQSGRMEFFWTILKPNDAINFESNGNFIAPEYAYKIVKKGDSAIMKSELEYGNCNTKCQTPMGAINSSMPFHNIHPLTIGECPKYVKSNRLVLATGLRNSPQRESRRKKRGLFGAIAGFIEGGWQGMVDGWYGYHHSNEQGSGYAADKESTQKAIDGVTNKVNSIIDKMNTQFEAVGREFNNLERRIENLNKKMEDGFLDVWTYNAELLVLMENERTLDFHDSNVKNLYDKVRLQLRDNAKELGNGCFEFYHKCDNECMESIRNGTYNYPQYSEEARLKREEISGVKLESIGTYQILSIYSTVASSLALAIMMAGLSLWMCSNGSLQCRICI

SEQ ID NO: 9172 - protein, 566 aa, synthetic construct
  REGION 1..566: note = hemagglutinin__InfluenzaA__AFM78646
MKAILVVLLYTFATANADTLCIGYHANNSTDTVDTVLEKNVTVTHSVNLLEDKHNGKLCKLRGVAPLHLGKCNIAGWILGNPECESLSTASSWSYIVETSSSDNGTCYPGDFIDYEELREQLSSVSSFERFEIFPKTSSWPNHDPNKGVTAACPHAGAKSFYKNLIWLVKKGNSYPKLSKSYINDKGKEVLVLWGIHHPSTSADQQGLYQNADAYVFVGTSRYSKKFKPEIAIRPKVRDQEGRMNYYWTLVEPGDKITFEATGNLVVPRYAFAMERNAGSGIIISDTPVHDCNTTCQTPKGAINTSLPFQNIHPITIGKCPKYVKSTKLRLATGLRNVPSIQSRGLFGAIAGFIEGGWTGMVDGWYGYHHQNEQGSGYAADLKSTQNAIDEITNKVNSVIEKMNTQFTAVGKEFNHLEKRIENLNKKVDDGFLDIWTYNAELLVLLENERTLDYHDSNVKNLYEKVRSQLKNNAKEIGNGCFEFYHKCDNTCMESVKNGTYDYPKYSEEAKLNREEIDGVKLESTRIYQILAIYSTVASSLVLVVSLGAISFWMCSNGSLQCRICI

SEQ ID NO: 9173 - protein, 565 aa, synthetic construct
  REGION 1..565: note = hemagglutinin__InfluenzaA__AFM85179
MKVKLLILLCTFTATYADTICIGYHANNSTDTVDTVLEKNVTVTHSVNLLENSHNGKLCLLKGIAPLQLGNCSVAGWILGNPECELLISKESWSYIVETPNPENGTCYPGYFADYEELREQLSSVSSFERFEIFPKESSWPNHTVTGVSASCSHNGKSSFYRNLLWLTGKNGLYPNLSKSYANNKEKEVLILWGVHHPPNIGDQRTLYYTENAYVSVVSSHYSRRFTPEITKRPKVRDQEGRINYYWTLLEPGDTIIFEANGNLIAPWYAFALSRGFGSGIIISNAPMDECDAKCQTPQGAINSSLPFQNVHPVTIGECPKYVRSAKLRMVTGLRNIPSIQSRGLFGAIAGFIEGGWTGMVDGWYGYHHQNEQGSGYAADQKSTQNAINGITNKVNSVIEKMNTQFTAVGKEFNKFERRMENLNKKVDDGFLDIWTYNAELLVLLENERTLDFHDSNVKNLYEKVKSQLKNNAKEIGNGCFEFYHKCNNECMESVKNGTYDYPKYSEESKLNREKIDGVKLESMGVYQILAIYSTVASSLVLLVSLGAISFWMCSNGSLQCRICI

SEQ ID NO: 9174 - protein, 566 aa, synthetic construct
  REGION 1..566: note = hemagglutinin__InfluenzaA__AFN11846
MKTIIALSYILCLVFAQKLPGNDNSTATLCLGHHAVPNGTLVKTITNDQIEVTNATELVQSSSTGRICDSPHRILDGKNCTLIDALLGDPHCDGFQNKEWDLFVERSKAYSNCYPYDVPDYASLRSLVASSGTLEFTNEGFNWTGVAQDGKSYACKRGSVKSFFSRLNWLHKLEYKYPALNVTMPNNDKFDKLYIWGVHHPSTDSDQTSLYVQASGRVTVSTKRSQQTVIPNIGSRPWVRGISSRISIYWTIVKPGDILLINSTGNLIAPRGYFKIRNGKSSIMRSDAPIGNCNSECITPNGSIPNDKPFQNVNRITYGACPRYVKQNTLKLATGMRNVPEKQTRGIFGAIAGFIENGWEGMVDGWYGFRHQNSEGTGQAADLKSTQAAIDQINGKLNRLIEKTNEKFHQIEKEFSEVEGRIQDLEKYVEDTKIDLWSYNAELLVALENQHTIDLTDSEMNKLFERTRKQLRENAEDMGNGCFKIYHKCDNACIGSIRNGTYDHDVYRDEALNNRFQIKGVELKSGYKDWILWISFAISCFLLCVVLLGFIMWACQKGNIRCNICI

SEQ ID NO: 9175 - protein, 566 aa, synthetic construct; identical to SEQ ID NO: 3530
  REGION 1..566: note = hemagglutinin__InfluenzaA__AFN17371

SEQ ID NO: 9176 - protein, 566 aa, synthetic construct; identical to SEQ ID NO: 2669
  REGION 1..566: note = hemagglutinin__InfluenzaA__AFN17381

SEQ ID NO: 9177 - protein, 566 aa, synthetic construct; identical to SEQ ID NO: 2669
  REGION 1..566: note = hemagglutinin__InfluenzaA__AFN17391

SEQ ID NO: 9178 - protein, 566 aa, synthetic construct; identical to SEQ ID NO: 2669
  REGION 1..566: note = hemagglutinin__InfluenzaA__AFN17401

SEQ ID NO: 9179 - protein, 566 aa, synthetic construct; identical to SEQ ID NO: 2669
  REGION 1..566: note = hemagglutinin__InfluenzaA__AFN17411

SEQ ID NO: 9180 - protein, 566 aa, synthetic construct; identical to SEQ ID NO: 2669
  REGION 1..566: note = hemagglutinin__InfluenzaA__AFN17421

SEQ ID NO: 9181 - protein, 566 aa, synthetic construct; identical to SEQ ID NO: 2760
  REGION 1..566: note = hemagglutinin__InfluenzaA__AFN17431

SEQ ID NO: 9182 - protein, 566 aa, synthetic construct
  REGION 1..566: note = hemagglutinin__InfluenzaA__AFN17441
MKAILVVLLYTFATANADTLCIGYHANNSTDTVDTVLEKNVTVTHSVNLLEDKHNGKLCKLRGVAPLHLGKCNIAGWILGNPECESLSKASSWSYIVETSSSDNGTCYPGDFIDYEELREQLSSVSSFERFEIFPKTSSWPNHDSNKGVTAACPHAGAKSFYKNLIWLVKKGNSYPKLSKSYINDKGKEVLVLWGIHHPSTSADQQSLYQNADAYVFVGTSRYSKKFKPEIAIRPKVRDQEGRMNYYWTLVEPGDKITFEATGNLVVPRYAFAMERNAGSGIIISDTPVHDCNTTCQTPKGAINTSLPFQNIHPITIGKCPKYVKSTKLRLATGLRNVPSIQSRGLFGAIAGFIEGGWTGMVDGWYGYHHQNEQGSGYAADLKSTQNAIDEITNKVNSVIEKMNTQFTAVGKEFNHLEKRIENLNKKVDDGFLDIWTYNAELLVLLENERTLDYHDSNVKNLYEKVRSQLKNNAKEIGNGCFEFYHKCDNTCMESVKNGTYDYPKYSEEAKLNREEIDGVKLESTRIYQILAIYSTVASSLVLVVSLGAISFWMCSNGSLQCRICI

SEQ ID NO: 9183 - protein, 566 aa, synthetic construct; identical to SEQ ID NO: 5224
  REGION 1..566: note = hemagglutinin__InfluenzaA__AFN17451

SEQ ID NO: 9184 - protein, 566 aa, synthetic construct; identical to SEQ ID NO: 3511
  REGION 1..566: note = hemagglutinin__InfluenzaA__AFN17467

SEQ ID NO: 9185 - protein, 566 aa, synthetic construct; identical to SEQ ID NO: 2669
  REGION 1..566: note = hemagglutinin__InfluenzaA__AFN17477

SEQ ID NO: 9186 - protein, 566 aa, synthetic construct; identical to SEQ ID NO: 3530
  REGION 1..566: note = hemagglutinin__InfluenzaA__AFN17487

SEQ ID NO: 9187 - protein, 566 aa, synthetic construct; identical to SEQ ID NO: 2669
  REGION 1..566: note = hemagglutinin__InfluenzaA__AFN17497

SEQ ID NO: 9188 - protein, 566 aa, synthetic construct; identical to SEQ ID NO: 2669
  REGION 1..566: note = hemagglutinin__InfluenzaA__AFN17507

SEQ ID NO: 9189 - protein, 566 aa, synthetic construct; identical to SEQ ID NO: 3511
  REGION 1..566: note = hemagglutinin__InfluenzaA__AFN17517

SEQ ID NO: 9190 - protein, 566 aa, synthetic construct; identical to SEQ ID NO: 3530
  REGION 1..566: note = hemagglutinin__InfluenzaA__AFN17527

SEQ ID NO: 9191 - protein, 566 aa, synthetic construct; identical to SEQ ID NO: 2669
  REGION 1..566: note = hemagglutinin__InfluenzaA__AFN17537

SEQ ID NO: 9192 - protein, 566 aa, synthetic construct; identical to SEQ ID NO: 2911
  REGION 1..566: note = hemagglutinin__InfluenzaA__AFN17547

SEQ ID NO: 9193 - protein, 566 aa, synthetic construct; identical to SEQ ID NO: 4200
  REGION 1..566: note = hemagglutinin__InfluenzaA__AFN17557

SEQ ID NO: 9194 - protein, 566 aa, synthetic construct; identical to SEQ ID NO: 3511
  REGION 1..566: note = hemagglutinin__InfluenzaA__AFN17567

SEQ ID NO: 9195 - protein, 566 aa, synthetic construct; identical to SEQ ID NO: 2911
  REGION 1..566: note = hemagglutinin__InfluenzaA__AFN17574

SEQ ID NO: 9196 - protein, 566 aa, synthetic construct; identical to SEQ ID NO: 2669
  REGION 1..566: note = hemagglutinin__InfluenzaA__AFN17580

SEQ ID NO: 9197 - protein, 566 aa, synthetic construct; identical to SEQ ID NO: 2669
  REGION 1..566: note = hemagglutinin__InfluenzaA__AFN17586

SEQ ID NO: 9198 - protein, 566 aa, synthetic construct; identical to SEQ ID NO: 3530
  REGION 1..566: note = hemagglutinin__InfluenzaA__AFN17595

SEQ ID NO: 9199 - protein, 566 aa, synthetic construct; identical to SEQ ID NO: 2669
  REGION 1..566: note = hemagglutinin__InfluenzaA__AFN17605

SEQ ID NO: 9200 - protein, 566 aa, synthetic construct; identical to SEQ ID NO: 2669
  REGION 1..566: note = hemagglutinin__InfluenzaA__AFN17615

SEQ ID NO: 9201 - protein, 566 aa, synthetic construct; identical to SEQ ID NO: 2669
  REGION 1..566: note = hemagglutinin__InfluenzaA__AFN17625

SEQ ID NO: 9202 - protein, 566 aa, synthetic construct; identical to SEQ ID NO: 2669
  REGION 1..566: note = hemagglutinin__InfluenzaA__AFN17635

SEQ ID NO: 9203 - protein, 566 aa, synthetic construct
  REGION 1..566: note = hemagglutinin__InfluenzaA__AFN17645
MKAILVVLLYTFATANADTLCIGYHANNSTDTVDTVLEKNVTVTHSVNLLEDKHNGKLCKLRGVAPLHLGKCNIAGWILGNPECESLSTASSWSYIVETSSSDNGTCYPGDFIDYEELREQLSSVSSFERVEIFPKTSSWPNHDSNKGVTAACPHAGAKSFYKNLIWLVKKGNSYPKLSKSYINDKGKEVLVLWGIHHPSTSADQQSLYQNADAYVFVGTSRYSKKFKPEIAIRPKVRDQEGRMNYYWTLVEPGDKITFEATGNLVVPRYAFAMERNAGSGIIISDTPVHDCNTTCQTPKGAINTSLPFQNIHPITIGKCPKYVKSTKLRLATGLRNVPSIQSRGLFGAIAGFIEGGWTGMVDGWYGYHHQNEQGSGYAADLKSTQNAIDEITNKVNSVIEKMNTQFTAVGKEFNHLEKRIENLNKKVDDGFLDIWTYNAELLVLLENERTLDYHDSNVKNLYEKVRSQLKNNAKEIGNGCFEFYHKCDNTCMESVKNGTYDYPKYSEEAKLNREEIDGVKLESTRIYQILAIYSTVASSLVLVVSLGAISFWMCSNGSLQCRICI

SEQ ID NO: 9204 - protein, 566 aa, synthetic construct; identical to SEQ ID NO: 3530
  REGION 1..566: note = hemagglutinin__InfluenzaA__AFN17655

SEQ ID NO: 9205 - protein, 566 aa, synthetic construct; identical to SEQ ID NO: 3530
  REGION 1..566: note = hemagglutinin__InfluenzaA__AFN17665

SEQ ID NO: 9206 - protein, 566 aa, synthetic construct
  REGION 1..566: note = hemagglutinin__InfluenzaA__AFN17675
MKAILIVLLYTFATANADTLCIGYHANNSTDTVDTVLEKNVTVTHSVNLLEDKHNGKLCKLRGVAPLHLGKCNIAGWILGNPECESLSTASSWSYIVETSSSDNGTCYPGDFIDYEELREQLSSVSSFERFEIFPKTSSWPNHDSNKGVTAACPHAGAKSFYKNLIWLVKKGNSYPKLSESYINDKGKEVLVLWGIHHPSTSADQQSLYQNADAYVFVGTSRYSKKFKPEIAIRPKVRDQEGRMNYYWTLVEPGDKITFEATGNLVVPRYAFAMERNAGSGIIISDTPVHDCNTTCQTPKGAINTSLPFQNIHPITIGKCPKYVKSTKLRLATGLRNVPSIQSRGLFGAIAGFIEGGWTGMVDGWYGYHHQNEQGSGYAADLKSTQNAIDEITNKVNSVIEKMNTQFTAVGKEFNHLEKRIENLNKKVDDGFLDIWTYNAELLVLLENERTLDYHDSNVKNLYEKVRSQLKNNAKEIGNGCFEFYHKCDNTCMESVKNGTYDYPKYSEEAKLNREEIDGVKLESTRIYQILAIYSTVASSLVLVVSLGAISFWMCSNGSLQCRICI

SEQ ID NO: 9207 - protein, 566 aa, synthetic construct
  REGION 1..566: note = hemagglutinin__InfluenzaA__AFN17685
MKAILVVLLYTFATANADTLCIGYHANNSTDTVDTILEKNVTVTHSVNLLEDKHNGKLCKLRGVAPLHLGKCNIAGWILGNPECESLSTASSWSYIVETSSSDNGTCYPGDFIDYEELREQLSSVSSFERFEIFPKTSSWPNHDSNKGVTAACPHAGAKSFYKNLIWLVKKGNSYPKLSKSYINDKGKEVLVLWGIHHPSTSADQQSLYQNADAYVFVGTSRYSKKFKPEIAIRPKVRDQEGRMNYYWTLVEPRDKITFEATGNLVVPRYAFAMERNAGSGIIISDTPVHDCNTTCQTPKGAINTSLPFQNIHPITIGKCPKYVKSTKLRLATGLRNVPSIQSRGLFGAIAGFIEGGWTGMVDGWYGYHHQNEQGSGYAADLKSTQNAIDEITNKVNSVIEKMNTQFTAVGKEFNHLEKRIENLNKKVDDGFLDIWTYNAELLVLLENERTLDYHDSNVKNLYEKVRSQLKNNAKEIGNGCFEFYHKCDNTCMESVKNGTYDYPKYSEEAKLNREEIDGVKLESTRIYQILAIYSTVASSLVLVVSLGAISFWMCSNGSLQCRICI

SEQ ID NO: 9208 - protein, 566 aa, synthetic construct; identical to SEQ ID NO: 2669
  REGION 1..566: note = hemagglutinin__InfluenzaA__AFN17695

SEQ ID NO: 9209 - protein, 566 aa, synthetic construct; identical to SEQ ID NO: 2669
  REGION 1..566: note = hemagglutinin__InfluenzaA__AFN17705

SEQ ID NO: 9210 - protein, 566 aa, synthetic construct; identical to SEQ ID NO: 3298
  REGION 1..566: note = hemagglutinin__InfluenzaA__AFN17715

SEQ ID NO: 9211 - protein, 566 aa, synthetic construct
  REGION 1..566: note = hemagglutinin__InfluenzaA__AFN17725
MKAILVVLLYTFATANADTLCIGYHANNSTDTVDTVLEKNVTVTHSVNLLEDKHNGKLCKLRGVAPLHLGKCNIAGWILGNPECESLSTASSWSYIVETSSSDNGTCYPGDFIDYEELREQLSSVSSFERFEIFPKTSSWPNHDSNKGVTAACPHAGAKSFYKNLIWLVKKGNSYPKLSKSYINDKGKEVLVLWGIHHPSTSADQQSLYQNADAYVFVGTSRYSKKFKPEIAIRPQVRDQEGRMNYYWTLVEPGDKITFEATGNLVVPRYAFAMERNAGSGIIISDTPVHDCNTTCQTPKGAINTSLPFQNIHPITIGKCPKYVKSTKLRLATGLRNVPSIQSRGLFGAIAGFIEGGWTGMVDGWYGYHHQNEQGSGYAADLKSTQNAIDEITNKVNSVIEKMNTQFTAVGKEFNHLEKRIENLNKKVDDGFLDIWTYNAELLVLLENERTLDYHDSNVKNLYEKVRSQLKNNAKEIGNGCFEFYHKCDNTCMESVKNGTYDYPKYSEEAKLNREEIDGVKLESTRIYQILAIYSTVASSLVLVVSLGAISFWMCSNGSLQCRICI

SEQ ID NO: 9212 - protein, 566 aa, synthetic construct; identical to SEQ ID NO: 2669
  REGION 1..566: note = hemagglutinin__InfluenzaA__AFN17735

SEQ ID NO: 9213 - protein, 566 aa, synthetic construct; identical to SEQ ID NO: 2669
  REGION 1..566: note = hemagglutinin__InfluenzaA__AFN17742

SEQ ID NO: 9214 - protein, 566 aa, synthetic construct; identical to SEQ ID NO: 2669
  REGION 1..566: note = hemagglutinin__InfluenzaA__AFN17748

SEQ ID NO: 9215 - protein, 566 aa, synthetic construct; identical to SEQ ID NO: 2669
  REGION 1..566: note = hemagglutinin__InfluenzaA__AFN17757

SEQ ID NO: 9216 - protein, 566 aa, synthetic construct; identical to SEQ ID NO: 3298
  REGION 1..566: note = hemagglutinin__InfluenzaA__AFN17767

SEQ ID NO: 9217 - protein, 566 aa, synthetic construct; identical to SEQ ID NO: 7679
  REGION 1..566: note = hemagglutinin__InfluenzaA__AFN17774

SEQ ID NO: 9218 - protein, 566 aa, synthetic construct; identical to SEQ ID NO: 2669
  REGION 1..566: note = hemagglutinin__InfluenzaA__AFN17783

SEQ ID NO: 9219 - protein, 566 aa, synthetic construct; identical to SEQ ID NO: 3298
  REGION 1..566: note = hemagglutinin__InfluenzaA__AFN17793

SEQ ID NO: 9220 - protein, 566 aa, synthetic construct; identical to SEQ ID NO: 2669
  REGION 1..566: note = hemagglutinin__InfluenzaA__AFN17803

SEQ ID NO: 9221 - protein, 566 aa, synthetic construct; identical to SEQ ID NO: 2669
  REGION 1..566: note = hemagglutinin__InfluenzaA__AFN17813

SEQ ID NO: 9222 - protein, 566 aa, synthetic construct
  REGION 1..566: note = hemagglutinin__InfluenzaA__AFN17823
MKAILVVLLYTFATANADTLCIGYHANNSTDTVDTVLEKNVTVTHSVNLLEDKHNGKLCKLRGVAPLHLGKCNIAGWILGNPECESLSTASSWSYIVETSSSDNGTCYPGDFIDYEELREQLSSVSSFERFEIFPKTSSWPNHDSNKGVTAACPHAGAKSFYKNLIWLVKKGNSYPKLSESYINDKGKEVLVLWGIHHPSTSADQQSLYQNADAYVFVGTSRYSKKFKPEIAIRPKVRDQEGRMNYYWTLVEPGDKITFEATGNLVVPRYAFAMERNAGSGIIISDTPVHDCNTTCQTPKGAINTSLPFQNIHPITIGKCPKYVKSTKLRLATGLRNVPSIQSRGLFGAIAGFIEGGWTGMVDGWYGYHHQNEQGSGYAADLKSTQNAIDEITNKVNSVIEKMNTQFTAVGKEFNHLEKRIENLNKKVDDGFLDIWTYNAELLVLLENERTLDYHDSNVKNLYEKVRSQLKNNAKEIGNGCFEFYHKCDNTCMESVKNGTYDYPKYSEEAKLNREEIDGVKLESTRIYQILAIYSTVASSLVLVVSLGAISFWMCSNGSLQCRICI

SEQ ID NO: 9223 - protein, 566 aa, synthetic construct
  REGION 1..566: note = hemagglutinin__InfluenzaA__AFN17833
MKAILVVLLYTFATANADTLCIGYHANNSTDTVDTVLEKNVTVTHSVNLLEDKHNGKLCKLRGVAPLHLGKCNIAGWILGNPECESLSTASSWSYIVETSSSDNGTCYPGDFIDYEELREQLSSVSSFERFEIFPKTSSWPNHDSNKGVTAACPNAGAKSFYKNLIWLVKKGNSYPKLSKSYINDKGKEVLVLWGIHHPSTSADQQSLYQNADAYVFVGTSRYSKKFKPEIAIRPKVRDQEGRMNYYWTLVEPGDKITFEATGNLVVPRYAFAMERNAGSGIIISDTPVHDCNTTCQTPKGAINTSLPFQNIHPITIGKCPKYVKSTKLRLATGLRNVPSIQSRGLFGAIAGFIEGGWTGMVDGWYGYHHQNEQGSGYAADLKSTQNAIDEITNKVNSVIEKMNTQFTAVGKEFNHLEKRIENLNKKVDDGFLDIWTYNAELLVLLENERTLDYHDSNVKNLYEKVRSQLKNNAKEIGNGCFEFYHKCDNTCMESVKNGTYDYPKYSEEAKLNREEIDGVKLESTRIYQILAIYSTVASSLVLVVSLGAISFWMCSNGSLQCRICI

SEQ ID NO: 9224 - protein, 566 aa, synthetic construct; identical to SEQ ID NO: 7178
  REGION 1..566: note = hemagglutinin__InfluenzaA__AFN17843

SEQ ID NO: 9225 - protein, 566 aa, synthetic construct; identical to SEQ ID NO: 2669
  REGION 1..566: note = hemagglutinin__InfluenzaA__AFN17853

SEQ ID NO: 9226 - protein, 566 aa, synthetic construct; identical to SEQ ID NO: 2911
  REGION 1..566: note = hemagglutinin__InfluenzaA__AFN17863

SEQ ID NO: 9227 - protein, 566 aa, synthetic construct
  REGION 1..566: note = hemagglutinin__InfluenzaA__AFN17873
MKAILVVLLYTFATANADTLCIGYHANNSTDTVDTVLEKNVTVTHSVNLLEDKHNGKLCKLRGVAPLHLGKCNIAGWILGNPECESLSTAGSWSYIVETSSSDNGTCYPGDFIDYEELREQLSSVSSFERFEIFPKTSSWPNHDLNKGVTAACPHAGAKSFYKNLIWLVKKGNSYPKLSKSYINDKGKEVLVLWGIHHPSTSADQQSLYQNADAYVFVGTSRYSKKFKPEIAIRPKVRDQEGRMNYYWTLVEPGDKITFEATGNLVVPRYAFAMERNAGSGIIISDTPVHDCNTTCQTPKGAINTSLPFQNIHPITIGKCPKYVKSTKLRLATGLRNVPSIQSRGLFGAIAGFIEGGWTGMVDGWYGYHHQNEQGSGYAADLKSTQNAIDEITNKVNSVIEKMNTQFTAVGKEFNHLEKRIENLNKKVDDGFLDIWTYNAELLVLLENERTLDYHDSNVKNLYEKVRSQLKNNAKEIGNGCFEFYHKCDNTCMESVKNGTYDYPKYSEEAKLNREEIDGVKLESTRIYQILAIYSTVASSLVLVVSLGAISFWMCSNGSLQCRICI

SEQ ID NO: 9228 - protein, 566 aa, synthetic construct
  REGION 1..566: note = hemagglutinin__InfluenzaA__AFN17883
MKAILVVLLYTFATANADTLCIGYHANNSTDTVDTVLEKNVTVTHSVNLLEDKHNGKLCKLRGVAPLHLGKCNIAGWILGNPECESLSTASSWSYIVETSSSDNGTCYPGDFIDYEELREQLSSVSSFERFEIFPKTSSWPNHDSNKGVTAACPHAGAKSFYKNLIWLVKKGNSYPKLSKSYINDKGKEVLVLWGIHHPSTSADQQSLYQNADAYVFVGTSRYSKKFKPEIAIRPKVRDQEGRMNYYWTLVEPGDKITFEATGNLVVPRYAFAMERNAGSGIIISDTPVHDCNTTCQTLKGAINTSLPFQNIHPITIGKCPKYVKSTKLRLATGLRNVPSIQSRGLFGAIAGFIEGGWTGMVDGWYGYHHQNEQGSGYAADLKSTQNAIDEITNKVNSVIEKMNTQFTAVGKEFNHLEKRIENLNKKVDDGFLDIWTYNAELLVLLENERTLDYHDSNVKNLYEKVRSQLKNNAKEIGNGCFEFYHKCDNTCMESVKNGTYDYPKYSEEAKLNREEIDGVKLESTRIYQILAIYSTVASSLVLVVSLGAISFWMCSNGSLQCRICI

SEQ ID NO: 9229 - protein, 566 aa, synthetic construct; identical to SEQ ID NO: 2669
  REGION 1..566: note = hemagglutinin__InfluenzaA__AFN17893

SEQ ID NO: 9230 - protein, 566 aa, synthetic construct
  REGION 1..566: note = hemagglutinin__InfluenzaA__AFN17903
MKAILVVLLYTFATANADTLCIGYHANNSTDTVDTVLEKNVTVTHSVNLLEDKHNGKLCKLRGVAPLHLGKCNIAGWILGNPECESLSTASSWSYIVETSSSDNGTCYPGDFIDYEELREQLSSVSSFERFEIFPKTSSWPNHESNKGVTAACPHAGAKSFYKNLIWLVKKGNSYPKLSKSYVNDKGKEVLVLWGIHHPSTSADQQSLYQNADAYVFVGTSRYSKKFKPEIAIRPKVRDQEGRMNYYWTLVEPGDKITFEATGNLVVPRYAFAMERNAGSGIIISDTPVHDCNTTCQTPKGAINTSLPFQNIHPITIGKCPKYVKSTKLRLATGLRNVPSIQSRGLFGAIAGFIEGGWTGMVDGWYGYHHQNEQGSGYAADLKSTQNAIDEITNKVNSVIEKMNTQFTAVGKEFNHLEKRIENLNKKVDDGFLDIWTYNAELLVLLENERTLDYHDSNVKNLYEKVRSQLKNNAKEIGNGCFEFYHKCDNTCMESVKNGTYDYPKYSEEAKLNREEIDGVKLESTRIYQILAIYSTVASSLVLVVSLGAISFWMCSNGSLQCRICI

SEQ ID NO: 9231 - protein, 566 aa, synthetic construct; identical to SEQ ID NO: 3022
  REGION 1..566: note = hemagglutinin__InfluenzaA__AFN17919

SEQ ID NO: 9232 - protein, 566 aa, synthetic construct; identical to SEQ ID NO: 2911
  REGION 1..566: note = hemagglutinin__InfluenzaA__AFN17929

SEQ ID NO: 9233 - protein, 566 aa, synthetic construct; identical to SEQ ID NO: 8927
  REGION 1..566: note = hemagglutinin__InfluenzaA__AFN17939

SEQ ID NO: 9234 - protein, 566 aa, synthetic construct; identical to SEQ ID NO: 3530
  REGION 1..566: note = hemagglutinin__InfluenzaA__AFN17949

SEQ ID NO: 9235 - protein, 566 aa, synthetic construct
  REGION 1..566: note = hemagglutinin__InfluenzaA__AFN17959
MKAILVVLLYTFATANADTLCIGYHANNSTDTVDTVLEKNVTVTHSVNLLEDKHNGKLCKLRGVAPLHLGKCNIAGWILGNPECESLSTASSWSYIVETSSSDNGTCYPGDFIDYEELREQLSSVSSFERFEIFPKTSSWPNHDSNKGVTAACPHAGAKSFYKNLIWLVKKGNSYPKLSKSYVNDKGKEVLVLWGIHHPSTSADQQSLYQNADAYVFVGTSRYSKKFKPEIAIRPKVRDQEGRMNYYWTLVEPGDKITFEATGNLVVPRYAFAMERNAGSGIIISDTPVHDCNTTCQTPKGAINTSLPFQNIHPITIGKCPKYVKSTKLRLATGLRNVPSIQSRGLFGAIAGFIEGGWTGMVDGWYGYHHQNEQGSGYAADLKSTQNAIDEITNKVNSVIEKMNTQFTAVGKEFNHLEKRIENLNKKVDDGFLDIWTYNAELLVLLENERTLDYHDSNVKNLYEKVRSQLKNNAKEIGNGCFEFYHKCDNTCMESVKNGTYDYPKYSEEAKLNREEIDGVKLESTRIYQILAIYSTVASSLVLVVSLGAISFWMCSNGSLQCRICI

SEQ ID NO: 9236 - protein, 566 aa, synthetic construct; identical to SEQ ID NO: 4351
  REGION 1..566: note = hemagglutinin__InfluenzaA__AFN17969

SEQ ID NO: 9237 - protein, 566 aa, synthetic construct; identical to SEQ ID NO: 3530
  REGION 1..566: note = hemagglutinin__InfluenzaA__AFN17979

SEQ ID NO: 9238 - protein, 566 aa, synthetic construct
  REGION 1..566: note = hemagglutinin__InfluenzaA__AFN17989
MKAILVVLLYTFATANADTLCIGYHANNSTDTVDTVLEKNVTVTHSVNLLEDKHNGKLCKLRGVAPLHLGKCNIAGWILGNPECESLSTASSWSYIVETSSSDNGTCYPGDFIDYEELREQLSSVSSFERFEIFPKTSSWPNHDSNKGVTAACPHAGAKSFYKNLIWLVKKGNSYPKLSKSYINDKGKEVLVLWGIHHPSTSADQQSLYQNADAYVFVGTSRYSKKFKPEIAIRPKVRDQEGRMNYYWTLVEPGDKITFEATGNLVVPRYAFAMERNAGSGIIISDTPVHDCNTTCQTPKGAINTSLPFQNIHPITIGKCPKYVKSTKLRLATGLRNVPSIQSRGLFGAIAGFIEGGWTGMVDGWYGYHHQNEQGSGYAADLKSTQNAIDEITNKVNSVIGKMNTQFTAVGKEFNHLEKRIENLNKKVDDGFLDIWTYNAELLVLLENERTLDYHDSNVKNLYEKVRSQLKNNAKEIGNGCFEFYHKCDNTCMESVKNGTYDYPKYSEEAKLNREEIDGVKLESTRIYQILAIYSTVASSLVLVVSLGAISFWMCSNGSLQCRICI

SEQ ID NO: 9239 - protein, 566 aa, synthetic construct; identical to SEQ ID NO: 2669
  REGION 1..566: note = hemagglutinin__InfluenzaA__AFN17999

SEQ ID NO: 9240 - protein, 566 aa, synthetic construct
  REGION 1..566: note = hemagglutinin__InfluenzaA__AFN18019
MKAILVVLLYTFATAKADTLCIGYHANNSTDTVDTVLEKNVTVTHSVNLLEDKHNGKLCKLRGVAPLHLGKCNIAGWILGNPECESLSTASSWSYIVETSSSDNGTCYPGDFIDYEELREQLSSVSSFERFEMFPKTSSWPNHDSNKGVTAACPHAGAKSFYKNLIWLVKKGNSYPKLSKSYINDKGKEVLVLWGIHHPSTSADQQSLYQNADAYVFVGTSRYSKKFKPEIAIRPKVRDQEGRMNYYWTLVEPGDKITFEATGNLVVPRYAFAMERNAGSGIIISDTPVHDCNTTCQTPKGAINTSLPFQNIHPITIGKCPKYVKSTKLRLATGLRNVPSIQSRGLFGAIAGFIEGGWTGMVDGWYGYHHQNEQGSGYAADLKSTQNAIDEITNKVNSVIEKMNTQFTAVGKEFNHLEKRIENLNKKVDDGFLDIWTYNAELLVLLENERTLDYHDSNVKNLYEKVRSQLKNNAKEIGNGCFEFYHKCDNTCMESVKNGTYDYPKYSEEAKLNREEIDGVKLESTRIYQILAIYSTVASSLVLVVSLGAISFWMCSNGSLQCRICI

SEQ ID NO: 9241 - protein, 566 aa, synthetic construct; identical to SEQ ID NO: 3530
  REGION 1..566: note = hemagglutinin__InfluenzaA__AFN18039

SEQ ID NO: 9242 - protein, 566 aa, synthetic construct; identical to SEQ ID NO: 2669
  REGION 1..566: note = hemagglutinin__InfluenzaA__AFN18049

SEQ ID NO: 9243 - protein, 566 aa, synthetic construct
  REGION 1..566: note = hemagglutinin__InfluenzaA__AFN18059
MKAILVVLLYTFATANADTLCIGYHANNSTDTVDTVLEKNVTVTHSVNLLEDKHNGKLCKLRGVAPLHLGKCNIAGWILGNPECESLSTASSWSYIVETSSSDNGTCYPGDFIDYEELREQLSSVSSFERFEIFPKTSSWPNHDSNKGVTAACPHAGAKSFYKNLIWLVKKGNSYPKLSKSYINDKGKEVLVLWGIHHPSTSADQQSLYQNADAYVFVGTSRYSKKFKPEIAIRPKVRDQEGRMNYYWTLVEPGDKITFEATGNLVVPRYAFAMERNAGSGIIISDTPVHDCNTTCQTPKGAINTSLPFQNIHPITIGKCPKYVKSTKLRLATGLRNVPSIQSRGLFGAIAGFIEGGWTGMVDGWYGYHHQNEQGSGYAADLKSTQNAIDEITNKVNSVIEKMNTQFTAVGKEFNHLEKRIENLNKKVDDGFLDIWTYNAELLVLLENERTLDYHDSNVKNLYEKVRSQLKNNAKEIGNGCFEFYHKCDNACMESVKNGTYDYPKYSEEAKLNREEIDGVKLESTRIYQILAIYSTVASSLVLVVSLGAISFWMCSNGSLQCRICI

SEQ ID NO: 9244 - protein, 566 aa, synthetic construct; identical to SEQ ID NO: 2669
  REGION 1..566: note = hemagglutinin__InfluenzaA__AFN18078

SEQ ID NO: 9245 - protein, 566 aa, synthetic construct
  REGION 1..566: note = hemagglutinin__InfluenzaA__AFN18088
MKAILVVLLYTFATANADTLCIGYHANNSTDTVDTVLEKNVTVTHSVNLLEDKHNGKLCKLRGVAPLHLGKCNIAGWILGNPECESLSTASSWSYIVETSSSDNGTCYPGDFIDYEELREQLSSVSSFERFEIFPKTSSWPNHDSNKGVTAACPHAGAKSFYKNLIWLVKKGNSYPKLSKSYINDKGKEVLVLWGIHHPSTSADQQSLYQNADTYVFVGTSRYSKKFKPEIAIRPKVRDQEGRMNYYWTLVEPGDKITFEATGNLVVPRYAFAMVRNAGSGIIISDTPVHDCNTTCQTPKGAINTSLPFQNIHPITIGKCPKYVKSTKLRLATGLRNVPSIQSRGLFGAIAGFIEGGWTGMVDGWYGYHHQNEQGSGYAADLKSTQNAIDEITNKVNSVIEKMNTQFTAVGKEFNHLEKRIENLNKKVDDGFLDIWTYNAELLVLLENERTLDYHDSNVKNLYEKVRSQLKNNAKEIGNGCFEFYHKCDNTCMESVKNGTYDYPKYSEEAKLNREEIDGVKLESTRIYQILAIYSTVASSLVLVVSLGAISFWMCSNGSLQCRICI

SEQ ID NO: 9246 - protein, 566 aa, synthetic construct
  REGION 1..566: note = hemagglutinin__InfluenzaA__AFN18098
MKAILVVLLYTFATANADTLCIGYHANNSTDTVDTVLEKNVTVTHSVNLLEDKHNGKLCKLRGIAPLHLGKCNIAGWILGNPECESLSTASSWSYIVETSSSDNGTCYPGNFIDYEELREQLSSVSSFERFEIFPKTSSWPNHDSNKGVTAACPHAGAKSFYKNLIWLVKKGNSYPKLSKSYINDKGKEVLVLWGIHHPSTSADQQSLYQNADAYVFVGTSRYSKKFKPEIAIRPKVRDQEGRMNYYWTLVEPGDKITFEATGNLVVPRYAFAVERNAGSGIIISDTPVHDCNTTCQTPKGAINTSLPFQNIHPITIGKCPKYVKSTKLRLATGLRNVPSIQSRGLFGAIAGFIEGGWTGMVDGWYGYHHQNEQGSGYAADLKSTQNAIDEITNKVNSVIEKMNTQFTAVGKEFNHLEKRIENLNKKVDDGFLDIWTYNAELLVLLENERTLDYHDSNVKNLYEKVRSQLKNNAKEIGNGCFEFYHKCDNTCMESVKNGTYDYPKYSEEAKLNREEIDGVKLESTRIYQILAIYSTVASSLVLVVSLGAISFWMCSNGSLQCRICI

SEQ ID NO: 9247 - protein, 566 aa, synthetic construct
  REGION 1..566: note = hemagglutinin__InfluenzaA__AFN18105
MKAILIVLLYTFATANADTLCIGYHANNSTDTVDTVLEKNVTVTHSVNLLEDKHNGKLCKLRGVAPLHLGKCNIAGWILGNPECESLSTASSWSYIVETSSSDNGTCYPGDFIDYEELREQLSSVSSFERFEIFPKTSSWPNHDSNKGVTAACPHAGAKSFYKNLIWLVKKGNSYPKLSKSYINDKGKEVLVLWGIHHPSTSADQQSLYQNADAYVFVGTSRYSKKFKPEIAIRPKVRDQEGRMNYYWTLVEPGDKITFEATGNLVVPRYAFAMERNAGSGIIISDTPVHDCNTNCQTPKGAINTSLPFQNIHPITIGKCPKYVKSTKLRLATGLRNVPSIQSRGLFGAIAGFIEGGWTGMVDGWYGYHHQNEQGSGYAADLKSTQNAIDEITNKVNSVIEKMNTQFTAVGKEFNHLEKRIENLNKKVDDGFLDIWTYNAELLVLLENERTLDYHDSNVKNLYEKVRSQLKNNAKEIGNGCFEFYHKCDNTCMESVKNGTYDYPKYSEEAKLNREEIDGVKLESTRIYQILAIYSTVASSLVLVVSLGAISFWMCSNGSLQCRICI

SEQ ID NO: 9248 - protein, 566 aa, synthetic construct; identical to SEQ ID NO: 2911
  REGION 1..566: note = hemagglutinin__InfluenzaA__AFN18107

SEQ ID NO: 9249 - protein, 566 aa, synthetic construct; identical to SEQ ID NO: 9243
  REGION 1..566: note = hemagglutinin__InfluenzaA__AFN18117

SEQ ID NO: 9250 - protein, 566 aa, synthetic construct; identical to SEQ ID NO: 2669
  REGION 1..566: note = hemagglutinin__InfluenzaA__AFN18119

SEQ ID NO: 9251 - protein, 566 aa, synthetic construct
  REGION 1..566: note = hemagglutinin__InfluenzaA__AFN18121
MKAILVVLLYTFATANADTLCIGYHANNSTDTVDTVLEKNVTVTHSVNLLEDKHNGKLCKLRGVAPLHLGKCNIAGWILGNPECESLSTASSWSYIVETSSSDNGTCYPGDFIDYEELREQLSSVSSFERFEIFPKTSSWPNHDSNKGVTAACPHAGARSFYKNLIWLVKKGNSYPKLSKSYINDKGKEVLVLWGIHHPSTSADQQSLYQNADAYVFVGTSRYSKKFKPEIAIRPKVRDQEGRMNYYWTLVEPGDKITFEATGNLVVPRYAFAMVRNAGSGIIISDTPVHDCNTTCQTPKGAINTSLPFQNIHPITIGKCPKYVKSTKLRLATGLRNVPSIQSRGLFGAIAGFIEGGWTGMVDGWYGYHHQNEQGSGYAADLKSTQNAIDEITNKVNSVIEKMNTQFTAVGKEFNHLEKRIENLNKKVDDGFLDIWTYNAELLVLLENERTLDYHDSNVKNLYEKVRSQLKNNAKEIGNGCFEFYHKCDNTCMESVKNGTYDYPKYSEEAKLNREEIDGVKLESTRIYQILAIYSTVASSLVLVVSLGAISFWMCSNGSLQCRICI

SEQ ID NO: 9252 - protein, 566 aa, synthetic construct; identical to SEQ ID NO: 9243
  REGION 1..566: note = hemagglutinin__InfluenzaA__AFN18133

SEQ ID NO: 9253 - protein, 566 aa, synthetic construct; identical to SEQ ID NO: 8927
  REGION 1..566: note = hemagglutinin__InfluenzaA__AFN18135

SEQ ID NO: 9254 - protein, 566 aa, synthetic construct; identical to SEQ ID NO: 3511
  REGION 1..566: note = hemagglutinin__InfluenzaA__AFN18137

SEQ ID NO: 9255 - protein, 566 aa, synthetic construct
  REGION 1..566: note = hemagglutinin__InfluenzaA__AFN18139
MEAILVVLLYTFATANADTLCIGYHANNSTDTVDTVLEKNVTVTHSVNLLEDKHNGKLCKLRGVAPLHLGKCNIAGWILGNPECESLSTASSWSYIVETSSSDNGTCYPGDFIDYEELREQLSSVSSFERFEIFPKTSSWPNHDSNKGVTAACPHAGAKSFYKNLIWLVKKGNSYPKLSKSYINDKGKEVLVLWGIHHPSTSADQQGLYQNADAYVFVGSSRYSKKFKPEIAIRPKVRDQEGRMNYYWTLVEPGDKITFEATGNLVVPRYAFAMERNAGSGIIISDTPVHDCNTTCQTPKGAINTSLPFHNIHPITIGKCPKYVKSTKLRLATGLRNVPSIQSRGLFGAIAGFIEGGWTGMVDGWYGYHHQNEQGSGYAADLKSTQNAIDEITNKVNSVIEKMNTQFTAVGKEFNHLEKRIENLNKKVDDGFLDIWTYNAELLVLLENERTLDYHDSNVKNLYEKVRSQLKNNAKEIGNGCFEFYHKCDNTCMESVKNGTYDYPKYSEEAKLNREEIDGVKLESTRIYQILAIYSTVASSLVLVVSLGAISFWMCSNGSLQCRICI

SEQ ID NO: 9256 - protein, 566 aa, synthetic construct; identical to SEQ ID NO: 9251
  REGION 1..566: note = hemagglutinin__InfluenzaA__AFN18141

SEQ ID NO: 9257 - protein, 566 aa, synthetic construct; identical to SEQ ID NO: 3530
  REGION 1..566: note = hemagglutinin__InfluenzaA__AFN18148

SEQ ID NO: 9258 - protein, 566 aa, synthetic construct; identical to SEQ ID NO: 3833
  REGION 1..566: note = hemagglutinin__InfluenzaA__AFN18155

SEQ ID NO: 9259 - protein, 566 aa, synthetic construct
  REGION 1..566: note = hemagglutinin__InfluenzaA__AFN18157
MKAILVVLLYTFATANADTLCIGYHANNSTDTVDTVLEKNVTVTHSVNLLEDKHNGKLCKLRGVAPLHLGKCNIAGWILGNPECESLSTASSWSYIVETSSSGNGTCYPGDFIDYEELREQLSSVSSFERFEIFPKTSSWPNHDSNKGVTAACPHAGAKSFYKNLIWLVKKGNSYPKLSKSYINDKGKEVLVLWGIHHPSTSADQQSLYQNADAYAFVGTSRYSKKFKPEIAIRPKVRDQEGRMNYYWTLVEPGDKITFEATGNLVVPRYAFAMERNAGSGIIISDTPVHDCNTTCQTPKGAINTSLPFQNIHPITIGKCPKYVKSTKLRLATGLRNVPSIQSRGLFGAIAGFIEGGWTGMVDGWYGYHHQNEQGSGYAADLKSTQNAIDEITNKVNSVIEKMNTQFTAVGKEFNHLEKRIENLNKKVDDGFLDIWTYNAELLVLLENERTLDYHDSNVKNLYEKVRSQLKNNAKEIGNGCFEFYHKCDNTCMESVKNGTYDYPKYSEEAKLNREEIDGVKLESTRIYQILAIYSTVASSLVLVVSLGAISFWMCSNGSLQCRICI

SEQ ID NO: 9260 - protein, 566 aa, synthetic construct
  REGION 1..566: note = hemagglutinin__InfluenzaA__AFN18159
MEAILVVLLYTFATANADTLCIGYHANNSTDTVDTVLEKNVTVTHSVNLLEDKHNGKLCKLRGVAPLHLGKCNIAGWILGNPECESLSTASSWSYIVETSSSDNGTCYPGDFIDYEELREQLSSVSSFERFEIFPKTSSWPNHDSNKGVTAACPHAGSKSFYKNLIWLVKKGNSYPKLSKSYINDKGKEVLVLWGIHHPSTSADQQSLYQNADAYVFVGSSRYSKKFKPEIAIRPKVRDQEGRMNYYWTLVEPGDKITFEATGNLVVPRYAFAMERNAGSGIIISDTPVHDCNTTCQTPKGAINTSLPFHNIHPITIGKCPKYVKSTKLRLATGLRNVPSIQSRGLFGAIAGFIEGGWTGMVDGWYGYHHQNEQGSGYAADLKSTQNAIDEITNKVNSVIEKMNTQFTAVGKEFNHLEKRIENLNKKVDDGFLDIWTYNAELLVLLENERTLDYHDSNVKNLYEKVRNQLKNNAKEIGNGCFEFYHKCDNTCMESVKNGTYDYPKYSEEAKLNREEIDGVKLESTRIYQILAIYSTVASSLVLVVSLGAISFWMCSNGSLQCRICI

SEQ ID NO: 9261 - protein, 566 aa, synthetic construct
  REGION 1..566: note = hemagglutinin__InfluenzaA__AFN18164
MKAILVVLLYTFATTNADTLCIGYHANNSTDTVDTVLEKNVTVTHSVNLLEDKHNGKLCKLRGVAPLHLGKCNIAGWILGNPECESLSTASSWSYIVETSSSDNGTCYPGDFIDYEELREQLSSVSSFERFEIFPKTSSWPNHDSNKGVTAACPHAGAKSFYKNLIWLVKKGNSYPKLSKSYINDKGKEVLVLWGIHHPSTSADQQSLYQNADAYVFVGTSRYSKKFKPEIAIRPKVRDQEGRMNYYWTLVEPGDKITFEATGNLIVPRYAFAMERNAGSGIIISNTPVHDCNTTCQTPKGAINTSLPFQNIHPITIGKCPKYVKSTKLRLATGLRNVPSIQSRGLFGAIAGFIEGGWTGMVDGWYGYHHQNEQGSGYAADLKSTQNAIDKITNKVNSVIEKMNTQFTAVGKELNHLEKRIENLNKKVDDGFLDIWTYNAELLVLLENERTLDYHDSNVKNLYEKVRSQLKNNAKEIGNGCFEFYHKCDNTCMESVKNGTYDYPKYSEEAKLNREEIDGVKLESTRIYQILAVYSTVASSLVLVVSLGAISFWMCSNGSLQCRICI

SEQ ID NO: 9262 - protein, 566 aa, synthetic construct
  REGION 1..566: note = hemagglutinin__InfluenzaA__AFN18171
MKAILVVLLYTFATANADTLCIGYHANNSTDTVDTVLEKNVTVTHSVNLLEDKHSGKLCKLRGVAPLHLGKCNIAGWILGNPECESLSTASSWSYIVETSSSDNGKCYPGDFIDYEELREQLSSVSSFERFEIFPKTSSWPNHDSNKGVTAACPHAGAKSFYKNLIWLVKKGNSYPKLSKSYINDKGKEVLVLWGIHHPSTSADQQSLYQNADAYVFVGTSKYSKKFKPEIAIRPKVRDQEGRMNYYWTLVEPGDKITFEATGNLVVPRYAFAMERNAGSGIIISDTPVKDCNTTCQTPKGAINTSLPFQNIHPITIGKCPKYVKSTKLRLATGLRNVPSIQSRGLFGAIAGFIEGGWTGMVDGWYGYHHQNEQGSGYAADLKSTQNAIDEITNKVNSVIEKMNTQFTAVGKEFNHLEKRIENLNKKVDDGFLDIWTYNAELLVLLENERTLDYHDSNVKNLYEKVRSQLKNNAKEIGNGCFEFYHKCDNTCMESVKNGTYDYPKYSEEAKLNREEIDGVKLESTRIYQILAIYSTVASSLVLVVSLGAISFWMCSNGSLQCRICI

SEQ ID NO: 9263 - protein, 566 aa, synthetic construct
  REGION 1..566: note = hemagglutinin__InfluenzaA__AFN18176
MKAILVVLLYTFATANADTLCIGYHANNSTDTVDTVLEKNVTVTHSVNLLEDKHNGKLCKLRGVAPLHLGKCNIAGWILGNPECESLSTASSWSYIVETSSSDNGTCYPGDFIDYEELREQLSSVSSFERFEIFPKTSSWPNHDSNKGVTAACPHAGAKSFYKNLIWLVKKGNSYPKLSKSYINDKGKEVLVLWGIHHPSTSADQQSLYQNADAYVFVGTSRYSKKFKPEIAIRPKVRDQEGRMNYYWTLVEPGDKITFEATGNLLVPRYAFAMERNAGSGIIISDTPVHDCNTTCQTPKGAINTSLPFQNIHPITIGKCPKYVKSTKLRLATGLRNIPSIQSRGLFGAIAGFIEGGWTGMVDGWYGYHHQNEQGSGYAADLKSTQNAIDEITNKVNSVIEKMNTQFTAVGKEFNHLEKRIENLNKKVDDGFLDIWTYNAELLVLLENERTLDYHDSNVKNLYEKVRSQLKNNAKEIGNGCFEFYHKCDNTCMESVKNGTYDYPKYSEEAKLNREEIDGVKLESTRIYQILAIYSTVASSLVLVVSLGAISFWMCSNGSLQCRICI

SEQ ID NO: 9264 - protein, 566 aa, synthetic construct
  REGION 1..566: note = hemagglutinin__InfluenzaA__AFN18183
MKAILVVLLYTFATANADTLCIGYHANNSTDTVDTILEKNVTVTHSVNLLEDKHNGKLCKLRGVAPLHLGKCNIAGWILGNPECESLSTASSWSYIVETSSSDNGTCYPGDFIDYEELREQLSSVSSFERFEIFPKTSSWPNHDSNKGVTAACPHAGAKSFYKNLIWLVKKGNSYPKLSKSYINDKGKEVLVLWGIHHPSTSADQQSLYQNADAYVFVGTSRYSKKFKPEIAIRPKVRDQEGRMNYYWTLVEPGDKITFEATGNLMVPRYAFAMERNAGSGIIISDTPVHDCNTTCQTPKGAINTSLPFQNIHPITIGKCPKYVKSTKLRLATGLRNVPSIQSRGLFGAIAGFIEGGWTGMVDGWYGYHHQNEQGSGYAADLKSTQNAIDEITNKVNSVIEKMNTQFTAVGKEFNHLEKRIENLNKKVDDGFLDIWTYNAELLVLLENERTLDYHDSNVKNLYEKVRSQLKNNAKEIGNGCFEFYHKCDNTCMESVKNGTYDYPKYSEEAKLNREEIDGVKLESTRIYQILAIYSTVASSLVLVVSLGAISFWMCSNGSLQCRICI

SEQ ID NO: 9265 - protein, 566 aa, synthetic construct; identical to SEQ ID NO: 4221
  REGION 1..566: note = hemagglutinin__InfluenzaA__AFN18195

SEQ ID NO: 9266 - protein, 566 aa, synthetic construct; identical to SEQ ID NO: 2669
  REGION 1..566: note = hemagglutinin__InfluenzaA__AFN18200

SEQ ID NO: 9267 - protein, 566 aa, synthetic construct
  REGION 1..566: note = hemagglutinin__InfluenzaA__AFN18207
MKAILVVLLYTFATANADTLCIGYHANNSTDTVDTVLEKNVTVTHSVNLLEDKHNGKLCKLRGVAPLHLGKCNIAGWILGNPECESLSTASSWSYIVETSSSDNGTCYPGDFIDYEELREQLSSVSSFERFEIFPKTSSWPNHDSNKGVTAACPHAGAKSFYKSLIWLVKKGNSYPKLSKSYINDKGREVLVLWGIHHPSTSADQQSLYQNADAYVFVGTSRYSKKFKPEIAIRPKVRDQEGRMNYYWTLVEPGDKITFEATGNLVVPRYAFAMERNAGSGIIISDTPVHDCNTTCQTPKGAINTSLPFQNIHPITIGKCPKYVKSTKLRLATGLRNVPSIQSRGLFGAIAGFIEGGWTGMVDGWYGYHHQNEQGSGYAADLKSTQNAIDEITNKVNSVIEKMNTQFTAVGKEFNHLEKRIENLNKKVDDGFLDIWTYNAELLVLLENERTLDYHDSNVKNLYEKVRSQLKNNAKEIGNGCFEFYHKCDNTCMESVKNGTYDYPKYSEEAKLNREEIDGVKLESTRIYQILAIYSTVASSLVLVVSLGAISFWMCSNGSLQCRICI

SEQ ID NO: 9268 - protein, 566 aa, synthetic construct
  REGION 1..566: note = hemagglutinin__InfluenzaA__AFN18214
MKAILVVLLYTFATANADTLCIGYHANNSTDTVDTVLEKNVTVTHSVNILEDKHNGKLCKLRGVAPLHLGKCNIAGWILGNPECESLSTASSWSYIVETSSSDNGTCYPGDFINYEELREQLSSVSSFERFEIFPKTSSWPNHDSNKGVTAACPHAGAKSFYKNLIWLVKKGNSYPKLSKSYINDKGKEVLVLWGIHHPSTSADQQSLYQNADAYVFVGSSRYSKKFKPEIAIRPKVRDQEGRMNYYWTLVEPGDKITFEATGNLVVPRYAFAMERNAGSGIIISDTPVHDCNTTCQTPKGAINTSLPFQNIHPITIGKCPKYVKSTKLRLATGLRNVPSIQSRGLFGAIAGFIEGGWTGMVDGWYGYHHQNEQGSGYAADLKSTQNAIDEITNKVNSVIEKMNTQFTAVGKEFNHLEKRIENLNKKVDDGFLDIWTYNAELLVLLENERTLDYHDSNVKNLYEKVRSQLKNNAKEVGNGCFEFYHKCDNTCMESVKNGTYDYPKYSEEAKLNREEIDGVKLESTRIYQILAIYSTAASSLVLVVSLGAISFWMCSNGSLQCRICI

SEQ ID NO: 9269 - protein, 566 aa, synthetic construct; identical to SEQ ID NO: 5224
  REGION 1..566: note = hemagglutinin__InfluenzaA__AFN18224

SEQ ID NO: 9270 - protein, 566 aa, synthetic construct; identical to SEQ ID NO: 4221
  REGION 1..566: note = hemagglutinin__InfluenzaA__AFN18231

SEQ ID NO: 9271 - protein, 566 aa, synthetic construct
  REGION 1..566: note = hemagglutinin__InfluenzaA__AFN18233
MKAILVVLLYTFATANADTLCIGYHANNSTDTVDTVLEKNVTVTHSVNLLEDKHNGKLCKLRGVAPLHLGKCNIAGWILGNPECESLSTASSWSYIVETSSSDNGTCYPGDFIDYEELREQLSSVSSFERFEIFPKTSSWPNHDPNKGVTAACPHAGAKSFYKNLIWLVKKGNSYPKLSKSYINDKGKEVLVLWGIHHPSTSADQQSLYQNADAYVFVGTSRYSRKFKPEIAIRPKVRDQEGRMNYYWTLVEPGDKITFEATGNLVVPRYAFAMERNAGSGIIISDTPVHDCNTTCQTPKGAINTSLPFQNIHPITIGKCPKYVKSTKLRLATGLRNVPSIQSRGLFGAIAGFIEGGWTGMVDGWYGYHHQNEQGSGYAADLKSTQNAIDEITNKVNSVIEKMNTQFTAVGKEFNHLEKRIENLNKKVDDGFLDIWTYNAELLVLLENERTLDYHDSNVKKLYEKVRSQLKNNAKEIGNGCFEFYHKCDNTCMESVKNGTYDYPKYSEEAKLNREEIDGVKLESTRIYQILAIYSTVASSLVLVVSLGAISFWMCSNGSLQCRICI

SEQ ID NO: 9272 - protein, 566 aa, synthetic construct
  REGION 1..566: note = hemagglutinin__InfluenzaA__AFN18243
MKAILVVLLYTFATANADTLCIGYHANNSTDTVDTVLEKNVTVTHSVNLLEDKHNGKLCKLRGVAPLHLGKCNIAGWILGNPECESLSTASSWSYIVETSSSDNGTCYPGDFIDYEELREQLSSVSSFERFEIFPKTSSWPNHDSNKGVTAACPHAGAKSFYKNLIWLVKKGNSYPKLSKSYINDKGKEVLVLWGIHHPSTSADQQSLYQNADTYVFVGTSRYSKKFKPEIAIRPKVRDQEGRMNYYWTLVEPGDKITFEATGNLVVPRYAFAMERNAGSGIIISDTPVHDCNTTCQTPKGAINTSLPFQNIHPITIGKCPKYVKSTKLRLATGLRNVPSIQSRGLFGAIAGFIEGGWTGMVDGWYGYHHQNEQGSGYAADLKSTQNAIDEITNKVNSVIEKMNTQFTAVGKEFNHLEKRIENLNKKVDDGFLDIWTYNAELLVLLENERTLDYHDSNVKNLYEKVRSQLKNNAKEIGNGCFEFYHKCDNTCMESVKNGTYDYPKYSEEAKLNREEIDGVKLESTRIYQILAIYSTVASSLVLVVSLGAISFWMCSNGSLQCRICI

SEQ ID NO: 9273 - protein, 566 aa, synthetic construct; identical to SEQ ID NO: 8758
  REGION 1..566: note = hemagglutinin__InfluenzaA__AFN18245

SEQ ID NO: 9274 - protein, 566 aa, synthetic construct; identical to SEQ ID NO: 5224
  REGION 1..566: note = hemagglutinin__InfluenzaA__AFN18255

SEQ ID NO: 9275 - protein, 566 aa, synthetic construct; identical to SEQ ID NO: 9272
  REGION 1..566: note = hemagglutinin__InfluenzaA__AFN18260

SEQ ID NO: 9276 - protein, 566 aa, synthetic construct; identical to SEQ ID NO: 9272
  REGION 1..566: note = hemagglutinin__InfluenzaA__AFN18267

SEQ ID NO: 9277 - protein, 566 aa, synthetic construct
  REGION 1..566: note = hemagglutinin__InfluenzaA__AFN18269
MKAILVVLLYTFATANADTLCIGYHANNSTDTVDTVLEKNVTVTHSVNLLEDKHNGKLCKLRGVAPLHLGKCNIAGWILGNPECESLSTASSWSYIVETSSSDNGTCYPGDFIDYEELREQLSSVSSFEKFEIFPKTSSWPNHDSNKGVTAACPHAGAKSFYKNLIWLVKKGNSYPKLSKSYINDKGKEVLVLWGIHHPSTSADQQSLYQNADAYVFVGTSRYSKKFKPEIAIRPKVRDQEGRMNYYWTLVEPGDKITFEATGNLVVPRYAFAMERNAGSGIIISDTPVHDCNTTCQTPKGAINTSLPFQNIHPITIGKCPKYVKSTKLRLATGLRNVPSIQSRGLFGAIAGFIEGGWTGMVDGWYGYHHQNEQGSGYAADLKSTQNAIDEITNKVNSVIEKMNTQFTAVGKEFNHLEKRIENLNKKVDDGFLDIWTYNAELLVLLENERTLDYHDSNVKNLYEKVRSQLKNNAKEIGNGCFEFYHKCDNTCMESVKNGTYDYPKYSEEAKLNREEIDGVKLESTRIYQILAIYSTVASSLVLVVSLGAISFWMCSNGSLQCRICI

SEQ ID NO: 9278 - protein, 566 aa, synthetic construct; identical to SEQ ID NO: 3833
  REGION 1..566: note = hemagglutinin__InfluenzaA__AFN18271

SEQ ID NO: 9279 - protein, 566 aa, synthetic construct; identical to SEQ ID NO: 4221
  REGION 1..566: note = hemagglutinin__InfluenzaA__AFN18273

SEQ ID NO: 9280 - protein, 566 aa, synthetic construct; identical to SEQ ID NO: 3833
  REGION 1..566: note = hemagglutinin__InfluenzaA__AFN18280

SEQ ID NO: 9281 - protein, 566 aa, synthetic construct; identical to SEQ ID NO: 3467
  REGION 1..566: note = hemagglutinin__InfluenzaA__AFN18303

SEQ ID NO: 9282 - protein, 566 aa, synthetic construct
  REGION 1..566: note = hemagglutinin__InfluenzaA__AFN18305
MKAILVVLLYTFATANADTLCIGYHANNSTDTVDTVLEKNVTVTHSANLLEDKHNGKLCKLRGVAPLHLGKCNIAGWILGNPECESLSTASSWSYIVETSSSDNGTCYPGDFIDYEELREQLSSVSSFERFEIFPKTSSWPNHDSNKGVTAACPHAGAKSFYKNLIWLVKKGNSYPKLSKSYINDKGKEVLVLWGIHHPSTSADQQSLYQNADAYVFVGTSRYSKKFKPEIAIRPKVRDQEGRMNYYWTLVEPGDKITFEATGNLVVPRYAFAMERNAGSGIIISDTPVHDCNTTCQTPKGAINTSLPFQNIHPITIGKCPKYVKSTKLRLATGLRNVPSIQSRGLFGAIAGFIEGGWTGMVDGWYGYHHQNEQGSGYAADLKSTQNAIDKITNKVNSVIEKMNTQFTAVGKEFNHLGKRIENLNKKVDDGFLDIWTYNAELLVLLENERTLDYHDSNVKNLYEKVRSQLKNNAKEIGNGCFEFYHKCDNTCMESVKNGTYDYPKYSEEAKLNREEIDGVKLESTRIYQILAIYSTVASSLVLVVSLGAISFWMCSNGSLQCRICI

SEQ ID NO: 9283 - protein, 566 aa, synthetic construct
  REGION 1..566: note = hemagglutinin__InfluenzaA__AFN18307
MKAILVVLLYTFAAANADTLCIGYHANNSTDTVDTVLEKNVTVTHSVNLLEDKHNGKLCKLRGVAPLHLGKCNIAGWILGNPECESLSTASSWSYIVETSSSDNGTCYPGDFIDYEELREQLSSVSSFERFEIFPKTSSWPNHDSNKGVTAACPHAGAKSFYKNLIWLVKKGNSYPKLSKSYINDKGKEVLVLWGIHHPSTSADQQSLYQNADAYVFVGTSRYSKKFKPEIAIRPKVRDQEGRMNYYWTLVEPGDKITFEATGNLVVPRYAFAMERNTGSGIIISDTPVHDCNTTCQTPKGAINTSLPFQNIHPITIGKCPKYVKSTKLRLATGLRNVPSIQSRGLFGAIAGFIEGGWTGMVDGWYGYHHQNEQGSGYAADLKSTQNAIDKITNKVNSVIEKMNTQFTAVGKEFNHLEKRIENLNKKVDDGFLDIWTYNAELLVLLENERTLDYHDSNVKNLYEKVRSQLKNNAKEIGNGCFEFYHKCDNTCMESVKNGTYDYPKYSEEAKLNREEIDGVKLESTRIYQILAIYSTVASSLVLVVSLGAISFWMCSNGSLQCRICI

SEQ ID NO: 9284 - protein, 566 aa, synthetic construct
  REGION 1..566: note = hemagglutinin__InfluenzaA__AFN18312
MKAILVVLLYTFATANADTLCIGYHANNSTDTVDTVLEKNVTVTHSVNLLEDKHNGKLCKLRGVAPLHLGKCNIAGWILGNPECESLSTASSWSYIVETSSSDNGTCYPGDFIDYEELREQLSSVSSFERFEIFPKTSSWPNHDSNKGITAACPHAGAKSFYKNLIWLVKKGNSYPKLSKSYINDKGKEVLVLWGIHHPSTSADQQSLYQNADAYVFVGTSRYSKKFKPEIAIRPKVRDQEGRMNYYWTLVEPGDKITFEATGNLVVPRYAFAMERNAGSGIIISDTPVHDCNTTCQTPKGAINTSLPFQNIHPITIGKCPKYVKSTKLRLATGLRNVPSIQSRGLFGAIAGFIEGGWTGMVDGWYGYHHQNEQGSGYAADLKSTQNAIDKITNKVNSVIEKMNTQFTAVGKEFNHLEKRIENLNKKVDDGFLDIWTYNAELLVLLENERTLDYHDSNVKNLYEKVRSQLKNNAKEIGNGCFEFYHKCDNTCMESVKNGTYDYPKYSEEAKLNREEIDGVKLESTRIYQILAIYSTVASSLVLVISLGAISFWMCSNGSLQCRICI

SEQ ID NO: 9285 - protein, 566 aa, synthetic construct; identical to SEQ ID NO: 5034
  REGION 1..566: note = hemagglutinin__InfluenzaA__AFN18319

SEQ ID NO: 9286 - protein, 566 aa, synthetic construct; identical to SEQ ID NO: 7131
  REGION 1..566: note = hemagglutinin__InfluenzaA__AFN18324

SEQ ID NO: 9287 - protein, 566 aa, synthetic construct; identical to SEQ ID NO: 3022
  REGION 1..566: note = hemagglutinin__InfluenzaA__AFN18334

SEQ ID NO: 9288 - protein, 566 aa, synthetic construct; identical to SEQ ID NO: 4785
  REGION 1..566: note = hemagglutinin__InfluenzaA__AFN18344

SEQ ID NO: 9289 - protein, 566 aa, synthetic construct; identical to SEQ ID NO: 2669
  REGION 1..566: note = hemagglutinin__InfluenzaA__AFN18354

SEQ ID NO: 9290 - protein, 566 aa, synthetic construct
  REGION 1..566: note = hemagglutinin__InfluenzaA__AFN18364
MKAILVVLLYTFATANADTLCIGYHANNSTDTVDTVLEKNVTVTHSVNLLEDKHNGKLCKLRGVAPLHLGKCNIAGWILGNPECESLSTASSWSYIVETSSSDNGTCYPGDFIDYEELREQLSSVSSFERFEIFPKTSSWPNHDLNKGVTAACPHAGAKSFYKNLIWLVKKGNSYPKLSKSYINDKGKEVLVLWGIHHPSTSADQQSLYQNADAYVFVGTSRYSKKFKPEIAIRPKVRDQEGRMNYYWTLVEPGDKITFEATGNLVVPRYAFAMERNAGSGIIISDTPVHDCNTTCQTPKGAINTSLPFQNIHPITIGKCPKYVKSTKLRLATGLRNVPSIQSRGLFGAIAGFIEGGWTGMVDGWYGYHHQNEQGSGYAADLKSTQNAIDEITNKVNSVIEKMNTQFTAVGKEFNHLEKRIENLNKKIDDGFLDIWTYNAELLVLLENERTLDYHDSNVKNLYEKVRSQLKNNAKEIGNGCFEFYHKCDNTCMESVKNGTYDYPKYSEEAKLNREEIDGVKLESTRIYQILAIYSTVASSLVLVVSLGAISFWMCSNGSLQCRICI

SEQ ID NO: 9291 - protein, 566 aa, synthetic construct; identical to SEQ ID NO: 2669
  REGION 1..566: note = hemagglutinin__InfluenzaA__AFN18374

SEQ ID NO: 9292 - protein, 566 aa, synthetic construct
  REGION 1..566: note = hemagglutinin__InfluenzaA__AFN18381
MKAILVVLLYTFATANADTLCIGYHANNSTDTVDTVLEKNVTVTHSVNLLEDKHNGKLCKLRGVAPLHLGKCNIAGWILGNPECESLSTASSWSYIVETSSSDNGTCYPGDFIDYEELREQLSSVSSFERFEIFPKTSSWPNHDSNKGVTAACPHAGAKSFYKNLIWLVKKGNSYPKLSKSYINDKGKEVLVLWGIHHPSTSADQQSLYQNADAYVFVGTSKYSKKFKPEIAIRPKVRDQEGRMNYYWTLVKPGDKITFEATGNLVVPRYAFAMERNAGSGIIISDTPVQDCNTTCQTPKGAINTSLPFQNIHPITIGKCPKYVKSTKLRLATGLRNVPSIQSRGLFGAIAGFIEGGWTGMVDGWYGYHHQNEQGSGYAADLKSTQNAIDEITNKVNSVIEKMNTQFTAVGKEFNHLEKRIENLNKKVDDGFLDIWTYNAELLVLLENERTLDYHDSNVKNLYEKVRSQLKNNAKEIGNGCFEFYHKCDNTCMESVKNGTYDYPKYSEEAKLNREEIDGVKLESTRIYQILAIYSTVASSLVLVVSLGAISFWMCSNGSLQCRICI

SEQ ID NO: 9293 - protein, 566 aa, synthetic construct
  REGION 1..566: note = hemagglutinin__InfluenzaA__AFN18390
MKAILVVLLYTFATANADTLCIGYHANNSTDTVDTVLEKNVTVTHSVNLLEDKHNGKLCKLRGVAPLHLGKCNIAGWILGNPECESLSTASSWSYIVETSSSDNGTCYPGDFIDYEELREQLSSVSSFERFEIFPKTSSWPNHDSNKGVTAACPHAGAKSFYKNLIWLVKKGNSYPKLSKSYINDKGKEVLVLWGIHHPSTSADQQSLYQNADAYVFVGTSRYSKKFKPEIAIRPKVRDQEGRMNYYWTLVEPGDKITFEATGNLVVPRYAFAMERNAGSGIIISDTPVHDCNTTCQTPKGAINTSLPFQNIHPITIGKCPKYVKSTKLRLATGLRNVPSIQSRGLFGAIAGFIEGGWTGMVDGWYGYHHQNEQGSGYAADLKSTQNAIDEITNKVNSVIEKMNTQFTAVGKEFNHLEKRIENLNKKVDDGFLDIWTYNAELLVLLENERTLDYHDSNVKNLYEKIRSQLKNNAKEIGNGCFEFYHKCDNTCMESVKNGTYDYPKYSEEAKLNREEIDGVKLESTRIYQILAIYSTVASSLVLVVSLGAISFWMCSNGSLQCRICI

SEQ ID NO: 9294 - protein, 566 aa, synthetic construct
  REGION 1..566: note = hemagglutinin__InfluenzaA__AFN18400
MKAILVVLLYTFATANADTLCIGYHANNSTDTVDTVLEKNVTVTHSVNLLEDKHNGKLCKLRGVTPLHLGKCNIAGWILGNPECESLSKASSWSYIVETSSSDNGTCYPGDFIDYEELREQLSSVSSFERFEIFPKTSSWPNHDSNKGVTAACPHAGAKSFYKNLIWLVKKGNSYPKLSKSYINDKGKEVLVLWGIHHPSTSADQQSLYQNADAYVFVGTSRYSKKFKPEIAIRPKVRDQEGRMNYYWTLVEPGDKITFEATGNLVVPRYAFAMERNVGSGIIISDTPVHDCNTTCQTPKGAINTSLPFQNIHPITIGKCPKYVKSTKLRLATGLRNVPSIQSRGLFGAIAGFIEGGWTGMVDGWYGYHHQNEQGSGYAADLKSTQNAIDEITNKVNSVIEKMNTQFTAVGKEFNHLEKRIENLNKKVDDGFLDIWTYNAELLVLLENERTLDYHDSNVKNLYEKVRSQLKNNAKEIGNGCFEFYHKCDNTCMESVKNGTYDYPKYSEEAKLNREEIDGVKLESTRIYQILAIYSTVASSLVLVVSLGAISFWMCSNGSLQCRICI

SEQ ID NO: 9295 - protein, 566 aa, synthetic construct; identical to SEQ ID NO: 2760
  REGION 1..566: note = hemagglutinin__InfluenzaA__AFN18410

SEQ ID NO: 9296 - protein, 566 aa, synthetic construct; identical to SEQ ID NO: 2669
  REGION 1..566: note = hemagglutinin__InfluenzaA__AFN18420

SEQ ID NO: 9297 - protein, 566 aa, synthetic construct
  REGION 1..566: note = hemagglutinin__InfluenzaA__AFN18430
MKAILVVLLYTFATANADTLCIGYHANNSTDTVDTVLEKNVTVTHSVNLLENKHNGKLCKLRGVAPLHLGKCNIAGWILGNPECESLSTASSWSYIVETSSSDNGTCYPGDFIDYEELREQLSSVSSFERFEIFPKTSSWPNHDSNKGVTAACPHAGAKSFYKNLIWLVKKGNSYPKLSKSYINDKGKEVLVLWGIHHPSTSADQQSLYQNADAYVFVGTSRYSKKFKPEIAIRPKVRDQEGRMNYYWTLVEPGDKITFEATGNLVVPRYAFAMVRNAGSGIIISDTPVHDCNTTCQTPKGAINTSLPFQNIHPITIGKCPKYVKSTKLRLATGLRNVPSIQSRGLFGAIAGFIEGGWTGMVDGWYGYHHQNEQGSGYAADLKSTQNAIDEITNKVNSVIEKMNTQFTAVGKEFNHLEKRIENLNKKVDDGFLDIWTYNAELLVLLENERTLDYHDSNVKNLYEKVRSQLKNNAKEIGNGCFEFYHKCDNTCMESVKNGTYDYPKYSEEAKLNREEIDGVKLESTRIYQILAIYSTVASSLVLVVSLGAISFWMCSNGSLQCRICI

SEQ ID NO: 9298 - protein, 566 aa, synthetic construct; identical to SEQ ID NO: 2669
  REGION 1..566: note = hemagglutinin__InfluenzaA__AFN18440

SEQ ID NO: 9299 - protein, 566 aa, synthetic construct; identical to SEQ ID NO: 2669
  REGION 1..566: note = hemagglutinin__InfluenzaA__AFN18450

SEQ ID NO: 9300 - protein, 566 aa, synthetic construct; identical to SEQ ID NO: 5224
  REGION 1..566: note = hemagglutinin__InfluenzaA__AFN18460

SEQ ID NO: 9301 - protein, 566 aa, synthetic construct; identical to SEQ ID NO: 3530
  REGION 1..566: note = hemagglutinin__InfluenzaA__AFN18470

SEQ ID NO: 9302 - protein, 566 aa, synthetic construct; identical to SEQ ID NO: 2760
  REGION 1..566: note = hemagglutinin__InfluenzaA__AFN18480

SEQ ID NO: 9303 - protein, 566 aa, synthetic construct; identical to SEQ ID NO: 3530
  REGION 1..566: note = hemagglutinin__InfluenzaA__AFN18490

SEQ ID NO: 9304 - protein, 566 aa, synthetic construct; identical to SEQ ID NO: 2669
  REGION 1..566: note = hemagglutinin__InfluenzaA__AFN18497

SEQ ID NO: 9305 - protein, 566 aa, synthetic construct; identical to SEQ ID NO: 2669
  REGION 1..566: note = hemagglutinin__InfluenzaA__AFN18512

SEQ ID NO: 9306 - protein, 566 aa, synthetic construct
  REGION 1..566: note = hemagglutinin__InfluenzaA__AFN18519
MKAILVVLLYTFATANADTLCIGYHANNSTDTVDTVLEKNVTVTHSVNLLEDKHNGKLCKLRGVAPLHLGKCNIAGWILGNPECESLSTASSWSYIVETSSSDNGTCYPGDFIDYEELREQLSSVSSFERFEIFPKTSSWPNHDSNKGVTAACPHAGAKSFYKNLIWLVKKENSYPKLSKSYINDKGKEVLVLWGIHHPSTSADQQSLYQNADAYVFVGTSRYSKKFKPEIAIRPKVRDQEGRMNYYWTLVEPGDKITFEATGNLVVPRYAFAMERNAGSGIIISDTPVHDCNTTCQTPKGAINTSLPFQNIHPITIGKCPKYVKSTKLRLATGLRNVPSIQSRGLFGAIAGFIEGGWTGMVDGWYGYHHQNEQGSGYAADLKSTQNAIDEITNKVNSVIEKMNTQFTAVGKEFNHLEKRIENLNKKVDDGFLDIWTYNAELLVLLENERTLDYHDSNVKNLYEKVRSQLKNNAKEIGNGCFEFYHKCDNTCMESVKNGTYDYPKYSEEAKLNREEIDGVKLESTRIYQILAIYSTVASSLVLVVSLGAISFWMCSNGSLQCRICI

SEQ ID NO: 9307 - protein, 566 aa, synthetic construct
  REGION 1..566: note = hemagglutinin__InfluenzaA__AFN18521
MKAILVVLLYTFATANADTLCIGYHANNSTDTVDTVLEKNVTVTHSVNLLEDKHNGKLCKLRGVAPLHLGKCNIAGWILGNPECESLSTASSWSYIVETSSSDNGTCYPGDFIDYEELREQLSSVSSFERFEIFPKTSSWPNHDSNKGVTAACPHAGAKSFYKNLIWLVKKGNSYPKLSKSYINDKGKEVLVLWGIHHPSTSADQQSLYQNADAYVFVGTSRYSKKFKPEIAIRPKVRDQEGRMNYYWTLVEPGDKITFEATGNLVVPRYAFAMVRNAGSGIIISDTPVHDCNTTCQTPKGAINTSLPFQNIHPITIGKCPKYVKSTKLRLATGLRNVPSIQSRGLFGAIAGFIEGGWTGMVDGWYGYHHQNEQGSGYAADLKSTQNAIDEITNKVNSVIEKMNTQFTAVGKEFNHLEKRIENLNKKVDDGFLDIWTYNAELLVLLENERTLDYHDSNVKNLYEKVRSQLKNNAKEIGNGCFEFYHKCDNTCMESVKNGTYDYPKYSGEAKLNREEIDGVKLESTRIYQILAIYSTVASSLVLVVSLGAISFWMCSNGSLQCRICI

SEQ ID NO: 9308 - protein, 566 aa, synthetic construct; identical to SEQ ID NO: 2669
  REGION 1..566: note = hemagglutinin__InfluenzaA__AFN18528

SEQ ID NO: 9309 - protein, 566 aa, synthetic construct; identical to SEQ ID NO: 2669
  REGION 1..566: note = hemagglutinin__InfluenzaA__AFN18531

SEQ ID NO: 9310 - protein, 566 aa, synthetic construct; identical to SEQ ID NO: 5266
  REGION 1..566: note = hemagglutinin__InfluenzaA__AFN18543

SEQ ID NO: 9311 - protein, 566 aa, synthetic construct; identical to SEQ ID NO: 7551
  REGION 1..566: note = hemagglutinin__InfluenzaA__AFN18545

SEQ ID NO: 9312 - protein, 566 aa, synthetic construct; identical to SEQ ID NO: 3530
  REGION 1..566: note = hemagglutinin__InfluenzaA__AFN18550

SEQ ID NO: 9313 - protein, 566 aa, synthetic construct
  REGION 1..566: note = hemagglutinin__InfluenzaA__AFN18557
MKAILVVLLYTFATANADTLCIGYHANNSTDTVDTVLEKNVTVTHSVNLLEDKHNGKLCKLRGVAPLHLGKCNIAGWILGNPECESLSTASSWSYIVETSSSDNGTCYPGDFIDYEELREQLSSVSSFERFEIFPKTSSWPNHDSNKGVTAACPHAGAKSFYKNLIWLVKKGNSYPKLSKSYINDKGKEVLVLWGIHHPSTSADQQSLYQNADAYVFVGTSRYSKKFKPEIAIRPKVRDQEGRMNYYWTLVEPGDKITFEATGNLVVPRYAFAMERNAGSGIIISDTPAHDCNTTCQTPKGAINTSLPFQNIHPITIGKCPKYVKSTKLRLATGLRNVPSIQSRGLFGAIAGFIEGGWTGMVDGWYGYHHQNEQGSGYAADLKSTQNAIDEITNKVNSVIEKMNTQFTAVGKEFNHLEKRIENLNKKVDDGFLDIWTYNAELLVLLENERTLDYHDSNVKNLYEKVRSQLKNNAKEIGNGCFEFYHKCDNTCMESVKNGTYDYPKYSEEAKLNREEIDGVKLESTRIYQILAIYSTVASSLVLVVSLGAISFWMCSNGSLQCRICI

SEQ ID NO: 9314 - protein, 566 aa, synthetic construct
  REGION 1..566: note = hemagglutinin__InfluenzaA__AFN18559
MKAILVVLLYTFATANADTLCIGYHANNSTDTVDTVLEKNVTVTHSVNLLEDKHNGKLCKLRGVAPLHLGKCNIAGWILGNPECESLSTASSWSYIVETSSSDNGTCYPGDFIDYEELREQLSSVSSFERFEIFPKTSSWPNHDSNKGVTAACPHAGAKSFYKNLIWLVKKGNSYPKLSKSYINDKGKEVLVLWGIHHPSTSADQQNLYQNADAYVFVGTSRYSKKFKPEIAIRPKVRDQEGRMNYYWTLVEPGDKITFEATGNLVVPRYAFAMERNAGSGIIISDTPVHDCNTTCQTPKGAINTSLPFQNIHPITIGKCPKYVKSTKLRLATGLRNVPSIQSRGLFGAIAGFIEGGWTGMVDGWYGYHHQNEQGSGYAADLKSTQNAIDEITNKVNSVIEKMNTQFTAVGKEFNHLEKRIENLNKKVDDGFLDIWTYNAELLVLLENERTLDYHDSNVKNLYEKVRSQLKNNAKEIGNGCFEFYHKCDNTCMESVKNGTYDYPKYSEEAKLNREEIDGVKLESTRIYQILAIYSTVASSLVLVVSLGAISFWMCSNGSLQCRICI

SEQ ID NO: 9315 - protein, 566 aa, synthetic construct; identical to SEQ ID NO: 3535
  REGION 1..566: note = hemagglutinin__InfluenzaA__AFN18561

SEQ ID NO: 9316 - protein, 566 aa, synthetic construct; identical to SEQ ID NO: 3771
  REGION 1..566: note = hemagglutinin__InfluenzaA__AFN18563

SEQ ID NO: 9317 - protein, 566 aa, synthetic construct
  REGION 1..566: note = hemagglutinin__InfluenzaA__AFN18565
MKAILVVLLYTFATANADTLCIGYHANNSTDTVDTVLEKNVTVTHSVNLLEDKHNGKLCKLRGVAPLHLGKCNIAGWILGNPECESLSTASSWSYIVETSSSDNGTCYPGDFIDYEELREQLSSVSSFERFEIFPKTSSWPNHDSNKGVTAACPHAGAKSFYKNLIWLVKKGNSYPKLSKSYINDKGKEVLVLWGIHHPSTSADQQSLYQNADAYVFVGTSRYSKKFKPEIAIRPKVRDQEGRMNYYWTLVEPGDKITFEATGNLVVPRYAFAMVRNAGSGIIISDTPVHDCNTTCQTPKGAINTSLPFQNIHPITIGKCPKYVKSTKLRLATGLRNVPSIQSRGLFGAIAGFIEGGWTGMVDGWYGYHHQNEQGSGYAADLKSTQNAIDEITNKVNSVIEKMNTQFTAVGKEFNHLEKRMENLNKKVDDGFLDIWTYNAELLVLLENERTLDYHDSNVKNLYEKVRSQLKNNAKEIGNGCFEFYHKCDNTCMESVKNGTYDYPKYSEEAKLNREEIDGVKLESTRIYQILAIYSTVASSLVLVVSLGAISFWMCSNGSLQCRICI

SEQ ID NO: 9318 - protein, 566 aa, synthetic construct
  REGION 1..566: note = hemagglutinin__InfluenzaA__AFN18570
MKAILVVLLYTFATANADTLCIGYHANNSTDTVDTVLEKNVTVTHSVNLLEDKHNGKLCKLRGVAPLHLGKCNIAGWILGNPECESLSTVSSWSYIVETSSSDNGTCYPGDFIDYEELREQLSSVSSFERFEIFPKTSSWPNHDSNKGVTAACPHAGAKSFYKNLIWLVKKGNSYPKLSKSYINDKGKEVLVLWGIHHPSTSADQQSLYQNADAYVFVGTSRYSKKFKPEIAIRPKVRDQEGRMNYYWTLVEPGDKITFEATGNLVVPRYAFAMERNAGSGIIISDTPVHDCNTTCQTPKGAINTSLPFQNIHPITIGKCPKYVKSTKLRLATGLRNVPSIQSRGLFGAIAGFIEGGWTGMVDGWYGYHHQNEQGSGYAADLKSTQNAIDEITNKVNSVIEKMNTQFTAVGKEFNHLEKRIENLNKKVDDGFLDIWTYNAELLVLLENERTLDYHDSNVKNLYEKVRSQLKNNAKEIGNGCFEFYHKCDNTCMESVKNGTYDYPKYSEEAKLNREEIDGVKLESTRIYQILAIYSTVASSLVLVVSLGAISFWMCSNGSLQCRICI

SEQ ID NO: 9319 - protein, 566 aa, synthetic construct; identical to SEQ ID NO: 2669
  REGION 1..566: note = hemagglutinin__InfluenzaA__AFN18580

SEQ ID NO: 9320 - protein, 566 aa, synthetic construct; identical to SEQ ID NO: 2911
  REGION 1..566: note = hemagglutinin__InfluenzaA__AFN18590

SEQ ID NO: 9321 - protein, 566 aa, synthetic construct
  REGION 1..566: note = hemagglutinin__InfluenzaA__AFN18600
MKAILVVLLYTFATANADTLCIGYHANNSTDTVDTVLEKNVTVTHSVNLLEDKHNGKLCKLRGVAPLHLGKCNIAGWILGNPECESLSTASSWSYIVETSSSDNGTCYPGDFIDYEELREQLSSVSSFERFEIFPKTSSWPNHDSNKGVTAACPHAGAKSFYKNLIWLVKKGNSYPKLSKSYINDKGKEVLVLWGIHHPSTSADQQNLYQNADAYVFVGTSRYSKKFKPEIAIRPKVRDQEGRMNYYWTLVEPGDKITFEATGNLVVPRYAFAMERNAGSGIIISDTPVHDCNTTCQTPKGAINTSLPFQNIHPITIGKCPKYVKSTKLRLATGLRNVPSIQSRGLFGAIAGFIEGGWTGMVDGWYGYHHQNEQGSGYAADLKSTQNAIDEITNKVNSVIEKMNTQFTAVGKEFNHLEKRIENLNKKVDDGFLDIWTYNAELLVLLENERTLDYHDSNVKNLYEKVRSQLKNNAKEIGNGCFEFYHKCDNACMESVKNGTYDYPKYSEEAKLNREEIDGVKLESTRIYQILAIYSTVASSLVLVVSLGAISFWMCSNGSLQCRICI

SEQ ID NO: 9322 - protein, 566 aa, synthetic construct; identical to SEQ ID NO: 2669
  REGION 1..566: note = hemagglutinin__InfluenzaA__AFN18610

SEQ ID NO: 9323 - protein, 566 aa, synthetic construct
  REGION 1..566: note = hemagglutinin__InfluenzaA__AFN18617
MKAILVVLLYTFATANADTLCIGYHANNSTDTVDTVLEKNVTVTHSVNLLEDKHNGKLCKLRGVAPLHLGKCNIAGWILGNPECESLSTASSWSYIVETSSSDNGTCYPGDFIDYEELREQLSSVSSFERFEIFPKTSSWPNHDSNKGVTAACPHAGAKSFYKNLIWLVKKGNSYPKLSKSYINDKGKEVLVLWGIHHPSTSADQQSLYQNADAYVFVGTSRYSKKFKPEIAIRPKVRDQEGRMNYYWTLVEPGDKITFEATGNLVVPRYAFAMVRNAGSGIIISDTPVHDCNTTCQTPKGAINTSLPFQNIHPITIGKCPKYVKSTKLRLATGLRNVPSIQSRGLFGAIAGFIEGGWTGMVDGWYGYHHQNEQGSGYAADLKSTQSAIDEITNKVNSVIEKMNTQFTAVGKEFNHLEKRIENLNKKVDDGFLDIWTYNAELLVLLENERTLDYHDSNVKNLYEKVRSQLKNNAKEIGNGCFEFYHKCDNTCMESVKNGTYDYPKYSEEAKLKREEIDGVKLESTRIYQILAIYSTVASSLVLVVSLGAISFWMCSNGSLQCRICI

SEQ ID NO: 9324 - protein, 566 aa, synthetic construct; identical to SEQ ID NO: 3530
  REGION 1..566: note = hemagglutinin__InfluenzaA__AFN18622

SEQ ID NO: 9325 - protein, 566 aa, synthetic construct; identical to SEQ ID NO: 2669
  REGION 1..566: note = hemagglutinin__InfluenzaA__AFN18629

SEQ ID NO: 9326 - protein, 566 aa, synthetic construct; identical to SEQ ID NO: 2911
  REGION 1..566: note = hemagglutinin__InfluenzaA__AFN18634

SEQ ID NO: 9327 - protein, 566 aa, synthetic construct
  REGION 1..566: note = hemagglutinin__InfluenzaA__AFN18644
MKAILVVLLYTFATANADTLCIGYHANNSTDTVDTVLEKNVTVTHSVNLLEDKHNGKLCKLRGVAPLHLGKCNIAGWILGNPECESLSTASSWSYIVETSSSDNGTCYPGDFIDYEELREQLSSVSSFERFEIFPKTSSWPNHDSNKGVTAACPHAGAKSFYKNLIWLVKKGNSYPKLSKSYINDKGKEVLVLWGIHHPSTSADQQSLYQNADAYVFVGTSRYSKKFKPEIAIRPKVRDQEGRMNYYWTLVEPGDKITFEATGNLVVPRYAFAMVRNAGSGIIISDTPVHDCNTTCQTPKGAINTSLPFQNIHPITIGKCPKYVKSTKLRLATGLRNVPSIQSRGLFGAIAGFIEGGWTGMVDGWYGYHHQNEQGSGYAADLKSTQSAIDEITNKVNSVIEKVNTQFTAVGKEFNHLEKRIENLNKKVDDGFLDIWTYNAELLVLLENERTLDYHDSNVKNLYEKVRSQLKNNAKEIGNGCFEFYHKCDNTCMESVKNGTYDYPKYSEEAKLNREEIDGVKLESTRIYQILAIYSTVASSLVLVVSLGAISFWMCSNGSLQCRICI

SEQ ID NO: 9328 - protein, 566 aa, synthetic construct; identical to SEQ ID NO: 3530
  REGION 1..566: note = hemagglutinin__InfluenzaA__AFN18654

SEQ ID NO: 9329 - protein, 566 aa, synthetic construct; identical to SEQ ID NO: 2669
  REGION 1..566: note = hemagglutinin__InfluenzaA__AFN18664

SEQ ID NO: 9330 - protein, 566 aa, synthetic construct; identical to SEQ ID NO: 2911
  REGION 1..566: note = hemagglutinin__InfluenzaA__AFN18674

SEQ ID NO: 9331 - protein, 566 aa, synthetic construct; identical to SEQ ID NO: 2669
  REGION 1..566: note = hemagglutinin__InfluenzaA__AFN18684

SEQ ID NO: 9332 - protein, 566 aa, synthetic construct; identical to SEQ ID NO: 3530
  REGION 1..566: note = hemagglutinin__InfluenzaA__AFN18694

SEQ ID NO: 9333 - protein, 566 aa, synthetic construct
  REGION 1..566: note = hemagglutinin__InfluenzaA__AFN18704
MKAILVVLLYTFATANADTLCIGYHANNSTDTVDTVLEKNVTVTHSVNLLEDKHNGKLCKLRGVAPLHLGKCNIAGWILGNPECESLSTASSWSYIVETSSSDNGTCYPGDFIDYEELREQLSSVSSFERFEIFPKTSSWPNHDSNKGVTAACPHAGAKSFYKNLIWLVKKGNSYPKLSKSYINDKGKEVLVLWGIHHPSTSADQQSLYQNADAYVFVGTSRYSKKFKPEIAIRPKVRDQEGRMNYYWTLVEPGDKITFEATGNLVVPRYAFAMVRNAGSGIIISDTPVHDCNTTCQTPKGAINTSLPFQNIHPITIGKCPKYVKSTKLRLATGLRNVPSIQSRGLFGAIAGFIEGGWTGMVDGWYGYHHQNEQGSGYAADLKSTQSAIDEITNKVNSVIEKMNTQFTAVGKEFNHLEKRIENLNKKVDDGFLDIWTYNAELLVLLENERTLDYHDSNVKNLYEKVRSQLKNNAKEIGNGCFEFYHKCDNTCMESVKNGTYDYPKYSEEAKLNREEIDGVKLESTRIYQILAIYSTVASSLVLVVSLGAISFWMCSNGSLQCRICI

SEQ ID NO: 9334 - protein, 566 aa, synthetic construct; identical to SEQ ID NO: 4903
  REGION 1..566: note = hemagglutinin__InfluenzaA__AFN18714

SEQ ID NO: 9335 - protein, 566 aa, synthetic construct; identical to SEQ ID NO: 2669
  REGION 1..566: note = hemagglutinin__InfluenzaA__AFN18721

SEQ ID NO: 9336 - protein, 566 aa, synthetic construct; identical to SEQ ID NO: 5335
  REGION 1..566: note = hemagglutinin__InfluenzaA__AFN18725

SEQ ID NO: 9337 - protein, 566 aa, synthetic construct
  REGION 1..566: note = hemagglutinin__InfluenzaA__AFN18735
MKAILVVLLYTFATANADTLCIGYHANNSTDTVDTVLEKNVTVTHSVNLLEDKHNGKLCKLRGVAPLHLGKCNIAGWILGNPECESLSTASSWSYIVETSSSDNGTCYPGDFIDYEELREQLSSVSSFERFEIFPKTSSWPNHDSNKGVTAACPHAGAKSFYKTLIWLVKKGNSYPKLSKSYINDKGKEVLVLWGIHHPSTSADQQSLYQNADAYVFVGTSRYSKKFKPEIAIRPKVRDQEGRMNYYWTLVEPGDKITFEATGNLVVPRYAFAMERNAGSGIIISDTPVHDCNTTCQTPKGAINTSLPFQNIHPITIGKCPKYVKSTKLRLATGLRNVPSIQSRGLFGAIAGFIEGGWTGMVDGWYGYHHQNEQGSGYAADLKSTQNAIDEITNKVNSVIEKMNTQFTAVGKEFNHLEKRIENLNKKVDDGFLDIWTYNAELLVLLENERTLDYHDSNVKNLYEKVRSQLKNNAKEIGNGCFEFYHKCDNTCMESVKNGTYDYPKYSEEAKLNREEIDGVKLESTRIYQILAIYSTVASSLVLVVSLGAISFWMCSNGSLQCRICI

SEQ ID NO: 9338 - protein, 566 aa, synthetic construct; identical to SEQ ID NO: 2669
  REGION 1..566: note = hemagglutinin__InfluenzaA__AFN18742

SEQ ID NO: 9339 - protein, 566 aa, synthetic construct; identical to SEQ ID NO: 3771
  REGION 1..566: note = hemagglutinin__InfluenzaA__AFN18747

SEQ ID NO: 9340 - protein, 566 aa, synthetic construct
  REGION 1..566: note = hemagglutinin__InfluenzaA__AFN18757
MKAILVVLLYTFATANADTLCIGYHANNSTDTVDTVLEKNVTVTHSVNLLEDKHNGKLCKLRGVAPLHLGKCNIAGWILGNPECESLSTASSWSYIVETSSSDNGTCYPGDFIDYEELREQLSSVSSFERFEIFPKTSSWPNHDSNKGVTAACPHAGAKSFYKNLIWLVKKGNSYPKLSKSYINDKGKEVLVLWGIHHPSTSADQQSLYQNADAYVFVGTSRYSKKFKPEIAIRPKVRDQEGRMNYYWTLVEPGDKITFEATGNLAVPRYAFAMERNAGSGIIISDTPVHDCNTTCQTPKGAINTSLPFQNIHPITIGKCPKYVKSTKLRLATGLRNVPSIQSRGLFGAIAGFIEGGWTGMVDGWYGYHHQNEQGSGYAADLKSTQNAIDEITNKVNSVIEKMNTQFTAVGKEFNHLEKRIENLNKKVDDGFLDIWTYNAELLVLLENERTLDYHDSNVKNLYEKVRSQLKNNAKEIGNGCFEFYHKCDNTCMESVKNGTYDYPKYSEEAKLNREEIDGVKLESTRIYQILAIYSTVASSLVLVVSLGAISFWMCSNGSLQCRICI

SEQ ID NO: 9341 - protein, 566 aa, synthetic construct; identical to SEQ ID NO: 2669
  REGION 1..566: note = hemagglutinin__InfluenzaA__AFN18767

SEQ ID NO: 9342 - protein, 566 aa, synthetic construct; identical to SEQ ID NO: 9333
  REGION 1..566: note = hemagglutinin__InfluenzaA__AFN18774

SEQ ID NO: 9343 - protein, 566 aa, synthetic construct; identical to SEQ ID NO: 2669
  REGION 1..566: note = hemagglutinin__InfluenzaA__AFN18776

SEQ ID NO: 9344 - protein, 566 aa, synthetic construct; identical to SEQ ID NO: 3535
  REGION 1..566: note = hemagglutinin__InfluenzaA__AFN18778

SEQ ID NO: 9345 - protein, 566 aa, synthetic construct; identical to SEQ ID NO: 2669
  REGION 1..566: note = hemagglutinin__InfluenzaA__AFN18784

SEQ ID NO: 9346 - protein, 566 aa, synthetic construct; identical to SEQ ID NO: 3535
  REGION 1..566: note = hemagglutinin__InfluenzaA__AFN18789

SEQ ID NO: 9347 - protein, 566 aa, synthetic construct; identical to SEQ ID NO: 2669
  REGION 1..566: note = hemagglutinin__InfluenzaA__AFN18799

SEQ ID NO: 9348 - protein, 566 aa, synthetic construct; identical to SEQ ID NO: 2669
  REGION 1..566: note = hemagglutinin__InfluenzaA__AFN18809

SEQ ID NO: 9349 - protein, 566 aa, synthetic construct; identical to SEQ ID NO: 3771
  REGION 1..566: note = hemagglutinin__InfluenzaA__AFN18816

SEQ ID NO: 9350 - protein, 566 aa, synthetic construct; identical to SEQ ID NO: 2669
  REGION 1..566: note = hemagglutinin__InfluenzaA__AFN18818

SEQ ID NO: 9351 - protein, 566 aa, synthetic construct
  REGION 1..566: note = hemagglutinin__InfluenzaA__AFN18820
MKAILVVLLYTFATANADTLCIGYHANNSTDTVDTVLEKNVTVTHSVNLLEDKHNGKLCKLRGVAPLHLGNCNIAGWILGNPECESLSTASSWSYIVETSSSDNGTCYPGDFIDYEELREQLSSVSSFERFEIFPKTSSWPNHDSNKGVTAACPHAGAKSFYKNLIWLVKKGNSYPKLSKSYINDKGKEVLVLWGIHHPSTSADQQSLYQNADAYVFVGTSRYSKKFKPEIAIRPKVRDQEGRMNYYWTLVEPGDKITFEATGNLVVPRYAFAMERNAGSGIIISDTPVHDCNTTCQTPKGAINTSLPFQNIHPITIGKCPKYVKSTKLRLATGLRNVPSIQSRGLFGAIAGFIEGGWTGMVDGWYGYHHQNEQGSGYAADLKSTQNAIDEITNKVNSVIEKMNTQFTAVGKEFNHLEKRIENLNKKVDDGFLDIWTYNAELLVLLENERTLDYHDSNVKNLYEKVRSQLKNNAKEIGNGCFEFYHKCDNTCMESVKNGTYDYPKYSEEAKLNREEIDGVKLESTRIYQILAIYSTVASSLVLVVSLGAISFWMCSNGSLQCRICI

SEQ ID NO: 9352 - protein, 566 aa, synthetic construct; identical to SEQ ID NO: 2669
  REGION 1..566: note = hemagglutinin__InfluenzaA__AFN18822

SEQ ID NO: 9353 - protein, 566 aa, synthetic construct
  REGION 1..566: note = hemagglutinin__InfluenzaA__AFN18824
MKAILVVLLYTFATANADTLCIGYHANNSTDTVDTVLEKNVTVTHSVNLLEDKHNGKLCKLRGVAPLHLGKCNIAGWILGNPECESLSTASSWSYIVETSSSDNGTCYPGDFIDYEELREQLSSVSSFERFEIFPKTSSWPNHDSNKGVTAACPHAGAKSFYKNLIWLVKKGNSYPKLSKSYINDKGKEVLVLWGIHHPSTSADQQSLYQNADAYVFVGTSRYSKKFKPEIAIRPKVRDQEGRMNYYWTLVEPGDKITFEATGNLVVPRYAFAMERNAGSGIIISDTPVHDCNTTCQTPKGAINTSLPFQNIHPITIGKCPKYVKSTKLRLATGLRNVPSIQSRGLFGAIAGFIEGGWTGMVDGWYGYHHQNEQGSGYAADLKSTQNAIDEITNKVNSVIEKMNTQFTAVGKEFNHLEKRIENLNKKVDDGFLDIWTYNAELLVLLENERTLDYHDSNVKNLYEKVRSQLKNNAKEIGNGCFEFYHKCDNTCMESVKNGTYDYPKYSEEAKLNREEIDGVRLESTRIYQILAIYSTVASSLVLVVSLGAISFWMCSNGSLQCRICI

SEQ ID NO: 9354 - protein, 566 aa, synthetic construct; identical to SEQ ID NO: 9277
  REGION 1..566: note = hemagglutinin__InfluenzaA__AFN18826

SEQ ID NO: 9355 - protein, 566 aa, synthetic construct
  REGION 1..566: note = hemagglutinin__InfluenzaA__AFN18828
MKAILVVLLYTFATANADTLCIGYHANNSTDTVDTVLEKNVTVTHSVNLLEDKHNGKLCKLRGVAPLHLGKCNIAGWILGNPECESLSTASSWSYIVETSSSDNGTCYPGDFIDYEELREQLSSVSSFERFEIFPKTSSWPNHDSNKGVTAACPHAGAKSFYKNLIWLVKKGNSYPKLSKSYINDKGKEVLVLWGIHHPSTSADQQSLYQNADAYVFVGTSRYSKKFKPEIAIRPKVRDQEGRMNYYWTLVEPGDKITFEATGNLVVPRYAFAMERNAGSGIIISDTPVHDCNTTCQTPKGAINTSLPFQNIHPITIGKCPKYVKSIKLRLATGLRNVPSIQSRGLFGAIAGFIEGGWTGMVDGWYGYHHQNEQGSGYAADLKSTQNAIDEITNKVNSVIEKMNTQFTAVGKEFNHLEKRIENLNKKVDDGFLDIWTYNAELLVLLENERTLDYHDSNVKNLYEKVRSQLKNNAKEIGNGCFEFYHKCDNTCMESVKNGTYDYPKYSEEAKLNREEIDGVKLESTRIYQILAIYSTVASSLVLVVSLGAISFWMCSNGSLQCRICI

SEQ ID NO: 9356 - protein, 566 aa, synthetic construct; identical to SEQ ID NO: 9340
  REGION 1..566: note = hemagglutinin__InfluenzaA__AFN18830

SEQ ID NO: 9357 - protein, 566 aa, synthetic construct; identical to SEQ ID NO: 2669
  REGION 1..566: note = hemagglutinin__InfluenzaA__AFN18832

SEQ ID NO: 9358 - protein, 566 aa, synthetic construct; identical to SEQ ID NO: 3535
  REGION 1..566: note = hemagglutinin__InfluenzaA__AFN18834

SEQ ID NO: 9359 - protein, 566 aa, synthetic construct
  REGION 1..566: note = hemagglutinin__InfluenzaA__AFN18849
MKAILVVLLYTFATANADTLCIGYHANNSTDTVDTVLEKNVTVTHSVNLLEDKHNGKLCKLRGVAPLHLGKCNIAGWILGNPECESLSTASSWSYIVETSSSDNGTCYPGDFIDYEELREQLSSVSSFERFEIFPKTSSWPNHDSNKGVTAACPHAGAKSFYKNLIWLVKKGNSYPKLSKSYINDKGKEVLVLWGIHHPSTSADQQSLYQNVDAYVFVGTSRYSKKFKPEIAIRPKVRDQEGRMNYYWTLVEPGDKITFEATGNLVVPRYAFAMERNAGSGIIISDTPVHDCNTTCQTPKGAINTSLPFQNIHPITIGKCPKYVKSTKLRLATGLRNVPSIQSRGLFGAIAGFIEGGWTGMVDGWYGYHHQNEQGSGYAADLKSTQNAIDEITNKVNSVIEKMNTQFTAVGKEFNHLEKRIENLNKKVDDGFLDIWTYNAELLVLLENERTLDYHDSNVKNLYEKVRSQLKNNAKEIGNGCFEFYHKCDNTCMESVKNGTYDYPKYSEEAKLNREEIDGVKLESTRIYQILAIYSTVASSLVLVVSLGAISFWMCSNGSLQCRICI

SEQ ID NO: 9360 - protein, 566 aa, synthetic construct
  REGION 1..566: note = hemagglutinin__InfluenzaA__AFN18856
MKAILVVLLYTFATANADTLCIGYHANNSTDTVDTVLEKNVTVTHSVNLLENKHNGKLCKLRGVAPLHLGKCNIAGWILGNPECESLSTASSWSYIVETSSSDNGTCYPGDFIDYEELREQLSSVSSFERFEIFPKTSSWPNHDSNKGVTAACPHAGAKSFYKNLIWLVKKGNSYPKLSKSYINDKGKEVLVLWGIHHPSTSADQQSLYQNADAYVFVGTSRYSKKFKPEIAIRPKVRDQEGRMNYYWTLVEPGDKITFEATGNLVVPRYAFAMERNAGSGIIISDTPVHDCNTTCQTPKGAINTSLPFQNIHPITIGKCPKYVKSTKLRLATGLRNVPSIQSRGLFGAIAGFIEGGWTGMVDGWYGYHHQNEQGSGYAADLKSTQNAIDEITNKVNSVIEKMNTQFTAVGKEFNHLEKRIENLNKKVDDGFLDIWTYNAELLVLLENERTLDYHDSNVKNLYEKVRSQLKNNAKEIGNGCFEFYHKCDNTCMESVKNGTYDYPKYSEEAKLNREEIDGVKLESTRIYQILAIYSTVASSLVLVVSLGAISFWMCSNGSLQCRICI

SEQ ID NO: 9361 - protein, 566 aa, synthetic construct; identical to SEQ ID NO: 3530
  REGION 1..566: note = hemagglutinin__InfluenzaA__AFN18858

SEQ ID NO: 9362 - protein, 566 aa, synthetic construct
  REGION 1..566: note = hemagglutinin__InfluenzaA__AFN18860
MKAILVVLLYTFATANADTLCIGYHANNSTDTVDTVLEKNVTVTHSVNLLEDKHNGKLCKLRGVAPLHLGKCNIAGWILGNPECESLSTASSWSYIVETSSSDNGTCYPGDFIDYEELREQLSSVSSFERFEIFPKTSSWPNHDSNKGVTAACSHAGAKSFYKNLIWLVKKGNSYPKLSKSYINDKGKEVLVLWGIHHPSTSADQQSLYQNADAYVFVGTSRYSKKFKPEIAIRPKVRDQEGRMDYYWTLVEPGDKITFEATGNLVVPRYAFAMERNAGSGIIISDTPVHDCNTTCQTPKGAINTSLPFQNIHPITIGKCPKYVKSTKLRLATGLRNVPSIQSRGLFGAIAGFIEGGWTGMVDGWYGYHHQNEQGSGYAADLKSTQNAIDEITNKVNSVIEKMNTQFTAVGKEFNHLEKRIENLNKKVDDGFLDIWTYNAELLVLLENERTLDYHDSNVKNLYEKVRSQLKNNAKEIGNGCFEFYHKCDNTCMESVKNGTYDYPKYSEEAKLNREEIDGVKLESTRIYQILAIYSTVASSLVLVVSLGAISFWMCSNGSLQCRICI

SEQ ID NO: 9363 - protein, 566 aa, synthetic construct
  REGION 1..566: note = hemagglutinin__InfluenzaA__AFN18865
MKAILVVLLYTFATANADTLCIGYHANNSTDTVDTVLEKNVTVTHSVNLLEDKHNGKLCKLRGVAPLHLGKCNIAGWILGNPECESLSTASSWSYIVETSSSDNGTCYPGDFIDYEELREQLSSVSSFERFEIFPKTSSWPNHDSNKGVTAACPHAGAKSFYKNLIWLVKKGNSYPKLSKSYINDKGKEVLVLWGIHHPSTSADQQSLYQNADAYVFVGTSRYSKKFKPEIAIRPKVRDQEGRMNYYWTLVEPGDKITFEATGNLVVPRYAFAMERNAGSGIIISDTSVHDCNTTCQTPKGAINTSLPFQNIHPITIGKCPKYVKSTKLRLATGLRNVPSIQSRGLFGAIAGFIEGGWTGMVDGWYGYHHQNEQGSGYAADLKSTQNAIDKITNKVNSVIEKMNTQFTAVGKEFNHLEKRIENLNKKVDDGFLDIWTYNAELLVLLENERTLDYHDSNVKNLYEKVRSQLKNNAKEIGNGCFEFYHKCDNTCMESVKNGTYDYPKYSEEAKLNREEIDGVKLESTRIYQILAIYSTVASSLVLVVSLGAISFWMCSNGSLQCRICI

SEQ ID NO: 9364 - protein, 566 aa, synthetic construct
  REGION 1..566: note = hemagglutinin__InfluenzaA__AFN18875
MEAILVVLLYTFATANADTLCIGYHANNSTDTVDTVLEKNVTVTHSVNLLEDKHNGKLCKLRGVAPLHLGKCNIAGWILGNPECESLSTASSWSYIVETSSSDNGTCYPGDFIDYEELREQLSSVSSFERFEIFPKTSSWPNHDSNKGVTAACPHAGAKSFYKNLIWLVKKGNSYPKLSKSYINDKGKEVLVLWGIHHPSTSAAQQSLYQNADAYVFVGSSRYSKKFKPEIAIRPKVRDQEGRMNYYWTLVEPGDKITFEATGNLVVPRYAFAMERNAGSGIIISDTPVHDCNTTCQTPKGAINTSLPFHNIHPITIGKCPKYVKSTKLRLATGLRNVPSIQSRGLFGAIAGFIEGGWTGMVDGWYGYHHQNEQGSGYAADLKSTQNAIDEITNKVNSVIEKMNTQFTAVGKEFNHLEKRIENLNKKVDDGFLDIWTYNAELLVLLENERTLDYHDSNVKNLYEKVRSQLKNNAKEIGNGCFEFYHKCDNTCMESVKNGTYDYPKYSEEAKLNREEIDGVKLESTRIYQILAIYSTVASSLVLVVSLGAISFWMCSNGSLQCRICI

SEQ ID NO: 9365 - protein, 566 aa, synthetic construct
  REGION 1..566: note = hemagglutinin__InfluenzaA__AFN18885
MKAILIVLLYTFATANADTLCIGYHANNSTDTVDTVLEKNVTVTHSVNLLEDKHNGKLCKLRGVAPLHLGKCNIAGWILGNPECESLSTASSWSYIVETSSSDNGTCYPGDFIDYEELREQLSSVSSFERFEIFPKTSSWPNHDSNKGVTAACPHAGAKSFYKNLIWLVKKGNSYPKLSKSYINDKGKEVLVLWGIHHPSTSADQQSLYQNADAYVFVGTSRYSKKFKPEIAIRPKVRDQEGRMNYYWTLVEPGDKITFEATGNLVVPRYAFAMERNAGSGIIISDTPVHDCNTTCQTPKGAINTNLPFQNIHPITIGKCPKYVKSTKLRLATGLRNVPSTQSRGLFGAIAGFIEGGWTGMVDGWYGYHHQNEQGSGYAADLKSTQNAIDEITNKVNSVIEKMNTQFTAVGKEFNHLEKRIENLNKKVDDGFLDIWTYNAELLVLLENERTLDYHDSNVKNLYEKVRSQLKNNAKEIGNGCFEFYHKCDNTCMESVKNGTYDYPKYSEEAKLNREEIDGVKLESTRIYQILAIYSTVASSLVLVVSLGAISFWMCSNGSLQCKICI

SEQ ID NO: 9366 - protein, 566 aa, synthetic construct; identical to SEQ ID NO: 2669
  REGION 1..566: note = hemagglutinin__InfluenzaA__AFN18892

SEQ ID NO: 9367 - protein, 566 aa, synthetic construct; identical to SEQ ID NO: 2911
  REGION 1..566: note = hemagglutinin__InfluenzaA__AFN18894

SEQ ID NO: 9368 - protein, 566 aa, synthetic construct; identical to SEQ ID NO: 9333
  REGION 1..566: note = hemagglutinin__InfluenzaA__AFN18903

SEQ ID NO: 9369 - protein, 566 aa, synthetic construct; identical to SEQ ID NO: 3771
  REGION 1..566: note = hemagglutinin__InfluenzaA__AFN18910

SEQ ID NO: 9370 - protein, 566 aa, synthetic construct
  REGION 1..566: note = hemagglutinin__InfluenzaA__AFN18912
MEAILVVLLYTFATANADTLCIGYHANNSTDTVDTVLEKNVTVTHSVNLLEDKHNGKLCKLRGVAPLHLGKCNIAGWILGNPECESLSTASSWSYIVETSSSDNGTCYPGDFIDYEELREQLSSVSSFERFEIFPKTSSWPNHDSNKGVTAACPHAGAKSFYKNLIWLVKKGNSYPKLSKSYINDKGKEVLVLWGIHHPSTSADQQSLYQNADAYVFVGSSRYSKKFKPEIAIRPKVRDQEGRMNYYWTLVEPGDKITFEATGNLVVPRYAFAMERNAGSGIIISDTSVHDCNTTCQTPKGAINTSLPFHNIHPITIGKCPKYVKSTKLRLATGLRNVPSIQSRGLFGAIAGFIEGGWTGMVDGWYGYHHQNEQGSGYAADLKSTQNAIDEITNKVNSVIEKMNTQFTAVGKEFNHLEKRIENLNKKVDDGFLDIWTYNAELLVLLENERTLDYHDSNVKNLYEKVRSQLKNNAKEIGNGCFEFYHKCDNTCMESVKNGTYDYPKYSEEAKLNREEIDGVKLESTRIYQILAIYSTVASSLVLVVSLGAISFWMCSNGSLQCRICI

SEQ ID NO: 9371 - protein, 566 aa, synthetic construct; identical to SEQ ID NO: 3771
  REGION 1..566: note = hemagglutinin__InfluenzaA__AFN18917

SEQ ID NO: 9372 - protein, 566 aa, synthetic construct; identical to SEQ ID NO: 2669
  REGION 1..566: note = hemagglutinin__InfluenzaA__AFN18927

SEQ ID NO: 9373 - protein, 566 aa, synthetic construct; identical to SEQ ID NO: 5335
  REGION 1..566: note = hemagglutinin__InfluenzaA__AFN18937

SEQ ID NO: 9374 - protein, 566 aa, synthetic construct
  REGION 1..566: note = hemagglutinin__InfluenzaA__AFN18952
MKAILVVLLYTFATANADTLCIGYHANNSTDTVDTVLEKNVTVTHSVNILEDKHNRKLCKLRGVAPLHLGKCNIAGWILGNPECESLSTASSWSYIVETSSSDNGTCYPGDFIDYEELREQLSSVSSFERFEIFPKTSSWPNHDSNKGVTAACPHAGAKSFYKNLIWLVKKGNSYPKLSKSYINDKGKEVLVLWGIHHPSTSADQQSLYQNADAYVFVGTSRYSKKFKPEIAIRPKVRDQEGRMNYYWTLVEPGDKITFEATGNLVVPRYAFAMERNAGSGIIISDTPVHDCNTTCQTPKGAINTSLPFQNIHPITIGKCPKYVKSTKLRLATGLRNVPSIQSRGLFGAIAGFIEGGWTGMVDGWYGYHHQNEQGSGYAADLKSTQNAIDEITNKVNSVIEKMNTQFTAVGKEFNHLEKRIENLNKKVDDGFLDIWTYNAELLVLLENERTLDYHDSNVKNLYEKVRSQLKNNAKEIGNGCFEFYHKCDNTCMESVKNGTYDYPKYSEEAKLNREKIDGVKLESTRIYQILAIYSTVASSLVLVVSLGAISFWMCSNGSLQCRICI

SEQ ID NO: 9375 - protein, 566 aa, synthetic construct
  REGION 1..566: note = hemagglutinin__InfluenzaA__AFN18957
MKAILVVLLYTFATANADTLCIGYHANNSTDTVDTVLEKNVTVTHSVNLLEDNHNGKLCKLRGVAPLHLGKCNIAGWILGNPECESLSTASSWSYIVETSSSDNGTCYPGDFIDYEELREQLSSVSSFERFEIFPKTSSWPNHDSNKGVTAACPHAGAKSFYKNLIWLVKKGNSYPKLSKSYINDKGKEVLVLWGIHHPSTSADQQSLYQNADAYVFVGTSRYSKKFKPEIAIRPKVRDQEGRMNYYWTLVEPGDKITFEATGNLVVPRYAFAMERNAGSGIIISDTPVHDCNTTCQTPKGAINTSLPFQNIHPITIGKCPKYVKSTKLRLATGLRNVPSIQSRGLFGAIAGFIEGGWTGMVDGWYGYHHQNEQGSGYAADLKSTQNAIDEITNKVNSVIEKMNTQFTAVGKEFNHLEKRIENLNKKVDDGFLDIWTYNAELLVLLENERTLDYHDSNVKNLYEKVRSQLKNNAKEIGNGCFEFYHKCDNTCMESVKNGTYDYPKYSEEAKLNREEIDGVKLESTRIYQILAIYSTVASSLVLVVSLGAISFWMCSNGSLQCRICI

SEQ ID NO: 9376 - protein, 566 aa, synthetic construct; identical to SEQ ID NO: 8758
  REGION 1..566: note = hemagglutinin__InfluenzaA__AFN18964

SEQ ID NO: 9377 - protein, 566 aa, synthetic construct
  REGION 1..566: note = hemagglutinin__InfluenzaA__AFN18974
MKAILVVLLYTFATANADTLCIGYHANNSTDTVDTVLEKNVTVTHSVNLLEDKHNGKLCKLRGVAPLHLGKCNIAGWILGNPECESLSTASSWSYIVETSSSDNGTCYPGDFIDYEELREQLSSMSSFERFEIFPKTSSWPNHDPNKGVTAACPHAGAKSFYKNLIWLVKKGNSYPKLSKSYINDKGKKVLVLWGIHHPSTSADQQSLYQNADAYVFVGTSRYSKKFKPEIAIRPKVRDQEGRMNYYWTLVEPGDKITFEATGNLVVPRYAFAMERNAGSGIIISDTPVHDCNTTCQTPKGAINTSLPFQNIHPITIGKCPKYVKSTKLRLATGLRNVPSIQSRGLFGAIAGFIEGGWTGMVDGWYGYHHQNEQGSGYAADLKSTQNAIDEITNKVNSVIEKMNTQFTAVGKEFNHLEKRIENLNKKVDDGFLDIWTYNAELLVLLENERTLDYHDSNVKNLYEKVRSQLKNNAKEIGNGCFEFYHKCDNTCMESVKNGTYDYPKYSDEAKLNREEIDGVKLESTRIYQILAIYSTVASSLVLVVSLGAISFWMCSNGSLQCRICI

SEQ ID NO: 9378 - protein, 566 aa, synthetic construct; identical to SEQ ID NO: 4221
  REGION 1..566: note = hemagglutinin__InfluenzaA__AFN18979

SEQ ID NO: 9379 - protein, 566 aa, synthetic construct
  REGION 1..566: note = hemagglutinin__InfluenzaA__AFN18982
MKAILVVLLYTFAIANADTLCIGYHANNSTDTVDTVLEKNVTVTHSVNLLEDKHNGKLCKLRGVAPLHLGKCNIAGWILGNPECESLSTASSWSYIVETSSSDNGTCYPGDFIDYEELREQLSSVSSFERFEIFPKTNSWPNHDSNKGVTAACPHAGAKSFYKNLIWLVKKGNSYPKLSKSYINDKGKEVLVLWGIHHPSTSADQQSLYQNADAYVFVGTSRYSKKFKPEIAIRPKVRDQEGRMNYYWTLVEPGDKITFEATGNLVVPRYAFAMERNAGSGIIISDTPVHDCNTTCQTPKGAINTSLPFQNIHPITIGKCPKYVKSTKLRLATGLRNVPSIQSRGLFGAIAGFIEGGWTGMVDGWYGYHHQNEQGSGYAADLKSTQHAIDEITNKVNSVIEKMNTQFTAVGKEFNHLEKRIENLNKKVDDGFLDIWTYNAELLVLLENERTLDYHDSNVKNLYEKVRSQLKNNAKEIGNGCFEFYHKCDNTCMESVKNGTYDYPKYSEEAKLNREEINGVKLESTRIYQILAIYSTVASSLVLVVSLGAISFWMCSNGSLQCRICI

SEQ ID NO: 9380 - protein, 566 aa, synthetic construct; identical to SEQ ID NO: 9272
  REGION 1..566: note = hemagglutinin__InfluenzaA__AFN18984

SEQ ID NO: 9381 - protein, 566 aa, synthetic construct; identical to SEQ ID NO: 2669
  REGION 1..566: note = hemagglutinin__InfluenzaA__AFN18986

SEQ ID NO: 9382 - protein, 566 aa, synthetic construct; identical to SEQ ID NO: 2669
  REGION 1..566: note = hemagglutinin__InfluenzaA__AFN18988

SEQ ID NO: 9383 - protein, 566 aa, synthetic construct; identical to SEQ ID NO: 3833
  REGION 1..566: note = hemagglutinin__InfluenzaA__AFN18993

SEQ ID NO: 9384 - protein, 566 aa, synthetic construct; identical to SEQ ID NO: 3833
  REGION 1..566: note = hemagglutinin__InfluenzaA__AFN18999

SEQ ID NO: 9385 - protein, 566 aa, synthetic construct; identical to SEQ ID NO: 3467
  REGION 1..566: note = hemagglutinin__InfluenzaA__AFN19006

SEQ ID NO: 9386 - protein, 566 aa, synthetic construct; identical to SEQ ID NO: 2669
  REGION 1..566: note = hemagglutinin__InfluenzaA__AFN19026

SEQ ID NO: 9387 - protein, 566 aa, synthetic construct; identical to SEQ ID NO: 3809
  REGION 1..566: note = hemagglutinin__InfluenzaA__AFN19036

SEQ ID NO: 9388 - protein, 566 aa, synthetic construct; identical to SEQ ID NO: 2669
  REGION 1..566: note = hemagglutinin__InfluenzaA__AFN19043

SEQ ID NO: 9389 - protein, 566 aa, synthetic construct; identical to SEQ ID NO: 2669
  REGION 1..566: note = hemagglutinin__InfluenzaA__AFN19053

SEQ ID NO: 9390 - protein, 566 aa, synthetic construct; identical to SEQ ID NO: 2669
  REGION 1..566: note = hemagglutinin__InfluenzaA__AFN19063

SEQ ID NO: 9391 - protein, 566 aa, synthetic construct; identical to SEQ ID NO: 2669
  REGION 1..566: note = hemagglutinin__InfluenzaA__AFN19070

SEQ ID NO: 9392 - protein, 566 aa, synthetic construct
  REGION 1..566: note = hemagglutinin__InfluenzaA__AFN19076
MKAILVVLLYTFATANADTLCIGYHANNSTDTVDTVLEKDVTVTHSVNLLEDKHNGKLCKLRGVAPLHLGKCNIAGWILGNPECESLSTASSWSYIVETSSSDNGTCYPGDFIDYEELREQLSSVSSFERFEIFPKTSSWPNHDSNKGVTAACPHAGAKSFYKNLIWLVKKGNSYPKLSKSYINDKGKEVLVLWGIHHPSTSADQQSLYQNADAYVFVGTSRYSKKFKPEIAIRPKVRDQEGRMNYYWTLVEPGDKITFEATGNLVVPRYAFAMERNAGSGIIISDTPVHDCNTTCQTPKGAINTSLPFQNIHPITIGKCPKYVKSTKLRLATGLRNVPSIQSRGLFGAIAGFIEGGWTGMVDGWYGYHHQNEQGSGYAADLKSTQNAIDEITNKVNSVIEKMNTQFTAVGKEFNHLEKRIENLNKKVDDGFLDIWTYNAELLVLLENERTLDYHDSNVKNLYEKVRSQLKNNAKEIGNGCFEFYHKCDNTCMESVKNGTYDYPKYSEEAKLNREEIDGVKLESTRIYQILAIYSTVASSLVLVVSLGAISFWMCSNGSLQCRICI

SEQ ID NO: 9393 - protein, 566 aa, synthetic construct; identical to SEQ ID NO: 2669
  REGION 1..566: note = hemagglutinin__InfluenzaA__AFN19082

SEQ ID NO: 9394 - protein, 566 aa, synthetic construct; identical to SEQ ID NO: 2669
  REGION 1..566: note = hemagglutinin__InfluenzaA__AFN19088

SEQ ID NO: 9395 - protein, 566 aa, synthetic construct; identical to SEQ ID NO: 2669
  REGION 1..566: note = hemagglutinin__InfluenzaA__AFN19097

SEQ ID NO: 9396 - protein, 566 aa, synthetic construct; identical to SEQ ID NO: 2669
  REGION 1..566: note = hemagglutinin__InfluenzaA__AFN19104

SEQ ID NO: 9397 - protein, 566 aa, synthetic construct; identical to SEQ ID NO: 2669
  REGION 1..566: note = hemagglutinin__InfluenzaA__AFN19113

SEQ ID NO: 9398 - protein, 566 aa, synthetic construct; identical to SEQ ID NO: 2669
  REGION 1..566: note = hemagglutinin__InfluenzaA__AFN19119

SEQ ID NO: 9399 - protein, 566 aa, synthetic construct; identical to SEQ ID NO: 5180
  REGION 1..566: note = hemagglutinin__InfluenzaA__AFN19125

SEQ ID NO: 9400 - protein, 566 aa, synthetic construct; identical to SEQ ID NO: 2669
  REGION 1..566: note = hemagglutinin__InfluenzaA__AFN19134

SEQ ID NO: 9401 - protein, 566 aa, synthetic construct; identical to SEQ ID NO: 2669
  REGION 1..566: note = hemagglutinin__InfluenzaA__AFN19144

SEQ ID NO: 9402 - protein, 566 aa, synthetic construct; identical to SEQ ID NO: 5224
  REGION 1..566: note = hemagglutinin__InfluenzaA__AFN19154

SEQ ID NO: 9403 - protein, 566 aa, synthetic construct; identical to SEQ ID NO: 2669
  REGION 1..566: note = hemagglutinin__InfluenzaA__AFN19164

SEQ ID NO: 9404 - protein, 566 aa, synthetic construct; identical to SEQ ID NO: 2669
  REGION 1..566: note = hemagglutinin__InfluenzaA__AFN19174

SEQ ID NO: 9405 - protein, 566 aa, synthetic construct; identical to SEQ ID NO: 2669
  REGION 1..566: note = hemagglutinin__InfluenzaA__AFN19184

SEQ ID NO: 9406 - protein, 566 aa, synthetic construct; identical to SEQ ID NO: 2669
  REGION 1..566: note = hemagglutinin__InfluenzaA__AFN19194

SEQ ID NO: 9407 - protein, 566 aa, synthetic construct; identical to SEQ ID NO: 2669
  REGION 1..566: note = hemagglutinin__InfluenzaA__AFN19203

SEQ ID NO: 9408 - protein, 566 aa, synthetic construct; identical to SEQ ID NO: 2669
  REGION 1..566: note = hemagglutinin__InfluenzaA__AFN19213

SEQ ID NO: 9409 - protein, 566 aa, synthetic construct; identical to SEQ ID NO: 2669
  REGION 1..566: note = hemagglutinin__InfluenzaA__AFN19223

SEQ ID NO: 9410 - protein, 566 aa, synthetic construct; identical to SEQ ID NO: 2669
  REGION 1..566: note = hemagglutinin__InfluenzaA__AFN19233

SEQ ID NO: 9411 - protein, 566 aa, synthetic construct
  REGION 1..566: note = hemagglutinin__InfluenzaA__AFN19243
MKAILVVLLYTFATANADTLCIGYHANNSTDTVDTVLEKNVTVTHSVNLLEDKHNGKLCKLRGVAPLHLGKCNIAGWILGNPECESLSTASSWSYIVETSSSDNGTCYPGDFIDYEELREQLSSVSSFERFEIFPKTSSWPNHDSNKGVTAACPHAGAKSFYKNLIWLVKKGNSYPKLSKSYINDKGKEVLVLWGIHHPSTSADQQSLYQNADAYVFVGTSKYSKKFKPEIAIRPKVRDQEGRMNYYWTLVEPGDKITFEATGNLVVPRYAFAMERNAGSGIIISDTPVQDCNTTCQTPKGAINTSLPFQNIHPITIGKCPKYVKSTKLRLATGLRNVPSIQSRGLFGAIAGFIEGGWTGMVDGWYGYHHQNEQGSGYAADLKSTQNAIDEITNKVNSVIEKMNTQFTAVGKEFNHLEKRIENLNKKVDDGFLDIWTYNAELLVLLENERTLDYHDSNVKNLYEKVRSQLKNNAKEIGNGCFEFYHKCDNTCMESVKNGTYDYPKYSEEAKLNREEIDGVKLESTRIYQILAIYSTVASSLVLVVSLGAISFWMCSNGSLQCRICI

SEQ ID NO: 9412 - protein, 566 aa, synthetic construct; identical to SEQ ID NO: 4785
  REGION 1..566: note = hemagglutinin__InfluenzaA__AFN19250

SEQ ID NO: 9413 - protein, 566 aa, synthetic construct; identical to SEQ ID NO: 2669
  REGION 1..566: note = hemagglutinin__InfluenzaA__AFN19259

SEQ ID NO: 9414 - protein, 566 aa, synthetic construct; identical to SEQ ID NO: 2669
  REGION 1..566: note = hemagglutinin__InfluenzaA__AFN19269

SEQ ID NO: 9415 - protein, 566 aa, synthetic construct; identical to SEQ ID NO: 2669
  REGION 1..566: note = hemagglutinin__InfluenzaA__AFN19279

SEQ ID NO: 9416 - protein, 566 aa, synthetic construct; identical to SEQ ID NO: 3530
  REGION 1..566: note = hemagglutinin__InfluenzaA__AFN19286

SEQ ID NO: 9417 - protein, 566 aa, synthetic construct; identical to SEQ ID NO: 2669
  REGION 1..566: note = hemagglutinin__InfluenzaA__AFN19295

SEQ ID NO: 9418 - protein, 566 aa, synthetic construct; identical to SEQ ID NO: 2669
  REGION 1..566: note = hemagglutinin__InfluenzaA__AFN19305

SEQ ID NO: 9419 - protein, 566 aa, synthetic construct; identical to SEQ ID NO: 3535
  REGION 1..566: note = hemagglutinin__InfluenzaA__AFN19315

SEQ ID NO: 9420 - protein, 566 aa, synthetic construct; identical to SEQ ID NO: 2669
  REGION 1..566: note = hemagglutinin__InfluenzaA__AFN19325

SEQ ID NO: 9421 - protein, 566 aa, synthetic construct; identical to SEQ ID NO: 2669
  REGION 1..566: note = hemagglutinin__InfluenzaA__AFN19335

SEQ ID NO: 9422 - protein, 566 aa, synthetic construct; identical to SEQ ID NO: 2669
  REGION 1..566: note = hemagglutinin__InfluenzaA__AFN19344

SEQ ID NO: 9423 - protein, 566 aa, synthetic construct
  REGION 1..566: note = hemagglutinin__InfluenzaA__AFN19351
MKTIIALSYILCLVFAQKLPGNDNSMATLCLGHHAVPNGTIVKTITNDQIEVTNATELVQNSSIGEICDSPHQILDGENCTLIDALLGDPQCDGFQNKKWDLFVERSKAYSNCYPYDVPDYASLRSLVASSGTLEFNNESFNWTGVTQNGTSSACIRRSNNSFFSRLNWLTHLNFKYPALNVTMPNNEQFDKLYIWGVHHPGTDKDQIFLYAQSSGRITVSTKRSQQAVIPNIGSRPRIRNIPSRISIYWTIVKPGDILLINSTGNLIAPRGYFKIRSGKSSIMRSDAPIGKCNSECITPNGSIPNDKPFQNVNRITYGACPRYVKQSTLKLATGMRNVPEKQTRGIFGAIAGFIENGWEGMVDGWYGFRHQNSEGRGQAADLKSTQAAIDQINGKLNRLIGKTNEKFHQIEKEFSEVEGRIQDLEKYVEDTKIDLWSYNAELLVALENQHTIDLTDSEMNKLFEKTKKQLRENAEDMGNGCFKIYHKCDNACIGSIRNGTYDHDVYRDEALNNRFQIKGVELKSGYKDWILWISFAISCFLLCVALLGFIMWACQKGNVRCNICI

SEQ ID NO: 9424 - protein, 566 aa, synthetic construct; identical to SEQ ID NO: 9074
  REGION 1..566: note = hemagglutinin__InfluenzaA__AFN19355

SEQ ID NO: 9425 - protein, 566 aa, synthetic construct; identical to SEQ ID NO: 9074
  REGION 1..566: note = hemagglutinin__InfluenzaA__AFN19357

SEQ ID NO: 9426 - protein, 566 aa, synthetic construct; identical to SEQ ID NO: 9074
  REGION 1..566: note = hemagglutinin__InfluenzaA__AFN19361

SEQ ID NO: 9427 - protein, 566 aa, synthetic construct
  REGION 1..566: note = hemagglutinin__InfluenzaA__AFN19363
MKTIIALSYILCLVFAQKLPGNDNSTATLCLGHHAVPNGTIVKTITNDQIEVTNATELVQISSTGEICDSPHQILDGENCTLIDALLGDPQCDGFQNKKWDLFVERSKAYSNCYPYDVPDYASLRSLVASSGTLEFNNESFNWTGVTQNGTSSACIRRSNSSFFSRLNWLTHLNFKYPALNVTMPNNEQFDKLYIWGVHHPGTDKDQIFLYAQSSGRITVSTKRSQQAVIPNIGSRPRIRNIPSRISIYWTIVKPGDILLINSTGNLIAPRGYFKIRSGKSSIMRSDAPIGKCNSECITPNGSIPNDKPFQNVNRITYGACPRYVKQSTLKLATGMRNVPEKQTRGIFGAIAGFIENGWEGMVDGWYGFRHQNSEGRGQAADLKSTQAAIDQINGKLNRLIGKTNEKFHQIEKEFSEVEGRIQDLEKYVEDTKIDLWSYNAELLVALENQHTIDLTDSEMNKLFEKTKKQLRENAEDMGNGCFKIYHKCDNACIGSIRNGTYNHDVYRDEALNNRFQIKGVELKSGYKDWILWISFAISCFLLCVALLGFIMWACQKGNIRCNICI

SEQ ID NO: 9428 - protein, 566 aa, synthetic construct; identical to SEQ ID NO: 6982
  REGION 1..566: note = hemagglutinin__InfluenzaA__AFN19365

SEQ ID NO: 9429 - protein, 566 aa, synthetic construct
  REGION 1..566: note = hemagglutinin__InfluenzaA__AFN19367
MKTIIALSYILCLVFAQKLPENDNSTATLCLGHHAVPNGTIVKTITNDQIEVTNATELVQSSSTGEICDSPHQILDGVNCTLIDALLGDPQCDGFQNKKWDLFVERSKAYSNCYPYDVPDYASLRSLVASSGTLEFNNESFNWTGVTQNGTSSACIRRSNSSFFSRLNWLTHLNFKYPALNVTMPNNEQFDKLYIWGVHHPGTDKDQIFLYAQSSGRITVSTKRSQQAVIPNIGSRPRIRNIPSRISIYWTIVKPGDILLINSTGNLIAPRGYFKIQSGKSSIMRSDAPIGKCNSECITPNGSIPNDKPFQNVNRITYGACPRYVKQSTLKLATGMRNVPEKQTRGIFGAIAGFIENGWEGMVDGWYGFRHQNSEGRGQAADLKSTQAAIDQINGKLNRLIGKTNEKFHQIEKEFSEVEGRIQDLEKYVEDTKIDLWSYNAELLVALENQHTIDLTDSEMNKLFEKTKKQLRENAEDMGNGCFKIYHKCDNACIGSIRNGTYNHDVYRDEALNNRFQIKGVELKSGYKDWILWISFAISCFLLCVALLGFIMWACQKGNIRCNICI

SEQ ID NO: 9430 - protein, 566 aa, synthetic construct
  REGION 1..566: note = hemagglutinin__InfluenzaA__AFN19369
MKTIIALSYILCLVFAQKLPENDNSTATLCLGHHAVPNGTIVKTITNDQIEVTNATELVQSSSTGEICDSPHQILDGVNCTLIDALLGDPQCDGFQNKKWDLFVERSKAYSNCYPYDVPDYASLRSLVASSGTLEFNNESFNWTGVTQNGTSSACIRRSNSSFFSRLNWLTHLNFKYPALNVTMPNNEQFDKLYIWGVHHPGTDKDQIFLYAQSSGRITVSTKRSQQAVIPNIGSRPRIRNIPSRISIYWTIVKPGDILLINSTGNLIAPRGYFKIRSGKSSIMRSDAPIGKCNSECITPNGSIPNDKPFQNVNRITYGACPRYVKQSTLKLATGMRNVPEKQTRGIFGAIAGFIENGWEGMVDGWYGFRHQNSEGRGQAADLKSTQAAIDQINGKLNRLIGKTNEKFHQIEKEFSEVEGRIQDLEKYVEDTKIDLWSYNAELLVALENQHTIDLTDSEMNKLFEKTKKQLRENAEDMGNGCFKIYHKCDNACIGSIRNGTYNHDVYRDEALNNRFQIKGVELKSGYKDWILWISFAISCFLLCVALLGFIMWACQKGNIRCNICI

SEQ ID NO: 9431 - protein, 566 aa, synthetic construct
  REGION 1..566: note = hemagglutinin__InfluenzaA__AFN19373
MKTIIALSYILCLVFAQKLPGNDNSTATLCLGHHAVPNGTIVKTITNDQIEVTNATELVQNSSIGEICDSPHQILDGENCTLIDALLGDPQCDGFQNKKWDLFVERSKAYSNCYPYDVPDYASLRSLVASSGTLEFNNESFNWTGVTQNGTSSACIRRSNNSFFSRLNWLTHLNFKYPALNVTMPNNEQFDKLYIWGVHHPGTDKDQIFLYAQSSGRITVSTKRSQQAVIPNIGSRPRIRNIPSRISIYWTIVKPGDILLINSTGNLIAPRGYFKIRSGKSSIMRSDAPIGKCNSECITPNGSIPNDKPFQNVNRITYGACPRYVKQSTLKLATGMRNVPEKQTRGIFGAIAGFIENGWEGMVDGWYGFRHQNSEGRGQAADLKSTQAAIDQINGKLNRLIGKTNEKFHQIEKEFSEVEGRIQDLEKYVEDTKIDLWSYNAELLVALENQHTIDLTDSEMNKLFEKTKKQLRENAEDMGNGCFKIYHKCDNACIGSIRNGTYDHDVYRDEALNNRFQIKGVELKSGYKDWILWISFAISCFLLCVALLGFIMWACQKGNIRCNICI

SEQ ID NO: 9432 - protein, 566 aa, synthetic construct; identical to SEQ ID NO: 9074
  REGION 1..566: note = hemagglutinin__InfluenzaA__AFN19375

SEQ ID NO: 9433 - protein, 566 aa, synthetic construct
  REGION 1..566: note = hemagglutinin__InfluenzaA__AFN19377
MKTIIALSYILCLVFAQKLPENDNSTATLCLGHHAVPNGTIVKTITNDQIEVTNATELVQSSSTGEICDSPHQILDGVNCTLIDALLGDPQCDGFQNKKWDLFVERSKAYSNCYPYDVPDYASLRSLVASSGTLEFNNESFNWTGVTQNGTSSACIRRSNSSFFSRLNWLTHLNFKYPALNVTMPNNEQFDKLYIWGVHHPGTDKDQIFLYAQSSGRITVSTKRSQQAVIPNIGSRPRIRNIPSRISIYWTIVKPGDILLINSTGNLIAPRGYFKIRSGKSSIMRSDAPIGKCNSECITPNGSIPNDKPFQNVNRITYGACPRYVKQSTLKLATGMRNVPEKQTRGIFGAIAGFIENGWEGMVDGWYGFRHQNSEGRGQAADLKSTQAAIDQINGKLNRLIGKTNEKFHQIEKEFSEVEGRIQDLEKYVEDTKIDLWSYNAELLVALENQHTIDLTDSEMNKLFEKTKKQLRENAEDMGNGCFKIYHKCDNACIGSIRNGTYNHDVYRDEALNNRFQIKGVELKSGYKDWILWISFAISCFLLCVALLGFIMWACQNGNIRCNICI

SEQ ID NO: 9434 - protein, 566 aa, synthetic construct; identical to SEQ ID NO: 9074
  REGION 1..566: note = hemagglutinin__InfluenzaA__AFN19379

SEQ ID NO: 9435 - protein, 566 aa, synthetic construct; identical to SEQ ID NO: 9431
  REGION 1..566: note = hemagglutinin__InfluenzaA__AFN19381

SEQ ID NO: 9436 - protein, 566 aa, synthetic construct; identical to SEQ ID NO: 9430
  REGION 1..566: note = hemagglutinin__InfluenzaA__AFN19383

SEQ ID NO: 9437 - protein, 566 aa, synthetic construct
  REGION 1..566: note = hemagglutinin__InfluenzaA__AFN19385
MKTIIALSYILCLVFAQKLPENDNSTATLCLGHHAVPNGTIVKTITNDQIEVTNATELVQSSSTGEICDSPHQILDGVNCTLIDALLGDPQCDGFQNKKWDLFVERSKAYSNCYPYDVPDYASLRSLVASSGTLEFNNESFNWTGVTQNGTSSACIRRSNSSFFSRLNWLTHLNFKYPALNVTMPNNEQFDKLYIWGVHHPGTDKDQIFLYAQSSGRITVSTKRSQQAVIPNIGSRPRIRNIPSRISIYWTIVKPGDILLINSTGNLIAPRGYFKIQSGKSSIMRSDAPIGKCNSECITPNGSIPNDKPFQNVNRITYGACPRYVKQSTLKLATGMRNVPEKQTRGIFGAIAGFIENGWEGMVDGWYGFRHQNSEGRGQAADLKSTQAAIDQINGKLNRLIGKTNEKFHQIEKEFSEVEGRIQDLEKYVEDTKIDIWSYNAELLVALENQHTIDLTDSEMNKLFEKTKKQLRENAEDMGNGCFKIYHKCDNACIGSIRNGTYNHDVYRDEALNNRFQIKGVELKSGYKDWILWISFAISCFLLCVALLGFIMWACQKGNIRCNICI

SEQ ID NO: 9438 - protein, 566 aa, synthetic construct; identical to SEQ ID NO: 9430
  REGION 1..566: note = hemagglutinin__InfluenzaA__AFN19387

SEQ ID NO: 9439 - protein, 566 aa, synthetic construct; identical to SEQ ID NO: 9074
  REGION 1..566: note = hemagglutinin__InfluenzaA__AFN19389

SEQ ID NO: 9440 - protein, 566 aa, synthetic construct; identical to SEQ ID NO: 9074
  REGION 1..566: note = hemagglutinin__InfluenzaA__AFN19391

SEQ ID NO: 9441 - protein, 566 aa, synthetic construct
  REGION 1..566: note = hemagglutinin__InfluenzaA__AFN19393
MKTIIALSYILCLVFAQKLPGNDNSTATLCLGHHAVPNGTIVKTITNDQIEVTNATELVQSSSAGEICDSPHHILDGENCTLIDALLGDPQCDGFQNKKWDLFVERSRAYSNCYPYDVPDYASLRSLVASSGTLEFNNESFNWTGVTQNGTSSACIRRSNNSFFSRLNWLTHLNFKYPALNVTMPNNEQFDKLYIWGVHHPGTDKDQIFLYAQASGRITVSTKRSQQAVIPNIGSRPRVRNIPSRISIYWTIVKPGDILLINSTGNLIAPRGYFKIRSGKSSIMRSDAPIGKCNSECITPNGSIPNDKPFQNVNRITYGACPRYVKQSTLKLATGMRNVPEKQTRGIFGAIAGFIENGWEGMMDGWYGFRHQNSEGRGQAADLKSTQAAIDQINGKLNRLIGKTNEKFHQIEKEFSEVEGRIQDLEKYVEDTKIDLWSYNAELLVALENQHTIDLTDSEMNKLFEKTKKQLRENAEDMGNGCFKIYHKCDNACIGSIRNGTYDHDVYRDEALSNRFQIKGVELKSGYKDWILWISFAISCFLLCVALLGFIMWACQKGNIRCNICI

SEQ ID NO: 9442 - protein, 566 aa, synthetic construct; identical to SEQ ID NO: 9430
  REGION 1..566: note = hemagglutinin__InfluenzaA__AFN19397

SEQ ID NO: 9443 - protein, 566 aa, synthetic construct; identical to SEQ ID NO: 9074
  REGION 1..566: note = hemagglutinin__InfluenzaA__AFN19399

SEQ ID NO: 9444 - protein, 566 aa, synthetic construct; identical to SEQ ID NO: 9430
  REGION 1..566: note = hemagglutinin__InfluenzaA__AFN19401

SEQ ID NO: 9445 - protein, 566 aa, synthetic construct; identical to SEQ ID NO: 9074
  REGION 1..566: note = hemagglutinin__InfluenzaA__AFN19403

SEQ ID NO: 9446 - protein, 566 aa, synthetic construct; identical to SEQ ID NO: 9430
  REGION 1..566: note = hemagglutinin__InfluenzaA__AFN19405

SEQ ID NO: 9447 - protein, 566 aa, synthetic construct
  REGION 1..566: note = hemagglutinin__InfluenzaA__AFN19407
MKTIIALSYILCLVFAQKLPGNDNSTATLCLGHHAVPNGTIVKTITNDQIEVTNATELVQNSSIGEICDSPHQILDGENCTLIDALLGDPQCDGFQNKKWDLFVERSKAYSNCYPYDVPDYASLRSLVASSGTLEFNNESFNWSGVTQNGTSSACMRRSNSSFFSRLNWLTHLNFKYPALNVTMPNNEQFDKLYIWGVHHPGTDKDQIFLYAQSSGRITVSTKRSQQAVIPNIGSRPRIRNIPSRISIYWTIVKPGDILLINSTGNLIAPRGYFKIRSGKSSIMRSDAPIGKCNSECITPNGSIPNDKPFQNVNRITYGACPRYVKQSTLKLATGMRNVPEKQTRGIFGAIAGFIENGWEGMVDGWYGFRHQNSEGRGQAADLKSTQAAIDQINGKLNRLIGKTNEKFHQIEKEFSEVEGRIQDLEKYVEDTKIDLWSYNAELLVALENQHTIDLTDSEMNKLFEKTKKQLRENAEDMGNGCFKIYHKCDNACIGSIRNGTYDHDVYRDEALNNRFQIKGVELKSGYKDWILWISFAISCFLLCVALLGFIMWACQKGNIRCNICI

SEQ ID NO: 9448 - protein, 566 aa, synthetic construct
  REGION 1..566: note = hemagglutinin__InfluenzaA__AFN19409
MKTIIALSYILCLVFAQKLPGNDNSTATLCLGHHAVPNGTIVKTITNDQIEVTNATELVQSSSIGEICDSPHQILDGENCTLIDALLGDPQCDGFQNKKWDLFVERSKAYSNCYPYDVPDYASLRSLVASSGTLEFNNESFNWTGVTQNGTSSACIRRSNSSFFSRLNWLTHLNFKYPALNVTMPNNEQFDKLYIWGVHHPGTDKDQIFLYAQSSGRITVSTKRSQQAVIPNIGSRPRIRNIPSRISIYWTIVKPGDILLINSTGNLIAPRGYFKIRSGKSSIMRSDAPIGKCNSECITPNGSIPNDKPFQNVNRITYGACPRYVKQSTLKLATGMRNVPEKQTRGIFGAIAGFIENGWEGMVDGWYGFRHQNSEGRGQAADLKSTQAAIDQINGKLNRLIGKTNEKFHQIEKEFSEVEGRIQDLEKYVEDTKIDLWSYNAELLVALENQHTIDLTDSEMNKLFEKTKKQLRENAEDMGNGCFKIYHKCDNACIGSIRNGTYNHDVYRDEALNNRFQIKGVELKSGYKDWILWISFAISCFLLCVALLGFIMWACQKGNIRCNICI

SEQ ID NO: 9449 - protein, 566 aa, synthetic construct; identical to SEQ ID NO: 9430
  REGION 1..566: note = hemagglutinin__InfluenzaA__AFN19411

SEQ ID NO: 9450 - protein, 566 aa, synthetic construct; identical to SEQ ID NO: 9074
  REGION 1..566: note = hemagglutinin__InfluenzaA__AFN19413

SEQ ID NO: 9451 - protein, 566 aa, synthetic construct
  REGION 1..566: note = hemagglutinin__InfluenzaA__AFN19415
MKTIIALSYILCLVFAQKLPGNDNSTATLCLGHHAVPNGTIVKTITNDQIEVTNATELVQSSSTGEICDSPHQILDGENCTLIDALLGDPQCDGFQNKKWDLFVERSKAYSNCYPYDVPDYASLRSLVASSGTLEFNNESFNWTGVTQNGTSSACIRRSNSSFFSRLNWLTHLNFKYPALNVTMPNNEQFDKLYIWGVHHPGTDKDQIFLYAQSSGRITVSTKRSQQAVIPNIGSRPRIRNIPSRISIYWTIVKPGDILLINSTGNLIAPRGYFKIRSGKSSVMRSDAPIGKCNSECITPNGSIPNDKPFQNVNRITYGACPRYVKQSTLKLATGMRNVPEKQTRGIFGAIAGFIENGWEGMVDGWYGFRHQNSEGRGQAADLKSTQAAIDQINGKLNRLIGKTNEKFHQIEKEFSEVEGRIQDLEKYVEDTKIDLWSYNAELLVALENQHTIDLTDSEMNKLFEKTKKQLRENAEDMGNGCFKIYHKCDNACIGSIRNGTYNHDVYRDEALNNRFQIKGVELKSGYKDWILWISFAISCFLLCVALLGFIMWACQKGNIRCNICI

SEQ ID NO: 9452 - protein, 566 aa, synthetic construct
  REGION 1..566: note = hemagglutinin__InfluenzaA__AFN19417
MKTIIALSYILCLVFAQKLPGNDNSTATLCLGHHAVPNGTIVKTITNDQIEVTNATELVQSSSTGEICDSPHQILDGENCTLIDALLGDPQCDGFQNKKWDLFVERSKAYSNCYPYDVPDYASLRSLIASSGTLEFNNESFNWTGVTQNGTSSACIRRSNSSFFSRLNWLTHLNFKYPALNVTMPNNEQFDKLYIWGVHHPGTDKDQIFLYAQSSGRITVSTKRSQQAVIPNIGSRPRIRNIPSRISIYWTIVKPGDILLINSTGNLIAPRGYFKIRSGKSSIMRSDAPIGKCNSECITPNGSIPNDKPFQNVNRITYGACPRYVKQSTLKLATGMRNVPEKQTRGIFGAIAGFIENGWEGMVDGWYGFRHQNSEGRGQAADLKSTQAAIDQINGKLNRLIGKTNEKFHQIEKEFSEVEGRIQDLEKYVEDTKIDLWSYNAELLVALENQHTIDLTDSEMNKLFEKTKKQLRENAEDMGNGCFKIYHKCDNACIGSIRNGTYNHDVYRDEALNNRFQIKGVELKSGYKDWILWISFAISCFLLCVALLGFIMWACQKGNIRCNICI

SEQ ID NO: 9453 - protein, 566 aa, synthetic construct
  REGION 1..566: note = hemagglutinin__InfluenzaA__AFN19423
MKTIIALSYILCLVFAQKLPGNDNSTATLCLGHHAVPNGTIVKTITNDRIEVTNATELVQNSSIGEICDSPHQILDGENCTLIDALLGDPQCDGFQNKKWDLFVERSKAYSNCYPYDVPDYASLRSLVASSGTLEFNNESFNWTGVTQNGTSSACIRRSNNSFFSRLNWLTHLNFKYPALNVTMPNNEQFDKLYIWGVHHPGTDKDQIFLYAQSSGRITVSTKRSQQAVIPNIGSRPRIRNIPSRISIYWTIVKPGDILLINSTGNLIAPRGYFKIRSGKSSIMRSDAPIGKCKSECITPNGSIPNDKPFQNVNRITYGACPRYVKQSTLKLATGMRNVPEKQTRGIFGAIAGFIENGWEGMVDGWYGFRHQNSEGRGQAADLKSTQAAIDQINGKLNRLIGKTNEKFHQIEKEFSEVEGRIQDLEKYVEDTKIDLWSYNAELLVALENQHTIDLTDSEMNKLFEKTKKQLRENAEDMGNGCFKIYHKCDNACIGSIRNGTYDHDVYRDEALNNRFQIKGVELKSGYKDWILWISFAISCFLLCVALLGFIMWACQKGNIRCNICI

SEQ ID NO: 9454 - protein, 566 aa, synthetic construct; identical to SEQ ID NO: 9430
  REGION 1..566: note = hemagglutinin__InfluenzaA__AFN19425

SEQ ID NO: 9455 - protein, 566 aa, synthetic construct
  REGION 1..566: note = hemagglutinin__InfluenzaA__AFN19437
MKTIIALSYILCLVFAQKLPGNDNSTATLCLGHHAVPNGTIVKTITNDQIEVTNATELVQNSSIGEICDSPHQILDGENCTLIDALLGDPQCDGFQNKKWDLFVERSKAYSNCYPYDVPDYASLRSLVASSGTLEFNNESFNWTGVTQNGTSSACIRRSNSSFFSRLNWLTHLNFKYPALNVTMPNNEQFDKLYIWGVHHPGTDKDQIFLYAQSSGRITVSTKRSQQAVIPNIGSRPRIRNIPSRISIYWTIVKPGDILLINSTGNLIAPRGYFRIRSGKSSIMRSDAPIGKCNSECITPNGSIPNDKPFQNVNRITYGACPRYVKQSTLKLATGMRNVPEKQTRGIFGAIAGFIENGWEGMVDGWYGFRHQNSEGRGQAADLKSTQAAIDQINRKLNRLIGKTNEKFHQIEKEFSEVEGRIQDLEKYVEDTKIDLWSYNAELLVALENQHTIDLTDSEMNKLFEKTKKQLRENAEDMGNGCFKIYHKCDNACIGSIRNGTYDHYVYRDEALNNRFQIKGVELKSGYKDWILWISFAISCFLLCVALLGFIMWACQKGNIRCNICI

SEQ ID NO: 9456 - protein, 566 aa, synthetic construct
  REGION 1..566: note = hemagglutinin__InfluenzaA__AFN19439
MKTIIALSHILCLVFAQKLPENDNSTATLCLGHHAVPNGTIVKTITNDQIEVTNATELVQSSSTGEICDSPHQILDGINCTLIDALLGDPQCDGFQNKKWDLFVERSKAYSNCYPYDVPDYASLRSLVASSGTLEFNNESFNWTGVTQNGTSSACIRRSNSSFFSRLNWLTHLNFKYPALNVTMPNNEQFDKLYIWGVHHPGTDKDQIFLYAQPSGRITVSTKRSQQAVIPNIGSRPRIRNIPSRISIYWTIVKPGDILLINSTGNLIAPRGYFKIRSGKSSIMRSDAPIGKCNSECITPNGSIPNDKPFQNVNRITYGACPRYVKQSTLKLATGMRNVPEKQTRGIFGAIAGFIENGWEGMVDGWYGFRHQNSEGRGQAADLKSTQAAIDQINGKLNRLIGKTNEKFHQIEKEFSEVEGRIQDLEKYVEDTKIDLWSYNAELLVALENQHTIDLTDSEMNKLFEKTKKQLRENAEDMGNGCFKIYHKCDNACIGSIRNGTYNHDVYRDEALNNRFQIKGVELKSGYKDWILWISFAISCFLLCVALLGFIMWACQKGNIRCNICI

SEQ ID NO: 9457 - protein, 566 aa, synthetic construct; identical to SEQ ID NO: 9431
  REGION 1..566: note = hemagglutinin__InfluenzaA__AFN19443

SEQ ID NO: 9458 - protein, 566 aa, synthetic construct
  REGION 1..566: note = hemagglutinin__InfluenzaA__AFN19445
MKTIIALSYILCLVFAQKLPGNDNSTATLCLGHHAVPNGTIVKTITNDRIEVTNATELVQNSSIGEICDSPHQILDGENCTLIDALLGDPQCDGFQNKKWDLFVERSKAYSNCYPYDVPDYASLRSLVASSGTLEFNNESFNWTGVTQNGTSSACIRRSNNSFFSRLNWLTHLNFKYPALNVTMPNNEQFDKLYIWGVHHPGTDKDQIFLYAQSSGRITVSTKRSQQAVIPNIGSRPRIRNIPSRISIYWTIVKPGDILLINSTGNLIAPRGYFKIRSGKSSIMRSDAPIGKCKSECITPNGSIPNDKPFQNVNRITYGACPRYVKQSTLRLATGMRNVPEKQTRGIFGAIAGFIENGWEGMVDGWYGFRHQNSEGRGQAADLKSTQAAIDQINGKLNRLIGKTNEKFHQIEKEFSEVEGRIQDLEKYVEDTKIDLWSYNAELLVALENQHTIDLTDSEMNKLFEKTKKQLRENAEDMGNGCFKIYHKCDNACIGSIRNGTYDHDVYRDEALNNRFQIKGVELKSGYKDWILWISFAISCFLLCVALLGFIMWACQKGNIRCNICI

SEQ ID NO: 9459 - protein, 566 aa, synthetic construct; identical to SEQ ID NO: 9453
  REGION 1..566: note = hemagglutinin__InfluenzaA__AFN19447

SEQ ID NO: 9460 - protein, 566 aa, synthetic construct
  REGION 1..566: note = hemagglutinin__InfluenzaA__AFN19451
MKTIIALSYILCLVFAQKLPGNDNSTATLCLGHHAVPNGTIVKTITNDQIEVTNATELVQNSSIGEICDSPHQILDGENCTLIDALLGDPQCDGFQNKKWDLFVERSKAYSNCYPYDVPDYASLRSLVASSGTLEFNNESFNWTGVTQNGTSSACIRRSNSSFFSRLNWLTHLNFKYPALNVTMPNNEQFDKLYIWGVHHPGTDKDQIFLYAQSSGRITVSTKRSQQAVIPNIGSRPRIRNIPSRISIYWTIVKPGDILLINSTGNLIAPRGYFKIRSGKSSIMRSDAPIGKCNSECITPNGSIPNDKPFQNVNRITYGACPRYVKQSTLKLATGMRNVPEKQTRGIFGAIAGFIENGWEGMVDGWYGFRHQNSEGRGQAADLKSTQAAIDQINGKLNRLIGKTNEKFHQIEKEFSEVEGRIQDLEKYVEDTKIDLWSYNAELLVALENQHTIDLTDSEMNKLFEKTKKQLRENAEDMGNGCFKIYHKCDNACIGSIRNGTYDHDVYRDEALNNRFQINGVELKSGYKDWILWISFAISCFLLCVALLGFIMWACQKGNIRCNICI

SEQ ID NO: 9461 - protein, 566 aa, synthetic construct
  REGION 1..566: note = hemagglutinin__InfluenzaA__AFN19453
MKTIIALSYILCLVFAQKLPGNDNSTATLCLGHHAVPNGTIVKTITNDQIEVTNATELVQNSSIGEICDSPHQILDGENCTLIDALLGDPQCDGFQNKKWDLFVERSKAYSNCYPYDVPDYASLRSLVASSGTLEFNNESFNWTGVTQNGTSSACIRRSNSSFFSRLNWLTHLNFKYPALNVTMPNNEQFDKLYIWGVHHPGTDKDQIFLYAQSSGRITVSTKRSQQAVIPNIGSRPRIRNIPSRISIYWTIVKPGDILLINSTGNLIAPRGYFKIRSGKSSIMRSDAPIGKCNSECITPNGSIPNDKPFQNVNRITYGACPRYVKQSTLKLATGMRNVPEKQTRGIFGAIAGFIENGWEGMVDGWYGFRHQNSEGRGQAADLKSTQAAIDQINGKLNRLIGKTNEKFHQIEKEFSEVEGRIQDLEKYVEDTKIDLWSYNAELLVALENQHTIDLTDSEMNKLFEKTKKQLRENAEDMGNGCFKIYHKCDNACIGSIRNGTYDHDVYRDEALNNRFQVKGVELKSGYKDWILWISFAISCFLLCVALLGFIMWACQKGNIRCNICI

SEQ ID NO: 9462 - protein, 566 aa, synthetic construct; identical to SEQ ID NO: 9453
  REGION 1..566: note = hemagglutinin__InfluenzaA__AFN19455

SEQ ID NO: 9463 - protein, 566 aa, synthetic construct; identical to SEQ ID NO: 9074
  REGION 1..566: note = hemagglutinin__InfluenzaA__AFN19457

SEQ ID NO: 9464 - protein, 566 aa, synthetic construct; identical to SEQ ID NO: 9074
  REGION 1..566: note = hemagglutinin__InfluenzaA__AFN19459

SEQ ID NO: 9465 - protein, 566 aa, synthetic construct; identical to SEQ ID NO: 9431
  REGION 1..566: note = hemagglutinin__InfluenzaA__AFN19461

SEQ ID NO: 9466 - protein, 566 aa, synthetic construct
  REGION 1..566: note = hemagglutinin__InfluenzaA__AFN19465
MKTIIALSYILCLVFAQKLPGNDNSTATLCLGHHAVPNGTIVKTITNDQIEVTNATELVQSSSTGEICDSPHQILDGENCTLIDALLGDPQCDGFQNKKWDLFVERSKAYSNCYPYDVPDYASLRSLVASSGTLEFNNESFNWTGVTQNGTSSACIRRSNSSFFSRLNWLTHLNFKYPALNVTMPNNEQFDKLYIWGVHHPGTDKDQIFLYAQSSGRITVSTKRSQQAVIPNIGSRPRIRNIPSRISIYWTIVKPGDILLINSTGNLIAPRGYFKIRSGKSSIMRSDAPIGKCNSECITPNGSIPNDKPFQNVNRITYGACPRYVKQSTLKLATGMRNVPEKQTRGIFGAIAGFIENGWEGMVDGWYGFRHQNSEGRGQAADLKSTQAAIDQINGKLNRLIGKTNEKFHQIEKEFSEVEGRIQDLEKYVEDTKIDLWSYNAELLVALENQHTIDLTDSEMNKLFEKTKKQLRENAEDIGNGCFKIYHKCDNACIGSIRNGTYNHDVYRDEALNNRFQIKGVELKSGYKDWILWISFAISCFLLCIALLGFIMWACQKGNIRCNICI

SEQ ID NO: 9467 - protein, 566 aa, synthetic construct; identical to SEQ ID NO: 9453
  REGION 1..566: note = hemagglutinin__InfluenzaA__AFN19467

SEQ ID NO: 9468 - protein, 566 aa, synthetic construct; identical to SEQ ID NO: 9461
  REGION 1..566: note = hemagglutinin__InfluenzaA__AFN19469

SEQ ID NO: 9469 - protein, 566 aa, synthetic construct; identical to SEQ ID NO: 9074
  REGION 1..566: note = hemagglutinin__InfluenzaA__AFN19471

SEQ ID NO: 9470 - protein, 566 aa, synthetic construct
  REGION 1..566: note = hemagglutinin__InfluenzaA__AFN19473
MKTIIALSYILCLVFAQKLPGNDNSTATLCLGHHAVPNGTIVKTITNDQIEVTNATELVQSSSTGEICGSPHQILDGENCTLIDALLGDPQCDGFQNKKWDLFVERSKAYSNCYPYDVPDYASLRSLVASSGTLEFNNESFNWTGVTQNGTSSACIRRSNSSFFSRLNWLTHLNFKYPALNVTMPNNEQFDKLYIWGVHHPGTDKDQIFLYAQSSGRITVSTKRSQQAVIPNIGSRPRIRNIPSRISIYWTIVKPGDILLINSTGNLIAPRGYFKIRSGKSSIMRSDAPIGKCNSECITPNGSIPNDKPFQNVNRITYGACPRYVKQSTLKLATGMRNVPEKQTRGIFGAIAGFIENGWEGMVDGWYGFRHQNSEGRGQAADLKSTQAAIDQINGKLNRLIGKTNEKFHQIEKEFSEVEGRIQDLEKYVEDTKIDLWSYNAELLVALENQHTIDLTDSEMNKLFEKTKKQLRENAEDMGNGCFKIYHKCDNACIGSIRNGTYNHDVYRDEALNNRFQIKGVELKSGYKDWILWISFAISCFLLCVALLGFIMWACQKGNIRCNICI

SEQ ID NO: 9471 - protein, 566 aa, synthetic construct; identical to SEQ ID NO: 9453
  REGION 1..566: note = hemagglutinin__InfluenzaA__AFN19475

SEQ ID NO: 9472 - protein, 566 aa, synthetic construct; identical to SEQ ID NO: 9074
  REGION 1..566: note = hemagglutinin__InfluenzaA__AFN19477

SEQ ID NO: 9473 - protein, 566 aa, synthetic construct
  REGION 1..566: note = hemagglutinin__InfluenzaA__AFN19479
MKTIIALSCILCLVFAQKLPGNDNSTATLCLGHHAVPNGTIVKTITNDQIEVTNATELVQNSSIGEICDSPHQILDGENCTLIDALLGDPQCDGFQNKKWDLFVERSKAYSNCYPYDVPDYASLRSLVASSGTLEFNNESFNWTGVTQNGTSSACIRRSNSSFFSRLNWLTHLNFKYPALNVTMPNNEQFDKLYIWGVHHPGTDKDQIFLYAQSSGRITVSTKRSQQAVIPNIGSRPRIRNIPSRISIYWTIVKPGDILLINSTGNLIAPRGYFKIRSGKSSIMRSDAPIGKCNSECITPNGSIPNDKPFQNVNRITYGACPRYVKQSTLKLATGMRNVPEKQTRGIFGAIAGFIENGWEGMVDGWYGFRHQNSEGRGQAADLKSTQAAIDQINGKLNRLIGKTNEKFHQIEKEFSEVEGRIQDLEKYVEDTKIDLWSYNAELLVALENQHTIDLTDSEMNKLFEKTKKQLRENAEDMGNGCFKIYHKCDNACIGSIRNGTYDHDVYRDEALNNRFQIKGVELKSGYKDWILWISFAISCFLLCVALLGFIMWACQKGNIRCNICI

SEQ ID NO: 9474 - protein, 566 aa, synthetic construct; identical to SEQ ID NO: 9453
  REGION 1..566: note = hemagglutinin__InfluenzaA__AFN19483

SEQ ID NO: 9475 - protein, 566 aa, synthetic construct; identical to SEQ ID NO: 6855
  REGION 1..566: note = hemagglutinin__InfluenzaA__AFN19485

SEQ ID NO: 9476 - protein, 566 aa, synthetic construct; identical to SEQ ID NO: 9074
  REGION 1..566: note = hemagglutinin__InfluenzaA__AFN19487

SEQ ID NO: 9477 - protein, 566 aa, synthetic construct
  REGION 1..566: note = hemagglutinin__InfluenzaA__AFN19491
MKTIIALSYILCLVFAQKLPGNDNSTATLCLGHHAVPNGTIVKTITNDQIEVTNATELVQSSSTGEICDSPHQILDGENCTLIDALLGDPQCDGFQNKKWDLFVERSKAYSNCYPYDVPDYASLRSLVASSGTLEFNNESFNWTGVTQNGTSSACIRRSNSSFFSRLNWLTHLNFKYPALNVTMPNNEQFDKLYIWGVHHPGTDKDQIFLYAQSSGRITVSTKRSQQAVIPNIGSRPRIRNIPSRISIYWTIVKPGDILLINSTGNLIAPRGYFKIRSGKSSIMRSDAPIGKCNSECITPNGSIPNDKPFQNVNRITYGACPRYVKQSTLKLATGMRNVPEKQTRGIFGAIAGFIENGWEGMVDGWYGFRHQNSEGRGQAADLKSTQAAIDQINGKLNRLIGKTNEKFHQIEKEFSEVEGRIQDLEKYVEDTKIDLWSYNAELLVALENQHTIDLTDSEMNKLFEKTKKQLRENAEDMGNGCFKIYHKCDNACIGSIRNGTYNHDVYRDEALNNRFQIKGVELKSGYKDWILWISFAISCFLLCVVLLGFIMWACQKGNIRCNICI

SEQ ID NO: 9478 - protein, 566 aa, synthetic construct
  REGION 1..566: note = hemagglutinin__InfluenzaA__AFN19493
MKTIIALSYILCLVFAQKLPGNDNSTATLCLGHHAVPNGTIVKTITNDQIEVTNATELVQSSSTGEICNSPHQILDGENCTLIDALLGDPQCDGFQNKKWDLFVERSKAHSNCYPYDVPDYASLRSLVASSGTLEFNNESFNWTGVTQNGTSSACIRRSNNSFFSRLNWLTHLNFKYPALNVTMPNNEQFDKLYIWGVHHPGTDKDQIFLYAQASGRITVSTKRSQQTVIPNIGSRPRVRNIPSRVSIYWTIVKPGDILLINSTGNLIAPRGYFKIRSGKSSIMRSDAPIGKCNSACITPNGSIPNDKPFQNVNRITYGACPRYVKQNTLKLATGMRNVPEKQTRGIFGAIAGFIENGWEGMVDGWYGFRHQNSEGRGQAADLKSTQAAIDQINGKLNRLIGKTNEKFHQIEKEFSEVEGRIQDLEKYVEDTKIDLWSYNAELLVALENQHTIDLTDSEMNKLFEKTKKQLRENAEDMGNGCFKIYHKCDNACIGSIRNGTYDHDVYRDEALNNRFQIKGVELKSGYKDWILWISFAISCFLLCVALLGFIMWACQKGNIRCNICI

SEQ ID NO: 9479 - protein, 566 aa, synthetic construct
  REGION 1..566: note = hemagglutinin__InfluenzaA__AFN19495
MKTIIALSYILCLVFAQKIPGNDNSTATLCLGHHAVPNGTIVKTITNDQIEVTNATELVQSSSAGEICDSPHHILDGENCTLIDALLGDPQCDGFQNKKWDLFVERSRAYSNCYPYDVPDYASLRSLVASSGTLEFNNESFNWTGVTQNGTSSACIRRSNNSFFSRLNWLTHLNFKYPALNVTMPNNEQFDKLYIWGVHHPGTDKDQIFLYAQASGRITVSTKRSQQAVIPNIGSRPRVRNIPSRISIYWTIVKPGDILLINSTGNLIAPRGYFKIRSGKSSIMRSDAPIGKCNSECITPNGSIPNDKPFQNVNRITYGACPRYVKQSTLKLATGMRNVPEKQTRGIFGAIAGFIENGWEGMMDGWYGFRHQNSEGRGQAADLKSTQAAIDQINGKLNRLIGKTNEKFHQIEKEFSEVEGRIQDLEKYVEDTKIDLWSYNAELLVALENQHTIDLTDSEMNKLFEKTKKQLRENAEDMGNGCFKIYHKCDNACIGSIRNGTYDHDVYRDEALNNRFQIKGVELKSGYKDWILWISFATSCFLLCVALLGFIMWACQKGNIRCNICI

SEQ ID NO: 9480 - protein, 566 aa, synthetic construct
  REGION 1..566: note = hemagglutinin__InfluenzaA__AFN19497
MKTIIALSYILCLVFAQKLPENDNSTATLCLGHHAVPNGTIVKTITNDQIEVTNATELVQSSSTGEICNSPHQILDGENCTLIDALLGDPQCDGFQNKKWDLFVERSKAHSNCYPYDVPDYASLRSLVASSGTLEFNNESFNWTGVTQNGTSSACIRRSNNSFFSRLNWLTHLNFKYPALNVTMPNNEQFDKLYIWGVHHPGTDKDQIFLYAQASGRITVSTKRSQQAVIPNIGSRPRVRNIPSRVSIYWTIVKPGDILLINSTGNLIAPRGYFKIRSGKSSIMRSDAPIGKCNSTCITPNGSIPNDKPFQNVNRITYGACPRYVKQNTLKLATGMRNVPEKQTRGIFGAIAGFIENGWEGMVDGWYGFRHQNSEGRGQAADLKSTQAAIDQINGKLNRLIGKTNEKFHQIEKEFSEVEGRIQDLEKYVEDTKIDLWSYNAELLVALENQHTIDLTDSEMNKLFEKTKKQLRENAEDMGNGCFKIYHKCDNACIGSIRNGTYDHDVYRDEALNNRFQIKGVELKSGYKDWILWISFAISCFLLCVALLGFIMWACQKGNIRCNICI

SEQ ID NO: 9481 - protein, 566 aa, synthetic construct; identical to SEQ ID NO: 9431
  REGION 1..566: note = hemagglutinin__InfluenzaA__AFN19499

SEQ ID NO: 9482 - protein, 566 aa, synthetic construct; identical to SEQ ID NO: 9430
  REGION 1..566: note = hemagglutinin__InfluenzaA__AFN19501

SEQ ID NO: 9483 - protein, 566 aa, synthetic construct; identical to SEQ ID NO: 6982
  REGION 1..566: note = hemagglutinin__InfluenzaA__AFN19503

SEQ ID NO: 9484 - protein, 566 aa, synthetic construct; identical to SEQ ID NO: 9431
  REGION 1..566: note = hemagglutinin__InfluenzaA__AFN19507

SEQ ID NO: 9485 - protein, 566 aa, synthetic construct; identical to SEQ ID NO: 9430
  REGION 1..566: note = hemagglutinin__InfluenzaA__AFN19509

SEQ ID NO: 9486 - protein, 566 aa, synthetic construct; identical to SEQ ID NO: 9431
  REGION 1..566: note = hemagglutinin__InfluenzaA__AFN19513

SEQ ID NO: 9487 - protein, 566 aa, synthetic construct; identical to SEQ ID NO: 9430
  REGION 1..566: note = hemagglutinin__InfluenzaA__AFN19515

SEQ ID NO: 9488 - protein, 566 aa, synthetic construct; identical to SEQ ID NO: 9431
  REGION 1..566: note = hemagglutinin__InfluenzaA__AFN19517

SEQ ID NO: 9489 - protein, 566 aa, synthetic construct; identical to SEQ ID NO: 9431
  REGION 1..566: note = hemagglutinin__InfluenzaA__AFN19519

SEQ ID NO: 9490 - protein, 566 aa, synthetic construct; identical to SEQ ID NO: 9074
  REGION 1..566: note = hemagglutinin__InfluenzaA__AFN19521

SEQ ID NO: 9491 - protein, 566 aa, synthetic construct; identical to SEQ ID NO: 9430
  REGION 1..566: note = hemagglutinin__InfluenzaA__AFN19523

SEQ ID NO: 9492 - protein, 566 aa, synthetic construct
  REGION 1..566: note = hemagglutinin__InfluenzaA__AFN19527
MKTIIALSYTLCLVFAQKLPGNDNSTATLCLGHHAVPNGTIVKTITNDQIEVTNATELVQNSSIGEICDSPHQILDGENCTLIDALLGDPQCDGFQNKKWDLFVERSKAYSNCYPYDVPDYASLRSLVASSGTLEFNNESFNWTGVTQNGTSSACIRRSNSSFFSRLNWLTHLNFKYPALNVTMPNNEQFDKLYIWGVHHPGTDKDQIFLYAQSSGRITVSTKRSQQAVIPNIGSRPRIRNIPSRISIYWTIVKPGDILLINSTGNLIAPRGYFKIRSGKSSIMRSDAPIGKCNSECITPNGSIPNDKPFQNVNRITYGACPRYVKQSTLKLATGMRNVPEKQTRGIFGAIAGFIENGWEGMVDGWYGFRHQNSEGRGQAADLKSTQAAIDQINGKLNRLIGKTNEKFHQIEKEFSEVEGRIQDLEKYVEDTKIDLWSYNAELLVALENQHTIDLTDSEMNKLFEKTKKQLRENAEDMGNGCFKIYHKCDNACIGSIRNGTYDHDVYRDEALNNRFQIKGVELKSGYKDWILWISFAISCFLLCVALLGFIMWACQKGNIRCNICI

SEQ ID NO: 9493 - protein, 566 aa, synthetic construct
  REGION 1..566: note = hemagglutinin__InfluenzaA__AFN19529
MKTIIALSYILCLVFAQKLPGNDNSTATLCLGHHAVPNGTIVKTITNDQIEVTNATELVQNSSIGEICDSPHQILDGENCTLIDALLGDPQCDGFQNKKWDLFVERSKAYSNCYPYDVPDYASLRSLVASSGTLEFNNESFNWTGVTQNGTSSACIRRSNSSFFSRLNWLTHLNFKYPALNVTMPNNEQFDKLYIWGVHHPGTDKDQIFLYAQSSGRITVSTKRSQQAVIPNIGSRPRIRNIPSRISIYWTIVKPGDILLINSTGNLIAPRGYFKIRSGKSSIMRSDAPIGKCNSECITPNGSIPNDKPFQNVNRITYGACPRYVKQSTLKLATGMRNVPEKQTRGIFGAIAGFIENGWEGMVDGWYGFRHQNSEGRGQAADLKSTQAAIDQINGKLNRLIGKTNEKFHQIEKEFSEVEGRIQDLEKYVEDTKIDLWSYNAELLVALENQHTIDLTDSEMNKLFEKTKKQLRENAEDMGNGCFKIYHKCDNACIGSIRNGTYDHDVYRDEALNNRFQIKGVELKSGYKDWILWISFAISCFLLCVALLGFIMWACQKGNIRCNICI

SEQ ID NO: 9494 - protein, 566 aa, synthetic construct; identical to SEQ ID NO: 9074
  REGION 1..566: note = hemagglutinin__InfluenzaA__AFN19531

SEQ ID NO: 9495 - protein, 566 aa, synthetic construct; identical to SEQ ID NO: 9493
  REGION 1..566: note = hemagglutinin__InfluenzaA__AFN19533

SEQ ID NO: 9496 - protein, 566 aa, synthetic construct
  REGION 1..566: note = hemagglutinin__InfluenzaA__AFN19535
MKTIIALSYILCLVFAQKIPGNDNSTATLCLGHHAVPNGTIVKTITNDQIEVTNATELVQSSSTGEICDSPHQILDGENCTLIDALLGDPQCDGFQNKKWDLFVERSKAYSNCYPYDVPDYASLRSLVASSGTLEFNNESFNWTGVTQNGTSSACIRRSNSSFFSRLNWLTHLNFKYPALNVTMPNNEQFDKLYIWGVHHPGTDKDQIFLYAQSSGRITVSTKRSQQAVIPNIGSRPRIRNIPSRISIYWTIVKPGDILLINSTGNLIAPRGYFKIRSGKSSIMRSDAPIGKCNSECITPNGSIPNDKPFQNVNRITYGACPRYVKQSTLKLATGMRNVPEKQTRGIFGAIAGFIENGWEGMVDGWYGFRHQNSEGRGQAADLKSTQAAIDQINGKLNRLIGKTNEKFHQIEKEFSEVEGRIQDLEKYVEDTKIDLWSYNAELLVALENQHTIDLTDSEMNKLFEKTKKQLRENAEDMGNGCFKIYHKCDNACIGSIRNGTYNHDVYRDEALNNRFQIKGVELKSGYKDWILWISFAISCFLLCVALLGFIMWACQKGNIRCNICI

SEQ ID NO: 9497 - protein, 566 aa, synthetic construct; identical to SEQ ID NO: 9074
  REGION 1..566: note = hemagglutinin__InfluenzaA__AFN19537

SEQ ID NO: 9498 - protein, 566 aa, synthetic construct; identical to SEQ ID NO: 9074
  REGION 1..566: note = hemagglutinin__InfluenzaA__AFN19539

SEQ ID NO: 9499 - protein, 566 aa, synthetic construct; identical to SEQ ID NO: 9074
  REGION 1..566: note = hemagglutinin__InfluenzaA__AFN19543

SEQ ID NO: 9500 - protein, 566 aa, synthetic construct
  REGION 1..566: note = hemagglutinin__InfluenzaA__AFN19545
MKTIIALSYILCLVFAQKLPGSDNSTATLCLGHHAVPNGTIVKTITNDRIEVTNATELVQNSSIGEICDSPHQILDGENCTLIDALLGDPQCDGFKNKKWDLFVERSKAYSNCYPYDVPDYASLRSLVASSGTLEFNNESFNWTGVTQNGTSSACIRRSNNSFFSRLNWLTHLNFKYPALNVTMPNNEQFDKLYIWGVHHPGTDKDQIFLYAQSSGRITVSTKRSQQAVIPNIGSRPRIRNIPSRISIYWTIVKPGDILLINSTGNLIAPRGYFKIQSGKSSIMRSDAPIGKCKSECITPNGSIPNDKPFQNVNRITYGACPRYVKQSTLKLATGMRNVPEKQTRGIFGAIAGFIENGWEGMVDGWYGFRHQNSEGRGQAADLKSTQAAIDQINGKLNRLIGKTNEKFHQIEKEFSEVEGRIQDLEKYVEDTKIDLWSYNAELLVALENQHTIDLTDSEMNKLFEKTKKQLRENAEDMGNGCFKIYHKCDNACIGSIRNGTYDHDVYRDEALNNRFQIKGVELKSGYKDWILWISFAISCFLLCVALLGFIMWACQKGNIRCNICI

SEQ ID NO: 9501 - protein, 566 aa, synthetic construct; identical to SEQ ID NO: 9074
  REGION 1..566: note = hemagglutinin__InfluenzaA__AFN19547

SEQ ID NO: 9502 - protein, 566 aa, synthetic construct
  REGION 1..566: note = hemagglutinin__InfluenzaA__AFN19549
MKTIIALSYILCLVFAQKLPGNDNSTATLCLGHHAVPNGTIVKTITNDQIEVTNATELVQSSSKGEICNSPHQILDGGNCTLIDALLGDPQCDGFQNKKWDLFVERSKAHSNCYPYDVPDYASLRSLVASSGTLEFNNESFNWTGVTQNGTSSACMRRSNNSFFSRLNWLTHLNFKYPALNVTMPNNEQFDKLYIWGVHHPGTDKDQIFLYAQASGRITVSTKRSQQAVIPNIGSRPRVRNIPSRVSIYWTIVKPGDILLINSTGNLIAPRGYFKIRSGKSSIMRSDAPIGKCNSACITPNGSIPNDKPFQNVNRITYGACPRYVKQNTLKLATGMRNVPEKQTRGIFGAIAGFIENGWEGMVDGWYGFRHQNSEGRGQAADLKSTQAAIDQINGKLNRLIGKTNEKFHQIEKEFSEVEGRIQDIEKYVEDTKIDLWSYNAELLVALENQHTIDLTDSEMNKLFEKTKKQLRENAEDMGNGCFKIYHKCDNACIGSIRNGTYDHDVYRDEALNNRFQIKGVELKSGYKDWILWISFAISCFLLCVALLGFIMWACQKGNIRCNICI

SEQ ID NO: 9503 - protein, 566 aa, synthetic construct
  REGION 1..566: note = hemagglutinin__InfluenzaA__AFN19551
MKTIIALSYILCLVFAQKIPGNDNSTATLCLGHHAVPNGTIVKTITNDQIEVTNATELVQSSSTGEICDSPHQILDGENCTLIDALLGDPHCDGFQNKKWDLFVERSKAYSNCYPYDVPDYASLRSLVASSGTLEFNNESFNWTGVTQNGTSSACIRRSNSSFFSRLNWLTHLNFKYPALNVTMPNNEQFDKLYIWGVHHPGTDKDQIFLYAQSSGRITVSTKRSQQAVIPNIGSRPRIRNIPSRISIYWTIVKPGDILLINSTGNLIAPRGYFKIRSGKSSIMRSDAPIGKCNSECITPNGSIPNDKPFQNVNRITYGACPRYVKQSTLKLATGMRNVPEKQTRGIFGAIAGFIENGWEGMVDGWYGFRHQNSEGRGQAADLKSTQAAIDQINGKLNRLIGKTNEKFHQIEKEFSEVEGRIQDLEKYVEDTKIDLWSYNAELLVALENQHTIDLTDSEMNKLFEKTKKQLRENAEDMGNGCFKIYHKCDNACIGSIRNGTYNHDVYRDEALNNRFQIKGVELKSGYKDWILWISFAISCFLLCVALLGFIMWACQKGNIRCNICI

SEQ ID NO: 9504 - protein, 566 aa, synthetic construct; identical to SEQ ID NO: 9453
  REGION 1..566: note = hemagglutinin__InfluenzaA__AFN19553

SEQ ID NO: 9505 - protein, 566 aa, synthetic construct; identical to SEQ ID NO: 9453
  REGION 1..566: note = hemagglutinin__InfluenzaA__AFN19555

SEQ ID NO: 9506 - protein, 566 aa, synthetic construct; identical to SEQ ID NO: 9074
  REGION 1..566: note = hemagglutinin__InfluenzaA__AFN19557

SEQ ID NO: 9507 - protein, 566 aa, synthetic construct; identical to SEQ ID NO: 9453
  REGION 1..566: note = hemagglutinin__InfluenzaA__AFN19559

SEQ ID NO: 9508 - protein, 566 aa, synthetic construct; identical to SEQ ID NO: 9461
  REGION 1..566: note = hemagglutinin__InfluenzaA__AFN19561

SEQ ID NO: 9509 - protein, 566 aa, synthetic construct
  REGION 1..566: note = hemagglutinin__InfluenzaA__AFN19563
MKTIIALSYILCLVFAQKLPGNDNSTATLCLGHHAVPNGTIVKTITNDRIEVTNATELVQNSSIGEICDSPHQILDGENCTLIDALLGDPQCDGFQNKKWDLFVERSKAYSNCYPYDVPDYASLRSLVASSGTLEFNNESFNWTGVTQNGTSSACIRRSNNSFFSRLNWLTHLNFKYPALNVTMPNNEQFDKLYIWGVHHPGTDKDQIFLYAQSSGRITVSTKRSQQAVIPNIGSRPRIRNIPSRISIYWTIVKPGDILLINSTGNLIAPRGYFKIRSGKSSIMRSDAPIGKCKSECITPNGSIPNDKPFQNVNRITYGACPRYVKQSTLKLATGMRNVPEKQTRGIFGAIAGFIENGWEGMVDGWYGFRHQNSEGRGQAADLKSTQAAIDQINGKLNRLIGKTNEKFHQIEKEFSEVEGRIQDLEKYVEDTKIDLWSYNAELLVALENQHTIDLTDSEMNKLFEKTKKQLRENAEDMGNGCFKIYHKCDNACIGSIRNGTYDHDVYRDEALNNRFQIKGVELKSGYKDWILWISFATSCFLLCVALLGFIMWACQKGNIRCNICI

SEQ ID NO: 9510 - protein, 566 aa, synthetic construct; identical to SEQ ID NO: 9431
  REGION 1..566: note = hemagglutinin__InfluenzaA__AFN19565

SEQ ID NO: 9511 - protein, 566 aa, synthetic construct
  REGION 1..566: note = hemagglutinin__InfluenzaA__AFN19567
MKTIIALSYILCLVFAQKIPGNDNSTATLCLGHHAVPNGTIVKTITNDRIEVTNATELVQNSSIGEICDSPHQILDGENCTLIDALLGDPQCDGFQNKKWDLFVERSKAYSNCYPYDVPDYASLRSLVASSGTLEFNNESFNWTGVTQNGTSSACIRRSNNSFFSRLNWLTHLNFKYPALNVTMPNNEQFDKLYIWGVHHPGTDKDQIFLYAQSSGRITVSTKRSQQAVIPNIGSRPRIRNIPSRISIYWTIVKPGDILLINSTGNLIAPRGYFKIRSGKSSIMRSDAPIGKCKSECITPNGSIPNDKPFQNVNRITYGACPRYVKQSTLKLATGMRNVPEKQTRGIFGAIAGFIENGWEGMVDGWYGFRHQNSEGRGQAADLKSTQAAIDQINGKLNRLIGKTNEKFHQIEKEFSEVEGRIQDLEKYVEDTKIDLWSYNAELLVALENQHTIDLTDSEMNKLFEKTKKQLRENAEDMGNGCFKIYHKCDNACIGSIRNGTYDHDVYRDEALNNRFQIKGVELKSGYKDWILWISFAISCFLLCVALLGFIMWACQKGNIRCNICI

SEQ ID NO: 9512 - protein, 566 aa, synthetic construct; identical to SEQ ID NO: 9074
  REGION 1..566: note = hemagglutinin__InfluenzaA__AFN19569

SEQ ID NO: 9513 - protein, 566 aa, synthetic construct
  REGION 1..566: note = hemagglutinin__InfluenzaA__AFN19571
MKTIIALSYILCLVFAQKLPGNDNSTATLCLGHHAVPNGTIVKTITNDQIEVTNATELVQSSSTGEICDSPHQILDGENCTLIDALLGDPQCDGFQNKKWDLFVERSKAYSNCYPYDVPDYASLRSLVASSGTLEFNNESFNWTGVTQNGTSSACIRRSNSSFFSRLNWLTHLNFKYPALNVTMPNNEQFDKLYIWGVHHPGTDKDQIFLYSQSSGRITVSTKRSQQAVIPNIGSRPRIRNIPSRISIYWTIVKPGDILLINSTGNLIAPRGYFRIRSGKSSIMRSDAPIGKCNSECITPNGSIPNDKPFQNVNRITYGPCPRYVKQSTLKLATGMRNVPEKQTRGIFGAIAGFIENGWEGMVDGWYGYRHQNSEGRGQAADLKSTQAAIDQINGKLNRLIGKTNEKFHQIEKEFSEVEGRIQDLEKYVEDTKIDLWTYNAELLVALENQHTIDLTDSEMNKLFEKTKKQLRENAEDMGNGCFKIYHKCDNACIGSIRNGTYNHDVYRDEALNNRFQIKGVELKSGYKDWILWISFAISCFLLCVALLGFIMWACQKGNIRCNICI

SEQ ID NO: 9514 - protein, 566 aa, synthetic construct
  REGION 1..566: note = hemagglutinin__InfluenzaA__AFN19573
MKTIIALSYILCLVFAQKLPGNDNSTATLCLGHHAVPNGTIVKTITNDQIEVTNATELVQSSSTGKICDSPHQILDGKNCTLIDALLGDPQCDGFQNKKWDLFVERSKAYSNCYPYDVPDYASLRSLVASSGTLEFNNESFNWTGVTQNGTSSACIRRSKNSFFSRLNWLTHLNFKYSALNVTMPNKEQFDKLYIWGVHHPGTDKDQISLYAQASGRITVSTKRSQQTVIPNIGSRPRVRNIPSRISIYWTIVKPGDILLINSTGNLIAPRGYFKMQSGKSSIMRSDAPIGKCNSECITPNGSIPNDKPFQNVNRITYGACPRYVKQNTLKLATGMRNVPEKQTRGIFGAIAGFIENGWEGMVDGWYGFRHQNSEGRGQAADLKSTQAAIDQINGKLNRLIGKTNEKFHQIEKEFSEVEGRIQDLEKYVEDTKIDLWSYNAELLVALENQHTIDLTDSEMNKLFEKTKKQLRENAEDMGNGCFKIYHKCDNACIGSIRNGTYDHDVYRDEALNNRFQIKGVELKSGYKDWILWISFAISCFLLCVALLGFIMWACQKGNIRCNICI

SEQ ID NO: 9515 - protein, 566 aa, synthetic construct
  REGION 1..566: note = hemagglutinin__InfluenzaA__AFN19575
MKTIIALSYILCLVFAQKLPGNDNSTATLCLGHHAVPNGTIVKTITNDQIEVTNATELVQSSSTGEICDNPHQILDGENCTLIDALLGDPQCDGFQNKKWDLFVERSKAYSNCYPYDVPDYASLRSLVASSGTLEFNNESFNWTGVTQNGTSSACIRRSNNSFFSRLNWLTHLNFKYPALNVTMPNNEQFDKLYIWGVHHPGTDKDQIFLYAQSSGRITVSTKRSQQAVIPNIGSRPRVRNIPSRISIYWTIVKPGDILLINSTGNLIAPRGYFKIRSGKSSIMRSDAPIGKCNSECITPNGSIPNDKPFQNVNRITYGACPRYVKQSTLKLATGMRNVPEKQTRGIFGAIAGFIENGWEGMVDGWYGFRHQNSEGRGQAADLKSTQAAIDQINGKLNRLIGKTNEKFHQIEKEFSEVEGRIQDLEKYVEDTKIDLWSYNAELLVALENQHTIDLTDSEMNKLFEKTKKQLRENAEDMGNGCFKIYHKCDNACIGSIRNGTYDHDVYRDEALNNRFQIKGVELKSGYKDWILWISFAISCFLLCVALLGFIMWACQKGNIRCNICI

SEQ ID NO: 9516 - protein, 566 aa, synthetic construct; identical to SEQ ID NO: 9430
  REGION 1..566: note = hemagglutinin__InfluenzaA__AFN19577

SEQ ID NO: 9517 - protein, 566 aa, synthetic construct; identical to SEQ ID NO: 9430
  REGION 1..566: note = hemagglutinin__InfluenzaA__AFN19579

SEQ ID NO: 9518 - protein, 566 aa, synthetic construct; identical to SEQ ID NO: 9430
  REGION 1..566: note = hemagglutinin__InfluenzaA__AFN19581

SEQ ID NO: 9519 - protein, 566 aa, synthetic construct; identical to SEQ ID NO: 9430
  REGION 1..566: note = hemagglutinin__InfluenzaA__AFN19583

SEQ ID NO: 9520 - protein, 566 aa, synthetic construct
  REGION 1..566: note = hemagglutinin__InfluenzaA__AFN19587
MKTIIALSYILCLVFAQKLPENDNSTATLCLGHHAVPNGTIVKTITNDQIEVTNATELVQSSSTGEICDSPHQILDGVNCTLIDALLGDPQCDGFQNKKWDLFVERSKAYSNCYPYDVPDYASLRSLVASSGTLEFNNESFNWTGVTQNGTSSACIRRSNSSFFSRLNWLTHLNFKYPALNVTMPNNEQFDKLYIWGVHHPGTDKDQIFLYAQSSGRITVSTKRSQQAVIPNIGSRPRIRNIPSRISIYWTIVKPGDILLINSTGNLIAPRGYFKIRSGKSSIMRSDAPIGKCNSECITPNGSIPNDKPFQNVNRITYGACPRYVKQSTLKLATGMRNVPEKQTRGIFGAIAGFIENGWEGMVDGWYGFRHQNSEGRGQAADLKSTQAAIDQINGKLNRLIGKTNEKFHQIEKEFSEVEGRIQDLEKYVEDTKIDLWSYNAELLVALENQHTIDLTDSEMNKLFEKTKKQLRENAEDMGNGCFKIYHECDNACIGSIRNGTYNHDVYRDEALNNRFQIKGVELKSGYKDWILWISFAISCFLLCVALLGFIMWACQKGNIRCNICI

SEQ ID NO: 9521 - protein, 566 aa, synthetic construct; identical to SEQ ID NO: 9430
  REGION 1..566: note = hemagglutinin__InfluenzaA__AFN19589

SEQ ID NO: 9522 - protein, 566 aa, synthetic construct
  REGION 1..566: note = hemagglutinin__InfluenzaA__AFN19591
MKTIIALSYILCLVFAQKLPGNDNSTATLCLGHHAVPNGTIVKTITNDQIEVTNATELVQNSSIGEICDSPHQILDGENCTLIDALLGDPQCDGFQNKKWDLFVERSKAYSNCYPYDVPDYASLRSLVASSGTLEFNNESFNWTGVTQNGTSSACMRRSNSSFFSRLNWLTHLNFKYPALNVTMPNNEQFDKLYIWGVHHPGTDKDQIFLYAQSSGRITVSTKRSQQAVIPNIGSRPRIRNIPSRISIYWTIVKPGDILLINSTGNLIAPRGYFKIRSGKSSIMRSDAPIGKCNSECITPNGSIPNDKPFQNVNRITYGACPRYVKQSTLKLATGMRNVPEKQTRGIFGAIAGFIENGWEGMVDGWYGFRHQNSEGRGQAADLKSTQAAIDQINGKLNRLIGKTNEKFHQIEKEFSEVEGRIQDLEKYVEDTKIDLWSYNAELLVALENQHTIDLTDSEMNKLFEKTKKQLRENAEDMGNGCFKIYHKCDNACIGSIRNGTYDHDVYRDEALNNRFQIKGVELKSGYKDWILWISFAISCFLLCVALLGFIMWACQNGNIRCNICI

SEQ ID NO: 9523 - protein, 566 aa, synthetic construct; identical to SEQ ID NO: 9430
  REGION 1..566: note = hemagglutinin__InfluenzaA__AFN19593

SEQ ID NO: 9524 - protein, 566 aa, synthetic construct; identical to SEQ ID NO: 9431
  REGION 1..566: note = hemagglutinin__InfluenzaA__AFN19595

SEQ ID NO: 9525 - protein, 566 aa, synthetic construct; identical to SEQ ID NO: 9431
  REGION 1..566: note = hemagglutinin__InfluenzaA__AFN19599

SEQ ID NO: 9526 - protein, 566 aa, synthetic construct; identical to SEQ ID NO: 9493
  REGION 1..566: note = hemagglutinin__InfluenzaA__AFN19601

SEQ ID NO: 9527 - protein, 566 aa, synthetic construct; identical to SEQ ID NO: 9074
  REGION 1..566: note = hemagglutinin__InfluenzaA__AFN19607

SEQ ID NO: 9528 - protein, 566 aa, synthetic construct; identical to SEQ ID NO: 9430
  REGION 1..566: note = hemagglutinin__InfluenzaA__AFN19609

SEQ ID NO: 9529 - protein, 566 aa, synthetic construct
  REGION 1..566: note = hemagglutinin__InfluenzaA__AFN19611
MKTIIALSYILCLVFAQKLPGNDNSTATLCLGHHAVPNGTIVKTITNDQIEVTNATELVQNSSIGEICDSPHQILDGENCTLIDALLGDPQCDGFQNKKWDLFVERSKAYSNCYPYDVPDYASLRSLVASSGTLEFNNESFNWTGVTQNGTSSACIRRSNNSFFSRLNWLTHLNFKYPALNVTMPNNEQFDKLYIWGVHHPGTDKDQIFLYAQSSGRITVSTKRSQQAVIPNIGSRPRIRNIPSRISIYWTIVEPGDILLINSTGNLIAPRGYFKIRSGKSSIMRSDAPIGKCNSECITPNGSIPNDKPFQNVNRITYGACPRYVKQSTLKLATGMRNVPEKQTRGIFGAIAGFIENGWEGMVDGWYGFRHQNSEGRGQAADLKSTQAAIDQINGKLNRLIGKTNEKFHQIEKEFSEVEGRIQDLEKYVEDTKIDLWSYNAELLVALENQHTIDLTDSEMNKLFEKTKKQLRENAEDMGNGCFKIYHKCDNACIGSIRNGTYDHDVYRDEALNNRFQIKGVELKSGYKDWILWISFAISCFLLCVALLGFIMWACQKGNIRCNICI

SEQ ID NO: 9530 - protein, 566 aa, synthetic construct; identical to SEQ ID NO: 9453
  REGION 1..566: note = hemagglutinin__InfluenzaA__AFN19613

SEQ ID NO: 9531 - protein, 566 aa, synthetic construct; identical to SEQ ID NO: 9431
  REGION 1..566: note = hemagglutinin__InfluenzaA__AFN19617

SEQ ID NO: 9532 - protein, 566 aa, synthetic construct
  REGION 1..566: note = hemagglutinin__InfluenzaA__AFN19619
MKTIIALSHILCLVFAQKLPGNDNSTATLCLGHHAVPNGTIVKTITNDQIEVTNATELVQSSSTGEICDSPHQILDGENCTLIDALLGDPQCDGFQNKKWDLFVERSKAYSNCYPYDVPDYASLRSLVASSGTLEFNNESFNWTGVTQNGTSSACIRRSNSSFFSRLNWLTHLNFKYPALNVTMPNNEQFDKLYIWGVHHPGTDKDQIFLYAQSSGRITVSTKRSQQAVIPNIGSKPRIRNIPSRISIYWTIVKPGDILLINSTGNLIAPRGYFKIRSGKSSIMRSDAPIGKCNSECITPNGSIPNDKPFQNVNRITYGACPRYVKQSTLKLATGMRNVPEKQTRGIFGAIAGFIENGWEGMVDGWYGFRHQNSEGRGQAADLKSTQAAIDQINGKLNRLIGKTNEKFHQIEKEFSEVEGRIQDLEKYVEDTKIDLWSYNAELLVALENQHTIDLTDSEMNKLFEKTKKQLRENAEDMGNGCFKIYHKCDNACIGSIRNGTYNHDVYRDEALNNRFQIKGVELKSGYKDWILWISFAISCFLLCVVLLGFIMWACQKGNIRCNICI

SEQ ID NO: 9533 - protein, 566 aa, synthetic construct; identical to SEQ ID NO: 9493
  REGION 1..566: note = hemagglutinin__InfluenzaA__AFN19623

SEQ ID NO: 9534 - protein, 566 aa, synthetic construct; identical to SEQ ID NO: 9430
  REGION 1..566: note = hemagglutinin__InfluenzaA__AFN19629

SEQ ID NO: 9535 - protein, 566 aa, synthetic construct
  REGION 1..566: note = hemagglutinin__InfluenzaA__AFN19631
MKTIIALSYILCLVFAQKLPENDYSTATLCLGHHAVPNGTIVKTITNDQIEVTNATELVQSSSTGEICDSPHQILDGINCTLIDALLGDPQCDGFQNKKWDLFVERSKAYSNCYPYDVPDYASLRSLVASSGTLEFNNESFNWTGVTQNGTSSACIRRSTSSFFSRLNWLTHLNFKYPALNVTMPNNEQFDKLYIWGVHHPGTDKDQIFLYAQPSGRITVSTKRSQQAVIPNIGSRPRIRNIPSRISIYWTIVKPGDILLINSTGNLIAPRGYFKIRSGKSSIMRSDAPIGKCNSECITPNGSIPNDKPFQNVNRITYGACPRYVKQSTLKLATGMRNVPEKQTRGIFGAIAGFIENGWEGMVDGWYGFRHQNSEGRGQAADLKSTQAAIDQINGKLNRLIGKTNEKFHQIEKEFSEVEGRIQDLEKYVEDTKIDLWSYNAELLVALENQHTIDLTDSEMNKLFEKTKKQLRENAEDMGNGCFKIYHKCDNACIGSIRNGTYNHDVYRDEALNNRFQIKGVELKSGYKDWILWISFAISCFLLCVALLGFIMWACQKGNIRCNICI

SEQ ID NO: 9536 - protein, 566 aa, synthetic construct
  REGION 1..566: note = hemagglutinin__InfluenzaA__AFN19633
MKTIIALSYILCLVFAQKLPGNDNSTATLCLGHHAVPNGTIVKTITNDQIEVTNATELVQSSSTGEICDSPHQILDGENCTLIDALLGDPQCDGFQNKKWDLFVERSKAYSNCYPYDVPDYASLRSLVASSGTLEFNNESFNWTGVTQNGTSSACIRRSNSSFFSRLNWLTHLNFKYPALNVTMPNNEQFDKLYIWGVHHPGTDKDQIFLYAQSSGRITISTKRSQQAVIPNIGSRPRIRNIPSRISIYWTIVKPGDILLINSTGNLIAPRGYFKIRSGKSSIMRSDAPIGKCNSECITPNGSIPNDKPFQNVNRITYGACPRYVKQSTLKLATGMRNVPEKQTRGIFGAIAGFIENGWEGMVDGWYGFRHQNSEGRGQAADLKSTQAAIDQINGKLNRLIGKTNEKFHQIEKEFSEVEGRIQDLEKYVEDTKIDLWSYNAELLVALENQHTIDLTDSEMNKLFEKTKKQLRENAEDMGNGCFKIYHKCDNACIGSIRNGTYNHDVYRDEALNNRFQIKGVELKSGYKDWILWISFAISCFLLCVALLGFIMWACQKGNIRCNICI

SEQ ID NO: 9537 - protein, 566 aa, synthetic construct
  REGION 1..566: note = hemagglutinin__InfluenzaA__AFN19635
MKTIIALSYILCLVFAQKLPENDNSTATLCLGHHAVPNGTIVKTITNDQIEVTNATELVQSSSTGEICDSPHQILDGINCTLIDALLGDPQCDGFQNKKWDLFVERSKAYSNCYPYDVPDYASLRSLVASSGTLEFNNESFNWTGVTQNGTSSACIRRSNSSFFSRLNWLTHLNFKYPALNVTMPNNEQFDKLYIWGVHHPGTDKDQIFLYAQPSGRITVSTKRSQQAVIPNIGSRPRIRNIPSRISIYWTIVKPGDILLINSTGNLIAPRGYFKIRSGKSSIMRSDAPIGKCNSECITPNGSIPNDKPFQNVNRITYGACPRYVKQSTLKLATGMRNVPEKQTRGIFGAIAGFIENGWEGMVDGWYGFRHQNSEGRGQAADLKSTQAAIDQINGKLNRLIGKTNEKFHQIEKEFSEVEGRIQDLEKYVEDTKIDLWSYNAELLVALENQHTIDLTDSEMNKLFEKTKKQLRENAEDMGNGCFKIYHKCDNACIGSIRNGTYNHDVYRDEALNNRFQIKGVELKSGYKDWILWISFAISCFLLCVALLGFIMWACQKGNIRCNICI

SEQ ID NO: 9538 - protein, 566 aa, synthetic construct; identical to SEQ ID NO: 9537
  REGION 1..566: note = hemagglutinin__InfluenzaA__AFN19637

SEQ ID NO: 9539 - protein, 566 aa, synthetic construct; identical to SEQ ID NO: 9074
  REGION 1..566: note = hemagglutinin__InfluenzaA__AFN19639

SEQ ID NO: 9540 - protein, 566 aa, synthetic construct; identical to SEQ ID NO: 9493
  REGION 1..566: note = hemagglutinin__InfluenzaA__AFN19641

SEQ ID NO: 9541 - protein, 566 aa, synthetic construct; identical to SEQ ID NO: 9537
  REGION 1..566: note = hemagglutinin__InfluenzaA__AFN19643

SEQ ID NO: 9542 - protein, 566 aa, synthetic construct; identical to SEQ ID NO: 9074
  REGION 1..566: note = hemagglutinin__InfluenzaA__AFN19645

SEQ ID NO: 9543 - protein, 566 aa, synthetic construct
  REGION 1..566: note = hemagglutinin__InfluenzaA__AFN19647
MKTIIALSYILCLVFAQKLPENDNSTATLCLGHHAVPNGTIVKTITNDQIEVTNATELVQSSSTGEICDSPHQILDGVNCTLIDALLGDPQCDGFQNKKWDLFVERSKAYSNCYPYDVPDYASLKSLVASSGTLEFNNESFNWTGVTQNGTSSACIRRSNSSFFSRLNWLTHLNFKYPALNVTMPNNEQFDKLYIWGVHHPGTDKDQIFLYAQSSGRITVSTKRSQQAVIPNIGSRPRIRNIPSRISIYWTIVKPGDILLINSTGNLIAPRGYFKIQSGKSSIMRSDAPIGKCNSECITPNGSIPNDKPFQNVNRITYGACPRYVKQSTLKLATGMRNVPEKQTRGIFGAIAGFIENGWEGMVDGWYGFRHQNSEGRGQAADLKSTQAAIDQINGKLNRLIGKTNEKFHQIEKEFSEVEGRIQDLEKYVEDTKIDLWSYNAELLVALENQHTIDLTDSEMNKLFEKTKKQLRENAEDMGNGCFKIYHKCDNACIGSIRNGTYNHDVYRDEALNNRFQIKGVELKSGYKDWILWISFAISCFLLCVALLGFIMWACQKGNIRCNICI

SEQ ID NO: 9544 - protein, 566 aa, synthetic construct
  REGION 1..566: note = hemagglutinin__InfluenzaA__AFN19649
MKTIIALSYILCLVFAQKLPGNDNSTATLCLGHHAVPNGTIVKTITNDQIEVTNATELVQNSSISEICDSPHQILDGENCTLIDALLGDPQCDGFQNKKWDLFVERSKAYSNCYPYDVPDYASLRSLVASSGTLEFNNESFNWTGVTQNGTSSACIRRSNSSFFSRLNWLTHLNFKYPALNVTMPNNEQFDKLYIWGVHHPGTDKDQIFLYAQSSGRITVSTKRSQQAVIPNIGSRPRIRNIPSRISIYWTIVKPGDILLINSTGNLIAPRGYFKIRSGKSSIMRSDAPIGKCNSECITPNGSIPNDKPFQNVNRITYGACPRYVKQSTLKLATGMRNVPEKQTRGIFGAIAGFIENGWEGMMDGWYGFRHQNSEGRGQAADLKSTQAAIDQINGKLNRLIGKTNEKFHQIEKEFSEVEGRIQDLEKYVEDTKIDLWSYNAELLVALENQHTIDLTDSEMNKLFEKTKKQLRENAEDMGNGCFKIYHKCDNACIGSIRNGTYDHDVYRDEALNNRFQIKGVELKSGYKDWILWISFAISCFLLCVALLGFIMWACQKGNIRCNICI

SEQ ID NO: 9545 - protein, 566 aa, synthetic construct; identical to SEQ ID NO: 9537
  REGION 1..566: note = hemagglutinin__InfluenzaA__AFN19653

SEQ ID NO: 9546 - protein, 566 aa, synthetic construct; identical to SEQ ID NO: 9453
  REGION 1..566: note = hemagglutinin__InfluenzaA__AFN19663

SEQ ID NO: 9547 - protein, 566 aa, synthetic construct; identical to SEQ ID NO: 9461
  REGION 1..566: note = hemagglutinin__InfluenzaA__AFN19665

SEQ ID NO: 9548 - protein, 566 aa, synthetic construct
  REGION 1..566: note = hemagglutinin__InfluenzaA__AFN19667
MKTIIALSYILCLVFAQKLPGNDNSTATLCLGHHAVPNGTIVKTITNDQIEVTNATELVQNSSIGEICDSPHQILDGENCTLIDALLGDPQCDGFQNKKWDLFVERSKAYSNCYPYDVPDYASLRSLVASSGTLEFNNESFNWTGVTQNGTSSACMRRSNSSFFSRLNWLTHLNFKYPALNVTMPNNEQFDKLYIWGVHHPGTDKDQIFLYAQSSGRITVSTKRSQQAVIPNIGSRPRIRNIPSRISIYWTIVKPGDILLINSTGNLIAPRGYFKIRSGKSSIMRSDAPIGKCNSECITPNGSIPNDKPFQNVNRITYGACPRYVKQSTLKLATGMRNVPEKQTRGIFGAIAGFIENGWEGMVDGWYGFRHQNSEGRGQAADLKSTQAAIDQINGKLNRLIGKTNEKFHQIEKEFSEVEGRIQDLEKYVEDTKIDLWSYNAELLVALENQHTIDLTDSEMNKLFEKTKKQLRENAEDMGNGCFKIYHKCDNACIGSIRNGTYDHDVYRDEALNNRFQIKGVELKSGYKDWILWISFAISCFLLCVALLGFIMWACQKGNIRCNICI

SEQ ID NO: 9549 - protein, 566 aa, synthetic construct
  REGION 1..566: note = hemagglutinin__InfluenzaA__AFN19669
MKTIIALSYILCMVFAQKLPGNDNSTATLCLGHHAVPNGTIVKTITNDQIEVTNATELVQNSSIGEICDSPHQILDGENCTLIDALLGDPQCDGFQNKKWDLFVERSKAYSNCYPYDVPNYASLRSLVASSGTLEFNNESFNWTGVTQNGTSSACMRRSNSSFFSRLNWLTHLNFKYPALNVTMPNNEQFDKLYIWGVHHPGTDKDQIFLYAQSSGRITVSTKRSQQAVIPNIGSRPRIRNIPSRISIYWTIVKPGDILLINSTGNLIAPRGYFKIRSGKSSIMRSDAPIGKCNSECITPNGSIPNDKPFQNVNRITYGACPRYVKQSTLKLATGMRNVPEKQTRGIFGAIAGFIENGWEGMVDGWYGFRHQNSEGRGQAADLKSTQAAIDQINGKLNRLIGKTNEKFHQIEKEFSEVEGRIQDLEKYVEDTKIDLWSYNAELLVALENQHTIDLTDSEMNKLFEKTKKQLRENAEDMGNGCFKIYHKCDNACIGSIRNGTYDHDVYRDEALNNRFQIKGVELKSGYKDWILWISFAISCFLLCVALLGFIMWACQKGNIRCNICI

SEQ ID NO: 9550 - protein, 566 aa, synthetic construct
  REGION 1..566: note = hemagglutinin__InfluenzaA__AFN19671
MKTIIALSYILCLVFAQKLPGNDNSTATLCLGHHAVPNGTIVKTITNDRIEVTNATELVQNSSIGEICDSPHQILDGENCTLIDALLGDPQCDGFQNKKWDLFVERSKAYSNCYPYDVPDYASLRSLVASSGTLEFNNESFNWTGVTQNGTSSACIRRSNNSFFSRLNWLTHLNFKYPALNVTMPNNEQFDKLYIWGVHHPGTDKDQIFLYAQSSGRITVSTKRSQQAVIPNIGSRPRIRNIPSRISIYWTIVKPGDILLINSTGNLIAPRGYFKIRSGKSSIMRSDAPIGKCKSECITPNGSIPNDKPFQNVNRITYGACPRYVKQSTLKLATGMRNVPEKQTRGIFGAIAGFIENGWEGMVDGWYGFRHQNSEGRGQAADLKSTQAAIDQINGKLNRLIGKTNEKFHQIEKEFSEVEGRIQDLEKYVEDTKIDLWSYNAELLVALENQHTIDLTDSEMNKLFEKTKKQLRENAEDMGNGCFKIYHKCDNACIESIRNGTYDHDVYRDEALNNRFQIKGVELKSGYKDWILWISFAISCFLLCVALLGFIMWACQKGNIRCNICI

SEQ ID NO: 9551 - protein, 566 aa, synthetic construct; identical to SEQ ID NO: 9074
  REGION 1..566: note = hemagglutinin__InfluenzaA__AFN19674

SEQ ID NO: 9552 - protein, 566 aa, synthetic construct; identical to SEQ ID NO: 9074
  REGION 1..566: note = hemagglutinin__InfluenzaA__AFN19676

SEQ ID NO: 9553 - protein, 566 aa, synthetic construct; identical to SEQ ID NO: 9461
  REGION 1..566: note = hemagglutinin__InfluenzaA__AFN19678

SEQ ID NO: 9554 - protein, 566 aa, synthetic construct
  REGION 1..566: note = hemagglutinin__InfluenzaA__AFN19682
MKTIIALSYILCLVFAQKLPGNDNSTATLCLGHHAVPNGTIVKTITNDQIEVTNATELVQNSSIGEICDSPHQILDGENCTLIDALLGDPQCDGFQNKKWDLFVERSKAYSNCYPYDVPNYASLRSLVASSGTLEFNNESFNWTGVTQNGTSSACMRRSNSSFFSRLNWLTHLNFKYPALNVTMPNNEQFDKLYIWGVHHPGTDKDQIFLYAQSSGRITVSTKRSQQAVIPNIGSRPRIRNIPSRISIYWTIVKPGDILLINSTGNLIAPRGYFKIRSGKSSIMRSDAPIGKCNSECITPNGSIPNDKPFQNVNRITYGACPRYVKQSTLKLATGMRNVPEKQTRGIFGAIAGFIENGWEGMVDGWYGFRHQNSEGRGQAADLKSTQAAIDQINGKLNRLIGKTNEKFHQIEKEFSEVEGRIQDLEKYVEDTKIDLWSYNAELLVALENQHTIDLTDSEMNKLFEKTKKQLRENAEDMGNGCFKIYHKCDNACIGSIRNGTYDHDVYRDEALNNRFQIKGVELKSGYKDWILWISFAISCFLLCVALLGFIMWACQKGNIKCNICI

SEQ ID NO: 9555 - protein, 566 aa, synthetic construct
  REGION 1..566: note = hemagglutinin__InfluenzaA__AFN19684
MKTIIALSYILCLAFAQKLPGNDNSTATLCLGHHAVPNGTIVKTITNDQIEVTNATELVQSSSTGEICDSPHQILDGENCTLIDALLGDPQCDGFQNKKWDLFVERSKAYSNCYPYDVPDYASLRSLVASSGTLEFNNESFNWTGVTQNGTSSACIRGSNSSFFSRLNWLTHLNFKYPALNVTMPNNEQFDKLYIWGVHHPGTDKDQIFLYAQSSGRITVSTKRSQQAVIPNIGSRPRIRNIPSRISIYWTIVKPGDILLINSTGNLIAPRGYFKIRSGKSSIMRSDAPIGKCNSECITPNGSIPNDKPFQNVNRITYGACPRYVKQSTLKLATGMRNVPEKQTRGIFGAIAGFIENGWEGMVDGWYGFRHQNSEGRGQAADLKSTQAAIDQINGKLNRLIGKTNEKFHQIEKEFSEVEGRIQDLEKYVEDTKIDLWSYNAELLVALENQHTIDLTDSEMNKLFEKTKKQLRENAEDMGNGCFKIYHKCDNACIGSIRNGTYNHNVYRDEALNNRFQIKGVELKSGYKDWILWISFAISCFLLCVALLGFIMWACQKGNIRCNICI

SEQ ID NO: 9556 - protein, 566 aa, synthetic construct
  REGION 1..566: note = hemagglutinin__InfluenzaA__AFN19686
MKTIIALSYILCLAFAQKLPGNDNSTATLCLGHHAVPNGTIVKTITNDQIEVTNATELVQSSSTGEICDSPHQILDGENCTLIDALLGDPQCDGFQNKKWDLFVERSKAYSNCYPYDVPDYASLRSLVASSGTLEFNNESFNWTGVTQNGTSSACIRRSNSSFFSRLNWLTHLNFKYPALNVTMPNNEQFDKLYIWGVHHPGTDKDQIFLYAQSSGRITVSTKRSQQAVIPNIGSRPRIRNIPSRISIYWTIVKPGDILLINSTGNLIAPRGYFKIRSGKSSIMRSDAPIGKCNSECITPNGSIPNDKPFQNVNRITYGACPRYVKQSTLKLATGMRNIPEKQTRGIFGAIAGFIENGWEGMVDGWYGFRHQNSEGRGQAADLKSTQAAIDQINGKLNRLIGKTNEKFHQIEKEFSEVEGRIQDLEKYVEDTKIDLWSYNAELLVALENQHTIDLTDSEMNKLFEKTKKQLRENAEDMGNGCFKIYHKCDNACIGSIRNGTYNHNVYRDEALNNRFQIKGVELKSGYKDWILWISFAISCFLLCVALLGFIMWACQKGNIRCNICI

SEQ ID NO: 9557 - protein, 566 aa, synthetic construct
  REGION 1..566: note = hemagglutinin__InfluenzaA__AFN19688
MKTIIALSYILCLVFAQELPGNDNSTATLCLGHHAVPNGTIVKTITNDQIEVTNATELVQSSSTGEICDSPHQILDGENCTLIDALLGDPQCDGFQNKKWDLFVERSKAYSNCYPYDVPDYASLRSLVASSGTLEFNNESFNWTGVTQNGTSSACIRRSNSSFFSRLNWLTHLNFKYPALNVTMPNNEQFDKLYIWGVHHPGTDKDQIFLYAQSSGRITVSTKRSQQAVIPNIGSRPRIRNIPSRISIYWTIVKPGDILLINSTGNLIAPRGYFKIRSGKSSIMRSDAPIGKCNSECITPNGSIPNDKPFQNVNRITYGACPRYVKQSTLKLATGMRNVPEKQTRGIFGAIAGFIENGWEGMVDGWYGFRHQNSEGRGQAADLKSTQAAIDQINGKLNRLIGKTNEKFHQIEKEFSEVEGRIQDLEKYVEDTKIDLWSYNAELLVALENQHTIDLTDSEMNKLFEKTKKQLRENAEDMGNGCFKIYHKCDNACIGSIRNGTYNHDVYRDEALNNRFQIKGVELKSGYKDWILWISFAISCFLLCVALLGFIMWACQKGNIRCNICI

SEQ ID NO: 9558 - protein, 566 aa, synthetic construct
  REGION 1..566: note = hemagglutinin__InfluenzaA__AFN19690
MKTTIALSYILCLVFAQKLPGNDNSTATLCLGHHAVPNGTIVKTITNDRIEVTNATELVQNSSIGEICDSPHQILDGENCTLIDALLGDPQCDGFQNKKWDLFVERSKAYSNCYPYDVPDYASLRSLVASSGTLEFNNESFNWTGVTQNGTSSACIRRSNNSFFSRLNWLTHLNFKYPALNVTMPNNEQFDKLYIWGVHHPGTDKDQIFLYAQSSGRITVSTKRSQQAVIPNIGSRPRIRNIPSRISIYWTIVKPGDILLINSTGNLIAPRGYFKIRSGKSSIMRSDAPIGKCKSECITPNGSIPNDKPFQNVNRITYGACPRYVKQSTLKLATGMRNVPEKQTRGIFGAIAGFIENGWEGMVDGWYGFRHQNSEGRGQAADLKSTQAAIDQINGKLNRLIGKTNEKFHQIEKEFSEVEGRIQDLEKYVEDTKIDLWSYNAELLVALENQHTIDLTDSEMNKLFEKTKKQLRENAEDMGNGCFKIYHKCDNACIGSIRNGTYDHDVYRDEALNNRFQIKGVDLKSGYKDWILWISFAISCFLLCVALLGFIMWACQKGNIRCNICI

SEQ ID NO: 9559 - protein, 566 aa, synthetic construct
  REGION 1..566: note = hemagglutinin__InfluenzaA__AFN19692
MKTIIALSYILCLVFAQKIPGNDNSTATLCLGHHAVPNGTIVKTITNDQIEVTNATELVQSSSTGEICDSPHQILDGENCTLIDALLGDPQCDGFQNKKWDLFVERSKAYSNCYPYDVPDYASLRSLVASSGTLEFNNESFNWTGVTQNGTSSACIRRSDSSFFSRLNWLTHLNFKYPALNVTMPNNEQFDKLYIWGVHHPGTDKDQIFLYAQASGRITVSTKRSQQAVIPNIGSRPRIRNIPSRISIYWTIVKPGDILLINSTGNLIAPRGYFKIRSGKSSIMRSDAPIGKCNSECITPNGSIPNDKPFQNVNRITYGACPRYVKQNTLKLATGMRNVPEKQTRGIFGAIAGFIENGWEGMVDGWYGFRHQNSEGRGQAADLKSTQAAIDQINGKLNRLIGKTNEKFHQIEKEFSEVEGRIQDLEKYVEDTKIDLWSYNAELLVALENQHTIDLTDSEMNKLFEKTKKQLRENAEDMGNGCFKIYHKCDNACIGSIRNGTYNHDVYRDEALNNRFQIKGVELKSGYKDWILWISFAISCFLLCVALLGFIMWACQKGNIRCNICI

SEQ ID NO: 9560 - protein, 566 aa, synthetic construct
  REGION 1..566: note = hemagglutinin__InfluenzaA__AFN19694
MKTIIALSYILCLVFAQKLPGNDNSTATLCLGHHAVPNGTIVKTITNDRIEVTNATELVQNSPIGEICDSPHQILDGENCTLIDALLGDPQCDGFQNKKWDLFVERSKAYSNCYPYDVPDYASLRSLVASSGTLEFNNESFNWTGVTQNGTSSACIRRSNNSFFSRLNWLTHLNFKYPALNVTMPNNEQFDKLYIWGVHHPGTDKDQIFLYAQSSGRITVSTKRSQQAVIPNIGSRPRIRNIPSRISIYWTIVKPGDILLINSTGNLIAPRGYFKIRSGKSSIMRSDAPIGKCKSECITPNGSIPNDKPFQNVNRITYGACPRYVKQSTLKLATGMRNVPEKQTRGIFGAIAGFIENGWEGMVDGWYGFRHQNSEGRGQAADLKSTQAAIDQINGKLNRLIGKTNEKFHQIEKEFSEVEGRIQDLEKYVEDTKIDLWSYNAELLVALENQHTIDLTDSEMNKLFEKTKKQLRENAEDMGNGCFKIYHKCDNACIGSIRNGTYDHDVYRDEALNNRFQIKGVELKSGYKDWILWISFAISCFLLCVALLGFIMWACQKGNIRCNICI

SEQ ID NO: 9561 - protein, 566 aa, synthetic construct
  REGION 1..566: note = hemagglutinin__InfluenzaA__AFN19700
MKTIIALSYILCLVFAQKLPGNDNSTATLCLGHHAVPNGTIVKTITNDQIEVTNATELVQNSSIGEICDSPHQILDGENCTLIDALLGDPQCDGFQNKKWDLFVERSKAYSNCYPYDVPDYASLRSLVASSGTLEFNNERFNWSGVTQNGTSSACMRRSNSSFFSRLNWLTHLNFKYPALNVTMPNNEQFDKLYIWGVHHPGTDKDQIFLYAQSSGRITVSTKRSQQAVIPNIGSRPRIRNIPSRISIYWTIVKPGDILLINSTGNLIAPRGYFKIRSGKSSIMRSDAPIGKCNSECITPNGSIPNDKPFQNVNRITYGACPRYVKQSTLKLATGMRNVPEKQTRGIFGAIAGFIENGWEGMVDGWYGFRHQNSEGRGQAADLKSTQAAIDQINGKLNRLIGKTNEKFHQIEKEFSEVEGRIQDLEKYVEDTKIDLWSYNAELLVALENQHTIDLTDSEMNKLFEKTKKQLRENAEDMGNGCFKIYHKCDNACIGSIRNGTYDHDVYRDEALNNRFQIKGVELKSGYKDWILWISFAISCFLLCVALLGFIMWACQKGNIRCNICI

SEQ ID NO: 9562 - protein, 566 aa, synthetic construct
  REGION 1..566: note = hemagglutinin__InfluenzaA__AFN19702
MKTIIALSYILCLVFAQKLPGNDNSTATLCLGHHAVPNGTIVKTITNDRIEVTNATELVQNSSIGEICDSPHQILDGENCTLIDALLGDPQCDGFQNKKWDLFVERGKAYSNCYPYDVPDYASLRSLVASSGTLEFNNESFNWTGVTQNGTSSACIRRSNNSFFSRLNWLTHLNFKYPALNVTMPNNEQFDKLYIWGVHHPGTDKDQIFLYAQSSGRITVSTKRSQQAVIPNIGSRPRIRNIPSRISIYWTIVKPGDILLINSTGNLIAPRGYFKIRSGKSSIMRSDAPIGKCKSECITPNGSIPNDKPFQNVNRITYGACPRYVKQSTLKLATGMRNVPEKQTRGIFGAIAGFIENGWEGMVDGWYGFRHQNSEGRGQAADLKSTQAAIDQINGKLNRLIGKTNEKFHQIEKEFSEVEGRIQDLEKYVEDTKIDLWSYNAELLVALENQHTIDLTDSEMNKLFEKTKKQLRENAEDMGNGCFKIYHKCDNACIGSIRNGTYDHDVYRDEALNNRFQIKGVELKSGYKDWILWISFAISCFLLCVALLGFIMWACQKGNIRCNICI

SEQ ID NO: 9563 - protein, 566 aa, synthetic construct; identical to SEQ ID NO: 6815
  REGION 1..566: note = hemagglutinin__InfluenzaA__AFN19709

SEQ ID NO: 9564 - protein, 566 aa, synthetic construct
  REGION 1..566: note = hemagglutinin__InfluenzaA__AFN19719
MKAILVVLLYTFATANADTLCIGYHANNSTDTVDTVLEKNVTVTHSVNLLEDKHNGKLCKLRGVAPLHLGKCNIAGWILGNPECESLSTASSWSYIVETSSSDNGTCYPGDFIDYEELREQLSSVSSFERFEIFPKTSSWPNHDSNKGVTAACPHAGAKSFYKNLIWLVKKGNSYPKLSKSYINDKGKEVLVLWGIHHPSTTADQQSLYQNADTYVFVGTSRYSKKFKPEIAIRPKVRDQEGRMNYYWTLVEPGDKITFEATGNLVVPRYAFAMERNAGSGIIISDTPVHDCNTTCQTPKGAINTSLPFQNIHPITIGKCPKYVKSTKLRLATGLRNVPSIQSRGLFGAIAGFIEGGWTGMVDGWYGYHHQNEQGSGYAADLKSTQNAIDKITNKVNSVIEKMNTQFTAVGKEFNHLEKRIENLNKKVDDGFLDIWTYNAELLVLLENERTLDYHDSNVKNLYEKVRTQLKNNAKEIGNGCFEFYHKCDNTCMESVKNGTYDYPKYSEEAKLNREEIDGVKLESTRVYQILAIYSTVASSLVLVVSLGAISFWMCSNGSLQCRICI

SEQ ID NO: 9565 - protein, 566 aa, synthetic construct; identical to SEQ ID NO: 6435
  REGION 1..566: note = hemagglutinin__InfluenzaA__AFN19730

SEQ ID NO: 9566 - protein, 566 aa, synthetic construct; identical to SEQ ID NO: 6815
  REGION 1..566: note = hemagglutinin__InfluenzaA__AFN19736

SEQ ID NO: 9567 - protein, 566 aa, synthetic construct
  REGION 1..566: note = hemagglutinin__InfluenzaA__AFN19748
MKAILVVLLYTFATANADTLCIGYHANNSTDTVDTVLEKNVTVTHSVNLLEDKHNGKLCKLRGVAPLHLGKCNIAGWILGNPECESLSTASSWSYIVETSSSDNGTCYPGDFIDYEELREQLSSVSSFERFEIFPKTSSWPNHDSNKGVTAACPHAGAKSFYKNLIWLVKTGNSYPKLSKSYINDKGKEVLVLWGIHHPSTTADQQSLYQNADTYVFVGTSRYSKKFKPEIAIRPKVRDQEGRMNYYWTLVEPGDKITFEATGNLVVPRYAFAMERNAGSGIIISDTPVHDCNTTCQTPKGAINTSLPFQNIHPITIGKCPKYVKSTKLRLATGLRNVPSIQSRGLFGAIAGFIEGGWTGMVDGWYGYHHQNEQGSGYAADLKSTQNAIDKITNKVNSVIEKMNTQFTAVGKEFNHLEKRIENLNKKVDDGFLDIWTYNAELLVLLENERTLDYHDSNVKNLYEKVRNQLKNNAKETGNGCFEFYHKCDNTCMESVKNGTYDYPKYSEEAKLNREEIDGVKLESTRIYQILAIYSTVASSLVLVVSLGAISFWMCSNGSLQCRICI

SEQ ID NO: 9568 - protein, 566 aa, synthetic construct; identical to SEQ ID NO: 6824
  REGION 1..566: note = hemagglutinin__InfluenzaA__AFN19757

SEQ ID NO: 9569 - protein, 566 aa, synthetic construct; identical to SEQ ID NO: 6815
  REGION 1..566: note = hemagglutinin__InfluenzaA__AFN19768

SEQ ID NO: 9570 - protein, 566 aa, synthetic construct
  REGION 1..566: note = hemagglutinin__InfluenzaA__AFN19781
MKAILVVLLYTFATANADTLCIGYHANNSTDTVDTVLEKNVTVTHSVNLLEDKHNGKLCKLRGVAPLHLGKCNIAGWILGNPECESLSTASSWSYIVETSSSDNGTCYPGDFIDYEELREQLSSVSSFERFEIFPKTSSWPNHDSNKGVTAACPHAGAKSFYKNLIWLVKKGNSYPKLSKSYINDKGKEVLVLWGIHHPSTTADQQSLYQNADTYVFVGTSRYSKKFKPEIAIRPKVRDQEGRMNYYWTLVEPGDKITFEATGNLVVPRYAFAVERNAGSGIIISDTPVHDCNTTCQTPKGAINTSLPFQNIHPITIGKCPKYVKSTKLRLATGLRNVPSIQSRGLFGAIAGFIEGGWTGMVDGWYGYHHQNEQGSGYAADLKSTQNAIDKITNKVNSVIEKMNTQFTAVGKEFNHLEKRIENLNKKVDDGFLDIWTYNAELLVLLENERTLDYHDSNVKNLYEKVRNQLKNNAKEIGNGCFEFYHKCDNTCMESVKNGTYDYPKYSEEAKLNREEIDGVKLESTRIYQILAIYSTVASSLVLVVSLGAISFWMCSNGSLQCRICI

SEQ ID NO: 9571 - protein, 566 aa, synthetic construct
  REGION 1..566: note = hemagglutinin__InfluenzaA__AFN19791
MKAILVVLLYTFAIANADTLCIGYHANNSTDTVDTVLEKNVTVTHSVNLLEDKHNGKLCKLRGVAPLHLGKCNIAGWILGNPECESLSTASSWSYIVETSSSDNGTCYPGDFINYEELREQLSSVSSFERFEIFPKTSSWPNHDSNKGVTAACPHAGAKSFYKNLIWLVKKGNSYPKLSKSYINDKGKEVLVLWGIHHPSTSADQQSLYQNADAYVFVGTSKYSKKFKPEIAVRPKVRDQEGRMNYYWTLVEPGDKITFEATGNLLVPRYAFAMERNAGSGIIISDTPVHDCNTTCQTPEGAINTSLPFQNIHPITIGKCPKYVKSTKLRLATGLRNVPSIQSRGLFGAIAGFIEGGWTGMVDGWYGYHHQNEQGSGYAADLKSTQNAIDKITNKVNSVIEKMNTQFTAVGKEFNHLEKRIENLNKKVDDGFLDIWTYNAELLVLLENERTLDYHDSNVKNLYEKVRSQLKNNAKEIGNGCFEFYHKCDNTCMESVKNGTYDYPKYSEEAKLNREEIDGVKLESTRIYQILAIYSTVASSLVLIVSLGAISFWMCSNGSLQCRICI

SEQ ID NO: 9572 - protein, 566 aa, synthetic construct; identical to SEQ ID NO: 6815
  REGION 1..566: note = hemagglutinin__InfluenzaA__AFN19806

SEQ ID NO: 9573 - protein, 566 aa, synthetic construct
  REGION 1..566: note = hemagglutinin__InfluenzaA__AFN19808
MKAILVVLLYTFATANADTLCIGYHANNSTDTVDTVLEKNVTVTHSVNLLEDKHNGKLCKLRGVAPLHLGKCNIAGWILGNPECESLSTANSWSYIVETSSSDNGTCYPGDFIDYEELREQLSSVSSFERFEIFPKTNSWPNHDSNKGVTAACPHAGAKSFYKNLIWLVKKGNSYPKLSKSYINDKGKEVLVLWGIHHPSTSADQQSLYQNADAYVFVGTSRYSKKFKPEIAIRPKVRDQEGRMNYYWTLVEPGDKITFEATGNLVVPRYAFAMERNAGSGIIISDTPAHDCNTTCQTPKGAINTSLPFQNIHPITIGKCPKYVNSTKLRLATGLRNVPSIQSRGLFGAIAGFIEGGWTGMVDGWYGYHHQNEQGSGYAADLKSTQNAIDKITNKVNSVIEKMNTQFTAVGKEFNHLEKRIENLNKKVDDGFLDIWTYNAELLVLLENERTLDYHDSNVKNLYEKVRSQLKNNAKEIGNGCFEFYHKCDNTCMESVKNGTYDYPKYSEEAKLNREEIDGVKLESTRIYQILAIYSTVASSLVLVVSLGAISFWMCSNGSLQCRICI

SEQ ID NO: 9574 - protein, 566 aa, synthetic construct; identical to SEQ ID NO: 6824
  REGION 1..566: note = hemagglutinin__InfluenzaA__AFN19814

SEQ ID NO: 9575 - protein, 566 aa, synthetic construct
  REGION 1..566: note = hemagglutinin__InfluenzaA__AFN19816
MKAILVVLLYTFATANADTLCIGYHANNSTDTVDTVLEKNVTVTHSVNLLEDKHNGKLCKLRGVAPLHLGKCNIAGWILGNPECESLSTASSWSYIVETSSSDNGTCYPGDFIDYEELREQLSSVSSFERFEIFPKTSSWPNHDSNKGVTAACPHAGAKGFYKNLIWLVKKGNSYPKLSKSYINDKGKEVLVLWGIHHPSTTADQQSLYQNADTYVFVGTSRYSKKFKPEIAIRPKVRDQEGRMNYYWTLVEPGDKITFEATGNLVVPRYAFAMERDAGSGIIISDTPVHDCNTTCQTPKGAINTSLPFQNIHPITIGKCPKYVKSTKLRLATGLRNVPSIQSRGLFGAIAGFIEGGWTGMVDGWYGYHHQNEQGSGYAADLKSTQNAIDKITNKVNSVIEKMNTQFTAVGKEFNHLEKRIENLNKKVDDGFLDIWTYNAELLVLLENERTLDYHDSNVKNLYEKVRNQLKNNAKEIGNGCFEFYHKCDNTCMESVKNGTYDYPKYSEEAKLNREEIDGVKLESTRIYQILAIYSTVASSLVLVVSLGAISFWMCSNGSLQCRICI

SEQ ID NO: 9576 - protein, 566 aa, synthetic construct
  REGION 1..566: note = hemagglutinin__InfluenzaA__AFN19821
MKAILVVLLYTFATANADTLCIGYHANNSTDTVDTVLEKNVTVTHSVNLLEDKHNGKLCKLRGVAPLHLGKCNIAGWILGNPECESLSTASSWSYIVETSSSDNGTCYPGDFIDYEELREQLSSVSSFERFEIFPKTSSWPNHDSNKGVTAACPHAGAKSFYKNLIWLVKKGNSYPKLSKSYINDKGKEVLVLWGIHHPSTTADQQSLYQNADTYVFVGTSRYSKKLKPEIAIRPKVRDQEGRMNYYWTLVEPGGKITFEATGNLVVPRYAFAMERNAGSGIIISDTPVHDCNTTCQTPKGAINTSLPFQNIHPITIGKCPKYVKSTKLRLATGLRNVPSIQSRGLFGAIAGFIEGGWTGMVDGWYGYHHQNEQGSGYAADLKSTQNAIDKITNKVNSVIEKMNTQFTAVGKEFNHLEKRIENLNKKVDDGFLDIWTYNAELLVLLENERTLDYHDSNVKNLYEKVRNQLKNNAKEIGNGCFEFYHKCDNTCMESVKNGTYDYPKYSEEAKLNREEIDGVKLESTRIYQILAIYSTVASSLVLVVSLGAISFWMCSNGSLQCRICI

SEQ ID NO: 9577 - protein, 566 aa, synthetic construct; identical to SEQ ID NO: 6435
  REGION 1..566: note = hemagglutinin__InfluenzaA__AFN19831

SEQ ID NO: 9578 - protein, 566 aa, synthetic construct
  REGION 1..566: note = hemagglutinin__InfluenzaA__AFN19849
MKAILVVLLYTFATANADTLCIGYHANNSTDTVDTVLEKNVTVTHSVNLLEDKHNGKLCKLRGVAPLHLGKCDIAGWILGNPECESLSTASSWSYIVETSSSDNGTCYPGDFINYEELREQLSSVSSFERFEIFPKTSSWPNHDSNKGVTAACPQAGAKSFYKNLIWLVKKGNSYPKLSKSYINDKGKEVLVLWGIHHPSTSADQQSLYQNADAYVFVGTSKYSKKFKPEIAVRPKVRDQEGRMNYYWTLVEPGDKITFEATGNLLVPRYAFAMERNAGSGIIISDTPVHDCNTTCQTPKGAINTSLPFQNIHPITIGKCPKYVKSTKLRLATGLRNVPSIQSRGLFGAIAGFIEGGWTGMVDGWYGYHHQNAQGSGYAADLKSTQNAIDKITNKVNSVIEKMNTQFTAVGKEFNHLEKRIENLNKKVDDGFLDIWTYNAELLVLLENERTLDYHDSNVKNLYEKVRSQLKNNAKEIGDGCFEFYHKCDNTCMESVKNGTYDYPKYSEEAKLNREEIDGVKLESTRIYQILAIYSTVASSLVLVVSLGAISFWMCSNGSLQCRICI

SEQ ID NO: 9579 - protein, 566 aa, synthetic construct
  REGION 1..566: note = hemagglutinin__InfluenzaA__AFN19865
MKAILVVLLYTFATANADTLCIGYHANNSTDTVDTVLEKNVTVTHSVNLLEDKHNGKLCKLRGVAPLHLGKCNIAGWILGNPECESLSTASSWSYIVETSSSDNGTCYPGDFIDYEELREQLSSVSSFERFEIFPKTSSWPNHDSNKGVTAACPHAGAKSFYKNLIWLVKKGNSYPKLSKSYINDKGKEVLVLWGIHHPSTTADQQSLYQNADAYVFVGTSRYSKKFKPEIAIRPKVRDQEGRMNYYWTLVEPGDKITFEATGNLVVPRYAFAMERNAGSGIIISDTLVHDCNTTCQTPKGAINTSLPFQNIHPITIGKCPKYVKSTKLRLATGLRNVPSIQSRGLFGAIAGFIEGGWTGMVDGWYGYHHQNEQGSGYAADLKSTQNAIDKITNKVNSVIEKMNTQFTAVGKEFNHLEKRIENLNKKVDDGFLDIWTYNAELLVLLENERTLDYHDSNVKNLYEKVRNQLKNNAKEIGNGCFEFYHKCDNTCMESVKNGTYDYPKYSEEAKLNREEIDGVKLESTRIYQILAIYSTVASSLVLVVSLGAISFWMCSNGSLQCRICI

SEQ ID NO: 9580 - protein, 566 aa, synthetic construct
  REGION 1..566: note = hemagglutinin__InfluenzaA__AFN19875
MKAILVVLLYTFATANADTLCIGYHANNSTDTVDTVLEKNVTVTHSVNLLEDKHNGKLCKLRGVAPLHLGKCNIAGWILGNPECESLSTASSWSYIVETSSSDNGTCYPGDFINYEELREQLSSVSSFERFEIFPKTSSWPNHDSNKGVTAACPHAGEKSFYKNLIWLVKKGNSYPKLSKSYINDKGKEVLVLWGIHHPSTSADQQSLYQNADAYVFVGTSKYSKKFKPEIAVRPKVRDQEGRMNYYWTLVEPGDKITFEATGNLLVPRYAFAMERNAGSGIIISDTPVHDCNTTCQTPKGAINTSLPFQNIHPITIGKCPKYVKSTKLRLATGLRNVPSIQSRGLFGAIAGFIEGGWTGMVDGWYGYHHQNEQGSGYAADLKSTQNAIDKITNKVNSVIEKMNTQFTAVGKEFNHLEKRIENLNKKVDDGFLDIWTYNAELLVLLENERTLDYHDSNVKNLYEKVRSQLKNNAKEIGNGCFEFYHKCDNTCMESVKNGTYDYPKYSEEAKLNREEIDGVKLESTRIYQILAIYSTVASSLVLVVSLGAISFWMCSNGSLQCRICI

SEQ ID NO: 9581 - protein, 566 aa, synthetic construct
  REGION 1..566: note = hemagglutinin__InfluenzaA__AFN19895
MKAILVVLLYTFATANADTLCIGYHANNSTDTVDTVLEKNVTVTHSVNLLEDKHNGKLCKLRGVAPLHLGKCNIAGWILGNPECESLSTASSWSYIVETSSSDNGTCYPGDFIDYEELREQLSSVSSFERFEIFPKTSSWPNHDSNKGVTAACPHAGAKSFYKNLIWLVKKGNSYPKISKSYINDKGKEVLVLWGIHHPSTTADQQSLYQNADTYVFVGTSRYSKKFKPEIAIRPKVRDQEGRMNYYWTLVEPGDKITFEATGNLVVPRYAFAMERNAGSGIIISDTPVHDCNTTCQTPKGAINTSLPFQNIHPITIGRCPKYVKSTKLRLATGLRNVPSIQSRGLFGAIAGFIEGGWTGMVDGWYGYHHQNEQGSGYAADLKSTQNAIDKITNKVNSVIEKMNTQFTAVGKEFNHLEKRIENLNKKVDDGFLDIWTYNAELLVLLENERTLDYHDSNVKNLYEKVRNQLKNNAKETGNGCFEFYHKCDNTCMESVKNGTYDYPKYSEEAKLNREVIDGVKLESTRIYQILAIYSTVASSLVLVVSLGAISFWMCSNGSLQCRICI

SEQ ID NO: 9582 - protein, 566 aa, synthetic construct
  REGION 1..566: note = hemagglutinin__InfluenzaA__AFN19905
MKAILVVLLYTFATANADTLCIGYHANNSTDTVDTVLEKNVTVTHSVNLLEDKHNGKLCKLRGVAPLHLGKCNIAGWILGNPECESLSTASSWSYIVETSSSDNGTCYPGDFIDYEELREQLSSVSSFERFEIFPKTSSWPNHDSNKGVTAACPHAGAKGFYKNLIWLVKKGNSYPKLSKSYINDKGKEVLVLWGIHHPSTTADQQSLYQNADTYVFVGTSRYSKKFKPEIAIRPKVRDQEGRMNYYWTLVEPGDKITFEATGNLVVPRYAFAMERNAGSGIIISDTPVHDCNTTCQTPKGAINTSLPFQNIHPITIGKCPKYVKSTKLRLATGLRNVPSIQSRGLFGAIAGFIEGGWTGMVDGWYGYHHQNEQGSGYAADLKSTQNAVDKITNKVNSVIEKMNTQFTAVGKEFNHLEKRIENLNKKVDDGFLDIWTYNAELLVLLENERTLDYHDSNVKNLYEKVRNQLKNNAKEIGNGCFEFYHKCDNTCMESVKNGTYDYPKYSEEAKLNREKIDGVKLESTRIYQILAIYSTVASSLVLIVSLGAISFWMCSNGSLQCRICI

SEQ ID NO: 9583 - protein, 566 aa, synthetic construct
  REGION 1..566: note = hemagglutinin__InfluenzaA__AFN19915
MKAILVVLLYTFATANADTLCIGYHANNSTDTVDTVLEKNVTVTHSVNLLEDKHNGKLCKLRGVAPLHLGKCNIAGWILGNPECESLSTASSWSYIVETSSSDNGTCYPGDFINYEELREQLSSVSSFERFEIFPKTSSWPNHDSNKGVTAACPQAGAKSFYKNLIWLVKKGNSYPKLSSSYINDKGKEVLVLWGIHHPSTSADQQSLYQNADAYVFVGTSEYSKKFKPEIAVRPKVRDQEGRMNYYWTLVEPGDKITFEATGNLLVPRYAFAMERNAGSGIIISDTPVHDCNTTCQTPKGAINTSLPFQNIHPITIGKCPKYVKSTKLRLATGLRNVPSIQSRGLFGAIAGFIEGGWTGMVDGWYGYHHQNAQGSGYAADLKSTQNAIDKITNKVNSVIEKMNTQFTAVGKEFNHLEKRIENLNKKVDDGFLDIWTYNAELLVLLENERTLDYHDSNVKNLYEKVRSQLKNNAKEIGNGCFEFYHKCDNTCMESVKNGTYDYPKYSEEAKLNREEIDGVKLESTRIYQILAIYSTVASSLVLVVSLGAISFWMCSNGSLQCRICI

SEQ ID NO: 9584 - protein, 566 aa, synthetic construct
  REGION 1..566: note = hemagglutinin__InfluenzaA__AFN19922
MKAILVVVLYTFATANADTLCIGYHANNSTDTVDTVLEKNVTVTHSVNLLEDKHNGKLCKLRGVAPLHLGKCNIAGWILGNPECESLSTASSWSYIVETSSSDNGTCYPGDFIDYEELREQLSSVSSFERFEIFPKTSSWPNHDSNKGVTAACPHAGAKGFYKNLIWLVKKGNSYPKLSRSYINDKGKEVLVLWGIHHPSTTADQQSLYQNADTYVFVGTSRYSKKFKPEIAIRPKVRDQEGRMNYYWTLVEPGDKITFEATGNLVVPRYAFAMERNAGSGIIISDTPAQDCNTTCQTPKGAINTSLPFQNIHPITIGKCPKYVKSTKLRLATGLRNVPSIQSRGLFGAIAGFIEGGWTGMVDGWYGYHHQNEQGSGYAADLKSTQNAIDKITNKVNSVIEKMNTQFTAVGKEFNHLEKRIENLNKKVDDGFLDIWTYNAELLVLLENERTLDYHDSNVKNLYEKVRNQLKNNAKEIGNGCFEFYHKCDNTCMESVKNGTYDYPKYSEEAKLNREEIDGVKLESTRIYQILAIYSTVASSLVLVVSLGAISFWMCSNGSLQCRICI

SEQ ID NO: 9585 - protein, 566 aa, synthetic construct; identical to SEQ ID NO: 6454
  REGION 1..566: note = hemagglutinin__InfluenzaA__AFN19931

SEQ ID NO: 9586 - protein, 566 aa, synthetic construct
  REGION 1..566: note = hemagglutinin__InfluenzaA__AFN19941
MKAILVVLLYTFATANADTLCIGYHANNSTDTVDTVLEKNVTVTHSVNLLEDKHNGKLCKLRGVAPLHLGKCNIAGWILGNPECESLSTASSWSYIVETSISDNGTCYPGDFINYEELREQLSSVSSFERFEIFPKTSSWPNHDSNKGVTAACPQAGAKSFYKNLIWLVKKGNSYPKLSKSYINDKGKEVLVLWGIHHPSTSADQQSLYQNADAYVFVGTSKYSKKFKPEIAVRPKVRDQEGRMNYYWTLVEPGDKITFEATGNLLVPRYAFAMERNAGSGIIISDTPVHDCNTTCQTPKGAINTSLPFQNIHPITIGKCPKYVKSTKLRLATGLRNVPSIQSRGLFGAIAGFIEGGWTGMVDGWYGYHHQNAQGSGYAADLKSTQNAIDKITNKVNSVIEKMNTQFTAVGKEFNHLEKRIENLNKKVDDGFLDIWTYNAELLVLLENERTLDYHDSNVKNLYEKVRSQLKNNAKEIGNGCFEFYHKCDNTCMESVKNGTYDYPKYSEEAKLNREEIDGVKLESTRIYQILAIYSTVASSLVLVVSLGAISFWMCSNGSLQCRICI

SEQ ID NO: 9587 - protein, 566 aa, synthetic construct
  REGION 1..566: note = hemagglutinin__InfluenzaA__AFN19951
MKAILVVLLYTFATANADTLCIGYHANNSTDTVDTVLEKNVTVTHSVNLLEDKHNGKLCKLRGVAPLHLGKCNIAGWILGNPECESLSTASSWSYIVETSSSDNGTCYPGDFIDYEELREQLSSVSSFERFEIFPKTSSWPNHDSNKGVTAACPHAGAKSFYKNLIWLVKKGNSYPKLSKSYINDKGKEVLVLWGIHHPSTTADQQSLYQNADTYVFVGTSRYSKKFKPEIAIRPKVRDQEGRMNYYWTLVEPGDKITFEATGNLVVPRYAFAMERNAGSGIIISDTPVHDCNTTCQTPKGAINTSLPFQNIHPITIGKCPKYVKSTKLRLATGLRNVPSIQSRGLFGAIAGFIEGGWTGMVDGWYGYHHQNEQGSGYAADLKSTQNAIDKITNKVNSVIEKMNTQFTAVGKEFNHLEKRIENLNKKVDDGFLDIWTYNAELLVLLENERTLDYHDSNVKNLYEKVRNQLKNNAKETGNGCFEFYHKCDNTCMESVKNGTYDYPKYSEEAKLNREEIDGVKLESTRIYQILAIYSTAASSLVLVVSLGAISFWMCSNGSLQCRICI

SEQ ID NO: 9588 - protein, 566 aa, synthetic construct; identical to SEQ ID NO: 6815
  REGION 1..566: note = hemagglutinin__InfluenzaA__AFN19966

SEQ ID NO: 9589 - protein, 566 aa, synthetic construct
  REGION 1..566: note = hemagglutinin__InfluenzaA__AFN19972
MKAILVVLLYTFATANADTLCIGYHANNSTDTVDTVLEKNVTVTHSVNLLEDKHNGKLCKLRGVAPLHLGKCNIAGWILGNPECESLSTASSWSYIVETSSSDNGTCYPGDFIDNEELREQLSSVSSFERFEIFPKTSSWPNHDSNKGVTAACPHAGAKSFYKNLIWLVKKGNSYPKLSKSYINDKGKEVLVLWGIHHPSTTADQQSLYQNADTYVFVGTSRYSKKFKPEIAIRPKVRDQEGRMNYYWTLVEPGDKITFEATGNLVVPRYAFAMERNAGSGIIISDTPVHDCNTTCQTPKGAINTSLPFQNIHPITIGKCPKYVKSTKLRLATGLRNVPSIQSRGLFGAIAGFIEGGWTGMVDGWYGYHHQNEQGSGYAADLKSTQNAIDKITNKVNSVIEKMNTQFTAVGKEFNHLEKRIENLNKKVDDGFLDIWTYNAELLVLLENERTLDYHDSNVKNLYEKVRNQLKNNAKEIGNGCFEFYHKCDNTCMESVKNGTYDYPKYSEEAKLNREEIDGVKLESTRVYQILAIYSTVASSLVLVVSLGAISFWMCSNGSLQCRICI

SEQ ID NO: 9590 - protein, 566 aa, synthetic construct
  REGION 1..566: note = hemagglutinin__InfluenzaA__AFN19978
MKAILVVMLYTFATANADTLCIGYHANNSTDTVDTVLEKNVTVTHSVNLLEDKHNGKLCKLRGVAPLHLGKCNIAGWILGNPECESLSTASSWSYIVETSSSDNGTCYPGDFIDYEELREQLSSVSSFERFEIFPKTSSWPNHDSNKGVTAACPHAGAKGFYKNLIWLVKKGNSYPKLSKSYINDKGKEVLVLWGIHHPSTTADQQSLYQNADTYVFVGTSRYSKKFKPEIAIRPKVRDQEGRMNYYWTLVEPGDKITFEATGNLVVPRYAFAMERNAGSGIIISDTPVHDCNTTCQTPKGAINTSLPFQNIHPITIGKCPKYVKSTKLRLATGLRNVPSIQSRGLFGAIAGFIEGGWTGMVDGWYGYHHQNEQGSGYAADLKSTQNAIDKITNKVNSVIEKMNTQFTAVGKEFNHLEKRIENLNKKVDDGFLDIWTYNAELLVLLENERTLDYHDSNVKNLYEKVRNQLKNNAKEIGNGCFEFYHKCDNTCMESVKNGTYDYPKYSEEAKLNREKIDGVKLESTRIYQILAIYSTVASSLVLVVSLGAISFWMCSNGSLQCRICI

SEQ ID NO: 9591 - protein, 566 aa, synthetic construct; identical to SEQ ID NO: 6815
  REGION 1..566: note = hemagglutinin__InfluenzaA__AFN19983

SEQ ID NO: 9592 - protein, 566 aa, synthetic construct
  REGION 1..566: note = hemagglutinin__InfluenzaA__AFN19993
MKAILVVLLYTVATTNADTLCIGYHANNSTDTVDTVLEKNVTVTHSVNLLEDKHNGKLCKLRGVAPLHLGKCNIAGWILGNPECESLSTASSWSYIVETSSSDNGTCYPGDFIDYEELREQLSSVSSFERFEIFPKTSSWPNHDSNKGVTAACPHAGAKGFYKNLIWLVKKGNSYPKLSKSYINDKGKEVLVLWGIHHPSTTADQQSLYQNADTYVFVGTSRYSKKFKPEIAIRPKVRDQEGRMNYYWTLVEPGDKITFEATGNLVVPRYAFAMERNAGSGIIISDTPVHDCNTTCQTPKGAINTSLPFQNIHPITIGKCPKYVKSTKLRLATGLRNVPSIQSRGLFGAIAGFIEGGWTGMVDGWYGYHHQNEQGSGYAADLKSTQNAIDKITNKVNSVIEKMNTQFTAVGKEFNHLEKRIENLNKKVDDGFLDIWTYNAELLVLLENERTLDYHDSNVKNLYEKVRNQLKNNAKEIGNGCFEFYHKCDNTCMESVKNGTYDYPKYSEEAKLNREEIDGVKLESTRIYQILAIYSTVASSLVLVVSLGAISFWMCSNGSLQCRICI

SEQ ID NO: 9593 - protein, 566 aa, synthetic construct; identical to SEQ ID NO: 6815
  REGION 1..566: note = hemagglutinin__InfluenzaA__AFN20000

SEQ ID NO: 9594 - protein, 566 aa, synthetic construct; identical to SEQ ID NO: 6822
  REGION 1..566: note = hemagglutinin__InfluenzaA__AFN20006

SEQ ID NO: 9595 - protein, 566 aa, synthetic construct; identical to SEQ ID NO: 6454
  REGION 1..566: note = hemagglutinin__InfluenzaA__AFN20012

SEQ ID NO: 9596 - protein, 566 aa, synthetic construct
  REGION 1..566: note = hemagglutinin__InfluenzaA__AFN20018
MKAILVVLLYTFATANADTLCIGYHANNSTDTVDTVLEKNVTVTHSVNLLEDKHNGKLCKLRGVAPLHLGKCNIAGWILGNPECESLSTASSWSYIVETSSSDNGTCYPGDFINYEELREQLSSVSSFERFEIFPKTSSWPNHDSNKGVTAACPQAGAKSFYKNLIWLVKKGNSYPKLSNSYINDKGKEVLVLWGIHHPSTSADQQSLYQNADAYVFVGTSKYSKKFKPEIAVRPKVRDQEGRMNYYWTLVEPGDKITFEATGNLLVPRYAFAMERNAGSGIIISDTPVHDCNTTCQTPKGAINTSLPFQNIHPITIGKCPKYVKSTKLRLATGLRNVPSIQSRGLFGAIAGFIEGGWTGMVDGWYGYHHQNAQGSGYAADLKSTQNAIDKITNKVNSVIEKMNTQFTAVGKEFNHLEKRIENLNKKVDDGFLDIWTYNAELLVLLENERTLDYHDSNVKNLYEKVRSQLKNNAKEIGNGCFEFYHKCDNTCMESVKNGTYDYPKYSEEAKLNREEIDGVKLESTRIYQILAIYSTVASSLVLVVSLGAISFWMCSNGSLQCRICI

SEQ ID NO: 9597 - protein, 566 aa, synthetic construct; identical to SEQ ID NO: 6824
  REGION 1..566: note = hemagglutinin__InfluenzaA__AFN20019

SEQ ID NO: 9598 - protein, 566 aa, synthetic construct; identical to SEQ ID NO: 6454
  REGION 1..566: note = hemagglutinin__InfluenzaA__AFN20021

SEQ ID NO: 9599 - protein, 566 aa, synthetic construct; identical to SEQ ID NO: 6824
  REGION 1..566: note = hemagglutinin__InfluenzaA__AFN20034

SEQ ID NO: 9600 - protein, 566 aa, synthetic construct; identical to SEQ ID NO: 6815
  REGION 1..566: note = hemagglutinin__InfluenzaA__AFN20040

SEQ ID NO: 9601 - protein, 566 aa, synthetic construct; identical to SEQ ID NO: 9587
  REGION 1..566: note = hemagglutinin__InfluenzaA__AFN20046

SEQ ID NO: 9602 - protein, 566 aa, synthetic construct; identical to SEQ ID NO: 6824
  REGION 1..566: note = hemagglutinin__InfluenzaA__AFN20052

SEQ ID NO: 9603 - protein, 566 aa, synthetic construct; identical to SEQ ID NO: 6824
  REGION 1..566: note = hemagglutinin__InfluenzaA__AFN20061

SEQ ID NO: 9604 - protein, 566 aa, synthetic construct
  REGION 1..566: note = hemagglutinin__InfluenzaA__AFN20076
MKAILVVLLYTFATANADTLCIGYHANNSTDTVDTVLEKNVTVTHSVNLLEDKHNGKLCKLRGVAPLHLGKCNIAGWILGNPDCESLSTASSWSYIVETSSSDNGTCYPGDFIDYEELREQLSSVSSFERFEIFPKTSSWPNHDSNKGVTAACPHAGAKSFYKNLIWLVKKGNSYPKLSKSYINDKGKEVLVLWGIHHPSTTADQQSLYQNADTYVFVGTSRYSKKFKPEIAIRPKVRDQEGRMNYYWTLVEPGDKITFEATGNLVVPRYAFAMERNAGSGIIISDTPVHDCNTTCQTPKGAINTSLPFQNIHPITIGKCPKYVKSTKLRLATGLRNVPSIQSRGLFGAIAGFIEGGWTGMVDGWYGYHHQNEQGSGYAADLKSTQNAIDKITNKVNSVIEKMNTQFTAVGKEFNHLEKRIENLNKKVDDGFLDIWTYNAELLVLLENERTLDYHDSNVKNLYEKVRNQLKNNAKETGNGCFEFYHKCDNTCMESVKNGTYDYPKYSEEAKLNREEIDGVKLESTRIYQILAIYSTVASSLVLVVSLGAISFWMCSNGSLQCRICI

SEQ ID NO: 9605 - protein, 566 aa, synthetic construct
  REGION 1..566: note = hemagglutinin__InfluenzaA__AFN20081
MKAILVVLLYTFATANADTLCIGYHANNSTDTVDTVLEKNVTVTHSVNLLEDKHNGKLCKLRGVAPLHLGKCNIAGWILGNPECESLSTASSWSYIVETSSSDNGTCYPGDFIDYEELREQLSSVSSFERFEIFPKTSSWPNHDSNKGVTAACPHAGAKSFYKNLIWLVKKGNSYPKISKSYINDKGKEVLVLWGIHHPSTTADQQSLYQNADTYVFVGTSRYSKKFKPEIAIRPKVRDQEGRMNYYWTLVEPGDKITFEATGNLVIPRYAFAMERNAGSGIIISDTPVHDCNTTCQTPKGAINTSLPFQNIHPITIGRCPKYVKSTKLRLATGLRNVPSIQSRGLFGAIAGFIEGGWTGMVDGWYGYHHQNEQGSGYAADLKSTQNAIDKITNKVNSVIEKMNTQFTAVGKEFNHLEKRIENLNKKVDDGFLDIWTYNAELLVLLENERTLDYHDSNVKNLYEKVRNQLKNNAKETGNGCFEFYHKCDNTCMESVKNGTYDYPKYSEEAKLNREVIDGVKLESTRIYQILAIYSTVASSLVLVVSLGAISFWMCSNGSLQCRICI

SEQ ID NO: 9606 - protein, 566 aa, synthetic construct; identical to SEQ ID NO: 6824
  REGION 1..566: note = hemagglutinin__InfluenzaA__AFN20092

SEQ ID NO: 9607 - protein, 566 aa, synthetic construct; identical to SEQ ID NO: 9586
  REGION 1..566: note = hemagglutinin__InfluenzaA__AFN20099

SEQ ID NO: 9608 - protein, 566 aa, synthetic construct
  REGION 1..566: note = hemagglutinin__InfluenzaA__AFN20112
MKAILVVLLYTFATANADTLCIGYHANNSTDTVDTVLEKNVTVTHSVNLLEDKHNGKLCKLRGVAPLHLGKCNIAGWILGNPECKSLSTASSWSYIVETSSSDNGTCYPGDFIDYEELREQLSSVSSFERFEIFPKTSSWPNHNPNKGVTAACPHAGAKSFYKNLIWLVKNGNSYPKLNTSYINDKGKEVLVLWGIHHPSTSADQQSLYQNADAYAFVGTSRYSKKFKPEIAIRPKVRDQEGRMNYYWTLVEPGDKITFEATGNLVVPRYAFAMERNAGSGIIISDTSVHDCNTTCQTPKGAINTSLPFQNVHPITIGKCPKYVKSTKLRLATGLRNVPSIQSRGLFGAIAGFIEGGWTGMVDGWYGYHHQNEQGSGYAADLKSTQNAFDKITNKVNSVIEKMNTQFTAVGKEFNHLEKRIENLNKKVDDGFLDIWTYNAELLVLLENERTLDYHDSNVKNLYEKVRSQLKTNAKEIGNGCFEFYHKCDNTCMESVKNGTYDYPKYSEEAKLNREEIDGVKLESTRIYQILAIYSTVASSLVLVVSLGAISFWMCSNGSLQCRICI

SEQ ID NO: 9609 - protein, 566 aa, synthetic construct
  REGION 1..566: note = hemagglutinin__InfluenzaA__AFN87924
MKAILVVLLYTFATANADTLCIGYHANNSTDTVDTVLEKNVTVTHSVNLLEDKHNGKLCKLRGVAPLHLGKCNIAGWILGNPECESLSTASSWSYIVETSSSDNGTCYPGDFIDYEELREQLSSVSSFERFEIFPKTSSWPNHDPNKGVTAACPHAGAKSFYKNLIWLVKKGNSYPKLSTSYINDKRKEVLVLWGIHHPSTSADQQSLYQNADAYAFVGTSRYSKKFKPEIAIRPKVRDQEGRMNYYWTLVEPGDKITFEATGNLVVPRYAFAMERNAGSGIIISDTSVHDCNTTCQTPKGAINTSLPFQNVHPITIGKCPKYVKSTKLRLATGLRNVPSIQSRGLFGAIAGFIEGGWTGMVDGWYGYHHQNEQGSGYAADLKSTQNAFDKITNKVNSVIEKMNTQFTAVGKEFNHLEKRIENLNKKVDDGFLDIWTYNAELLVLLENERTLDYHDSNVKNLYEKVRSQLKNNAKEIGNGCFEFYHKCDNTCMESVKNGTYDYPKYSEEAKLNREEIDGVKLESTRIYQILAIYSTVASSLVLVVSLGAISFWMCSNGSLQCRICI

SEQ ID NO: 9610 - protein, 566 aa, synthetic construct; identical to SEQ ID NO: 2669
  REGION 1..566: note = hemagglutinin__InfluenzaA__AFN87926

SEQ ID NO: 9611 - protein, 566 aa, synthetic construct
  REGION 1..566: note = hemagglutinin__InfluenzaA__AFN87927
MKAILVVLLYTFATANADTLCIGYHANNSTDTVDTVLEKNVTVTHSVNLLEDKHNGKLCKLRGVAPLHLGKCNIAGWILGNPECESLSTASSWSYIVETSSSDNGTCYPGDFIDYEELREQLSSVSSFERFEIFPKTSSWPNHDSNKGVTAACPHAGAKSFYKNLIWLVKKGNSYPKLSKSYINDKRKEVLVLWGIHHPSTSADQQSLYQNADAYVFVGTSRYSKKFKPEIAIRPKVRDQEGRMNYYWTLVEPGDKITFEATGNLVVPRYAFAMERNAGSGIIISGTPVHDCNTTCQTPKGAINTSLPFQNIHPITIGKCPKYVKSTKLRLATGLRNVPSIQSRGLFGAIAGFIEGGWTGMVDGWYGYHHQNEQGSGYAADLKSTQNAIDKITNRVNSVIEKMNTQFTAVGKEFNHLEKRIENLNKKVDDGFLDIWTYNAELLVLLENERTLDYHDSNVKNLYEKVRSQLKNNAKEIGNGCFEFYHKCDNTCMESVKNGTYDYPKYSEEAKLNREEIDGVKLESTRIYQILAIYSTVASSLVLVVSLGAISFWMCSNGSLQCRICI

SEQ ID NO: 9612 - protein, 566 aa, synthetic construct
  REGION 1..566: note = hemagglutinin__InfluenzaA__AFN87928
MKAILVVLLYTFATANADTLCIGYHANNSTDTVDTVLEKNVTVTHSVNLLEDKHNGKLCKLRGVAPLHLGKCNIAGWILGNPECESLSTASSWSYIVETSSSDNGTCYPGDFIDYEELREQLSSVSSFERFEIFPKTSSWPNHDSNKGVTAACPHAGAKSFYKNLIWLVKKGNSYPKLSKSYINDKGKEVLVLWGIHHPSTSADQQSLYQNADAYVFVGTSRYSKKFKPEIAIRPKVRDREGRMNYYWTLVEPGDKITFEATGNLVVPRYAFAMERNAGSGIIISDTPVHDCNTTCQTPKGAINTSLPFQNIHPITIGKCPKYVKSTKLRLATGLRNVPSIQSRGLFGAIAGFIEGGWTGMVDGWYGYHHQNEQGSGYAADLKSTQNAIDKITNKVNSVIEKMNTQFTAVGKEFNHLEKRIENLNKKVDDGFLDIWTYNAELLVLLENERTLDYHDSNVKNLYEKVRSQLKNNAKEIGNGCFEFYHKCDNTCMESVKNGTYDYPKYSEEAKLNREEIDGVKLESTRIYQILAIYSTVASSLVLAVSLGAISFWMCSNGSLQCRICI

SEQ ID NO: 9613 - protein, 566 aa, synthetic construct; identical to SEQ ID NO: 3833
  REGION 1..566: note = hemagglutinin__InfluenzaA__AFN87929

SEQ ID NO: 9614 - protein, 566 aa, synthetic construct; identical to SEQ ID NO: 3833
  REGION 1..566: note = hemagglutinin__InfluenzaA__AFN87930

SEQ ID NO: 9615 - protein, 566 aa, synthetic construct
  REGION 1..566: note = hemagglutinin__InfluenzaA__AFN87931
MKAILVVLLYTFATANADTLCIGYHANNSTDTVDTVLEKNVTVTHSVNLLEEKHNGKLCKLRGVAPLHLGKCNIAGWILGNPECESLSTASSWSYIVETSSSDNGTCYPGDFIDYEELREQLSSVSSFERFEIFPKTSSWPNHDSNKGVTAACPHAGAKSFYKNLIWLVKKGNSYPKLSKSYINDKGKEVLVLWGIHHPSTSADQQSIYQNADAYVFVGTSRYSKKFKPEIAIRPKVRDQEGRMNYYWTLVEPGDKITFEATGNLVVPRYAFTMERNAGSGIIISDTPVHDCNTTCQTPKGAINTSLPFQNIHPITIGKCPKYVKSTKLRLATGLRNVPSIQSRGLFGAIAGFIEGGWTGMVDGWYGYHHQNEQGSGYAADLKSTQNAIDKITNKVNSVIEKMNTQFTAVGKEFNHLEKRIENLNKKVDDGFLDIWTYNAELLVLLENERTLDYHDSNVKNLYEKVRSQLKNNAKEIGNGCFEFYHKCDNTCMESVKNGTYDYPKYSEEAKLNREEIDGVKLESTRIYQILAIYSTVASSLVLVVSLGAISFWMCSNGSLQCRICI

SEQ ID NO: 9616 - protein, 566 aa, synthetic construct
  REGION 1..566: note = hemagglutinin__InfluenzaA__AFN87932
MEAILVVLLYTFATANADTLCIGYHANNSTDTVDTVLEKNVTVTHSVNLLEDKHNGKLCKLRGVAPLHLGKCNIAGWILGNPECESLSTASSWSYIVETSSSDNGTCYPGDFIDYEELREQLSSVSSFERFEIFPKTSSWPNHDSNKGVTAACPHAGAKSFYKNLIWLVKKGNSYPKLSKSYINDKGKEVLVLWGIHHPSTSADQQSLYQNADAYVFVGSSRYSKKFKPEIAIRPKVRDREGRMNYYWTLVEPGDKITFEATGNLVVPRYAFAMERNAGSGIIISDTPVHDCNTTCQTPKGAINTSLPFHNIHPITIGKCPKYVKSTKLRLATGLRNVPSIQSRGLFGAIAGFIEGGWTGMVDGWYGYHHQNEQGSGYAADLKSTQNAIDEITNKVNSVIEKMNTQFTAVGKEFNHLEKRIENLNKKVDDGFLDIWTYNAELLVLLENERTLDYHDSNVKNLYEKVRSQLKNNAKEIGNGCFEFYHKCDNTCMESVKNGTYDYPKYSEEAKLNREEIDGVKLESTRIYQILAIYSTVASSLVLVVSLGAISFWMCSNGSLQCRICI

SEQ ID NO: 9617 - protein, 566 aa, synthetic construct; identical to SEQ ID NO: 3833
  REGION 1..566: note = hemagglutinin__InfluenzaA__AFN87933

SEQ ID NO: 9618 - protein, 566 aa, synthetic construct
  REGION 1..566: note = hemagglutinin__InfluenzaA__AFN87934
MKAILVVMLYTFATANADTLCIGYHANNSTDTVDTVLEKNVTVTHSVNLLEDKHNGKLCKLRGVAPLQLGKCNIAGWILGNPECESLSTASSWSYIVETSSSDNGTCYPGDFIDYEELREQLSSVSSFERFEIFPKTSSWPNHDSNKGVTAACPHAGAKGFYKNLIWLVKKGNSYPKLSKSYINDKGKEVLVLWGIHHPSTSADQQSLYQNADTYVFVGTSRYSKKFKPEIAIRPKVRDQEGRMNYYWTLVEPGDKITFEATGNLVVPRYAFAMERNAGSGIIISDTPVHDCNTTCQTPKGAINTSLPFQNIHPITIGKCPKYVKSTKLRLATGLRNVPSIQSRGLFGAIAGFIEGGWTGMVDGWYGYHHQNEQGSGYAADLKSTQNAIDKITNKVNSVIEKMNTQFTAVGKEFNHLEKRIENLNKKVDDGFLDIWTYNAELLVLLENERTLDYHDSNVKNLYEKVRSQLKNNAKEIGNGCFEFYHKCDNTCMESVKNGTYDYPKYSEEAKLNREEIDGVKLESTRIYQILAIYSTVASSLVLVVSLGAISFWMCSNGSLQCRICI

SEQ ID NO: 9619 - protein, 566 aa, synthetic construct
  REGION 1..566: note = hemagglutinin__InfluenzaA__AFN87936
MKAILVVLLYTFATANADTLCIGYHANNSTDTVDTVLEKNVTVTHSVNLLEDKHNGKLCKLRGVAPLHLGKCNIAGWILGNPECESLSTASSWSYIVETSISDNGTCYPGDFIDYEELREQLSSVSSFERFEIFPKTSSWPNHDPNKGVTAACPHAGAKSFYKNLIWLVKKGNSYPKLSTSYINDKGKEVLVLWGIHHPSTSADQQSLYQNADAYAFVGTSRYSKKFKPEIAIRPKVRDQEGRMNYYWTLVEPGDKITFEATGNLVVPRYAFAMERNAGSGIIISDTSVHDCNTTCQTPKGAINTSLPFQNVHPITIGKCPKYVKSTKLRLATGLRIVPSIQSRGLFGAIAGFIEGGWTGMVDGWYGYHHQNEQGSGYAADLKSTQNAFDKITNKVNSVIEKMNTQFTAVGKEFNHLEKRIENLNKKVDDGFLDIWTYNAELLVLLENERTLDYHDSNVKNLYEKVRSQLKNNAKEIGNGCFEFYHKCDNTCMESVKNGTYDYPKYSEEAKLNREEIDGVKLESTRIYQILAIYSTVASSLVLVVSLGAISFWMCSNGSLQCRICI

SEQ ID NO: 9620 - protein, 566 aa, synthetic construct
  REGION 1..566: note = hemagglutinin__InfluenzaA__AFN87938
MKAILVVLLYTFATANADTLCIGYHANNSTDTVDTVLEKNVTVTHSVNLLEDKHNGKLCKLRGVAPLHLGKCNIAGWILGNPECESLSTASSWSYIVETSSSDNGTCYPGDFIDYEELREQLSSVSSFERFEIFPKTSSWPNHDPNKGVTAACPHAGAKSFYKNLIWLVKKGNSYPKLSKSYINDKGKEVLVLWGIHHPSTSADQQSLYQNADAYVFVGTSRYSKKFKPEIAIRPKVRDQEGRMNYYWTLVEPGDKITFEATGNLVVPRYAFAMERNAGSGIIISDTPVHDCNTTCQTSKGAINTSLPFQNIHPITIGKCPKYVKSTKLRLATGLRNVPSIQSRGLFGAIAGFIEGGWTGMVDGWYGYHHQNEQGSGYAADLKSTQNAIDEITNKVNSVIEKMNTQFTAVGKEFNHLEKRIENLNKKVDDGFLDIWTYNAELLVLLENERTLDYHDSNVKNLYEKVRNQLKNNAKEIGNGCFEFYHKCDNTCMESVKNGTYDYPKYSEEAKLNREEIDGVKLESTRIYQILAIYSTVASSLVLVVSLGAISFWMCSNGSLQCRICI

SEQ ID NO: 9621 - protein, 566 aa, synthetic construct
  REGION 1..566: note = hemagglutinin__InfluenzaA__AFN87939
MKAILVVLLYTFATANADTLCIGYHANNSTDTVDTVLEKNVTVTHSVNLLEDKHNGKLCKLRGVAPLHLGKCNIAGWILGNPECESLSTASSWSYIVETSSSDNGTCYPGDFIDYEELREQLSSVSSFERFEIFPKTSSWPNHDPNKGVTAACPHAGAKSFYKNLIWLVKKGNSYPKLSTSYINDKGKEVLVLWGIHHPSTSADQQSLYQNADAYAFVGTSRYSKKFKPEIAIRPKVRDQEGRMNYYWTLVEPGDKITFEATGNLVVPRYAFAMERNAGSGIIISDTSVHDCNTTCQTPKGAINTSLPFQNVHPITIGKCPKYVKSTKLRLATGLRNVPSIQSRGLFGAIAGFIEGGWTGMVDGWYGYHHQNEQGSGYAADLKSTQNAIDEITNKVNSVIEKMNTQFTAVGKEFNHLEKRIENLNKKVDDGFLDIWTYNAELLVLLENERTLDYHDSNVKNLYEKVRSQLKNNAKEIGNGCFEFYHKCDNTCMESVKNGTYDYPKYSEEAKLNREEIDGVKLESTRIYQILAIYSTVASSLVLVVSLGAISFWMCSNGSLQCRICI

SEQ ID NO: 9622 - protein, 566 aa, synthetic construct
  REGION 1..566: note = hemagglutinin__InfluenzaA__AFN87941
MKAILVVLLYTFATANADTLCIGYHANNSTDTVDTVLEKNVTVTHSVNLLEDKHNGKLCKLRGVAPLHLGKCNIAGWILGNPECESLSTASSWSYIVETSSSDNGTCYPGDFIDYEELREQLSSVSSFERFEIFPKTSSWPNHDPNKGVTAACPHAGAKSFYKNLIWLVKKGNSYPKLSKSYINDKGKEVLVLWGIHHPSTSADQQSLYQNADAYVFVGTSRYSKKFKPEIAIRPKVRDQEGRMNYYWTLVEPGDKITFEATGNLVVPRYAFAMERNAGSGIIISDTPVHDCNTTCQTPKGAINTSLPFQNIHPITIGKCPKYVKSTKLRLATGLRNVPSIQSRGLFGAIAGFIEGGWTGMVDGWYGYHHQNEQGSGYAADLKSTQNAIDEITNKVNSVIEKMNTQFTAVGKEFNHLEKRIENLNKKVDDGFLDIWTYNAELLVLLENERTLDYHDSNVKNLYEKVRNQLKNNAKEIGNGCFEFYHKCDNTCMESVKNGTYDYPKYSEEAKLNREEIDGVKLESTRIYQILAIYSTVASSLVLVVSLGAISFWMCSNGSLQCRICI

SEQ ID NO: 9623 - protein, 566 aa, synthetic construct
  REGION 1..566: note = hemagglutinin__InfluenzaA__AFN87943
MKAILVVLLYTFATANADTLCIGYHANNSTDTVDTVLEKNVTVTHSVNLLEDKHNGKLCKLRGVAPLHLGKCNIAGWILGNPECESLSTASSWSYIVETSISDNGTCYPGDFIDYEELREQLSSVSSFERFEIFPKTSSWPNHDPNKGVTAACPHAGAKSFYKNLIWLVKKGNSYPKLSTSYINDKGKEVLVLWGIHHPSTSADQQSLYQNADAYAFVGTSRYSKKFKPEIAIRPKVRDQEGRMNYYWTLVEPGDKITFEATGNLVVPRYAFAMERNAGSGIIISDTSVHDCNTTCQTPKGAINTSLPFQNVHPITIGKCPKYVKSTKLRLATGLRNVPSIQSRGLFGAIAGFIEGGWTGMVDGWYGYHHQNEQGSGYAADLKSTQNAIDEITNKVNSVIEKMNTQFTAVGKEFNHLEKRIENLNKKVDDGFLDIWTYNAELLVLLENERTLDYHDSNVKNLYEKVRSQLKNNAKEIGNGCFEFYHKCDNTCMESVKNGTYDYPKYSEEAKLNREEIDGVKLESTRIYQILAIYSTVASSLVLVVSLGAISFWMCSNGSLQCRICI

SEQ ID NO: 9624 - protein, 566 aa, synthetic construct
  REGION 1..566: note = hemagglutinin__InfluenzaA__AFN87945
MKAILVVLLYTFATANADTLCIGYHANNSTDTVDTVLEKNVTVTHSVNLLEDKHDGKLCKLRGVAPLHLGKCNIAGWILGNPECESLSTASSWSYIVETSSSDNGTCYPGDFIDYEELREQLSSVSSFERFEIFPKTSSWPNHDSNKGVTAACPHAGAKSFYKNLIWLVKKGNSYPKLSQSYINDKGKEVLVLWGIHHPSTSADQQSLYQNADAYVFVGTSRYSKKFKPEIAIRPKVRDQEGRMNYYWTLVEPGDKITFEATGNLVVPRYAFAMERNAGSGIIISDTPVHDCNTTCQTPKGAINTSLPFQNIHPITIGKCPKYVKSTKLRLATGLRNVPSIQSRGLFGAIAGFIEGGWTGMVDGWYGYHHQNEQGSGYAADLKSTQNAIDKITNKVNSVIEKMNTQFTAVGKEFNHLEKRIENLNKKVDDGFLDIWTYNAELLVLLENERTLDYHDSNVKNLYEKVRSQLKNNAKEIGNGCFEFYHKCDNTCMESVKNGTYDYPKYSEEAKLNREEIDGVKLESTRIYQILAIYSTVASSLVLVVSLGAISFWMCSNGSLQCRICI

SEQ ID NO: 9625 - protein, 566 aa, synthetic construct
  REGION 1..566: note = hemagglutinin__InfluenzaA__AFN87947
MKAILVVLLYTFATANADTLCIGYHANNSTDTVDTVLEKNVTVTHSVNLLEDKHNGKLCKLRGVAPLHLGKCNIAGWILGNPECESLSTASSWSYIVETSSSDNGTCYPGDFIDYEELREQLSSVSSFERFEIFPKTSSWPNHDPNKGVTAACPHAGAKSFYKNLIWLVKKGNSYPKLSTSYINDKGKEVLVLWGIHHPSTSADQQSLYQNADAYAFVGTSRYSKKFKPEIAIRPKVRDQEGRMNYYWTLVEPGDKITFEATGNLVVPRYAFAMERNAGSGIIISDTSVHDCNTTCQTPKGAINTSLPFQNVHPITIGKCPKYVKSTKLRLATGLRNVPSIQSRGLFGAIAGFIEGGWTGMVDGWYGYHHQNEQGSGYAADLKSTQNAFDEITNKVNSVIEKMNTQFTAVGKEFNHLEKRIENLNKKVDDGFLDIWTYNAELLVLLENERTLDYHDSNVKNLYEKVRSQLKNNAKEIGNGCFEFYHKCDNTCMESVKNGTYDYPKYSEEAKLNREEIDGVKLESTRIYQILAIYSTVASSLVLVVSLGAISFWMCSNGSLQCRICI

SEQ ID NO: 9626 - protein, 566 aa, synthetic construct
  REGION 1..566: note = hemagglutinin__InfluenzaA__AFN87949
MKAILVVMLYTFATANADTLCIGYHANNSTDTVDTVLEKNVTVTHSVNLLEDKHNGKLCKLRGVAPLHLGKCNIAGWILGNPECESLSTASSWSYIVETSSSDNGTCYPGDFIDYEELREQLSSVSSFERFEIFPKTSSWPNHDSNKGVTAACPHAGAKGFYKNLIWLVKKGNSYPKLSKSYINDKGKEVLVLWGIHHPSTSADQQSLYQNADTYVFVGTSRYSKKFKPEIAIRPKVRDQEGRMNYYWTLVEPGDKITFEATGNLVVPRYAFAMERNAGSGIIISDTPVHDCNTTCQTPKGAINTSLPFQNIHPITIGKCPKYVKSTKLRLATGLRNVPSIQSRGLFGAIAGFIEGGWTGMVDGWYGYHHQNEQGSGYAADLKSTQNAIDKITNKVNSVIEKMNTQFTAVGKEFNHLEKRIENLNKKVDDGFLDIWTYNAELLVLLENERTLDYHDSNVKNLYEKVRSQLKNNAKEIGNGCFEFYHKCDNTCMESVKNGTYDYPKYSEEAKLNREEIDGVKLESTRIYQILAIYSTVASSLVLVVSLGAISFWMCSNGSLQCRICI

SEQ ID NO: 9627 - protein, 566 aa, synthetic construct; identical to SEQ ID NO: 6940
  REGION 1..566: note = hemagglutinin__InfluenzaA__AFN87951

SEQ ID NO: 9628 - protein, 566 aa, synthetic construct
  REGION 1..566: note = hemagglutinin__InfluenzaA__AFN87953
MKAILVVLLYTFATANADTLCIGYHANNSTDTVDTVLEKNVTVTHSANLLEDKHNGKLCKLRGVAPLHLGKCNIAGWILGNPECESLSTASSWSYIVETSSSDNGTCYPGDFIDYEELREQLSSVSSFERFEIFPKTSSWPNHDLNKGVTAACPHAGAKSFYKNLIWLVKKGNSYPKLSKSYINDKGKEVLVLWGIHHPSTSADQQSLYQNADAYVFVGTSRYSKKFKPEIAIRPKVRDQEGRMNYYWTLVEPGDKITFEATGNLVVPRYAFAMERNAGSGIIISDTPVHDCNTTCQTPKGAINTSLPFQNIHPITIGKCPKYVKSTKLRLATGLRNVPSIQSRGLFGAIAGFIEGGWTGMVDGWYGYHHQNEQGSGYAADLKSTQNAIDEITNKVNSVIEKMNTQFTAVGKEFNHLEKRIENLNKKVDDGFLDIWTYNAELLVLLENERTLDYHDSNVKNLYEKVRSQLKNNAKEIGNGCFEFYHKCDNTCMESVKNGTYDYPKYSEEAKLNREEIDGVKLESTRIYQILAIYSTVASSLVLVVSLGAISFWMCSNGSLQCRICI

SEQ ID NO: 9629 - protein, 566 aa, synthetic construct
  REGION 1..566: note = hemagglutinin__InfluenzaA__AFN87955
MKAILVVMLYTFATANADTLCIGYHANNSTDTVDTVLEKNVTVTHSVNLLEDKHNGKLCKLRGVAPLHLGKCNIAGWILGNPECESLSTASSWSYIVETSSSDNGTCYPGDFIDYEELREQLSSVSSFERFEIFPKTSSWPNHDSNKGVTAACPHAGAKGFYKNLIWLVKKGNSYPKLSKSYINDKGKEVLVLWGIHHPSTTADQQSLYQNADTYVFVGTSRYSKKFKPEIAIRPKVRDQEGRMNYYWTLVEPGDKITFEATGNLVVPRYAFAMERNAGSGIIISDTPVHDCNTTCQTPKGAINTSLPFQNIHPITIGKCPKYVKSTKLRLATGLRNVPSIQSRGLFGAIAGFIEGGWTGMVDGWYGYHHQNEQGSGYAADLKSTQNAIDEITNKVNSVIEKMNTQFTAVGKEFNHLEKRIENLNKKVDDGFLDIWTYNAELLVLLENERTLDYHDSNVKNLYEKVRSQLKNNAKEIGNGCFEFYHKCDNTCMESVKNGTYDYPKYSEEAKLNREEIDGVKLESTRIYQILAIYSTVASSLVLVVSLGAISFWMCSNGSLQCRICI

SEQ ID NO: 9630 - protein, 566 aa, synthetic construct
  REGION 1..566: note = hemagglutinin__InfluenzaA__AFN87957
MKAILVVLLYTFATANADTLCIGYHANNSTDTVDTVLEKNVTVTHSVNLLEDKHNGKLCKLRGVAPLHLGKCNIAGWILGNPECESLSTASSWSYIVETSISDNGTCYPGDFIDYEELREQLSSVSSFERFEIFPKTSSWPNHDPNKGVTAACPHAGAKSFYKNLIWLVKKGNSYPKLSTSYINDKGKEVLVLWGIHHPSTSADQQSLYQNADAYAFVGTSRYSKKFKPEIAIRPKVRDQEGRMNYYWTLVEPGDKITFEATGNLVVPRYAFAMERNAGSGIIISDTSVHDCNTTCQTPKGAINTSLPFQNVHPITIGKCPKYVKSTKLRLATGLRNVPSIQSRGLFGAIAGFIEGGWTGMVDGWYGYHHQNEQGSGYAADLKSTQNAFDEITNKVNSVIEKMNTQFTAVGKEFNHLEKRIENLNKKVDDGFLDIWTYNAELLVLLENERTLDYHDSNVKNLYEKVRSQLKNNAKEIGNGCFEFYHKCDNKCMESVKNGTYDYPKYSEEAKLNREEIDGVKLESTRIYQILAIYSTVASSLVLVVSLGAISFWMCSNGSLQCRICI

SEQ ID NO: 9631 - protein, 566 aa, synthetic construct
  REGION 1..566: note = hemagglutinin__InfluenzaA__AFN87959
MKAILVVMLYTFATANADTLCIGYHANNSTDTVDTVLEKNVTVTHSVNLLEDKHNGKLCKLRGVAPLHLGKCNIAGWILGNPECESLSTASSWSYIVETSSSDNGTCYPGDFIDYEELREQLSSVSSFERFEIFPKTSSWPNHDSNKGVTAACPHAGAKGFYKNLIWLVKKGNSYPKLSKSYINDKGKEVLVLWGIHHPSTSADQQSLYQNADTYVFVGTSRYSKKFKPEIAIRPKVRDQEGRMNYYWTLVEPGDKITFEATGNLVVPRYAFAMERNAGSGIIISDTPVHDCNTTCQTPKGAINTSLPFQNIHPITIGKCPKYVKSTKLRLATGLRNVPSIQSRGLFGAIAGFIEGGWTGMVDGWYGYHHQNEQGSGYAADLKSTQNAIDKITNKVNSVIEKMNTQFTAVGKEFNHLEKRIENLNKKVDDGFLDIWTYNAELLVLLENERTLDYHDSNVKNLYEKVRNQLKNNAKEIGNGCFEFYHKCDNTCMESVKNGTYDYPKYSEEAKLNREEIDGVKLESTRIYQILAIYSTVASSLVLVVSLGAISFWMCSNGSLQCRICI

SEQ ID NO: 9632 - protein, 566 aa, synthetic construct; identical to SEQ ID NO: 3154
  REGION 1..566: note = hemagglutinin__InfluenzaA__AFN87961

SEQ ID NO: 9633 - protein, 565 aa, synthetic construct
  REGION 1..565: note = hemagglutinin__InfluenzaA__AFO64802
MKAKLLVLLCTFTATYADTICIGYHANNSTDTVDTVLEKNVTVTHSVNLLEDSHNGKLCLLKGIAPLQLGNCSVAGWILGNPECELLISKESWSYIVETPNPENGTCYPGYFADYEELREQLSSVSSFERFEIFPKESSWPNHTVTGVSASCSHNGKSSFYRNLLWLTVKNGLYPNLSKSYVNNKGKEVLVLWGVHHPSNIRDQRAIYHTENAYVSVVSSHYSRRFTPEIAKRPKVRDQEGRINYYWTLLEPGDTIIFEANGNLIAPWYAFALSRGFGSGIITSNAPMDECDAKCQTPQGAINSSLPFQNVHPVTIGECPKYVRSAKLRMVTGLRNIPSIQSRGLFGAIAGFIEGGWTGMIDGWYGYHHQNEQGSGYAADQKSTQNAINGITNKVNSVIEKMNTQFTAVGKEFNKLERRMENLNKKVDDGFLDIWTYNAELLVLLENERTLDFHDSNVKNLYEKVKSQLKNNAKEIGNGCFEFYHKCNNECMESVKNGTYDYPKYSEESKLNREKIDGVKLESMGVYQILAIYSTVASSLVLLVSLGAISFWMCSNGSLQCRICI

SEQ ID NO: 9634 - protein, 566 aa, synthetic construct
  REGION 1..566: note = hemagglutinin__InfluenzaA__AFO64813
MKAKLLVLLCAFTATDADTICIGYHANNSTDTVDTVLEKNVTVTHSVNLLEDSHNGKLCRLKGIAPLQLGNCSIAGWILGNPECESLFSKKSWSYIAETPNSENGTCYPGYFADYEELREQLSSVSSFERFEIFPKESSWPNHTVTKGVTASCSHKGRSSFYRNLLWLTEKNGSYPNLSKSYVNNKEKEVLVLWGVHHPSNIRDQRAIYHTENAYVSVVSSHYNRRFTPEIAKRPKVRDQEGRINYYWTLLEPGDTIIFEANGNLIAPWYAFALSRGFGSGIITSNASMDECDAKCQTPQGAINSSLPFQNVHPVTIGECPKYVRSTKLRMVTGLRNIPSIQSRGLFGAIAGFIEGGWTGMIDGWYGYHHQNEQGSGYAADQKSTQNAINGITNKVNSVIEKMNTQFTAVGKEFNKLERRMENLNKKVDDGFLDIWTYNAELLVLLENERTLDFHDSNVKNLYEKVKSQLKNNAKEIGNGCFEFYHKCNNECMESVKNGTYDYPKYSEESKLNREKIDGVKLESMGVYQILAIYSTVASSLVLLVSLGAISFWMCSNGSLQCRICI

SEQ ID NO: 9635 - protein, 566 aa, synthetic construct
  REGION 1..566: note = hemagglutinin__InfluenzaA__AFO64824
MKAILLVLLCAFTATDADTICIGYHANNSTDTVDTVLEKNVTVTHSVNLLEDSHNGKLCRLKGIAPLQLGNCSIAGWILGNPECESLFSKKSWSYIAETPNSENGTCYPGYFADYEELREQLSSVSSFERFEIFPKESSWPNHTVTKGVTASCSHKGRSSFYRNLLWLTEKNGLYPNLSKSYVNNKEKEVLVLWGVHHPSNIGDQRAIYHTENAYVSVVSSHYNRRFTPEIAKRPKVRGQEGRINYYWTLLEPGDTIIFEANGNLIAPWYAFALSRGFGSGIITSNASMDECDAKCQTPQGAINSSLPFQNVHPVTIGECPKYVRSTKLKMVTGLRNIPSIQSRGLFGAIAGFIEGGWTGMIDGWYGYHHQNEQGSGYAADQKSTQNAINGITNKVNSVIEKMNTQFTAVGKEFNKLEKRMENLNKKVDDGFLDIWTYNAELLVLLENERTLDFHDSNVKNLYEKVKNQLKNNAKEIGNGCFEFYHKCNNECMESVKNGTYDYPKYSEESKLNREKIDGVKLESMGVYQILAIYSTVASSLVLLVSLGAISFWMCSNGSLQCRICI

SEQ ID NO: 9636 - protein, 566 aa, synthetic construct
  REGION 1..566: note = hemagglutinin__InfluenzaA__AFO64835
MKAKLLVLLCAFTATYADTICIGYHANNSTDTVDTVLEKNVTVTHSVNLLEDSHNGKLCRLKGIAPLQLGNCSVAGWILGNPECESLFSKESWSYIAETPDPENGTCYPGYFADYEELREQLSSVSSFERFEIFPKESSWPNHTVTKGVTASCSHNGKSSFYRNLLWLTKKNGLYPNLSKSYVNNKEKEVLVLWGVHHPSNIGEQRAIYHTENAYVSVVSSHYSRRFTPEIAKRPKVRDQEGRINYYWTLLEPGDTIIFEANGNLIAPWYAFALSRGFGSGIITSNASMDECDAKCQTPQGAINSSLPFQNVHPVTIGECPKYVRSTKLRMVTGLRNIPSIQSRGLFGAIAGFIEGGWTGMIDGWYGYHHQNEQGSGYAADQKSTQNAINGITNKVNSVIEKMNTQFTAVGKEFNKLERRMENLNKKVDDGFLDIWTYNAELLVLLENERTLDFHDSNVKNLYEKVKNQLKNNAKEIGNGCFEFYHKCNNECMESVKNGTYDYPKYSEESKLNREKIDGVKLESMGVYQILAIYSTVASSLVLLVSLGAISFWMCSNGSLQCRICI

SEQ ID NO: 9637 - protein, 566 aa, synthetic construct
  REGION 1..566: note = hemagglutinin__InfluenzaA__AFO64846
MKAKLLVLLCAFTATYADTICIGYHANNSTDTVDTVLEKNVTVTHSVNLLEDSHNGKLCRLKGIAPLQLGNCSVAGWILGNPECESLFTKESWSYIAETPNPENGTCYPGYFADYEELREQLSSVSSFERFEIFPKESSWPNHTVTKGVTASCSHNGKSSFYRNLLWLTEKNGLYPNLSKSYVNNKEKEVLVLWGVHHPSNMGDQRAIYHTENAYVSVVSSHYSRRFTPEIAKRPKVRGQEGRINYYWTLLEPGDTIIFEANGNLIAPRYAFALSRGFGSGIITSNASMDECDAKCQTPQGAINSSLPFQNVHPVTIGECPKYVRSTKLRMVTGLRNIPSIQSRGLFGAIAGFIEGGWTGMIDGWYGYHHQNEQGSGYAADQKSTQNAINGITNKVNSVIEKMNTQFTAVGKEFNKLERRMENLNKKVDDGFLDIWTYNAELLVLLENERTLDFHDSNVKNLYEKVKSQLKNNAKEIGNGCFEFYHKCNNECMESVKNGTYDYPKYSEESKLNREKIDGVKLESMGVYQILAIYSTVASSLVLLVSLGAISFWMCSNGSLQCRICI

SEQ ID NO: 9638 - protein, 566 aa, synthetic construct
  REGION 1..566: note = hemagglutinin__InfluenzaA__AFO64857
MKAKLLVLLCAFTATYADTICIGYHANNSTDTVDTVLEKNVTVTHSVNLLEDSHNGKLCRLKGTAPLQLGNCSVAGWILGNPECESLFSKESWSYIAETPNPENGTCYPGYFADYEELREQLSSVSSFERFEIFPKESSWPNHTVTKGVTASCSHNGKSSFYKNLLWLTEKNGLYPNLSKSYVNNKEKEVLVLWGVHHPSNIGDQRAIYHTENAYVSVVSSHYSRRFTPEIAKRPKVRGQEGRINYYWTLLEPGDTIIFEANGNLIAPWYAFALSRGFGSGIITSTASMGECDAKCQTPQGAINSSLPFQNVHPVTIGECPKYVRSTKLRMVTGLRNIPSIQSRGLFGAIAGFIEGGWTGMIDGWYGYHHQNEQGSGYAADQKSTQNAIDGITNKVNSVIEKMNTQFTAVGKEFNKLERRMENLNKKVDDGFLDIWTYNAELLVLLENGRTLDFHDSNVKNLYEKVKNQLKNNAKEIGNGCFEFYHKCNNECMESVKNGTYDYPKYSEESKLNREKIDGVKLESMGVYQILAIYSTVASSLVLLVSLGAISFWMCSNGSLQCRICI

SEQ ID NO: 9639 - protein, 566 aa, synthetic construct
  REGION 1..566: note = hemagglutinin__InfluenzaA__AFO64868
MKVKLLVLLCAFTATYADTICIGYHANNSTDTVDTVLEKNVTVTHSVNLLEDSHNGKLCRLKGTAPLQLGNCSVAGWILGNPECESLFSKESWSYIAETPNPENGTCYPGCFADYEELREQLSSVSSFERFEIFPKESSWPNHTVTKGVTASCSHNGKSSFYKNLLWLTEKNGLYPNLSKSYVNNKEKEVLVLWGVHHPSNIRDQRAIYHTENAYVSVVSSHYSRRFTPEIAKRPKVRGQEGRINYYWTLLEPGDTIIFEANGNLIAPWYAFALSRGFGSGIITSNASMGECDAKCQTPQGAINSSLPFQNVHPVTIGECPKYVRSTKLRMVTGLRNIPSIQSRGLFGAIAGFIEGGWTGMIDGWYGYHHQNEQGSGYAADQKSTQNAIDGITNKVNSVIEKMNTQFTAVGKEFNKLERRMENLNKKVDDGFLDIWTYNAELLVLLENERTLDFHDSNVKNLYEKVKNQLKNNAKEIGNGCFEFYHKCNNECMESVKNGTYDYPKYSEESKLNREKIDGVKLESMGVYQILAIYSTVASSLVLLVSLGAISFWMCSNGSLQCRICI

SEQ ID NO: 9640 - protein, 565 aa, synthetic construct
  REGION 1..565: note = hemagglutinin__InfluenzaA__AFO64879
MKAKLLVLLCTFTATYADTICIGYHANNSTDTVDTVLEKNVTVTHSVNLLEDSHNGKLCLLKGIAPLQLGNCSVAGWILGNPECESLIFKESWSYIVETPNPENGTCYPGYFADYEELREQLSSVSSFERFEIFPKESSWPNHTVTGVSASCSHNGKSSFYRNLLWLTEKNGLYPNLSKSYVNNKEKEVLVLWGVHHPSNIRDQRAIYHTENAYVSVVSSHYSRRFTPEIAKRPKVRGQEGRINYYWTLLEPGDTIIFEANGNLIAPWYAFALSRGFGSGIITSNAPMDECDAKCQTPQGAINSSLPFQNVHPVTIGECPKYVRSAKLRMVTGLRNIPSIQSRGLFGAIAGFIEGGWTGMIDGWYGYHHQNEQGSGYAADQKSTQNAINGITNKVNSVIEKMNTQFTAVGKEFNKLERRMENLNKKVDDGFLDIWTYNAELLVLLENERTLDFHDSNVKNLYEKVKSQLKNNAKEIGNGCFEFYHKCNNECMESVKNGTYDYPKYSEESKLNREKIDGVKLESMGVYQILAIYSTVASSLVLLVSLGAISFWMCSNGSLQCRICI

SEQ ID NO: 9641 - protein, 565 aa, synthetic construct
  REGION 1..565: note = hemagglutinin__InfluenzaA__AFO64890
MKAKLLVLLCTFTATYADTICIGYHANNSTDTVDTVLEKNVTVTHSVNLLEDSHNGKLCLLKGIAPLQLGNCSVAGWILGNPECESLISKESWSYIVETPNPENGTCYPGYFADYEELREQLSSVSSFERFEIFPKESSWPNHTVTGVSASCSHNGKSSFYRNLLWLTEKNGLYPNLSKSYVNNKEKEVLVLWGVHHPSNIRDQRAIYHTENAYVSVVSSHYSRRFTPEIAKRPKVRGQEGRINYYWTLLEPGDTIIFEANGNLIAPWYAFALSRGFGSGIITSNAPMDECDVKCQTPQGAINSSLPFQNVHPVTIGECPKYVRSAKLRMVTGLRNIPSIQSRGLFGAIAGFIEGGWTGMIDGWYGYHHQNEQGSGYAADQKSTQNAINGITNKVNSVIEKMNTQFTAVGKEFNKLERRMENLNKKVDDGFLDIWTYNAELLVLLENERTLDFHDSNVKNLYEKVKSQLKNNAKEIGNGCFEFYHKCNNECMESVKNGTYDYPKYSEESKLNREKIDGVKLESMGVYQILAIYSTVASSLVLLVSLGAISFWMCSNGSLQCRICI

SEQ ID NO: 9642 - protein, 566 aa, synthetic construct
  REGION 1..566: note = hemagglutinin__InfluenzaA__AFO64901
MKAKLLVLLCAFTATYADTICIGYHANNSTDTVDTVLEKNVTVTHSVNLLEDSHNGKLCRLKGTAPLQLGNCSIAGWILGNPECESLFSKESWSYIAETPNPENGTCYPGYFADYEELREQLSSVSSFERFEIFPKESSWPNHTVTKGVTASCSHNGKSSFYKNLLWLTEKNGLYPNLSKSYVNNKKKEVLVLWGVHHPSNIGDQRAIYHTENAYVSVVSSHYSRRFTPEIAKRPKVRNQEGRINYYWTLLEPGDTIIFEANGNLIAPWYAFALSRGFESGIITSNASMGECDAKCQTPQGAINSSLPFQNVHPVTIGECPKYVRSTKLRMVTGLRNIPSIQSRGLFGAIAGFIEGGWTGMIDGWYGYHHQNEQGSGYAADQKSTQNAINGITNKVNSIIEKMNTQFTAVGKEFNKLERRMENLNKKVDDGFLDIWTYNAELLVLLENERTLDFHDSNVKNLYEKVKNQLKNNAKEIGNGCFEFYHKCNNECMESVKNGTYDYPKYSKESKLNREKIDGVKLESMGVYQILAIYSTVASSLVLLVSLGAISFWMCSNGSLQCRICI

SEQ ID NO: 9643 - protein, 565 aa, synthetic construct
  REGION 1..565: note = hemagglutinin__InfluenzaA__AFO65016
MKAKLLVLLCTFTATYADTICIGYHANNSTDTVDTVLEKNVTVTHSVNLLEDSHNGKLCLLKGIAPLQLGNCSVAGWILGNPECESLISKESWSYIVETPNPENGTCYPGYFADYEELREQLSSVSSFERFEIFPKESSWPNHTVTGVSASCSHNGKSSFYRNLLWLTKKNGLYPNLSKSYVNNKEKEVLVLWGVHHPSNIGDQRTIYHTENAYVSVVSSHYSRRFTPEIAKRPKVRDQEGRINYYWTLLEPGDTIIFEANGNLIAPWYAFALSRGFGSGIITSNAPMDECDAKCQTPQGAINSSLPFQNVHPITIGECPKYVRSAKLRMVTGLRNIPSIQSRGLFGAIAGFIEGGWTGMIDGWYGYHHQNEQGSGYAADQKSTQNAINGITNKVNSVIEKMNTQFTAVGKEFNNLERRMENLNKKVDDGFLDIWTYNAELLVLLENERTLDFHDSNVKNLYEKVKSQLKNNAKEIGNGCFEFYHKCNNECMESVKNGTYDYPKYSEESKLNREKIDGVKLESMGVYQILAIYSTVASSLVLLVSLGAISFWMCSNGSLQCRICI

SEQ ID NO: 9644 - protein, 565 aa, synthetic construct; identical to SEQ ID NO: 2115
  REGION 1..565: note = hemagglutinin__InfluenzaA__AFO65027

SEQ ID NO: 9645 - protein, 565 aa, synthetic construct
  REGION 1..565: note = hemagglutinin__InfluenzaA__AFO65038
MKAKLLVLLCTFTATYADTICIGYHANNSTDTVDTVLEKNVTVTHSVNLLEDSHNGKLCLLKGIAPLQLGNCSVAGWILGNPECELLISKESWSYIVETPNPENGTCYPGYFADYEELREQLSSVSSFERFEIFPKESSWPNHTVTGVSASCSHNGKSSFYRNLLWLTGKNGLYPNLSMSYVNNKEKEVLVLWGVHHPPNIGNQRALYHTENAYVSVVSSHYSRRFTPEIAKRPKVRDQEGRINYYWTLLEPGDTIIFEANGNLIAPWYAFALSRGFGSGIITSNAPMDECDAKCQTPQGAINSSLPFQNVHPVTIGECPKYVRSAKLRMVTGLRNIPSIQSRGLFGAIAGFIEGGWTGMVDGWYGYHHQNEQGSGYAADQKSTQNAINGITNKVNSVIEKMNTQFTAVGKEFNKLERRMENLNKKVDDGFLDIWTYNAELLVLLENERTLDFHDSNVKNLYEKVKSQLKNNAKEIGNGCFEFYHKCNNECMESVKNGTYDYPKYSEESKLNREKIDGVKLESMGVYQILAIYSTVASSLVLLVSLGAISFWMCSNGSLQCRICI

SEQ ID NO: 9646 - protein, 565 aa, synthetic construct
  REGION 1..565: note = hemagglutinin__InfluenzaA__AFO66136
MKVKLLVLLCTFTATYADTICIGYHANNSTDTVDTVLEKNVTVTHSVNLLEDSHNGKLCLLKGIAPLQLGNCSVAGWILGNPECELLISKESWSYIVETPNPENGTCYPGYFADYEELREQLSSVSSFERFEIFPKESSWPNHTVTGVSASCSHNGKSSFYRNLLWLTGKNGLYPNLSKSYANNKEKEVLVLWGVHHPPNIGNQRALYHTENAYVSVVSSHYSRRFTPEIAKRPKVRDQEGRINYYWTLLEPGDTIIFEANGNLIAPRYAFALSRGFGSGIITSNAPMDECDAKCQTPQGAINSSLPFQNVHPVTIGECPKYVRSAKLRMVTGLRNIPSIQSRGLFGAIAGFIEGGWTGMVDGWYGYHHQNEQGSGYAADQKSTQNAINGITNKVNSVIEKMNTQFTAVGKEFNKLERRMENLNKKVDDGFLDIWTYNAELLVLLENERTLDFHDSNVKNLYEKVKSQLKNNAKEIGNGCFEFYHKCNNECMESVKNGTYDYPKYSEESKLNREKIDGVKLESMGVYQILAIYSTVASSLVLLVSLGAISFWMCSNGSLQCRICI

SEQ ID NO: 9647 - protein, 566 aa, synthetic construct
  REGION 1..566: note = hemagglutinin__InfluenzaA__AFO66147
MKAKLLVLLCAFTTTYADTICIGYHANNSTDTVDTVLEKNVTVTHSVNLLEDSHNGKLCRLKGTAPLQLGNCSIAGWILGNPECESLFSKESWSYIAETPNPKNGTCYPGYFADYEELREQLSSVSSFERFEIFPKDSSWPNHTVTKGVTASCSHNGKSSFYKNLLWLTGKNGLYPNLSKSYVNKKGKEVLVLWGVHHPSNMGDQRAIYHKENAYVSVLSSHYSRRFTPEIAKRPKVRDQEGRINYYWTLLEPGDTIIFEANGNLIAPWYAFALSRGFGSGIIISNASMGECDAKCQTPQGAINSSLPFQNVHPVTIGECPKYVRSTKLRMVTGLRNVPSIQSRGLFGAIAGFIEGGWTGMIDGWYGYHHQNEQGSGYAADQKSTQNAINGITNKVNSIIEKMNTQFTAVGKEFNKLERRMENLNKKVDDGFLDIWTYNAELLVLLENERTLDFHDSNVKNLYEKVKNQLKNNAKEIGNGCFEFYHKCNNECMESVKNGTYDYPKYSKESKLNREKIDGVKLESMGVYQILAIYSTVASSLVLLVSLGAISFWMCSNGSLQCRICI

SEQ ID NO: 9648 - protein, 565 aa, synthetic construct
  REGION 1..565: note = hemagglutinin__InfluenzaA__AFO66158
MKAKLLVLLCTFTATYADTICIGYHANNSTDTVDTVLEKNVTVTHSVNLLEDSHNGKLCLLKGIAPLQLGNCSVAGWILGNPECELLISKGSWSYIVETPNPENGTCYPGYFADYEELREQLSSVSSFERFEIFPKGSSWPNHTVTGVSASCSHNGKSSFYRNLLWLTGKNGLYPNLSMSYVNNKEKEVLVLWGVHHPPNIGNQRALYHTENAYVSVVSSHYSRRFTPEIAKRPKVRDQEGRINYYWTLLEPGDTIIFEANGNLIAPWYAFALSRGFGSGIITSNAPMGECDAKCQTPQGAINSSLPFQNVHPVTIGECPKYVRSAKLRMVTGLRNIPSIQSRGLFGAIAGFIEGGWTGMVDGWYGYHHQNEQGSGYAADQKSTQNAINGITNKVNSVIEKMNTQFTAVGKEFNKLERRMENLNKKVDDGFLDIWTYNAELLVLLENERTLDFHDSNVKNLYEKVKSQLKNNAKEIGNGCFEFYHKCNNECMESVKNGTYDYPKYSEESKLNREKIDGVKLESMGVYQILAIYSTVASSLVLLVSLGAISFWMCSNGSLQCRICI

SEQ ID NO: 9649 - protein, 565 aa, synthetic construct
  REGION 1..565: note = hemagglutinin__InfluenzaA__AFO66169
MKVKLLVLLCTFTATYADTICIGYHANNSTDTVDTVLEKNVTVTHSVNLLEDSHNGKLCLLKGIAPLQLGNCSVAGWILGNPECELLISKESWSYIVETSNPENGTCYPGYFTDYEELREQLSSVSSFERFEIFPKESSWPNHTVTGVSASCSHNGKSSFYKNLLWLTGKNGLYPNLSKSYANNKEKEVLVLWGVHHPPNIGDQRALYHTENAYVSVVSSHYSRRFTPEIAKRPKVRDQEGRINYYWTLLEPGDTIIFEANGNLIAPRYAFALSRGFGSGIITSNAPMDECDAKCQTPHGAINSSLPFQNVHPVTIGECPKYVRSAKLRMVTGLRNIPSIQSRGLFGAIAGFIEGGWTGMVDGWYGYHHQNEQGSGYAADQKSTQNAINGITNKVNSVIEKMNTQFTAVGKEFNKLERRMENLNKKVDDGFIDIWTYNAELLVLLENERTLDFHDSNVKNLYEKVKSQLKNNAKEIGNGCFEFYHKCNDECMESVKNGTYDYPKYSEESKLNREKIDGVKLESMGVYQILAIYSTVASSLVLLVSLGAISFWMCSNGSLQCRICI

SEQ ID NO: 9650 - protein, 565 aa, synthetic construct
  REGION 1..565: note = hemagglutinin__InfluenzaA__AFO66180
MKAKLLVLLCTFTATYADTICIGYHANNSTDTVDTVLEKNVTVTHSVNLLEDSHNGKLCLLKGIAPLQLGNCSVAGWILGNPECELLISKESWSYIVETPNPENGTCYPGYFADYEELREQLSSVSSFERFEIFPKGSSWPNHTVTGVSASCSHNGKSSFYRNLLWLTGKNGLYPNLSMSYVNNKEKEVLVLWGVHHPPNIGDQRALYHTENAYVSVVSSHYSRRFTPEIAKRPKVRNQEGRINYYWTLLEPGDTIIFEANGNLIAPWYAFALSRGFGSGIITSNAPMGECDAKCQTPQGAINSSLPFQNVHPVTIGECPKYVRSAKLRMVTGLRNIPSIQSRGLFGAIAGFIEGGWTGMVDGWYGYHHQNEQGSGYAADQKSTQNAINGITNKVNSVIEKMNTQFTAVGKEFNKLERRMENLNKKVDDGFLDIWTYNAELLVLLENERTLDFHDSNVKNLYEKVKSQLKNNAKEIGNGCFEFYHKCNNECMESVKNGTYDYPKYSEESKLNREKIDGVKLESMGVYQILAIYSTVASSLVLLVSLGAISFWMCSNGSLQCRICI

SEQ ID NO: 9651 - protein, 565 aa, synthetic construct
  REGION 1..565: note = hemagglutinin__InfluenzaA__AFO66191
MKAKLLVLLCTFTATYADTICIGYHANNSTDTVDTVLEKNVTVTHSVNLLEDSHNGKLCLLKGIAPLQLGNCSVAGWILGNPECELLISKESWSYIVETPNPENGTCYPGYFADYEELREQLSSVSSFERFEIFPKGSSWPNHTVTGVSASCSHNGKSSFYRNLLWLTGKNGLYPNLSMSYVNNKEKEVLVLWGVHHPPNIGNQRALYHTENAYVSVVSSHYSRRFTPEIAKRPKVRDQEGRINYYWTLLEPGDTIIFEANGNLIAPWYAFALSRGFGSGIITSNAPMDECDAKCQTPQGAINSSLPFQNVHPVTIGECPKYVRSAKLRMVTGLRNIPSIQSRGLFGAIAGFIEGGWTGMVDGWYGYHHQNEQGSGYAADQKSTQNAINGITNKVNSVIEKMNTQFTAVGKEFNKLERRMENLNKKVDDGFLDIWTYNAELLVLLENERTLDFHDSNVKNLYEKVKSQLKNNAKEIGNGCFEFYHKCNNECMESVKNGTYDYPKYSEESKLNREKIDGVKLESMGVYQILAIYSTVASSLVLLVSLGAISFWMCSNGSLQCRICI

SEQ ID NO: 9652 - protein, 565 aa, synthetic construct; identical to SEQ ID NO: 512
  REGION 1..565: note = hemagglutinin__InfluenzaA__AFO66202

SEQ ID NO: 9653 - protein, 565 aa, synthetic construct
  REGION 1..565: note = hemagglutinin__InfluenzaA__AFO66213
MKVKLLVLLCTFTATYADTICIGYHANNSTDTVDTVLEKNVTVTHSVNLLEDSHNGKLCLLKGIAPLQLGNCSVAGWILGNPECELLISKESWSYIVETPNPENGTCYPGYFADYEELREQLSSVSSFERFEIFPKESSWPNHTVTGVSASCSHNGKSSFYRNLLWLTGKNGLYPNLSKSYANNKKKEVLVLWGVHHPPNIGNQRALYHTENAYVSVVSSHYSRRFTPEIAKRPKVRDQEGRINYYWTLLEPGDTIIFEANGNLIAPRYAFALSRGFGSGIITSNAPMDECDAKCQTPQGAINSSLPFQNVHPVTIGECPKYVRSAKLRMVTGLRNIPSIQSRGLFGAIAGFIEGGWTGMVDGWYGYHHQNEQGSGYAADQKSTQNAINGITNKVNSVIEKMNTQFTAVGKEFNKLERRMENLNKKVDDGFLDIWTYNAELLVLLENERTLDFHDSNVKNLYEKVKSQLKNNAKEIGNGCFEFYHKCNDECMESVKNGTYDYPKYSEESKLNREKIDGVKLESMGVYQILAIYSTVASSLVLLVSLGAISFWMCSNGSLQCRICI

SEQ ID NO: 9654 - protein, 565 aa, synthetic construct
  REGION 1..565: note = hemagglutinin__InfluenzaA__AFO66224
MKVKLLVLLCTFTATYADTICIGYHANNSTDTVDTVLEKNVTVTHSVNLLEDSHNGKLCLLKGIAPLQLGNCSVAGWILGNPECELLISKESWSYIVETPNPENGTCYPGYFADYEELREQLSSVSSFERFEIFPKESSWPNHTVTGVSASCSHNGKSSFYRNLLWLTGKNGLYPNLSKSYANNKEKEVLVLWGVHHPPNIGNQRALYHTENAYVSVVSSHYSRRFTPEIAKRPKVRDQEGRINYYWTLLEPGDTIIFEANGNLIAPRYAFALSRGFGSGIITSNAPMDECDAKCQTPQGAINSSLPFQNVHPVTIGECPKYVRSAKLRMVTGLRNIPSIQSRGLFGAIAGFIEGGWTGMVDGWYGYHHQNEQGSGYAADQKSTQNAINGITNKVNSVIEKMNTQFTAVGKEFNKLERRMENLNKKVDDGFLDIWTYNAELLVLLENERTLDFHDSNVKNLYEKVKSQLKNNAKEIGNGCFEFYHKCNDECMESVKNGTYDYPKYSEESKLNREKIDGVKLESMGVYQILAIYSTVASSLVLLVSLGAISFWMCSNGSLQCRICI

SEQ ID NO: 9655 - protein, 565 aa, synthetic construct
  REGION 1..565: note = hemagglutinin__InfluenzaA__AFO66235
MKVKLLVLLCTFTATYADTICIGYHANNSTDTVDTVLEKNVTVTHSVNLLEDSHNGKLCLLKGIAPLQLGNCSVAGWILGNPECELLISKESWSYIVEKPNPENGTCYPGHFADYEELREQLSSVSSFERFEIFPKESSWPNHTVTGVSASCSHNGKSSFYKNLLWLTGKNGLYPNLSKSYANNKEKEVLVLWGVHHPPNIGVQRALYHTENAYVSVVSSHYSRKFTPEIAKRPKVRDQEGRINYYWTLLEPGDTIIFEANGNLIAPRYAFALSRGFGSGIINSNAPMDECDAKCQTPQGAINSSLPFQNVHPVTIGECPKYVRSAKLRMVTGLRNIPSIQSRGLFGAIAGFIEGGWTGMVDGWYGYHHQNEQGSGYAADQKSTQNAINGITNKVNSVIEKMNTQFTAVGKEFNKLERRMENLNKKVDDGFIDIWTYNAELLVLLENERTLDFHDSNVKNLYEKVKSQLKNNAKEIGNGCFEFYHKCNDECMESVKNGTYDYPKYSEESKLNREKIDGVKLESMGVYQILAIYSTVASSLVLLVSLGAISFWMCSNGSLQCRICI

SEQ ID NO: 9656 - protein, 565 aa, synthetic construct
  REGION 1..565: note = hemagglutinin__InfluenzaA__AFO66246
MKVKLLVLLCTFTATYADTICIGYHANNSTDTVDTVLEKNVTVTHSVNLLEDSHNGKLCLLKGIAPLQLGNCSVAGWILGNPECELLISKESWSYIVEKPNPENGTCYPGHFADYEELREQLSSVSSFERFEIFPKESSWPNHTVTGVSASCSHNGKSSFYKNLLWLTGKNGLYPNLSKSYANNKEKEVLVLWGVHHPPNIGNQRALYHTENAYVSVVSSHYSRKFTPEIAKRPKVRDQEGRINYYWTLLEPGDTIIFEANGNLIAPRYAFALSRGFGSGIINSNAPMDECDAECQTPQGAINSSLPFQNVHPVTIGECPKYVRSAKLRMVTGLRNIPSIQSRGLFGAIAGFIEGGWTGMVDGWYGYHHQNEQGSGYAADQKSTQNAINGITNKVNSVIEKMNTQFTAVGKEFNKLERRMENLNKKVDDGFIDIWTYNAELLVLLENERTLDFHDSNVKNLYEKVKSQLKNNAKEIGNGCFEFYHKCNDECMESVKNGTYDYPKYSEESKLNREKIDGVKLESMGVYQILAIYSTVASSLVLLVSLGAISFWMCSNGSLQCRICI

SEQ ID NO: 9657 - protein, 566 aa, synthetic construct
  REGION 1..566: note = hemagglutinin__InfluenzaA__AFP33324
MKAKLLVLLCTFTATYADTICIGYHANNSTDTVDTVLEKNVTVTHSVNLLEDSHNGKLCRLKGTAPLQLGNCSIAGWILGNPECESLFSKESWSYIAETPNPKNGTCYPGYFADYEELREQLSSVSSFERFEIFPKDSSWPNHTVTKGVTASCSHNGKSSFYKNLLWLTGKNGLYPNLSKSYVNKKGKEVLVLWGVHHPSNMGDQRAIYHKENAYVSVLSSHYSRRFTPEIAKRPKVRDQEGRINYYWTLLEPGDTIIFEANGNLIAPWYAFALSRGFGSGIIISNASMGECDAKCQTPQGAINSSLPFQNVHPVTIGECPKYVRSTKLRMVTGLRNVPSIQSRGLFGAIAGFIEGGWTGMIDGWYGYHHQNEQGSGYAADQKSTQNAINGITNKVNSIIEKMNTQFTAVGKEFNKLERRMENLNKKVDDGFLDIWTYNAELLVLLENERTLDFHDSNVKNLYEKVKTQLKNNAKEIGNGCFEFYHKCNNECMESVKNGTYDYPKYSKESKLNREKIDGVKLESMGVYQILAIYSTVASSLVLLVSLGAISFWMCSNGSLQCRICI

SEQ ID NO: 9658 - protein, 565 aa, synthetic construct
  REGION 1..565: note = hemagglutinin__InfluenzaA__AFP33325
MKVKLLVLLCTFTATYADTICIGYHANNSTDTVDTVLEKNVTVTHSVNLLEDSHNGKLCLLKGIAPLQLGNCSVAGWILGNPECELLIPKESWSYIVETPNPENGTCYPGYFADYEELREQLSSVSSFERFEIFPKESSWPSHTVTGVSASCSHNGKSSFYRNLLWLTGKNGLYPNLSKSYSNNKEKEVLVLWGVHHPPNIGDQRALYHTENAYVSVVSSHYSRRFTPEIAKRPKVRGQEGRINYYWTLLEPGDTIIFEANGNLIAPWYAFALSRGFGSGIITSNAPMDECDAKCQTPQGAINSSLPFQNVHPVTIGECPKYVRSAKLRMVTGLRNIPSIQSRGLFGAIAGFIEGGWTGMVDGWYGYHHQNEQGSGYAADQKSTQNAINGITNKVNSVIEKMNTQFTAVGKEFNKLERRMENLNKKVDDGFLDIWTYNAELLVLLENERTLDFHDSNVKNLYEKVKSQLKNNAKEIGNGCFEFYHKCNDECMESVKNGTYDYPKYSEESKLNREKIDGVKLESMGVYQILAIYSTVASSLVLLVSLGAISFWMCSNGSLQCRICI

SEQ ID NO: 9659 - protein, 566 aa, synthetic construct
  REGION 1..566: note = hemagglutinin__InfluenzaA__AFQ32573
MKTIIALSYILCLVFAQKLPGNDNSTATLCLGHHAVPNGTIVKTITNDQIEVTNATELVQSSSTGEICNSPHQILDGENCTLIDALLGDPQCDGFQNKKWDLFVERSKAHSNCYPYDVPDYASLRSLVASSGTLEFNNESFNWTGVTQNGTSSACIRRSNNSFFSRLNWLTHLNFKYPALNVTMPNNEQFDKLYIWGVHHPGTDKDQIFLYAQASGRITVSTKRSQQAVIPNIGSRPRVRNIPSRVSIYWTIVKPGDILLINSTGNLIAPRGYFKIRSGKSSIMRSDAPIGKCNSACITPNGSIPNDKPFQNVNRITYGACPRYVKQNTLKLATGMRNVPEKQTRGIFGAIAGFIENGWEGMVDGWYGFRHQNSEGRGQAADLKSTQAAIDQINGKLNRLIGKTNEKFHQIEKEFSEVEGRIQDLEKYVGDTKIDLWSYNAELLVALENQHTIDLTDSEMNKLFEKTKKQLRENAEDMGNGCFKIYHKCDNACIGSIRNGTYDHDVYRDEALNNRFQIKGVELKSGYKDWILWISFAISCFLLCVALLGFIMWACQKGNIRCNICI

SEQ ID NO: 9660 - protein, 566 aa, synthetic construct
  REGION 1..566: note = hemagglutinin__InfluenzaA__AFQ37281
MKAILVVLLYTFATTNADTLCIGYHANNSTDTVDTVLEKNVTVTHSVNLLEDKHNGKLCKLRGVAPLHLGKCNIAGWILGNPECESLSTASSWSYIVETSSSDNGTCYPGDFIDYEELREQLSSVSSFERFEIFPKTSSWPNHDSNKGVTAACPHAGAKSFYKNLIWLVKKGNSYPKLSKSYINDKGKEVLVLWGIHHPSTSTDQQSLYQNADAYVFVGTSRYSKKFKPEIAIRPKVRDREGRMNYYWTLVEPGDKITFEATGNLVVPRYAFAMERNAGSGIIISDTPAHDCNTTCQTPKGAINTSLPFQNVHPITIGKCPKYVKSTKLRLATGLRNVPSIQSRGLFGAIAGFIEGGWTGMVDGWYGYHHQNEQGSGYAADLKSTQNAIDKITNKVNSVIEKMNTQFTAVGKEFNHLEKRIENLNKKVDDGFLDIWTYNAELLVLLENERTLDYHDSNVKNLYEKVRSQLKNNAKEIGNGCFEFYHKCDDKCMESVKNGTYDYPKYSEEAKLNREEIDGVKLESTRIYQILAIYSTAASSLVLVVSLGAISFWMCSNGSLQCRICI

SEQ ID NO: 9661 - protein, 568 aa, synthetic construct
  REGION 1..568: note = hemagglutinin__InfluenzaA__AFQ55689
MNTQILALIACMLIGAKGDKICLGHHAVANGTKVNTLTERGIEVVNATETVETANTKKICTQGKRPTDLGQCGLLGTLIGPPQCDQFLEFDADLIIERREGTDVCYPGKFTNEESLRQILRGSGGIDKESMGFTYSGIRTNGATSACRRSGSSFYAEMKWLLSNSDNAAFPQMTKSYRNPRNKPALIIWGVHHSGSATEQTKLYGSGNKLITVGSSKYQQSFTPSPGARPQVNGQSGRIDFHWLLLDPNDTVTFTFNGAFIAPDRASFFRGESIGVQSDVPLDSGCEGDCFHNGGTIVSSLPFQNINPRTVGKCPRYVKQTSLLLATGMRNVPENPKDRKSRHRRTRGLFGAIAGFIENGWEGLIDGWYGFRHQNAQGEGTAADYKSTQSAIDQITGKLNRLIDKTNQQFELIDNEFSEIEQQIGNVINWTRDSMTEVWSYNAELLVAMENQHTIDLADSEMNKLYERVRKQLRENAEEDGTGCFEIFHKCDDQCMESIRNNTYDHTQYRAESLQNRIQIDPVKLSSGYKDIILWFSFGASCFLLLAIAMGLVFICIKNGNMRCTICI

SEQ ID NO: 9662 - protein, 566 aa, synthetic construct; identical to SEQ ID NO: 8186
  REGION 1..566: note = hemagglutinin__InfluenzaA__AFR68153

SEQ ID NO: 9663 - protein, 566 aa, synthetic construct
  REGION 1..566: note = hemagglutinin__InfluenzaA__AFR68163
MKATLVVLLYTFATANADTLCIGYHANNSTDTVDTVLEKNVTVTHSANLLEDKHNGKLCKLRGVAPLHLGKCNIAGWILGNPECETLSTASSWSYIVETSSSDNGTCYPGDFIDYEELREQLSSVSSFERFEIFPKTSSWPNHDSNKGVTAACPHAGAKGFYKNLIWLVKKGNSYPKLSKSYINDKGKEVLVLWGIHHPSTTADQQSLYQNADTYVFVGTSRYSKKFKPEIAIRPKVRDQEGRMNYYWTLVEPGDKITFEATGNLVVPRYAFAMERDAGSGIIISDTPVHDCNTTCQTPKGAINTSLPFQNIHPITIGKCPKYVKSTKLRLATGLRNVPSIQSRGLFGAIAGFIEGGWTGMVDGWYGYHHQNEQGSGYAADLKSTQNAIDKITNKVNSVIEKMNTQFTAVGKEFNHLEKRIENLNKKVDDGFLDIWTYNAELLVLLENERTLDYHDSNVKNLYEKVRNQLKNNAKEIGNGCFEFYHKCDNTCMESVKNGTYDYPKYSEEAKLNREEIDGVKLESTRIYQILAIYSTAASSLVLVVSLGAISFWMCSNGSLQCRICI

SEQ ID NO: 9664 - protein, 566 aa, synthetic construct
  REGION 1..566: note = hemagglutinin__InfluenzaA__AFR68173
MKTIIALSYILCLVFAQKLPGNDNSTATLCLGHHAVPNGTIVKTITNDQIEVTNATELVQSSSTGEICDSPHQILDGENCTLIDALLGDPQCDGFQNKKWDLFVERSKAYSNCYPYDVPDYASLRSLVASSGTLEFNNESFNWTGVTQNGTSSACIRRSNSSFFSRLNWLTHLNFKYPALNVTMPNNEQFDKLYIWGVHHPGTDKDQIFLYAQASGRITVSTKRSQQSVIPNIGSRPRIRNIPSRISIYWTIVKPGDILLINSTGNLIAPRGYFKIRSGKSSIMRSDAPIGKCNSECITPNGSIPNDKPFQNVNRITYGACPRYVKQNTLKLATGMRNVPEKQTRGIFGAIAGFIENGWEGMVDGWYGFRHQNSEGRGQAADLKSTQAAIDQINGKLNRLIGKTNEKFHQIEKEFSEVEGRIQDLEKYVEDTKIDLWSYNAELLVALENQHTIDLTDSEMNKLFEKTKKQLRENAEDMGNGCFKIYHKCDNACIGSIRNGTYNHDVYRDEALNNRFQIKGVELKSGYKDWILWISFAISCFLLCVALLGFIMWACQKGNIRCNICI

SEQ ID NO: 9665 - protein, 566 aa, synthetic construct; identical to SEQ ID NO: 2669
  REGION 1..566: note = hemagglutinin__InfluenzaA__AFR84675

SEQ ID NO: 9666 - protein, 566 aa, synthetic construct; identical to SEQ ID NO: 3022
  REGION 1..566: note = hemagglutinin__InfluenzaA__AFR84685

SEQ ID NO: 9667 - protein, 566 aa, synthetic construct; identical to SEQ ID NO: 2849
  REGION 1..566: note = hemagglutinin__InfluenzaA__AFR84694

SEQ ID NO: 9668 - protein, 566 aa, synthetic construct; identical to SEQ ID NO: 2656
  REGION 1..566: note = hemagglutinin__InfluenzaA__AFR84704

SEQ ID NO: 9669 - protein, 566 aa, synthetic construct
  REGION 1..566: note = hemagglutinin__InfluenzaA__AFR84714
MKAILVVLLYTFATANADTLCIGYRANNSTDTVDTVLEKNVTVTHSVNILEDKHNGKLCKLRGVAPLHLGKCNIAGWILGNPECESLSTASSWSYIVETSSSDNGTCYPGDFIDYEELREQLSSVSSFERFEIFPKTSSWPNHDSNKGVTAACPHAGAKSFYKNLIWLVKKGNSYPKLSKSYINDKGKEVLVLWGIHHPSTSADQQSLYQNADAYVFVGSSRYSKKFKPEIAIRPKVRDQEGRMNYYWTLVEPGDKITFEATGNLVVPRYAFAMERNAGSGIIISDTPVHDCNTTCQTPKGAINTSLPFQNIHPITIGKCPKYVKSTKLRLATGLRNVPSIQSRGLFGAIAGFIEGGWTGMVDGWYGYHHQNEQGSGYAADLKSTQNAIDEITNKVNSVIEKMNTQFTAVGKEFNHLEKRIENLNKKVDDGFLDIWTYNAELLVLLENERTLDYHDSNVKNLYEKVRSQLKNNAKEIGNGCFEFYHKCDNTCMESVKNGTYDYPKYSEEAKLNREEIDGVKLESTRIYQILAIYSTVASSLVLVVSLGAISFWMCSNGSLQCRICI

SEQ ID NO: 9670 - protein, 566 aa, synthetic construct; identical to SEQ ID NO: 2849
  REGION 1..566: note = hemagglutinin__InfluenzaA__AFR84724

SEQ ID NO: 9671 - protein, 566 aa, synthetic construct; identical to SEQ ID NO: 2849
  REGION 1..566: note = hemagglutinin__InfluenzaA__AFR84734

SEQ ID NO: 9672 - protein, 566 aa, synthetic construct; identical to SEQ ID NO: 2849
  REGION 1..566: note = hemagglutinin__InfluenzaA__AFR84754

SEQ ID NO: 9673 - protein, 566 aa, synthetic construct; identical to SEQ ID NO: 2849
  REGION 1..566: note = hemagglutinin__InfluenzaA__AFR84764

SEQ ID NO: 9674 - protein, 566 aa, synthetic construct; identical to SEQ ID NO: 2849
  REGION 1..566: note = hemagglutinin__InfluenzaA__AFR84774

SEQ ID NO: 9675 - protein, 566 aa, synthetic construct
  REGION 1..566: note = hemagglutinin__InfluenzaA__AFR84784
MKAILVGLLYTFATANADTLCIGYHANNSTDTVDTVLEKNVTVTHSVNILEDKHNGKLCKLRGVAPLHLGKCNIAGWILGNPECESLSTASSWSYIVETSSSDNGTCYPGDFIDYEELREQLSSVSSFERFEIFPKTSSWPNHDSNKGVTAACPHAGAKSFYKNLIWLVKKGNSYPKLSKSYINDKGKEVLVLWGIHHPSTSADQQSLYQNADAYVFVGSSRYSKKFKPEIAIRPKVRDQEGRMNYYWTLVEPGDKITFEATGNLVVPRYAFAMERNAGSGIIISDTPVHDCNTTCQTPKGAINTSLPFQNIHPITIGKCPKYVKSTKLRLATGLRNVPSIQSRGLFGAIAGFIEGGWTGMVDGWYGYHHQNEQGSGYAADLKSTQNAIDEITNKVNSVIEKMNTQFTAVGKEFNHLEKRIENLNKKVDDGFLDIWTYNAELLVLLENERTLDYHDSNVKNLYEKVRSQLKNNAKEIGNGCFEFYHKCDNTCMESVKNGTYDYPKYSEEAKLNREEIDGVKLESTRIYQILAIYSTVASSLALVVSLGAISFWMCSNGSLQCRICI

SEQ ID NO: 9676 - protein, 566 aa, synthetic construct; identical to SEQ ID NO: 2849
  REGION 1..566: note = hemagglutinin__InfluenzaA__AFR84794

SEQ ID NO: 9677 - protein, 566 aa, synthetic construct; identical to SEQ ID NO: 2669
  REGION 1..566: note = hemagglutinin__InfluenzaA__AFR84804

SEQ ID NO: 9678 - protein, 566 aa, synthetic construct; identical to SEQ ID NO: 2849
  REGION 1..566: note = hemagglutinin__InfluenzaA__AFR84814

SEQ ID NO: 9679 - protein, 566 aa, synthetic construct; identical to SEQ ID NO: 2669
  REGION 1..566: note = hemagglutinin__InfluenzaA__AFR84824

SEQ ID NO: 9680 - protein, 566 aa, synthetic construct; identical to SEQ ID NO: 2695
  REGION 1..566: note = hemagglutinin__InfluenzaA__AFR84834

SEQ ID NO: 9681 - protein, 566 aa, synthetic construct; identical to SEQ ID NO: 7869
  REGION 1..566: note = hemagglutinin__InfluenzaA__AFR84844

SEQ ID NO: 9682 - protein, 566 aa, synthetic construct; identical to SEQ ID NO: 2911
  REGION 1..566: note = hemagglutinin__InfluenzaA__AFR84854

SEQ ID NO: 9683 - protein, 566 aa, synthetic construct; identical to SEQ ID NO: 2669
  REGION 1..566: note = hemagglutinin__InfluenzaA__AFR84864

SEQ ID NO: 9684 - protein, 566 aa, synthetic construct; identical to SEQ ID NO: 2849
  REGION 1..566: note = hemagglutinin__InfluenzaA__AFR84874

SEQ ID NO: 9685 - protein, 566 aa, synthetic construct; identical to SEQ ID NO: 2656
  REGION 1..566: note = hemagglutinin__InfluenzaA__AFR84893

SEQ ID NO: 9686 - protein, 566 aa, synthetic construct; identical to SEQ ID NO: 2656
  REGION 1..566: note = hemagglutinin__InfluenzaA__AFR84903

SEQ ID NO: 9687 - protein, 566 aa, synthetic construct; identical to SEQ ID NO: 2656
  REGION 1..566: note = hemagglutinin__InfluenzaA__AFR84913

SEQ ID NO: 9688 - protein, 566 aa, synthetic construct; identical to SEQ ID NO: 2656
  REGION 1..566: note = hemagglutinin__InfluenzaA__AFR84923

SEQ ID NO: 9689 - protein, 562 aa, synthetic construct
  REGION 1..562: note = hemagglutinin__InfluenzaA__AFV53205
MAIIYLILLFATVRGDQICIGYHANNSTEKVDTILERNVTVTHAKDILEKTHNGKLCKLNGIPPLELGDCSIAGWLLGNPECDRLLRVPEWSYIMEKENPRYSLCYPGSLNDYEELKHLLSSVRHFEKVRILPKDRWTQHTTTGDSKACAVSGKPSFFRNMVWLTKKGPDYPVAKGSYNNTSGEQMLIIWGVHHPIDEAEQRELYQKVGTYVSASTSTLNKRSIPEIAARPEVNGLRSRMEFSWTLLDVWDTINFESTGNLIAPEYGFKISKRGSSGIMKTEGTLGNCETKCQTPLGAINTTLPFHNVHPLTIGECPKYVKSEKLVLATGLRNVPQIESRGLFGAIAGFIEGGWQGMVDGWYGYHHSNDQGSGYAADKESTQKAFDEITNKVNSVIEKMNTQFEAVGKEFNNLEKRLENLNKKMEDGFLDVWTYNAELLVLMENERTLDFHDSNVKNLYEKVRMQLRDNVKELGNGCFEFYHKCDDECINSVKNGTYDYPKYEEESKLKRNEIKGVKLSSMGVYQILAIYATVAGSLSLAIMMAGISFWMCSNGSLQCRICI

SEQ ID NO: 9690 - protein, 562 aa, synthetic construct
  REGION 1..562: note = hemagglutinin__InfluenzaA__AFV53216
MAIIYLILLFTAVRGDQICIGYHANNSTEKVDTILERNVTVTHAKDILEKTHNGKLCKLNGIPPLELGDCSIAGWLLGNPECDRLLSVPEWSYIMEKENPRDGLCYPGSFNDYEELKHLLSSVKHFEKVKILPKDRWTQHTTTGGSRACAVSGNPSFFRNMVWLTEKGSNYPVAKGSYNNTSGEQMLIIWGVHHPNDETEQRTLYQNVGTYVSVGTSTLNKRSTPDIATRPKVNGQGGRMEFSWTLLDMWDTINFESTGNLIAPEYGFKISKRGSSGIMKTEGTLGNCETKCQTPLGAINTTLPFHNVHPLTIGECPKYVKSEKLVLATGLRNVPQIESRGLFGAIAGFIEGGWQGMVDGWYGYHHSNDQGSGYAADKESTQKAFDGITNKVNSVIEKMNTQFEAVEKEFSNLERRLENLNKKMEDGFLDVWTYNAELLVLMENERTLDFHDSNVKNLYDKVRMQLRDNVKELGNGCFEFYHKCDDECMNSVKNGTYDYPKYEEESKLNRNEIKGVKLSSMGIYQILAIYATVAGSLSLAIMMAGISFWMCSNGSLQCRICI

SEQ ID NO: 9691 - protein, 562 aa, synthetic construct
  REGION 1..562: note = hemagglutinin__InfluenzaA__AFV53227
MIIIYLILLFTAVRGDQICIGYHANNSTEKVDTILERNVTVTHAKDILEKTHNGKLCKLNGIPPLELGDCSIAGWLLGNPECDRLLRVPEWSYIMEKENPRYSLCYPGSFNDYEELKHLLSSVKHFEKVKILPKDGWTQHKTDGGSKACAVSGKASFFRNMVWLTKEGPNYQVAKRSYNNTSGEQMLIIWGVHHPKDEAEQIALYQKVGTYVSASTSTLNKRSTPEIAARPEVNGLGSRMEFSWTLLDVWDTINFESTGNLVAPEYGFKISKRGSSGIMKTEGTLGNCETKCQTPLGAINTTLPFHNVHPLTIGECPKYVKSEKLVLATGLRNVPQIESRGLFGAIAGFIEGGWQGMVDGWYGYHHSNDQGSGYAADKESTQKAFDRITNKVNSVIEKMNIQFEAVGKEFSNLEKRLENLNKKMEDGFLDVWTYNAELLVLMENERTLDFHDSNVKNLYDKVRMQLRDNVKELGNGCFEFYHKCDDECMNSVKNGTYDYPKYEEESKLKRNEIKGVKLSSMGVYQILAIYATVAGSLSLAIMIAGISFWMCSNGSLQCRVCI

SEQ ID NO: 9692 - protein, 562 aa, synthetic construct
  REGION 1..562: note = hemagglutinin__InfluenzaA__AFV53238
MAIIYLILLFTAVRGDQICIGYHANNSTEKVDTILERNVTVTHAKDILEKTHNGKLCKLNGIPPLELGDCSIAGWLLGNPECDRLLRVPEWSYIMEKENPRYSLCYPGSFNDYEELKHLLSSVKHFEKVKILPKDRWTQHTTTGGSMACAVSGKPSFFRNMVWLTTKGPNYPVAQGSYNNTSGEQMLIIWGVHHPNDEAEQRALYQKVGTYVSASTSTLYKRSIPEIAARPKVNGLGSRMEFSWTLLDMWDTINFESTGNLVAPEYGFKISKRGSSGIMKTEGTLENCETKCQTPLGAINTTLPFHNVHPLTIGECPKYVKSEKLVLATGLRNVPQIESRGLFGAIAGFIEGGWQGMVDGWYGYHHSNDQGSGYAADKESTQKAFDGITNKVNSVIEKMNTQFEAVGKEFSNLEKRLENLNKKMEDGFLDVWTYNAELLVLMENERTLDFHDSNVKNLYDKVRMQLRDNVKELGNGCFEFYHKCDNECMDSVKNGTYDYPKYEEESKLNRNEIKGVKLSSMGVYQILAIYATVAGSLSLAIMMAGISFWMCSNGSLQCRICI

SEQ ID NO: 9693 - protein, 562 aa, synthetic construct
  REGION 1..562: note = hemagglutinin__InfluenzaA__AFV53249
MAIIYLILLFATVRGDQICIGYHANNSTETVDTILERNVTVTHAKDILEKTHNGKLCKLNGIPPLELGDCSIAGWLLGNPECDRLLRVPEWSYIMEKENPRYSLCYPGSLNDYEELKHLLSSVKHFEKVRILPKDRWTNHTTTGGSKACAVSGEPSFFRNMVWLTKKGPNYPVAKGSYNNTSGEQMLIIWGVHHPNDEAEQRALYQKVGTYVSASTSTLYKRSIPEIAARPKVNGLGSRMEFSWTLLNVWDTINFESTGNLVAPEYGFKISKRGRSGIMKTEGTLGNCETKCQTPLGAINTTLPFHNVHPLTIGECPKYVKSEKLVLATGLRNVPQIESRGLFGAIAGFIEGGWQGMVDGWYGYHHSNDQGSGYAADKESTQKAFDGITNKVNSVIEKMNTQFEAVGKEFNNLEKRLENLNKKMEDGFLDVWTYNAELLVLMENERTLDFHDSNVKNLYEKVRMQLRDNVKELGNGCFEFYHKCDDECMNSVKNGTYDYPKYEEESKLKRNEIKGVKLSSMGVYQILAIYATVAGSLSLAIMVAGISFWMCSNGSLQCRICI

SEQ ID NO: 9694 - protein, 565 aa, synthetic construct
  REGION 1..565: note = hemagglutinin__InfluenzaA__AFV53260
MKAKLLILLCALSATDADTICIGYHANNSTDTVDTVLEKNVTVTHSVNLLEDSHNGKLCRLKGKAPLQLGNCNIAGWVLGNPECESLLSNRSWSYIAETPNSENGTCYPGDFADYEELREQLSSVSSFERFEIFPKERSWPNHTTRGVTAACPHAMKSSFYKNLVWLTEANGSYPNLSRSYVNNQEKEVLVLWGVHHPSNIEDQRTLYRKDNAYVSVVSSNYNRRFTPEIAKRPKVRGQSGRINYYWTLLEPGDTIIFEATGNLIAPWYAFALSRGPGSGIITSNAPLDECDTKCQTPQGAINSSLPFQNIHPVTIGECPKYVRSTKLRMVTGLRNIPSFQSRGLFGAIAGFIEGGWTGMMDGWYGYHHQNEQGSGYAADQKSTQNAINGITNKVNSVIEKMNTQFTAVGKEFNKLEKRMENLNKKVDDGFLDIWTYNAELLVLLENERTLDFHDSNVKNLYEKVKNQLRNNAKELGNGCFEFYHKCDNECMESVKNGTYDYPKYSEESKLNREKIDGVKLESMGVYRILAIYSTVASSLVLLVSLGAISFWMCSNGSLQCRICI

SEQ ID NO: 9695 - protein, 562 aa, synthetic construct
  REGION 1..562: note = hemagglutinin__InfluenzaA__AFV53271
MAITYLILLFTAVRGDQICIGYHANNSTEKVDTILERNVTVTHAKDILEKTHNGKLCKLNGIPPLELGDCSIAGWLLGNPECDRFLRVPEWSYIMEKENPRYSLCYPGSFNDYEELKHLLSSVKHFEKVKILPKDGWTQHTTTGGSMACAVSGKPSFFRNMVWLTEKGQNYPVAKGSYNNTSGEQMLIIWGVHHPNDEAEQRALYQKVGTYVSASTSTLNKRSTPEIAARPKVNGLGSRMEFSWTLLDMWDTINFESTGNLVAPEYGFKISKRGSSGIMKTEGTLENCETKCQTPLGAINTTLPFHNVHPLTIGECPKYVKSEKLVLATGLRNIPQIESRGLFGAIAGFIEGGWQGMVDGWYGYHHSNDQGSGYAADKESTQKAFDGITNKVNSVIEKMNTQFEAVGKEFSNLEKRLENLNKKMEDGFLDVWTYNAELLVLMENERTLDFHDSNVKNLYDKVRMQLRDNVKELGNGCFEFYHKCDNECMDSVKNGTYDYPKYEEESKLNRNEIKGVKLSSMGVYQILAIYATVAGSLSLAIMMAGISFWMCSNGSLQCRICI

SEQ ID NO: 9696 - protein, 562 aa, synthetic construct
  REGION 1..562: note = hemagglutinin__InfluenzaA__AFV53282
MAIIYLILLFTAVRGDQICIGYHANNSTEKVDTILERNVTVTHAKDILEKTHNGKLCKLNGIPPLELGDCSIAGWLLGNPECDRLLSVPEWSYIMEKENPRDGLCYPGSFNDYEELKHLLSSVKHFEKVKILPKDRWTQHTTTGGSRACAVSGNPSFFRNMVWLTKKGTNYPVAKGSYNNTSGEQMLIIWGVHHPNDETEQRTLYQNVGTYVSVGTSTLNKRSTPEIATRPKVNGLGSRMEFSWTLLDMWDTINFESTGNLIAPEYGFKISKRGSSGIMKTEGTLENCETKCQTPLGAINTTLPFHNVHPLTIGECPKYVKLEKLVLATGLRNVPQIESRGLFGAIAGFIEGGWQGMVDGWYGYHHSNDQGSGYAADKESTQKAFDVITNKVNSVIEKMNTQFEAVGKEFSNLERRLENLNKKMEDGFLDVWTYNAELLVLMENERTLDFHDSNVKNLYDKVRMQLRDNVKELGNGCFEFYHKCDDECMNSVKNGTYDYPKYEEESKLNRNEIKGVKLSSMGVYQILAIYATVAGSLSLAIMMAGISFWMCSNGSLQCRICI

SEQ ID NO: 9697 - protein, 562 aa, synthetic construct
  REGION 1..562: note = hemagglutinin__InfluenzaA__AFV53293
MAIIYLILLFTSVRGDQICIGYHANNSTEKVDTILERNVTVTHAKNILEKTHNGKLCKLNGIPPLELGDCSIAGWLLGNPECDRLLRVPEWSYIMEKENPKYSLCYPGSFNDYEELKHLLSSVKHFEKVKILPKDGWTQHTTNGGSRACAVSGNPSFFRNMVWLTKKGPNYPVAKGSYNNTSGEQMLIIWGVHHPNDEAEQRALYQEVGTYVSASTSTLNKRSTPEIAARPKVNGLGSRMEFSWTLLDMWDTINFESTGNLVAPEYGFKISKRGSSGVMKTEGTLENCETKCQTPLGAINTTLPFHNVHPLTIGECPKYVKSEKLVLATGLRNVPQIESRGLFGAIAGFIEGGWQGMVDGWYGYHHSNDQGSGYAADKESTQKAFDGITNKVNSVIEKMNTQFEAVGKEFSNLEKRLENLNKKMEDGFLDVWTYNAELLVLMENERTLDFHDSNVKNLYDKVRMQLRDNVKELGNGCFEFYHKCDDECMDSVKNGTYDYPKYEEESKLNRNEIKGVKLSSMGVYQILAIYATVAGSLSLAIMMAGISFWMCSNGSLQCRICI

SEQ ID NO: 9698 - protein, 562 aa, synthetic construct
  REGION 1..562: note = hemagglutinin__InfluenzaA__AFV53304
MAIIYLILLFTAVRGDQICIGYHANNSTEKVDTILEQNVTVTHAKDILEKTHNGKLCKLNGIPPLELGDCSIAGWLLGNPECDRLLSVPEWSYIMEKENPRDGLCYPGSFNDYEELKHLLSSVKHFEKVKILPKDRWTQHTTTGGSRACAVSGNPSFFRNMVWLTKKESNYPVAKGSYNNTSGEQMLIIWGVHHPNDETEQRTLYQNVGTYVSVGTSTLNKRSTPNIATRPKVNGLGSRMEFSWTLLDMWDTINFESTGNLIAPEYGFKISKRGSSGIMKTEGTLENCETKCQTPLGAINTTLPFHNVHPLTIGECPKYVKSEKLVLATGLRNVPQIESRGLFGAIAGFIEGGWQGMVDGWYGYHHSNDQGSGYAADKESTQKAFDGITNKVNSVIEKMNTQFEAVGKEFSNLERRLENLNKKMEDGFLDVWTYNAELLVLMENERTLDFHDSNVKNLYDKVRMQLRDNVKELGNGCFEFYHKCDDECMNSVKNGTYDYPKYEEESKLNRNEIKGVKLSSMGVYQILAIYATVAGSLSLAIMMAGISFWMCSNGSLQCRICI

SEQ ID NO: 9699 - protein, 562 aa, synthetic construct
  REGION 1..562: note = hemagglutinin__InfluenzaA__AFV53314
MAIIYLILLFTAVRGDKICIGYHANNSTETVDTILERNVTVTHAKDILEKTHNGKLCKLNGIPPLELGDCSIAGWLLGNPECDRLLSVPEWSYIMEKENPRNGLCYPGNFNDYEELKHLLSSVKHFEKVKILPKDRWTQHTTTGGSQACAVSGNPSFFRNMVWLTEKESNYPVAKGSYNNTSGEQMLIIWGVHHPIDETEQRTLYQNVGTYVSVGTSTLNKRSTPEIAKRPKVNGLGSRMEFSWTLLDMWDTITFESTGNLIAPEYGFKISKRGSSGIMKTEGTLENCETKCQTPLGAINTTLPFHNVHPLTIGECPKYVKSEKLVLATGLRNVPQIESRGLFGAIAGFIEGGWQGMVDGWYGYHHSNDQGSGYAADKESTQKAFDGITNKVNAVIEKINTQFEAVGKEFSNLERRLENLNKKMEDGFLDVWTYNAELLVLMENERTLDFHDSNVKNLYDKVRMQLRDNVKELGNGCFEFYHKCDDECMNSVKNGTYDYPKYEEESKLNRNEIKGVKLSSMGVYQILAIYATVAGSLSLAIMMAGISFWMCSNGSLQCRICI

SEQ ID NO: 9700 - protein, 562 aa, synthetic construct
  REGION 1..562: note = hemagglutinin__InfluenzaA__AFV53325
MAIIYLILLFTAVRGDQICIGYHANNSTEKVDTILERNVTVTHAKDILEKTHNGKLCKLNGIPPLELGDCSIAGWLLGNPECDRLLSVPEWSYIMEKENPRDGLCYPGSFNDYEELKHLLSSVKHFEKVKILPKDRWTQHTTTGGSRACAVSGNPSFFRNMVWLTKKGSNYTVAKGSYNNTSGEQMLIIWGVHHPNDETEQRTLYQNVGTYVSVSTSTLNKRSTPEIATRPKVNGLGSRMEFSWTLLDMWDTINFESTGNLIAPEYGFKISKRGSSGIMKTEGTLENCETKCQTPLGAINTTLPFHNVHPLTIGECPKYVKSEKLVLATGLRNVPQIESRGLFGAIAGFIEGGWQGMVDGWYGYHHSNDQGSGYAADKESTQKAFDGITNKVNSVIEKMNTQFEAVGKEFSNLERRLENLNKKMEDGFLDVWTYNAELLVLMENERTLDFHDSNVKNLYDKVRMQLRDNVKELGNGCFEFYHKCDDECMNSVKNGTYDYPKYEEESKLNRNEIKGVKLSSMGVYQILAIYATVAGSLSLAIMMAGISFWMCSNGSLQCRICI

SEQ ID NO: 9701 - protein, 562 aa, synthetic construct
  REGION 1..562: note = hemagglutinin__InfluenzaA__AFV53336
MAIIYLILLFTAVRGDQICIGYHANNSTEKVDTILERNVTVTHAKDILEKTHNGKLCKLNGIPPLELGDCSIAGWLLGNPECDRLLRVPEWSYIMEKENPRYSLCYPGSFNDYEELKHLLSSVKHLEKVKILPKDGWTQHETDGGSKACAVSGKPSFFRNMVWLTKKGPNYPVAKRSYNNTSGEQMLIIWGVHHPNDEAEQRALYQKVGTYVSASTSTLNKRSTPEIAARPEVSGLGSRMEFSWTLLDVWDTISFESTGNLVAPEYGFKISKRGSSGIMKTEGTLGNCETKCQTPLGAINTTLPFHNVHPLTIGECPKYVKSEKLVLATGLRNVPQIESRGLFGAIAGFIEGGWQGMVDGWYGYHHSNDQGSGYAADKESTQKAFDRITNKVNSVIEKMNTQFEAVGKEFSNLEKRLENLNKKMEDGFLDVWTYNAELLVLMENERILDFHDSNVKNLYDKVRMQLRDNVKELGNGCFEFYHKCDDECMNSVKNGTYDYPKYEEESKLKRNEIKGVKLSSMGVYQILAIYATVAGSLSLAIMIAGISFWMCSNGSLQCRICI

SEQ ID NO: 9702 - protein, 566 aa, synthetic construct
  REGION 1..566: note = hemagglutinin__InfluenzaA__AFV68720
MKTIIALSYILCLVFAQKLPGNDNSTATLCLGHHAVPNGTIVKTITNDQIEVTNATELVQSSSTGEICDSPHQILDGENCTLIDALLGDPQCDGFQNKKWDLFVERSKAYSNCYPYDVPDYASLRSLVASSGTLEFNNESFNWTGVTQNGTSSACIRRSDSSFFSRLNWLTHLNFKYPALNVTMPNNEQFDKLYIWGVHHPGTDKDQIFLYAQASGRITVSTKRSQQAVIPNIGSRPRIRNIPSRISIYWTIVKPGDILLINSTGNLIAPRGYFKIRSGKSSIMRSDAPIGKCNSECITPNGSIPNDKPFQNVNRITYGACPRYVKQNTLKLATGMRNVPEKQTRGIFGAIAGFIENGWEGMVDGWYGFRHQNSEGRGQAADLKSTQAAIDQINGKLNRLIGKTNEKFHQIEKEFSEVEGRIQDLEKYVEDTKIDLWSYNAELLVALENQHTIDLTDSEMNKLFEKTKKQLRENAEDMGNGCFKIYHKCDNACIGSIRNGTYNHDVYRDEALNNRFQIKGVELKSGYKDWILWISFAISCFLLCVALLGFIMWACQKGNIRCNICI

SEQ ID NO: 9703 - protein, 566 aa, synthetic construct; identical to SEQ ID NO: 2669
  REGION 1..566: note = hemagglutinin__InfluenzaA__AFX96347

SEQ ID NO: 9704 - protein, 566 aa, synthetic construct
  REGION 1..566: note = hemagglutinin__InfluenzaA__AFX96359
MKAILVVLLYTFATANADTLCIGYHANNSTDTVDTVLEKNVTVTHSVNLLEDKHNGKLCKLRGVAPLHLGKCNIAGWILGNPECESLSTASSWSYIVETSSSDNGTCYPGDFIDYEELREQLSSVSSFERFEIFPKTSSWPNHDSNKGVTAACPHAGAKSFYKNLIWLVKKGNSYPKLSKSYINDKGKEVLVLWGIHHPSTSADQQSLYQNADTYVFVGTSRYSKKFKPEIAIRPKVRDQEGRMNYYWTLVEPGDKITFEATGNLVVPRYAFAMERNAGSGIIISDTPVHDCNTTCQTPKGAINTSLPFQNIHPITIGKCPKYVKSTKLRLATGLRNVPSIQSRGLFGAIAGFIEGGWTGMVDGWYGYHHQNEQGSGYAADLKSTQNAIDEITNKVNSVIEKMNTQFTAVGKEFNHLEKRIENLNKKIDDGFLDIWTYNAELLVLLENERTLDYHDSNVKNLYEKVRSQLKNNAKEIGNGCFEFYHKCDNTCMESVKNGTYDYPKYSEEAKLNREEINGVKLESTRIYQILAIYSTVASSLVLVVSLGAISFWMCSNGSLQCRICI

SEQ ID NO: 9705 - protein, 566 aa, synthetic construct
  REGION 1..566: note = hemagglutinin__InfluenzaA__AFX96366
MKAILVVLLYTFATANADTLCIGYHANNSTDTVDTVLEKNVTVTHSVNLLEDKHNGKLCKLRGVAPLHLGKCNIAGWILGNPECESLSTASSWSYIVETSSSDNGTCYPGDFIDYEELREQLSSVSSFERFEIFPKTSSWPNHDSNKGVTAACPHAGAKSFYKNLIWLVKKGNSYPKLSKSYINDRGKEVLVLWGIHHPSTSADQQSLYQNADAYVFVGTSRYSKKFKPEIAIRPKVRDQEGRMNYYWTLVEPGDKITFEATGNLVVPRYAFAMERNAGSGIIISDTPVHDCNTTCQTPKGAINTSLPFQNIHPITIGKCPKYVKSTKLRLATGLRNVPSIQSRGLFGAIAGFIEGGWTGMVDGWYGYHHQNEQGSGYAADLKSTQNAIDKITNKVNSVIEKMNTQFTAVGKEFNQLEKRIENLNKKVDDGFLDIWTYNAELLVLLENERTLDYHDSNVKNLYEKVRSQLKNNAKEIGNGCFEFYHKCDNTCMESVKNGTYDYPKYSEEAKLNREEIDGVKLESTRIYQILAIYSTVASSLVLVVSLGAISFWMCSNGSLQCRICI

SEQ ID NO: 9706 - protein, 566 aa, synthetic construct; identical to SEQ ID NO: 4169
  REGION 1..566: note = hemagglutinin__InfluenzaA__AFX96383

SEQ ID NO: 9707 - protein, 566 aa, synthetic construct; identical to SEQ ID NO: 2669
  REGION 1..566: note = hemagglutinin__InfluenzaA__AFX96398

SEQ ID NO: 9708 - protein, 566 aa, synthetic construct; identical to SEQ ID NO: 2669
  REGION 1..566: note = hemagglutinin__InfluenzaA__AFX96408

SEQ ID NO: 9709 - protein, 566 aa, synthetic construct; identical to SEQ ID NO: 2669
  REGION 1..566: note = hemagglutinin__InfluenzaA__AFX96418

SEQ ID NO: 9710 - protein, 566 aa, synthetic construct; identical to SEQ ID NO: 2669
  REGION 1..566: note = hemagglutinin__InfluenzaA__AFX96428

SEQ ID NO: 9711 - protein, 566 aa, synthetic construct; identical to SEQ ID NO: 2669
  REGION 1..566: note = hemagglutinin__InfluenzaA__AFX96438

SEQ ID NO: 9712 - protein, 566 aa, synthetic construct; identical to SEQ ID NO: 2669
  REGION 1..566: note = hemagglutinin__InfluenzaA__AFX96448

SEQ ID NO: 9713 - protein, 566 aa, synthetic construct; identical to SEQ ID NO: 2669
  REGION 1..566: note = hemagglutinin__InfluenzaA__AFX96458

SEQ ID NO: 9714 - protein, 566 aa, synthetic construct; identical to SEQ ID NO: 2669
  REGION 1..566: note = hemagglutinin__InfluenzaA__AFX96468

SEQ ID NO: 9715 - protein, 566 aa, synthetic construct; identical to SEQ ID NO: 2669
  REGION 1..566: note = hemagglutinin__InfluenzaA__AFX96478

SEQ ID NO: 9716 - protein, 566 aa, synthetic construct; identical to SEQ ID NO: 2669
  REGION 1..566: note = hemagglutinin__InfluenzaA__AFX96488

SEQ ID NO: 9717 - protein, 566 aa, synthetic construct
  REGION 1..566: note = hemagglutinin__InfluenzaA__AFX96498
MKAILVVLLYTFATANADTLCIGYHANNSTDTVDTVLEKNVTVTHSVNLLEDKHNGKLCKLRGVAPLHLGKCNIAGWILGNPECESLSTASSWSYIVETSSSDNGTCYPGDFIDYEELREQLSSVSSFERFEIFPKTSSWPNHDSNKGVTAACPHAGAKSFYKNLIWLVKKGNSYPKISKSYINDKGKEVLVLWGIHHPSTSADQQSLYQNADAYVFVGTSRYSKKFKPEIAIRPKVRDQEGRMNYYWTLVEPGDKITFEATGNLVVPRYAFAMERNAGSGIIISDTPVHDCNTTCQTPKGAINTSLPFQNIHPITIGKCPKYVKSTKLRLATGLRNVPSIQSRGLFGAIAGFIEGGWTGMVDGWYGYHHQNEQGSGYAADLKSTQNAIDEITNKVNSVIEKMNTQFTAVGKEFNHLEKRIENLNKKVDDGFLDIWTYNAELLVLLENERTLDYHDSNVKNLYEKVRSQLKNNAKEIGNGCFEFYHKCDNTCMESVKNGTYDYPKYSEEAKLNREEIDGVKLESTRIYQILAIYSTVASSLVLVVSLGAISFWMCSNGSLQCRICI

SEQ ID NO: 9718 - protein, 566 aa, synthetic construct; identical to SEQ ID NO: 2669
  REGION 1..566: note = hemagglutinin__InfluenzaA__AFX96508

SEQ ID NO: 9719 - protein, 566 aa, synthetic construct; identical to SEQ ID NO: 4169
  REGION 1..566: note = hemagglutinin__InfluenzaA__AFX96518

SEQ ID NO: 9720 - protein, 566 aa, synthetic construct; identical to SEQ ID NO: 2669
  REGION 1..566: note = hemagglutinin__InfluenzaA__AFX96528

SEQ ID NO: 9721 - protein, 566 aa, synthetic construct; identical to SEQ ID NO: 4169
  REGION 1..566: note = hemagglutinin__InfluenzaA__AFX96538

SEQ ID NO: 9722 - protein, 566 aa, synthetic construct
  REGION 1..566: note = hemagglutinin__InfluenzaA__AFX96548
MKAILVVLLYTFATANADTLCIGYHANNSTDTVDTVLEKNVTVTHSVNLLEDKHNGKLCKLRGVAPLHLGKCNIAGWILGNPECESLSTASSWSYIVETSSSDNGTCYPGDFIDYEELREQLSSVSSFERFEIFPKTSSWPNHDSNKGVTAACPHAGAKSFYKNLIWLVKKGNSYPKLSKSYINDKGKEVLVLWGIHHPSTSADQQSLYQNADTYVFVGTSRYSKKFKPEIAIRPKVRDQEGRMNYYWTLVEPGDKITFEATGNLVVPRYAFAMERNAGSGIIISDTPVHDCNTTCQTPKGAINTSLPFQNIHPITIGKCPKYVKSTKLRLATGLRNVPSIQSRGLFGAIAGFIEGGWTGMVDGWYGYHHQNEQGSGYAADLKSTQNAIDKITNKVNSVIEKMNTQFTAVGKEFNHLEKRIENLNKKIDDGFLDIWTYNAELLVLLENERTLDYHDSNVKNLYEKVRSQLKNNAKEIGNGCFEFYHKCDNTCMESVKNGTYDYPKYSEEAKLNREEIDGVKLESTRIYQILAIYSTVASSLVLVVSLGAISFWMCSNGSLQCRICI

SEQ ID NO: 9723 - protein, 566 aa, synthetic construct; identical to SEQ ID NO: 2669
  REGION 1..566: note = hemagglutinin__InfluenzaA__AFX96558

SEQ ID NO: 9724 - protein, 566 aa, synthetic construct; identical to SEQ ID NO: 3829
  REGION 1..566: note = hemagglutinin__InfluenzaA__AFX96568

SEQ ID NO: 9725 - protein, 566 aa, synthetic construct; identical to SEQ ID NO: 3829
  REGION 1..566: note = hemagglutinin__InfluenzaA__AFX96578

SEQ ID NO: 9726 - protein, 566 aa, synthetic construct; identical to SEQ ID NO: 2669
  REGION 1..566: note = hemagglutinin__InfluenzaA__AFX96588

SEQ ID NO: 9727 - protein, 566 aa, synthetic construct; identical to SEQ ID NO: 2669
  REGION 1..566: note = hemagglutinin__InfluenzaA__AFX96598

SEQ ID NO: 9728 - protein, 566 aa, synthetic construct
  REGION 1..566: note = hemagglutinin__InfluenzaA__AFX96608
MKAILVVLLYTFATANADTLCIGYHANNSTDTVDTVLEKNVTVTHSVNLLEDKHNGKLCKLRGVAPLHLGKCNIAGWILGNPECESLSTASSWSYIVETSSSDNGTCYPGDFIDYEELREQLSSVSSFERFEIFPKTSSWPNHDSNKGVTAACPHAGAKSFYKNLIWLVKKGNSYPKLSKSYINDKGKEVLVLWGIHHPSTSADQQSLYQNADAYVFVGTSRYSKKFKPEIAIRPKVRDQEGRMNYYWTLVEPGDKITFEATGNLVVPRYAFAMERNAGSGIIISDTPVHDCNTTCQTPKGAINTSLPFQNIHPITIGKCPKYVKSTKLRLATGLRNVPSIQSRGLFGAIAGFIEGGWTGMVDGWYGYHHQNEQGSGYAADLKSTQNAIDEITNKVNSVIEKMNTQFTAVGKEFNHLEKRIENLNKKVDDGFLDIWTYNAELLVLLENERTLDYHDSNVKNLYEKVRSQLKNNAKEIGNGCFEFYHKCDNTCMESVKNGTYDYPKYSEEAKLNREKIDGVKLESTRIYQILAIYSTLASSLVLVVSLGAISFWMCSNGSLQCRICI

SEQ ID NO: 9729 - protein, 566 aa, synthetic construct; identical to SEQ ID NO: 2669
  REGION 1..566: note = hemagglutinin__InfluenzaA__AFX96618

SEQ ID NO: 9730 - protein, 566 aa, synthetic construct; identical to SEQ ID NO: 3829
  REGION 1..566: note = hemagglutinin__InfluenzaA__AFX96628

SEQ ID NO: 9731 - protein, 566 aa, synthetic construct
  REGION 1..566: note = hemagglutinin__InfluenzaA__AFX96638
MKAILVVLLYTFATANADTLCIGYHANNSTDTVDTVLEKNVTVTHSVNLLEDKHNGKLCKLRGVAPLHLGKCNIAGWILGNPECESLSTASSWSYIVETSSSDNGTCYPGDFINYEELREQLSSVSSFERFEIFPKTSSWPNHDSNKGVTAACPHAGAKSFYKNLVWLVKKGNSYPKLSKSYINDKGKEVLVLWGIHHPSTSADQQSLYQNADAYVFVGTSRYSKKFKPEIAIRPKVRDQEGRMNYYWTLVEPGDKITFEATGNLMVPRYAFAMERNAGSGIIISDTPVHDCNTTCQTPKGAINTSLPFQNIHPITIGKCPKYVKSTKLRLATGLRNVPSIQSRGLFGAIAGFIEGGWTGMVDGWYGYHHQNEQGSGYAADLKSTQNAIDEITNKVNSVIEKMNTQFTAVGKEFNHLEKRIENLNKKVDDGFLDIWTYNAELLVLLENERTLDYHDSNVKNLYEKVRSQLKNNAKEIGNGCFEFYHKCDNTCMESVKNGTYDYPKYSEEAKLNREEIDGVKLESTRIYQILAIYSTVASSLVLVVSLGAISFWMCSNGSLQCRICI

SEQ ID NO: 9732 - protein, 566 aa, synthetic construct; identical to SEQ ID NO: 2669
  REGION 1..566: note = hemagglutinin__InfluenzaA__AFX96648

SEQ ID NO: 9733 - protein, 566 aa, synthetic construct; identical to SEQ ID NO: 3829
  REGION 1..566: note = hemagglutinin__InfluenzaA__AFX96658

SEQ ID NO: 9734 - protein, 566 aa, synthetic construct
  REGION 1..566: note = hemagglutinin__InfluenzaA__AFX96668
MKAILVVLLYTFATANADTLCIGYHANNSTDTVDTVLEKNVTVTHSVNLLEDKHNGKLCKLRGVAPLHLGKCNIAGWILGNPECESLSTASSWSYIVETSSSDNGTCYPGDFIDYEELREQLSSVSSFERFEIFPKTSSWPNHDSNKGVTAACPHAGAKSFYKNLIWLVKKGNSYPKLSKSYINDKGKEVLVLWGIHHPSTSADQQSLYQNADAYVFVGTSRYSKKFKPEIAIRPKVRDQEGRMNYYWTLVEPGDKITFEATGNLVVPRYAFAMERNAGSGIIISDTPVHDCNTTCQTPKGAINTSLPFQNIHPITIGKCSKYVKSTKLRLATGLRNVPSIQSRGLFGAIAGFIEGGWTGMVDGWYGYHHQNEQGSGYAADLKSTQNAIDEITNKVNSVIEKMNTQFTAVGKEFNHLEKRIENLNKKVDDGFLDIWTYNAELLVLLENERTLDYHDSNVKNLYEKVRSQLKNNAKEIGNGCFEFYHKCDNTCMESVKNGTYDYPKYSEEAKLNREEIDGVKLESTRIYQILAIYSTVASSLVLVVSLGAISFWMCSNGSLQCRICI

SEQ ID NO: 9735 - protein, 566 aa, synthetic construct
  REGION 1..566: note = hemagglutinin__InfluenzaA__AFX96678
MKAILVVLLYTFATANADTLCIGYHANNSTDTVDTVLEKNVTVTHSVNLLEDKHNGKLCKLRGVAPLHLGKCNIAGWILGNPECESLSTASSWSYIVETSSSDNGTCYPGDFIDYEELREQLSSVSSFERFEIFPKTSSWPNHDSNKGVTAACSHAGAKSFYKNLIWLVKKGNSYPKLSKSYINDKGKEVLVLWGIHHPSTSADQQSLYQNADAYVFVGTSRYSKKFKPEIAIRPKVRDQEGRMNYYWTLVEPGDKITFEATGNLVVPRYAFAMERNAGSGIIISDTPVHDCNTTCQTPKGAINTSLPFQNIHPITIGKCPKYVKSTKLRLATGLRNVPSIQSRGLFGAIAGFIEGGWTGMVDGWYGYHHQNEQGSGYAADLKSTQNAIDEITNKVNSVIEKMNTQFTAVGKEFNHLEKRIENLNKKVDDGFLDIWTYNAELLVLLENERTLDYHDSNVKNLYEKVRSQLKNNAKEIGNGCFEFYHKCDNTCMESVKNGTYDYPKYSEEAKLNREEIDGVKLESTRIYQILAIYSTVASSLVLVVSLGAISFWMCSNGSLQCRICI

SEQ ID NO: 9736 - protein, 566 aa, synthetic construct
  REGION 1..566: note = hemagglutinin__InfluenzaA__AFX96688
MKAILVVLLYTFATANADTLCIGYHANNSTDTVDTVLEKNVTVTHSVNLLEDKHNGKLCKLRGVAPLHLGKCNIAGWILGNPDCESLSTASSWSYIVETSSSDNGTCYPGDFIDYEELREQLSSVSSFERFEMFPKTSSWPNHDSNKGVTAACPHAGAKSFYKNLIWLVKKGNSYPKLSKSYINDKGKEVLVLWGIHHPSTSADQQSLYQNADAYVFVGTSRYSKKFKPEIAIRPKVRDQEGRMNYYWTLVEPGDKITFEATGNLVVPRYAFAMERNDGSGIIISDTPVHDCNTTCQTPKGAINTSLPFQNIHPITIGKCPKYVKSTKLRLATGLRNVPSIQSRGLFGAIAGFIEGGWTGMVDGWYGYHHQNEQGSGYAADLKSTQNAIDEITNKVNSVIEKMNTQFTAVGKEFNHLEKRIENLNKKVDDGFLDIWTYNAELLVLLENERTLDYHDSNVKNLYEKVRSQLKNNAKEIGNGCFEFYHKCDNTCMESVKNGTYDYPKYSEEAKLNREEIDGVKLESTRIYQILAIYSTVASSLVLVVSLGAISFWMCSNGSLQCRICI

SEQ ID NO: 9737 - protein, 566 aa, synthetic construct; identical to SEQ ID NO: 2669
  REGION 1..566: note = hemagglutinin__InfluenzaA__AFX96698

SEQ ID NO: 9738 - protein, 566 aa, synthetic construct
  REGION 1..566: note = hemagglutinin__InfluenzaA__AFX96718
MKAILVVLLYTFATANADTLCIGYHANNSTDTVDTVLEKNVTVTHSVNLLEDKHNGKLCKLRGVAPLHLGKCNIAGWILGNPECESLSTASSWSYIVETSSSDNGTCYPGDFIDYEELREQLSSVSSFERFEIFPKTSSWPNHDSNKGVTAACPHAGAKSFYKNLIWLVKKGNSYPKISKSYINDKGKEVLVLWGIHHPSTSADQQSLYQNADTYVFVGTSRYSKKFKPEIAIRPKVRDQEGRMNYYWTLVEPGDKITFEATGNLVVPRYAFAMERNAGSGIIISDTPVHDCNTTCQTPKGAINTSLPFQNIHPITIGKCPKYVKSTKLRLATGLRNVPSIQSRGLFGAIAGFIEGGWTGMVDGWYGYHHQNEQGSGYAADLKSTQKAIDEITNKVNSVIEKMNTQFTAVGKEFNHLEKRIENLNKKIDDGFLDIWTYNAELLVLLENERTLDYHDSNVKNLYEKVRSQLKNNAKEIGNGCFEFYHKCDNTCMESVKNGTYDYPKYSEEAKLNREEIDGVKLESTRIYQILAIYSTVASSLVLVVSLGAISFWMCSNGSLQCRICI

SEQ ID NO: 9739 - protein, 566 aa, synthetic construct; identical to SEQ ID NO: 9738
  REGION 1..566: note = hemagglutinin__InfluenzaA__AFX96728

SEQ ID NO: 9740 - protein, 566 aa, synthetic construct; identical to SEQ ID NO: 3139
  REGION 1..566: note = hemagglutinin__InfluenzaA__AFX96738

SEQ ID NO: 9741 - protein, 566 aa, synthetic construct
  REGION 1..566: note = hemagglutinin__InfluenzaA__AFX96748
MKAILVVLLYTIATANADTLCIGYHANNSTDTVDTVIEKNVTVTHSVNLLEDKHNGKLCKLRGVAPLHLGKCNIAGWILGNPECESLSTASSWSYIVETSSSDNGTCYPGDFIDYEELREQLSSVSSFERFEMFPKTSSWPNHDSNKGVTAACPHAGAKSFYKNLIWLVKKGNSYPKLSKSYINDKGKEVLVLWGIHHPSTSADQQSLYQNADAYVFVGTSRYSKKFKPEIAIRPKVRDQEGRMNYYWTLVEPGDKITFEATGNLVVPRYAFAMERNAGSGIIISDTPVHDCNTTCQTPKGAINTSLPFQNIHPITIGKCPKYVKSTKLRLATGLRNVPSIQSRGLFGAIAGFIEGGWTGMVDGWYGYHHQNEQGSGYAADLKSTQNAIDEITNKVNSVIEKMNTQFTAVGKEFNHLEKRIENLNKKVDDGFLDIWTYNAELLVLLENERTLDYHDSNVKNLYEKVRSQLKNNAKEIGNGCFEFYHKCDNTCMESVKNGTYDYPKYSEEAKLNREEIDGVKLESTRIYQILAIYSTVASSLVLVVSLGAISFWMCSNGSLQCRICI

SEQ ID NO: 9742 - protein, 566 aa, synthetic construct
  REGION 1..566: note = hemagglutinin__InfluenzaA__AFX96758
MKAILVVLLYTFATANADTLCIGYHANNSTDTVDTVLEKNVTVTHSVNLLEDKHNGKLCKLRGVAPLHLGKCNIAGWILGNPECESLSTASSWSYIVETSSSDNGTCYPGDFIDYEELREQLSSVSSFERFEMFPKTSSWPNHDSNKGVTAACPHAGAKSFYKNLIWLVKKGNSYPKLSKSYINDKGKEVLVLWGIHHPSTSADQQSLYQNADTYVFVGTSRYSKKFKPEIAIRPKVRDQEGRMNYYWTLVEPGDKITFEATGNLVVPRYAFAMERNAGSGIIISDTPVHDCNTTCQTPKGAINTSLPFQNIHPITIGKCPKYVKSTKLRLATGLRNVPSIQSRGLFGAIAGFIEGGWTGMVDGWYGYHHQNEQGSGYAADLKSTQNAIDEITNKVNSVIEKMNTQFTAVGKEFNHLEKRIENLNKKIDDGFLDIWTYNAELLVLLENERTLDYHDSNVKNLYEKVRSQLKNNAKEIGNGCFEFYHKCDNTCMESVKNGTYDYPKYSEEAKLNREEIDGVKLESTRIYQILAIYSTVASSLVLVVSLGAISFWMCSNGSLQCRICI

SEQ ID NO: 9743 - protein, 566 aa, synthetic construct
  REGION 1..566: note = hemagglutinin__InfluenzaA__AFX96768
MKAILVVLLYTFATANADTLCIGYHANNSTDTVDTVLEKNVTVTHSVNLLEDKHNGKLCKLRGVAPLHLGKCNIAGWILGNPECESLSTAISWSYIVETSSSDNGTCYPGDFIDYEELREQLSSVSSFERFEIFPKTSSWPNHDSNKGVTAACPHAGAKSFYKNLIWLVKKGNSYPKLSKSYINDKGKEVLVLWGIHHPSTSADQQSLYQNADAYVFVGTSRYSKKFKPEIAIRPKVRDQEGRMNYYWTLVEPGDKITFEATGNLVVPRYAFAMERNAGSGIIISDTPVHDCNTTCQTPKGAINTSLPFQNIHPITIGKCPKYVKSTKLRLATGLRNVPSIQSRGLFGAIAGFIEGGWTGMVDGWYGYHHQNEQGSGYAADLKSTQNAIDEITNKVNSVIEKMNTQFTAVGKEFNHLEKRIENLNKKVDDGFLDIWTYNAELLVLLENERTLDYHDSNVKNLYEKVRSQLKNNAKEIGNGCFEFYHKCDNTCMESVKNGTYDYPKYSEEAKLNREEIDGVKLESTKIYQILAIYSTVASSLVLVVSLGAISFWMCSNGSLQCRICI

SEQ ID NO: 9744 - protein, 566 aa, synthetic construct
  REGION 1..566: note = hemagglutinin__InfluenzaA__AFX96778
MKAILVILLYTFATANADTLCIGYHANNSTDTVDTILEKNVTVTHSVNLLEDKHNGKLCKLRGVAPLHLGKCNIAGWILGNPECESLSTASSWSYIVETSSSDNGTCYPGDFIDYEELREQLSSVSSFERFEIFPKTSSWPNHDSNKGVTAACPHAGAKSFYKNLIWLVKKGNSYPKLSKSYINDKGKEVLVLWGIHHPSTSADQQSLYQNADAYVFVGTSRYSKKFKPEIAIRPKVRDQEGRMNYYWTLVEPGDKITFEATGNLVVPRYAFAMERNAGSGIIISDTPVHDCNTTCQTPKGAINTSLPFQNIHPITIGKCPKYVKSTKLRLATGLRNVPSIQSRGLFGAIAGFIEGGWTGMVDGWYGYHHQNEQGSGYAADLKSTQNAIDEITNKVNSVIEKMNTQFTAVGKEFNHLEKRIENLNKKVDDGFLDIWTYNAELLVLLENERTLDYHDSNVKNLYEKVRSQLKNNAKEIGNGCFEFYHKCDNTCMESVKNGTYDYPKYSEEAKLNREEIDGVKLESTRIYQILAIYSTVASSLVLVVSLGAISFWMCSNGSLQCRICI

SEQ ID NO: 9745 - protein, 566 aa, synthetic construct
  REGION 1..566: note = hemagglutinin__InfluenzaA__AFX96788
MKAILVVLLYTFATANADTLCIGYHANNSTDTVDTVLEKNVTVTHSVNLLEDKHNGKLCKLRGVAPLHLGKCNIAGWILGNPECESLSTASSWSYIVETSSSDNGTCYPGDFIDYEELREQLSSVSSFERFEIFPKTSSWPNHDSNKGVTAACPHAGAKSFYKNLIWLVKKGNSYPKLSKSYINDKGKEVLVLWGIHHPSTSADQQSLYQNADAYVFVGTSRYSKKFKPEIAIRPKVRDQEGRMNYYWTLVEPGDKITFEATGNLVVPRYAFAMEKNAGSGIIISDTPVHDCNTTCQTPKGAINTSLPFQNIHPITIGKCPKYVKSTKLRLATGLRNVPSIQSRGLFGAIAGFIEGGWTGMVDGWYGYHHQNEQGSGYAADLKSTQNAIDKITNKVNSVIEKMNTQFTAVGKEFNHLEKRIENLNKKVDDGFLDIWTYNAELLVLLENERTLDYHDSNVKNLYEKVRSQLKNNAKEIGNGCFEFYHKCDNTCMESVKNGTYDYPKYSEEAKLNREEIDGVKLESTRIYQILAIYSTVASSLVLVVSLGAISFWMCSNGSLQCRICI

SEQ ID NO: 9746 - protein, 566 aa, synthetic construct; identical to SEQ ID NO: 9745
  REGION 1..566: note = hemagglutinin__InfluenzaA__AFX96798

SEQ ID NO: 9747 - protein, 566 aa, synthetic construct; identical to SEQ ID NO: 3829
  REGION 1..566: note = hemagglutinin__InfluenzaA__AFX96808

SEQ ID NO: 9748 - protein, 566 aa, synthetic construct; identical to SEQ ID NO: 6909
  REGION 1..566: note = hemagglutinin__InfluenzaA__AFX96818

SEQ ID NO: 9749 - protein, 566 aa, synthetic construct; identical to SEQ ID NO: 9745
  REGION 1..566: note = hemagglutinin__InfluenzaA__AFX96828

SEQ ID NO: 9750 - protein, 566 aa, synthetic construct; identical to SEQ ID NO: 5266
  REGION 1..566: note = hemagglutinin__InfluenzaA__AFX96838

SEQ ID NO: 9751 - protein, 566 aa, synthetic construct
  REGION 1..566: note = hemagglutinin__InfluenzaA__AFX96856
MKAILVVLLYTFATANADTLCIGYHANNSTDTVDTVLEKNVTVTHSVNLLEDKHNGKLCKLRGVAPLHLGKCNIAGWILGNPECESLSTASSWSYIVETSSSDNGTCYPGDFIDYEELREQLSSVSSFERFEIFPKTSSWPNHDSNKGVTAACTHAGAKSFYKNLIWLVKKGNSYPKLSKSYINDKGKEVLVLWGIHHPSTSADQQSLYQNADAYVFVGTSRYSKKFKPEIAIRPKVRDQEGRMNYYWTLVEPGDKITFEATGNLVVPRYAFAMERNAGSGIIISDTPVHDCNTTCQTPKGAINTSLPFQNIHPITIGKCPKYVKSTKLRLATGLRNVPSIQSRGLFGAIAGFIEGGWTGMVDGWYGYHHQNEQGSGYAADLKSTQNAIDEITNKVNSVIEKMNTQFTAVGKEFNHLEKRIENLNKKVDDGFLDIWTYNAELLVLLENERTLDYHDSNVKNLYEKVRSQLKNNAKEIGNGCFEFYHKCDNTCMESVKNGTYDYPKYSEEAKLNREEIDGVKLESTRIYQILAIYSTVASSLVLVVSLGAISFWMCSNGSLQCRICI

SEQ ID NO: 9752 - protein, 566 aa, synthetic construct; identical to SEQ ID NO: 9734
  REGION 1..566: note = hemagglutinin__InfluenzaA__AFX96904

SEQ ID NO: 9753 - protein, 566 aa, synthetic construct; identical to SEQ ID NO: 4169
  REGION 1..566: note = hemagglutinin__InfluenzaA__AFX96914

SEQ ID NO: 9754 - protein, 566 aa, synthetic construct
  REGION 1..566: note = hemagglutinin__InfluenzaA__AFX96924
MKAILVVLLYTFATANADTLCIGYHANNSTDTVDTVLEKNVTVTHSVNLLEDKHNGKLCKLRGVAPLHLGKCNIAGWILGNPECESLSTASSWSYIVETSSSDNGTCYPGDFIDYEELREQLSSVSSFERFEIFPKTSSWPNHDSNKGVTAACPHAGAKSFYKNLIWLVKKGNSYPKLSKSYINDKGKEVLVLWGIHHPSTSADQQSLYQNADAYVFVGTSRYSKRFKPEIAIRPKVRDQEGRMNYYWTLVEPGDKITFEATGNLVVPRYAFAMERNAGSGIIISDTPVHDCNTTCQTPKGAINTSLPFQNIHPITIGKCPKYVKSTKLRLATGLRNVPSIQSRGLFGAIAGFIEGGWTGMVDGWYGYHHQNEQGSGYAADLKSTQNAIDEITNKVNSVIEKMNTQFTAVGKEFNHLEKRIENLNKKVDDGFLDIWTYNAELLVLLENERTLDYHDSNVKNLYEKVRSQLKNNAKEIGNGCFEFYHKCDNTCMESVKNGTYDYPKYSEEAKLNREEIDGVKLESTRIYQILAIYSTVASSLVLVVSLGAISFWMCSNGSLQCRICI

SEQ ID NO: 9755 - protein, 566 aa, synthetic construct; identical to SEQ ID NO: 2669
  REGION 1..566: note = hemagglutinin__InfluenzaA__AFX96934

SEQ ID NO: 9756 - protein, 566 aa, synthetic construct
  REGION 1..566: note = hemagglutinin__InfluenzaA__AFY24097
MKAILVVLLYTFATANADTLCIGYHADNSTDTVDTVLEKNVTVTHSVDLLEDKHNGKLCKLRGVAPLHLGKCNIAGWILGNPECESLSTASSWSYIVETSSSDNGTCYPGDFIDYEELREQLSSVSSFERFEIFPKTSSWPNHDSNKGVTAACPHAGAKSFYKNLIWLVKKGNSYPKLNKSYINDKGKEVLVLWGIHHPSTSTDQQSLYQNADAYVFVGTSRYSKKFKPEIAIRPKVRDQEGRMNYYWTLVEPGDKITFEATGNLVVPRYAFAMERNAGSGIIISDTPVHDCNTTCQTPKGAINTSLPFQNIHPITIGKCPKYVKSTKLRLATGLRNVPSIQSRGLFGAIAGFIEGGWTGMVDGWYGYHHQNEQGSGYAADLKSTQNAIDEITNKVNSVIEKMNTQFTAVGKEFNHLEKRIENLNKKVDDGFLDIWTYNAELLVLLENERTLDYHDSNVKNLYEKVRSQLKNNAKEIGNGCFEFYHKCDNTCMESVKNGTYDYPKYSEEAKLNREEIDGVKLESTRIYQILAIYSTVASSLVLVVSLGAISFWMCSNGSLQCRICI

SEQ ID NO: 9757 - protein, 566 aa, synthetic construct; identical to SEQ ID NO: 630
  REGION 1..566: note = hemagglutinin__InfluenzaA__AFY24162

SEQ ID NO: 9758 - protein, 566 aa, synthetic construct
  REGION 1..566: note = hemagglutinin__InfluenzaA__AFY24195
MKTIIALSYILCLVFAQKLPGNDNSTATLCLGHHAVPNGTIVKTITNDQIEVTNATELVQSSSTGGICDSPHQILDGENCTLIDALLGDPQCDGFQNKKWDLFVERSKAYSNCYPYDVPDYASLRSLVASSGTLEFNNESFNWTGVTQNGTSSACKRRSNNSFFSRLNWLTHLKFKYPALNVTMPNNEKFDKLYIWGVHHPGTDNDQIFLYAQASGRITVSTKRSQQTVIPNIGSRPRIRNIPSRISIYWTIVKPGDILLINSTGNLIAPRGYFKIRSGKSSIMRSDAPIGKCNSECITPNGSIPNDKPFQNVNRITYGACPRYVKQNTLKLATGMRNVPEKQTRGIFGAIAGFIENGWEGMVDGWYGFRHQNSEGIGQAADLKSTQAAINQINGKLNRLIGKTNEKFHQIEKEFSEVEGRIQDLEKYVEDTKIDLWSYNAELLVALENQHTIDLTDSEMNKLFERTKKQLRENAEDMGNGCFKIYHKCDNACIGSIRNGTYDHDVYRDEALNNRFQIKGVELKSGYKDWILWISFAISCFLLCVALLGFIMWACQKGNIRCNICI

SEQ ID NO: 9759 - protein, 566 aa, synthetic construct; identical to SEQ ID NO: 185
  REGION 1..566: note = hemagglutinin__InfluenzaA__AFY24217

SEQ ID NO: 9760 - protein, 566 aa, synthetic construct
  REGION 1..566: note = hemagglutinin__InfluenzaA__AGB08294
MKAILVVLLYTFATANADTLCIGYHANNSTDTVDTVLEKNVTVTHSVNLLEDKHNGKLCKLRGVAPLHLGKCNIAGWILGNPECESLSTASSWSYIVETSSSDNGTCYPGDFINYEELREQLSSVSSFERFEIFPKTSSWPNHDSNKGVTAACPQAGAKSFYKNLIWLVKKGNSYPKLIKSYINDKGKEVLVLWGIHHPSTSADQQSLYQNADAYVFVGTSKYSKKFKPEIAVRPKVRDQEGRMNYYWTLVEPGDKITFEATGNLLVPRYAFVMERNAGSGIIISDTPVHDCNTTCQTPKGAINTSLPFQNIHPITIGKCPKYVKSTKLRLATGLRNIPSIQSRGLFGAIAGFIEGGWTGMVDGWYGYHHQNAQGSGYAADLKSTQNAIDKITNKVNSVIEKMNTQFTAVGKEFNHLEKRIENLNKKVDDGFLDIWTYNAELLVLLENERTLDYHDSNVKNLYEKVRSQLKNNAKEIGNGCFEFYHKCDNTCMESVKNGTYDYPRYSEEAKLNREEIDGVKLESTRIYQILAIYSTVASSLVLVVSLGAISFWMCSNGSLQCRICI

SEQ ID NO: 9761 - protein, 566 aa, synthetic construct
  REGION 1..566: note = hemagglutinin__InfluenzaA__AGB08295
MKAILVVLLYTFATANADTLCIGYHANNSTDTVDTVIEKNVTVTHSVNLLEDKHNGKLCKLRGVAPLHLGKCNIAGWILGNPECESLSTASSWSYIVETSSSDNGTCYPGDFINYEELREQLSSVSSFERFEIFPKTSSWPNHDSNKGVTAACPHAGAKSFYKNLIWLVKKGNSYPKLSKSYINDKRKEVLVLWGIHHPSTTADQQSLYQNADAYVFVGTSRYSKKFKPEIAIRPKVRDQEGRMNYYWTLVEPGDKITFEATGNLVVPRYAFAMERTAGSGIIISDTPVHDCNTTCQTPKGAINTSLPFQNIHPITIGKCPKYVKSTKLRLATGLRNIPSIQSRGLFGAIAGFIEGGWTGMVDGWYGYHHQNEQGSGYAADLKSTQNAIDKITNKVNSVIEKMNTQFTAVGKEFNHLEKRIENLNKKVDDGFLDIWTYNAELLVLLENERTLDYHDSNVKNLYEKVRNQLKNNAKEIGNGCFEFYHKCDNTCMESVKNGTYDYPKYSEEAKLNREEIDGVKLESTRIYQILAIYSTVASSLVLVVSLGAISFWMCSNGSLQCRICI

SEQ ID NO: 9762 - protein, 566 aa, synthetic construct
  REGION 1..566: note = hemagglutinin__InfluenzaA__AGB08296
MKAILVVLLYTFATANADTLCIGYHANNSTDTVDTVLEKNVTVTHSVNLLEDKHNGKLCKLRGVAPLHLGKCNIAGWILGNPECESLSTASSWSYIVETSSSDNGTCYPGDFINYEELREQLSSVSSFERFEIFPKTSSWPNHDSNKGVTAACPHAGAKSFYKNLIWLVKKGNSYPKLSKSYINDKGKEVLVLWGIHHPSTTADQQSLYQNADAYVFVGTSRYSKKFKPEIAIRPKVRGQEGRMNYYWTLVEPGDKITFEATGNLVVPRYAFAMERTAGSGIIISDTPVHDCNTTCQTPKGAINTSLPFQNIHPITIGKCPKYVKSTKLRLATGLRNVPSIQSRGLFGAIAGFIEGGWTGMVDGWYGYHHQNEQGSGYAADLKSTQNAIDKITNKVNSVIEKMNTQFTAVGKEFNHLEKRIENLNKKVDDGFLDIWTYNAELLVLLENERTLDYHDSNVKNLYEKVRNQLKNNAKEIGNGCFEFYHKCDNTCMESVKNGTYDYPKYSEEAKLNREEIDGVKLESTRIYQILAIYSTVASSLVLVVSLGAISFWMCSNGSLQCRICI

SEQ ID NO: 9763 - protein, 566 aa, synthetic construct
  REGION 1..566: note = hemagglutinin__InfluenzaA__AGB08297
MKAILVVLLYTFATANADTLCIGYHANNSTDTVDTVLEKNVTVTHSVNLLEDKHNGKLCKLRGVAPLHLGKCNIAGWILGNPECESLSTASSWSYIVETSSSDNGTCYPGDFINYEELREQLSSVSSFERFEIFPKTSSWPNHDSNKGVTAACPHAGAKSFYKNLIWLVKKGNSYPKLSESYINDKGKEVLVLWGIHHPSTTADQQSLYQNADAYVFVGTSRYSKKFKPEIAIRPKVRDQEGRMNYYWTLVEPGDKITFEATGNLVVPRYAFAMERTAGSGIIISDTPVHDCNTTCQTPKGAINTSLPFQNIHPITIGKCPKYVKSTKLRLATGLRNVPSIQSRGLFGAIAGFIEGGWTGMVDGWYGYHHQNEQGSGYAADLKSTQNAIDKITNKVNSVIEKMNTQFTAVGKEFNHLEKRIENLNKKVDDGFLDIWTYNAELLVLLENERTLDYHDSNVKNLYEKVRNQLKNNAKEIGNGCFEFYHKCDNTCMESVKNGTYDYPKYSEEAKLNREEIDGVKLESTRIYQILAIYSTVASSLVLVVSLGAISFWMCSNGSLQCRICI

SEQ ID NO: 9764 - protein, 566 aa, synthetic construct
  REGION 1..566: note = hemagglutinin__InfluenzaA__AGB08298
MKAILVVLLYTFATANADTLCIGYHANNSTDTVDTVLEKNVTVTHSVNLLEDKHNGKLCKLRGIAPLHLGKCNIAGWILGNPECESLSTASSWSYIVETSSSDNGTCYPGDFINYEELREQLSSVSSFERFEIFPKTSSWPNHDSNKGVTAACPHAGAKSFYKNLIWLVKKGNSYPRLSKSYINDKGKEVLVLWGIHHPSTTADQQSLYQNADAYVFVGTSRYSKKFKPEIAIRPKVRDQEGRMNYYWTLVEPGDKITFEATGNLVVPRYAFAMERTAGSGIIISDTPVHDCNTTCQTPKGAINTSLPFQNIHPITIGKCPKYVKSTKLRLATGLRNVPSIQSRGLFGAIAGFIEGGWTGMVDGWYGYHHQNEQGSGYAADLKSTQNAIDKITNKVNSVIEKMNTQFTAVGKEFNQLEKRIENLNKKVDDGFLDIWTYNAELLVLLENERTLDYHDSNVKNLYEKVRNQLKNNAKEIGNGCFEFYHKCDNTCMESVKNGTYDYPKYSEEAKLNREEIDGVKLESTRIYQILAIYSTVASSLVLVVSLGAISFWMCSNGSLQCRICI

SEQ ID NO: 9765 - protein, 566 aa, synthetic construct
  REGION 1..566: note = hemagglutinin__InfluenzaA__AGB08301
MKTIIALSYILCLVFAQELPGNDDSTATLCLGHHAVPNGTIVKTITNDQIEVTNATELVQSSSTGEICNSPHQILDGENCTLIDALLGDPQCDGFQNKKWDLFVERSKAHSNCYPYDVPDYASLRSLVASSGTLEFNNESFNWTGVTQNGTSSACIRRSNNSFFSRLNWLTHLNFKYPALNVTMPNNEQFDKLYIWGVHHPGTDKDQIFLYAQASGRITVSTKRSQQAVIPNIGSRPRVRNIPSRVSIYWTVVKPGDILLINSTGNLIAPRGYFKIRSGKSSIMRSDAPIGKCNSACITPNGSIPNDKPFQNVNRITYGACPRYVKQNTLKLATGMRNVPEKQTRGIFGAIAGFIENGWEGMVDGWYGFRHQNSEGRGQAADLKSTQAAIDQINGKLNRLIGKTNEKFHQIEKEFSEVEGRIQDLEKYVEDTKIDLWSYNAELLVALENQHTIDLTDSEMNKLFEKTKKQLRENAEDMGNGCFKIYHKCDNACIGSIRNGTYDHNVYRDEALNNRFQIKGVELKSGYKDWILWISFAISCFLLCVALLGFIMWACQKGNIRCNICI

SEQ ID NO: 9766 - protein, 566 aa, synthetic construct
  REGION 1..566: note = hemagglutinin__InfluenzaA__AGB08343
MKTIIALSYIFCLVLAQDLPGNDNSTATLCLGHHAVPNGTLVKTITNDQIEVTNATELVQSSSTGRICNNPHRILDGINCTLIDALLGDPHCDGFQNKKWDLFVERSKAFSNCYPYDVPDYASLRSLVASSGTLEFINEGFNWTGVTQNGGSYACKRGPDNGFFSRLNWLYKSESTYPVLNVTMPNNDNFDKLYIWGVHHPSTDKEQTNLYVQASGRVTVSTKRSQQTIIPNVGSRPWVRGLSSRISIYWTIVKPGDILVINSNGNLIAPRGYFKIRNGKSSIMRSDAPIGTCSSECITPNGSIPNDKPFQNVNKITYGACPKYVKQNTLKLATGMRNVPEKQTRGIFGAIAGFIENGWEGMIDGWYGFRHQNSEGTGQAADLKSTQAAIDQINGKLNRVIEKTNEKFHQIEKEFSEVEGRIQDLEKYVEDTKIDLWSYNAELLVALENQHTIDLTDSEMNKLFEKTRRQLRENAEDMGNGCFKIYHKCDNACIGSIRNGTYDHDVYRDEALNNRFQIKGVELKSGYKDWILWISFAISCFLLCVVLLGFIMWACQKGNIRCNICI

SEQ ID NO: 9767 - protein, 566 aa, synthetic construct
  REGION 1..566: note = hemagglutinin__InfluenzaA__AGB08362
MKTIIALSYIFCLALGQDLPGNDNSTATLCLGHHAVPNGTLVKTITDDQIEVTNATELVQSSSTGKICNNPHRILDGINCTLIDALLGDPHCDVFQDETWDLFVERSKAFSNCYPYDVPDYASLRSLVASSGTLEFITEGFTWTGVTQNGGSNACKRGPGSGFFSRLNWLTKSGSTYPVLNVTMPNNDNFDKLYIWGVHHPSTNQEQTSLYVQASGRVTVSTRRSQQTIIPNIGSRPWVRGLSSRISIYWTIVKPGDVLVINSNGNLIAPRGYFKMRTGKSSIMRSDAPIDTCISECITPNGSIPNDKPFQNVNKITYGACPKYVKQNTLKLATGMRNVPEKQTRGLFGAIAGFIENGWEGMIDGWYGFRHQNSEGTGQAADLKSTQAAIDQINGKLNRVIEKTNEKFHQIEKEFSEVEGRIQDLEKYVEDTKIDLWSYNAELLVALENQHTIDLTDSEMNKLFDKTRRQLRENAEDMGNGCFKIYHKCDNACIESIRNGTYDHDVYRDEALNNRFQIKGVELKSGYKDWILWISFAISCFLLCVVLLGFIMWACQRGNIRCNICI

SEQ ID NO: 9768 - protein, 566 aa, synthetic construct; identical to SEQ ID NO: 6822
  REGION 1..566: note = hemagglutinin__InfluenzaA__AGB12986

SEQ ID NO: 9769 - protein, 566 aa, synthetic construct; identical to SEQ ID NO: 7086
  REGION 1..566: note = hemagglutinin__InfluenzaA__AGB13006

SEQ ID NO: 9770 - protein, 566 aa, synthetic construct
  REGION 1..566: note = hemagglutinin__InfluenzaA__AGB13016
MKAILVVLLYTIATANADTLCIGYHANNSTDTVDTVLEKNVTVTHSVNLLEDKHNGKLCKLRGVAPLHLGKCNIAGWILGNPECESLSTASSWSYIVETSSSDNGTCYPGDFINYEELREQLSSVSSFERFEIFPKTSSWPNHDSNKGVTAACPHAGAKSFYKNLIWLVKKGNSYPKLSKSYINDKGKEVLVLWGIHHPSTTADQQSLYQNADAYVFVGTSRYSKKFKPEIAIRPKVRDQEGRMNYYWTLVEPGDKITFEAIGNLVVPRYAFAMEKNAGSGIIISDTPVHDCNTTCQTPKGAINTSLPFQNIHPITIGKCPKYVKSTKLRLATGLRNVPSIQSRGLFGAIAGFIEGGWTGMVDGWYGYHHQNEQGSGYAADLKSTQNAIDKITNKVNSVIEKMNTQFTAVGKEFNHLEKRIENLNKKVDDGFLDIWTYNAELLVLLENERTLDYHDSNVKNLYEKVRNQLKNNAKEIGNGCFEFYHKCDNTCMESVKNGTYDYPKYSEEAKLNREEIDGVKLESARVYQILAIYSTVASSLVLVVSLGAISFWMCSNGSLQCRICI

SEQ ID NO: 9771 - protein, 566 aa, synthetic construct; identical to SEQ ID NO: 6867
  REGION 1..566: note = hemagglutinin__InfluenzaA__AGB13026

SEQ ID NO: 9772 - protein, 566 aa, synthetic construct; identical to SEQ ID NO: 6809
  REGION 1..566: note = hemagglutinin__InfluenzaA__AGB13036

SEQ ID NO: 9773 - protein, 566 aa, synthetic construct
  REGION 1..566: note = hemagglutinin__InfluenzaA__AGB13048
MKAILVVLLYTFATANADTLCIGYHANNSTDTVDTVLEKNVTVTHSVNLLEDKHNGKLCKLRGVAPLHLGKCNIAGWILGNPECESLSTASSWSYIVETSSSDNGTCYPGDFINYEELREQLSSVSSFERFEIFPKTSSWPNHDSNKGVTAACPHAGAKSFYKNLIWLVKKGNSYPKLSKSYINDKGKEVLVLWGIHHPSTTADQQSLYQNADAYVFVGTSRYSKKFKPEIAIRPKVRDQEGRMNYYWTLVEPGDKITFEATGNLVVPRYAFAMERNAGSGIIISDTPVHDCNTTCQTPKGAINTSLPFQNIHPITIGKCPKYVKSTKLRLATGLRNVPSIQSRGLFGAIAGFIEGGWTGMVDGWYGYHHQNEQGSGYAADLKSTQNAIDKITNKVNSVIEKMNTQFTAVGKEFNHLEKRIENLNKKVDDGFLDIWTYNAELLVLLENERTLDYHDSNVKNLYEKVRNQLKNNAKEIGNGCFEFYHKCDNTCIESVKNGTYDYPKYSEEAKLNREEIDGVKLESTRIYQILAIYSTVASSLVLVVSLGAISFWMCSNGSLQCRICI

SEQ ID NO: 9774 - protein, 566 aa, synthetic construct
  REGION 1..566: note = hemagglutinin__InfluenzaA__AGB13066
MKAILVVLLYTFATANADTLCIGYHANNSTDTVDTVLEKNVTVTHSVNLLEDKHNGKLCKLRGVAPLHLGKCNIAGWILGNPECESLSTASSWSYIVETSSSDNGTCYPGDFIDYEELREQLSSVSSFERFEIFPKTSSWPNHDSNKGVTAACPHAGAKSFYKNLIWLVKKGNSYPKLSKSYINDKGKEVLVLWGIHHPSTSADQQSLYQNADAYVFVGTSRYSKKFKPEIAIRPKVRDQEGRMNYYWTLVEPGDKITFEATGNLVVPRYAFAMERNAGSGIIISDTPVHDCNTTCQTPKGAINTSLPFQNIHPITIGKCPKYVKGTKLRLATGLRNVPSIQSRGLFGAIAGFIEGGWTGMVDGWYGYHHQNEQGSGYAADLKSTQHAIDEITNKVNSVIEKMNTQFTAVGKEFNHLEKRIENLNKKVDDGFLDIWTYNAELLVLLENERTLDYHDSNVKNLYEKVRSQLKNNAKEIGNGCFEFYHKCDNTCMESVKNGTYDYPKYSEEAKLNREEIDGVKLESTRIYQILAIYSTVASSLVLVVSLGAISFWMCSNGSLQCRICI

SEQ ID NO: 9775 - protein, 566 aa, synthetic construct; identical to SEQ ID NO: 6909
  REGION 1..566: note = hemagglutinin__InfluenzaA__AGB13082

SEQ ID NO: 9776 - protein, 566 aa, synthetic construct; identical to SEQ ID NO: 6809
  REGION 1..566: note = hemagglutinin__InfluenzaA__AGB13105

SEQ ID NO: 9777 - protein, 566 aa, synthetic construct; identical to SEQ ID NO: 6867
  REGION 1..566: note = hemagglutinin__InfluenzaA__AGB13125

SEQ ID NO: 9778 - protein, 566 aa, synthetic construct; identical to SEQ ID NO: 6867
  REGION 1..566: note = hemagglutinin__InfluenzaA__AGB13130

SEQ ID NO: 9779 - protein, 566 aa, synthetic construct
  REGION 1..566: note = hemagglutinin__InfluenzaA__AGB13140
MKAILVVLLYTFATANADTLCIGYHANNSTDTVDTVLEKNVTVTHSVNLLEDKHNGKLCKLRGVAPLHLGKCNIAGWILGNPECESLSTASLWSYIVETSSSDNGTCYPGDFIDYEELREQLSSVSSFERFEIFPKTSSWPNHDSNKGVTAACPHAGAKSFYKNLIWLVKKGNSYPKLSKSYINDKGKEVLVLWGIHHPSTTADQQSLYQNADTYVFVGTSRYSKKFKPEIAIRPKVRDQEGRMNYYWTLVEPGDKITFEATGNLVVPRYAFAMERNAGSGIIISDTPVHDCNTTCQTPKGAINTSLPFQNIHPITIGKCPKYVKSTKLRLATGLRNVPSIQSRGLFGAIAGFIEGGWTGMVDGWYGYHHQNEQGSGYAADLKSTQNAIDKITNKVNSVIEKMNTQFTAVGKEFNHLEKRIENLNKKVDDGFLDIWTYNAELLVLLENERTLDYHDSNVKNLYEKVRNQLKNNAKEIGNGCFEFYHKCDNTCMESVKNGTYDYPKYSEEAKLNREEIDGVKLESTRIYQILAIYSTVASSLVLVVSLGAISFWMCSNGSLQCRICI

SEQ ID NO: 9780 - protein, 566 aa, synthetic construct
  REGION 1..566: note = hemagglutinin__InfluenzaA__AGB13159
MKAILVVMLYTFATANADTLCIGYHANNSTDTVDTVLEKNVTVTHSVNLLEDKHNGKLCKLRGVASLHLGKCNIAGWILGNPECESLSTASSWSYIVETSSSDNGTCYPGDFIDYEELREQLSSVSSFERFEIFPKTSSWPNHDSNKGVTAACPHAGAKGFYKNLIWLVKKGNSYPKLSKSYINDKGKEVLVLWGIHHPSTTADQQSLYQNADTYVFVGTSRYSKKFKPEIAIRPKVRDQEGRMNYYWTLVEPGDKITFEATGNLVVPRYAFAMERNAGSGIIISDTPVHDCNTTCQTPKGAINTSLPFQNIHPITIGKCPKYVKSTKLRLATGLRNVPSIQSRGLFGAIAGFIEGGWTGMVDGWYGYHHQNEQGSGYAADLKSTQNAIDKITNKVNSVIEKMNTQFTAVGKEFNHLEKRIENLNKKVDDGFLDIWTYNAELLVLLENERTLDYHDSNVKNLYEKVRNQLKNNAKEIGNGCFEFYHKCDNTCMESVKNGTYDYPKYSEEAKLNREEIDGVKLESTRIYQILAIYSTVASSLVLVVSLGAISFWMCSNGSLQCRICI

SEQ ID NO: 9781 - protein, 566 aa, synthetic construct; identical to SEQ ID NO: 6824
  REGION 1..566: note = hemagglutinin__InfluenzaA__AGB13170

SEQ ID NO: 9782 - protein, 566 aa, synthetic construct
  REGION 1..566: note = hemagglutinin__InfluenzaA__AGB13180
MKAILVVLLYTFATANADTLCIGYHANNSTDTVDTVLEKNVTVTHSVNLLEDKHNGKLCKLRGVAPLHLGKCNIAGWILGNPECESLSTASSWSYIVETSSSDNGTCYPGDFINYEELREQLSSVSSFERFEIFPKTSSWPNHDSNKGVTAACPHAGAKSFYKNLIWLVKKGNSYPKLSKSYINDKGKEVLVLWGIHHPSTTADQQSLYQNADAYVFVGTSRYSKKFKPEIAIRPKVRDQEGRMNYYWTLVEPGDKITFEATGNLVVPRYAFAMERNAGSGIIISDTSVHDCNTTCQTPKGAINTSLPFQNIHPITIGKCPKYVKSTKLRLATGLRNVPSIQSRGLFGAIAGFIEGGWTGMVDGWYGYHHQNEQGSGYAADLKSTQNAIDKITNKVNSVIEKMNTQFTAVGKEFNHLEKRIENLNKKVDDGFLDIWTYNAELLVLLENERTLDYHDSNVKNLYEKVRNQLKNNAKEIGNGCFEFYHKCDNTCMESVKNGTYDYPKYSEEAKLNREEIDGVKLESTRIYQILAIYSTVASSLVLVVSLGAISFWMCSNGSLQCRICI

SEQ ID NO: 9783 - protein, 566 aa, synthetic construct; identical to SEQ ID NO: 6867
  REGION 1..566: note = hemagglutinin__InfluenzaA__AGB13190

SEQ ID NO: 9784 - protein, 566 aa, synthetic construct
  REGION 1..566: note = hemagglutinin__InfluenzaA__AGB13200
MKAILVVLLYTFATANADTLCIGYHANNSTDTVDTVLEKNVTVTHSVNLLEDKHNGKLCKLRGVAPLHLGKCNIAGWILGNPECESLSTASSWSYIVETSSSDNGTCYPGDFINYEELREQLSSVSSFERFEIFPKTSSWPNHDSNKGVTAACPHAGVKSFYKNLIWLVKKGNSYPKLSKSYINDKGKEVLVLWGIHHPSTTTDQQSLYQNADAYVFVGTSKYSKKFKPEIAIRPKVRDQEGRMNYYWTLVEPGDKITFEATGNLVVPRYAFAMERNAGSGIIISDTPVHDCNTTCQTPKGAINTSLPFQNIHPITIGKCPKYVKSTKLRLATGLRNVPSIQSRGLFGAIAGFIEGGWTGMVDGWYGYHHQNEQGSGYAADLKSTQNAIDKITNKVNSVIEKMNTQFTAVGKEFNHLEKRIENLNKKVDDGFLDIWTYNAELLVLLENERTLDYHDSNVKNLYEKVRNQLKNNAKEIGNGCFEFYHKCDNTCMESVKNGTYDYPKYSEEAKLNREEIDGVKLESTRIYQILAIYSTVASSLVLVVSLGAISFWMCSNGSLQCRICI

SEQ ID NO: 9785 - protein, 566 aa, synthetic construct
  REGION 1..566: note = hemagglutinin__InfluenzaA__AGB13210
MKATLVVLLYTFATANADTLCIGYHANNSTDTVDTVLEKNVTVTHSVNLLEDKHNGKLCKLRGVAPLHLGKCNIAGWILGNPECESLSTASSWSYIVETSSSDNGTCYPGDFINYEELREQLSSVSSFERFEIFPKTSSWPNHDSNKGVTAACPHAGAKSFYKNLIWLVKKGNSYPKLSKSYINDKGKEVLVLWGIHHPSTSADQQSLYQNADAYVFVGTSKYSKKFKPEIAVRPKVRDQEGRMNYYWTLVEPGDKITFEATGNLLVPRYAFAMERNAGSGIIISDTPVHDCNTTCQTPKGAINTSLPFQNIHPITIGKCPKYVKSTKLRLATGLRNVPSIQSRGLFGAIAGFIEGGWTGMVDGWYGYHHQNEQGSGYAADLKSTQNAIDKITNKVNSVIEKMNTQFTAVGKEFNHLEKRIENLNKKVDDGFLDIWTYNAELLVLLENERTLDYHDSNVKNLYEKVRSQLKNNAKEIGNGCFEFYHKCDNTCMESVKNGTYDYPKYSEEAKLNREEIDGVKLESTRIYQILAIYSTVASSLVLVVSLGAISFWMCSNGSLQCRICI

SEQ ID NO: 9786 - protein, 566 aa, synthetic construct
  REGION 1..566: note = hemagglutinin__InfluenzaA__AGB13220
MKAILVVLLYTFATANADTLCIGYHANNSTDTVDTVLEKNVTVTHSVNLLEDKHNGKLCKLRGVAPLHLGKCNIAGWILGNPECESLSTASSWSYIVETSISDNGTCYPGDFINYEELREQLSSVSSFERFEIFPKTSSWPNHDSNKGVTAACPHAGAKSFYKNLIWLVKKGNSYPKLSKSYINDKGKEVLVLWGIHHPSTTADQQSLYQNADAYVFVGTSKYSKKFKPEIAIRPKVRDQEGRMNYYWTLVEPGDKITFEATGNLVVPRYAFAMERNAGSGIIISDTPVHDCNTTCQTPKGAINTSLPFQNIHPITIGKCPKYVKSTKLRLATGLRNVPSIQSRGLFGAIAGFIEGGWTGMVDGWYGYHHQNEQGSGYAADLKSTQNAIDKITNKVNSVIEKMNTQFTAVGKEFNHLEKRIENLNKKVDDGFLDIWTYNAELLVLLENERTLDYHDSNVKNLYEKVRNQLKNNAKEIGNGCFEFYHKCDNTCMESVKNGTYDYPKYSEEAKLNREEIDGVKLESTRIYQILAIYSTVASSLVLVVSLGAISFWMCSNGSLQCRICI

SEQ ID NO: 9787 - protein, 566 aa, synthetic construct
  REGION 1..566: note = hemagglutinin__InfluenzaA__AGB13230
MKAILVVLLYTFATANADTLCIGYHANNSTDTVDTVLEKNVTVTHSVNLLEDNHNGKLCKLRGVAPLHLGKCNIAGWILGNPECESLSTASSWSYIVETSSSDNGTCYPGDFINYEELREQLSSVSSFERFEIFPKTSSWPNHDSNKGVTAACPHAGAKSFYKNLIWLVKKGNSYPKLSKSYINDKGKEVLVLWGIHHPSTTADQQSLYQNADAYVFVGTSRYSKKFKPEIAIRPKVRDQEGRMNYYWTLVEPGDKITFEATGNLVVPRYAFAMERNAGSGIIISDTPVHDCNTTCQTPKGAINTSLPFQNIHPITIGKCPKYVKSTKLRLATGLRNVPSIQSRGLFGAIAGFIEGGWTGMVDGWYGYHHQNEQGSGYAADLKSTQNAIDKITNKVNSVIEKMNTQFTAVGKEFNRLEKRIENLNKKVDDGFLDIWTYNAELLVLLENERTLDYHDSNVKNLYEKVRNQLKNNAKEIGNGCFEFYHKCDNTCMESVKNGTYDYPKYSEEAKLNREEIDGVKLESTRIYQILAIYSTVASSLVLVVSLGAISFWMCSNGSLQCRICI

SEQ ID NO: 9788 - protein, 566 aa, synthetic construct; identical to SEQ ID NO: 6867
  REGION 1..566: note = hemagglutinin__InfluenzaA__AGB13240

SEQ ID NO: 9789 - protein, 566 aa, synthetic construct; identical to SEQ ID NO: 6867
  REGION 1..566: note = hemagglutinin__InfluenzaA__AGB13250

SEQ ID NO: 9790 - protein, 566 aa, synthetic construct
  REGION 1..566: note = hemagglutinin__InfluenzaA__AGB13260
MKAILVVLLYTFATANADTLCIGYHANNSTDTVDTVLEKNVTVTHSVNLLEDKHNGKLCKLRGVAPLHLGKCNIAGWILGNPECESLSTASSWSYIVETSSSDNGTCYPGDFIDYEELREQLSSVSSFERFEIFPKTSSWPNHDSNKGVTTACPHAGSKSFYKNLIWLVKKGNSYPKLSKSYINDKGKEVLVLWGIHHPPTSADQQSLYQNADAYVFVGTSRYSKKFKPEIAIRPKVRDQEGRMNYYWTLVEPGDKITFEATGNLVVPRYAFAMERNAGSGIIISDTPVHDCNTTCQTPKGAINTSLPFQNVHPITIGKCPKYVKSTKLRLATGLRNVPSIQSRGLFGAIAGFIEGGWTGMVDGWYGYHHQNEQGSGYAADLKSTQNAIDEITNKVNSVIEKMNTQFTAVGKEFNHLEKRIENLNKKVDDGFLDIWTYNAELLVLLENERTLDYHDSNVKNLYEKVRSQLKNNAKEIGNGCFEFYHKCDNTCMESIKNGTYDYPKYSEEAKLNREEIDGVKLESTRIYQILAIYSTVASSLVLVVSLGAISFWMCSNGSLQCRICI

SEQ ID NO: 9791 - protein, 566 aa, synthetic construct
  REGION 1..566: note = hemagglutinin__InfluenzaA__AGB13270
MKAILVVLLYTFATANADTLCIGYHANNSTDTVDTVLEKNVTVTHSVNLLEDKHNGKLCKLRGVAPLHLGKCNIAGWILGNPECESLSTASSWSYIVETSSSDNGTCYPGDFINYEELREQLSSVSSFERFEIFPKTSSWPNHDSNKGVTAACPHAGAKSFYKNLIWLVKKGNSYPKLSKSYINDKGKEVLVLWGIHHPSTSADQQSLYQNADAYVFVGTSKYSKKFKPEIAVRPKVRDQEGRMNYYWTLVEPGDKITFEATGNLLVPRYAFAMERNAGSGIIISDTPVHDCNTTCQTPKGAINTSLPFQNIHPITIGKCPKYVKSTKLRLATGLRNVPSIQSRGLFGAIAGFIEGGWTGMVDGWYGYHHQNEQGSGYAADLKSTQNAIDKITNKVNSVIEKMNTQFTAVGKEFNHLEKRIENLNKKVDDGFLDIWTYNAELLVLLENERTLDYHDSNVKNLYEKVRSQLKNNAKEIGNGCFEFYHKCDNTCMESVKNGTYDYPKYSEEAKLNREKIDGVKLESTRIYQILAIYSTVASSLVLVVSLGAISFWMCSNGSLQCRICI

SEQ ID NO: 9792 - protein, 566 aa, synthetic construct
  REGION 1..566: note = hemagglutinin__InfluenzaA__AGB13280
MKAILVVLLYTFATANADTLCIGYHANNSTDTVDTVLEKNVTVTHSVNLLEDKHNGKLCKLRGVAPLHLGKCNIAGWILGNPECESLSTASSWSYIVETSSSDNGTCYPGDFINYEELREQLSSVSSFERFEIFPKTSSWPNHDSNKGVTAACPHAGAKSFYKNLIWLVKKGNSYPKLSKSYINDKGKEVLVLWGIHHPSTNADQQSLYQNADAYVFVGTSKYSKKFKPEIAVRPKVRDQEGRMNYYWTLVEPGDKITFEATGNLLVPRYAFAMERNAGSGIIISDTPVHDCNTTCQTPKGAINTSLPFQNIHPITIGKCPKYVKSTKLRLATGLRNVPSIQSRGLFGAIAGFIEGGWTGMVDGWYGYHHQNGQGSGYAADLKSTQNAIDKITNKVNSVIEKMNTQFTAVGKEFNHLEKRIENLNKKVDDGFLDIWTYNAELLVLLENERTLDYHDSNVKNLYEKVRSQLKNNAKEIGNGCFEFYHKCDNTCMESVKNGTYDYPKYSEEAKLNREEIDGVKLESTRIYQILAIYSTVASSLVLVVSLGAISFWMCSNGSLQCRICI

SEQ ID NO: 9793 - protein, 566 aa, synthetic construct
  REGION 1..566: note = hemagglutinin__InfluenzaA__AGB13290
MKAILVVLLYTFATANADTLCIGYHANNSTDTVDTVLEKNVTVTHSVNLLEVKHNGKLCKLRGVAPLHLGKCNIAGWILGNPECESLSTASSWSYIVETSSSDNGTCYPGDFINYEELREQLSSVSSFERFEIFPKTSSWPNHDSNKGVTAACPHAGAKSFYKNLIWLVKKGNSYPKLSKSYINDKGKEVLVLWGIHHPSTTADQQSLYQNADAYVFVGTSRYSKKFKPEIAIRPKVRDQEGRMNYYWTLVEPGDKITFEATGNLVVPRYAFAMERNAGSGIIISDTPVHDCNTTCQTPKGAINTSLPFQNIHPITIGKCPKYVKSTKLRLATGLRNVPSIQSRGLFGAIAGFIEGGWTGMVDGWYGYHHQNEQGSGYAADLKSTQNAIDKITNKVNSVIEKMNTQFTAVGKEFNHLEKRIENLNKKVDDGFLDIWTYNAELLVLLENERTLDYHDSNVKNLYEKVRNQLKNNAKEIGNGCFEFYHKCDNTCMESVKNGTYDYPKYSEEAKLNREEIDGVKLESTRIYQILAIYSTVASSLVLVVSLGAISFWMCSNGSLQCRICI

SEQ ID NO: 9794 - protein, 566 aa, synthetic construct; identical to SEQ ID NO: 6867
  REGION 1..566: note = hemagglutinin__InfluenzaA__AGB13300

SEQ ID NO: 9795 - protein, 566 aa, synthetic construct
  REGION 1..566: note = hemagglutinin__InfluenzaA__AGB13310
MKAILVVLLYTFATANADTLCIGYHANNSTDTVDTVLEKNVTVTHSVNLLEDKHNGKLCKLRGVAPLHLGKCNIAGWILGNPECESLSTASSWSYIVETSSSDNGTCYPGDFIDYEELREQLSSVSSFERFEIFPKTSSWPNHDSNKGVTAACPHAGAKSFYKNLIWLVKKGNSYPKLSKSYINDKGKEVLVLWGVHHPSTSADQQSLYQNADAYVFVGTSRYSKKFKPEIAIRPKVRDQEGRMNYYWTLVEPGDKITFEATGNLVVPRYAFAMERNAGSGIIISDTPVHDCNTTCQTPKGAINTSLPFQNIHPITIGKCPKYVKSTKLRLATGLRNVPSIQSRGLFGAIAGFIEGGWTGMVDGWYGYHHQNEQGSGYAADLKSTQHAIDEITNKVNSVIEKMNTQFTAVGKEFNHLEKRIENLNKKVDDGFLDIWTYNAELLVLLENERTLDYHDSNVKNLYEKVRSQLKNNAKEIGNGCFEFYHKCDNTCMESVKNGTYDYPKYSEEAKLNREEIDGVKLESTRIYQILAIYSTVASSLVLVVSLGAISFWMCSNGSLQCRICI

SEQ ID NO: 9796 - protein, 566 aa, synthetic construct
  REGION 1..566: note = hemagglutinin__InfluenzaA__AGB13320
MKAILVVLLYTIATANADTLCIGYHANNSTDTVDTVLEKNVTVTHSVNLLEDKHNGKLCKLRGVAPLHLGKCNIAGWILGNPECESLSTASSWSYIVETSSSDNGTCYPGDFINYEELREQLSSVSSFERFEIFPKTSSWPNHDSNKGVTAACPHAGAKSFYKNLIWLVKKGNSYPKLSKSYINDKGKEVLVLWGIHHPSTTADQQSLYQNADAYVFVGTSRYSKKFKPEIAIRPKVRDQEGRMNYYWTLVEPGDKITFEATGNLVVPRYAFAMEKNAGSGIIISDTPVHDCNTTCQTPKGAINTSLPFQNIHPITIGKCPKYVKSTKLRLATGLRNVPSIQSRGLFGAIAGFIEGGWTGMVDGWYGYHHQNEQGSGYAADLKSTQNAIDKITNKVNSVIEKMNTQFTAVGKEFNHLEKRIENLNKKVDDGFLDIWTYNAELLVLLENERTLDYHDSNVKNLYEKVRNQLKNNAKEIGNGCFEFYHKCDNTCMESVKNGTYDYPKYSEEAKLNREEIDGVKLESARVYQILAIYSTVASSLVLVVSLGAISFWMCSNGSLQCRICI

SEQ ID NO: 9797 - protein, 566 aa, synthetic construct
  REGION 1..566: note = hemagglutinin__InfluenzaA__AGB13330
MKAILVVMLYTFATANADTLCIGYHANNSTDTVDTVLEKNVTVTHSVNLLEDKHNGKLCKLRGVAPLHLGKCNIAGWILGNPECESLSTASSWSYIVETSSSDNGTCYPGDFIDYEELREQLSSVSSFERFEIFPKTSSWPNHDSNKGVTAACPHAGAKGFYKNLIWLVKKGNSYPKLSKSYSNDKGKEVLVLWGIHHPSTTADQQSLYQNADTYVFVGTSRYSKKFKPEIAIRPKVRDQEGRMNYYWTLVEPGDKITFEATGNLVVPRYAFAMERNAGSGIIISDTPVHDCNTTCQTPKGAINTSLPFQNIHPITIGKCPKYVKSTKLRLATGLRNVPSIQSRGLFGAIAGFIEGGWTGMVDGWYGYHHQNEQGSGYAADLKSTQNAIDKITNKVNSVIEKMNTQFTAVGKEFNHLEKRIENLNKKVDDGFLDIWTYNAELLVLLENERTLDYHDSNVKNLYEKVRNQLKNNAKEIGNGCFEFYHKCDNTCMESVKNGTYDYPKYSEEAKLNREEIDGVKLESTRIYQILAIYSTVASSLVLVVSLGAISFWMCSNGSLQCRICI

SEQ ID NO: 9798 - protein, 566 aa, synthetic construct; identical to SEQ ID NO: 6867
  REGION 1..566: note = hemagglutinin__InfluenzaA__AGB13340

SEQ ID NO: 9799 - protein, 566 aa, synthetic construct
  REGION 1..566: note = hemagglutinin__InfluenzaA__AGB13350
MKAILVVLLYTFATANADTLCIGYHANNSTETVDTVLEKNVTVTHSVNLLEDKHNGKLCKLRGVAPLHLGKCNIAGWILGNPECESLSTASSWSYIVETSSSDNGTCYPGDFINYEELREQLSSVSSFERFEIFPKTSSWPNHDSNKGVTAACPQAGAKSFYKNLIWLVKKGNSYPKLSKSYINDKGKEVLVLWGIHHPSTSADQQSLYQNADAYVFVGTSKYSKKFKPEIAVRPKVRDQEGRMNYYWTLVEPGDKITFEATGNLLVPRYAFAMERNAGSGIIISDTPVHDCNTTCQTPKGAINTSLPFQNIHPITIGKCPKYVKSTKLRLATGLRNVPSIQSRGLFGAIAGFIEGGWTGMVDGWYGYHHQNAQGSGYAADLKSTQNAIDKITNKVNSVIEKMNTQFTAVGKEFNHLEKRIENLNKKVDDGFLDIWTYNAELLVLLENERTLDYHDSNVKNLYEKVRSQLKNNAKEIGNGCFEFYHKCDNTCMESVKNGTYDYPKYSEEAKLNREEIDGVKLESTRIYQILAIYSTVASSLVLVVSLGAISFWMCSNGSLQCRICI

SEQ ID NO: 9800 - protein, 566 aa, synthetic construct
  REGION 1..566: note = hemagglutinin__InfluenzaA__AGB13360
MKAILVVLLYTFATANADTLCIGYHANNSTDTVDTVLEKNVTVTHSVNLLEDKHNGKLCKLRGVAPLHLGKCNIAGWILGNPECESLSTASSWSYIVETSSSDNGTCYPGDFINYEELREQLSSVSSFERFEIFPKTSSWPNHDSNKGVTAACPHAGAKSFYKNLIWLVKKGNSYPKLSKSYINDKGKEVLVLWGIHHPSTSADQQSLYQNADAYVFVGTSKYSKKFKPEIAVRPKVRDQEGRMNYYWTLVEPGDKITFEATGNLLVPRYAFAMERNAGSGIIISDTPVHDCNTTCQTPKGAINTSLPFQNIHPITIGKCPKYVKSTKLRLATGLRNVPSIQSRGLFGAIAGFIEGGWTGMVDGWYGYHHQNEQGSGYAADLKSTQNAIDKITNKVNSVIEKMNTQFTAVGKEFNHLEKRIENLNKKVDDGFLDIWTYNAEMLVLLENEKTLDYHDSNVKNLYEKVRSQLKNNAKEIGNGCFEFYHKCDNTCMESVKNGTYDYPKYSEEAKLNREEIDGVKLESTRIYQILAIYSTVASSLVLVVSLGAISFWMCSNGSLQCRICI

SEQ ID NO: 9801 - protein, 566 aa, synthetic construct
  REGION 1..566: note = hemagglutinin__InfluenzaA__AGB13380
MKAILVVLLYTFATAKADTLCIGYHANNSTDTVDTVLEKNVTVTHSVNLLEDKHNGKLCKLRGVAPLHLGKCNIAGWILGNPECESLSTASSWSYIVETSSSDNGTCYPGDFINYEELREQLSSVSSFERFEIFPKTSSWPNHDSNKGVTAACPHAGAKSFYKNLIWLVKKGNSYPKLSKSYINDKGKEVLVLWGIHHPSTTADQQSLYQNADAYVFVGTSRYSKKFKPEIAIRPKVRDQEGRMNYYWTLVEPGDKITFEATGNLVVPRYAFAMERNPGSGIIISDTPVHDCNTTCQTPKGAINTSLPFQNIHPITIGKCPKYVKSTKLRLATGLRNVPSIQSRGLFGAIAGFIEGGWTGMVDGWYGYHHQNEQGSGYAADLKSTQNAIDKITNKVNSVIEKMNTQFTAVGKEFNHLEKRIENLNKKVDDGFLDIWTYNAELLVLLENERTLDYHDSNVKNLYEKVRNQLKNNAKEIGNGCFEFYHKCDNTCMESVKNGTYDYPKYSEEAKLNREEIDGVKLESTRIYQILAIYSTVASSLVLVVSLGAISFWMCSNGSLQCRICI

SEQ ID NO: 9802 - protein, 566 aa, synthetic construct; identical to SEQ ID NO: 6435
  REGION 1..566: note = hemagglutinin__InfluenzaA__AGB13390

SEQ ID NO: 9803 - protein, 566 aa, synthetic construct; identical to SEQ ID NO: 7042
  REGION 1..566: note = hemagglutinin__InfluenzaA__AGB13400

SEQ ID NO: 9804 - protein, 566 aa, synthetic construct; identical to SEQ ID NO: 6435
  REGION 1..566: note = hemagglutinin__InfluenzaA__AGB13410

SEQ ID NO: 9805 - protein, 566 aa, synthetic construct; identical to SEQ ID NO: 6454
  REGION 1..566: note = hemagglutinin__InfluenzaA__AGB13420

SEQ ID NO: 9806 - protein, 566 aa, synthetic construct
  REGION 1..566: note = hemagglutinin__InfluenzaA__AGB13430
MKAILVVLLYTFATANADTLCIGYHANNSTDTVDTVLEKNVTVTHSVNLLEDKHNGKLCKLRGVAPLHLGKCNIAGWILGNPECESLSTASSWSYIVETSSSDNGTCYPGDFIDYEELREQLSSVSSFERFEMFPKTSSWPNHDSNKGVTTACPHAGAKSFYKNLIWLVKKGNSYPKLSKSYINDKGKEVLVLWGIHHPPTSADQQSLYQNADAYVFVGTSRYSKKFKPEIAIRPKVRDQEGRMNYYWTLVEPGDKITFEATGNLVVPRYAFAMERNAGSGIIISDTPVHDCNTTCQTPKGAINTSLPFQNIHPITIGKCPKYVKSTKLRLATGLRNVPSIQSRGLFGAIAGFIEGGWTGMVDGWYGYHHQNEQGSGYAADLKSTQNAIDGITNKVNSVIEKMNTQFTAVGKEFNHLEKRIENLNKKVDDGFLDIWTYNAELLVLLENERTLDYHDSNVKNLYEKVRSQLKNNAKEIGNGCFEFYHKCDNTCMESVKNGTYDYPKYSEEAKLNREEIDGVKLESTMIYQILAIYSTVASSLVLVVSLGAISFWMCSNGSLQCRICI

SEQ ID NO: 9807 - protein, 566 aa, synthetic construct; identical to SEQ ID NO: 7042
  REGION 1..566: note = hemagglutinin__InfluenzaA__AGB13440

SEQ ID NO: 9808 - protein, 566 aa, synthetic construct; identical to SEQ ID NO: 6454
  REGION 1..566: note = hemagglutinin__InfluenzaA__AGB13450

SEQ ID NO: 9809 - protein, 566 aa, synthetic construct; identical to SEQ ID NO: 6435
  REGION 1..566: note = hemagglutinin__InfluenzaA__AGB13460

SEQ ID NO: 9810 - protein, 566 aa, synthetic construct; identical to SEQ ID NO: 6867
  REGION 1..566: note = hemagglutinin__InfluenzaA__AGB13470

SEQ ID NO: 9811 - protein, 566 aa, synthetic construct; identical to SEQ ID NO: 6454
  REGION 1..566: note = hemagglutinin__InfluenzaA__AGB13480

SEQ ID NO: 9812 - protein, 566 aa, synthetic construct; identical to SEQ ID NO: 6867
  REGION 1..566: note = hemagglutinin__InfluenzaA__AGB13490

SEQ ID NO: 9813 - protein, 566 aa, synthetic construct
  REGION 1..566: note = hemagglutinin__InfluenzaA__AGB13500
MKAILVVLLYTFATANADTLCIGYHANNSTDTVDTVLEKNVTVTHSVNLLEDKHNGKLCKLRGVAPLHLGKCNIAGWILGNPECESLSTASSWSYIVETSSSDNGTCYPGNFIDYEELREQLSSVSSFERFEIFPKTSSWPDHDSNKGVTAACPHAGAKGFYKNLIWLVKKGNSYPKLSKSYINDKGKEVLVLWGIHHPSTSADQQSLYQNADAYVFVGTSRYSKKFKPEIAIRPKVRDQEGRMNYYWTLVEPGDKITFEATGNLVAPRYAFAMERNAGSGIIISDTPVHDCNTTCQTPKGAINTSLPFQNIHPITIGKCPKYVKSTKLRLATGLRNVPSIQSRGLFGAIAGFIEGGWTGMVDGWYGYHHQNEQGSGYAADLKSTQNAIDKITNKVNSVIEKMNTQFTAVGKEFNHLEKRIENLNKKVDDGFLDIWTYNAELLVLLENERTLDYHDSNVKNLYEKVRSQLKNNAKEIGNGCFEFYHKCDNTCMESVKNGTYDYPKYSEEAKLNREEIDGVKLESTRIYQILAIYSTVASSLVLVVSLGAISFWMCSNGSLQCRICI

SEQ ID NO: 9814 - protein, 566 aa, synthetic construct; identical to SEQ ID NO: 7072
  REGION 1..566: note = hemagglutinin__InfluenzaA__AGB13520

SEQ ID NO: 9815 - protein, 566 aa, synthetic construct
  REGION 1..566: note = hemagglutinin__InfluenzaA__AGB13530
MKAILVVLLYTFATANADTLCIGYHANNSTDTVDTVLEKNVTVTHSVNLLEDKHNGKLCKLRGVAPLHLGKCNIAGWILGNPECESLSTASSWSYIVETSSSDNGTCYPGDFIDYEELREQLSSVSSFERFEIFPKTSSWPNHDSNKGVTAACPHAGAKSFYKNLIWLVKKGNSYPKLNKSYINDKGKEVLVLWGIHHPSTTADQQSLYQNADAYVFVGTSRYSKKFKPEIAIRPKVRDQEGRMNYYWTLVEPGDKITFEATGNLVVPRYAFAMERNAGSGIIISDTPVHDCNTTCQTPKGAINTSLPFQNIHPITIGKCPKYVKSTKLRLATGLRNVPSIQSRGLFGAIAGFIEGGWTGMVDGWYGYHHQNEQGSGYAADLKSTQNAIDKITNKVNSVIEKMNTQFTAVGKEFNHLEKRIENLNKKVDDGFLDIWTYNAELLVLLENERTLDYHDSNVKNLYEKVRNQLKNNAKEIGNGCFEFYHKCDNTCMESVKNGTYDYPKYSEEAKLNREEINGVKLESTRIYQILAIYSTVASSLVLVVSLGAISFWMCSNGSLQCRICI

SEQ ID NO: 9816 - protein, 566 aa, synthetic construct; identical to SEQ ID NO: 7086
  REGION 1..566: note = hemagglutinin__InfluenzaA__AGB13540

SEQ ID NO: 9817 - protein, 566 aa, synthetic construct; identical to SEQ ID NO: 7050
  REGION 1..566: note = hemagglutinin__InfluenzaA__AGB13550

SEQ ID NO: 9818 - protein, 566 aa, synthetic construct; identical to SEQ ID NO: 7050
  REGION 1..566: note = hemagglutinin__InfluenzaA__AGB13560

SEQ ID NO: 9819 - protein, 566 aa, synthetic construct; identical to SEQ ID NO: 6867
  REGION 1..566: note = hemagglutinin__InfluenzaA__AGB13570

SEQ ID NO: 9820 - protein, 566 aa, synthetic construct
  REGION 1..566: note = hemagglutinin__InfluenzaA__AGB13580
MKAILVVLLYTFATANADTLCIGYHANNSTDTVDTVLEKNVTVTHSVNLLEDKHNGKLCKLRGVAPLHLGKCNIAGWILGNPECESLSTASSWSYIVETSSSDNGTCYPGDFINYEELREQLSSVSSFERFEIFPKTSSWPNHDSNKGVTAACPHAGAKSFYKNLIWLVKKGNSYPKLSKSYINDKGKEVLVLWGIHHPSTTADQQSLYQNADAYVFVGTSRYSKKFKPEIAIRPKVRDQEGRMNYYWTLVEPGDKITFEATGNLVVPRYAFAMERNAGSGIIISDTPVHDCNTTCQTPKGAINTSLPFQNIHPITIGKCPKYVKSTKLRLATGLRNVPSIQSRGLFGAIAGFIEGGWTGMVDGWYGYHHQNEQGSGYAADLKSTQNAIDKITNKVNSVIEKMNTQFTAVGKEFNHLEKRIENLNKKVDDGFLDIWTYNAELLVLLENERTLDYHDSNVKNLYEKVRNQLKNNAKEIGNGCFEFYHKCNNTCMESVKNGTYDYPKYSEEAKLNREEIDGVKLESTRIYQILAIYSTVASSLVLVVSLGAISFWMCSNGSLQCRICI

SEQ ID NO: 9821 - protein, 566 aa, synthetic construct
  REGION 1..566: note = hemagglutinin__InfluenzaA__AGB13590
MKAILVVLLYTFATANADTLCIGYHANNSTDTVDTVLEKNVTVTHSVNLLEDKHNGKLCKLRGVAPLHLGKCNIAGWILGNPECESLSTASSWSYIVETSSSDNGTCYPGDFINYEELREQLSSVSSFERFEIFPKTSSWPNHDSNKGVTAACPHAGAKSFYKNLIWLVKKGNSYPKLSQSYINDKGKEVLVLWGIHHPSTTADQQSLYQNADAYVFVGTSRYSKKFKPEIAIRPKVRDQEGRMNYYWTLVEPGDKITFEATGNLVVPRYAFAMERNAGSGIIISDTPVHDCNTTCQTPKGAINTSLPFQNIHPITIGKCPKYVKSTKLRLATGLRNVPSIQSRGLFGAIAGFIEGGWTGMVDGWYGYHHQNEQGSGYAADLKSTQNAIDKITNKVNSVIEKMNTQFTAVGKEFNHLEKRIENLNKKVDDGFLDIWTYNAELLVLLENERTLDYHDSNVKNLYEKVRNQLKNNAKEIGNGCFEFYHKCDNTCMESVKNGTYDYPKYSEEAKLNREEIDGVKLESTRIYQILAIYSTVASSLVLVVSLGAISFWMCSNGSLQCRICI

SEQ ID NO: 9822 - protein, 566 aa, synthetic construct
  REGION 1..566: note = hemagglutinin__InfluenzaA__AGB13600
MKAILVVLLYTFATANADTLCIGYHANNSTDTVDTVLEKNVTVTHSVNLLEDKHNGKLCKLRGVAPLHLGKCNIAGWILGNPECESLSTASSWSYIVETSSSDNGTCYPGDFINYEELREQLSSVSSFERFEIFPKTSSWPNHDSNKGVTAACPHAGAKSFYKNLIWLVKKGNSYPKLNKSYINDKGKEVLVLWGIHHPSTTADQQSLYQNADAYVFVGTSRYSKKFKPEIAIRPKVRDQEGRMNYYWTLVEPGDKITFEATGNLVVPRYAFAMERNAGSGIIISDTPVHDCNTTCQTPKGAINTSLPFQNIHPITIGKCPKYVKSTKLRLATGLRNVPSIQSRGLFGAIAGFIEGGWTGMVDGWYGYHHQNEQGSGYAADLKSTQNAIDKITNKVNSVIEKMNTQFTAVGKEFNHLEKRIENLNKKVDDGFLDIWTYNAELLVLLENERTLDYHDSNVKNLYEKVRNQLKNNAKEIGNGCFEFYHKCDNTCMESVKNGTYDYPKYSEEAKLNREEIDGVKLESTRIYQILAIYSTVASSLVLVVSLGAISFWMCSNGSLQCRICI

SEQ ID NO: 9823 - protein, 566 aa, synthetic construct; identical to SEQ ID NO: 6867
  REGION 1..566: note = hemagglutinin__InfluenzaA__AGB13610

SEQ ID NO: 9824 - protein, 566 aa, synthetic construct; identical to SEQ ID NO: 7086
  REGION 1..566: note = hemagglutinin__InfluenzaA__AGB13620

SEQ ID NO: 9825 - protein, 566 aa, synthetic construct; identical to SEQ ID NO: 6454
  REGION 1..566: note = hemagglutinin__InfluenzaA__AGB13630

SEQ ID NO: 9826 - protein, 566 aa, synthetic construct
  REGION 1..566: note = hemagglutinin__InfluenzaA__AGB13640
MKAILVVLLYTFATANADTLCIGYHANNSTDTVDTVLEKNVTVTHSVNLLEDKHNGKLCKLRGVAPLHLGKCNIAGWILGNPECESLSTASSWSYIVETSSSDNGTCYPGDFIDYEELREQLSSVSSFERFEIFPKTSSWPNHDSNKGVTTACPHAGAKSFYKNLIWLVKKGNSYPKLSKSYINDKGKEVLVLWGIHHPPTSADQQSLYQNADAYVFVGTSRYSKKFKPEIAIRPKVRDQEGRMNYYWTLVEPGDKITFEATGNLVVPRYAFAMERNAGSGIIISDTPVHDCNTTCQTPKGAINTSLPFQNIHPITIGKCPKYVKSTKLRLATGLRNVPSIQSRGLFGAIAGFIEGGWTGMVDGWYGYHHQNEQGSGYAADLKSTQNAIDGITNKVNSVIEKMNTQFTAVGKEFNHLEKRIENLNKKVDDGFLDIWTYNAELLVLLENERTLDYHDSNVKNLYEKVRSQLKNNAKEIGNGCFEFYHKCDNTCMESVKNGTYDYPKYSEEAKLNREEIDGVKLESTMIYQILAIYSTVASSLVLIVSLGAISFWMCSNGSLQCRICI

SEQ ID NO: 9827 - protein, 566 aa, synthetic construct
  REGION 1..566: note = hemagglutinin__InfluenzaA__AGB13650
MKAILVVLLYTFATANADTLCIGYHANNSTDTVDTVLEKNVTVTHSVNLLEDKHNGKLCKLRGVAPLHLGKCNIAGWILGNPECESLSTASSWSYIVETSSSDNGTCYPGDFIDYEELREQLSSVSSFERFEIFPKTSSWPNHDSNKGVTTACPHAGAKSFYKNLIWLVKKGNSYPKLSKSYINDKGKEVLVLWGIHHPPTSADQQSLYQNADAYVFVGTSRYSKKFKPEIAIRPKVRDQEGRMNYYWTLVEPGDKITFEATGNLVVPRYAFAMERNAGSGIIISDTPVHDCNTTCQTPKGAINTSLPFQNIHPITIGKCPKYVKSTKLRLATGLRNVPSIQSRGLFGAIAGFIEGGWTGMVDGWYGYHHQNEQGSGYAADLKSTQNAIDGITNKVNSVIEKMNTQFTAVGKEFNHLEKRIENLNKKVDDGFLDIWTYNAELLILLENERTLDYHDSNVKNLYEKVRSQLKNNAKEIGNGCFEFYHKCDNTCMESVKNGTYDYPKYSEEAKLNREEIDGVKLESTMIYQILAIYSTVASSLVLIVSLGAISFWMCSNGSLQCRICI

SEQ ID NO: 9828 - protein, 566 aa, synthetic construct; identical to SEQ ID NO: 6824
  REGION 1..566: note = hemagglutinin__InfluenzaA__AGB13660

SEQ ID NO: 9829 - protein, 566 aa, synthetic construct; identical to SEQ ID NO: 6435
  REGION 1..566: note = hemagglutinin__InfluenzaA__AGB13721

SEQ ID NO: 9830 - protein, 566 aa, synthetic construct; identical to SEQ ID NO: 6867
  REGION 1..566: note = hemagglutinin__InfluenzaA__AGB13731

SEQ ID NO: 9831 - protein, 566 aa, synthetic construct
  REGION 1..566: note = hemagglutinin__InfluenzaA__AGB51356
MKAILLVLLCTFAATNADTLCIGYHANNSTDTVDTVLEKNVTVTHSVNLLEDRHNGKLCKLGGIAPLHLGKCNIAGWLLGNPECELLLTVSSWSYIVETSNSDNGTCYPGDFINYEELREQLSSVSSFERFEIFPKTSSWPNHETNRGVTAACPYAGANSFYRNLIWLVEKGNSYPKLSKSYVNNKGKEVLVLWGIHHPPTSTDQQSLYQNADAYVFVGSSKYNRKFKPEIAARPKVRGQAGRMNYYWTLIEPGDTITFEATGNLVVPRYAFAMNRGSGSGIIISDAPVHDCNTKCQTPKGAINTSLPFQNIHPVTIGECPKYVKSTKLRMATGLRNIPSIQSRGLFGAIAGFIEGGWTGMIDGWYGYHHQNEQGSGYAADQRSTQNAIDGITNKVNSVIEKMNTQFTAVGKEFNHLEKRIENLNKKVDDGFLDIWTYNAELLVLLENERTLDFHDSNVKNLYEKVRSQLRNNAKEIGNGCFEFYHKCDDTCMESVKNGTYDYPKYSEESKLNREEIDGVKLESTRIYQILAIYSTVASSLVLLVSLGAISFWMCSNGSLQCRICI

SEQ ID NO: 9832 - protein, 566 aa, synthetic construct
  REGION 1..566: note = hemagglutinin__InfluenzaA__AGB97269
MKAILVVLLYTFATANADTLCIGYHANNSTDTVDTVLEKNITVTHSVNLLEDKHNGKLCKLRGVAPLHLGKCNIAGWILGNPECETLSTASSWSYIVETSSSDNGTCYPGDFIDYEELREQLSSVSSFERFEIFPKTSSWPNHDSNKGVTAACPHAGAKGFYKNLIWLVKKGNSYPKLSKSYINDKGKEVLVLWGIHHPSTTADQQSLYQNADTYVFVGTSRYSKKFKPEIAIRPKVRDQEGRMNYYWTLVEPGDKITFEATGNLVVPRYAFAMERDAGSGIIISDTPVHDCNTTCQTPKGAINTSLPFQNIHPITIGKCPKYVKSTKLRLATGLRNVPSIQSRGLFGAIAGFIEGGWTGMVDGWYGYHHQNEQGSGYAADLKSTQNAIDKITNKVNSVIEKMNTQFTAVGKEFNHLEKRIENLNKKVDDGFLDIWTYNAELLVLLENERTLDYHDSNVKNLYEKVRNQLKNNAKEIGNGCFEFYHKCDNTCMESVKNGTYDYPKYSEEAKLNREEIDGVKLESTRIYQILAIYSTAASSLVLVVSLGAISFWMCSNGSLQCRICI

SEQ ID NO: 9833 - protein, 566 aa, synthetic construct; identical to SEQ ID NO: 8186
  REGION 1..566: note = hemagglutinin__InfluenzaA__AGB97273

SEQ ID NO: 9834 - protein, 566 aa, synthetic construct
  REGION 1..566: note = hemagglutinin__InfluenzaA__AGB97288
MKTIIALGYILCLVFAQKLPGNDNSTATLCLGHHAVPNGTIVKTITNDRIEVTNATELVQNSSIGEICDSPHQILDGKNCTLIDALLGDPQCDGFQNKKWDLFIERSKAYSNCYPYDVPDYASLRSLVASSGTLEFNNESFNWTGVTQNGTSSACIRRSNSSFFSRLNWLTHLNFKYPALNVTMPNNEQFDKLYIWGVHHPGTDKDQIFLYAKSSGRITVSTKRSQQAVIPNIGSRPRIRNIPSRISIYWTIVKPGDILLINSTGNLIAPRGYFKIRSGKSSIMRSDAPIGKCKSECITPNGSIPNDKPFQNVNRITYGACPRYVKQSTLKLATGMRNVPEKQTRGIFGAIAGFIENGWEGMVDGWYGFRHQNSEGRGQAADLKSTQAAIDQINGKLNRLIGKTNEKFHQIEKEFSEVEGRIQDLEKYVEDTKIDLWSYNAELLVALENQHTIDLTDSEMNKLFEKTKKQLRENAEDMGNGCFKIYHKCDNACIGSIRNGTYDHNVYRDEALNNRFQIKGVELKSGYKDWILWISFAISCFLLCVALLGFIMWACQKGNIRCNICI

SEQ ID NO: 9835 - protein, 566 aa, synthetic construct
  REGION 1..566: note = hemagglutinin__InfluenzaA__AGB97292
MKTIIALSYILCLVFAQELPGNDDSTATLCLGHHAVPNGTIVKTITNDQIEVTNATELVQSSSTGEICNSPHQILDGENCTLIDALLGDPQCDGFQNKKWDLFVERSKAHSNCYPYDVPDYASLRSLVASSGTLEFNNESFNWTGVTQNGTSSACIRRSNNSFFSRLNWLTHLNFKYPALNVTMPNNEQFDKLYIWGVHHPGTDKDQIFLYAQASGRITVSTKRSQQAVIPNIGSRPRVRNIPSRVSIYWTIVKPGDILLINSTGNLIAPRGYFKIRSGKSSIMRSDAPIGKCNSACITPNGSIPNDKPFQNVNRITYGACPRYVKQNTLKLATGMRNVPEKQTRGIFGAIAGFIENGWEGMVDGWYGFRHQNSEGRGQAADLKSTQAAIDQINGKLNRLIGKTNEKFHQIEKEFSEVEGRIQDLEKYVEDTKIDLWSYNAELLVALENQHTIDLTDSEMNKLFEKTKKQLRENAEDMGNGCFKIYHKCDNACIGSIRNGTYDHDVYRDEALNNRFQIKGVELKSGYKDWILWISFAISCFLLCVALLGFIMWACQKGNIRCNICI

SEQ ID NO: 9836 - protein, 566 aa, synthetic construct
  REGION 1..566: note = hemagglutinin__InfluenzaA__AGB97300
MKTIIALSYILCLVFAQKLPGNDNSTATLCLGHHAVPNGTIVKTITNDRIEVTNATELVQNSSIGEICDSPHQILDGENCTLIDALLGDPQCDGFQNKKWDLFVERSKAYSNCYPYDVPDYASLRSLVASSGTLEFNNESFNWTGVTQNGTSSACIRRSNSSFFSRLNWLTHLNFKYPALNVTMPNNEQFDKLYIWGVHHPGTDKDQIFLYAQSSGRITVSTKRSQQAVIPNIGSRPRIRNIPSRISIYWTIVKPGDILLINSTGNLIAPRGYFKIRSGKSSIMRSDAPIGKCKSECITPNGSIPNDKPFQNVNRITYGACPRYVKQSTLKLATGMRNVPEKQTRGIFGAIAGFIENGWEGMVDGWYGFRHQNSEGRGQAADLKSTQAAIDQINGKLNRLIGKTNEKFHQIEKEFSEVEGRIQDLEKYVEDTKIDLWSYNAELLVALENQHTIDLTDSEMNKLFEKTRKQLRENAEDMGNGCFKIYHKCDNACIGSIRNGTYDHDVYRDEALNNRFQIKGVELKSGYKDWILWISFAISCFLLCVALLGFIMWACQKGNIRCNICI

SEQ ID NO: 9837 - protein, 566 aa, synthetic construct
  REGION 1..566: note = hemagglutinin__InfluenzaA__AGE89267
MKAILIVLLYTFATANADTLCIGYHANNSTDTVDTVLEKNVTVTHSVDLLEDKHNGKLCKLRGVAPLHLGKCNIAGWILGNPECESLSTASSWSYIVETSSSDNGTCYPGDFIDYEELREQLSSVSSFERFEIFPKTSSWPNHDSNKGVTAACPHAGEKSFYKNLIWLVKKGNSYPKLNKSYINDKGKEVLVLWGIHHPSTSTDQQSLYQNADAYVFVGTSRYSKKFKPEIAIRPKVRDQEGRMNYYWTLVEPGDKITFEATGNLVVPRYAFAMERNAGSGIIISDTPIHDCNTTCQTPKGAINTSLPFQNIHPITIGKCPKYVKSTKLRLATGLRNVPSIQSRGLFGAIAGFIEGGWTGMVDGWYGYHHQNEQGSGYAADLKSTQNAIDEITNKVNSVIEKMNTQFTAVGKEFNHLEKRIENLNKKVDDGFLDIWTYNAELLVLLENERTLDYHDSNVKNLYEKVKSQLKNNAKEIGNGCFEFYHKCDNTCMESVKNGTYDYPKYSEEAKLNREKIDGVKLESTRIYQILAIYSTVASSLVLVVSLGAISFWMCSNGSLQCRICI

SEQ ID NO: 9838 - protein, 566 aa, synthetic construct
  REGION 1..566: note = hemagglutinin__InfluenzaA__AGE89277
MKAILIVLLYTFATANADTLCIGYHANNSTDTVDTVLEKNVTVTHSVDLLEDKHNGKLCKLRGVAPLHLGKCNIAGWILGNPECESLSTASSWSYIVETSSSDNGTCYPGDFIDYEELREQLNSVSSFERFEIFPKTSSWPNHDSNKGVTAACPHAGEKSFYKNLIWLVKKGNSYPKLNKSYINDKGKEVLVLWGIHHPSTSTDQQSLYQNADAYVFVGTSRYSKKFKPEIAIRPKVRDQEGRMNYYWTLVEPGDKITFEATGNLVVPRYAFAMERNAGSGIIISDTPIHDCNTTCQTPKGAINTSLPFQNIHPITIGKCPKYVKSTKLRLATGLRNVPSIQSRGLFGAIAGFIEGGWTGMVDGWYGYHHQNEQGSGYAADLKSTQNAIDEITNKVNSVIEKMNTQFTAVGKEFNHLEKRIENLNKKVDDGFLDIWTYNAELLVLLENERTLDYHDSNVKNLYEKVKSQLKNNAKEIGNGCFEFYHKCDNTCMESVKNGTYDYPKYSEEAKLNREKIDGVKLESTRIYQILAIYSTVASSLVLVVSLGAISFWMCSNGSLQCRICI

SEQ ID NO: 9839 - protein, 566 aa, synthetic construct; identical to SEQ ID NO: 8356
  REGION 1..566: note = hemagglutinin__InfluenzaA__AGE89287

SEQ ID NO: 9840 - protein, 566 aa, synthetic construct
  REGION 1..566: note = hemagglutinin__InfluenzaA__AGE89298
MKAILVVLLYTFATANADTLCIGYHANNSTDTVDTVLEKNVTVTHSVNLLEDKHNGKLCKLRGVAPLHLGKCNIAGWILGNPECESLSTASSWSYIVETSSSDNGTCYPGDFIDYEELREQLSSVSSFERFEIFPKTSSWPNHDSNKGVTAACPHAGAKGFYKNLIWLVKKGNSYPKLSKSYINDKGKEVLVLWGIHHPSTTADQQSLYQNADTYVFVGTSRYSKKFKPEIAIRPKVRDQEGRMNYYWTLVEPGDKITFEATGNLVVPRYAFAMERNAGSGIIISDTPVHDCNTTCQTPKGAINTSLPFQNIHPITIGKCPKYVKSTKLRLATGLRNVPSIQSRGLFGAIAGFIEGGWTGMVDGWYGYHHQNEQGSGYAADLKSTQNAIDKITNKVNSVIEKMNTQFTAVGKEFNHLEKRIENLNKKVDDGFLDIWTYNAELLVLLENERTLDYHDSNVKNLYEKVRNQLKNNAKEIGNGCFEFYHKCDNTCMESVKNGTYDYPKYSEEAKLNREEIDGVKLESTRIYQILAIYSTVASSLILVVSLGAISFWMCSNGSLQCRICI

SEQ ID NO: 9841 - protein, 566 aa, synthetic construct; identical to SEQ ID NO: 6909
  REGION 1..566: note = hemagglutinin__InfluenzaA__AGE89308

SEQ ID NO: 9842 - protein, 566 aa, synthetic construct; identical to SEQ ID NO: 8351
  REGION 1..566: note = hemagglutinin__InfluenzaA__AGE89318

SEQ ID NO: 9843 - protein, 566 aa, synthetic construct
  REGION 1..566: note = hemagglutinin__InfluenzaA__AGE89329
MKTIIALSYILCLVFAQKLPGNDDSTATLCLGHHAVPNGTIVKTITNDQIEVTNATELVQSSSTGEICNSPHQILDGENCTLIDALLGDPQCDGFQNKKWDLFVERSKAHSNCYPYDVPDYASLRSLVASSGTLEFNNESFNWTGVTQNGTSSACIRRSNNSFFSRLNWLTHLNFKYPALNVTMPNNEQFDKLYIWGVHHPGTDKDQIFLYAQASGRITVSTKRSQQAVIPNIGSRPRVRNIPSRVSIYWTIVKPGDILLINSTGNLIAPRGYFKIRSGKSSIMRSDAPIGKCNSACITPNGSIPNDKPFQNVNRITYGACPRYVKQNTLKLATGMRNVPEKQTRGIFGAIAGFIENGWEGMVDGWYGFRHQNSEGRGQAADLKSTQAAIDQINGKLNRLIGKTNEKFHQIEKEFSEVEGRIQDLEKYVEDTKIDLWSYNAELLVALENQHTIDLTDSEMNKLFEKTKKQLRENAEDMGNGCFKIYHKCDNACIGSIRNGTYDHDVYRDEALNNRFQIKGVELKSGYKDWILWISFAISCFLLCVALLGFIMWACQKGNIRCNICI

SEQ ID NO: 9844 - protein, 566 aa, synthetic construct; identical to SEQ ID NO: 6454
  REGION 1..566: note = hemagglutinin__InfluenzaA__AGE89340

SEQ ID NO: 9845 - protein, 566 aa, synthetic construct; identical to SEQ ID NO: 8354
  REGION 1..566: note = hemagglutinin__InfluenzaA__AGE89350

SEQ ID NO: 9846 - protein, 566 aa, synthetic construct
  REGION 1..566: note = hemagglutinin__InfluenzaA__AGE89361
MKAILVVLLYTFATANADTLCIGYHANNSTDTVDTVLEKNVTVTHSVNLLEDKHNGKLCKLRGVAPLHLGKCNIAGWILGNPECESLSTASSWSYIVETSSSDNGTCYPGDFINYEELREQLSSVSSFERFEIFPKTSSWPNHDSNKGVTAACPHAGAKSFYKNLIWLVKKGNSYPKLSKSYINDKGKEVLVLWGIHHPSTTTDQQSLYQNADAYVFVGTSRYSKKFKPEIAIRPKVRDQEGRMNYYWTLVEPGDKITFEATGNLVVPRYAFAMERNAGSGIIISDTPVHDCNTTCQTPKGAINTSLPFQNIHPITIGKCPKYVKSTKLRLATGLRNVPSIQSRGLFGAIAGFIEGGWTGMVDGWYGYHHQNEQGSGYAADLKSTQNAIDKITNKVNSVIEKMNTQFTAVGKEFNHLEKRIENLNKKVDDGFLDIWTYNAELLVLLENERTLDYHDSNVKNLYEKVRNQLKNNAKEIGNGCFEFYHKCDNTCMESVKNGTYDYPKYSEEAKLNREEIDGVKLESTRIYQILAIYSTVASSLVLVVSLGAISFWMCSNGSLQCRICI

SEQ ID NO: 9847 - protein, 566 aa, synthetic construct; identical to SEQ ID NO: 8351
  REGION 1..566: note = hemagglutinin__InfluenzaA__AGE89371

SEQ ID NO: 9848 - protein, 566 aa, synthetic construct
  REGION 1..566: note = hemagglutinin__InfluenzaA__AGE89382
MKAILVVLLYTFATANADTLCIGYHANNSTDTVDTVLEKNVTVTHSVNLLEDKHNGKLCKLRGVAPLHLGKCNIAGWILGNPECESLSTASSWSYIVETSSSDNGTCYPGDFINYEELREQLSSVSSFERFEIFPKTSSWPNHDSNKGVTAACPHAGAKSFYKNLIWLVKKGNSYPKLSKSYINDKGKEVLVLWGIHHPSTSADQQSLYQNADAYVFVGTSKYSKKFKPEIAVRPKVRDQEGRMNYYWTLVKPGDKITFEATGNLLVPRYAFAMERNAGSGIIISDTPVHDCNTTCQTPKGAINTSLPFQNIHPITIGKCPKYVKSTKLRLATGLRNVPSIQSRGLFGAIAGFIEGGWTGMVDGWYGYHHQNEQGSGYAADLKSTQNAIDKITNKVNSVIEKMNTQFTAVGKEFNHLEKRIENLNKKVDDGFLDIWTYNAELLVLLENERTLDYHDSNVKNLYEKVRSQLKNNAKEIGNGCFEFYHKCDNTCMESVKNGTYDYPKYSEEAKLNREEIDGVKLESTRIYQILAIYSTVASSLVLVVSLGAISFWMCSNGSLQCRICI

SEQ ID NO: 9849 - protein, 566 aa, synthetic construct
  REGION 1..566: note = hemagglutinin__InfluenzaA__AGE89392
MKTIIALSYILCLVFAQELPGNDNSTATLCLGHHAVPNGTIVKTITNDQIEVTNATELVQSSSTGEICNSPHQILDGENCTLIDALLGDPQCDGFQNKKWDLFVERSKAHSNCYPYDVPDYASLRSLVASSGTLEFNNESFNWTGVTQNGTSSACIRRSNNSFFSRLNWLTHLNFKYPALNVTMPNNEQFDKLYIWGVHHPGTDKDQIFLYAQASGRITVSTKRSQQAVIPNIGSRPRVRNIPSRVSIYWTIVKPGDILLINSTGNLIAPRGYFKIRSGKSSIMRSDAPIGKCNSACITPNGSIPNDKPFQNVNRITYGACPRYVKQNTLKLATGMRNVPEKQTRGIFGAIAGFIENGWEGMVDGWYGFRHQNSEGRGQAADLKSTQAAIDQINGKLNRLIGKTNEKFHQIEKEFSEVEGRIQDLEKYVEDTKIDLWSYNAELLVALENQHTIDLTDSEMNKLFEKTKKQLRENAEDMGNGCFKIYHKCDNACIGSIRNGTYDHDVYRDEALNNRFQIKGVELKSGYKDWILWISFAISCFLLCVALLGFIMWACQKGNIRCNICI

SEQ ID NO: 9850 - protein, 566 aa, synthetic construct; identical to SEQ ID NO: 9837
  REGION 1..566: note = hemagglutinin__InfluenzaA__AGE89422

SEQ ID NO: 9851 - protein, 566 aa, synthetic construct; identical to SEQ ID NO: 8334
  REGION 1..566: note = hemagglutinin__InfluenzaA__AGE89719

SEQ ID NO: 9852 - protein, 566 aa, synthetic construct
  REGION 1..566: note = hemagglutinin__InfluenzaA__AGE89730
MKAILVVLLYTFATANADTLCIGYHANNSTDTVDTVLEKNVTVTHSVNLLEDKHNGKLCKLRGVAPLHLGKCNIAGWILGNPECESLSTASSWSYIVETSSSDNGTCYPGDFINYEELREQLSSVSSFERFEIFPKTSSWPNHDSNKGVTAACPHAGAKSFYKNLIWLVKKGNSYPKLSKSYINDKGKEVLVLWGIHHPSTSADQQSLYQNADAYVFVGTSKYSKKFKPEIAVRPKVRDQEGRMNYYWTLVEPGDKITFEATGNLLVPRYAFAMERNAGSGIIISDTPVHDCNTTCQTPKGAINTSLPFQNIHPITIGKCPKYVKSTKLRLATGLRNVPSIQSRGLFGAIAGFIEGGWTGMVDGWYGYHHQNGQGSGYAADLKSTQNAIDKITNKVNSVIEKMNTQFTAVGKEFNHLEKRIENLNKKVDDGFLDIWTYNAELLVLLENERTLDYHDSNVKNLYEKVRSQLKNNAKEIGNGCFEFYHKCDNTCMESVKNGTYDYPKYSEEAKLNREEIDGVKLESTRIYQILAIYSTVASSLVLVVSLGAISFWMCSNGSLQCRICI

SEQ ID NO: 9853 - protein, 566 aa, synthetic construct; identical to SEQ ID NO: 8351
  REGION 1..566: note = hemagglutinin__InfluenzaA__AGE89740

SEQ ID NO: 9854 - protein, 566 aa, synthetic construct
  REGION 1..566: note = hemagglutinin__InfluenzaA__AGE89751
MKTIIALSYILCLVFAQKLPGNDNSTATLCLGHHAVPNGTIVKTITNDQIEVTNATELVQSSSAGEICDSPHHILDGENCTLIDALLGDPQCDGFQNKKWDLFVERSRAYSNCYPYDVPDYASLRSLVASSGTLEFNNESFNWTGVTQNGTSSACIRRSNNSFFSRLNWLTHLNFKYPALNVTMPNNEQFDKLYIWGVHHPGTDKDQIFLYAQASGRITVSTKRSQQAVIPNIGSRPRVRNIPSRISIYWTIVKPGDILLINSTGNLIAPRGYFKIRSGKSSIMRSDAPIGKCNSECITPNGSIPNDKPFQNVNRITYGACPRYVKQSTLKLATGMRNVPEKQTRGIFGAIAGFIENGWEGMMDGWYGFRHQNSEGRGQAADLKSTQAAIDQINGKLNRLIGKTNEKFHQIEKEFSEVEGRIQDLEKYVEDTKIDLWSYNAELLVAMENQHTIDLTDSEMNKLFEKTKKQLRENAEDMGNGCFKIYHKCDNACIGSIRNGTYDHDVYRDEALSNRFQIKGVELKSGYKDWILWISFAISCFLLCVALLGFIMWACQKGNIRCNICI

SEQ ID NO: 9855 - protein, 566 aa, synthetic construct; identical to SEQ ID NO: 8354
  REGION 1..566: note = hemagglutinin__InfluenzaA__AGE89762

SEQ ID NO: 9856 - protein, 566 aa, synthetic construct
  REGION 1..566: note = hemagglutinin__InfluenzaA__AGF44891
MKAILVVLLYTFATANADTLCIGYHANNSTDTVDTVLEKNVTVTHSVNLLEDKHNGKLCKLRGVAPLHLGKCNIAGWILGNPECESLSTASSWSYIVETSSSDNGTCYPGDFINYEELREQLSSVSSFERFEIFPKTSSWPNHDSNKGVTAACPHAGAKSFYKNLIWLVKKGNSYPKLSKSYINDKGKEVLVLWGIHHPSTTADQQSLYQNADAYVFVGTSRYSKKFKPEIAIRPKVRDQEGRMNYYWTLIEPGDKITFEATGNLVVPRYAFAMERNAGSGIIISDTPVHDCNTTCQTPEGAINTSLPFQNIHPITIGKCPKYVKSTKLRLATGLRNVPSIQSRGLFGAIAGFIEGGWTGMVDGWYGYHHQNEQGSGYAADLKSTQNAVDKITNKVNSVIEKMNTQFTAVGKEFNHLEKRIENLNKKVDDGFLDIWTYNAELLVLLENERTLDYHDSNVKNLYEKVRNQLKNNAKEIGNGCFEFYHKCDNTCMESVKNGTYDYPKYSEEAKLNREKIDGVKLESTRIYQILAIYSTVASSLVLVVSLGAISFWMCSNGSLQCRICI

SEQ ID NO: 9857 - protein, 566 aa, synthetic construct; identical to SEQ ID NO: 9856
  REGION 1..566: note = hemagglutinin__InfluenzaA__AGF44892

SEQ ID NO: 9858 - protein, 566 aa, synthetic construct
  REGION 1..566: note = hemagglutinin__InfluenzaA__AGF44895
MKTIIALSYILCLVFAQKLPGNDNSTATLCLGHHAVPNGTIVKTITNDRIEVTNATELVQNSSIGEICDSPHQILDGENCTLIDALLGDPQCDGFQNKKWDLFVERSKAYSNCYPYDVPDYASLRSLVASSGTLEFNNESFNWTGVTQNGTSSACIRRSNSSFFSRLNWLTHLNFKYPALNVTMPNNEQFDKLYIWGVHHPGTDKDQIFLYAQSSGRITVSTKRSQQAVIPNIGSRPRIRNIPSRISIYWTIVKPGDILLINSTGNLIAPRGYFKIRSGKSSIMRSDAPIGKCKSECITPNGSIPNDKPFQNVNRITYGACPRYVKQSTLKLATGMRNVPEKQTRGIFGAIAGFIENGWEGMVDGWYGFRHQNSEGRGQAADLKSTQAAIDQINGKLNRLIGKTNEKFHQIEKEFSEVEGRIQDLEKYVEDTKIDLWSYNAELLVALENQHTIDLTDSEMNKLFEKTKKQLRENAEDMGNGCFKIYHKCDNACIGSIRNGTYDHNVYRDEALNNRFQIKGVELKSGYKDWILWISFAISCFLLCVALLGFIMWACQKGNIRCNICI

SEQ ID NO: 9859 - protein, 566 aa, synthetic construct; identical to SEQ ID NO: 9835
  REGION 1..566: note = hemagglutinin__InfluenzaA__AGF44896

SEQ ID NO: 9860 - protein, 566 aa, synthetic construct
  REGION 1..566: note = hemagglutinin__InfluenzaA__AGF44897
MKTIIALSYILCLVFAQELPGNDDSTATLCLGHHAVPNGTIVKTITNDQIEVTNATELVQSSSTGEICNSPHQILDGENCTLIDALLGDPQCDGFQNKKWDLFVERSKAHSNCYPYDVPDYASLRSLVASSGTLEFNNESFNWTGVTQNGTSSACMRRSNNSFFSRLNWLTHLNFKYPALNVTMPNNEQFDKLYIWGVHHPGTDKDQIFLYAQASGRITVSTKRSQQAVIPNIGSRPRVRNIPSRVSIYWTIVKPGDILLINSTGNLIAPRGYFKIQSGKSSIMRSDAPIGKCNSACITPNGSIPNDKPFQNVNRITYGACPRYVKQNTLKLATGMRNVPEKQTRGIFGAIAGFIENGWEGMVDGWYGFRHQNSEGRGQAADLKSTQAAIDQINGKLNRLIGKTNEKFHQIEKEFSEVEGRIQDLEKYVEDTKIDLWSYNAELLVALENQHTIDLTDSEMNKLFEKTKKQLRENAEDMGNGCFKIYHKCDNACIGSIRNGTYDHDVYRDEALNNRFQIKGVELKSGYKDWILWISFAISCFLLCVALLGFIMWACQKGNIRCNICI

SEQ ID NO: 9861 - protein, 566 aa, synthetic construct; identical to SEQ ID NO: 9858
  REGION 1..566: note = hemagglutinin__InfluenzaA__AGF44900

SEQ ID NO: 9862 - protein, 566 aa, synthetic construct; identical to SEQ ID NO: 9858
  REGION 1..566: note = hemagglutinin__InfluenzaA__AGF44901

SEQ ID NO: 9863 - protein, 566 aa, synthetic construct; identical to SEQ ID NO: 9858
  REGION 1..566: note = hemagglutinin__InfluenzaA__AGF44902

SEQ ID NO: 9864 - protein, 566 aa, synthetic construct; identical to SEQ ID NO: 9858
  REGION 1..566: note = hemagglutinin__InfluenzaA__AGF44903

SEQ ID NO: 9865 - protein, 566 aa, synthetic construct; identical to SEQ ID NO: 9858
  REGION 1..566: note = hemagglutinin__InfluenzaA__AGF44904

SEQ ID NO: 9866 - protein, 566 aa, synthetic construct
  REGION 1..566: note = hemagglutinin__InfluenzaA__AGF44905
MKTIIALSYILCLVFAQKLPGNDNSTATLCLGHHAVPNGTIVKTITNDRIEVTNATELVQNSSIGEICDSPHQILDGENCTLIDALLGDPQCDGFQNKKWDLFVERSKAYSNCYPYDVPDYASLRSLVASSGTLEFNNESFNWTGVTQNGTSSACIRRSNSSFFSRLNWLTHLNFKYPALNVTMPNNEQFDKLYIWGVHHPGTDKDQIFLYAQSSGRITVSTKRSQQAVIPNIGSRPRIRNIPSRISIYWTIVKPGDILLINSTGNLIAPRGYFKIRSGKSSIMRSDAPIGKCKSECITPNGSIPNDKPFQNVNRNTYGACPRYVKQSTLKLATGMRNVPEKQTRGIFGAIAGFIENGWEGMVDGWYGFRHQNSEGRGQAADLKSTQAAIDQINGKLNRLIGKTNEKFHQIEKEFSEVEGRIQDLEKYVEDTKIDLWSYNAELLVALENQHTIDLTDSEMNKLFEKTKKQLRENAEDMGNGCFKIYHKCDNACIGSIRNGTYDHNVYRDEALNNRFQIKGVELKSGYKDWILWISFAISCFLLCVALLGFIMWACQKGNIRCNICI

SEQ ID NO: 9867 - protein, 566 aa, synthetic construct; identical to SEQ ID NO: 9858
  REGION 1..566: note = hemagglutinin__InfluenzaA__AGF44906

SEQ ID NO: 9868 - protein, 566 aa, synthetic construct
  REGION 1..566: note = hemagglutinin__InfluenzaA__AGF44908
MKTIIALSYILCLVFAQKLPGNDNSTATLCLGHHAVPNGTIVKTITNDRIEVTNATELVQNSSIGEICDSPHQILDGENCTLIDALLGDPQCDGFQNKKWDLFVERSKAYSNCYPYDVPDYASLRSLVASSGTLEFNNESFNWAGVTQNGTSSACIRGSNSSFFSRLNWLTHLNFKYPALNVTMPNNEQFDKLYIWGVHHPGTDKDQIFLYAQSSGRITVSTKRSQQAVIPNIGSRPRIRNIPSRISIYWTIVKPGDILLINSTGNLIAPRGYFKIRSGKSSIMRSDAPIGKCKSECITPNGSIPNDKPFQNVNRITYGACPRYVKQSTLKLATGMRNVPEKQTRGIFGAIAGFIENGWEGMMDGWYGFRHQNSEGRGQAADLKSTQAAIDQINGKLNRLIGKTNEKFHQIEKEFSEVEGRIQDLEKYVEDTKIDLWSYNAELLVALENQHTIDLTDSEMNKLFEKTKKQLRENAEDMGNGCFKIYHKCDNACIGSIRNGTYDHDVYRDEALNNRFQIKGVELKSGYKDWILWISFAISCFLLCVALLGFIMWACQKGNIRCNICI

SEQ ID NO: 9869 - protein, 566 aa, synthetic construct; identical to SEQ ID NO: 9858
  REGION 1..566: note = hemagglutinin__InfluenzaA__AGF44909

SEQ ID NO: 9870 - protein, 566 aa, synthetic construct; identical to SEQ ID NO: 9858
  REGION 1..566: note = hemagglutinin__InfluenzaA__AGF44910

SEQ ID NO: 9871 - protein, 566 aa, synthetic construct
  REGION 1..566: note = hemagglutinin__InfluenzaA__AGF44911
MKTIIALSYILCLVFAQKLPGNDNSTATLCLGHHAVPNGTIVKTITNDRIEVTNATELVQNSSIGEICDSPHQILDGENCTLIDALLGDPQCDGFQNKKWDLFVERSKAYSNCYPYDVPDYASLRSLVASSGTLEFNNESFNWAGVTQNGTSSACIRGSNSSFFSRLNWLTHLNFKYPALNVTMPNNEQFDKLYIWGVHHPGTDKDQIFLYAQSSGRITVSTKRSQQAVIPNIGSRPRIRNIPSRISIYWTIVKPGDILLINSTGNLIAPRGYFKIRSGKSSIMRSDAPIGKCKSECITPNGSIPNDKPFQNVNRITYGACPRYVKQSTLKLATGMRNVPEKQTRGIFGAIAGFIENGWEGMVDGWYGFRHQNSEGRGQAADLKSTQAAIDQINGKLNRLIGKTNEKFHQIEKEFSEVEGRIQDLEKYVEDTKIDLWSYNAELLVALENQHTIDLTDSEMNKLFEKTKKQLRENAEDMGNGCFKIYHKCDNACIGSIRNGTYDHDVYRDEALNNRFQIKGVELKSGYKDWILWISFATSCFLLCVALLGFIMWACQKGNIRCNICI

SEQ ID NO: 9872 - protein, 566 aa, synthetic construct; identical to SEQ ID NO: 9858
  REGION 1..566: note = hemagglutinin__InfluenzaA__AGF44912

SEQ ID NO: 9873 - protein, 566 aa, synthetic construct; identical to SEQ ID NO: 9858
  REGION 1..566: note = hemagglutinin__InfluenzaA__AGF44913

SEQ ID NO: 9874 - protein, 566 aa, synthetic construct
  REGION 1..566: note = hemagglutinin__InfluenzaA__AGF44914
MKTIIALSYILCLVFAQKLPGNDNSTATLCLGHHAVPNGTIVKTITNDRIEVTNATELVQNSSIGEICDSPHQILDGENCTLIDALLGDPQCDGFQNKKWDLFVERSKAYSNCYPYDVPDYASLRSLVASSGTLEFNNESFNWTGVTQNGTSSACIRRSNSSFFSRLNWLTHLNFKYPALNVTMPNNEQFDKLYIWGVHHPGTDKDQIFLYAQSSGRITVSTKRSQQAVIPNIGSRPRIRNIPSRISIYWTIVKPGDILLINSTGNLIAPRGYFKIRSGKSSIMRSDAPIGKCKSECITPNGSIPNDKPFQNVNKITYGACPRYVKQSTLKLATGMRNVPEKQTRGIFGAIAGFIENGWEGMVDGWYGFRHQNSEGRGQAADLKSTQAAIDQINGKLNRLIGKTNEKFHQIEKEFSEVEGRIQDLEKYVEDTKIDLWSYNAELLVALENQHTIDLTDSEMNKLFEKTKKQLRENAEDMGNGCFKIYHKCDNACIGSIRNGTYDHNVYRDEALNNRFQIKGVELKSGYKDWILWISFAISCFLLCVALLGFIMWACQKGNIRCNICI

SEQ ID NO: 9875 - protein, 566 aa, synthetic construct; identical to SEQ ID NO: 9835
  REGION 1..566: note = hemagglutinin__InfluenzaA__AGF44916

SEQ ID NO: 9876 - protein, 566 aa, synthetic construct
  REGION 1..566: note = hemagglutinin__InfluenzaA__AGF44917
MKTIIALSYILCLVFAQKIPGNDNSTATLCLGHHAVPNGTIVKTITNEQIEVTNATELVQSSSTGEICNSPHQILDGENCTLIDALLGDPQCDGFQNKKWDLFVERSKAYSNCYPYDVPDYASLRSLVASSGTLEFNNESFNWTGVTQNGTSSACIRGSDSSFFSRLNWLTHLNFKYPALNVTMPNNEQFDKLYIWGVHHPGTDKDQIFLYAQASGRITVSTKRSQQAVIPNIGSRPRIRNIPSRISIYWTIVKPGDILLINSTGNLIAPRGYFKIRSGKSSIMRSDAPIGKCNSECITPNGSIPNDKPFQNVNRITYGACPRYVKQNTLKLATGMRNVPEKQTRGIFGAIAGFIENGWEGMMDGWYGFRHQNSEGRGQAADLKSTQAAIDQINGKLNRLIGKTNEKFHQIEKEFSEVEGRIQDLEKYVEDTKIDLWSYNAELLVALENQHTIDLTDSEMNKLFEKTKKQLRENAEDMGNGCFKIYHKCDNACIGSIRNGTYNHDVYRDEALNNRFQIKGVELKSGYKDWILWISFAISCFLLCVALLGFIMWACQKGNIRCNICI

SEQ ID NO: 9877 - protein, 566 aa, synthetic construct; identical to SEQ ID NO: 9835
  REGION 1..566: note = hemagglutinin__InfluenzaA__AGF44918

SEQ ID NO: 9878 - protein, 566 aa, synthetic construct
  REGION 1..566: note = hemagglutinin__InfluenzaA__AGF44919
MKTIIALSYILCLVFAQKLPGNDNSTATLCLGHHAVPNGTIVKTITNDRIEVTNATELVQNSSIGEICDSPHQILDGENCTLIDALLGDPQCDGFQNKKWDLFVERSKAYSNCYPYDVPDYASLRSLVASSGTLEFNNESFNWAGVTQNGTSSACIRGSNSSFFSRLNWLTHLNFKYPALNVTMPNNEQFDKLYIWGVHHPGTDKDQIFLYAQSSGRITVSTKRSQQAVIPNIGSRPRIRNIPSRISIYWTIVKPGDILLINSTGNLIAPRGYFKIRSGKSSIMRSDAPIGKCKSECITPNGSIPNDKPFQNVNRITYGACPRYVKQSTLKLATGMRNVPEKQTRGIFGAIAGFIENGWEGMVDGWYGFRHQNSEGRGQAADLKSTQAAIDQINGKLNRLIGKTNEKFHQIEKEFSEVEGRIQDLEKYVEDTKIDLWSYNAELLVALENQHTIDLTDSEMNKLFEKTKKQLRENAEDMGNGCFKIYHKCDNACIGSIRNGTYDHYVYRDEALNNRFQIKGVELKSGYKDWILWISFAISCFLLCVALLGFIMWACQKGNIRCNICI

SEQ ID NO: 9879 - protein, 566 aa, synthetic construct; identical to SEQ ID NO: 9835
  REGION 1..566: note = hemagglutinin__InfluenzaA__AGF44920

SEQ ID NO: 9880 - protein, 566 aa, synthetic construct; identical to SEQ ID NO: 9858
  REGION 1..566: note = hemagglutinin__InfluenzaA__AGF44921

SEQ ID NO: 9881 - protein, 566 aa, synthetic construct
  REGION 1..566: note = hemagglutinin__InfluenzaA__AGG13411
MKTIIALSYILCLVFAQELPGNDDSTATLCLGHHAVPNGTIVKTITNDRIEVTNATELVQSSSTGEICNSPHQILDGENCTLIDALLGDPQCDGFQNKKWDLFVERSKAHSNCYPYDVPDYASLRSLVASSGTLEFNNESFNWTGVTQNGTSSACIRRSNNSFFSRLNWLTHLNFKYPALNVTMPNNEQFDKLYIWGVHHPGTDKDQIFLYAQASGRITVSTKRNQQTVIPNIGSRPRVRNIPSRVSIYWTIVKPGDILLINSTGNLIAPRGYFKIRSGKSSIMRSDAPIGKCNSACITPNGSIPNDKPFQNVNRITYGACPRYVKQNTLKLATGMRNVPEKQTRGIFGAIAGFIENGWEGMVDGWYGFRHQNSEGRGQAADLKSTQAAIDQINGKLNRLIGKTNEKFHQIEKEFSEVEGRIQDLEKYVEDTKIDLWSYNAELLVALENQHTIDLTDSEMNKLFEKTKKQLRENAEDMGNGCFKIYHKCDNACIGSIRNGTYDHDVYRDEALNNRFQIKGVELKSGYKDWILWISFAISCFLLCVALLGFIMWACQKGNIRCNICI

SEQ ID NO: 9882 - protein, 566 aa, synthetic construct
  REGION 1..566: note = hemagglutinin__InfluenzaA__AGG13447
MKTIIALSYILCLVFAQELPGNDDSTATLCLGHHAVPNGTIVKTITNDRIEVTNATELVQSSSTGEICNSPHQILDGENCTLIDALLGDPQCDGFQNKKWDLFVERSKAHSNCYPYDVPDYASLRSLVASSGTLEFNNESFNWTGVTQNGTSSACIRRSNNSFFSRLNWLTHLNFKYPALNVTMPNNEQFDKLYIWGVHHPGTDKDQIFLYAQASGRITVSTKRSQQTVIPNIGSRPRVRNIPSRVSIYWTIVKPGDILLINSTGNLIAPRGYFKIRSGKSSIMRSDAPIGKCNSACITPNGSIPNDKPFQNVNRITYGACPRYVKQNTLKLATGMRNVPEKQTRGIFGAIAGFIENGWEGMVDGWYGFRHQNSEGRGQAADLKSTQAAIDQINGKLNRLIGKTNEKFHQIEKEFSEVEGRIQDLEKYVEDTKIDLWSYNAELLVALENQHTIDLTDSEMNKLFEKTQKQLRENAEDMGNGCFKIYHKCDNACIGSIRNGTYDHDVYRDEALNNRFQIKGVELKSGYKDWILWISFAISCFLLCVALLGFIMWACQKGNIRCNICI

SEQ ID NO: 9883 - protein, 566 aa, synthetic construct
  REGION 1..566: note = hemagglutinin__InfluenzaA__AGG13459
MKTIIALSYILCLVFAQKLPGNDNSTATLCLGHHAVPNGTIVKTITNDRIEVTNATELVQNSSIGEICDSPHQILDGENCTLIDALLGDPQCDGFQNKKWDLFVERSKAYSNCYPYDVPDYASLRSLVASSGTLEFNNESFNWTGVTQNGTSSACIRRSNSSFFSRLNWLTHLNFKYPALNVTMPNNEQFDKLYIWGVHHPGTDKDQIFLYAQSSGRITVSTKRSQQAVIPNIGSRPRIRNIPSRISIYWTIVKPGDILLINSTGNLIAPRGYFKIRSGKSSIMRSDAPIGKCKSECITPNGSIPNDKPFQNVNRITYGACPRYVKQSTLKLATGMRNVPEKQTRGIFGAIAGFIENGWEGMVDGWYGFRHQNSEGRGQAADLKSTQAAIDQINGKLNRLIGKTNEKFHQIEKEFSEVEGRIQDLEKYVEDTKIDLWSYNAELLVALENQHTIDLTDSEMNKLFEKTKKQLRENAEDMGNGCFKIYHKCDNACIGSIRNGTYDHDVYRDEALNNRFQIKGVELKSGYKDWILWISFAISCFLLCVALLGFIMWACQKGNIRCNICI

SEQ ID NO: 9884 - protein, 566 aa, synthetic construct
  REGION 1..566: note = hemagglutinin__InfluenzaA__AGG13495
MKTIIALSYILCLVFAQKLPGNDNSTATLCLGHHAVPNGTIVKTITNDQIEVTNATELVQSSSTGEICDSPHQILDGENCTLIDALLGDPQCDGFQNKKWDLFVERSKAYSNCYPYDVPDYASLRSLVASSGTLEFNNESFNWTGVTQNGTSSACIRRSDSSFFSRLNWLTHLNFKYPALNVTMPNNEQFDKLYIWGVHHPGTDKDQIFLYAQASGRITVSTKRSQQSVIPNIGSRPRIRNIPSRISIYWTIVKPGDILLINSTGNLIAPRGYFKIQSGKSSIMRSDAPIGKCNSECITPNGSIPNDKPFQNVNRITYGACPRYVKQNTLKLATGMRNVPEKQTRGIFGAIAGFIENGWEGMVDGWYGFRHQNSEGRGQAADLKSTQAAIDQINGKLNRLIGKTNEKFHQIEKEFSEVEGRIQDLEKYVEDTKIDLWSYNAELLVALENQHTIDLTDSEMNKLFEKTKKQLRENAEDMGNGCFKIYHKCDNACIGSIRNGTYNHDVYRDEALNNRFQIKGVELKSGYKDWILWISFAISCFLLCVALLGFIMWACQKGNIRCNICI

SEQ ID NO: 9885 - protein, 566 aa, synthetic construct; identical to SEQ ID NO: 9883
  REGION 1..566: note = hemagglutinin__InfluenzaA__AGG13507

SEQ ID NO: 9886 - protein, 566 aa, synthetic construct
  REGION 1..566: note = hemagglutinin__InfluenzaA__AGG13519
MKTIIALSYILCLVFAQKLPGNDNSTATLCLGHHAVPNGTIVKTITNDQIEVTNATELVQSSSTGEICDSPHQILDGENCTLIDALLGDPQCDGFQNKKWDLFVERSKAYSNCYPYDVPDYASLRSLVASSGTLEFNNESFNWTGVTQNGTSSACIRRSDSSFFSRLNWLTHLNFKYPALNVTMPNNEQFDKLYIWGVHHPGTDKDQIFLYAQASGRITVSTKRSQQSVIPNIGSRPRIRNIPSRISIYWTIVKPGDILLINSTGNLIAPRGYFKIQSGKSSIMRSDAPIGKCNSECITPNGSIPNDKPFQNVNRITYGACPRYVKQNTLKLATGMRNVPEKQTRGIFGAIAGFIENGWEGMVDGWYGFRHQNSEGRGQAADLKSTQAAIDQINGKLNRLIGKTNEKFHQIEKEFSEVEGRVQDLEKYVEDTKIDLWSYNAELLVALENQHTIDLTDSEMNKLFEKTKKQLRENAEDMGNGCFKIYHKCDNACIGSIRNGTYNHDVYRDEALNNRFQIKGVELKSGYKDWILWISFAISCFLLCVALLGFIMWACQKGNIRCNICI

SEQ ID NO: 9887 - protein, 566 aa, synthetic construct; identical to SEQ ID NO: 9883
  REGION 1..566: note = hemagglutinin__InfluenzaA__AGG13531

SEQ ID NO: 9888 - protein, 566 aa, synthetic construct
  REGION 1..566: note = hemagglutinin__InfluenzaA__AGG13543
MKTIIALSYILCLVFAQKLPGNDNSTATLCLGHHAVPNGTIVKTITNDRIEVTNATELVQNSSIGEICDSPHQILDGENCTLIDALLGDPQCDGFQNKKWDLFVERSKAYSNCYPYDVPDYASLRSLVASSGTLEFNNESFNWTGVTQNGTSSACIRRSNSSFFSRLNWLTHLNFKYPALNVTMPNNEQFDKLYIWGVHHPGTDKDQIFLYAQSSGRITVSTKRSQQAVIPNIGSRPRIRNIPSRISIYWTIVKPGDILLINSTGNLIAPRGYFKIRSGKSSIMRSDAPIGKCKSECITPNGSIPNDKPFQNVNRITYGACPRYVKQSTLKLATGMRNVPEKQTRGIFGAIAGFIENGWEGMVDGWYGFRHQNSEGRGQAADLKSTQAAIDQINGKLNRLIGKTNEKFHQIEKEFSEVEGRIQDIEKYVEDTKIDLWSYNAELLVALENQHTIDLTDSEMNKLFEKTKKQLRENAEDMGNGCFKIYHKCDNACIGSIRNGTYDHNVYRDEALNNRFQIKGVELKSGYKDWILWISFAISCFLLCVALLGFIMWACQKGNIRCNICI

SEQ ID NO: 9889 - protein, 566 aa, synthetic construct; identical to SEQ ID NO: 9883
  REGION 1..566: note = hemagglutinin__InfluenzaA__AGG13555

SEQ ID NO: 9890 - protein, 566 aa, synthetic construct; identical to SEQ ID NO: 9883
  REGION 1..566: note = hemagglutinin__InfluenzaA__AGG13567

SEQ ID NO: 9891 - protein, 566 aa, synthetic construct
  REGION 1..566: note = hemagglutinin__InfluenzaA__AGG13591
MKTIIALSYILCLVFAQKLPGNDNSTATLCLGHHAVPNGTIVKTITNDRIEVTNATELVQNSSIGEICDSPHQILDGENCTLIDALLGDPQCDGFQNKKWDLFVERSKAYSNCYPYDVPDYASLRSLVASSGTLEFNNENFNWTGVTQNGTSSACIRRSNSSFFSRLNWLTHLNFKYPALNVTMPNNEQFDKLYIWGVHHPGTDKDQIFLYAQSSGRITVSTKRSQQAVIPNIGSRPRIRNIPSRISIYWTIVKPGDILLINSTGNLIAPRGYFKIRSGKSSIMRSDAPIGKCKSECITPNGSIPNDRPFQNVNRITYGACPRYVKQSTLKLATGMRNVPEKQTRGIFGAIAGFIENGWEGMVDGWYGFRHQNSEGRGQAADLKSTQAAIDQINGKLNRLIGKTNEKFHQIEKEFSEVEGRIQDLEKYVEDTKIDLWSYNAELLVALENQHTIDLTDSEMNKLFEKTKKQLRENAEDMGNGCFKIYHKCDNACIGSIRNGTYDHDVYRDEALNNRFQIKGVELKSGYKDWILWISFAISCFLLCVALLGFIMWACQKGNIRCNICI

SEQ ID NO: 9892 - protein, 566 aa, synthetic construct
  REGION 1..566: note = hemagglutinin__InfluenzaA__AGG13615
MKTIIALSYILCLVFAQKIPGNDNSTATLCLGHHAVPNGTIVKTITNDRIEVTNATELVQNSSIGEICDSPHQILDGENCTLIDALLGDPQCDGFQNKKWDLFVERSKAYSNCYPYDVPDYASLRSLVASSGTLEFNNESFNWTGVTQNGTSSACIRRSNSSFFSRLNWLTHLNFKYPALNVTMPNNEQFDKLYIWGVHHPGTDKDQIFLYAQSSGRITVSTKRSQQAVIPNIGSRPRIRNIPSRISIYWTIVKPGDILLINSTGNLIAPRGYFKIRSGKSSIMRSDAPIGKCKSECITPNGSIPSDKPFQNVNRITYGACPRYVKQSTLKLATGMRNVPEKQTRGIFGAIAGFIENGWEGMVDGWYGFRHQNSEGRGQAADLKSTQAAIDQINGKLNRLIGKTNEKFHQIEKEFSEVEGRIQDLEKYVEDTKIDLWSYNAELLVALENQHTIDLTDSEMNKLFEKTKKQLRENAEDMGNGCFKIYHKCDNACIGSIRNGTYDHDVYRDEALNNRFQIKGVELKSGYKDWILWISFAISCFLLCVALLGFIMWACQKGNIRCNICI

SEQ ID NO: 9893 - protein, 566 aa, synthetic construct; identical to SEQ ID NO: 9891
  REGION 1..566: note = hemagglutinin__InfluenzaA__AGG13627

SEQ ID NO: 9894 - protein, 566 aa, synthetic construct
  REGION 1..566: note = hemagglutinin__InfluenzaA__AGG13639
MKTIIALSYILCLVFAQKLPGNDNSTATLCLGHHAVPNGTIVKTITNDRIEVTNATELVQNSSIGEICDSPHQILDGENCTLIDALLGDPQCDGFQNKKWDLFVERSKAYSNCYPYDVPDYASLRSLVASSGTLEFNNESFNWAGVTQNGTSSACIRGSNSSFFSRLNWLTHLNFKYPALNVTMPNNEQFDKLYIWGVHHPGTNKDQIFLYAQSSGRITVSTKRSQQAVIPNIGSRPRIRNIPSRISIYWTIVKPGDILLINSTGNLIAPRGYFKIRSGKSSIMRSDAPIGKCKSECITPNGSIPNDKPFQNVNRITYGACPRYVKQSTLKLATGMRNVPEKQTRGIFGAIAGFIENGWEGMVDGWYGFRHQNSEGRGQAADLKSTQAAIDQINGKLNRLIGKTNEKFHQIEKEFSEVEGRIQDLEKYVEDTKIDLWSYNAELLVALENQHTIDLTDSEMNKLFEKTKKQLRENAEDMGNGCFKIYHKCDNACIGSIRNGTYDHDVYRDEALNNRFQIKGVELKSGYKDWILWISFAISCFLLCVALLGFIMWACQKGNIRCNICI

SEQ ID NO: 9895 - protein, 566 aa, synthetic construct; identical to SEQ ID NO: 9884
  REGION 1..566: note = hemagglutinin__InfluenzaA__AGG13651

SEQ ID NO: 9896 - protein, 566 aa, synthetic construct; identical to SEQ ID NO: 9883
  REGION 1..566: note = hemagglutinin__InfluenzaA__AGG13663

SEQ ID NO: 9897 - protein, 566 aa, synthetic construct; identical to SEQ ID NO: 9884
  REGION 1..566: note = hemagglutinin__InfluenzaA__AGG13675

SEQ ID NO: 9898 - protein, 566 aa, synthetic construct; identical to SEQ ID NO: 9883
  REGION 1..566: note = hemagglutinin__InfluenzaA__AGG13687

SEQ ID NO: 9899 - protein, 566 aa, synthetic construct; identical to SEQ ID NO: 9884
  REGION 1..566: note = hemagglutinin__InfluenzaA__AGG13711

SEQ ID NO: 9900 - protein, 566 aa, synthetic construct; identical to SEQ ID NO: 9883
  REGION 1..566: note = hemagglutinin__InfluenzaA__AGG13723

SEQ ID NO: 9901 - protein, 566 aa, synthetic construct; identical to SEQ ID NO: 9883
  REGION 1..566: note = hemagglutinin__InfluenzaA__AGG13735

SEQ ID NO: 9902 - protein, 566 aa, synthetic construct; identical to SEQ ID NO: 9883
  REGION 1..566: note = hemagglutinin__InfluenzaA__AGG13747

SEQ ID NO: 9903 - protein, 566 aa, synthetic construct
  REGION 1..566: note = hemagglutinin__InfluenzaA__AGG13759
MKTIIALSYILCLVFAQELPGNDDSTATLCLGHHAVPNGTIVKTITNDRIEVTNATELVQSSSTGEICNSPHQILDGENCTLIDALLGDPQCDGFQNKKWDLFVERSKAHSNCYPYDVPDYASLRSLVASSGTLEFNNESFNWTGVTQNGTSSACIRRSNNSFFSRLNWLTHLNFKYPALNVTMPNNEQFDKLYIWGVHHPGTDKDQIFLYAQASGRITVSTKRSQQTVIPNIGSRPRVRNIPSRVSIYWTIVKPGDILLINSTGNLIAPRGYFKIRSGKSSIMRSDAPIGKCNSACITPNGSIPNDKPFQNVNRITYGACPRYVKQNTLKLATGMRNVPEKQTRGIFGAIAGFIENGWEGMVDGWYGFRHQNSEGRGQAADLKSTQAAIDQINGKLNRLIGKTNEKFHQIEKEFSEVEGRIQDLEKYVEDTKIDLWSYNAELLVALENQHTIDLTDSEMNKLFEKTKKQLRENAEDMGNGCFKIYHKCDNACIGSIRNGTYDHDVYRDEALNNRFQIKGVELKSGYKDWILWISFAISCFLLCVALLGFIMWACQKGNIRCNICI

SEQ ID NO: 9904 - protein, 566 aa, synthetic construct
  REGION 1..566: note = hemagglutinin__InfluenzaA__AGG13771
MKTIIALSYILCLVFAQKLPGNDNSTATLCLGHHAVPNGTIVKTITNDQIEVTNATELVQSSSTGEICDSPHQILDGENCTLIDALLGDPQCDGFQNKKWDLFVERSKAYSNCYPYDVPDYASLRSLVASSGTLEFNNESFNWTGVTQNGTSSACIRRSDSSFFSRLNWLTHLNFKYPALNVTMPNNEQFDKLYIWGVHHPGTDKDQIFLYAQASGRITVSTKRSQQSVIPNIGSRPRIRNIPSRISIYWTIVKPGDILLINSTGNLIAPRGYFKIQSGKSSIMRSDAPIGKCNSECITPNGSIPNDKPFQNVNRITYGACPRYVKQNTLKLATGMRNVPEKQTRGIFGAIAGFIENGWEGMVDGWYGFRHQNSEGRGQAADLKSTQAAIDQINGKLNRLIGKTNEKFHQIEKEFSEVEGRIQDLEKYVEDNKIDLWSYNAELLVALENQHTIDLTDSEMNKLFEKTKKQLRENAEDMGNGCFKIYHKCDNACIGSIRNGTYNHDVYRDEALNNRFQIKGVELKSGYKDWILWISFAISCFLLCVALLGFIMWACQKGNIRCNICI

SEQ ID NO: 9905 - protein, 566 aa, synthetic construct
  REGION 1..566: note = hemagglutinin__InfluenzaA__AGG13783
MKTIIALSYILCLVFAQKLPGNDNSTATLCLGHHAVPNGTIVKTITNDQIEVTNATELVQNSSMGEICDSPHQILDGENCTLIDALLGDPQCDGFQNKKWDLFVERSKAYSNCYPYDVPDYASLRSLVASSGTLEFNNESFNWAGVTQNGTSSACIRGSNSSFFSRLNWLTHLNFKYPALNVTMPNNEQFDKLYIWGVHHPGTDKDQIFLYAQSSGRITVSTKRSQQAVIPNIGSRPRIRNVPSRISIYWTIVKPGDILLINSTGNLIAPRGYFKIRSGKSSIMRSDAPIGKCKSECITPNGSIPNDKPFQNVNRITYGACPRYVKQSTLKLATGMRNVPEKQTRGIFGAIAGFIENGWEGMVDGWYGFRHQNSEGRGQAADLKSTQAAIDQINGKLNRLIGKTNEKFHQIEKEFSEVEGRIQDLEKYVEDTKIDLWSYNAELLVALENQHTIDLTDSEMNKLFEKTKKQLRENAEDMGNGCFKIYHKCDNACIGSIRNGTYDHDVYRDEALNNRFQIKGVELKSGYKDWILWISFAISCFLLCVALLGFIMWACQKGNIRCNICI

SEQ ID NO: 9906 - protein, 566 aa, synthetic construct; identical to SEQ ID NO: 9884
  REGION 1..566: note = hemagglutinin__InfluenzaA__AGG13795

SEQ ID NO: 9907 - protein, 566 aa, synthetic construct; identical to SEQ ID NO: 9835
  REGION 1..566: note = hemagglutinin__InfluenzaA__AGG13807

SEQ ID NO: 9908 - protein, 566 aa, synthetic construct; identical to SEQ ID NO: 9884
  REGION 1..566: note = hemagglutinin__InfluenzaA__AGG13819

SEQ ID NO: 9909 - protein, 566 aa, synthetic construct; identical to SEQ ID NO: 9884
  REGION 1..566: note = hemagglutinin__InfluenzaA__AGG13831

SEQ ID NO: 9910 - protein, 566 aa, synthetic construct; identical to SEQ ID NO: 9883
  REGION 1..566: note = hemagglutinin__InfluenzaA__AGG13855

SEQ ID NO: 9911 - protein, 566 aa, synthetic construct
  REGION 1..566: note = hemagglutinin__InfluenzaA__AGG13867
MKTIIALSYILCLVFAQKLPGNDNSTATLCLGHHAVPNGTIVKTITNDRIEVTNATELVQNSSIGKICDSPHQILDGENCTLMDALLGDPQCDGFQNKKWDLFVERSKAYSNCYPYDVPDYASLRSLVASSGTLEFNNESFNWTGVTQNGTSSACIRRSNSSFFSRLNWLTHLNFKYPALNVTMPNNEQFDKLYIWGVHHPGTDKDQIFLYAQSSGRITVSTKRSQQAVIPNIGSRPRIRNIPSRISIYWTIVKPGDILLINSTGNLIAPRGYFKIRSGKSSIMRSDAPIGKCKSECITPNGSIPNDKPFQNVNRITYGACPRYVKQSTLKLATGMRNVPEKQTRGIFGAIAGFIENGWEGMVDGWYGFRHQNSEGRGQAADLKSTQAAIDQINGKLNRLIGKTNEKFHQIEKEFSEVEGRIQDLEKYVEDTKIDLWSYNAELLVALENQHTIDLTDSEMNKLFEKTKKQLRENAEDMGNGCFKIYHKCDNACIGSIRNGTYDHNVYRDEALNNRFQIKGVELKSGYKDWILWISFAISCFLLCVALLGFIMWACQKGNIRCNICI

SEQ ID NO: 9912 - protein, 566 aa, synthetic construct; identical to SEQ ID NO: 9883
  REGION 1..566: note = hemagglutinin__InfluenzaA__AGG13879

SEQ ID NO: 9913 - protein, 566 aa, synthetic construct; identical to SEQ ID NO: 9883
  REGION 1..566: note = hemagglutinin__InfluenzaA__AGG13891

SEQ ID NO: 9914 - protein, 566 aa, synthetic construct
  REGION 1..566: note = hemagglutinin__InfluenzaA__AGG13903
MKTIIALSYILCLVFAQKLPGNDNSTATLCLGHHAVPNGTIVKTITNDQIEVTNATELVQSSSTGEICDSPHQILDGENCTLIDALLGDPQCDGFQNKKWDLFVERSKAYSNCYPYDVPDYASLRSLVASSGTLEFNNESFNWTGVTQNGTSSACIRRSDSSFFSRLNWLTHLNFKYPALNVTMPNNEQFDKLYIWGVHHPGTDKDQIFLYAQASGRITVSTKRSQQSVLPNIGSRPRIRNIPSRISIYWTIVKPGDILLINSTGNLIAPRGYFKIQSGKSSIMRSDAPIGKCNSECITPNGSIPNDKPFQNVNRITYGACPRYVKQNTLKLATGMRNVPEKQTRGIFGAIAGFIENGWEGMVDGWYGFRHQNSEGRGQAADLKSTQAAIDQINGKLNRLIGKTNEKFHQIEKEFSEVEGRIQDLEKYVEDTKIDLWSYNAELLVALENQHTIDLTDSEMNKLFEKTKKQLRENAEDMGNGCFKIYHKCDNACIGSIRNGTYNHDVYRDEALNNRFQIKGVELKSGYKDWILWISFAISCFLLCVALLGFIMWACQKGNIRCNICI

SEQ ID NO: 9915 - protein, 566 aa, synthetic construct; identical to SEQ ID NO: 9883
  REGION 1..566: note = hemagglutinin__InfluenzaA__AGG13927

SEQ ID NO: 9916 - protein, 566 aa, synthetic construct; identical to SEQ ID NO: 9891
  REGION 1..566: note = hemagglutinin__InfluenzaA__AGG13939

SEQ ID NO: 9917 - protein, 566 aa, synthetic construct
  REGION 1..566: note = hemagglutinin__InfluenzaA__AGG13962
MKAILVVLLYTFATANADTLCIGYHANNSTDTVDTVLEKNVTVTHSVNLLEDKHNGKLCKLRGVAPLHLGKCNIAGWILGNPECESLSTASSWSYIVETSSSDNGTCYPGDFINYEELREQLSSVSSFEGFEIFPKTSSWPNHDSNKGVTAACPHAGAKSFYKNLIWLVKKGNSYPKLSKSYINDKGKEVLVLWGIHHPSTTADQQSLYQNADAYVFVGTSRYSKKFKPEIAIRPKVRDQEGRMNYYWTLIEPGDKITFEATGNLVVPRYAFAMERNAESGIIISDTPVHDCNTTCQTPEGAINTSLPFQNIHPITIGKCPKYVKSTKLRLATGLRNVPSIQSRGLFGAIAGFIEGGWTGMVDGWYGYHHQNEQGSGYAADLKSTQNAIDKITNKVNSVIEKMNTQFTAVGKEFNHLEKRIENLNKKVDDGFLDIWTYNAELLVLLENERTLDYHDSNVKNLYEKVRNQLKNNAKEIGNGCFEFYHKCDNTCMESVKNGTYDYPKYSEEAKLNREKIDGVKLESTRIYQILAIYSTVASSLVLVVSLGAISFWMCSNGSLQCRICI

SEQ ID NO: 9918 - protein, 566 aa, synthetic construct; identical to SEQ ID NO: 9883
  REGION 1..566: note = hemagglutinin__InfluenzaA__AGG13973

SEQ ID NO: 9919 - protein, 566 aa, synthetic construct; identical to SEQ ID NO: 9883
  REGION 1..566: note = hemagglutinin__InfluenzaA__AGG13985

SEQ ID NO: 9920 - protein, 566 aa, synthetic construct; identical to SEQ ID NO: 9883
  REGION 1..566: note = hemagglutinin__InfluenzaA__AGG13997

SEQ ID NO: 9921 - protein, 566 aa, synthetic construct; identical to SEQ ID NO: 9883
  REGION 1..566: note = hemagglutinin__InfluenzaA__AGG14009

SEQ ID NO: 9922 - protein, 566 aa, synthetic construct
  REGION 1..566: note = hemagglutinin__InfluenzaA__AGG14021
MKTIIALSYILCLVFAQELPGNDDSTATLCLGHHAVPNGTIVKTITNDQIEVTNATELVQSSSTGEICNSPHQILDGENCTLIDALLGDPQCDGFQNKKWDLFVERSKAHSNCYPYDVPDYASLRSLVASSGTLEFNNESFNWTGVTQNGTSSACIRRSNNSFFSRLNWLTHLNFKYPALNVTMPNNEQFDKLYIWGVHHPGTDKDQIFLYAQASGRITVSTKRSQQAVIPNIGSRPRVRNIPSRVSIYWTIVKPGDILLINSTGNLIAPRGYFKIRSGKSSIMRSDAPIGKCNSACITPNGSIPNDKPFQNVNRITYGACPRYVKQNTLKLATGMRNVPEKQTRGIFGAIAGFIENGWEGMVDGWYGFRHQNSEGRGQAADLKSTQAAIDQINGKLNRLIGKTNEKFHQIEKEFSEVEGRIQDLEKYVEDTKIDLWSYNAELLVALENQHTIDLTDSEMNKLFEKTKKQLRENAEDMGNGCFKIYHKCDNACIGSIRNGTYDHDVYRDEALNNRFQIKGIELKSGYKDWILWISFAISCFLLCVALLGFIMWACQKGNIRCNICI

SEQ ID NO: 9923 - protein, 566 aa, synthetic construct; identical to SEQ ID NO: 9884
  REGION 1..566: note = hemagglutinin__InfluenzaA__AGG14033

SEQ ID NO: 9924 - protein, 566 aa, synthetic construct; identical to SEQ ID NO: 9903
  REGION 1..566: note = hemagglutinin__InfluenzaA__AGG14318

SEQ ID NO: 9925 - protein, 566 aa, synthetic construct
  REGION 1..566: note = hemagglutinin__InfluenzaA__AGG14330
MKTIIALSYILCLVFAQKLPGNDNSTATLCLGHHAVPNGTIVKTITNDRIEVTNATELVQNSSIGEICDSPHQILDGENCTLIDALLGDPQCDGFQNKKWDLFVERSKAYSNCYPYDVPDYASLRSLVASSGTLEFNNESFNWTGVTQNGTSSACIRRSNSSFFSRLNWLTHLNFKYPALNVTMPNNEQFDKLYIWGVHHPGTDKDQIFLYAQSSGRITVSTKRSQQAVIPNIGSRPRIRNIPSRISIYWTIVKPGDILLINSTGNLIAPRGYFKIRSGKSSIIRSDAPIGKCKSECITPNGSIPNDKPFQNVNRITYGACPRYVKQSTLKLATGMRNVPEKQTRGIFGAIAGFIENGWEGMVDGWYGFRHQNSEGRGQAADLKSTQAAIDQINGKLNRLIGKTNEKFHQIEKEFSEVEGRIQDLEKYVEDTKIDLWSYNAELLVALENQHTIDLTDSEMNKLFEKTKKQLRENAEDMGNGCFKIYHKCDNACIGSIRNGTYDHDVYRDEALNNRFQIKGVELKSGYKDWILWISFAISCFLLCVALLGFIMWACQKGNIRCNICI

SEQ ID NO: 9926 - protein, 566 aa, synthetic construct
  REGION 1..566: note = hemagglutinin__InfluenzaA__AGG84179
MKTIIALSYILCLVFAQKLPGNDNSTATLCLGHHAVPNGTIVKTITNDQIEVTNATELVQSSSASEICDSPHHILDGENCTLIDALLGDPQCDGFQNKKWDLFVERSRAYSNCYPYDVPDYASLRSLVASSGTLEFNNESFNWTGVTQNGTSSACIRRSNNSFFSRLNWLTHLNFKYPALNVTMPNNEQFDKLYIWGVHHPGTDKDQIFLYAQASGRITVSTKRSQQAVIPNIGSRPRVRNIPSRISIYWTIVKPGDILLINSTGNLIAPRGYFKIRSGKSSIMRSDAPIGKCNSECITPNGSIPNDKPFQNVNRITYGACPRYVKQSTLKLATGMRNVPEKQTRGIFGAIAGFIENGWEGMMDGWYGFRHQNSEGRGQAADLKSTQAAIDQINGKLNRLIGKTNEKFHQIEKEFSEVEGRIQDLEKYVEDTKIDLWSYNAELLVALENQHTIDLTDSEMNKLFEKTKKQLRENAEDMGNGCFKIYHKCDNACIGSIRNGTYDHDVYRDEALNNRFQIKGVELKSGYKDWILWISFAISCFLLCVALLGFIMWACQKGNIRCNICI

SEQ ID NO: 9927 - protein, 567 aa, synthetic construct
  REGION 1..567: note = hemagglutinin__InfluenzaA__AGI02564
MEKIVLLLAIVSLVKSDQICIGYHANNSTEQVDTIMEKNVTVTHAQDILEKTHNGKLCDLDGVKPLILRDCSVAGWLLGNPMCDEFINVPEWSYIVEKANPTNDLCYPGNFNDYEELKHLLSRINHFEKIQIIPKSSWSGHEASSGVSSACPYQGTPSFFRNVVWLIKKNNTYPTIKRSYNNTNQEDLLILWGIHHSNDAAEQTKLYQNPTTYISVGTSTLNQRLVPKIATRSKVNGQSGRMDFFWTILKPNDAINFESNGNFIAPEYAYKIVKKGDSAIMKSEVEYGNCNTKCQTPIGAINSSMPFHNIHPLTIGECPKYVKSNKLVLATGLRNSPLRERRRKRGLFGAIAGFIEGGWQGMVDGWYGYHHSNEQGSGYAADKESTQKAIDGVTNKVNSIIDKMNTQFEAVGREFNNLERRIENLNKKMEDGFLDVWTYNAELLVLMENERTLDFHDSNVKNLYDKVRLQLRNNAKELGNGCFEFYHKCDNECMESVRNGTYDYPQYSEEARLKREEISGVKLESIGTYQILSIYSTVASSLALAIMVAGLSLWMCSNGSLQCRICI

SEQ ID NO: 9928 - protein, 568 aa, synthetic construct
  REGION 1..568: note = hemagglutinin__InfluenzaA__AGI02565
MEKIVLLLAIVSLVKSDQICIGYHANNSTEQVDTIMEKNVTVTHAQDILEKTHNGKLCDLDGVKPLILRDCSVAGWLLGNPMCDEFINVPEWSYIVEKAIPANDLCYPGDFNDYEELKHLLSRINHFEKIQIIPKSSWSNHEASLGVSSACPYLGKPSFFRNVVWLIKKNSTYPTIKRSYNNTNQEDLLVLWGIHHPNDAAEQTKLYQNPTTYISVGTSTLNQRLVPKIATRSKVNGQSGRMEFFWTILKPNDAINFESNGNFIAPEYAYKIVKKGDSAIMKSELEYGNCNTKCQTPMGAINSSMPFHNIHPLTIGECPKYVKSNRLVLATGLRNSPQGERRRKKRGLFGAIAGFIEGGWQGMVDGWYGYHHSNEQGSGYAADKESTQKAIDGVTNKVNSIIDKMNTQFEAVGREFNNLERRIENLNKKMEDGFLDVWTYNAELLVLMENERTLDFHDSNVKNLYDKVRLQLRDNAKELGNGCFEFYHKCDNECMESVRNGTYDYPQYSEEARLKREEISGVKLESIGTYQILSIYSTVASSLALAIMVAGLSLWMCSNGSLQCRICI

SEQ ID NO: 9929 - protein, 567 aa, synthetic construct
  REGION 1..567: note = hemagglutinin__InfluenzaA__AGI02566
MEKIVLLLAIVSLVKSDQICIGYHANNSTEQVDTIMEKNVTVTHAQDILEKTHNGKLCDLDGVKPLILRDCSVAGWLLGNPMCDEFINVPEWSYIVEKANPANDLCYPGNFNDYEELKHLLSRINHFEKIQIIPKSSWSDHEASSGVSSACPYQGTPSFFRNVVWLIKKNNTYPTIKRSYNNTNQENLLILWGIHHSNDAAEQIKLYQNPTTYISVGTSTLNQRLVPKIATRSKVNGQSGRMDFFWTILKPNDAINFESNGNFIAPEYAYKIVKEGDSAIMKSEVEYGNCNTKCQTPIGAINSSMPFHNIHPLTIGECPKYVKSNKLVLATGLRNSPLRERRRKRGLFGAIAGFIEGGWQGMVDGWYGYHHSNEQGSGYAADKESTQKAIDGVTNKVNSIIDKMNTQFEAVGREFNNLERRIENLNKKMEDGFLDVWTYNAELLVLMENERTLDFHDSNVKNLYDKVRLQLRDNAKELGNGCFEFYHKCDNECMESVRNGTYDYPQYSEEARLKREEISGVKLESIGTYQILSIYSTVASSLALAIMVAGLSLWMCSNGSLQCRICI

SEQ ID NO: 9930 - protein, 568 aa, synthetic construct
  REGION 1..568: note = hemagglutinin__InfluenzaA__AGI02567
MEKIVLLLAIVSLVKSDQICIGYHANNSTEQVDTIMEKNVTVTHAQDILEKTHNGKLCDLDGVKPLILRDCSVAGWLLGNPMCDEFLNVPEWSYIVEKANPANDLCYPGNFNDYEELKHLLSRINHFEKIQIIPKSSWSDHEASSGVSSACPYQGRSSFFRNVVWLIKKNNAYPTIKRSYNNTNQEDLLVLWGIHHPNDAAEQTRLYQNPTTYISVGTSTLNQRLVPKIATRSKVNGQSGRMEFFWTILKPNDAINFESNGNFIAPEYAYKIVKKGDSTIMKSELEYGNCNTKCQTPIGAINSSMPFHNIHPLTIGECPKYVKSNRLVLATGLRNSPQGERRRKKRGLFGAIAGFIEGGWQGMVDGWYGYHHSNEQGSGYAADKESTQKAIDGVTNKVNSIIDKMNTQFEAVGREFNNLERRIENLNKKMEDGFLDVWTYNAELLVLMENERTLDFHDSNVKNLYDKVRLQLRDNAKELGNGCFEFYHRCDNECMESVRNGTYDYPQYSEEARLKREEISGVKLESIGTYQILSIYSTVASSLALAIMVAGLSLWMCSNGSLQCRICI

SEQ ID NO: 9931 - protein, 567 aa, synthetic construct
  REGION 1..567: note = hemagglutinin__InfluenzaA__AGI02568
MEKIVLLLAIVSLVKSDQICIGYHANNSTEQVDTIMEKNVTVTHAQDILEKTHNGKLCDLDGVKPLILRDCSVAGWLLGNPMCDEFINVPEWSYIVEKANPANDLCYPGNFNDYEELKHLLSRINHFEKIQIIPKSSWSDHEASSGVSSACPYQGTPSFFRNVVWLIKKNNTYPTIKRSYNNTNQENLLILWGIHHSNDATEQIKLYQNPTTYISVGTSTLNQRLVPKIGTRSKVNGQSGRMDFFWTILKPNDAINFESNGNFIAPEYAYKIVKEGDSAIMKSEVEYGNCNTKCQTPIGAINSSMPFHNIHPLTIGECPKYVKSNKLVLATGLRNSPLRERRRKRGLFGAIAGFIEGGWQGMVDGWYGYHHSNEQGSGYAADKESTQKAIDGVTNKVNSIIDKMNTQFEAVGREFNNLERRIENLNKKMEDGFLDVWTYNAELLVLMENERTLDFHDSNVKNLYDKVRLQLRDNAKELGNGCFEFYHKCDNECMESVRNGTYDYPQYSEEARLKREEISGVKLESMGIYQILSIYSTVASSLALAIMVAGLSLWMCSNGSLQCRICI

SEQ ID NO: 9932 - protein, 560 aa, synthetic construct
  REGION 1..560: note = hemagglutinin__InfluenzaA__AGI60301
MNTQILVFALIAIIPTNADKICLGHHAVSNGTKVNTLTERGVEVVNATETVERTNIPRICSKGKRTVDLGQCGLLGTITGPPQCDQFLEFSADLIIERREGSDVCYPGKFVNEEALRQILRESGGIDKEAMGFTYSGIRTNGATSACRRSGSSFYAEMKWLLSNTDNAAFPQMTKSYKNTRKSPALIVWGIHHSVSTAEQTKLYGSGNKLVTVGSSNYQQSFVPSPGARPQVNGISGRIDFHWLMLNPNDTVTFSFNGAFIAPDRASFLRGKSMGIQSGVQVDANCEGDCYHSGGTIISNLPFQNIDSRAVGKCPRYVKQRSLLLATGMKNVPEIPKGRGLFGAIAGFIENGWEGLIDGWYGFRHQNAQGEGTAADYKSTQSAIDQITGKLNRLIEKTNQQFELIDNEFNEVEKQIGNVINWTRDSITEVWSYNAELLVAMENQHTIDLADSEMDKLYERVKRQLRENAEEDGTGCFEIFHKCDDDCMASIRNNTYDHSKYREEAMQNRIQIDPVKLSSGYKDVILWFSFGASCFILLAIVMGLVFICVKNGNMRCTICI

SEQ ID NO: 9933 - protein, 560 aa, synthetic construct
  REGION 1..560: note = hemagglutinin__InfluenzaA__AGJ72861
MNTQILVFALIAIIPTNADKICLGHHAVSNGTKVNTLTERGGEVVNATETVERTNIPRICSKGKKTVDLGQGGPRGTITGPPQCDQFLEFSADLIMERREGSDVCYPGKFVNEEALRQILRESGGIDKEAMGFTYSGIRTNGATSACRRSGSSFYAEMKWLLSNTDNAAFPQMTKSYKNTRKSPALIVWGIHHSVSTAEQTKLYGSGNKLVTVGSSNYQQSFVPSPGARPQVNGQSGRIDFHWLMLNPNDTVTFSFNGAFIAPDRASFLRGKSMGIQSGVQVDANCEGDCYHSGGTIISNLPFQNIDSRAVGKCPRYVKQRSLLLATGMKNVPEIPKGRGLFGAIAGFIENGWEGLIDGWYGFRHQNAQGEGTAADYKSTQSAIDQITGKLNRLIEKTNQQFELIDNEFNEVEKQIGNVINWTRDSITEVWSYNAELLVAMENQHTIDLADSEMDKLYERVKRQLRENAEEDGTGCFEIFHKCDDDCMASIRNNTYDHSKYREEAMQNRIQIDPVKLSSGYKDVILWFSFGASCFILLAIVMGLVFICVKNGNMRCTICI

SEQ ID NO: 9934 - protein, 566 aa, synthetic construct
  REGION 1..566: note = hemagglutinin__InfluenzaA__AGJ73327
MKAILVVLLYTFATANADTLCIGYHANNSTDTVDTVLEKNVTVTHSVNLLEDKHNGKLCKLRGVAPLHLGKCNIAGWILGNPECESLSTASSWSYIVETSSSDNGTCYPGDFINYEELREQLSSVSSFERFEIFPKTSSWPNHDSNKGVTAACPHAGAKSFYKNLIWLVKKGNSYPKLSKSYINDKGKEVLVLWGIHHPSTTADHQSLYQNADAYVFVGTSRYSKKFKPEIAIRPKVRDQEGRMNYYWTLIEPGDKITFEATGNLVVPRYAFAMERNAGSGIIIPDTPVHDCNTTCQTPKGAINTSLPFQNIHPITIGKCPKYVKSTKLRLATGLRNVPSIQSRGLFGAIAGFIEGGWTGMVDGWYGYHHQNEQGSGYAADLKSTQNAIDKITNKVNSVIEKMNTQFTAVGKEFNHLEKRIENLNKKLDDGFLDIWTYNAELLVLLENERTLDYHDSNVKNLYEKVRNQLKNNAKEIGNGCFEFYHKCDNTCMESVKNGTYDYPKYSEEAKLNREKIDGVKLESTRIYQILAIYSTVASSLVLVVSLGEISFWMCSNGSLQCRICI

SEQ ID NO: 9935 - protein, 566 aa, synthetic construct
  REGION 1..566: note = hemagglutinin__InfluenzaA__AGJ73329
MKAILVVLLYTFATANADTLCIGYHANNSTDTVDTVLEKNVTVTHSVNLLEDKHNGKLCKLRGVAPLHLGKCNIAGWILGNPECESLSTASSWSYIVETSSSDNGTCYPGDFIDYEELREQLSSVSSFERFEIFPKTSSWPNHDSNKGVTAACPHAGAKGFYKNLIWLVKKGNSYPKLSKSYINDKGKEVLVLWGIHHPSTTADQQSLYQNADTYVFVGTSRYSKKFKPEIAIRPKVRDQEGRMNYYWTLVEPGDKITFEATGNLVVPRYAFAMERNAGSGIIISDAPVHDCNTTCQTPKGAINTSLPFQNIHPITIGKCPKYVKSTKLRLATGLRNVPSIQSRGLFGAIAGFIEGGWTGMVDGWYGYHHQNEQGSGYAADLKSTQNAIDKITNKVNSVIEKMNTQFTAVGKEFNHLEKRIENLNKKVDDGFLDIWTYNAELLVLLENERTLDYHDSNVKNLYEKVRNQLKNNAKEIGNGCFEFYHKCDNTCMESVKNGTYDYPKYSEEAKLNREEIDGVKLESTRIYQILAIYSTVASSLVLVVSLGAISFWMCSNGSLQCRICI

SEQ ID NO: 9936 - protein, 566 aa, synthetic construct
  REGION 1..566: note = hemagglutinin__InfluenzaA__AGJ73331
MKAILVVLLYTFATANADTLCIGYHANNSTDTVDTVLEKNVTVTHSVNLLEDKHNGKLCKLRGVAPLHLGKCNIAGWILGNPECESLSTASSWSYIVETSSSDNGTCYPGDFIDYEELREQLSSVSSFERFEIFPKTSSWPNHDSNKGVTTACPHAGAKSFYKNLIWLVKKGNSYPKLSKSYINDKGKEVLVLWGIHHPPTSADQQSLYQNADAYVFVGTSRYSKKFKPEIAIRPKVRGQEGRMNYYWTLVEPGDKITFEATGNLVVPRYAFAMERNAGSGIIISDTPVHDCNTTCQTPKGAINTSLPFQNIHPITIGKCPKYVKSTKLRLATGLRNVPSIQSRGLFGAIAGFIEGGWTGMVDGWYGYHHQNEQGSGYAADLKSTQNAIDEITNKVNSVIEKMNTQFTAVGKEFNHLEKRIENLNKKVDDGFLDIWTYNAELLVLLENERTLDYHDSKVKNLYEKVRSQLKNNAKEIGNGCFEFYHKCDNTCMESVKNGTYDYPKYSEEAKLNREEIDGVKLESTRIYQILAIYSTVASSLVLVVSLGAISFWMCSNGSLQCRICI

SEQ ID NO: 9937 - protein, 566 aa, synthetic construct
  REGION 1..566: note = hemagglutinin__InfluenzaA__AGJ73333
MKAILVVLLYTFATANADTLCIGYHANNSTDTVDTVLEKNVTVTHSVNLLEDKHNGKLCKLRGVAPLHLGKCNIAGWILGNPECESLSTASSWSYIVETSSSDNGTCYPGDFIDYEELREQLSSVSSFERFEIFPKTSSWPNHDSNKGVTAACPHAGAKGFYKNLIWLVKKGNSYPKLSKSYINDKGKEVLVLWGIHHPSTSADQQSLYQNADTYVFVGTSRYSKKFKPEIAIRPKVRDQEGRMNYYWTLVEPGDKITFEATGNLVVPRYAFAMERNAGSGIIISDTPVHDCNTTCQTPKGAINTSLPFQNIHPITIGKCPKYVKSTKLRLATGLRNVPSIQSRGLFGAIAGFIEGGWTGMVDGWYGYHHQNEQGSGYAADLKSTQNAIDKITNKVNSVIEKMNTQFTAVGKEFNHLEKRIENLNKKVDDGFLDIWTYNAELLVLLENERTLDYHDSNVKNLYEKVRNQLKNNAKEIGNGCFEFYHKCDNTCMESVKNGTYDYPKYSEEAKLNREEIDGVKLESTRIYQILAIYSTVASSLVLVVSLGAISFWMCSNGSLQCRICI

SEQ ID NO: 9938 - protein, 566 aa, synthetic construct
  REGION 1..566: note = hemagglutinin__InfluenzaA__AGJ73335
MKAILVVLLYTFATANADTLCIGYHANNSTDTVDTVLEKNVTVTHSVNLLEDKHNGKLCKLRGVAPLHLGKCNIAGWILGNPECESLSTASSWSYIVETSSSDNGTCYPGDFIDYEELREQLSSVSSFERFEIFPKTSSWPNHDSNKGVTAACPHAGAKSFYKNLIWLVKKGNSYPKLSKSYINDKGKEVLVLWGIHHPSTTADQQSLYQNADTYVFVGTSRYSKKFKPEIAIRPKVRDQEGRMNYYWTLVEPRDKITFEATGNLVVPRYAFAMERNAGSGIIISDTPVHDCNTTCQTPKGAINTSLPFQNIHPITIGKCPKYVKSTKLRLATGLRNVPSIQSRGLFGAIAGFIEGGWTGMVDGWYGYHHQNEQGSGYAADLKSTQNAIDKITNKVNSVIEKMNTQFTAVGKEFNHLEKRIENLNKKVDDGFLDIWTYNAELLVLLENERTLDYHDSNVKNLYEKVRNQLKNNAKEIGNGCFEFYHKCDNTCMESVKNGTYDYPKYSEEAKLNREEIDGVKLESTRIYQILAIYSTVASSLVLVVSLGAISFWMCSNGSLQCRICI

SEQ ID NO: 9939 - protein, 566 aa, synthetic construct; identical to SEQ ID NO: 6454
  REGION 1..566: note = hemagglutinin__InfluenzaA__AGJ73337

SEQ ID NO: 9940 - protein, 566 aa, synthetic construct; identical to SEQ ID NO: 6454
  REGION 1..566: note = hemagglutinin__InfluenzaA__AGJ73339

SEQ ID NO: 9941 - protein, 566 aa, synthetic construct; identical to SEQ ID NO: 6454
  REGION 1..566: note = hemagglutinin__InfluenzaA__AGJ73341

SEQ ID NO: 9942 - protein, 566 aa, synthetic construct
  REGION 1..566: note = hemagglutinin__InfluenzaA__AGJ73343
MKAILVVLLYTFATANADTLCIGYHANNSTDTVDTVLEKNVTVTHSVNLLEDKQNGKLCKLRGVAPLHLGKCNIAGWILGNPECESLSTASSWSYIVETSSSDNGTCYPGDFINYEELREQLSSVSSFERFEIFPKTSSWPNHDSNKGVTAACPHAGAKSFYKNLIWLVKKGNSYPKLSKSYINDKGKEVLVLWGIHHPSTSADQQSLYQNADAYVFVGTSKYSKKFKPEIAVRPKVRDQEGRMNYYWTLVEPGDKITFEATGNLLVPRYAFAMERNAGSGIIISDTPVHDCNTTCQTPKGAINTSLPFQNIHPITIGKCPKYVKSTKLRLATGLRNVPSIQSRGLFGAIAGFIEGGWTGMVDGWYGYHHQNEQGSGYAADLKSTQNAIDKITNKVNSVIEKMNTQFTAVGKEFNHLEKRIENLNKKVDDGFLDIWTYNAELLVLLENERTLDYHDSNVKNLYEKVRSQLKNNAKEIGNGCFEFYHKCDNTCMESVKNGTYDYPKYSEEAKLNREEIDGVKLESTRIYQILAIYSTVASSLVLVVSLGAISFWMCSNGSLQCRICI

SEQ ID NO: 9943 - protein, 566 aa, synthetic construct
  REGION 1..566: note = hemagglutinin__InfluenzaA__AGJ73345
MKAILVVLLYTFATANADTLCIGYHANNSTDTVDTVLEKNVTVTHSVNLLEDKHNGKLCKLRGVAPLHLGKCNIAGWILGNPECESLSTASSWSYIVETSSSDNGTCYPGDFINYEELREQLSSVSSFERFEIFPKTSSWPNHDSNKGVTAACPHAGAKSFYKNLIWLVKKGNSYPKLSKSYINDKGKEVLVLWGIHHPSTSADQQSLYQNEDAYVFVGTSKYSKKFKPEIAVRPKVRDQEGRMNYYWTLVEPGNKITFEATGNLLVPRYAFAMERNAGSGIIISDTPVHDCNTTCQTPKGAINTSLPFQNIHPITIGKCPKYVKSTKLRLATGLRNVPSIQSRGLFGAIAGFIEGGWTGMVDGWYGYHHQNEQGSGYAADLKSTQNAIDKITNKVNSVIEKMNTQFTAVGKEFNHLEKRIENLNKKVDDGFLDIWTYNAELLVLLENERTLDYHDSNVKNLYEKVRSQLKNNAKEIGNGCFEFYHKCDNTCMESVKNGTYDYPKYSEEAKLNREEIDGVKLESTRIYQILAIYSTVASSLVLVVSLGAISFWMCSNGSLQCRICI

SEQ ID NO: 9944 - protein, 566 aa, synthetic construct; identical to SEQ ID NO: 7050
  REGION 1..566: note = hemagglutinin__InfluenzaA__AGJ73347

SEQ ID NO: 9945 - protein, 566 aa, synthetic construct; identical to SEQ ID NO: 7050
  REGION 1..566: note = hemagglutinin__InfluenzaA__AGJ73349

SEQ ID NO: 9946 - protein, 566 aa, synthetic construct
  REGION 1..566: note = hemagglutinin__InfluenzaA__AGJ73351
MKAILVVLLYTFATANADTLCIGYHANNSTDTVDTVLEKNVTVTHSVNLLEDKHNGKLCKLRGVAPLHLGKCNIAGWILGNPECESLSTASSWSYIVETSSSDNGTCYPGDFIDYEELREQLSSVSSFERFEIFPKTSSWPNHDSNKGVTAACPHAGAKGFYKNLIWLVKKGNSYPKLSKSYINDKGKEVLVLWGIHHPSTTADQQSLYQNADTYVFVGTSRYSKKFKPEIAIRPKMRDQEGRMNYYWTLVEPGDKITFEATGNLVVPRYAFAMERNAGSGIIISDTPVHDCNTTCQTPKGAINTSLPFQNIHPITIGKCPKYVKSTKLRLATGLRNVPSIQSRGLFGAIAGFIEGGWTGMVDGWYGYHHQNEQGSGYAADLKSTQNAIDKITNKVNSVIEKMNTQFTAVGKEFNHLEKRIENLNKKVDDGFLDIWTYNAELLVLLENERTLDYHDSNVKNLYEKVRNQLKNNAKEIGNGCFEFYHKCDNTCMESVKNGTYDYPKYSEEAKLNREEIDGVKLESTRIYQILAIYSTVASSLVLVVSLGAISFWMCSNGSLQCRICI

SEQ ID NO: 9947 - protein, 566 aa, synthetic construct
  REGION 1..566: note = hemagglutinin__InfluenzaA__AGJ73353
MKAILVVLLYTFATANADTLCIGYHANNSTDTVDTVLEKNVTVTHSVNLLEDKHNGKLCKLRGVAPLHLGKCNIAGWILGNPECESLSTASSWSYIVETSSSDNGTCYPGDFINYEELREQLSSVSSFERFEIFPKTSSWPNHDSNKGVTAACPHAGAKSFYKNLIWLVKKGNSYPKLSKSYINDKGKEVLVLWGIHHPSTSADQQSLYQNADAYVFVGTSKYSKKFKPEIAVRPKVRDQEGRMNYYWTLVEPGDKITFEATGNLLVPRYAFAMERNAGSGIIISDTPVHDCNTTCQTPKGAINTSLPFQSIHPITIGKCPKYVKSTKLRLATGLRNVPSIQSRGLFGAIAGFIEGGWTGMVDGWYGYHHQNEQGSGYAADLKSTQNAIDKITNKVNSVIEKMNTQFTAVGKEFNHLEKRIENLNKKVDDGFLDIWTYNAELLVLLENERTLDYHDSNVKNLYEKVRSQLKNNAKEIGNGCFEFYHKCDNTCMESVKNGTYDYPKYSEEAKLNREEIDGVKLESTRIYQILAIYSTVASSLVLVVSLGAISFWMCSNGSLQCRICI

SEQ ID NO: 9948 - protein, 566 aa, synthetic construct
  REGION 1..566: note = hemagglutinin__InfluenzaA__AGJ73355
MKAILVVLLYTFATANADTLCIGYHANNSTDTVDTVLEKNVTVTHSVNLLEDKHNGKLCKLRGVAPLHLGKCNIAGWILGNPECESLSTASSWSYIVETSSSDNGTCYPGDFIDYEELREQLSSVSSFERFEIFPKTSSWPNHDSNKGVTAACPHAGAKGFYKNLIWLVKKGNSYPKLSKSYINDKGKEVLVLWGIHHPSTTADQQSLYQNADTYVFVGTSRYSKKFKPEIAIRPKVRDQEGRMNYYWTLVEPGDKITFEATGNLVVPRYAFAMERNAGSGIIISDTPVHDCNTTCQTPKGAINTSLPFQNIHPITIGKCPKYVKSTKLRLATGLRNVPSIQSRGLFGAIAGFIEGGWTGMVDGWYGYHHQNEQGSGYAADLKSTQNAIDKITNKVNSVIEKMNTQFTAVGKEFNHLEKRIENLNKKVDDGFLDIWTYNAELLVLLENERTLDYHDSNVKNLYEKVRNQLKNNAKEIGNGCFEFYHKCDNTCMESVKNGTYDYPKYSEEAKLNREEIDGVKLESTRIYQILAIYSTVASSLVLVVSLGATSFWMCSNGSLQCRICI

SEQ ID NO: 9949 - protein, 566 aa, synthetic construct; identical to SEQ ID NO: 6867
  REGION 1..566: note = hemagglutinin__InfluenzaA__AGJ73357

SEQ ID NO: 9950 - protein, 566 aa, synthetic construct
  REGION 1..566: note = hemagglutinin__InfluenzaA__AGJ73361
MKAILVVLLYTFATANADTLCIGYHANNSTDTVDTVLEKNVTVTHSVNLLEDKHNGKLCKLRGVAPLHLGKCNIAGWILGNPECESLSTSSSWSYIVETSSSDNGTCYPGDFIDYEELREQLSSVSSFERFEIFPKTSSWPNHDSNKGVTAACPHAGAKGFYKNLIWLVKKGNSYPKLSKSYINDKGKEVLVLWGIHHPSTTADQQSLYQNADTYVFVGTSRYSKKFKPEIAIRPKVRDQEGRMNYYWTLVEPGDKITFEATGNLVVPRYAFAMERNAGSGIFISDTPVHDCNTTCQTPKGAINTSLPFQNIHPITIGKCPKYVKSTKLRLATGLRNVPSIQSRGLFGAIAGFIEGGWTGMVDGWYGYHHQNEQGSGYAADLKSTQNAIDKITNKVNSVIEKMNTQFTAVGKEFNHLEKRIENLNKKVDDGFLDIWTYNAELLVLLENERTLDYHDSNVKNLYEKVRNQLKNNAKEIGNGCFEFYHKCDNTCMESVKNGTYDYPKYSEEAKLNREEIDGVKLESTRIYQILAIYSTVASSLVLVVSLGAISFWMCSNGSLQCRICI

SEQ ID NO: 9951 - protein, 566 aa, synthetic construct; identical to SEQ ID NO: 7050
  REGION 1..566: note = hemagglutinin__InfluenzaA__AGJ73363

SEQ ID NO: 9952 - protein, 566 aa, synthetic construct; identical to SEQ ID NO: 6867
  REGION 1..566: note = hemagglutinin__InfluenzaA__AGJ73365

SEQ ID NO: 9953 - protein, 566 aa, synthetic construct
  REGION 1..566: note = hemagglutinin__InfluenzaA__AGJ73367
MKAILVVLLYTFATANADTLCIGYHANNSTDTVDTVLEKNVTVTHSVNLLEDKHNGKLCKLRGVAPLHLGKCNIAGWILGNPECESLSTASSWPYIVETSSSDNGTCYPGDFINYEELREQLSSVSSFERFEIFPKTSSWPNHDSNKGVAAACPHAGAKSFYKNLIWLVKKGNSYPKLSKSYINDKGKEVLVLWGIHHPSTSADQQSLYQNADAYVFVGTSKYSKKFKPEIAVRPKVRDQEGRMNYYWTLVEPGDKITFEATGNLLVPRYAFAMERNAGSGIIISDTPVQDCNTTCQTPKGAINTSLPFQNIHPITIGKCPKYVKSTKLRLATGLRNVPSIQSRGLFGAIAGFIEGGWTGMVDGWYGYHHQNEQGSGYAADLKSTQNAIDKITNKVNSVIEKMNTQFTAVGKEFNHLEKRIENLNKKVDDGFLDIWTYNAELLVLLENERTLDYHDSNVKNLYEKVRNQLKNNAKEIGNGCFEFYHKCDNTCMESVKNGTYDYPKYSEEAKLNREEIDGVKLESTRIYQILAIYSTVASSLVLVVSLGAISFWMCSNGSLQCRICI

SEQ ID NO: 9954 - protein, 566 aa, synthetic construct
  REGION 1..566: note = hemagglutinin__InfluenzaA__AGJ73369
MKAILVVLLYTFATANADTLCIGYHANNSTDTVDTVLEKNVTVTHSVNLLEDKHNGKLCKLRGVAPLHLGKCNIAGWILGNPECESLSTASSWSYIVETSSSDNGTCYPGDFIDYEELREQLSSVSSFERFEIFPKTSSWPNHDSNKGVTAACPHAGAKGFYKNLIWLVKKGNSYPKLSKSYINDKGKEVLVLWGIHHPSTTADQQSLYQNADTYVFVGTSRYSKKFKPEIAIRPKVRDQEGRMNYYWTLVEPGDKITFEATGNLVVPRYAFAMERNAGSGIIISDTPVHDCNTTCQTPKGAINTSLPFQNIHPITIGKCPKYVKSTKLRLATGLRNVPSIQSRGLFGAIAGFIEGGWTGMVDGWYGYHHQNEQGSGYAADLKSTQNAIDKITNKVNSVIEKMNTQFTAVGKEFNHLEKRIENLNKKVDDGFLDIWTYNAELLVLLENERTLDYHDSNVKNLYEKVRNQLKNNAKEIGNGCFEFYHKCDNTCMESVKNGTYDYPKYSAEAKLNREEIDGVKLESTRIYQILAIYSTVASSLVLVVSLGAISFWMCSNGSLQCRICI

SEQ ID NO: 9955 - protein, 566 aa, synthetic construct; identical to SEQ ID NO: 6454
  REGION 1..566: note = hemagglutinin__InfluenzaA__AGJ73371

SEQ ID NO: 9956 - protein, 566 aa, synthetic construct
  REGION 1..566: note = hemagglutinin__InfluenzaA__AGJ73373
MKAILVVLLYTFATANADTLCIGYHANNSTDTVDTVLEKNVTVTHSVNLLEDKHNGKLCKLRGVAPLHLGKCNIAGWILGNPECESLSTASSWSYIVETSSSDNGTCYPGDFIDYEELREQLSSVSSFERFEIFPKTSSWPNHDSNKGVTAACPHAGAKGFYKNLIWLVKKGNSYPKLSKSYINDKGKEVLVLWGIHHPSTTADQQSLYQNADTYVFVGTSRYSKKFKPEIAIRPKVRDQEGRMNYYWTLVEPGDKITFEATGNLVVPRYAFAMERNAGSGIIISDTPVHDCNTTCQTPKGAINTSHPFQNIHPITIGKCPKYVKSTKLRLATGLRNVPSIQSRGLFGAIAGFIEGGWTGMVDGWYGYHHQNEQGSGYAADLKSTQNAIDKITNKVNSVIEKMNTQFTAVGKEFNHLEKRIENLNKKVDDGFLDIWTYNAELLVLLENERTLDYHDSNVKNLYEKVRNQLKNNAKEIGNGCFEFYHKCDNTCMESVKNGTYDYPKYSEEAKLNREEIDGVKLESTRIYQILAIYSTVASSLVLVVSLGAISFWMCSNGSLQCRICI

SEQ ID NO: 9957 - protein, 566 aa, synthetic construct
  REGION 1..566: note = hemagglutinin__InfluenzaA__AGJ73375
MKAILVVLLYTFATANADTLCIGYHANNSTDTVDTVLEKNVTVTHSVNLLEDKHNGKLCKLRGVAPLHLGKCNIAGWILGNPECESLSTASSWSYIVETSSSDNGTCYPGDFINYEELREQLSSVSSFERFEIFPETSSWPNHDSNKGVTAACPHAGAKSFYKNLIWLVKKGNSYPKLSKSYINDKGKEVLVLWGIHHPSTTADQQSLYQNADAYVFVGTSRYSKKFKPEIAIRPKVRDQEGRMNYYWTLIEPGDKITFEATGNLVVPRYAFAMERNAGSGIIISDTPVHDCNTTCQTPEGAINTSLPFQNIHPITIGKCPKYVKSTKLRLATGLRNVPSIQSRGLFGAIAGFIEGGWTGMVDGWYGYHHQNEQGSGYAADLKSTQNAIDKITNKVNSVIEKMNTQFTAVGKEFNHLEKRIENLNKKVDDGFLDIWTYNAELLVLLENERTLDYHDSNVKNLYEKVRNQLKNNAKEIGNGCFEFYHKCDNTCMESVKNGTYDYPKYSEEAKLNREEIDGVKLESTRIYQILAIYSTVASSLVLVVSLGAISFWMCSNGSLQCRICI

SEQ ID NO: 9958 - protein, 566 aa, synthetic construct
  REGION 1..566: note = hemagglutinin__InfluenzaA__AGJ73377
MKAILVVLLYTFATANADTLCIGYHANNSTDTVDTVLEKNVTVTHSVNLLEDKHNGKLCKLRGVAPLHLGKCNIAGWILGNPECESLSTASSWSYIVETSSSDNGTCYPGDFINYEELREQLSSVSSFERFEIFPKTSSWPNHDSNKGVTASCPRAGAKSFYKNLIWLVKKGNSYPKLSKSYINDKGKEVLVLWGIHHPSTTADQQSLYQNADAYVFVGTSRYSKKFKPEIAIRPKVRDQEGRMNYYWTLVEPGDKITFEATGNLLVPRYAFAMERNAGSGIIISDTPVHDCNTTCQTPKGAINTSLPFQNIHPITIGKCPKYVKSTKLRLATGLRNVPSIQSRGLFGAIAGFIEGGWTGMVDGWYGYHHQNEQGSGYAADLKSTQNAIDKITNKVNSVIEKMNTQFTAVGKEFNHLEKRIENLNKKVDDGFLDIWTYNAELLVLLENERTLDYHDSNVKNLYEKVRNQLKNNAKEIGNGCFEFNHKCDNTCMESVKNGTYDYPKYSEEAKLNKEEIDGVKLESTRIYQILAIYSTVASSLVLVVSLGAISFWMCSNGSLQCRICI

SEQ ID NO: 9959 - protein, 566 aa, synthetic construct
  REGION 1..566: note = hemagglutinin__InfluenzaA__AGJ73380
MKAILVVLLYTFATANADTLCIGYHANNSTDTVDTVLEKNVTVTHSVNLLEDKHNGKLCKLRGVAPLHLGKCNIAGWILGNPECESLSTASSWSYIVETSSSDNGTCYPGDFINYEELREQLSSVSSFERFEIFPKTSSWPNHDSNKGVTAACPHAGAKSFYKNLIWLVKKGNSYPKLSKSYINDKGKEVLVLWGIHHPSTTADQQSLYQNADAYVFVGTSRYSKKFKPEIAIRPKVRGQEGRMNYYWTLIEPGDKITFEATGNLVVPRYAFAMERNAGSGIIISDTPVHDCNSTCQTPKGAINTSLPFQNIHPITIGKCPKYVKSTKLRLATGLRNVPSIQSRGLFGAIAGFIEGGWTGMVDGWYGYHHQNEQGSGYAADLKSTQNAIDKITNKVNSVIEKMNTQFTAVGKEFNHLEKRIENLNKKVDDGFLDIWTYNAELFVLLENERTLDYHDSNVKDLYEKVRNQLKNNAKEIGNGCFEFYHKCDNTCMESVKNGTYDYPKYSEEAKLNREKIDGVKLESTRIYQILAIYSTVASSLVLVVSLGAISFWMCSNGSLQCRICI

SEQ ID NO: 9960 - protein, 566 aa, synthetic construct
  REGION 1..566: note = hemagglutinin__InfluenzaA__AGK62991
MKTIIALSYILCLVFAQKLPGNDNSTATLCLGHHAVPNGTIVKTITNDQIEVTNATELVQSSSTGEICDSPHQILDGENCTLIDALLGDPQCDGFQNKKWDLFVERSKAYSNCYPYDVPDYASLRSLVASSGTLEFNNESFNWTGVTQNGTSSACIRRSNSSFFSRLNWLTHLNFKYPALNVTMPNNEQFDKLYIWGVHHPGTDKDQIFLYAQASGRITVSTKRSQQAVIPNIGSRPRIRNIPSRISIYWTIVKPGDILLINSTGNLIAPRGYFKIRSGKSSIMRSDAPIGKCNSECITPNGSIPNDKPFQNVNRITYGACPRYVKQSTLKLATGMRNVPEKQTRGIFGAIAGFIENGWEGMVDGWYGFRHQNSEGRGQAADLKSTQAAIDQINGKLNRLIGKTNEKFHQIEKEFSEVEGRIQDLEKYVEDTKIDLWSYNAELLVALENQHTIDLTDSEMNKLFEKTKKQLRENAEDMGNGCFKIYHKCDNACIGSIRNGTYNHDVYRDEALNNRFQIKGVELKSGYKDWILWISFAISCFLLCVALLGFIMWACQKGNIRCNICI

SEQ ID NO: 9961 - protein, 566 aa, synthetic construct
  REGION 1..566: note = hemagglutinin__InfluenzaA__AGK62993
MKTIIALSYILCLVFAQKLPGNDNSTATLCLGHHAVPNGTIVKTITNDQIEVTNATELVQSSSTGEICNSPHQILDGENCTLIDALLGDPQCDGFQNKKWDLFVERSKAHSNCYPYDVPDYASLRSLVASSGTLEFNNESFNWTGVTQNGTSSACIRRSNNSFFSRLNWLTHLNFKYPALNVTMPNNEQFDKLYIWGVHHPGTDKDQIFLYAQASGRITVSTKRSQQAVIPNIGSRPRVRNIPSRVSIYWTIVKPGDILLINSTGNLIAPRGYFKIRSGKSSIMRSDAPISKCNSACITTNGSIPNDKPFQNVNRITYGACPRYVKQNTLKLATGMRNVPEKQTRGIFGAIAGFIENGWEGMVDGWYGFRHQNSEGRGQAADLKSTQAAIDQINGKLNRLIGKTNEKFHQIEKEFSEVEGRIQDLEKYVEDTKIDLWSYNAELLVALENQHTIDLTDSEMNKLFEKTKKQLRENAEDMGNGCFKIYHKCDNACIGSIRNGTYDHDVYRDEALNNRFQIKGVELKSGYKDWILWISFAISCFLLCVALLGFIMWSCQKGNIRCNICI

SEQ ID NO: 9962 - protein, 566 aa, synthetic construct
  REGION 1..566: note = hemagglutinin__InfluenzaA__AGK62995
MKTIIALSYILCLVFAQKLPGNDNSTATLCLGHHAGPNGTIVKTITNDQIEVTNATELVQSSSTGEICDSPHQILDGENCTLIDALLGDPQCDGFQNKKWDLFVERSKAYSNCYPYDVPDYASLRSLVASSGTLEFNNESFNWTGVTQNGTSSACIRRSNNSFFSRLNWLTHLNFKYPALNVTMPNNEQFDKLYIWGVHHPGTDKDQIFLYAQSSGRITVSTKRSQQAVIPNIGSRPRIRNIPSRISIYWTIVKPGDILLINSTGNLIAPRGYFKIRSGKSSIMRSDAPIGKCNSECITPNGSIPNDKPFQNVNRITYGACPRYVKQSTLKLATGMRNVPEKQTRGIFGAIAGFIENGWEGMVDGWYGFRHQNSEGRGQAADLKSTQAAIDQINGKLNRLIGKTNEKFHQIEKEFSEVEGRIQDLEKYVEDTKIDLWSYNAELLVALENQHTIDLTDSEMNKLFEKTKKQLRENAEDMGNGCFKIYHKCDNACIGSIRNGTYNHDVYRDEALNNRFQIKGVELKSGYKDWILWISFAISCFLLCVALLGFIMWACQKGNIRCNICI

SEQ ID NO: 9963 - protein, 566 aa, synthetic construct
  REGION 1..566: note = hemagglutinin__InfluenzaA__AGK62997
MKTIIALSYILCLVFAQKLPGNDNSTATLCLGHHAVPNGTIVKTITNDQIEVTNATELVQSSSTGEICNSPHQILDGENCTLIDALLGDPQCDGFQNKKWDLFVERSKAHSNCYPYDVPDYASLRSLVASSGTLEFNNESFNWTGVTQNGTSSACIRRSNNSFFSRLNWLTHLNFKYPALNVTMPNNDKFDKLYIWGVHHPGTDKDQIFLYAQASGRITVSTKRSQQAVIPNIGSRPRVRNIPSRVSIYWTIVKPGDILLINSTGNLIAPRGYFKIRSGKSSIMRSDAPIGKCNSACITPNGSIPNDKPFQNVNRITCGACARYVKQNTLKLATGMRNVPEKQTRGIFGAIAVFIENGWEGMVDGWYGFRHQNSEGREQAAAFQSTQAAIDQIIGKLNRLIGETNEKFHQIEKEFSEVERRIQALEKYVEDTKIDLWSYNAELLVALENQHTIDLTDSEMNKLFEKTKKQLRENAEDMGNGCFKIYHKCDNACIGSIRNGTYDHDVYRDEALNNRFQIKGVELKSGYKDWILWISFAISCFLLCVALLGFIMWSCQKGNIRCNICI

SEQ ID NO: 9964 - protein, 566 aa, synthetic construct
  REGION 1..566: note = hemagglutinin__InfluenzaA__AGK62999
MKTIIALSYILCLVFAQKLPGNDNSTATLCLGHHAVPNGTIVKTITNDQIEVTNATELVQSSSTGEICNSPHQILDGENCTLIDALLGDPQCDGFQNKKWDLFVERSKAYSNCYPYDVPDYASLRSLVASSGTLEFNNESFNWTGVTQNGTSSACIRRSNNSFFSRLNWLTHLNFKYPALNVTMPNNEQFDKLYIWGVHHPGTDKDQIFLYAQASGRITVSTKRSQQAVIPNIGSRPRVRNIPSRVSIYWTIVKPGDILLINSTGNLIAPRGYFKIRSGKSSIMRSDAPIGKCNSACITPNGSIPNDKPFQNVNRITYGACPRYVKQNTLKLATGMRNVPEKQTRGIFGAIAGFIENGWEGMVDGWYGFRHQNSEGRGQAADLKSTQAAIDQINGKLNRLIGKTNEKFHQIEKEFSEVEGRIQDLEKYVEDTKIDLWSYNAELLVALENQHTIDLTDSEMNKLFEKTKKQLRENAEDMGNGCFKIYHKCDNACIGSIRNGTYDHDVYRDEALNNRFQIKGVELKSGYKDWILWISFAISCFLLCVALLGFIMWACQKGNIRCNICI

SEQ ID NO: 9965 - protein, 566 aa, synthetic construct
  REGION 1..566: note = hemagglutinin__InfluenzaA__AGK63001
MKTIIALSYILCLVFAQKLPGNDNSTATLCLVHHAVPNGTIVKTITNDQIEVTNATELVQSSSTGEICDSPHQILDGENCTLIDALLGDPQCDGFQNKEWDLFVERSKAYSNCYPYDVPDYASLRSLVASSGTLEFNNESFNWTGVTQNGTSSACIRRSNSSFFSRLNGLTHLNFKYPALNVTMPNNEQFDKLYIWGVHHPGTDKDQIFLYAQSSGRITVSTKRSQQAVIPNIGSRPRIRNIPSRISIYWTIVKPGDILLINSTGNLIAPRGYFKIRSGKSSIMRSDAPIGKCNSECITPNGSIPNDKPFQNVNRITYGACPRYVKQSTLKLATGMRNVPEKQTRGIFGAIAGFIENGWEGMVDGWYGFRHQNSEGREQAADFQSTQAAIDQIIGKLNRLIGKTNEKFHQIEKEFSEVERRIQDLEKYVEDTKIDLWSYNAELLVALENQHTIDLTDSEMNKLFEKTKKQLRENAEDMGNGCFKIYHKCDNACIGSIRNGTYNHDVYRDEALNNRFQIKGVELKSGYKDWILWISFAISCFLLCVALLGFIMWSCQKGNIRCNICI

SEQ ID NO: 9966 - protein, 566 aa, synthetic construct
  REGION 1..566: note = hemagglutinin__InfluenzaA__AGK63003
MKTIIALSYILCLVFAQKLPGNDNSTATLCLGHHAGPNGTIVKTITNDQIEVTNATELVQSSSTGEICDSPHQILDGENCTLIDALLGDPQCDGFQNKKWDLFIERSKAYSNCYPYDVPDYASLRSLVASSGTLEFNNESFNWTGVTQNGTSSACIRRSNSSFFSRLNWLTHLNFKYPALNVTMPNNEQFDKLYIWGVHHPGTDKDQIFLYAQSSGRITVSTKRSQQAVIPNIGSRPRIRNIPSRISIYWTIVKPGDILLINSTGNLIAPRGYFKIRSGKSSIMRSDAPIGKCNSACITPNGSIPNDKPFQNVNRITYGACPRYVKQSTLKLATGMRNVPEKQTRGIFGAIAGFIENGWEGMVDGWYGFRHQNSEGRGQAADLKSTQAAIDQINGKLNRLIGKTNEKFHQIEKEFSEVEGRIQDLEKYVEDTKIDLWSYNAELLVALENQHTIDLTDSEMNKLFEKTKKQLRENAEDMGNGCFKIYHKCDNACIGSIRNGTYNHDVYRDEALNNRFQIKGVELKSGYKDWILWISFAISCFLLCVALLGFIMWACQKGNIRCNICI

SEQ ID NO: 9967 - protein, 566 aa, synthetic construct
  REGION 1..566: note = hemagglutinin__InfluenzaA__AGK63005
MKTIIALSYILCLVFAQKLPGNDNSTATLCLVHHAVPNGTIVKTITNDQIEVTNATELVQSSSTGEICDSPHQILDGENCTLIDALLGDPQCDGFQNKKWDLFVERSKAYSNCYPYDVPDYASLRSLVASSGTLEFNNESFNWTGVTQNGTSSACIRRSNSSFFSRLNGLTHLNFKYPALDVTMPNNDKFDKLYIWGVHHPGTDKDQIFLYAQSSGRITVSTKRSQQAVIPNIGSRPRIRNIPSRISIYWTIVKPGDILLINSTGNLIAPRGYFKIRSGKSSIMRSDAPIGKCNSECITPNGSIPNDKPFQNVNRITYGACPRYVKQSTLKLATGMRNVPEKQTRGIFGAIAVFIENGWEGMVDGWYGFRHQNSEGREQAADFQSTQAAIDQINGKLNRLIGKTNEKFHQIEKEFSEVEGRIQDLEKYVEDTKIDLWSYNAELLVALENQHTIDLTDSEMNKLFEKTKKQLRENAEDMGNGCFKIYHKCDNACIGSIRNGTYNHDVYRDEALNNRFQIKGVELKSGYKDWILWISFAISCFLLCVALLGFIMWACQKGNIRCNICI

SEQ ID NO: 9968 - protein, 566 aa, synthetic construct
  REGION 1..566: note = hemagglutinin__InfluenzaA__AGK63007
MKTIIALSYILCLVFAQKLPGNDNSTATLCLGHHAVPNGTIVKTITNDQIEVTNATELVQSSSTGEICDSPHQILDGENCTLIDALLGDPQCDGFQNKKWDLFVERSKAHSNCYPYDVPDYASLRSLVASSGTLEFNNESFNWTGVTQNGTSSACIRRSNNSFFSRLNWLTHLNFKYPALNVTMPNNEQFDKLYIWGVHHPGTDKDQIFLYAQASGRITVSTKRSQQAVIPNIGSRPRVRNIPSRVSIYWTIVKPGDILLINSTGNLIAPRGYFKIRSGKSSIMRSDAPIGKCNSECITPNGSIPNDKPFQNVNRITYGACPRYVKQNTLKLATGMRNVPEKQTRGIFGAIAGFIENGWEGMVDGWYGFRHQNSEGRGQAADLKSTQAAIDQINGKLNRLIGKTNEKFHQIEKEFSEVEGRIQDLEKYVEDTKIDLWSYNAELLVALENQHTIDLTDSEMNKLFEKTKKQLRENAEDMGNGCFKIYHKCDNACIGSIRNGTYDHDVYRDEALNNRFQIKGVELKSGYKDWILWISFAISCFLLCVALLGFIMWACQKGNIRCNICI

SEQ ID NO: 9969 - protein, 566 aa, synthetic construct
  REGION 1..566: note = hemagglutinin__InfluenzaA__AGK63009
MKTIIALSYILCLVFAQKLPGNDNSTATLCLGHHAVPNGTIVKTITNDQIEVTNATELVQSSSTGEICNSPHQILDGENCTLIDALLGDPQCDGLQNKKWDLFVERSKAHSNCYPYDVPDYASLRSLVASSGTLEFNNESFNWTGVTQNGTSSACIRRSNNSFFSRLNWLTHLNFKYPALNVTMPNNEQFDKLYIWGVHHPGTDKDQIFLYAQASGRITVSTKRSQQAVIPNIGSRPRVRNIPSRVSIYWTIVKPGDILLINSTGNLIAPRGYFKIRSGKSSIMRSDAPIGKCNSACITPNGSIPNDKPFQNVNRITYGACPRYVKQNTLKLATGMRNVPEKQTRGIFGAIAGFIENGWEGMVDGWYGFRHQNSEGRGQAADLKSTQAAIDQINGKLNRLIGKTNEKFHQIEKEFSEVEGRIQDLEKYVEDTKIDLWSYNAELLVALENQHTIDLTDSEMNKLFEKTKKQLRENAEDMGNGCFKIYHKCDNACIGSIRNGTYDHDVYRDEALNNRFQIKGVELKSGYKDWILWISFAISCFLLCVALLGFIMWACQKGNIRCNICI

SEQ ID NO: 9970 - protein, 566 aa, synthetic construct
  REGION 1..566: note = hemagglutinin__InfluenzaA__AGK63011
MKTIIALSYILCLVFAQKLPGNDNSTATLCLGHHAVPNGTIVKTITNDQIEVTNATELVQSSSTGEICDSPHQILDGENCTLIDALLGDPQCDGFQNKKWDLFVERSKAYSNCYPYDVPDYASLRSLVASSGTLEFNNESFNWTGVTQNGTSSACIRRSNNSFFSRLNWLTHLNFKYPALNVTMPNNEQFDKLYIWGVHHPGTDKDQIFLYAQASGRITVSTKRSQQAVIPNIGSRPRVRNIPSRISIYWTIVKPGDILLINSTGNLIAPRGYFKIRSGKSSIMRSDAPIGKCNSECITPNGSIPNDKPFQNVNRITYGACPRYVKQSTLKLATGMRNVPEKQTRGIFGAIAGFIENGWEGMVDGWYGFRHQNSEGRGQAADLKSTQAAIDQINGKLNRLIGKTNEKFHQIEKEFSEVEGRIQDLEKYVEDTKIDLWSYNAELLVALENQHTIDLTDSEMNKLFEKTKKQLRENAEDMGNGCFKIYHKCDNACIGSIRNGTYDHDVYRDEALNNRFQIKGVELKSGYKDWILWISFAISCFLLCVALLGFIMWACQKGNIRCNICI

SEQ ID NO: 9971 - protein, 566 aa, synthetic construct
  REGION 1..566: note = hemagglutinin__InfluenzaA__AGK63013
MKTIIALSYILCLVFAQKLPGNDNSTATLCLGHHAVPNGTIVKTITNDQIEVTNATELVQSSSTGEICNSPHQILDGENCTLIDALLGDPQCDGFQNKKWDLFVERSKAHSNCYPYDVPDYASLRSLVASSGTLEFNNESFNWTGVTQNGTSSACIRRSNNSFFSRLNWLTHLNFKYPALDVTMPNNEQFDKLYIWGVHHPGTDKDQIFLYAQASGRITVSTKRSQQAVIPNIGSRPRVRNIPSRVSIYWTIVKPGDILLINSTGNLIAPRGYFKIRSGKSSIMRSDAPIGKCNSACITPNGSIPNDKPFQNVNRITYGACARYVKQNTLKLATGMRNVPEKQTRGIFGAIAVFIENGWEGMVDGWYGFRHQNSEGRGQAAALQSTQAAIDQITGKLNRLIGETNEKFHQIEKEFSEVEGRIQALEKYVEDTKIDLWSYNAELLVALENQHTIDLTDSEMNKLFEKTKKQLRENAEDMGNGCFKIYHKCDNACIGSIRNGTYDHDVYRDEALNNRFQIKGVELKSGYKDWILWISFAISCFLLCVALLGFIMWSCQKGNIRCNICI

SEQ ID NO: 9972 - protein, 566 aa, synthetic construct
  REGION 1..566: note = hemagglutinin__InfluenzaA__AGK63015
MKTIIALSYILCLVFAQKLPGNDNSTATLCLGHHAVPNGTIVKTITNDQIEVTNATELVQSSSTGEICDSPHQILDGENCTLIDALLGDPQCDGFQNKKWDLFVERSKAYSNCYPYDVPDYASLRSLVASSGTLEFNNESFNWTGVTQNGTSSACIRKSNSSFFSRLNWLTHLNFKYPALNVTMPNNEQFDKLYIWGVHHPGTDKDQIFLYAQSSGRITVSTKRSQQAVIPNIGSRPRIRNIPSRISIYWTIVKPGDILLINSTGNLIAPRGYFKIRSGKSSIMRSDAPIGKCNSECITPNGSIPNDKPFQNVNRITYGACPRYVKQSTLKLATGMRNVPEKQTRGIFGAIAGFIENGWEGMVDGWYGFRHQNSEGRGQAADLKSTQAAIDQINGKLNRLIGKTNEKFHQIEKEFSEVEGRIQDLEKYVEDTKIDLWSYNAELLVALENQHTIDLTDSEMNKLFEKTKKQLRENAEDMGNGCFKIYHKCDNACIGSIRNGTYNHDVYRDEALNNRFQIKGVELKSGYKDWILWISFAISCFLLCVALLGFIMWACQKGNIRCNICI

SEQ ID NO: 9973 - protein, 566 aa, synthetic construct; identical to SEQ ID NO: 6982
  REGION 1..566: note = hemagglutinin__InfluenzaA__AGK63017

SEQ ID NO: 9974 - protein, 566 aa, synthetic construct
  REGION 1..566: note = hemagglutinin__InfluenzaA__AGK63019
MKTIIALSYILCLVFAQKLPGNDNSTATLCLGHHAVPNGTIVKTITNDQIEVTNATELVQSSSTGEICDSPHQILDGENCTLIDALLGDPQCDGFQNKKWDLFVERSKAYSNCYPYDVPDYASLRSLVASSGTLEFNNESFNWTGVTQNGTSSACIRRSNSSFFSRLNWLTHLNFKYPALNVTMPNNEQFDKLYIWGVHHPGTDKDQIFLYAQSSGRITVSTKRSQQAVIPNIGSRPRIRNIPSRISIYWTIVKPGDILLINSTGNLIAPRGYFKIRSGKSSIMRSDAPIGKCNSECITPNGSIPNDKPFQNVNRITYGACPRYVKQSTLKLATGMRNVPEKQTRGIFGAIAGFIENGWEGMVDGWYGFRHQNSEGRGQAADLKSTQAAIDQINGKLNRLIGKTNEKFHQIEKEFSEVEGRIQDLEKYVEDTKIDLWSYNAELLVALENQHTIDLTDSEMNKLFEKTKKQLRENAEDMGNGCFKIYHKCDNACIGSIRNGTYDHDVYRDEALNNRFQIKGVELKSGYKDWILWISFAISCFLLCVALLGFIMWACQKGNIRCNICI

SEQ ID NO: 9975 - protein, 566 aa, synthetic construct; identical to SEQ ID NO: 9849
  REGION 1..566: note = hemagglutinin__InfluenzaA__AGK63021

SEQ ID NO: 9976 - protein, 566 aa, synthetic construct
  REGION 1..566: note = hemagglutinin__InfluenzaA__AGK63025
MKTIIALSYILCLVFAQKLPGNDNSTATLCLGHHAVPNGTIVKTITNDQIEVTNATELVQSSSTGEICDSPHQILDGENCTLIDALLGDPQCDGFQNKKWDLFIERSKAYSNCYPYDVPDYASLRSLVASSGTLEFNNESFNWTGVTQNGTSSACIRKSNSSFFSRLNWLTHLNFKYPALNVTMPNNEQFDKLYIWGVHHPGTDKDQIFLYAQSSGRITVSTKRSQQAVIPNIGSRPRIRNIPSRISIYWTIVKPGDILLINSTGNLIAPRGYFKIRSGKSSIMRSDAPIGKCNSECITPNGSIPNDKPFQNVNRITYGACPRYVKQSTLKLATGMRNVPEKQTRGIFGAIAGFIENGWEGMVDGWYGFRHQNSEGRGQAADLKSTQAAIDQINGKLNRLIGKTNEKFHQIEKEFSEVEGRIQDLEKYVEDTKIDLWSYNAELLVALENQHTIDLTDSEMNKLFEKTKKQLRENAEDMGNGCFKIYHKCDNACIGSIRNGTYNHDVYRDEALNNRFQIKGVELKSGYKDWILWISFAISCFLLCVALLGFIMWACQKGNIRCNICI

SEQ ID NO: 9977 - protein, 566 aa, synthetic construct; identical to SEQ ID NO: 9074
  REGION 1..566: note = hemagglutinin__InfluenzaA__AGK63027

SEQ ID NO: 9978 - protein, 566 aa, synthetic construct
  REGION 1..566: note = hemagglutinin__InfluenzaA__AGK63029
MKTIIALSYILCLVFAQKLPGNDNSTATLCLGHHAVPNGTIVKTITNDQIEVTNATELVQSSSTGEICNSPHQILDGENCTLIDALLGDPQCDGFQNKKWDLFVERSKAHSNCYPYDVPDYASLRSLVASSGTLEFNNESFNWTGVTQNGTSSACIRRSNNSFFSRLNWLTHLNFKYPALNVTMPNNEQFDKLYIWGVHHPGTDKDQIFLYAQASGRITVSTKRSQQAVIPNIGSRPRVRNIPSRVSIYWTIVKPGDILLINSTGNLIAPRGYFKIRSGKSSIMRSDAPIGKCNSACITTNGSIPNDKPFQNVNRITYGACPRYVKQNTLKLATGMRNVPEKQTRGIFGAIAGFIENGWEGMVDGWYGFRHQNSEGRGQAADLKSTQAAIDQINGKLNRLIGKTNEKFHQIEKEFSEVEGRIQDLEKYVEDTKIDLWSYNAELLVALENQHTIDLTDSEMNKLFEKTKKQLRENAEDMGNGCFKIYHKCDNACIGSIRNGTYDHDVYRDEALNNRFQIKGVELKSGYKDWILWISFAISCFLLCVALLGFIMWACQKGNIRCNICI

SEQ ID NO: 9979 - protein, 566 aa, synthetic construct
  REGION 1..566: note = hemagglutinin__InfluenzaA__AGK63031
MKTIIALSYILCLVFAQKLPGNDNSTATLCLGHHAVPNGTIVKTITNDQIEVTNATELVQSSSTGEICDSPHQILDGENCTLIDALLGDPQCDGFQKKKWDLFVERSKAHSNCYPYDVPDYASLRSLVASSGTLEFNNESFNWTGVTQNGTSSACIRRSNNSFFSRLNWLTHLNFKYPALNVIMPNNEQFDKLYIWGVHHPGTDKDQIFLYAQASGRITVSTKRSQQAVIPNIGSRPRVRNIPSRVSIYWTIVKPGDILLINSTGNLIAPRGYFKIRSGKSSIMRSDAPIGKCNSACITPNGSIPNDKPFQNVNRITYGACPRYVKQNTLKLATGMRNVPEKQTRGIFGAIAGFIENGWEGMVDGWYGFRHQNSEGRGQAADLKSTQAAIDQINGKLNRLIGKTNEKLHQIEKEFSEVEGRILDLEKYVEDTKIDLWSYNAELLVALENQHTIDLTDSEMNKLFEKTKKQLRENAEDMGNGCFKIYHKCDNACIGSIRNGTYDHDVYRDEALNNRFQIKGVELKSGYKDWILWISFAISCFLLCVALLGFIMWACQKGNIRCNICI

SEQ ID NO: 9980 - protein, 566 aa, synthetic construct
  REGION 1..566: note = hemagglutinin__InfluenzaA__AGK63033
MKTIIALSYILCLVFAQKLPGNDNSTATLCLGHHAVPNGTIVKTITNDQIEVTNATELVQSSSTGEICDSPHQILDGENCTLIDALLGDPQCDGFQNKKWDLIVERSKAYSNCYPYDVPDYASLRSLVASSGTLEFNNESFNWTGVTQNGTSSACIRKSNSSFFSRLNWLTHLNFKYPALNVTMPNNEQFDKLYIWGVHHPGTDKDQIFLYAQASGRITVSTKRSQQAVIPNIGSRPRIRNIPSRISIYWTIVKPGDILLINSTGNLIAPRGYFKIRSGKSSIMRSDAPIGKCNSECITPNGSIPNDKPFQNVNRITYGACPRYVKQSTLKLATGMRNVPEKQTRGIFGAIAGFIENGWEGMVDGWYGFRHQNSEGRGQAADLKSTQAAIDQINGKLNRLIGKTNEKFHQIEKEFSEVEGRIQDLEKYVEDTKIDLWSYNAELLVALENQHTIDLTDSEMNKLFEKTKKQLRENAEDMGNGCFKIYHKCDNACIGSIRNGTYDHDVYRDEALNNRFQIKGVELKSGYKDWILWISFAISCFLLCVALLGFIMWACQKGNIRCNICI

SEQ ID NO: 9981 - protein, 566 aa, synthetic construct
  REGION 1..566: note = hemagglutinin__InfluenzaA__AGK63035
MKTIIALSYILCLVFAQKLPGNDNSTATLCLGHHAVPNGTIVKTITNDQIEVTNATELVQSSSTGEICDSPHQILDGENCTLIDALLGDPQCDGFQNKKWDLFVERSKAYSNCYPYDVPDYASLRSLVASSGTLEFNNESFNWTGVTQNGTSSACIRRSNNSFFSRLNWLTHLNFKYPALNVTMPNNEQFDKLYIWGVHHPGTDKDQIFLYAQASGRITVSTKRSQQAVIPNIGSRPRIRNIPSRISIYWTIVKPGDILLINSTGNLIAPRGYFKIRSGKSSIMRSDAPIGKCNSECITPNGSIPNDKPFQNVNRITYGACPRYVKQSTLKLATGMRNVPEKQTRGIFGAIAGFIENGWEGMVDGWYGFRHQNSEGRGQAADLKSTQAAIDQINGKLNRLIGKTNEKFHQIEKEFSEVEGRIQDLEKYVEDTKIDLWSYNAELLVALENQHTIDLTDSEMNKLFEKTKKQLRENAEDMGNGCFKIYHKCDNACIGSIRNGTYDHDVYRDEALNNRFQIKGVELKSGYKDWILWISFAISCFLLCVALLGFIMWACQKGNIRCNICI

SEQ ID NO: 9982 - protein, 566 aa, synthetic construct
  REGION 1..566: note = hemagglutinin__InfluenzaA__AGK63037
MKTIIALSYILCLVFAQELPGNDNSTATLCLGHHAVPNGTIVKTITNDQIEVTNATELVQSSSTGEICNSPHQILDGENCTLIDALLGDPQCDGFQNKKWDLFVERSKAHSNCNPYDVPDYASLRSLVASSGTLEFNNESFNWTGVTQNGTSSACIRRSNNSFFSRLNWLTHLNFKYPALNVTMPNNEQFDKLYIWGVHHPGTDKDQIFLYAQASGRITVSTKRSQQAVIPNIGSRPRVRNIPSRVSIYWTIVKPGDILLINSTGNLIAPRGYFKIRSGKSSIMRSDAPIGKCNSACITPNGSIPNDKPFQNVNRITYGACPRYVKQNTLKLATGMRNVPEKQTRGIFGAIAGFIENGWEGMVDGWYGFRHQNSEGRGQAADLKSTQAAIDQINGKLNRLIGKTNEKFHQIEKEFSEVEGRIQDLEKYVEDTKIDLWSYNAQLLVALENQHTIDLTDSEMNKLFEKTKKQLRENAEDMGNGCFKIYHKCDNACIGSIRNGTYDHDVYRDEALNNRFQIKGVELKSGYKDWILWISFAISCFLLCVALLGFIMWACQKGNIRCNICI

SEQ ID NO: 9983 - protein, 566 aa, synthetic construct
  REGION 1..566: note = hemagglutinin__InfluenzaA__AGK63039
MKTIIALSYILCLVFAQKLPGNDNSTATLCLGHHAVPNGTIVKTITNDQIEVTNATELVQSSSTGEICNSPHQILDGENCTLIDALLGDPQCDGFQKKKWDLFVERSKAHSNCYPYDVPDYASLRSLVASSGTLEFNNESFNWTGVTQNGTSSACIRRSNNSFFSRLNWLTHLNFKYPALNVTLPNNEQFDKLYIWGVHHPGTDKDQIFLYAQASGRITVSTKRSQQAVIPNIGSRPRVRNIPSRVSIYWTIVKPGDILLINSTGNLIAPRGYFKIRSGKSSIMRSDAPISKCNSACITPNGSIPNDKPFQNVNRITYGACPRYVKQNTLKLATGMRNVPEKQTRGIFGAIAGFIENGWEGMVDGWYGFRHQNSEGRGQAADLKSTQAAIDQINGKLNRLIGKTNEKFHQIEKEFSEVEGRIQDLEKYVEDTKIDLWSYNAELLVALENQHTIDLTDSEMNKLFEKTKKQLRENAEDMGNGCFKIYHKCDNACIGSIRNGTYDHDVYRDEALNNRFQIKGVELKSGYKDWILWISFAISCFLLCVALLGFIMWSCQKGNIRCNICI

SEQ ID NO: 9984 - protein, 566 aa, synthetic construct
  REGION 1..566: note = hemagglutinin__InfluenzaA__AGK63041
MKTIIALSYILCLVFAQKLPGNDNSTATLCLGHHAVPNGTIVKTITNDQIEVTNATELVQSSSTGEICDSPHQILDGENCTLIDALLGDPQCDGLQNKKWDLIVERSKAHSYCYPYDVPDYASLRSLVASSGTLEFNNESFNWTEVTQNGTSSACIRRSNNSFFSRLNWLTHLNFKYPALNVTMPNNEQFDKLYIWGVHHPGTDKDQIFLYAQASGRITVSTKRSQQAVIPNIGSRPRVRNIPSRVSIYWTIVKPGDILLINSTGNLIAPRGYFKIRSGKSSIMRSDAPIGKCNSACITPNGSIPNDKPFQNVNRITYGACPRYVKQNTLKLATGMRNVPEKQTRGIFGAIAGFIENGWEGMVDGWYGFRHQNSEGRGQAADLKSTQAAIDQINGKLNRLIGKTNEKFHQIEKEFSEVEGRIQDLEKYVEDTKIDLWSYNAELLVALENQHTIDLTDSEMNKLFEKTKKQLRENAEDMGNGCFKIYHKCDNACIGSIRNGTYDHDVYRDEALNNRFQIKGVELKSGYKDWILWISFAISCFLLCVALLGFIMWACQKGNIRCNICI

SEQ ID NO: 9985 - protein, 566 aa, synthetic construct
  REGION 1..566: note = hemagglutinin__InfluenzaA__AGK63043
MKTIIALSYILCLVFAQKLPGNDNSTATLCLGHHAVPNGTIVKTITNDQIEVTNATELVQSSSTGEICDSPHQILDGENCTLIDALLGDPQCDGFQNKKWDLFVERSKAYSNCYPYDVPDYASLRSLVASSGTLEFNNESFNWTGVTQNGTSSACIRRSNNSFFSRLNWLTHLNFKYPALNVTMPNNEQFDKLYIWGVHHPGTDKDQIFLYAQASGRITVSTKRSQQAVIPNIGSRPRVRNIPSRVSIYWTIVKPGDILLINSTGNLIAPRGYFKIRSGKSSIMRSDAPIGKCNSACITPNGSIPNDKPFQNVNRITYGACPRYVKQSTLKLATGMRNVPEKQTRGIFGAIAGFIENGWEGMVDGWYGFRHQNSEGRGQAADLKSTQAAIDQINGKLNRLIGKTNEKFHQIEKEFSEVEGRIQDLEKYVEDTKIDLWSYNAELLVALENQHTIDLTDSEMNKLFEKTKKQLRENAEDMGNGCFKIYHKCDNACIGSIRNGTYDHDVYRDEALNNRFQIKGVELKSGYKDWILWISFAISCFLLCVALLGFIMWACQKGNIRCNICI

SEQ ID NO: 9986 - protein, 566 aa, synthetic construct
  REGION 1..566: note = hemagglutinin__InfluenzaA__AGK63045
MKTIIALSYILCLVFAQKLPGNDNSTATLCLGHHAVPNGTIVKTITNDQIEVTNATELVQSSSTGEICNSPHQILDGENCTLIDALLGDPQCDGFQKKKWDLFVERSKAYSNCYPYDVPDYASLRSLVASSGTLEFNNESFNWTGVTQNGTSSACIRKSNSSFFSRLNWLTHLNFKYPALNVTMPNNEQFDKLYIWGVHHPGTDKDQIFLYAQASGRITVSTKRSQQAVIPNIGSRPRIRNIPSRISIYWTIVKPGDILLINSTGNLIAPRGYFKIRSGKSSIMRSDAPIGKCNSECITPNGSIPNDKPFQNVNRITYGACPRYVKQSTLKLATGMRNVPEKQTRGIFGAIAGFIENGWEGMVDGWYGFRHQNSEGRGQAADLKSTQAAIDQINGKLNRLIGKTNEKFHQIEKEFSEVEGRIQDLEKYVEDTKIDLWSYNAQLLVALENQHTIDLTDSEMNKLFEKTKKQLRENAEDMGNGCFKIYHKCDNACIGSIRNGTYDHDVYRDEALNNRFQIKGVELKSGYKDWILWISFAISCFLLCVALLGFIMWACQKGNIRCNICI

SEQ ID NO: 9987 - protein, 566 aa, synthetic construct
  REGION 1..566: note = hemagglutinin__InfluenzaA__AGK63047
MKAILVVLLYTFATANADTLCIGYHANNSTDTVDTVLEKNVTVTHSVNLLEDKHNGKLCKLRGVAPLHLGKCNIAGWILGNPECESLSTASSWSYIVETSSSDNGTCYPGDFINYEELREQLSSVSSFERFEIFPKTSSWPNHDSNKGVTAACPHAGAKSFYKNLIWLVKKGNSYPKLSKSYINDKGKEVLVLWGIHHPSTTADQQSLYQNADAYVFVGTSRYSKKFKPEIAIRPKVRDREGRMNYYWTLIEPGDKITFEATGNLVVPRYAFAMERNAGSGIIISDTPVHDCNTACQTPEGAINTSLPFQNIHPITIGKCPKYVKSTKLRLATGLRNVPSIQSRGLFGAIAGFIEGGWTGMVDGWYGYHHQNEQGSGYAADLKSTQNAIDKITNKVNSVIEKMNTQFTAVGKEFNHLEKRIENLNKKVDDGFLDIWTYNAELLVLLENERTLDYHDSNVKNLYEKVRNQLKNNAKEIGNGCFEFYHKCDNTCMESVKNGTYDYPKYSEEAKLNREKIDGVKLESTRIYQILAIYSTVASSLVLVVSLGAISFWMCSNGSLQCRICI

SEQ ID NO: 9988 - protein, 560 aa, synthetic construct
  REGION 1..560: note = hemagglutinin__InfluenzaA__AGK82158
MNTQILVFALIAIIPTNADKICLGHHAVSNGTKVNTLTERGVEVVNATETVERTNIPRICSKGKRTVDLGQCGLLGTITGPPQCDQFLEFSADLIIERREGSDVCYPGKFVNEEALRQILRESGGIDKEAMGFTYSGIRTNGATSACRRSGSSFYAEMKWLLSNTDNAAFPQMTKSYKNTRKSPALIVWGIHHSVSTAEQTKLYGSGNKLVTVGSSNYQQSFVPSPGARPQVNGLSGRIDFHWLMLNPNDTVTFSFNGAFIAPDRASFLRGKSMGIQSGVQVDANCEGDCYHSGGTIISNLPFQNIDSRAVGKCPRYVKQRSLLLATGMKNVPEIPKGRGLFGAIAGFIENGWEGLIDGWYGFRHQNAQGEGTAADYKSTQSAIDQITGKLNRLIEKTNQQFELIDNEFNEVEKQIGNVINWTRDSITEVWSYNAELLVAMENQHTIDLADSEMDKLYERVKRQLRENAEEDGTGCFEIFHKCDDDCMASIRNNTYDHSKYREEAMQNRIQIDPVKLSSGYKDVILWFSFGASCFILLAIVMGLVFICVKNGNMRCTICI

SEQ ID NO: 9989 - protein, 560 aa, synthetic construct
  REGION 1..560: note = hemagglutinin__InfluenzaA__AGK84857
MNTQILVFALIAIIPTNADKICLGHHAVSNGTKVNTLTERGVEVVNATETVERTNIPRICSKGKRTVDLGQCGLLGTITGPPQCDQFLEFSADLIIERREGSDVCYPGKFVNEEALRQILRESGGIDKEAMGFTYSGIRTNGATSACRRSGSSFYAEMKWLLSNTDNAAFPQITKSYKNTRKSPALIVWGIHHSVSTAEQTKLYGSGNKLVTVGSSNYQQSFVPSPGARPQVNGLSGRIDFHWLMLNPNDTVTFSFNGAFIAPDRASFLRGKSMGIQSGVQVDANCEGDCYHSGGTIISNLPFQNIDSRAVGKCPRYVKQRSLLLATGMKNVPEIPKGRGLFGAIAGFIENGWEGLIDGWYGFRHQNAQGEGTAADYKSTQSAIDQITGKLNRLIEKTNQQFELIDNEFNEVEKQIGNVINWTRDSITEVWSYNAELLVAMENQHTIDLADSEMDKLYERVKRQLRENAEEDGTGCFEIFHKCDDDCMASIRNNTYDHSKYREEAMQNRIQIDPVKLSSGYKDVILWFSFGASCFILLAIVMGLVFICVKNGNMRCTICI

SEQ ID NO: 9990 - protein, 560 aa, synthetic construct
  REGION 1..560: note = hemagglutinin__InfluenzaA__AGK84860
MNTQILVFALIAIIPTNADKICLGHHAVSNGTKVNTLTERGVEVVNATETVERTNIPRICSKGKMTVDLGQCGLLGTITGPPQCDQFLEFSADLIIERREGSDVCYPGKFVNEEALRQILRESGGIDKEAMGFTYSGIRTNGATSACRRSGSSFYAEMKWLLSNTDNAAFPQMTKSYKNTRKSPALIVWGIHHSVSTAEQTKLYGSGNKLVTVGSSNYQQSFVPSPGARPQVNGLSGRIDFHWLMLNPNDTVTFSFNGAFIAPDRASFLRGKSMGIQSGVQVDANCEGDCYHSGGTIISNLPFQNIDSRAVGKCPRYVKQRSLLLATGMKNVPEIPKGRGLFGAIAGFIENGWEGLIDGWYGFRHQNAQGEGTAADYKSTQSAIDQITGKLNRLIEKTNQQFELIDNEFNEVEKQIGNVINWTRDSITEVWSYNAELLVAMENQHTIDLADSEMDKLYERVKRQLRENAEEDGTGCFEIFHKCDDDCMASIRNNTYDHSKYREEAMQNRIQIDPVKLSSGYKDVILWFSFGASCFILLAIVMGLVFICVKNGNMRCTICI

SEQ ID NO: 9991 - protein, 560 aa, synthetic construct
  REGION 1..560: note = hemagglutinin__InfluenzaA__AGK84863
MNTQILVFALIAIIPTNADKICLGHHAVSNGTKVNTLTERGVEVVNATETVERTNIPRICSKGKKTVDLGQCGLLGTITGPPQCDQFLEFSADLIIERREGSDVCYPGKFVNEEALRQILRESGGIDKEAMGFTYSGIRTNGATSACRRSGSSFYAEMKWLLSNTDNAAFPQMTKSYKNTRKSPALIVWGIHHSVSTAEQTKLYGSGNKLVTVGSSNYQQSFVPSPGARPQVNGLSGRIDFHWLMLNPNDTVTFSFNGAFIAPDRASFLRGKSMGIQSGVQVDANCEGDCYHSGGTIISNLPFQNIDSRAVGKCPRYVKQRSLLLATGMKNVPEIPKGRGLFGAIAGFIENGWEGLIDGWYGFRHQNAQGEGTAADYKSTQSAIDQITGKLNRLIEKTNQQFELIDNEFNEVEKQIGNVINWTRDSITEVWSYNAELLVAMENQHTIDLADSEMDKLYERVKRQLRENAEEDGTGCFEIFHKCDDDCMASIRNNTYDHSKYREEAMQNRIQIDPVKLSSGYKDVILWFSFGASCFILLAIVMGLVFICVKNGNMRCTICI

SEQ ID NO: 9992 - protein, 566 aa, synthetic construct
  REGION 1..566: note = hemagglutinin__InfluenzaA__AGL07713
MKAILVVLLYTFATANADTLCIGYHANNSTDTVDTVLEKNVTVTRSVNLLEDKHNGKLCKLRGVAPLHLGKCNIAGWILGNPECESLSTASSWSYIVETSSSDNGTCYPGDFIDYEELREQLSSVSSFERFEIFPKTGSWPNHDSNKGVTAACPHAGAKGFYKNLIWLVEKGNSYPKLSKSYINDKGKEVLVLWGIHHPSTTADQQRLYQNADTYVFVGTSRYSKKFKPEIAIRPKVRDQEGRMNYYWTLVEPGDKITFEATGNLVVPRYAFAMERNAGSGIIISDTPVHDCNTTCQTPKGAINTSLPFQNIHPITIGKCPKYVKSTKLRLATGLRNVPSIQSRGLFGAIAGFIEGGWTGMVDGWYGYHHQNEQGSGYAADLKSTQNAIDKITNKVNSVIEKMNTQFTAVGKEFNHLEKRIENLNKKVDDGFLDIWTYNAELLVLLENERTLDYHDSNVKNLYEKVRNQLKNNAKEIGNGCFEFYHKCDNTCMESVKNGTYDYPKYSEEAKLNREEIDGVKLESTRIYQILAIYSTVASSLVLVVSLGAISFWMCSNGSLQCRICI

SEQ ID NO: 9993 - protein, 566 aa, synthetic construct
  REGION 1..566: note = hemagglutinin__InfluenzaA__AGL09731
MKTIIALSYILCLVFAQKIPGNDNSTATLCLGHHAVPNGTIVKTITNDRIEVTNATELVQNSSIGEICDSPHQILDGENCTLIDALLGDPQCDGFQNKKWDLFVERSKAYSNCYPYDVPDYASLRSLVASSGTLEFNNESFNWTGVTQNGTSSACIRRSNSSFFSRLNWLTHLNFKYPALNVTMPNNEQFDKLYIWGVHHPGTDKDQIFLYAQSSGRITVSTKRSQQAVIPNIGSRPRIRNIPSRISIYWTIVKPGDILLINSTGNLIAPRGYFKIRSGKSSIMRSDAPIGKCKSECITPNGSIPNDKPFQNVNRITYGACPRYVKQSTLKLATGMRNVPEKQTRGIFGAIAGFIENGWEGMVDGWYGFRHQNSEGRGQAADLKSTQAAIDQINGKLNRLIGKTNEKFHQIEKEFSEVEGRIQDLEKYVEDTKIDLWSYNAELLVALENQHTIDLTDSEMNKLFEKTKKQLRENAEDMGNGCFKIYHKCDNACIGSIRNGTYDHDVYRDEALNNRFQIKGVELKSGYKDWILWISFAISCFLLCVALLGFIMWACQKGNIRCNICI

SEQ ID NO: 9994 - protein, 566 aa, synthetic construct
  REGION 1..566: note = hemagglutinin__InfluenzaA__AGL09732
MKTIIALSYILCLVFAQKLPGNDNSTATLCLGHHAVPNGTIVKTITNDRIEVTNATELVQNSSIGEICDSPHQILDGENCTLIDALLGDPQCDGFQNKKWDLFVERSKAYSNCYPYDVPDYASLRSLVASSGTLEFNNESFNWAGVTQNGTSSACIRGSNSSFFSRLNWLTHLNFKYPALNVTMPNNEQFDKLYIWGVHHPGTDKDQIFLYAQSSGRITVSTKRSQQAVIPNIGSRPRIRNIPSRISIYWTIVKPGDILLINSTGNLIAPRGYFKIRSGKSSIMRSDAPIGKCKSECITPNGSIPNDKPFQNVNRITYGACPRYVKQSTLKLATGMRNVPEKQTRGIFGAIAGFIENGWEGMVDGWYGFRHQNSEGRGQAADLKSTQAAIDQINGKLNRLIGKTNEKFHQIEKEFSEVEGRIQDLEKYVEDTKIDLWSYNAELLVALENQHTIDLTDSEMNKLFEKTKKQLRENAEDMGNGCFKIYHKCDNACIGSIRNGTYDHDVYRDEALNNRFQIKGVELKSGYKDWILWISFAISCFLLCVALLGFIMWACQKGNIRCNICI

SEQ ID NO: 9995 - protein, 566 aa, synthetic construct
  REGION 1..566: note = hemagglutinin__InfluenzaA__AGL09734
MKTIIALSYILCLVFAQKFPGNDNSTATLCLGHHAVPNGTIVKTITNDRIEVTNATELVQNSSIGEICDSPHQILDGENCTLIDALLGDPQCDGFQNKKWDLFIERSKAYSNCYPYDVPDYASLRSLVASSGTLEFNNESFNWTGVTQNGTSSACIRRSNSSFFSRLNWLTHLNFKYPALNVTMPNNEQFDKLYIWGVHHPGTDKDQIFLYAQSSGRITVSTKRSQQAVIPNIGSRPRIRNIPSRISIYWTIVKPGDILLINSTGNLIAPRGYFKIRSGKSSIMRSDAPIGKCKSECITPNGSIPNDKPFQNVNRITYGACPRYVKQSTLKLATGMRNVPEKQTRGIFGAIAGFIENGWEGMVDGWYGFRHQNSEGRGQAADLKSTQAAIDQINGKLNRLIGKTNEKFHQIEKEFSEVEGRIQDLEKYVEDTKIDLWSYNAELLVALENQHTIDLTDSEMNKLFEKTKKQLRENAEDMGNGCFKIYHKCDNACIGSIRNGTYDHDVYRDEALNNRFQIKGVELKSGYKDWILWISFAISCFLLCVALLGFIMWACQKGNIRCNICI

SEQ ID NO: 9996 - protein, 566 aa, synthetic construct
  REGION 1..566: note = hemagglutinin__InfluenzaA__AGL09735
MKTIIALSYILCLVFAQKLPGNDNSTATLCLGHHAVPNGTIVKTITNDRIEVTNATELVQNSSIGEICDSPHQILDGENCTLIDALLGDPQCDGFQNKKWDLFVERSKAYSNCYPYDVPDYASLRSLVASSGTLEFNNESFNWAGVTQNGTSSACIRGSNSSFFSRLNWLTHLNFKYPALNVTMPNNEQFDKLYIWGVHHPGTDKDQIFLYAQSSGRITVSTKRSQQAVIPNIGSRPRIRNIPSRISIYWTIVKPGDILLINSTGNLIAPRGYFKIRSGKSSIMRSDAPIGKCKSECITPNGSIPNDKPFQNVNRITYGACPRYVKQSTLKLATGMRNVPEKQTRGIFGAIAGFIENGWEGMVDGWYGFRHQNSEGRGQAADLKSTQAAIDQINGKLNRLIGKTNEKFHQIEKEFSEVEGRIQDLEKYVEDTKIDLWSYNAELLVALENQHTIDLTDSEMNKLFEKTKKQLRENAEDMGNGCFKIYHKCDNACIGSIRNGTYDHDVYRDEALNNRFQIKGVELKSGYKDWILWISFAISCFLLCVALLGFIMWACQKGNIRCNISI

SEQ ID NO: 9997 - protein, 566 aa, synthetic construct
  REGION 1..566: note = hemagglutinin__InfluenzaA__AGL09736
MKTIIALSYILCLVFAQKLPGNDNSTATLCLGHHAVPNGTIVKTITNDQIEVTNATELVQNSSIGEICDSPHQILDGENCTLIDALLGDPQCDGFQNKKWDLFVERSKAYSNCYPYDVPDYASLRSLVASSGTLEFNNESFNWAGVTQNGTSSACIRGSNSSFFSRLNWLTHLNFKYPALNVTMPNNEQFDKLYIWGVHHPGTDKDQIFLYAQSSGRITVSTKRSQQAVIPNIGSRPRIRNIPSRISIYWTIVKPGDILLINSTGNLIAPRGYFKIRSGKSSIMRSDAPIGKCKSECITPNGSIPNDKPFQNVNRITYGACPRYVKQSTLKLATGMRNVPEKQTRGIFGAIAGFIENGWEGMVDGWYGFRHQNSEGRGQAADLKSTQAAIDQINGKLNRLIGKTNEKFHQIEKEFSEVEGRIQDLEKYVEDTKIDLWSYNAELLVALENQHTIDLTDSEMNKLFEKTKKQLRENAEDMGNGCFKIYHKCDNACIGSIRNGTYDHDVYRDEALNNRFQIKGVELKSGYKDWILWISFAISCFLLCVALLGFIMWACQKGNIRCNICI

SEQ ID NO: 9998 - protein, 566 aa, synthetic construct; identical to SEQ ID NO: 9883
  REGION 1..566: note = hemagglutinin__InfluenzaA__AGL09737

SEQ ID NO: 9999 - protein, 566 aa, synthetic construct
  REGION 1..566: note = hemagglutinin__InfluenzaA__AGL09739
MKTIIALSYILCLVFAQKLPGNDNSTATLCLGHHAVPNGTIVKTITNDRIEVTNATELVQNSSIGEICDSPHQILDGENCTLIDALLGDPQCDGFQNKKWDLFVERSKAYSSCYPYDVPDYASLRSLVASSGTLEFNNESFNWTGVTQNGTSSACIRRSNSSFFSRLNWLTHLNFKYPALNVTMPNNEQFDKLYIWGVHHPGTDKDQIFLYAQSSGRITVSTKRSQQAVIPNIGSRPRIRNIPSRISIYWTIVKPGDILLINSTGNLIAPRGYFKIRSGKSSIMRSDAPIGKCKSECITPNGSIPNDKPFQNVNRITYGACPRYVKQSTLKLATGMRNVPEKQTRGIFGAIAGFIENGWEGMVDGWYGFRHQNSEGRGQAADLKSTQAAIDQINGKLNRLIGKTNEKFHQIEKEFSEVEGRIQDLEKYVEDTKIDLWSYNAELLVALENQHTIDLTDSEMNKLFEKTKKQLRENAEDMGNGCFKIYHKCDNACIGSIRNGTYDHNVYRDEALNNRFQIKGVELKSGYKDWILWISFAISCFLLCVALLGFIMWACQKGNIRCNICI

SEQ ID NO: 10000 - protein, 566 aa, synthetic construct; identical to SEQ ID NO: 9835
  REGION 1..566: note = hemagglutinin__InfluenzaA__AGL09740

SEQ ID NO: 10001 - protein, 566 aa, synthetic construct; identical to SEQ ID NO: 9074
  REGION 1..566: note = hemagglutinin__InfluenzaA__AGL09741

SEQ ID NO: 10002 - protein, 566 aa, synthetic construct
  REGION 1..566: note = hemagglutinin__InfluenzaA__AGL09742
MKTIIALSYILCLVFAQELPGNDDSTATLCLGHHAVPNGTIVKTITNDQIEVTNATELVQSSSTGEICNSPHQILDGENCTLIDALLGDPQCDGFQNKKWDLFVERSKAHSNCYPYDVPDYASLRSLVASSGTLEFNNESFNWTGVTQNGTSSACIRRSNNSFFSRLNWLTHLNFKYPALNVTMPNNEQFDKLYIWGVHHPGTDKDQIFLYAQASGRITVSTKRSQQAVIPNIGSRPRVRNIPSRVSIYWTIVKPGDILLINSTGNLIAPRGYFKIRSGKSSIMRSDAPIGKCNSACITPNGSIPNDKPFQNVNRITYGACPRYVKQNTLKLATGMRNVPETQTRGIFGAIAGFIENGWEGMVDGWYGFRHQNSEGRGQAADLKSTQAAIDQINGKLNRLIGKTNEKFHQIEKEFSEVEGRIQDLEKYVEDTKIDLWSYNAELLVALENQHTIDLTDSEMNKLFEKTKKQLRENAEDMGNGCFKIYHKCDNACIGSIRNGTYDHDVYRDEALNNRFQIKGVELRSGYKDWILWISFAISCFLLCVALLGFIMWACQKGNIRCSICI

SEQ ID NO: 10003 - protein, 566 aa, synthetic construct; identical to SEQ ID NO: 9858
  REGION 1..566: note = hemagglutinin__InfluenzaA__AGL09744

SEQ ID NO: 10004 - protein, 566 aa, synthetic construct
  REGION 1..566: note = hemagglutinin__InfluenzaA__AGL09745
MKTIIALSYILCLVFAQKLPGNDNSTATLCLGHHAVPNGTIVKTITNDRIEVTNATELVQNSSIGEICDSPHQILDGENCTLIDALLGDPQCDGFQNKKWDLFVERSKAYSNCYPYDVPDYASLRSLVASSGTLEFNNESFNWTGVTQNGTSSACIRRSNSSFFSRLNWLTHLNFKYPALNVTMPNNEQFDKLYIWGVHHPGTDKDQIFLYAQSSGRITVSTKRSQQAVIPNIGSRPRIRNIPSRISIYWTIVKPGDILLINSTGNLIAPRGYFKIRSGKSSIMRSDAPIGKCKSECITPNGSIPNDKPFQNVNRITYGACPRYVKQSTLKLATGMRNVPEKQTRGIFGAIAGFIENGWEGMVDGWYGFRHQNSEGRGQAADLKSTQAAIDQINGKLNRLIGKTNEKFHQIEKEFSEVEGRIQDLEKYVEDTKIDLWSYNAELLVALENQHTIDLTDSEMNKLFEKTKKQLRENAEDVGNGCFKIYHKCDNTCIGSIRNGTYDHNVYRDEALNNRFQIKGVELKSGYKDWILWISFAISCFLLCVALLGFIMWACQKGNIRCNICI

SEQ ID NO: 10005 - protein, 566 aa, synthetic construct; identical to SEQ ID NO: 9997
  REGION 1..566: note = hemagglutinin__InfluenzaA__AGL09746

SEQ ID NO: 10006 - protein, 566 aa, synthetic construct; identical to SEQ ID NO: 9835
  REGION 1..566: note = hemagglutinin__InfluenzaA__AGL09747

SEQ ID NO: 10007 - protein, 566 aa, synthetic construct; identical to SEQ ID NO: 9858
  REGION 1..566: note = hemagglutinin__InfluenzaA__AGL09748

SEQ ID NO: 10008 - protein, 566 aa, synthetic construct; identical to SEQ ID NO: 9856
  REGION 1..566: note = hemagglutinin__InfluenzaA__AGL09749

SEQ ID NO: 10009 - protein, 566 aa, synthetic construct; identical to SEQ ID NO: 9994
  REGION 1..566: note = hemagglutinin__InfluenzaA__AGL09750

SEQ ID NO: 10010 - protein, 566 aa, synthetic construct; identical to SEQ ID NO: 9835
  REGION 1..566: note = hemagglutinin__InfluenzaA__AGL09751

SEQ ID NO: 10011 - protein, 566 aa, synthetic construct; identical to SEQ ID NO: 9994
  REGION 1..566: note = hemagglutinin__InfluenzaA__AGL09753

SEQ ID NO: 10012 - protein, 566 aa, synthetic construct
  REGION 1..566: note = hemagglutinin__InfluenzaA__AGL09754
MKTIIALSYILCLVFAQKLPGNDNSTATLCLGHHAVPNGTIVKTITNDRIEVTNATELVQNSSIGEICDSPHQILDGENCTLIDALLGDPQCDGFQNKKWDLFVERSKAYSNCYPYDVPDYASLRSLVASSGTLEFNNESFNWTGVTQNGTSSACIRRSNSSFFSRLNWLTHLNFKYPALNVTMPNNEQFDKLYIWGVHHPGTDKDQIFLYAQSSGRITVSTKRSQQAVIPNIGSRPRIRNIPSRISIYWTIVKPGDILLINSTGNLIAPRGYFKIRSGKSSIMRSDAPIGKCKSECITPNGSIPNDKPFQNVNRITYGACPRYVKQSTLKLATGMRNVPEKQTRGIFGAIAGFIENGWEGMVDGWYGFRHQNSEGRGQAADLKSTQAAIDQINGKLNRLIGKTNEKFHQIEKEFSEVEGRIQDLEKYVEDTKIDLWSYNAELLVALENQHTIDLTDSEMNKLFEKTKKQLRENAEDMGNGCFKIYHKCDNACIGSIRNGTYDHNVYRDEALNNRFQIKGVELKSGYKDWILWISFAISCLLLCVALLGFIMWACQKGNIRCNICI

SEQ ID NO: 10013 - protein, 566 aa, synthetic construct; identical to SEQ ID NO: 9997
  REGION 1..566: note = hemagglutinin__InfluenzaA__AGL09756

SEQ ID NO: 10014 - protein, 566 aa, synthetic construct
  REGION 1..566: note = hemagglutinin__InfluenzaA__AGL09758
MKAILVVLLYTFATANADTLCIGYHANNSTDTVDTVLEKNVTVTHSVNLLEDKHNGKICKLRGVAPLHLGKCNIAGWILGNPECESLSTASSWSYIVETSSSDNGTCYPGDFIDYEELREQLSSVSSFERFEIFPKTSSWPNHDSNKGVTAACPHAGAKGFYKNLIWLVKKGNSYPKLSNSYINDKGKEVLVLWGIHHPSTTADQQSLYQNADTYVFVGTSRYSKKFKPEIAIRPKVRDQEGRMNYYWTLVEPGDKITFEATGNLVVPRYAFAMERNAGSGIIISDTTVHDCNTTCQTPKGAINTSLPFQNIHPITIGKCPKYVKSTKLRLATGLRNVPSIQSRGLFGAIAGFIEGGWTGMVDGWYGYHHQNEQGSGYAADLKSTQNAIDKITNKVNSVIEKMNTQFTAVGKEFNHLEKRIENLNKKVDDGFLDIWTYNAELLVLLENERTLDYHDSNVKNLYEKVRNQLKNNAKEIGNGCFEFYHKCDNMCMESVKNGTYDYPKYSEEAKLNREKIDGVKLESTRIYQILAIYSTVASSLVLVVSLGAISFWMCSNGSLQCRICI

SEQ ID NO: 10015 - protein, 566 aa, synthetic construct
  REGION 1..566: note = hemagglutinin__InfluenzaA__AGL09760
MKTIIAVSYILCLVFAQELPGNDDSTATLCLGHHAVPNGTIVKTITNDQIEVTNATELVQSSSTGEICNSPHQILDGENCTLIDALLGDPQCDGFQNKKWDLFVERSKAHSNCYPYDVPDYASLRSLVASSGTLEFNNESFNWTGVTQNGTSSACIRRSNNSFFSRLNWLTHLNFKYPALNVTMPNNEQFDKLYIWGVHHPGTDKDQIFLYAQASGRITVSTKRSQQAVIPNIGSRPRVRNIPSRVSIYWTIVKPGDILLINSTGNLIAPRGYFKIRSGKSSIMRSDAPIGKCNSACITPNGSIPNDKPFQNVNRITYGACPRYVKQNTLKLATGMRNVPEKQTRGIFGAIAGFIENGWEGMVDGWYGFRHQNSEGRGQAADLKSTQAAIDQINGKLNRLIGKTNEKFHQIEKEFSEVEGRIQDLEKYVEDTKIDLWSYNAELLVALENQHTIDLTDSEMNKLFEKTKKQLRENAEDMGNGCFKIYHKCDNACIGSIRNGTYDHDVYRDEALNNRFQIKGVELKSGYKDWILWISFAISCFLLCVALLGFIMWACQKGNIRCNICI

SEQ ID NO: 10016 - protein, 566 aa, synthetic construct; identical to SEQ ID NO: 9868
  REGION 1..566: note = hemagglutinin__InfluenzaA__AGL09761

SEQ ID NO: 10017 - protein, 566 aa, synthetic construct
  REGION 1..566: note = hemagglutinin__InfluenzaA__AGL09762
MKTIIALSYILCLVFAQKLPGNDNSTATLCLGHHAVPNGTIVKTITNDQIEVTNATELVQNSSIGEICDSPHQILDGENCTLIDALLGDPQCDGFQNKKWDLFVERSKAYSNCYPYDVPDYASLRSLVASSGTLEFNNESFNWTGVTQNGTSSACIRGSNSSFFSRLNWLTHLNFKYPALNVTMPNNEQFDKLYIWGVHHPGTDKDQIFLYAQSSGRITVSTKRSQQAVIPNIGSRPRIRNIPSRISIYWTIVKPGDILLINSTGNLIAPRGYFKIRSGKSSIMRSDAPIGKCKSECITPNGSIPNDKPFQNVNRITYGACPRYVKQSTLKLATGMRNVPEKQTRGIFGAIAGFIENGWEGMVDGWYGFRHQNSEGRGQAADLKSTQAAIDQINGKLNRLIGKTNEKFHQIEKEFSEVEGRIQDLEKYVEDTKIDLWSYNAELLVALENQHTIDLTDSEMNKLFEKTKKQLRENAEDMGNGCFKIYHKCDNACIGSIRNGTYDHDVYRDEALNNRFQIKGVELKSGYKDWILWISFAISCFLLCVALLGFIMWACQKGNIRCNICI

SEQ ID NO: 10018 - protein, 566 aa, synthetic construct; identical to SEQ ID NO: 9994
  REGION 1..566: note = hemagglutinin__InfluenzaA__AGL09763

SEQ ID NO: 10019 - protein, 566 aa, synthetic construct
  REGION 1..566: note = hemagglutinin__InfluenzaA__AGL09764
MKTIIALSYILCLVFAQKIPGNDNSTATLCLGHHAVPNGTIVKTITNDQIEVTNATELVQNSSIGEICDSPHQILDGENCTLIDALLGDPQCDGFQNKKWDLFVERSKAYSNCYPYDVPDYASLRSLVASSGTLEFNNESFNWTGVTQNGTSSACIRRSNSSFFSRLNWLTHLNFKYPALNVTMPNNEQFDKLYIWGVHHPGTDKDQIFLYAQSSGRITVSTKRSQQAVIPNIGSRPRIRNIPSRISIYWTIVKPGDILLINSTGNLIAPRGYFKIRSGKSSIMRSDAPIGKCKSECITPNGSIPNDKPFQNVNRITYGACPRYVKQSTLKLATGMRNVPEKQTRGIFGAIAGFIENGWEGMVDGWYGFRHQNSEGRGQAADLKSTQAAIDQINGKLNRLIGKTNEKFHQIEKEFSEVEGRIQDLEKYVEDTKIDLWSYNAELLVALENQHTIDLTDSEMNKLFEKTKKQLRENAEDMGNGCFKIYHKCDNACIGSIRNGTYDHDVYRDEALNNRFQIKGVELKSGYKDWILWISFAISCFLLCVALLGFIMWACQKGNIRCNICI

SEQ ID NO: 10020 - protein, 566 aa, synthetic construct; identical to SEQ ID NO: 9858
  REGION 1..566: note = hemagglutinin__InfluenzaA__AGL09765

SEQ ID NO: 10021 - protein, 566 aa, synthetic construct
  REGION 1..566: note = hemagglutinin__InfluenzaA__AGL09766
MKTIIALSYILCLVFAQKLPGNDNSTATLCLGHHAVPNGTIVKTITNDQIEVTNATELVQNSSIGEICDSPHQILDGENCTLIDALLGDPQCDGFQNKKWDLFVERSKAYSNCYPYDVPDYASLRSLVASSGTLEFNNESFNWAGVTQNGTSSACIRGSNSSFFSRLNWLTHLNFKYPALNVTMPNNEQFDKLYIWGVHHPGTDKDQIFLYAQSSGRITVSTKRSQQAVIPNIGSRPRIRNIPSRISIYWTIVKPGDILLINSTGNLIAPRGYFKILSGKSSIMRSDAPIGKCKSECITPNGSIPNDKPFQNVNRITYGACPRYVKQSTLKLATGMRNVPEKQTRGIFGAIAGFIENGWEGMVDGWYGFRHQNSEGRGQAADLKSTQAAIDQINGKLNRLIGKTNEKFHQIEKEFSEVEGRIQDLEKYVEDTKIDLWSYNAELLVALENQHTIDLTDSEMNKLFEKTKKQLRENAEDMGNGCFKIYHKCDNACIGSIRNGTYDHDVYRDEALNNRFQIKGVELKSGYKDWILWISFAISCFLLCVALLGFIMWACQKGNIRCNICI

SEQ ID NO: 10022 - protein, 566 aa, synthetic construct
  REGION 1..566: note = hemagglutinin__InfluenzaA__AGL09767
MKTIIALSYILCLVFAQKLPGNDNSTATLCLGHHAVPNGTIVKTITNDRIEVTNATELVQNSSIGEICDSPHQILDGENCTLIDALLGDPQCDGFQNKKWDLFVERSKAYSNCYPYDVPDYASLRSLVASSGTLEFNNESFNWAGVTQNGTSSACIRGSNSSFFSRLNWLTHLNFKYPALNVTMPNNEQFDKLYIWGVHHPGTDKDQIFLYAQSSGRITVSTKRSQQAVIPNIGSRPRIRNIPSRISIYWTIVKPGDILLINSTGNLIAPRGYFKIRSGKSSIMRSDAPIGKCKSECITPNGSIPNDKPFQNVNRITYGACPRYVKQSTLKLATGMRNVPEKQTRGIFGAIAGFIENGWEGMVDGWYGFRHQNSEGRGQAADLKSTQAAIDQINGKLNRLIGKTNEKFHQIEKEFSEVEGRIQDLEKYVEDTKIDLWSYNAELLVALENQHTIDLTDSEMNKLFEKTKKQLRENAEDMGNGCFKIYHKCDNACIGSIRNGTYDHNVYRDEALNNRFQIKGVELKSGYKDWILWISFAISCFLLCVALLGFIMWACQKGNIRCNICI

SEQ ID NO: 10023 - protein, 566 aa, synthetic construct
  REGION 1..566: note = hemagglutinin__InfluenzaA__AGL09769
MKTIIALSYILCLVFAQKIPGNDNSTATLCLGHHAVPNGTIVKTITNDRIEVTNATELVQNSSIGEICDSPHQILDGENCTLIDALLGDPQCDGFQNKKWDLFVERSKAYSNCYPYDVPDYASLRSLVASSGTLEFNNESFNWTGVTQNGTSSACIRGSNSSFFSRLNWLTHLNFKYPALNVTMPNNEQFDKLYIWGVHHPGTDKDQIFLYAQSSGRITVSTKRSQQAVIPNIGSRPRIRNIPSRISIYWTIVKPGDILLINSTGNLIAPRGYFKIRSGKSSIMRSDAPIGKCKSECITPNGSIPNDKPFQNVNRITYGACPRYVKQSTLKLATGMRNVPEKQTRGIFGAIAGFIENGWEGMVDGWYGFRHQNSEGRGQAADLKSTQAAIDQINGKLNRLIGKTNEKFHQIEKEFSEVEGRIQDLEKYVEDTKIDLWSYNAELLVALENQHTIDLTDSEMNKLFEKTKKQLRENAEDMGNGCFKIYHKCDNACIGSIRNGTYDHDVYRDEALNNRFQIKGVELKSGYKDWILWISFAISCFLLCVALLGFIMWACQKGNIRCNICI

SEQ ID NO: 10024 - protein, 566 aa, synthetic construct; identical to SEQ ID NO: 9858
  REGION 1..566: note = hemagglutinin__InfluenzaA__AGL09770

SEQ ID NO: 10025 - protein, 566 aa, synthetic construct
  REGION 1..566: note = hemagglutinin__InfluenzaA__AGL09771
MKTIIALSYILCLVFAQKLPGNDNSTATLCLGHHAVPNGTIVKTITNDRIEVTNATELVQNSSIGEICDSPHQILDGENCTLIDALLGDPQCDGFQNKKWDLFVERSKAYSNCYPYDVPDYASLRSLVASSGTLEFNNESFNWAGVTQNGTSSACIRGSNSSFFSRLNWLTHLNFKYPALNVTMPNNEQFDKLYIWGVHHPGTDKDQIFLYAQSSGRITVSTKRSQQAVIPNIGSRPRIRNIPSRISIYWTIVKPGDILLINSTGNLIAPRGYFKIRSGKSSIMRSDAPIGKCKSECITPNGSIPNDKPFQNVNRITYGACPRYVKQSTLKLATGMRNVPEKQTRGIFGAIAGFIENGWEGMVDGWYGFRHQNSEGRGQAADLKSTQAAIDQINGKLNRLIGKTNEKFHQIEKEFSEVEGRIQDLEKYVEDTKIDLWSYNAELLVALENQHTIDLTDSEMNKLFEKTKKQLRENAEDMGNGCFKIYHKCDNACIGSIRNGTYDHDIYRDEALNNRFQIKGVELKSGYKDWILWISFAISCFLLCVALLGFIMWACQKGNIRCNICI

SEQ ID NO: 10026 - protein, 566 aa, synthetic construct
  REGION 1..566: note = hemagglutinin__InfluenzaA__AGL09772
MKTIIALSYILCLVFAQKLPGNDNSTATLCLGHHAVPNGTIVKTITNDQIEVTNATELVQSSSTGEICNSPHQILDGENCTLIDALLGDPQCDGFQNKKWDLFVERSKAHSNCYPYDVPDYASLRSLVASSGTLEFNNESFNWTGVTQNGTSSACIRRSNNSFFSRLNWLTHLNFKYPALNVTMPNNEQFDKLYIWGVHHPGTDKDQIFLYAQAAGRITVSTKRSQQAVIPNIGSRPRVRNIPSRVSIYWTIVKPGDILLINSTGNLIAPRGYFKIRSGKSSIMRSDAPIGKCNSACITPNGSIPNDKPFQNVNRITYGACPRYVKQNTLKLATGMRNVPEKQTRGIFGAIAGFIENGWEGMVDGWYGFRHQNSEGRGQAADLKSTQAAIDQINGKLNRLIGKTNEKFHQIEKEFSEVEGRIQDLEKYVEDTKIDLWSYNAELLVALENQHTIDLTDSEMNKLFEKTKKQLRENAEDMGNGCFKIYHKCDNACIGSIRNGTYDHYVYRDEALNNRFQIKGVELKSGYKDWILWISFATSCFLLCVALLGFIMWACQKGNIRCNICI

SEQ ID NO: 10027 - protein, 566 aa, synthetic construct
  REGION 1..566: note = hemagglutinin__InfluenzaA__AGL09773
MKTIIALSYILCLVFAQKLPGNDNSTATLCLGHHAVPNGTIVKTITNDQIEVTNATELVQSSSTGEICNSPHQILDGENCTLIDALLGDPQCDGFQNKKWDLFVERSKAHSNCYPYDVPDYASLRSLVASSGTLEFNNESFNWTEVTQNGTSSACIRRSNNSFFSRLNWLTHLNFKYPALNVTMPNNEQFDKLYIWGVHHPGTDKDQIFLYAQAAGRITVSTKRSQQAVIPNIGSRPRVRNIPSRVSIYWTIVKPGDILLINSTGNLIAPRGYFKIRSGKSSIMRSDAPIGKCNSACITPNGSIPNDKPFQNVNRITYGACPRYVKQNTLKLATGMRNVPEKQTRGIFGAIAGFIENGWEGMVDGWYGFRHQNSEGRGQAADLKSTQAAIDQINGKLNRLIGKTNEKFHQIEKEFSEVEGRIQDLEKYVEDTKIDLWSYNAELLVALENQHTIDLTDSEMNKLFEKTKKQLRENAEDMGNGCFKIYHKCDNACIGSIRNGTYDHYVYRDEALNNRFQIKGVELKSGYKDWILWISFATSCFLLCVALLGFIMWACQKGNIRCNICI

SEQ ID NO: 10028 - protein, 566 aa, synthetic construct; identical to SEQ ID NO: 10026
  REGION 1..566: note = hemagglutinin__InfluenzaA__AGL09774

SEQ ID NO: 10029 - protein, 566 aa, synthetic construct; identical to SEQ ID NO: 9868
  REGION 1..566: note = hemagglutinin__InfluenzaA__AGL09775

SEQ ID NO: 10030 - protein, 566 aa, synthetic construct; identical to SEQ ID NO: 10026
  REGION 1..566: note = hemagglutinin__InfluenzaA__AGL09776

SEQ ID NO: 10031 - protein, 566 aa, synthetic construct; identical to SEQ ID NO: 10026
  REGION 1..566: note = hemagglutinin__InfluenzaA__AGL09777

SEQ ID NO: 10032 - protein, 566 aa, synthetic construct
  REGION 1..566: note = hemagglutinin__InfluenzaA__AGL09778
MKTIIALSYILCLIFAQKLPGNDNSTATLCLGHHAVPNGTIVKTITNDRIEVTNATELVQNSSIGEICDSPHQILDGENCTLIDALLGDPQCDGFQNKKWDLFVERSKAYSNCYPYDVPDYASLRSLVASSGTLEFNNESFNWAGVTQNGTSSACIRGSNSSFFSRLNWLTHLNFKYPALNVTMPNNEQFDKLYIWGVHHPGTDKDQIFLYAQSSGRITVSTKRSQQAVIPNIGSRPRIRNIPSRISIYWTIVKPGDILLINSTGNLIAPRGYFKIRSGKSSIMRSDAPIGKCKSECITPNGSIPNDKPFQNVNRITYGACPRYVKQSTLKLATGMRNVPEKQTRGIFGAIAGFIENGWEGMMDGWYGFRHQNSEGRGQAADLKSTQAAIDQINGKLNRLIGKTNEKFHQIEKEFSEVEGRIQDLEKYVEDTKIDLWSYNAELLVALENQHTIDLTDSEMNKLFEKTKKQLRENAEDMGNGCFKIYHKCDNACIGSIRNGTYDHDVYRDEALNNRFQIKGVELKSGYKDWILWISFAISCFLLCVALLGFIMWACQKGNIRCNICI

SEQ ID NO: 10033 - protein, 566 aa, synthetic construct
  REGION 1..566: note = hemagglutinin__InfluenzaA__AGL09779
MKTIIALSYILCLVFAQKLPGNNNSTATLCLGHHAVPNGTIVKTITNDRIEVTNATELVQNSSIGEICDSPHQILDGENCTLIDALLGDPQCDGFQNKKWDLFVERSKAYSNCYPYDVPDYASLRSLVASSGTLEFNNESFNWAGVTQNGTSSACIRGSNSSFFSRLNWLTHLNFKYPALNVTMPNNEQFDKLYIWGVHHPGTDKDQIFLYAQSSGRITVSTKRSQQAVIPNIGSRPRIRNIPSRISIYWTIVKPGDILLINSTGNLIAPRGYFKIRSGKSSIMRSDAPIGKCKSECITPNGSIPNDKPFQNVNRITYGACPRYVKQSTLKLATGMRNVPEKQTRGIFGAIAGFIENGWEGMVDGWYGFRHQNSEGRGQAADLKSTQAAIDQINGKLNRLIGKTNEKFHQIEKEFSEVEGRIQDLEKYVEDTKIDLWSYNAELLVALENQHTIDLTDSEMNKLFEKTKKQLRENAEDMGNGCFKIYHKCDNACIGSIRNGTYDHDVYRDEALNNRFQIKGVELKSGYKDWILWISFAISCFLLCVALLGFIMWACQKGNIRCNICI

SEQ ID NO: 10034 - protein, 566 aa, synthetic construct
  REGION 1..566: note = hemagglutinin__InfluenzaA__AGL09780
MKTIIALSYILCLVFAQKLPGNDNSTATLCLGHHAVPNGTIVKTITNDRIEVTNATELVQNSSIGEICDSPHQILDGENCTLIDALLGDPQCDGFQNKKWDLFVERSKAYSNCYPYDVPDYASLRSLVASSGTLEFDNESFNWAGVTQNGTSSACIRGSNSSFFSRLNWLTHLNFKYPALNVTMPNNEQFDKLYIWGVHHPGTDKDQISLYAQSSGRITVSTKRSQQAVIPNIGSRPRIRNIPSRISIYWTIVKPGDILLINSTGNLIAPRGYFKIRSGKSSIMRSDAPIGKCKSECITPNGSIPNDKPFQNVNRITYGACPRYVKQSTLKLATGMRNVPEKQTRGIFGAIAGFIENGWEGMVDGWYGFRHQNSEGRGQAADLKSTQAAIDQINGKLNRLIGKTNEKFHQIEKEFSEVEGRIQDLEKYVEDTKIDLWSYNAELLVALENQHTIDLTDSEMNKLFEKTKKQLRENAEDMGNGCFKIYHKCDNACIGSIRNGTYDHDVYRDEALNNRFQIKGVELKSGYKDWILWISFAISCFLLCVALLGFIMWACQKGNIRCNICI

SEQ ID NO: 10035 - protein, 566 aa, synthetic construct; identical to SEQ ID NO: 9993
  REGION 1..566: note = hemagglutinin__InfluenzaA__AGL09781

SEQ ID NO: 10036 - protein, 566 aa, synthetic construct; identical to SEQ ID NO: 9858
  REGION 1..566: note = hemagglutinin__InfluenzaA__AGL09782

SEQ ID NO: 10037 - protein, 566 aa, synthetic construct
  REGION 1..566: note = hemagglutinin__InfluenzaA__AGL09783
MKTIIALSYILCLVFAQKLPGNDNSTATLCLGHHAVPNGTVVKTITNDRIEVTNATELVQNSSIGEICDSPHQILDGENCTLIDALLGDPQCDGFQNKKWDLFVERSKAYSNCYPYDVPDYASLRSLVASSGTLEFNNESFNWTGVTQNGTSSACIRRSNNSFFSRLNWLTHLNFKYPALNVTMPNNEQFDKLYIWGVHHPGTDKDQIFLYAQSSGRITVSTKRSQQAVIPNIGSRPRIRNIPSRISIYWTIVKPGDILLINSTGNLIAPRGYFKIRSGKSSIMRSDAPIGKCKSECITPNGSIPNDKPFQNVNRITYGACPRYVKQSTLKLATGMRNVPEKQTRGIFGAIAGFIENGWEGMVDGWYGFRHQNSEGRGQAADLKSTQAAIDQINGKLNRLIGKTNEKFHQIEKEFSEVEGRTQNLEKYVEDTKIDLWSYNAELLVALENQHTIDLTDSEMNKLFEKTKKQLRENAEDMGNGCFKIYHKCDNACIGSIRNGTYDHDVYRDEALNNRFQIKGVELKSGYKDWILWISFAISCFLLCVVLLGFIMWACQKGNIRCNICI

SEQ ID NO: 10038 - protein, 566 aa, synthetic construct; identical to SEQ ID NO: 9868
  REGION 1..566: note = hemagglutinin__InfluenzaA__AGL09785

SEQ ID NO: 10039 - protein, 566 aa, synthetic construct
  REGION 1..566: note = hemagglutinin__InfluenzaA__AGL09786
MKTIIALSYILCLVFAQKLPGNDNSTATLCLGHHAVPNGTIVKTITNDRIEVTNATELVQNSSIGEICDSPHQILDGENCTLIDALLGDPQCDGFQNKKWDLFVERSKAYSNCYPYDVPDYASLRSLVASSGTLEFDNESFNWAGVTQNGTSSACIRGSKSSFFSRLNWLTHLNFKYPALNVTMPNNEQFDKLYIWGVHHPGTDKDQISLYAQSSGRITVSTKRSQQAVIPNIGSRPRIRNIPSRISIYWTIVKPGDILLINSTGNLIAPRGYFKIRSGKSSIMRSDAPIGKCKSECITPNGSIPNDKPFQNVNRITYGACPRYVKQSTLKLATGMRNVPEKQTRGIFGAIAGFIENGWEGMVDGWYGFRHQNSEGRGQAADLKSTQAAIDQINGKLNRLIGKTNEKFHQIEKEFSEVEGRIQDLEKYVEDTKIDLWSYNAELLVALENQHTIDLTDSEMNKLFEKTKKQLRENAEDMGNGCFKIYHKCDNACIGSIRNGTYDHDVYRDEALNNRFQIKGVELKSGYKDWILWISFAISCFLLCVALLGFIMWACQKGNIRCNICI

SEQ ID NO: 10040 - protein, 566 aa, synthetic construct
  REGION 1..566: note = hemagglutinin__InfluenzaA__AGL09787
MKAILVVLLYTFATANADTLCIGYHANNSTDTVDTVLEKNVTVTHSVNLLEDKHNGKLCKLRGVAPLHLGKCNIAGWILGNPECESLSTASSWSYIVETSSSDNGTCYPGDFINYEELREQLSSVSSFERFEIFPKTSSWPNHDSNKGVTAACPHAGAKSFYKNLIWLVKKGNSYPKLSQSYINDKGKEVLVLWGIHHPSTTADQQSLYQNADAYVFVGTSRYSKKFKPEIAIRPKVRDQEGRMNYYWTLVEPGDKITFEATGNLVVPRYAFTMERNAGSGIIISDTPVHDCNTTCQTPEGAINTSLPFQNIHPITIGKCPKYVKSTKLRLATGLRNVPSIQSRGLFGAIAGFIEGGWTGMVDGWYGYHHQNEQGSGYAADLKSTQNAIDKITNKVNSVIEKMNTQFTAVGKEFNHLEKRIENLNKKVDDGFLDIWTYNAELLVLLENERTLDYHDSNVKNLYEKVRNQLKNNAKEIGNGCFEFYHKCDNTCMESVKNGTYDYPKYSEEAKLNREKIDGVKLESTRIYQILAIYSTVASSLVLVVSLGAISFWMCSNGSLQCRICI

SEQ ID NO: 10041 - protein, 566 aa, synthetic construct; identical to SEQ ID NO: 10040
  REGION 1..566: note = hemagglutinin__InfluenzaA__AGL09788

SEQ ID NO: 10042 - protein, 566 aa, synthetic construct; identical to SEQ ID NO: 10040
  REGION 1..566: note = hemagglutinin__InfluenzaA__AGL09789

SEQ ID NO: 10043 - protein, 566 aa, synthetic construct; identical to SEQ ID NO: 9994
  REGION 1..566: note = hemagglutinin__InfluenzaA__AGL09790

SEQ ID NO: 10044 - protein, 566 aa, synthetic construct
  REGION 1..566: note = hemagglutinin__InfluenzaA__AGL09791
MKTIIALSYILCLVFAQKLPGNDNSTATLCLGHHAVPNGTIVKTITNDRIEVTNATELVQNSSIGEICDSPHQILDGENCTLIDALLGDPQCDGFQNKKWDLFVERSKAYSNCYPYDVPDYASLRSLVASSGTLEFNNESFNWTGVTQNGTSSACIRRSNSSFFSRLNWLTHLNFKYPALNMTMPNNEQFDKLYIWGVHHPGTDKDQISLYAQSSGRITVSTKRSQQAVIPNIGSRPRIRNIPSRISIYWTIVKPGDILLINSTGNLIAPRGYFKIRSGKSSIMRSDAPIGKCKSECITPNGSIPNDKPFQNVNRITYGACPRYVKQSTLKLATGMRNVPEKQTRGIFGAIAGFIENGWEGMVDGWYGFRHQNSEGRGQAADLKSTQAAIDQINGKLNRLIGKTNEKFHQIEKEFSEVEGRIQDLEKYVEDTKIDLWSYNAELLVALENQHTIDLTDSEMNKLFEKTKKQLRENAEDMGNGCFKIYHKCDNACIGSIRNGTYDHNVYRDEALNNRFQIKGVELKSGYKDWILWISFAISCFLLCVALLGFIMWACQKGNIRCNICI

SEQ ID NO: 10045 - protein, 566 aa, synthetic construct; identical to SEQ ID NO: 9994
  REGION 1..566: note = hemagglutinin__InfluenzaA__AGL09792

SEQ ID NO: 10046 - protein, 566 aa, synthetic construct
  REGION 1..566: note = hemagglutinin__InfluenzaA__AGL09794
MKTIIALSYILCLVFAQKLPGNDNSTATLCLGHHAVPNGTIVKTITNDRIEVTNATELVQNSSIGEICDSPHQILDGENCTLIDALLGDPQCDGFQNKKWDLFVERSKAYSNCYPYDVPDYASLRSLVASSGTLEFNNESFNWAGVTQNGTSSACIRGSNSSFFSRLNWLTHLNFKYPALNVTMPNNEQFDKLYIWGVHHPGTDKDQIFLYAQSSGRITVSTKRSQQAVIPNIGSRPRIRNIPSRISIYWTIVKPGDILLINSTGNLIAPRGYFKIRSGKSSIMRSDTPIGKCKSECITPNGSIPNDKPFQNVNRITYGACPRYVKQSTLKLATGMRNVPEKQTRGIFGAIAGFIENGWEGMVDGWYGFRHQNSEGRGQAADLKSTQAAIDQINGKLNRLIGKTNEKFHQIEKEFSEVEGRIQDLEKYVEDTKIDLWSYNAELLVALENQHTIDLTDSEMNKLFEKTKKQLRENAEDMGNGCFKIYHKCDNACIGSIRNGTYDHDVYRDEALNNRFQIKGVELKSGYKDWILWISFAISCFLLCVALLGFIMWACQKGNIRCNICI

SEQ ID NO: 10047 - protein, 566 aa, synthetic construct; identical to SEQ ID NO: 9994
  REGION 1..566: note = hemagglutinin__InfluenzaA__AGL09795

SEQ ID NO: 10048 - protein, 566 aa, synthetic construct
  REGION 1..566: note = hemagglutinin__InfluenzaA__AGL09797
MKTIIALSYILCLVFSQKLPGNDNSTATLCLGHHAVPNGTIVKTITNDRIEVTNATELVQNSSIGEICDSPHQILDGENCTLIDALLGDPQCDGFQNKKWDLFVERSKAYSNCYPYDVPDYASLRSLVASSGTLEFNNESFNWAGVTQNGTSSACIRGSNSSFFSRLNWLTHLNFKYPALNVTMPNNEQFDKLYIWGVHHPGTDKDQIFLYAQSSGRITVSTKRSQQAVIPNIGSRPRIRNIPSRISIYWTIVKPGDILLINSTGNLIAPRGYFKIRSGKSSIMRSDAPIGKCKSECITPNGSIPNDKPFQNVNRITYGACPRYVKQSTLKLATGMRNVPEKQTRGIFGAIAGFIENGWEGMVDGWYGFRHQNSEGRGQAADLKSTQAAIDQINGKLNRLIGKTNEKFHQIEKEFSEVEGRIQDLEKYVEDTKIDLWSYNAELLVALENQHTIDLTDSEMNKLFEKTKKQLRENAEDMGNGCFKIYHKCDNACIGSIRNGTYDHDVYRDEALNNRFQIKGVELKSGYKDWILWISFAISCFLLCVALLGFIMWACQKGNIRCNICI

SEQ ID NO: 10049 - protein, 566 aa, synthetic construct
  REGION 1..566: note = hemagglutinin__InfluenzaA__AGL09798
MKTIIALSYILCLVFAQKLPGNDNSTATLCLGHHAVPNGTIVKTITNDRIEVTNATELVQNSSIGEICDSPHQILDGENCTLIDALLGDPQCDGFQNKKWDLFVERSKAYSNCYPYDVPDYASLRSLVASSGTLEFNNESFNWAGVTQNGTSSACIRGSNSSFFSRLNWLTHLNFKYPALNVTMPNNEQFDKLYIWGVHHPGTDKDQIFLYAQSSGRITVSTKRSQQAVIPNIGSRPRIRNIPSRISIYWTIVKPGDILLINSTGNLIAPRGYFKIRSGKSSIMRSDAPIGKCKSECITPNGSIPNDKPFQNVNRITYGACPRYVKQSTLKLATGMRNVPEKQTRGIFGAIAGFIENGWEGMVDGWYGFRHQNFEGRGQAADLKSTQAAIDQINGKLNRLIGKTNEKFHQIEKEFSEVEGRIQDLEKYVEDTKIDLWSYNAELLVALENQHTIDLTDSEMNKLFEKTKKQLRENAEDMGNGCFKIYHKCDNACIGSIRNGTYDHYVYRDEALNNRFQIKGVELKSGYKDWILWISFAISCFLLCVALLGFIMWACQKGNIRCNICI

SEQ ID NO: 10050 - protein, 566 aa, synthetic construct; identical to SEQ ID NO: 10048
  REGION 1..566: note = hemagglutinin__InfluenzaA__AGL09799

SEQ ID NO: 10051 - protein, 566 aa, synthetic construct; identical to SEQ ID NO: 9994
  REGION 1..566: note = hemagglutinin__InfluenzaA__AGL09800

SEQ ID NO: 10052 - protein, 566 aa, synthetic construct; identical to SEQ ID NO: 9858
  REGION 1..566: note = hemagglutinin__InfluenzaA__AGL09801

SEQ ID NO: 10053 - protein, 566 aa, synthetic construct; identical to SEQ ID NO: 9858
  REGION 1..566: note = hemagglutinin__InfluenzaA__AGL09802

SEQ ID NO: 10054 - protein, 566 aa, synthetic construct
  REGION 1..566: note = hemagglutinin__InfluenzaA__AGL09803
MKTIIALSYILCLVFAQKLPGNDNSTATLCLGHHAVPNGTIVKTITNDRIEVTNATELVQNSSIGEICDSPHQILDGENCTLIDALLGDPQCDGFQNKKWDLFVERSKAYSNCYPYDVPDYASLRSLVASSGTLEFNNESFNWTGVTQNGTSSACIRRSNSSFFSRLNWLTHLNFKYPALNVTMPNNEQFDKLYIWGVHHPGTDKDQIFLYAQSSGRITVSTKRSQQAVIPNIGSRPRIRNIPSRISIYWTIVKPGDILLINSTGNLIAPRGYFKIRSGKSSIMRSDAPIGKCKSECITPNGSIPNDKPFQNVNRITYGACPRYVKQRTLKLATGMRNVPEKQTRGIFGAIAGFIENGWEGMVDGWYGFRHQNSEGRGQAADLKSTQAAIDQINGKLNRLIGKTNEKFHQIEKEFSEVEGRIQDLEKYVEDTKIDLWSYNAELLVALENQHTIDLTDSEMNKLFEKTKKQLRENAEDMGNGCFKIYHKCDNACIGSIRNGTYDHDVYRDEALNNRFQIKGVELKSGYKDWILWISFAISCFLLCVALLGFIMWACQKGNIRCNICI

SEQ ID NO: 10055 - protein, 566 aa, synthetic construct; identical to SEQ ID NO: 9891
  REGION 1..566: note = hemagglutinin__InfluenzaA__AGL09804

SEQ ID NO: 10056 - protein, 566 aa, synthetic construct; identical to SEQ ID NO: 9997
  REGION 1..566: note = hemagglutinin__InfluenzaA__AGL09805

SEQ ID NO: 10057 - protein, 566 aa, synthetic construct; identical to SEQ ID NO: 10026
  REGION 1..566: note = hemagglutinin__InfluenzaA__AGL09806

SEQ ID NO: 10058 - protein, 566 aa, synthetic construct; identical to SEQ ID NO: 9997
  REGION 1..566: note = hemagglutinin__InfluenzaA__AGL09807

SEQ ID NO: 10059 - protein, 566 aa, synthetic construct
  REGION 1..566: note = hemagglutinin__InfluenzaA__AGL09808
MKTIIALSYILCLVFAQKLPGNDNSTATLCLGHHAVPNGTIVKTITNDQIEVTNATELVQNSSIGEICDSPHQILDGENCTLIDALLGDPQCDGFQNKKWDLFVERSKAYSNCYPYDVPDYASLRSLVASSGTLEFNNESFNWAGVTQNGTSSACIRGSNSSFFSRLNWLTHLNFKYPALNVTMPNNEQFDKLYIWGVHHPGTDKDQIFLYAQSSGRITVSTKRSQQAVIPNVGSRPRIRNIPSRISIYWTIVKPGDILLINSTGNLIAPRGYFKIRSGKSSIMRSDAPIGKCKSECITPNGSIPNDKPFQNVNRITYGACPRYVKQSTLKLATGMRNVPEKQTRGIFGAIAGFIENGWEGMVDGWYGFRHQNSEGRGQAADLKSTQAAIDQINGKLNRLIGKTNEKFHQIEKEFSEVEGRIQDLEKYVEDTKIDLWSYNAELLVALENQHTIDLTDSEMNKLFEKTKKQLRENAEDMGNGCFKIYHKCDNACIGSIRNGTYDHDVYRDEALNNRFQIKGVELKSGYKDWILWISFAISCFLLCVALLGFIMWACQKGNIRCNICI

SEQ ID NO: 10060 - protein, 566 aa, synthetic construct
  REGION 1..566: note = hemagglutinin__InfluenzaA__AGL09809
MKAILVVMLYTFATANADTLCIGYHANNSTDTVDTVLEKNVTVTHSVNLLEDKHNGKLCKLRGVAPLHLGKCNIAGWILGNPECESLSTASSWSYIVETSGSDNGTCYPGDFIDYEELREQLSSVSSFERFEIFPKTSSWPNHDSNKGVTAACPHAGAKGFYKNLIWLVKKGNSYPKLSISYINDKGKEVLVLWGIHHPSTTADQQSLYQNADTYVFVGTSRYSKKFKPEIAIRPKVRDQEGRMNYYWTLVEPGDKITFEATGNLVVPRYAFAMERNAGSGIIISDTPVHDCNTTCQTPKGAINTSLPFQNIHPITIGKCPKYVKSTKLRLATGLRNVPSIQSRGLFGAIAGFIEGGWTGMVDGWYGYHHQNEQGSGYAADLKSTQNAIDKITNKVNSVIEKMNTQFTAVGKEFNHLEKRIENLNKKVDDGFLDIWTYNAELLVLLENERTLDYHDSNVKNLYEKVRNQLKNNAKEIGNGCFEFYHKCDNTCMESVKNGTYDYPKYSEEAKLNREEIDGVKLESTRIYQILAIYSTAASSLVLVVSLGAISFWMCSNGSLQCRICI

SEQ ID NO: 10061 - protein, 566 aa, synthetic construct
  REGION 1..566: note = hemagglutinin__InfluenzaA__AGL09810
MKTIIALSYILCLVFAQKLPGNDNSTATLCLGHHAVPNGTIVKTITNDRIEVTNATELVQNSSIGEICDSPHQILDGENCTLIDALLGDPQCDGFQNKKWDLFVERSKAYSNCYPYDVPDYASLRSLVASSGTLEFSNESFNWTGVTQNGTSSACIRRSNSSFFSRLNWLTHLNFKYPALNVTMPNNEQFDKLYIWGVHHPGTDKDQIFLYAQSSGRITVSTKRSQQAVIPNIGSRPRIRNIPSRISIYWTIVKPGDILLINSTGNLIAPRGYFKIRSGKSSIMRSDAPIGKCKSECITPNGSIPNDKPFQNVNRITYGTCPRYVKQSTLKLATGMRNVPEKQTRGIFGAIAGFIENGWEGMVDGWYGFRHQNSEGRGQAADLKSTQAAIDQINGKLNRLIGKTNEKFHQIEKEFSEVEGRIQDLEKYVEDTKIDLWSYNAELLVALENQHTIDLTDSEMNKLFEKTKKQLRENAEDMGNGCFKIYHKCDNACMGSIRNGTYDHDVYRDEALNNRFQIKGVELKSGYKDWILWISFAISCFLLCVALLGFIMWACQKGNIRCNICI

SEQ ID NO: 10062 - protein, 566 aa, synthetic construct; identical to SEQ ID NO: 9858
  REGION 1..566: note = hemagglutinin__InfluenzaA__AGL09811

SEQ ID NO: 10063 - protein, 566 aa, synthetic construct
  REGION 1..566: note = hemagglutinin__InfluenzaA__AGL09812
MKTIIALSYILCLVFAQKLPGNDNSTATLCLGHHAVPNGTIVKTITNDRIEVTNATELVQNSSIGEICDSPHQILDGENCTLIDALLGDPQCDGFQDKKWDLFVERSKAYSNCYPYDVPDYASLRSLVASSGTLEFNNESFNWAGVTQNGTSSACIRGSNSSFFSRLNWLTHLNFKYPALNVTMPNNEQFDKLYIWGVHHPGTDKDQIFLYAQSSGRITVSTKRSQQAVIPNIGSRPRIRNIPSRISIYWTIVKPGDILLINSTGNLIAPRGYFKIRSGKSSIMRSDAPIGKCKSECITPNGSIPNDKPFQNVNRITYGACPRYVKQSTLKLATGMRNVPEKQTRGIFGAIAGFIENGWEGMVDGWYGFRHQNSEGRGQAADLKSTQAAIDQINGKLNRLIGKTNEKFHQIEKEFSEVEGRIQDLEKYVEDTKIDLWSYNAELLVALENQHTIDLTDSEMNKLFEKTKKQLRENAEDMGNGCFKIYHKCDNACIGSIRNGTYDHDVYRDEALNNRFQIKGVELKSGYKDWILWISFAISCFLLCVALLGFIMWACQKGNIRCNICI

SEQ ID NO: 10064 - protein, 566 aa, synthetic construct; identical to SEQ ID NO: 9835
  REGION 1..566: note = hemagglutinin__InfluenzaA__AGL09813

SEQ ID NO: 10065 - protein, 566 aa, synthetic construct; identical to SEQ ID NO: 9883
  REGION 1..566: note = hemagglutinin__InfluenzaA__AGL09814

SEQ ID NO: 10066 - protein, 566 aa, synthetic construct
  REGION 1..566: note = hemagglutinin__InfluenzaA__AGL09815
MKTIIALSYILCLVFAQKLPGNDNSTATLCLGHHAVPNGTIVKTITNDRIEVTNATELVQNSSIGEICDSPHQILDGENCTLIDALLGDPQCDGFQNKKWDLFVERSKAYSNCYPYDVPDYASLRSLVASSGTLEFNNESFNWTGVTQNGTSSACIRRSNSSFFSRLNWLTHLNFKYPALNVTMPNNEQFDKLYIWGVHHPGTDKDQIFLYAQSSGRITVSTKRSQQAVIPNIGSRPRIRSIPSRISIYWTIVKPGDILLINSTGNLIAPRGYFKIRSGKSSIMRSDAPIGKCKSECITPNGSIPNDKPFQNVNRITYGACPRYVKQSTLKLATGMRNVPEKQTRGIFGAIAGFIENGWEGMVDGWYGFRHQNSEGRGQAADLKSTQAAIDQINGKLNRLIGKTNEKFHQIEKEFSEVEGRIQDLEKYVEDTKIDLWSYNAELLVALENQHTIDLTDSEMNKLFEKTKKQLRENAEDMGNGCFKIYHKCDNACIGSIRNGTYDHDVYRDEALNNRFQIKGVELKSGYKDWILWISFAISCFLLCVALLGFIMWACQKGNIRCNICI

SEQ ID NO: 10067 - protein, 566 aa, synthetic construct; identical to SEQ ID NO: 9883
  REGION 1..566: note = hemagglutinin__InfluenzaA__AGL09816

SEQ ID NO: 10068 - protein, 566 aa, synthetic construct
  REGION 1..566: note = hemagglutinin__InfluenzaA__AGL09817
MKTIIALSYILCLVFAQELPGNDDSTATLCLGHHAVPNGTIVKTITNDQIEVTNATELVQSSSTGEICNSPHQILDGENCTLIDALLGDPQCDGFQNKKWDLFVERSKAHSNCYPYDVPDYASLRSLVASSGTLEFNSESFNWTGVTQNGTSSACIRRSNNSFFSRLNWLTHLNFKYPALNVTMPNNEQFDKLYIWGVHHPGTDKDQIFLYAQASGRITVSTKRSQQAVIPNIGSRPRVRNIPSRVSIYWTIVKPGDILLINSTGNLIAPRGYFKIRSGKSSIMRSDAPIGKCNSACITPNGSIPNDKPFQNVNRITYGACPRYVKQNTLKLATGMRNVPEKQTRGIFGAIAGFIENGWEGMVDGWYGFRHQNSEGRGQAADLKSTQAAIDQINGKLNRLIGKTNEKFHQIEKEFSEVEGRIQDLEKYVEDTKIDLWSYNAELLVALENQHTIDLTDSEMNKLFEKTKKQLRENAEDMGNGCFKIYHKCDNACIGSIRNGTYDHDVYRDEALNNRFQIKGVELKSGYKDWILWISFAISCFLLCVALLGFIMWACQKGNIRCNICI

SEQ ID NO: 10069 - protein, 566 aa, synthetic construct; identical to SEQ ID NO: 9883
  REGION 1..566: note = hemagglutinin__InfluenzaA__AGL09818

SEQ ID NO: 10070 - protein, 566 aa, synthetic construct; identical to SEQ ID NO: 9994
  REGION 1..566: note = hemagglutinin__InfluenzaA__AGL09819

SEQ ID NO: 10071 - protein, 566 aa, synthetic construct
  REGION 1..566: note = hemagglutinin__InfluenzaA__AGL09820
MKTIIALSYILCLVFAQKLPGNDNSTATLCLGHHAVPNGTIVKTITNDQIEVTNATELVQNSSIGEICDSPHQILDGENCTLIDALLGDPQCDGFQNKKWDLFVERSKAYSNCYPYDVPDYASLRSLVASSGTLEFNNESFNWTGVTQNGTSSACIRGSNSSFFSRLNWLTHLNFKYPALNVTMPNNEQFDKLYIWGVHHPGTDKDQIFLYAQSSGRITVSTKRSQQAVIPNIGSRPRIRNIPSRISIYWTIVKPGDILLINSTGNLIAPRGYFKIRSGKSSIMRSDAPIGKCKSECITPNGSIPNDKPFQNVNRITYGACPRYVKQSTLKLATGMRNVPEKQTRGIFGAIAGFIENGWEGMVDGWYGFRHQNSEGRGQAADLKSTQAAIDQINGKLNRLIGKTNEKFHQIEKEFSEIEGRIQDLEKYVEDTKIDLWSYNAELLVALENQHTIDLTDSEMNKLFEKTKKQLRENAEDMGNGCFKIYHKCDNACIGSIRNGTYDHDVYRDEALNNRFQIKGVELKSGYKDWILWISFAISCFLLCVALLGFIMWACQKGNIRCNICI

SEQ ID NO: 10072 - protein, 566 aa, synthetic construct
  REGION 1..566: note = hemagglutinin__InfluenzaA__AGL09821
MKTIIALSYILCLVFAQKLPGNDNSTATLCLGHHAVPNGTIVKTITNDRIEVTNATELVQNSSIGEICDSPHQILDGENCTLIDALLGDPQCDGFQNKKWDLFVERSKAYSNCYPYDVPDYASLRSLVASSGTLEFNNESFNWTGVTQNGTSSACIRRSNSSFFSRLNWLTHLNFKYPALNVTMPNNEQFDKLYIWGVHHPGTDKDQIFLYAQSSGRITVSTKRSQQAVIPNIGSRPRIRNIPSRISIYWTIVKPGDILLINSTGNLIAPRGYFKIRSGKSSIMRSDAPIGKCKSECITPNGSIPNDKPFQNVNRITYGACPRYVKQSTLKLATGMRNVPEKQTRGIFGAIAGFIENGWEGMVDGWYGFRHQNSEGRGQAADLKSTQAAIDQINGKLNRLIGKTNEKFHQIEKEFSEVEGRIQDLEKYVEDTKIDLWSYNAELLVALENQHTIDLTDSEMNKLFEKTKKQLRENAEDMGNGCFKIYHKCDNACIGSIRNGTYDHNVYRDEALNNRFQIKGIELKSGYKDWILWISFAISCFLLCVALLGFIMWACQKGNIRCNICI

SEQ ID NO: 10073 - protein, 566 aa, synthetic construct; identical to SEQ ID NO: 9997
  REGION 1..566: note = hemagglutinin__InfluenzaA__AGL09822

SEQ ID NO: 10074 - protein, 566 aa, synthetic construct; identical to SEQ ID NO: 10040
  REGION 1..566: note = hemagglutinin__InfluenzaA__AGL09823

SEQ ID NO: 10075 - protein, 566 aa, synthetic construct
  REGION 1..566: note = hemagglutinin__InfluenzaA__AGL09824
MKAILVVLLYTFATANADTLCIGYHANNSTDTVDTVLEKNVTVTHSVNLLEDKHNGKLCKLRGVAPLHLGKCNIAGWILGNPECESLSTASSWSYIVETSSSDNGTCYPGDFINYEELREQLSSVSSFERFEIFPKTSSWPNHDSNKGVTAACPHAGTKSFYKNLIWLVKKGNSYPKLSKSYINDKGKEVLVLWGIHHPSTTADQQSLYQNADAYVFVGTSRYSKKFKPEIAIRPKVRDQEGRMNYYWTLIEPGDKITFEATGNLVVPRYAFAMERNAGSGIIISDTPVHDCNTTCQTPEGAINTSLPFQNIHPITIGKCPKYVKSTKLRLATGLRNVPSIQSRGLFGAIAGFIEGGWTGMVDGWYGYHHQNEQGSGYAADLKSTQNAIDKITNKVNSVIEKMNTQFTAVGKEFNHLEKRIENLNKKVDDGFLDIWTYNAELLVLLENERTLDYHDSNVKNLYEKVRNQLKNNAKEIGNGCFEFYHKCDNTCMESVKNGTYDYPKYSEEAKLNREKIDGVKLESTRIYQILAIYSTVASSLVLVVSLGAISFWMCSNGSLQCRICI

SEQ ID NO: 10076 - protein, 566 aa, synthetic construct; identical to SEQ ID NO: 9994
  REGION 1..566: note = hemagglutinin__InfluenzaA__AGL09825

SEQ ID NO: 10077 - protein, 566 aa, synthetic construct; identical to SEQ ID NO: 10075
  REGION 1..566: note = hemagglutinin__InfluenzaA__AGL09826

SEQ ID NO: 10078 - protein, 566 aa, synthetic construct; identical to SEQ ID NO: 9868
  REGION 1..566: note = hemagglutinin__InfluenzaA__AGL09827

SEQ ID NO: 10079 - protein, 566 aa, synthetic construct
  REGION 1..566: note = hemagglutinin__InfluenzaA__AGL09828
MKTIIALSYILCLVFAQKLPGNDNSTATLCLGHHAVPNGTIVKTITNDQIEVTNATELVQNSSIGEICDSPHQILDGENCTLIDALLGDPQCDGFQNKKWDLFVERSKAYSNCYPYDVPDYASLRSLVASSGTLEFNNESFNWAGVTQNGTSSACIRGSNSSFFSRLNWLTHLNFKYPALNVTMPNNEQFDKLYIWGVHHPGTDKDQIFLYAQSSGRITVSTKRSQQAVIPNIGSRPRIRNIPSRISIYWTIVKPGDILLINSTGNLIAPRGYFKIRSGKSSIMRSDAPIGKCKSECITPNGSIPNDKPFQNVNRITYGACPRYVKQSTLKLATGMRNVPEKQTRGIFGAIAGFIENGWEGMVDGWYGYRHQNSEGRGQAADLKSTQAAIDQINGKLNRLIGKTNEKFHQIEKEFSEVEGRIQDLEKYVEDTKIDLWSYNAELLVALENQHTIDLTDSEMNKLFEKTKKQLRENAEDMGNGCFKIYHKCDNACIGSIRNGTYDHDVYRDEALNNRFQIKGVELKSGYKDWILWISFAISCFLLCVALLGFIMWACQKGNIRCNICI

SEQ ID NO: 10080 - protein, 566 aa, synthetic construct
  REGION 1..566: note = hemagglutinin__InfluenzaA__AGL09829
MKTIIALSYILCLVFAQKLPGNDNSTATLCLGHHAVPNGTIVKTITNDRIEVTNATELVQNSSIGEICDSPHQILDGENCTLIDALLGDPQCDGFQNKKWDLFVERSKAYSNCYPYDVPDYASLRSLVASSGTLEFNNESFNWAGVTQNGTSSACIRGSNSSFFSRLNWLTHLNFKYPALNVTMPNNEQFDKLYIWGVHHPGTDKDQIFLYAQSSGRITVSTKRSQQAVIPNIGSRPRIRNIPSRISIYWTIVKPGDILLINSTGNLIAPRGYFKIRSGKSSIMRSDAPIGKCKSECITPNGSIPNDKPFQNVNRITYGACPRYVKQSTLKLATGMRNVPEKQTRGIFGAIAGFIENGWEGMVDGWYGFRHQNSEGRGQAADLESTQAAIDQINGKLNRLIGKTNEKFHQIEKEFSEVEGRIQDLEKYVEDTKIDLWSYNAELLVALENQHTIDLTDSEMNKLFEKTKKQLRENAEDMGNGCFKIYHKCDNACIGSIRNGTYDHDVYRDEALNNRFQIKGVELKSGYKDWILWISFAISCFLLCVALLGFIMWACQKGNIRCNICI

SEQ ID NO: 10081 - protein, 566 aa, synthetic construct; identical to SEQ ID NO: 9883
  REGION 1..566: note = hemagglutinin__InfluenzaA__AGL09830

SEQ ID NO: 10082 - protein, 566 aa, synthetic construct; identical to SEQ ID NO: 9993
  REGION 1..566: note = hemagglutinin__InfluenzaA__AGL09831

SEQ ID NO: 10083 - protein, 566 aa, synthetic construct
  REGION 1..566: note = hemagglutinin__InfluenzaA__AGL09832
MKTIIALSYILCLVFAQKLPGNDNSTATLCLGHHAVPNGTIVKTITNDRIEVTNATELVQNSSIGEICDSPHQILDGENCTLIDALLGDPQCDGFQNKKWDLFVERSKAYSNCYPYDVPDYASLRSLVASSGTLEFNNESFNWTGVTQNGTSSACIRRSNSSFFSRLNWLTHSNFKYPALNVTMPNNEQFDKLYIWGVHHPGTDKDQIFLYAQSSGRITVSTKRSQQAVIPNIGSRPRIRNIPSRISIYWTIVKPGDILLINSTGNLIAPRGYFKIRSGKSSIMRSDAPIGKCKSECITPNGSIPNDKPFQNVNRITYGACPRYVKQSTLKLATGMRNVPEKQTRGIFGAIAGFIENGWEGMVDGWYGFRHQNSEGRGQAADLKSTQAAIDQINGKLNRLIGKTNEKFHQIEKEFSEVEGRIQDLEKYVEDTKIDLWSYNAELLVALENQHTIDLTDSEMNKLFEKTKKQLRENAEDMGNGCFKIYHKCDNACIGTIRNGTYDHNVYRDEALNNRFQIKGVELKSGYKDWILWISFAISCFLLCVALLGFIMWACQKGNIRCNICI

SEQ ID NO: 10084 - protein, 566 aa, synthetic construct; identical to SEQ ID NO: 9994
  REGION 1..566: note = hemagglutinin__InfluenzaA__AGL09833

SEQ ID NO: 10085 - protein, 566 aa, synthetic construct
  REGION 1..566: note = hemagglutinin__InfluenzaA__AGL09881
MKTIIALSYILCLVFAQKLPGNDNSTATLCLGHHAVPNGTIVKTITNDRIEVTNATELVQNSSIGEICDSPHQILDGENCTLIDALLGDPQCDGFQNKKWDLFVERSKAYSNCYPYDVPDYASLRSLVASSGTLEFNNESFNWAGVTQNGASSACIRGSNSSFFSRLNWLTHLNFKYPALNVTMPNNEQFDKLYIWGVHHPGTDKDQIFLYAQSSGRITVSTKRSQQAVIPNIGSRPRIRNIPSRISIYWTIVKPGDILLINSTGNLIAPRGYFKIRSGKSSIMRSDAPIGKCKSECITPNGSIPNDKPFQNVNRITYGACPRYVKQSTLKLATGMRNVPEKQTRGIFGAIAGFIENGWEGMVDGWYGFRHQNSEGRGQAADLKSTQAAIDQINGKLNRLIGKTNEKFHQIEKEFSEVEGRIQDLEKYVEDTKIDLWSYNAELLVALENQHTIDLTDSEMNKLFEKTKKQLRENAEDMGNGCFKIYHKCDNACIGSIRNGTYDHDVYRDEALNNRFQIKGVELKSGYKDWILWISFAISCFLLCVALLGFIMWACQKGNIRCNICI

SEQ ID NO: 10086 - protein, 566 aa, synthetic construct; identical to SEQ ID NO: 9858
  REGION 1..566: note = hemagglutinin__InfluenzaA__AGL09882

SEQ ID NO: 10087 - protein, 566 aa, synthetic construct; identical to SEQ ID NO: 9835
  REGION 1..566: note = hemagglutinin__InfluenzaA__AGL09883

SEQ ID NO: 10088 - protein, 566 aa, synthetic construct; identical to SEQ ID NO: 9835
  REGION 1..566: note = hemagglutinin__InfluenzaA__AGL09884

SEQ ID NO: 10089 - protein, 560 aa, synthetic construct; identical to SEQ ID NO: 9988
  REGION 1..560: note = hemagglutinin__InfluenzaA__AGL44438

SEQ ID NO: 10090 - protein, 566 aa, synthetic construct
  REGION 1..566: note = hemagglutinin__InfluenzaA__AGN69267
MKAILVVLLYTFTTGNADTLCIGYHANNSTDTVDTVLEKNVTVTHSVNLLEDRHNGKLCKLRGVAPLHLGKCNIAGWLLGNPECELLFTASSWSYIVETSNSDNGTCYPGDFINYEELREQLSSVSSFERFEIFPKASSWPNHETNRGVTAACPYAGANSFYRNLIWLVKKGNSYPKLSKSYINNKEKEVLVLWGIHHPPTSTDQQSLYQNADAYVFVGSSKYSKKFKPEIATRPKVRGQAGRMNYYWTLVEPGDTITFEATGNLVVPRYAFAMKRGSGSGIIISDTPVHDCNTTCQTPKGAINTSLPFQNIHPVTIGECPKYVKSTKLRMATGLRNIPSIQSRGLFGAIAGFIEGGWTGMIDGWYGYHHQNEQGSGYAADRKSTQNAIDGITNKVNSVIEKMNTQFTAVGKEFNHLEKRIENLNKKVDDGLLDVWTYNAELLVLLENERTLDYHDSNVKNLYEKVRSQLKNNAKEIGNGCFEFYHKCDDTCMESVKNGTYDYPKYSEEAKLNREEIDGVKLESTRIYQILAIYSTVASSLVLLVSLGAISFWMCSNGSLQCRICI

SEQ ID NO: 10091 - protein, 566 aa, synthetic construct
  REGION 1..566: note = hemagglutinin__InfluenzaA__AGN69278
MKAILVVLLYTFTTANADTLCIGYHANNSTDTVDTVLEKNVTVTHSVNLLEDRHNGKLCKLRGVAPLHLGKCNIAGWLLGNPECELLFTASSWSYIVETSNSDNGTCYPGDFINYEELREQLSSVSSFERFEIFPKASSWPNHEPNRGVTAACPYAGANSFYRNLIWLVKKGNSYPKLSKSYINNKEKEVLVLWGIHHPPTSTDQQSLYQNADAYVFVGSSKYNKKFKPEIATRPKVRGQAGRMNYYWTLVEPGDTITFEATGNLVVPRYAFAMKRGSGSGIIISDTPVHDCNTTCQTPKGAINTSLPFQNIHPVTIGECPKYVKSTKLRMATGLRNIPSIQSRGLFGAIAGFIEGGWTGMIDGWYGYHHQNEQGSGYAADRKSTQNAIDGITNKVNSVIEKMNTQFTAVGKEFNHLEKRIENLNKKVDDGLLDVWTYNAELLVLLENERTLDYHDSNVKNLYEKVRSQLKNNAKEIGNGCFEFYHKCDDTCMESVKNGTYDYPKYSEEAKLNREEIDGVKLESTRIYQILAIYSTVASSLVLLVSLGAISFWMCSNGSLQCRICI

SEQ ID NO: 10092 - protein, 566 aa, synthetic construct
  REGION 1..566: note = hemagglutinin__InfluenzaA__AGN69302
MEAKLFVLFCAFTALKADTICVGYHANNSTDTVDTILEKNVTVTHSVNLLENSHNGKLCSLNGKIPLQLGNCNVAGWILGNPKCDLLLTANSWSYIIETSNSKDGACYPGEFADYEELKEQLSTVSSFERFEIFPKATSWPNHDTTRGTTVACSHSGANSFYRNLLWIVKKGNSYPKLSKSYTNNKGKEVLVIWGVHHPPTDSDQQTLYQNNHTYVSVGSSKYYKRFTPEIVARPKVREQAGRMNYYWTLLDQGDTITFEATGNLIAPWHAFALKKGSSSGIMMSDAQVHNCTTKCQTPHGALKGNLPFQNVHPVTIGECPKYVKSTQLRMATGLRNIPSIQSRGLFGAIAGFIEGGWTGMVDGWYGYHHQNEQGSGYAADQKSTQIAIDGISNKVNSVIEKMNIQFTSVGKEFNSLEKRMENLNKKVDDGFLDVWTYNAELLILLENERTLDFHDLNVKNLYEKVKSQLRNNAKEIGNGCFEFYHKCDNECMESVKNGTYNYPKYSEESKLNREEIDGVKLESMGIHQILAIYSTVASSLVLLVSLGAISFWMCSNGSLQCRVCI

SEQ ID NO: 10093 - protein, 566 aa, synthetic construct; identical to SEQ ID NO: 10092
  REGION 1..566: note = hemagglutinin__InfluenzaA__AGN69314

SEQ ID NO: 10094 - protein, 566 aa, synthetic construct; identical to SEQ ID NO: 10092
  REGION 1..566: note = hemagglutinin__InfluenzaA__AGN69326

SEQ ID NO: 10095 - protein, 566 aa, synthetic construct
  REGION 1..566: note = hemagglutinin__InfluenzaA__AGN69338
MEAKLFVLFCAFTALKADTICVGYHANNSTDTVDTILEKNVTVTHSVNLLENSHNGKLCSLNGKIPLQLGNCNVAGWILGNPKCDLLLTANSWSYIIETSNSKNGACYPGEFADYEELKEQLSTVSSFERFEIFPKATSWPNHDTTRGTTVACSHSGANSFYRNLLWIVKKGNSYPKLSKSYTNNKGKEVLVIWGVHHPPTDSDQQTLYQNNHTYVSVGSSKYYKRFTPEIVARPKVREQAGRMNYYWTLLHQGDTITFEATGNLIAPWHAFALNEGSSSGIMRSDAQVHNCTTKCQTPHGALKGNLPFQNVHPVTIGECPKYVKSTQLRMATGLRNIPSIQSRGLFGAIAGFIEGGWTGMVDGWYGYHHRNEQGSGYAADQKSTQIAIDGISNKVNSVIEKMNIQFTSVGKECNSLEKRMENLNKKVDDGFLDVWTYNAELLILLENERTLDFHDLNVKNLYEKVKSQLRNNAKEIGNGCFEFYHKCDNECMESVKNGTYNYPKYSEESKLNREEIDGVKLESMGIHQILAIYSTVASSLVLLVSLGAISFWMCSNGSLQCRVCI

SEQ ID NO: 10096 - protein, 566 aa, synthetic construct
  REGION 1..566: note = hemagglutinin__InfluenzaA__AGO00265
MKARLLVLLCAIAATDADTICIGYHANNSTDTVDTILEKNVTVTHSVNLLEDSHNGKLCRLKGIAPLQLGKCNIAGWILGNPECESLLSERSWSYIVETPNSENGTCYPGDFIDYEELREQLSSVTSFERFEIFPKETSWPKHNTTKGVTAACSHAGKCSFYRNLLWLTEKDGSYPNLNNSYVNKKGKEVLVLWGVHHPSNIKDQQTLYQKENAYVSVVSSNYNRRFTPEIAERPKVRGQAGRMNYYWTLLEPGDTIIFEANGNLIAPWYAFALSRGFGSGIITSNASMHECNTKCQTPQGAINSSLPFQNIHPVTIGECPKYVRSTKLRMVTGLRNIPSIQSRGLFGAIAGFIEGGWTGMIDGWYGYHHQNEQGSGYAADQKSTQNAINGITNKVNSVIEKMNTQFTAVGKEFNNLEKRMENLNKKVDDGFLDIWTYNAELLVLLENERTLDFHDSNVKNLYEKVKSQLRNNAKEIGNGCFEFYHKCNNECMESVKNGTYDYPKYSEESKLNREKIDGVKLESMGVYQILAIYSTVASSLVLLVSLGAISFWMCSNGSLQCRICI

SEQ ID NO: 10097 - protein, 566 aa, synthetic construct
  REGION 1..566: note = hemagglutinin__InfluenzaA__AGO00277
MKAKLLILLCALSATDADTICIGYHANNSTDTVDTVLEKNVTVTHSVNLLEDSHNGKLCRLKGIAPLQLGKCNIAGWILGNPECESLLSKRSWSYIAETPNSENGTCYPGDFADYEELREQLSSVSSFERFEIFPKERSWPNHNINIGVTAACSHAGKSSFYKNLLWLTEKDGSYPNLNKSYVNKKEKEVLVLWGVHHPSNIENQKTLYRKENAYVSVVSSNYNRRFTPEIAERPKVRGQAGRMNYYWTLLEPGDTIIFEANGNLIAPWYAFALSRGLGSGIITSNASMDECDTKCQTPQGAINSSLPFQNIHPFTIGECPKYVRSTKLRMVTGLRNIPSIQSRGLFGAIAGFIEGGWAGMIDGWYGYHHQNEQGSGYAADQKSTQNAINGITNKVNSVIEKMNTQFTAVGKEFNKLEKRMENLNKKVDDGFLDIWTYNAELLVLLENERTLDFHDSNVKNLYEKVKNQLRNNAKEIGNGCFEFYHKCNNECMESVKNGTYDYPKYSEESKLNREKIDGVKLESMGVYQILAIYSTVASSLVLLVSLGAISFWMCSNGSLQCRICI

SEQ ID NO: 10098 - protein, 566 aa, synthetic construct; identical to SEQ ID NO: 1634
  REGION 1..566: note = hemagglutinin__InfluenzaA__AGO00289

SEQ ID NO: 10099 - protein, 565 aa, synthetic construct
  REGION 1..565: note = hemagglutinin__InfluenzaA__AGO00301
MKAKLLILLCALSATDADTICIGYHANNSTDTVDTVLEKNVTVTHSVNLLEDSHNGKLCRLKGKAPLQLGNCNIAGWVLGNPECESLLSNRSWSYIAETPNSENGTCYPGDFADYEELREQLSSVSSFERFEIFPKERSWPNHTTRGVTAACPHARKSSFYKNLVWLTEANGSYPNLSRSYVNNQEKEVLVLWGVHHPSNIEEQRALYRKDNAYVSVVSSNYNRRFTPEIAKRPKVRDQSGRMNYYWTLLEPGDTIIFEATGNLIAPWYAFALSRGPGSGIITSNAPLDECDTKCQTPQGAINSSLPFQNIHPVTIGECPKYVRSTKLRMVTGLRNIPSVQSRGLFGAIAGFIEGGWTGMMDGWYGYHHQNEQGSGYAADQKSTQNAINGITNKVNSVIEKMNTQFTAVGKEFNKLEKRMENLNKKVDDGFMDIWTYNAELLVLLENERTLDFHDSNVKNLYEKVKNQLRNNAKELGNGCFEFYHKCDNECMESVKNGTYDYPKYSEESKLNREKIDGVKLESMGVYRILAIYSTVASSLVLLVSLGAISFWMCSNGSLQCRICI

SEQ ID NO: 10100 - protein, 566 aa, synthetic construct
  REGION 1..566: note = hemagglutinin__InfluenzaA__AGO00313
MKTIIALSYIFCQVLAQNLPGNDNSTATLCLGHHAVPNGTLVKTITNDQIEVTNATELVQSSSTGRICDSPHRILDGKNCTLIDALLGDPHCDGFQNEKWDLFVERSKAFSNCYPYDVPDYASLRSLVASSGTLEFINEGFNWTGVTQNGGSYACKRGPDNSFFSRLNWLYKSESTYPVLNVTMPNNDNFDKLYIWGVHHPSTDKEQTNLYVQASGRVTVSTKRSQQTIIPNVGSRPWVRGLSSGISIYWTIVKPGDILLINSNGNLIAPRGYFKIRTGKSSIMRSDAPIGTCSSECITPNGSIPNDKPFQNVNKITYGACPKYVKQNTLKLATGMRNVPEKQTRGIFGAIAGFIENGWEGMIDGWYGFRHQNSEGTGQAADLKSTQAAIDQINGKLNRVIEKTNEKFHQIEKEFSEVEGRIQDLEKYVEDTKIDLWSYNAELLVALENQHTIDLTDSEMNKLFEKTRRQLRENAEDMGNGCFKIYHKCDNACIGSIRNGTYDHDVYRDEALNNRFQIKGVELKSGYKDWILWISFAISCFLLCVVLLGFIMWACQKGNIRCNICI

SEQ ID NO: 10101 - protein, 567 aa, synthetic construct; identical to SEQ ID NO: 9097
  REGION 1..567: note = hemagglutinin__InfluenzaA__AGO00325

SEQ ID NO: 10102 - protein, 565 aa, synthetic construct
  REGION 1..565: note = hemagglutinin__InfluenzaA__AGO00337
MKANLLVLLSALAAADADTICIGYHANNSTDTVDTVLEKNVTVTHSVNLLEDSHNGKLCRLKGIAPLQLGKCNIAGWLLGNPECDPLLPVRSWSYIVETPNSENGICYPGDFIDYEELREQLSSVSSFERFEIFPKESSWPNHNTNGVTAACSHEGKSSFYRNLLWLTEKEGSYPKLKNSYVNKKGKEVLVLWGIHHPPNSKEQQNLYQNENAYVSVVTSNYNRRFTPEIAERPKVRDQAGRMNYYWTLLKPGDTIIFEANGNLIAPMYAFALSRGFGSGIITSNASMHECNTKCQTPLGAINSSLPYQNVHPVTIGECPKYVRSAKLRMVTGLRNTPSIQSRGLFGAIAGFIEGGWTGMIDGWYGYHHQNEQGSGYAADQKSTQNAINGITNKVNTVIEKMNIQFTAVGKEFNKLEKRMENLNKKVDDGFLDIWTYNAELLVLLENERTLDFHDSNVKNLYEKVKSQLKNNAKEIGNGCFEFYHKCDNECMESVRNGTYDYPKYSEESKLNREKVDGVKLESMGIYQILAIYSTVASSLVLLVSLGAISFWMCSNGSLQCRICI

SEQ ID NO: 10103 - protein, 565 aa, synthetic construct; identical to SEQ ID NO: 3278
  REGION 1..565: note = hemagglutinin__InfluenzaA__AGO00349

SEQ ID NO: 10104 - protein, 565 aa, synthetic construct
  REGION 1..565: note = hemagglutinin__InfluenzaA__AGO00373
MKANLLVLLCALAAADADTICIGYHANNSTDTVDTVLEKNVTVTHSVNLLEDSHNGKLCRLKGIAPLQLGKCNIAGWLLGNPECDPLLPVRSWSYIVETPNSENGICYPGDFIDYEELREQLSSVSSFERFEIFPKESSWPDHNTNGVTAACSHEGKSSFYRNLLWLTEKESSYPKLKNSYVNKKGKEVLVLWGIHHPPNSKEQQNLYQNENAYVSVVTSNYNRRFTPEIAERPKVRDQAGRMNYYWTLLKPGDTIIFEANGNLIAPMYAFALSRGFGSGIITSNASMHECNTKCQTPLGAINSSLPYQNIHPVTIGECPKYVRSAKLRMVTGLRNIPSIQSRGLFGAIAGFIEGGWTGMIDGWYGYHHQNEQGSGYAADQKSTQNAINGITNKVNTVIEKMNIQFTAVGKEFNKLEKRMENLNKKVDDGFLDIWTYNAELLVLLENERTLDFHDSNMKNLYEKVKSQLKNNAKEIGNGCFEFYHKCDNECMESVRNGTYDYPKYSEESKLNREKVDGVKLESMGIYQILAIYSTVASSLVLLVSLGAISFWMCSNGSLQCRICI

SEQ ID NO: 10105 - protein, 565 aa, synthetic construct
  REGION 1..565: note = hemagglutinin__InfluenzaA__AGO00385
MKANLLVLLCALAAADADTICIGYHANNSTDTVDTVLEKNVTVTHSVNLLEDSHNGKLCRLKGIAPLQLGKCNIAGWLLGNPECDPLLPVGSWSYIVETPNSENGICYPGDFIDYEELREQLSSVSSFERFEIFPKESSWPDHNTNGVTAACSHEGKSSFYRNLLWLTEKESSYPKLKNSYVNKKGKEVLVLWGIHHPPNSKEQQNLYQNENAYVSVVTSNYNRRFTPEIAERPKVRDQAGRMNYYWTLLKPGDTIIFEANGNLIAPMYAFALSRGFGSGIITSNASMHECNTKCQTPLGAINSSLPYQNIHPVTIGECPKYVRSAKLRMVTGLRNIPSIQSRGLFGAIAGFIEGGWTGMIDGWYGYHHQNEQGSGYAADQKSTQNAINGITNKVNTVIEKMNIQFTAVGKEFNKLEKRMENLNKKVDDGFLDIWTYNAELLVLLENERTLDFHDSNVKNLYEKVKSQLKNNAKEIGNGCFEFYHKCDNECMESVRNGTYDYPKYSEESKLNREKVDGVKLESMGIYQILAIYSTVASSLVLLVSLGAISFWMCSNGSLQCRICI

SEQ ID NO: 10106 - protein, 565 aa, synthetic construct
  REGION 1..565: note = hemagglutinin__InfluenzaA__AGO00397
MKANLLVLLCALAAADADTICIGYHANNSTDTVDTVLEKNVTVTHSVNLLEDSHNGKLCRLKGIAPLQLGKCNIAGWLLGNPECDPLLPVGSWSYIVETPNSENGICYPGDFIDYEELREQLSSVSSFERFEIFPKESSWPDHNTNGVTAACSHEGKSSFYRNLLWLTEKESSYPKLKNSYVNKKGKEVLVLWGIHHPPNSKEQQNLYQNENAYVSVVTSNYNRRFTPEIAERPKVKDQAGRMNYYWTLLKPGDTIIFEANGNLIAPMYAFALSRGFGSGIITSNASMHECNTKCQTPLGAINSSLPYQNIHPVTIGECPKYVRSAKLRMVTGLRNIPSIQSRGLFGAIAGFIEGGWTGMIDGWYGYHHQNEQGSGYAADQKSTQNAINGITNKVNTVIEKMNIQFTAVGKEFNKLEKRMENLNKKVDDGFLDIWTYNAELLVLLENERTLDFHDSNVKNLYEKVKSQLKNNAKEIGNGCFEFYHKCDNECMESVRNGTYDYPKYSEESKLNREKVDGVKLESMGIYQILAIYSTVASSLVLLVSLGAISFWMCSNGSLQCRICI

SEQ ID NO: 10107 - protein, 565 aa, synthetic construct
  REGION 1..565: note = hemagglutinin__InfluenzaA__AGO00409
MKANLLVLLCALAAADADTICIGYHANNSTDTVDTVLEKNVTVTHSVNLLEDSHNGKLCRLKGIAPLQLGKCNIAGWLLGNPECDPLLPVGSWSYIVETPNSENGICYPGDFIDYEELREQLSSVSSFERFEIFPKESSWPDHNTNGVTAACSHEGKNSFYRNLLWLTEKKSSYPELKNSYVNKKGKEVLVLWGIHHPPNSKEQQNLYQNENAYVSVVTSNYNRRFTPEIAERPKVKDQAGRMNYYWTLLKPGDTIIFEANGNLIAPMYAFALSRGFGSGIITSNASMHECNTKCQTPLGAINSSLPYQNIHPVTIGECPKYVRSAKLRMVTGLRNIPSIQSRGLFGAIAGFIEGGWTGMIDGWYGYHHQNEQGSGYAADQKSTQNAINGITNKVNTVIEKMNIQFTAVGKEFNKLEKRMENLNKKVDDGFLDIWTYNAELLVLLENERTLDFHDSNVKNLYEKVKSQLKNNAKEIGNGCFEFYHKCDNECMESVRNGTYDYPKYSEESKLNREKVDGVKLESMGIYQILAIYSTVASSLVLLVSLGAISFWMCSNGSLQCRICI

SEQ ID NO: 10108 - protein, 565 aa, synthetic construct
  REGION 1..565: note = hemagglutinin__InfluenzaA__AGO00421
MKANLLVLLCALAAADADTICIGYHANNSTDTVDTVLEKNVTVTHSVNLLEDSHNGKLCKLKGIAPLQLGKCNIAGWLLGNPGCDPLLPVGSWSYIVETPNSENGICYPGDFIDYEELREQLSSVSSFERFKIFPKESSWPDHNTTGVTAACSHEGKNSFYRNLLWLTKKESSYPELKNSYVNKKRKEVLVLWGIHHPPNSKEQQNLYQNENAYVSVVTSNYNRRFTPEIAERPKVKGQAGRMNYYWTLLKPGDTIIFEANGNLIAPMYAFALSRGFGSGIITSNASMHECNTKCQTPLGAINSSLPYQNIHPVTIGECPKYVRSAKLRMVTGLRNIPSIQSRGLFGAIAGFIEGGWTGMIDGWYGYHHQNEQGSGYAADQKSTQNAINGITNKVNTVIEKMNIQFTAVGKEFNKLEKRMENLNKKVDDGFLDIWTYNAELLVLLENERTLDFHDSNVKNLYEKVKSQLKNNAKEIGNGCFEFYHKCDNECMESVRNGTYDYPKYSEESKLNREKVDGVKLESMGIYQILAIYSTVASSLVLLVSLGAISFWMCSNGSLQCRICI

SEQ ID NO: 10109 - protein, 565 aa, synthetic construct
  REGION 1..565: note = hemagglutinin__InfluenzaA__AGO00433
MKANLLVLLCALAAADADTICIGYHANNSTDTVDTVLEKNVTVTHSVNLLEDSHNGKLCRLKGIAPLQLGKCNIAGWLLGNPECDPLLPVRSWSYIVETPNSENGICYPGDFIDYEELREQLSSVSSFERFEIFPKESSWPNHNTNGVTAACSHEGKSSFYRNLLWLTEKEGSYPKLENSYVNKKGKEVLVLWGIHHPPNSKEQQNLYQNENAYVSVVTSNYNRRFTPEIAERPKVRDQAGRMNYYWTLLKPGDTIIFEANGNLIAPMYAFALSRGFGSGIITSNASMHECNTKCQTPLGAINSSLPYQNIHPVTIGECPKYVRSAKLRMVTGLRNIPSIQSRGLFGAIAGFIEGGWTGMIDGWYGYHHQNEQGSGYAADQKSTQNAINGITNKVNTVIEKMNIQFTAVGKEFNKLEKRMENLNKKVDDGFLDIWTYNAELLVLLENERTLDFHDSNVKNLYEKVKSQLKNNAKEIGNGCFEFYHKCDNECMESVRNGTYDYPKYSEESKLNREKVDGVKLESMGIYQILAIYSTVASSLVLLVSLGAISFWMCSNGSLQCRICI

SEQ ID NO: 10110 - protein, 565 aa, synthetic construct
  REGION 1..565: note = hemagglutinin__InfluenzaA__AGO00445
MKANLLVLLCALAAADADTICIGYHANNSTDTVDTVLEKNVTVTHSVNLLEDSHNGKLCRLKGIAPLQLGKCNIAGWLLGNPECDPLLPVRSWSYIVETPNSENGICYPGDFIDYEELREQLSSVSSFERFEIFPKESSWPNHNTNGVTAACSHEGKSSFYRNLLWLTEKEGSYPTLKNSYVNKKGKEVLVLWGIHHPPNSKEQQNLYQNENAYVSVVTSNYNRRFTPEIAERPKVRDQAGRMNYYWTLLKPGDTIIFEANGNLIAPMYAFALSRGFGSGIITSNASMHECNTKCQTPLGAINSSLPYQNIHPVTIGECPKYVRSAKLRMVTGLRNIPSIQSRGLFGAIAGFIEGGWTGMIDGWYGYHHQNEQGSGYAADQKSTQNAINGITNKVNTVIEKMNIQFTAVGKEFNKLEKRMENLNKKVDDGFLDIWTYNAELLVLLENERTLDFHDSNVKNLYEKVKSQLKNNAKEIGNGCFEFYHKCDNECMESVRNGTYDYPKYSEESKLNREKVDGVKLESMGIYQILAIYSTVASSLVLLVSLGAISFWMCSNGSLQCRICI

SEQ ID NO: 10111 - protein, 566 aa, synthetic construct
  REGION 1..566: note = hemagglutinin__InfluenzaA__AGO02696
MKAILVVMLYTFATANADTLCIGYHANNSTDTVDTVLEKNVTVTHSVNLLEDKHNGKLCKLRGVAPLHLGKCNIAGWILGNPECESLSTASSWSYIVETSSSDNGTCYPGDFIDYEELREQLSSVSSFERFEIFPKTSSWPNHDSNKGVTAACPHAGAKGFYKNLIWLVKKGNSYPKLSISYINDKGKEVLVLWGIHHPSTTADQQSLYQNADTYVFVGTSRYSKKFKPEIAIRPKVRDQEGRMNYYWTLVEPGDKITFEATGNLVVPRYAFAMERNAGSGIIISDTPVHDCNTTCQTPKGAINTSLPFQNIHPITIGKCPKYVKSTKLRLATGLRNVPSIQSRGLFGAIAGFIEGGWTGMVDGWYGYHHQNEQGSGYAADLKSTQNAIDKITNKVNSVIEKMNTQFTAVGKEFNHLEKRIENLNKKVDDGFLDIWTYNAELLVLLENERTLDYHDSNVKNLYEKVRNQLKNNAKEIGNGCFEFYHKCDNTCMESVKNGTYDYPKYSEEAKLNREEIDGVKLESTRIYQILAIYSTAASSLVLVVSLGAISFWMCSNGSLQCRICI

SEQ ID NO: 10112 - protein, 566 aa, synthetic construct; identical to SEQ ID NO: 10040
  REGION 1..566: note = hemagglutinin__InfluenzaA__AGO02697

SEQ ID NO: 10113 - protein, 566 aa, synthetic construct; identical to SEQ ID NO: 9858
  REGION 1..566: note = hemagglutinin__InfluenzaA__AGO02698

SEQ ID NO: 10114 - protein, 566 aa, synthetic construct; identical to SEQ ID NO: 9858
  REGION 1..566: note = hemagglutinin__InfluenzaA__AGO02699

SEQ ID NO: 10115 - protein, 566 aa, synthetic construct
  REGION 1..566: note = hemagglutinin__InfluenzaA__AGO02700
MKAILVVLLYTFATANADTLCIGYHANNSTDTVDTVLEKNVTVTHSVNLLEDKHNGKLCKLRGVAPLHLGKCNIAGWILGNPECESLSTASSWSYIVETSSSDNGTCYPGDFINYEELREQLSSVSSFERFEIFPKTSSWPNHDSNKGVTAACPQAGAKSFYKNLIWLVKKGNSYPKLSKSYINDKGKEVLVLWGIHHPSTSADQQSLYQNADAYVFVGTSKYSKKFKPEIAVRPKVRDQEGRMNYYWTLVEPGDKITFEATGNLLVPRYAFAMERNAGSGIIISDTPVHDCNTTCQTPKGAINTSLPFQNIHPITIGKCPKYVKSTKLRLATGLRNVPSIQSRGLFGAIAGFIEGGWTGMVDGWYGYHHQNAQGSGYAADLKSTQNAIDKITNKVNSVIEKMNTQFTAVGKEFNHLEKRIENLNKKVDDGFLDIWTYNAELLVLLENERTLDYHDSNVKNLYEKVRSQLKNNAKEIGNGCFEFYHKCDNTCMESVKNGTYDYPRYSEEAKLNREEIDGIKLESTRIYQILAIYSTVASSLVLIVSLGAISFWMCSNGSLQCRICI

SEQ ID NO: 10116 - protein, 566 aa, synthetic construct
  REGION 1..566: note = hemagglutinin__InfluenzaA__AGO02701
MKAILVVLLYTFATANADTLCIGYHANNSTDTVDTVLEKNVTVTHSVNLLEDKHNGKLCKLRGVAPLHLGKCNIAGWILGNPECESLSTASSWSYIVETSSSDNGTCYPGDFINYEELREQLSSVSHFERFEIFPKTSSWPNHDSNKGVTAACPHAGAKSFYKNLIWLVKKGNSYPKLSKSYINDKGKEVLVLWGIHHPSTSADQQSLYQNADAYVFVGTSKYSKKFKPEIAVRPKVRDQEGRMNYYWTLVEPGDKITFEATGNLLVPRYAFAMERNAGSGIIISDTPVHDCNTTCQTPKGAINTSLPFQNIHPITIGKCPKYVKSTKLRLATGLRNVPSIQSRGLFGAIAGFIEGGWTGMVDGWYGYHHQNGQGSGYAADLKSTQNAIDKITNKVNSVIEKMNTQFTAVGKEFNHLEKRIENLNKKVDDGFLDIWTYNAELLVLLENERTLDYHDSNVKNLYEKVRSQLKNNAKEIGNGCFEFYHKCDNTCMESVKNGTYDYPKYSEEAKLNREEIDGVKLESTRIYQILAIYSTVASSLVLVVSLGAISFWMCSNGSLQCRICI

SEQ ID NO: 10117 - protein, 560 aa, synthetic construct; identical to SEQ ID NO: 9988
  REGION 1..560: note = hemagglutinin__InfluenzaA__AGO51374

SEQ ID NO: 10118 - protein, 566 aa, synthetic construct
  REGION 1..566: note = hemagglutinin__InfluenzaA__AGO86686
MKTIIALSYILCLAFAQKLPGNDNSTATLCLGHHAVPNGTLVKTITNDQIEVTNATELVQSSSTGRICDSPHQILDGENCTLIDALLGDPHCDGFQNKEWDLFVERSKAYSNCYPYDVPDYASLRSLVASSGTLEFNNESFNWTGVAQNGTSSACKRRSIKSFFSRLNWLHQLENRYPALNVTMPNNDKFDKLYIWGVHHPSTDSDQISVYAQASGRVTVSTKRSQQTVIPNIGSRPWVRGISSRISIYWTIVKPGDILLINSTGNLIAPRGYFKIRSGKSSIMRSDAPIGKCNSECITPNGSIPNDKPFQNVNRITYGACPRYVKQNTLKLATGMRNVPEKQTRGIFGAIAGFIENGWEGMMDGWYGFRHQNSEGTGQAADLKSTQAAINQINGKLNKLIEKTNEKFHQIEKEFSEVEGRIQDLEKYVEDTKIDLWSYNAELLVALENQHTIDLTDSEMNKLFERTRKQLRENAEDMGNGCFKTYHKCDNACIGSIRNGTYDHDVYRDEALNNRFQIKGVELKSGYKDWILWISFAISCFLLCVVLLGFIMWACQKGNIRCNICI

SEQ ID NO: 10119 - protein, 566 aa, synthetic construct; identical to SEQ ID NO: 10040
  REGION 1..566: note = hemagglutinin__InfluenzaA__AGQ16240

SEQ ID NO: 10120 - protein, 566 aa, synthetic construct; identical to SEQ ID NO: 10040
  REGION 1..566: note = hemagglutinin__InfluenzaA__AGQ16241

SEQ ID NO: 10121 - protein, 566 aa, synthetic construct
  REGION 1..566: note = hemagglutinin__InfluenzaA__AGQ16242
MKAILVVLLYTFATANADTLCIGYHANNSTDTVDTVLEKNVTVTHSVNLLEDKHNGKLCKLRGVAPLHLGKCNIAGWILGNPECESLSTASSWSYIVETSSSDNGTCYPGDFINYEELREQLSSVSSFERFEIFPKTSSWPNHDSNKGVTAACPHAGAKSFYKNLIWLVKKGNSYPKLSTSYINDKGKEILVLWGIHHPSTTADQQSLYQNADAYVFVGTSRYSKKFKPEIAIRPKVRDQEGRMNYYWTLVEPGDKITFEATGNLVVPRYAFAMERNAGSGIIISDTPVHDCNTTCQTPEGAINTSLPFQNIHPITIGKCPKYVKSTKLRLATGLRNVPSIQSRGLFGAIAGFIEGGWTGMVDGWYGYHHQNEQGSGYAADLKSTQNAIDKITNKVNSVIEKMNTQFTAVGKEFNHLEKRIENLNKKVDDGFLDIWTYNAELLVLLENERTLDYHDSNVKNLYEKVRNQLKNNAKEIGNGCFEFYHKCDNTCMESVKNGTYDYPKYSEEAKLNREKIDGVKLESTRIYQILAIYSTVASSLVLVVSLGAISFWMCSNGSLQCRICI

SEQ ID NO: 10122 - protein, 566 aa, synthetic construct; identical to SEQ ID NO: 10060
  REGION 1..566: note = hemagglutinin__InfluenzaA__AGQ16243

SEQ ID NO: 10123 - protein, 566 aa, synthetic construct
  REGION 1..566: note = hemagglutinin__InfluenzaA__AGQ16245
MKAILVVLLYTFATANADTLCIGYHANNSTDTVDTVLEKNVTVTHSVNLLEDKHNGKLCKLRGVAPLHLGKCNIAGWILGNPECESLSTASSWSYIVETSSSDNGTCYPGDFINYEELREQLSSVSSFERFEIFPKTSSWPNHDSNKGVTAACPHAGAKSFYKNLIWLVKKGNSYPKLSKSYINDKGKEVLVLWGIHHPSTTADQQSLYQNADAYVFVGTSRYSKKFKPEIAIRPKVRDQEGRMNYYWTLIEPGDKITFEATGNLVVPRYAFAMERNAGSGIIISDTPVHDCNTTCQTPEGAINTSLPFQNIHPITIGKCPKYVKSTKLRLATGLRNVPSIQSRGLFGAIAGFIEGGWTGMVDGWYGYHHQNEQGSGYAADLKSTQNAIDKITNKVNSVIEKMNTQFTAVGKEFNHLEKRIENLNKKVDDGFLDIWTYNAELLVLLENERTLDYHDSNVKNLYEKVRNQLKNNAKEIGNGCFEFYHKCDNTCMESVKNGTYDYPKYSEEAKLNREKIDGVKLESTRIYQILAIYSTVASSLVLVVSLGAISFWMCSNGSLQCRICI

SEQ ID NO: 10124 - protein, 566 aa, synthetic construct; identical to SEQ ID NO: 10060
  REGION 1..566: note = hemagglutinin__InfluenzaA__AGQ16247

SEQ ID NO: 10125 - protein, 566 aa, synthetic construct
  REGION 1..566: note = hemagglutinin__InfluenzaA__AGQ16248
MQAILVVLLYTFATATADTLCIGYHANNSTDTVDTVLEKNVTVTHSVNLLEDKHNGKLCKLRGVAPLHLGKCNIAGWILGNPECESLSTASSWSYIVETSSSDNGTCYPGDFINYEELREQLSSVSSFERFEIFPKTSSWPNHDSNKGVTAACPHAGAKSFYKNLIWLVKKGNSYPKLSQSYINDKGKEVLVLWGIHHPSTTADQQSLYQNADAYVFVGTSRYSKKFKPEIAIRPKVRDQEGRMNYYWTLVEPGDKITFEATGNLVVPRYAFTMERNAGSGIIISDTPIHDCNTTCQTPEGAINTSLPFQNIHPITIGKCPKYVKSTKLRLATGLRNVPSIQSRGLFGAIAGFIEGGWTGMVDGWYGYHHQNEQGSGYAADLKSTQNAIDKITNKVNSVIEKMNTQFTAVGKEFNHLEKRIENLNKKVDDGFLDIWTYNAELLVLLENERTLDYHDSNVKNLYEKVRNQLKNNAKEIGNGCFEFYHKCDNTCMESVKNGTYDYPKYSEEAKLNREKIDGVKLESTRIYQILAIYSTVASSLVLVVSLGAISFWMCSNGSLQCRICI

SEQ ID NO: 10126 - protein, 566 aa, synthetic construct; identical to SEQ ID NO: 9858
  REGION 1..566: note = hemagglutinin__InfluenzaA__AGQ16329

SEQ ID NO: 10127 - protein, 566 aa, synthetic construct; identical to SEQ ID NO: 9883
  REGION 1..566: note = hemagglutinin__InfluenzaA__AGQ16331

SEQ ID NO: 10128 - protein, 566 aa, synthetic construct; identical to SEQ ID NO: 9858
  REGION 1..566: note = hemagglutinin__InfluenzaA__AGQ16332

SEQ ID NO: 10129 - protein, 566 aa, synthetic construct; identical to SEQ ID NO: 9858
  REGION 1..566: note = hemagglutinin__InfluenzaA__AGQ16333

SEQ ID NO: 10130 - protein, 566 aa, synthetic construct
  REGION 1..566: note = hemagglutinin__InfluenzaA__AGQ16335
MKTIIALSYILCLVFAQKLPGNDNSTATLCLGHHAVPNGTIVKTITNDRIEVTNATELVQNSSIGEICDSPHQVLDGENCTLIDALLGDPQCDGFQNKKWDLFVERSKAYSNCYPYDVPDYASLRSLVASSGTLEFNNESFNWTGVTQNGTSSACIRRSNSSFFSRLNWLTHLNFKYPALNVTMPNNEQFDKLYIWGVHHPGTDKDQIFLYAQSSGRITVSTKRSQQAVIPNIGSRPRIRNIPSRISIYWTIVKPGDILLINSTGNLIAPRGYFKIRSGKSSIMRSDAPIGKCKSECITPNGSIPNDKPFQNVNRITYGACPRYVKQNTLKLATGMRNVPEKQTRGIFGAIAGFIENGWEGMVDGWYGFRHQNSEGRGQAADLKSTQAAIDQINGKLNRLIGKTNEKFHQIEKEFSEVEGRIQDLEKYVEDTKIDLWSYNAELLVALENQHTIDLTDSEMNKLFEKTKKQLRENAEDMGNGCFKIYHKCDNACIGSIRNGTYDHDVYRDEALNNRFQIKGVELKSGYKDWILWISFAISCFLLCVALLGFIMWACQKGNIRCNICI

SEQ ID NO: 10131 - protein, 566 aa, synthetic construct
  REGION 1..566: note = hemagglutinin__InfluenzaA__AGQ16336
MKTIIALSYILCLVFAQKLPGNDNSTATLCLGHHAVPNGTIVKTITNDRIEVTNATELVQNSSIGEICDSPHQILDGENCTLIDALLGDPQCDGFQNKKWDLFVERSKAYSNCYPYDVPDYASLRSLVASSGTLEFNNESFNWTGVTQNGTSSACIRRSNRSFFSRLNWLTHLNFKYPALNVTMPNNEQFDKLYIWGVHHPGTDKDQIFLYAQSSGRITVSTKRSQQAVIPNIGSRPRIRNIPSRISIYWTIVKPGDILLINSTGNLIAPRGYFKIRSGKSSIMRSDAPIGKCKSECITPNGSIPNDKPFQNVNRITYGACPRYVKQSTLKLATGMRNVPEKQTRGIFGAIAGFIENGWEGMVDGWYGFRHQNSEGRGQAADLKSTQAAIDQINGKLNRLIGKTNEKFHQIEKEFSEVEGRIQDLEKYVEDTKIDLWSYNAELLVALENQHTIDLTDSEMNKLFEKTKKQLRENAEDMGNGCFKIYHKCDNACIGSIRNGTYDHDVYRDEALNNRFQIKGVELKSGYKDWILWISFAISCFLLCVALLGFIMWACQKGNIRCNICI

SEQ ID NO: 10132 - protein, 566 aa, synthetic construct; identical to SEQ ID NO: 10130
  REGION 1..566: note = hemagglutinin__InfluenzaA__AGQ16337

SEQ ID NO: 10133 - protein, 566 aa, synthetic construct; identical to SEQ ID NO: 9868
  REGION 1..566: note = hemagglutinin__InfluenzaA__AGQ16338

SEQ ID NO: 10134 - protein, 566 aa, synthetic construct
  REGION 1..566: note = hemagglutinin__InfluenzaA__AGQ16339
MKTIIALSYILCLVFAQKLPGNDNSTATLCLGHHAVPNGTIVKTITNDRIEVTNATELVQNSSIGEICDSPHQILDGENCTLIDALLGDPQCDGFQNKKWDLFVERSKAYSNCYPYDVPDYASLRSLVASSGTLEFNNESFNWAGVTQNGTSSACIRGSNSSFFSRLNWLTHLNFKYPALNVTMPNNEQFDKLYIWGVHHPGTDKDQIFLYAQSSGRITVSTKRSQQAVIPNIGSRPRIRNIPSRISIYWTIVKPGDILLINSTGNLIAPRGYFKIRSGKSSIMRSDAPIGKCKSECITPNGSIPNDKPFQNVNRITYGACPRYVKQSTLKLATGMRNVPEKQTRGIFGAIAGFIENGWEGMMDGWYGFRHQNSEGRGQAADLKSTQAAIDQINGKLNRLIGKTNEKFHQIEKEFSEVEGRIQDLEKYVEDTKIDLWSYNAELLVALENQHTIDLTDSEMNKLFEKTKKQLRENAEDMGNGCFKIYHKCDNACIGSIRNGTYDHDVYRDEALNNRFQIKGVELKSGYKNWILWISFAISCFLLCVALLGFIMWACQKGNIRCNICI

SEQ ID NO: 10135 - protein, 566 aa, synthetic construct; identical to SEQ ID NO: 9994
  REGION 1..566: note = hemagglutinin__InfluenzaA__AGQ16340

SEQ ID NO: 10136 - protein, 566 aa, synthetic construct; identical to SEQ ID NO: 9858
  REGION 1..566: note = hemagglutinin__InfluenzaA__AGQ16341

SEQ ID NO: 10137 - protein, 566 aa, synthetic construct; identical to SEQ ID NO: 9868
  REGION 1..566: note = hemagglutinin__InfluenzaA__AGQ16342

SEQ ID NO: 10138 - protein, 566 aa, synthetic construct
  REGION 1..566: note = hemagglutinin__InfluenzaA__AGQ16343
MKTIIALSYILCLVFAQKLPGNDNSTATLCLGHHAVPNGTIVKTITNDRIEVTNATELVQNSSIGEICDSPHQILDGENCTLIDALLGDPQCDGFQNKKWDLFVERSKAYSNCYPYDVPDYASLRSLVASSGTLEFNNESFNWAGVTQNGTSSACIRGSNSSFFSRLNWLTHLNFKYPALNVTMPNNEQFDKLYIWGVHHPGTDKDQIFLYAQSSGRITVSTKRSQQAVIPNIGSRPRIRDIPSRISIYWTIVKPGDILLINSTGNLIAPRGYFKIRSGKSSIMRSDAPIGKCKSECITPNGSIPNDKPFQNVNRITYGACPRYVKQSTLKLATGMRNVPEKQTRGIFGAIAGFIENGWEGMVDGWYGFRHQNSEGRGQAADLKSTQAAIDQINGKLNRLIGKTNEKFHQIEKEFSEVEGRIQDLEKYVEDTKIDLWSYNAELLVALENQHTIDLTDSEMNKLFEKTKKQLRENAEDMGNGCFKIYHKCDNACIGSIRNGTYDHDVYRDEALNNRFQIKGVELKSGYKDWILWISFAISCFLLCVALLGFIMWACQKGNIRCNICI

SEQ ID NO: 10139 - protein, 566 aa, synthetic construct; identical to SEQ ID NO: 9868
  REGION 1..566: note = hemagglutinin__InfluenzaA__AGQ16344

SEQ ID NO: 10140 - protein, 566 aa, synthetic construct; identical to SEQ ID NO: 9858
  REGION 1..566: note = hemagglutinin__InfluenzaA__AGQ16345

SEQ ID NO: 10141 - protein, 566 aa, synthetic construct
  REGION 1..566: note = hemagglutinin__InfluenzaA__AGQ16346
MKTIIALSYILCLVFAQKLPGNDNSTATLCLGHHAVPNGTIVKTITNDRIEVTNATELVQNSSIGEICDSPHQILDGENCTLIDALLGDPQCDGFQNKKWDLFVERSKAYSNCYPYDVPDYASLRSLVASSGTLEFNNESFNWTGVTQNGTSSACIRRSNSSFFSRLNWLTHLNFKYPALNVTMPNNEQFDKLYIWGVHHPGTDKDQIFLYAQSSGRITVSTKRSQQAVIPNIGSRPRIRNIPSRISIYWTIVKPGDILLINSTGNLIAPRGYFKIRSGKSSIMRSDAPIGKCRSECITPNGSIPNDKPFQNVNRITYGACPRYVKQSTLKLATGMRNVPEKQTRGIFGAIAGFIENGWEGMVDGWYGFRHQNSEGRGQAADLKSTQAAIDQINGKLNRLIGKTNEKFHQIEKEFSEVEGRIQDLEKYVEDTKIDLWSYNAELLVALENQHTIDLTDSEMNKLFEKTKKQLRENAEDMGNGCFKIYHKCDNACIGSIRNGTYDHNVYRDEALNNRFQIKGVELKSGYKDWILWISFAISCFLLCVALLGFIMWACQKGNIRCNICI

SEQ ID NO: 10142 - protein, 566 aa, synthetic construct; identical to SEQ ID NO: 9858
  REGION 1..566: note = hemagglutinin__InfluenzaA__AGQ16347

SEQ ID NO: 10143 - protein, 566 aa, synthetic construct; identical to SEQ ID NO: 9994
  REGION 1..566: note = hemagglutinin__InfluenzaA__AGQ16348

SEQ ID NO: 10144 - protein, 566 aa, synthetic construct; identical to SEQ ID NO: 9858
  REGION 1..566: note = hemagglutinin__InfluenzaA__AGQ16349

SEQ ID NO: 10145 - protein, 566 aa, synthetic construct
  REGION 1..566: note = hemagglutinin__InfluenzaA__AGQ16350
MKTIIALSYILCLVFAQKLPGNDNSTATLCLGHHAVPNGTIVKTITNDRIEVTNATELVQNSSIGEICDSPHQILDGENCTLIDALLGDPQCDGFQNKKWDLFVERSKAYSNCYPYDVPDYASLRSLVASSGTLEFNNESFNWTGVTQNGTSSACIRRSNSSFFSRLNWLTHLNFKYPALNVTMPNNEQFDKLYIWGVHHPGTDKDQIFLYAQSSGRITVSTKRSQQAVIPNIGSRPRIRNIPSRISIYWTIVKPGDILLINSTGNLIAPRGYFKIRSGKSSIMRSDAPIGKCKSECITPNGSIPNDKPFQNVNRITYGACPRYVKQSTLKLATGMRNVPEKQTRGIFGAIAGFIENGWEGMVDGWYGFRHQNSEGRGQAADLKSTQAAIDQINGKLNRLIGKTNEKFHQIEKEFSEVEGRIQDLEKYVEDTKIDLWSYNAELLVALENQHTIDLTDSEMNKLFEKTKKQLRENAEDMGNGCFKIYHKCDNACIGSIRNGTYDHNVYRDEALNNRFQIKGVELKSGYKDWILWISFAISCFLLCVALLGFIMWTCQKGNIRCNICI

SEQ ID NO: 10146 - protein, 566 aa, synthetic construct
  REGION 1..566: note = hemagglutinin__InfluenzaA__AGQ47719
MKAILLVLLCTFTATNADTLCIGYHANNSTDTVDTVLEKNVTVTHSVNLLEDRHNGKLCKLGGIAPLHLGKCNIAGWLLGNPECELLFTVSSWSYIVETSNSDNGTCYPGDFINYEELREQLSSVSSFERFEIFPKTSSWPDHETNRGVTAACPYAGANSFYRNLIWLVKKGNSYPKLSKSYVNNKGKEVLVLWGIHHPPTSTDQQSLYQNADAYVFVGSSKYNRKFKPEIAARPKVRGQAGRMNYYWTLIEPGDTITFEATGNLVVPRYAFAMNRGSGSGIIISDAPIHDCNTKCQTPKGAINTSLPFQNIHPVTIGECPKYVKSTKLRMATGLRNIPSIQSRGLFGAIAGFIEGGWTGMIDGWYGYHHQNGQGSGYAADQKSTQNAIDGITNKVNSVIEKMNTQFTAVGKEFNHLEKRIENLNKKVDDGFLDVWTYNAELLVLLENERTLDFHDSNVKNLYEKVRSQLRNNAKEIGNGCFEFYHKCDDTCMESVKNGTYDYPKYSEESKLNREEIDGVKLESTRIYQILAIYSTAASSLVLLVSLGAISFWMCSNGSLQCRICI

SEQ ID NO: 10147 - protein, 565 aa, synthetic construct; identical to SEQ ID NO: 2115
  REGION 1..565: note = hemagglutinin__InfluenzaA__AGQ47728

SEQ ID NO: 10148 - protein, 566 aa, synthetic construct
  REGION 1..566: note = hemagglutinin__InfluenzaA__AGQ47740
MKARLLVLLCALAATDADTICIGYHANNSTDTVDTLLEKNVTVTHSVNLLEDSHNGKLCKLKGIAPLQLGKCNIAGWLLGNPECDSLLPARSWSYIVETPNSENGACYPGDFIDYEELREQLSSVSSLERFEIFPKESSWPNHNTIKGVTASCSHRGQSSFYRNLLWLTKKGDSYPKLNNSYVNNKGKEVLVLWGVHHPSSSNEQQSLYRNENAYVSVVSSNYNRRFTPEIAARPKVRDQTGRMNYYWTLLEPGDTIMFEATGNLIAPWYAFALSRGFGSGIITSNASMHECNTKCQTPQGAINSSLPFQNIHPVTIGECPKYVRSTKLRMVTGLRNIPSIQSRGLFGAIAGFIEGGWTGMIDGWYGYHHQNEQGSGYAADQKSTQNAINGITNKVNSVIEKMNTQFTAVGKEFNNLEKRMENLNKKVDDGFLDIWTYNAELLVLLENERTLDFHDLNVKNLYEKVKSQLKNNAKEIGNGCFEFYHKCDNECMESVRNGTYDYPKYSEESKLNREKIDGVKLESMGVYQILAIYSTVASSLVLLVSLGAISFWMCSNGSLQCRICI

SEQ ID NO: 10149 - protein, 566 aa, synthetic construct
  REGION 1..566: note = hemagglutinin__InfluenzaA__AGQ47752
MKAKLLILLCALSATDADTICIGYHANNSTDTVDTVLEKNVTVTHSVNLLEDSHNGKLCRLKGKAPLQLGKCNIAGWVLGNPECESLLSNRSWSYIAETPNSENGICYPGDFADYEELREQLSSVSSFERFEIFPKERSWPKHNTIRGVTAACSHAGKSSFYKNLVWLTEANGSYPALSTSYVNNQEKEVLVLWGVHHPSNIEEQRTLYRKDNAYVSVVSSNYNRRFTPEIAKRPKVRDQPGRMNYYWTLLEPGDTIIFEATGNLIAPWYAFALSRGPGSGIITSNAPMDECDTKCQTPQGAINSSLPFQNIHPVTIGECPKYVRSTKLRMVTGLRNIPSIQSRGLFGAIAGFIEGGWTGMMDGWYGYHHQNEQGSGYAADQKSTQNAINGITNKVNSVIEKMNTQFTAVGKEFNKLEKRMENLNKKVDDGFLDIWTYNAELLVLLENERTLDFHDSNVKNLYEKVKNQLRNNAKELGNGCFEFYHKCDNECMESVKNGTYDYPKYSEESKLNREKIDGVKLESMGVYRILAIYSTVASSLVLLVSLGAISFWMCSNGSLQCRICI

SEQ ID NO: 10150 - protein, 566 aa, synthetic construct
  REGION 1..566: note = hemagglutinin__InfluenzaA__AGQ47764
MKAKLLILLCALTATDADTICIGYHANNSTDTVDTVLEKNVTVTHSVNLLEDSHNGKLCRLKGIAPLQLGKCNIAGWILGNPECESLLSKRSWSYIAETPNSENGACYPGDFADYEELREQLSSVSSFERFEIFPKERSWPKHNITRGVTAACSHAGKSSFYKNLLWLTETDGSYPKLSKSYVNNKEKEVLVLWGVHHPSNIEDQKTLYRKENAYVSVVSSNYNRRFTPEIAERPKVRGQAGRINYYWTLLEPGDTIIFEANGNLIAPWYAFALSRDFGSGIITSNASMDECDTKCQTPQGAINSSLPFQNIHPVTIGECPKYVKSTKLRMVTGLRNIPSIQSRGLFGAIAGFIEGGWTGMIDGWYGYHHQNEQGSGYAADQKSTQNAINGITNKVNSVIEKMNTQFTAVGKEFNKLEKRMENLNKKVDDGFLDIWTYNAELLVLLENERTLDFHDSNVKNLYEKVKNQLRNNAKEIGNGCFEFYHKCNNECMESVKNGTYDYPKYSEESKLNREKIDGVKLESMGVYQILAIYSTVASSLVLLVSLGAISFWMCSNGSLQCRICI

SEQ ID NO: 10151 - protein, 566 aa, synthetic construct
  REGION 1..566: note = hemagglutinin__InfluenzaA__AGQ47776
MKAKLLILLCALSATDADTICIGYHANNSTDTVDTVLEKNVTVTHSVNLLEDSHNGKLCRLKGIAPLQLGKCNIAGWILGNPECESLLSKRSWSYIAETPNSENGTCYPGDFADYEELREQLSSVSSFERFEIFPKERSWPKHNINIGVTAACSHAGKSSFYKNLLWLTEKDGSYPNLNKSYVNKKEKEVLVLWGVHHPSNIEDQKTLYRKENAYVSVVSSNYNRRFTPEIAERPKVRGQAGRMNYYWTLLEPGDTIIFEANGNLIAPWYAFALSRGLGSGIITSNASMDECDTKCQTPQGAINSSLPFQNIHPFTIGECPKYVRSTKLRMVTGLRNIPSIQSRGLFGAIAGFIEGGWTGMIDGWYGYHHQNEQGSGYAADQKSTQNAINGITNKVNSVIEKMNTQFTAVGKEFNKLEKRMENLNKKVDDGFLDIWTYNAELLVLLENERTLDFHDSNVKNLYEKVKNQLRNNAKEIGNGCFEFYHKCNNECMESVKNGTYDYPKYSEESKLNREKIDGVKLESMGVYQILAIYSTVASSLVLLVSLGAISFWMCSNGSLQCRICI

SEQ ID NO: 10152 - protein, 566 aa, synthetic construct
  REGION 1..566: note = hemagglutinin__InfluenzaA__AGQ47788
MKAKLLVLLCALSATDADTICIGYHANNSTDTVDTVLEKNVTVTHSVNLLEDSHNGKLCRLKGIAPLQLGKCNIAGWILGNPECESLFSKKSWSYIAETPNSENGTCYPGYFADYEELREQLSSVSSFERFEIFPKERSWPKHNVTRGVTAACSHKGKSSFYRNLLWLTEKDGSYPNLSKSYVNNKEKEVLVLWGVHHPSNIEDQKTLYRKENAYVSVVSSNYNRRFTPEIAERPKVRGQAGRINYYWTLLEPGDTIIFEANGNLIAPWHAFALSRGFGSGIITSNASMDECDTKCQTPQGAINSSLPFQNIHPVTIGECPKYVRSTKLRMVTGLRNIPSIQSRGLFGAIAGFIEGGWTGMIDGWYGYHHQNEQGSGYAADQKSTQNAINGITNKVNSVIEKMNTQFTAVGKEFNKLEKRMENLNKKVDDGFLDIWTYNAELLVLLENERTLDFHDSNVKNLYEKVKSQLKNNAKEIGNGCFEFYHKCNNECMESVKNGTYDYPKYSEESKLNREKIDGVKLESMGVYQILAIYSTVASSLVLLVSLGAISFWMCSNGSLQCRICI

SEQ ID NO: 10153 - protein, 566 aa, synthetic construct
  REGION 1..566: note = hemagglutinin__InfluenzaA__AGQ47800
MKARLLVLLCALAATDADTICIGYHANNSTDTVDTILEKNVTVTHSVNLLEDSHNGKLCRLKGIAPLQLGKCNIAGWILGNPECESLLSERSWSYIVEIPNSENGTCYPGDFTDYEELREQLSSVSSFERFEIFPKESSWPKHNTARGVTAACSHAGKSSFYRNLLWLTEKDGSYPNLKNSYVNKKGKEVLVLWGVHHPSSIKEQQTLYQKENAYVSVVSSNYNRRFTPEIAERPKVRDQAGRMNYYWTLLEPGDTIIFEANGNLIAPWYAFALSRGFGSGIITSNASMHECDTKCQTPQGAINSSLPFQNIHPVTIGECPKYVRSTKLRMVTGLRNIPSIQSRGLFGAIAGFIEGGWTGMIDGWYGYHHQNEQGSGYAADQKSTQNAINGITNKVNSVIEKMNTQFTAVGKEFNNLEKRMENLNKKVDDGFLDIWTYNAELLILLENERTLDFHDSNVKNLYEKVKSQLRNNAKEIGNGCFEFYHKCNNECMESVKNGTYDYPKYSEESKLNREKIDGVKLESMGVYQILAIYSTVASSLVLLVSLGAISFWMCSNGSLQCRICI

SEQ ID NO: 10154 - protein, 566 aa, synthetic construct
  REGION 1..566: note = hemagglutinin__InfluenzaA__AGQ47811
MKAKLLVLLCALSATDADTICIGYHANNSTDTVDTVLEKNVTVTHSVNLLEDSHNGKLCRLKGIAPLQLGKCNIAGWILGNPECESLFSKKSWSYIAETPNSENGTCYPGFFADYEELREQLSSVSSFERFEIFPKERSWPKHNVTRGVTAACSHKGKSSFYRNLLWLTEKNGSYPNLSKSYVNNKEKEVLVLWGVHHPSNIEDQKTIYRKENAYVSVVSSNYNRRFTPEIAERPKVRGQAGRINYYWTLLEPGDTIIFEANGNLIAPWHAFALSRGFGSGIITSNASMDECDTKCQTPQGAINSSLPFQNIHPVTIGECPKYVRSTKLRMVTGLRNIPSIQSRGLFGAIAGFIEGGWTGMIDGWYGYHHQNEQGSGYAADQKSTQNAIDGITNKVNSVIEKMNTQFTAVGKEFNKLEKRMENLNKKVDDGFLDIWTYNAELLVLLENERTLDFHDSNVKNLYEKVKSQLKNNAKEIGNGCFEFYHKCNNECMESVKNGTYDYPKYSEESKLNREKIDGVKLESMGVYQILAIYSTVASSLVLLVSLGAISFWMCSNGSLQCRICI

SEQ ID NO: 10155 - protein, 566 aa, synthetic construct
  REGION 1..566: note = hemagglutinin__InfluenzaA__AGQ47823
MKAKLLVLLCAFTATYADTICIGYHANNSTDTVDTVLEKNVTVTHSVNLLEDSHNGKLCRLKGIAPLQLGNCSVAGWILGNPKCESLFSKESWSYIAETPNPENGTCYPGYFADYEELREQLSSVSSFERFEIFPKESSWPNHTVTKGVTTSCSHNGKSSFYRNLLWLTEKNGLYPNLSKSYVNNKEKEVLVLWGVHHPSNIRDQRAIYHTENAYVSVVSSHYSRRFTPEIAKRPKVRGQEGRINYYWTLLEPGDTIIFEANGNLIAPWYAFALSRGFGSGIITSNASMDECDAKCQTPQGAINSSLPFQNVHPVTIGECPKYVRSTKLRMVTGLRNIPSIQSRGLFGAIAGFIEGGWTGMIDGWYGYHHQNEQGSGYAADQKSTQNAINGITNKVNSVIEKMNTQFTAVGKEFNKLERRMENLNKKVDDGFLDIWTYNAELLVLLENGRTLDFHDSNVKNLYEKVKSQLKNNAKEIGNGCFEFYHKCNNECMESVKNGTYDYPKYSEESKLNRGKIDGVKLESMGVYQILAIYSTVASSLVLLVSLGAISFWMCSNGSLQCRICI

SEQ ID NO: 10156 - protein, 566 aa, synthetic construct
  REGION 1..566: note = hemagglutinin__InfluenzaA__AGQ47835
MKTIIALSYIFCLVLGQDFPGNDNSTATLCLGHHAVPNGTIVKTITNDQIEVTNATELVQSSSTGKICNNPHRILDGINCTLIDALLGDPHCDGFQNETWDLFVERSKAFSNCYPYYVPDYASLRSLVASSGTLEFINEGFNWTGVTQNGGSNACKRGPNSGFFSRLNWLYKSGTTYPVLNVTMPNNDNFDKLYIWGVHHPSTDQEQTNLYVQASGRVTVSTKRSQQTITPNIGSRPWVRGLSSRISIYWTIVKPGDILVINSNGNLIAPRGYFKMRTGKSSIMRSDAPIGTCISECITPNGSIPNDKPFQNVNKITYGACPKYVKQNTLKLATGMRNVPEKQTRGIFGAIAGFIENGWEGMVDGWYGFRHQNSEGTGQAADLKSTQAAIDQINGKLNRVIEKTNEKFHQIEKEFSEVEGRIQDLEKYVEDTKIDLWSYNAELLVALENQHTIDLTDSEMNKLFEKTRRQLRENAEDMGNGCFKIYHKCDNACIGSIRNGTYDHDVYRDEALNNRFQIKGVELKSGYKDWILWISFAISCFLLCVVLLGFIMWACQKGNIRCNICI

SEQ ID NO: 10157 - protein, 566 aa, synthetic construct
  REGION 1..566: note = hemagglutinin__InfluenzaA__AGQ47847
MKARLLILLCALAATDADTICIGYHANNSTDTVDTVLEKNVTVTHSVNLLEDSHNGKLCRLKGIAPLQLGKCNIAGWLLGNPECDSLLPASSWSYIVETPNSKNGICYPGDFIDYEELREQLSSVSSFERFEIFPKESSWPKHNTTKGVTAACSHAGKSSFYRNLLWLTKKEDSYPKLSNSYVNKKGKEVLVLWGVHHPSNSKEQQTLYQNENAYVSVVSSNYNRRFTPEIAERPKVRDQAGRMNYYWTLLEPGDTIIFEANGNLIAPWYAFALSRGFGSGIITSNASMHECNTKCQTPQGAINSSLPFQNIHPVTIGECPKYVKSAKLRMVTGLRNIPSIQSRGLFGAIAGFIEGGWTGMIDGWYGYHHQNEQGSGYAADQKSTQNAINGITNKVNSVIEKMNTQFTAVGKEFNNLEKRMENLNKKVDDGFLDIWTYNAELLVLLENERTLDFHDSNVKNLYEKVKIQLKNNAKEIGNGCFEFYHKCDNECMESVRNGTYDYPKYSKESKLNREKIDGVKLEPMGVYQILAIYSTVASSLVLLVSLGAISFWMCSNGSLQCRICI

SEQ ID NO: 10158 - protein, 566 aa, synthetic construct
  REGION 1..566: note = hemagglutinin__InfluenzaA__AGQ47870
MKAILLVLLCTFAATNADTLCIGYHANNSTDTVDTVLEKNVTVTHSVNLLEDRHNGKLCKLGGIAPLHLGKCNIAGWLLGNPECELLLTVSSWSYIVETSNSDNGTCYPGDFINYEELREQLSSVSSFERFEIFPKTSSWPNHETNRGVTAACPYAGANSFYRNLIWLVKKGNSYPKLSKSYVNNKGKEVLVLWGIHHPPTSTDQQSLYQNADAYVFVGSSKYNRKFKPEIAARPKVRGQAGRMNYYWTLIEPGDTITFEATGNLVVPRYAFAMNRGSGSGIIISDAPVHDCNTKCQTPKGAINTSLPFQNIHPVTIGECPKYVKSTKLRMATGLRNIPSIQSRGLFGAIAGFIEGGWTGMIDGWYGYHHQNEQGSGYAADQRSTQNAIDGITNKVNSVIEKMNTQFTAVGKEFNHLEKRIENLNKKVDDGFLDIWTYNAELLVLLENERTLDFHDSNVKNLYEKVRSQLRNNAKEIGNGCFEFYHKCDDTCMESVKNGTYDYPKYSEESKLNREEIDGVKLESTRIYQILAIYSTVASSLVLLVSLGAISFWMCSNGSLQCRICI

SEQ ID NO: 10159 - protein, 566 aa, synthetic construct
  REGION 1..566: note = hemagglutinin__InfluenzaA__AGQ47882
MKAILLVLLCTFAATNADTLCIGYHANNSTDTVDTVLEKNVTVTHSVNLLEDRHNGKLCKLGGIAPLHLGKCNIAGWLLGNPECELLLTVSSWSYIVETSNSDNGTCYPGDFINYEELREQLSSVSSFERFEIFPKTSSWPNHETNRGVTAACPYAGANSFYRNLIWLVKKENSYPKLSKSYVNNKGKEVLVLWGIHHPPTSTDQQSLYQNADAYVFVGSSKYNRKFKPEIAARPKVRGQAGRMNYYWTLIEPGDTITFEATGNLVVPRYAFAMNRGSGSGIIISDAPVHDCNTKCQTPKGAINTSLPFQNIHPVTIGECPKYVKSTKLRMATGLRNIPSIQSRGLFGAIAGFIEGGWTGMIDGWYGYHHQNEQGSGYAADQRSTQNAIDGITNKVNSVIEKMNTQFTAVGKEFNHLEKRIENLNKKVDDGFLDIWTYNAELLVLLENERTLDFHDSNVKNLYEKVRSQLRNNAKEIGNGCFEFYHKCDDTCMESVKNGTYDYPKYSEESKLNREEIDGVKLESTRIYQILAIYSTVASSLVLLVSLGAISFWMCSNGSLQCRICI

SEQ ID NO: 10160 - protein, 566 aa, synthetic construct; identical to SEQ ID NO: 9095
  REGION 1..566: note = hemagglutinin__InfluenzaA__AGQ47894

SEQ ID NO: 10161 - protein, 566 aa, synthetic construct
  REGION 1..566: note = hemagglutinin__InfluenzaA__AGQ47906
MKTIIALSYIFCLALGQDLPGNDNSTATLCLGHHAVPNGTLVKTITDDQIEVTNATELVQSSSTGKICNNPHRILDGIDCTLIDALLGDPHCDVFQNETWDLFVERSKAFSNCYPYDVPDYASLRSLVASSGTLEFITEGFTWTGVTQNGGSNACKRGPGSGFFSRLNWLTKSGSTYPVLNVTMPNNDNFDKLYIWGIHHPSTNQEQTSLYVQASGRVTVSTRRSQQTIIPNIGSRPWVRGLSSRISIYWTIVKPGDVLVINSNGNLIAPRGYFKMRTGKSSIMRSDAPIDTCISECITPNGSIPNDKPFQNVNKITYGACPKYVKQNTLKLATGMRNVPEKQTRGLFGAIAGFIENGWEGMIDGWYGFRHQNSEGTGQAADLKSTQAAIDQINGKLNRVIEKTNEKFHQIEKEFSEVEGRIQDLEKYVEDTKIDLWSYNAELLVALENQHTIDLTDSEMNKLFEKTRRQLRENAEDMGNGCFKIYHKCDNACIESIRNGTYDHDVYRDEALNNRFQIKGVELKSGYKDWILWISFAISCFLLCVVLLGFIMWACQRGNIRCNICI

SEQ ID NO: 10162 - protein, 566 aa, synthetic construct
  REGION 1..566: note = hemagglutinin__InfluenzaA__AGQ47918
MKTIIALSYIFCLALGQDLPGNDNNTATLCLGHHAVPNGTLVKTITDDQIEVTNATELVQSSSTGKICNNPHRILDGIDCTLIDALLGDPHCDVFQNETWDLFVERSKAFSNCYPYDVPDYASLRSLVASSGTLEFITEGFTWTGVTQNGGSNACKRGPGSGFFSRLNWLTKSGSTYPVLNVTMPNNDNFDKLYIWGVHHPSTNQEQTSLYVQASGRVTVSTRRSQQTIIPNIGSRPWVRGLSSRISIYWTIVKPGDVLVINSNGNLIAPRGYFKMRTGKSSIMRSDAPIDTCISECITPNGSIPNDKPFQNVNKITYGACPKYVKQNTLKLATGMRNVPEKQTRGLFGAIAGFIENGWEGMIDGWYGFRHQNSEGTGQAADLKSTQAAIDQINGKLNRVIEKTNEKFHQIEKEFSEVEGRIQDLEKYVEDTKIDLWSYNAELLVALENQHTIDLTDSEMNKLFEKTRRQLRENAEDMGNGCFKIYHKCDNACIESIRNGTYDHDVYRDEALNNRFQIKGVELKSGYKDWILWISFAISCFLLCVVLLGFIMWACQRGNIRCNICI

SEQ ID NO: 10163 - protein, 566 aa, synthetic construct
  REGION 1..566: note = hemagglutinin__InfluenzaA__AGQ47930
MKANLLVLLCALAAADADTICIGYHANNSTDTVDTALEKNVTVTHSVNLLEDSHNGKLCRLKGIAPLQLGKCNIAGWLLGNPECDPLLPVRSWSYIVETPNSENGICYPGDFIDYEELREQLSSVSSFERFEIFPKESSWPNHNTNKGVTAACSHAGKSSFYRNLLWLTEKEGSYPKLKNSYVNKKGKEVLVLWGIHHPSNSKDQQNLYQNENAYVSVVTSNYNRRFTPEIAERPKVRDQAGRMNYYWTLLKPGDTIIFEANGNLIAPMYAFALSRGFGSGIITSNASMHECNTKCQTPLGAINSSLPFQNIHPVTIGECPKYVRSAKLRMVTGLRNIPSIQSRGLFGAIAGFIEGGWTGMIDGWYGYHHQNEQGSGYAADQKSTQNAINGITNKVNSVIEKMNIQFTAVGKEFNKLEKRMENLNKKVDDGFLDIWTYNAELLVLLENERTLDFHDSNVKNLYEKVKSQLKNNAKEIGNGCFEFYHKCDNECMESVRNGTYDYPKYSEESKLNREKVDGVKLESMGIYQILAIYSTVASSLVLLVSLGAISFWMCSNGSLQCRICI

SEQ ID NO: 10164 - protein, 565 aa, synthetic construct; identical to SEQ ID NO: 3278
  REGION 1..565: note = hemagglutinin__InfluenzaA__AGQ47942

SEQ ID NO: 10165 - protein, 565 aa, synthetic construct
  REGION 1..565: note = hemagglutinin__InfluenzaA__AGQ47954
MKANLLVLLCALAAADADTICIGYHANNSTDTVDTVLEKNVTVTHSVNLLEDSHNGKLCRLKGIAPLQLGKCNIAGWLLGNPECDPLLPVRSWSYIVETPNSENGICYPGDFIDYEELREQLSSVSSFERFEIFPKESSWPNHNTNGVTAACSHEGKSSFYRNLLWLTEKEGSYPKLKNSYVNKKGKEVLVLWGIHHPPNSKEQQNLYRNENAYVSVVTSNYNRRFTPEIAERPKVRDQAGRMNYYWTLLKPGDTIIFEANGNLIAPMYAFALSRGFGSGIITSNASMHECNTKCQTPLGAINSSLPYQNIHPVTIGECPKYVRSAKLRMVTGLRNIPSIQSRGLFGAIAGFIEGGWTGMIDGWYGYHHQNEQGSGYAADQKSTQNAINGITNKVNTVIEKMNIQFTAVGKEFNKLEKRMENLNKKVDDGFLDIWTYNAELLVLLENERTLDFHDSNVKNLYEKVKSQLKNNAKEIGNGCFEFYHKCDNECMESVRNGTYDYPKYSEESKLNREKVDGVKLESMGIYQILAIYSTVASSLVLLVSLGAISFWMCSNGSLQCRICI

SEQ ID NO: 10166 - protein, 565 aa, synthetic construct
  REGION 1..565: note = hemagglutinin__InfluenzaA__AGQ47966
MKANLLVLLCALAAADADTICIGYHANNSTDTVDTVLEKNVTVTHSVNLLEDSHNGKLCRLKGIAPLQLGKCNIAGWLLGNPECDPLLPVGSWSYIVETPNSENGICYPGDFIDYEELREQLSSVSSFERFEIFPKESSWPDHNTNGVTAACSHEGKNSFYRNLLWLTEKESSYPKLKNSYVNKKGKEVLVLWGIHHPPNSKEQQNLYQNENAYVSVVTSNYNRRFTPEIAERPKVKDQAGRMNYYWTLLKPGDTIIFEANGNLIAPMYAFALSRGFGSGIITSNASMHECNTKCQTPLGAINSSLPYQNIHPVTIGECPKYVRSAKLRMVTGLRNIPSIQSRGLFGAIAGFIEGGWTGMIDGWYGYHHQNEQGSGYAADQKSTQNAINGITNKVNTVIEKMNIQFTAVGKEFNKLEKRMENLNKKVDDGFLDIWTYNAELLVLLENERTLDFHDSNVKNLYEKVKSQLKNNAKEIGNGCFEFYHKCDNECMESVRNGTYDYPKYSEESKLNREKVDGVKLESMGIYQILAIYSTVASSLVLLVSLGAISFWMCSNGSLQCRICI

SEQ ID NO: 10167 - protein, 565 aa, synthetic construct
  REGION 1..565: note = hemagglutinin__InfluenzaA__AGQ47978
MKANLLVLLCALAAADADTICIGYHANNSTDTVDTVLEKNVTVTHSVNLLEDSHNGKLCRLKGIAPLQLGKCNIAGWLLGNPECDPLLPVGSWSYIVETPNSENGICYPGDFIDYEELREQLSSVSSFERFEIFPKESSWPDHNTNGVTAACSHEGKNSFYRNLLWLTKKESSYPELKNSYVNKKGKEVLVLWGIHHPPNSKEQQNLYQNENAYVSVVTSNYNRRFTPEIAERPKVKDQAGRMNYYWTLLKPGDTIIFEANGNLIAPMYAFALSRGFGSGIITSNASMHECNTKCQTPLGAINSSLPYQNIHPVTIGECPKYVRSAKLRMVTGLRNIPSIQSRGLFGAIAGFIEGGWTGMIDGWYGYHHQNEQGSGYAADQKSTQNAINGITNKVNTVIEKMNIQFTAVGKEFNKLEKRMENLNKKVDDGFLDIWTYNAELLVLLENERTLDFHDSNVKNLYEKVKSQLKNNAKEIGNGCFEFYHKCDNECMESVRNGTYDYPKYSEESKLNREKVDGVKLESMGIYQILAIYSTVASSLVLLVSLGAISFWMCSNGSLQCRICI

SEQ ID NO: 10168 - protein, 565 aa, synthetic construct
  REGION 1..565: note = hemagglutinin__InfluenzaA__AGQ47990
MKANLLVLLCALAAADADTICIGYHANNSTDTVDTVLEKNVTVTHSVNLLEDSHNGKLCRLKGIAPLQLGKCNIAGWLLGNPECDPLLPVGSWSYIVETPNSENGICYPGDFIDYEELREQLSSVSSFERFKIFPKESSWPDHNTNGVTAACSHEGKNSFYRNLLWLTKKESSYPELKNSYVNKKGKEVLVLWGIHHPPNSKEQQNLYQNENAYVSVVTSNYNRRFTPEIAERPKVKDQAGRMNYYWTLLKPGDTIIFEANGNLIAPMYAFALSRGFGSGIITSNASMHECNTKCQTPLGAINSSLPYQNIHPVTIGECPKYVRSAKLRMVTGLRNIPSIQSRGLFGAIAGFIEGGWTGMIDGWYGYHHQNEQGSGYAADQKSTQNAINGITNKVNTVIEKMNIQFTAVGKEFNKLEKRMENLNKKVDDGFLDIWTYNAELLVLLENERTLDFHDSNVKNLYEKVKSQLKNNAKEIGNGCFEFYHKCDNECMESVRNGTYDYPKYSEESKLNREKVDGVKLESMGIYQILAIYSTVASSLVLLVSLGAISFWMCSNGSLQCRICI

SEQ ID NO: 10169 - protein, 565 aa, synthetic construct
  REGION 1..565: note = hemagglutinin__InfluenzaA__AGQ48002
MKANLLVLLCALAAADADTICIGYHANNSTDTVDTVLEKNVTVTHSVNLLEDSHNGKLCRLKGIAPLQLGKCNIAGWLLGNPECDPLLPVGSWSYIVETPNSENGICYPGDFIDYEELREQLSSVSSFERFKIFPKESSWPDHNTNGVTAACSHEGKNSFYRNLLWLTKKESSYPELKNSYVNKKRKEVLVLWGIHHPPNSKEQQNLYQNENAYVSVVTSNYNRRFTPEIAERPKVKDQAGRMNYYWTLLKPGDTIIFEANGNLIAPMYAFALSRGFGSGIITSNASMHECNTKCQTPLGAINSSLPYQNIHPVTIGECPKYVRSAKLRMVTGLRNIPSIQSRGLFGAIAGFIEGGWTGMIDGWYGYHHQNEQGSGYAADQKSTQNAINGITNKVNTVIEKMNIQFTAVGKEFNKLEKRMENLNKKVDDGFLDIWTYNAELLVLLENERTLDFHDSNVKNLYEKVKSQLKNNAKEIGNGCFEFYHKCDNECMESVRNGTYDYPKYSEESKLNREKVDGVKLESMGIYQILAIYSTVASSLVLLVSLGAISFWMCSNGSLQCRICI

SEQ ID NO: 10170 - protein, 565 aa, synthetic construct
  REGION 1..565: note = hemagglutinin__InfluenzaA__AGQ48014
MKANLLVLLCALAAADADTICIGYHANNSTDTVDTVLEKNVTVTHSVNLLEDSHNGKLCRLKGIAPLQLGKCNIAGWLLGNPGCDPLLPVGSWSYIVETPNSENGICYPGDFIDYEELREQLSSVSSFERFKIFPKESSWPDHNTNGVTAACSHEGKNSFYRNLLWLTKKESSYPELKNSYVNKKRKEVLVLWGIHHPPNSKEQQNLYQNENAYVSVVTSNYNRRFTPEIAERPKVKDQAGRMNYYWTLLKPGDTIIFEANGNLIAPMYAFALSRGFGSGIITSNASMHECNTKCQTPLGAINSSLPYQNIHPVTIGECPKYVRSAKLRMVTGLRNIPSIQSRGLFGAIAGFIEGGWTGMIDGWYGYHHQNEQGSGYAADQKSTQNAINGITNKVNTVIEKMNIQFTAVGKEFNKLEKRMENLNKKVDDGFLDIWTYNAELLVLLENERTLDFHDSNVKNLYEKVKSQLKNNAKEIGNGCFEFYHKCDNECMESVRNGTYDYPKYSEESKLNREKVDGVKLESMGIYQILAIYSTVASSLVLLVSLGAISFWMCSNGSLQCRICI

SEQ ID NO: 10171 - protein, 565 aa, synthetic construct
  REGION 1..565: note = hemagglutinin__InfluenzaA__AGQ48026
MKANLLVLLCALAAADADTICIGYHANNSTDTVDTVLEKNVTVTHSVNLLEDSHNGKLCKLKGIAPLQLGKCNIAGWLLGNPGCDPLLPVGSWSYIVETPNSENGICYPGDFIDYEELREQLSSVSSFERFKIFPKESSWPDHNTNGVTAACSHEGKNSFYRNLLWLTKKESSYPELKNSYVNKKRKEVLVLWGIHHPPNSKEQQNLYQNENAYVSVVTSNYNRRFTPEIAERPKVKDQAGRMNYYWTLLKPGDTIIFEANGNLIAPMYAFALSRGFGSGIITSNASMHECNTKCQTPLGAINSSLPYQNIHPVTIGECPKYVRSAKLRMVTGLRNIPSIQSRGLFGAIAGFIEGGWTGMIDGWYGYHHQNEQGSGYAADQKSTQNAINGITNKVNTVIEKMNIQFTAVGKEFNKLEKRMENLNKKVDDGFLDIWTYNAELLVLLENERTLDFHDSNVKNLYEKVKSQLKNNAKEIGNGCFEFYHKCDNECMESVRNGTYDYPKYSEESKLNREKVDGVKLESMGIYQILAIYSTVASSLVLLVSLGAISFWMCSNGSLQCRICI

SEQ ID NO: 10172 - protein, 565 aa, synthetic construct
  REGION 1..565: note = hemagglutinin__InfluenzaA__AGQ48038
MKANLLVLLCALAAADADTICIGYHANNSTDTVDTVLEKNVTVTHSVNLLEDSHNGKLCKLKGIAPLQLGKCNIAGWLLGNPGCDPLLPVGSWSYIVETPNSENGICYPGDFIDYEELREQLSSVSSFERFKIFPKESSWPDHNTNGVTAACSHEGKNSFYRNLLWLTKKESSYPELKNSYVNKKREEVLVLWGIHHPPNSEEQQNLYQNENAYVSVVTSNYNRRFTPEIAERPKVKGQAGRMNYYWTLLKPGDTIIFEANGNLIAPMYAFALSRGFGSGIITSNASMHECNTKCQTPLGAINSSLPYQNIHPVTIGECPKYVRSAKLRMVTGLRNIPSIQSRGLFGAIAGFIEGGWTGMIDGWYGYHHQNEQGSGYAADQKSTQNAINGITNKVNTVIEKMNIQFTAVGKEFNKLEKRMENLNKKVDDGFLDIWTYNAELLVLLENERTLDFHDSNVKNLYEKVKSQLKNNAKEIGNGCFEFYHKCDNECMESVRNGTYDYPKYSEESKLNREKVDGVKLESMGIYQILAIYSTVASSLVLLVSLGAISFWMCSNGSLQCRICI

SEQ ID NO: 10173 - protein, 565 aa, synthetic construct
  REGION 1..565: note = hemagglutinin__InfluenzaA__AGQ48050
MKANLLVLLCALAAADADTICIGYHANNSTDTVDTVLEKNVTVTHSVNLLEDSHNGKLCKLKGIAPLQLGKCNIAGWLLGNPGCDPLLPVGSWSYIVETPNSENGICYPGDFIDYEELREQLSSVSSFERFKIFPKESSWPDHNTNGVTAACSHEGKNSFYRNLLWLTKKESSYPELKNSYVNKKREEVLVLWGIHHPPDSEEQQNLYQNENAYVSVVTSNYNRRFTPEIAERPKVKGQAGRMNYYWTLLKPGDTIIFKANGNLIAPMYAFALSRGFGSGIITSNASMHECNTKCQTPLGAINSSLPYQNIHPVTIGECPKYVRSAKLRMVTGLRNIPSIQSRGLFGAIAGFIEGGWTGMIDGWYGYHHQNEQGSGYAADQKSTQNAINGITNKVNTVIEKMNIQFTAVGKEFNKLEKRMENLNKKVDDGFLDIWTYNAELLVLLENERTLDFHDSNVKNLYEKVKSQLKNNAKEIGNGCFEFYHKCDNECMESVRNGTYDYPKYSEESKLNREKVDGVKLESMGIYQILAIYSTVASSLVLLVSLGAISFWMCSNGSLQCRICI

SEQ ID NO: 10174 - protein, 562 aa, synthetic construct
  REGION 1..562: note = hemagglutinin__InfluenzaA__AGQ80946
MAIIYLILLFTAVRGDQICIGYHSNNSTEKVDTILERNVTVTHAQDILEKTHNGKLCKLNGIPPLELGDCSIAGWLLGNPECDRLLTVPEWSYIMEKENPRNGLCYPGSFNDYEELKHLLSSVTHFEKVKILPKDRWTQHTTTGGSRACAVSGNPSFFRNMVWLTKKGPNYPVAKGSYNNTSGDQMLIIWGVHHPNDEAEQRTLYQNVGTYVSVGTSTLNKRSVPEIATRPKVNGQGGRMEFSWTILDVLDTINFESTGNLIAPEYGFKISKRGSSGIMKTEGTLENCETKCQTPLGAINTTLPFHNIHPLTIGECPKYVKSERLVLATGLRNVPQIESRGLFGAIAGFIEGGWQGMVDGWYGYHHSNDQGSGYAADKESTQKAIDGITNKVNSVIEKMNTQFEAVGKEFSNLEKRLENLNKKMEDGFLDVWTYNAELLVLMENERTLDFHDSNVKNLYDKVRMQLRDNAKELGNGCFEFYHKCDDECMNSVKNGTYDYPKYEEESKLNRNEIKGVKLSNMGVYQILAIYATVAGSLSLAIMIAGISLWMCSNGSLQCRICI

SEQ ID NO: 10175 - protein, 562 aa, synthetic construct
  REGION 1..562: note = hemagglutinin__InfluenzaA__AGQ80947
MAIIYLILLFATVRGDQICIGYHSNNSTEKVDTILERNITVTHAQDILEKTHNGKLCKLNGIPPLELGNCSIAGWLLGNPECDRLLTVPEWSYIMEKENPRDGLCYPGSFNDYEELKHLLSSVTHFEKVKILPKDRWTQHTTTGGSRACAVSGNPSFFRNMVWLTKKGSNYPIAKGSYNNTSGEQMLIIWGVHHPNDDAEQRTLYQNVGTYVSVGTSTLNKRSIPEIATRPKVNGQGGRMEFSWTILDMLDTINFESTGNLIAPEYGFKISKRGSSGIMKTEGTLENCETKCQTPLGAINTTLPFHNIHPLTIGECPKYVKSERLVLATGLRNVPQIESRGLFGAIAGFIEGGWQGMVDGWYGYHHSNDQGSGYAADKESTQKAIDGITNKVNSVIEKMNTQFEAVGKEFNNLEKRLENLNKKMEDGFLDVWTYNAELLVLMENERTLDFHDSNVKNLYDKVRMQLKDNAKELGNGCFEFYHKCDDECMNSVKNGTYDYPKYEEESKLNRNEIKGVKLSNMGVYQILAIYATVAGSLSLAIMIAGVSLWMCSNGSLQCRICI

SEQ ID NO: 10176 - protein, 562 aa, synthetic construct
  REGION 1..562: note = hemagglutinin__InfluenzaA__AGQ80948
MAIIYLILLFAAVRGDQICIGYHSNNSTEKVDTILERNVTVTHAQDILEKTHNGKLCKLNGIPPLELGNCSIAGWLLGNPECDRLLTVPEWSYIMEKENPRNGLCYPGSFNDYEELKHLLSSVTHFEKVKILPKDRWTQHTTTGGSRACAVFGNPSFFRNMVWLTKKGSNYPIAKGSYNNTSGEQMLIIWGVHHPNDDAEQRTLYQNVGTYVSVGTSTLNKRSIPEIATRPKVNGQGGRMEFSWTILDMLDTINFESTGNLIAPEYGFKISKRGSSGIMKTEGTLENCETKCQTPLGAINTTLPFHNIHPLTIGECPKYVKSERLVLATGLRNVPQIESRGLFGAIAGFIEGGWQGMVDGWYGYHHSNDQGSGYAADKESTQKAIDGITNKVNSVIEKMNTQFEAVGKEFNNLEKRLENLNKKMEDGFLDVWTYNAELLVLMENERTLDFHDSNVKNLYDKIRMQLKDNAKELGNGCFEFYHKCDDECMNSVKNGTYDYPKYEEESKLNRNEIKGVKLSNMGVYQILAIYATVAGSLSLAIMIAGISLWMCSNGSLQCRICI

SEQ ID NO: 10177 - protein, 562 aa, synthetic construct
  REGION 1..562: note = hemagglutinin__InfluenzaA__AGQ80949
MAIIYLILLFAAVRGDQICIGYHSNNSTEKVDTILERNVTVTHAQDILEKTHNGKLCKLNGIPPLELGDCSIAGWLLGNPECDRLLTVPEWSYIMEKENPRNGLCYPGSFNDYEELKHLLSSVTHFEKVKILPKDRWTQHTTTGGSRACAVSGNPSFFRNMVWLTKKGSNYPIAKGSYNNTSGEQMLIIWGVHHPNDDAEQRTLYQNVGTYVSVGTSTLNKRSIPEIATRPKVNGQGGRMEFSWTILDMLDTINFESTGNLIAPEYGFKISKRGSSGIMKTEGTLENCETKCQTPLGAINTTLPFHNIHPLTIGECPKYVKSERLVLATGLRNVPQIESRGLFGAIAGFIEGGWQGMVDGWYGYHHSNDQGSGYAADKESTQKAIDGITNKVNSVIEKMNTQFEAVGKEFNNLEKRLENLNKKMEDGFLDVWTYNAELLVLMENERTLDFHDSNVKNLYDKIRMQLKDNAKELGNGCFEFYHKCDDECMNSVKNGTYDYPKYEEESKLNRNEIKGVKLSNMGVYQILAIYATVAGSLSLAIMIAGISLWMCSNGSLQCRICI

SEQ ID NO: 10178 - protein, 566 aa, synthetic construct
  REGION 1..566: note = hemagglutinin__InfluenzaA__AGQ80950
MKTIIALSYIFCLAFGQNLPGNDSSTATLCLGHHAVLNGTIVKTITDDQIEVTNATELVQSSSTGKICNNPHKILDGRDCTLIDALLGDPHCDVFQDETWDLFVERSSAFSNCYPYDVPDYASLRSLVASSGTLEFITEGFTWTGVSQNGGSGACKRGPANGFFSRLNWLTKSGNAYPVLNVTMPNSDNFDKLYIWGVHHPSTNQEQTNLYVQASGRVTVSTRRSQQTIIPNIGSRPWVRGQSGRISIYWTIVKPGDVLVINSNGNLIAPRGYFKMRTGKSSIMRSDAPIETCISECITPNGSIPNDKPFQNVNKITYGACPKYVKQNTLKLATGMRNVPEKQTRGLFGAIAGFIENGWEGMIDGWYGFRHQNSEGTGQAADLKSTQAAIDQINGKLNRVIEKTNEKFHQIEKEFSEVEGRIQDLEKYVEDTKIDLWSYNAELLVALENQHTIDLTDSEMNKLFEKTRRQLRENAEDMGNGCFKIYHKCDNACIESIRNGTYDHDIYRDEALNNRFQIKGVELKSGYKDWILWISFAISCFLLCVVLLGFIMWACQRGNIRCNICI

SEQ ID NO: 10179 - protein, 564 aa, synthetic construct
  REGION 1..564: note = hemagglutinin__InfluenzaA__AGQ80951
MLSIVILFLLVAESSSQNYTGNPVICMGHHAVANGTMVKTLTDDQVEVVTAQELVESQNLPELCPSPLRLVDGQTCDIINGALGSPGCDHLNGAEWDIFIERPNAMDTCYPFDVPDYQSLRSILANNGKFEFIAEEFQWSTVKQNGKSGACKRANVNDFFNRLNWLVKSDGNAYPLQNLTKVNNGDYARLYIWGVHHPSTDTEQTNLYKNNPGRVTVSTKTSQTSVVPNIGSRPWVRGQSGRISFYWTIVEPGDLIVFNTIGNLIAPRGHYKLNSQKKSTILNTATPIGSCVSKCHTDKGSLSTTKPFQNISRVAIGDCPKYVKQGSLKLATGMRNIPEKASRGLFGAIAGFIENGWQGLIDGWYGFRHQNAEGTGTAADLKSTQAAIDQINGKLNRLIEKTNEKYHQIEKEFEQVEGRIQDLEKYVEDTKIDLWSYNAELLVALENQHTIDVTDSEMNKLFERVRRQLRENAEDKGNGCFEIFHKCDNNCIESIRNGTYDHDVYRNEAINNRFQIQGVKLTQGYKDIILWISFSISCFLLVALLLAFILWACQNGNIRCQICI

SEQ ID NO: 10180 - protein, 560 aa, synthetic construct
  REGION 1..560: note = hemagglutinin__InfluenzaA__AGQ80953
MNTQILVFALVAIIPTNADKICLGHHAVSNGTKVNTLTERGVEVVNATETVERTSIPRICSKGKRAVDLGQCGLLGTITGPPQCDQFLEFSADLIIERREGSDVCYPGKFVNEEALRQILRESGGIDKETMGFTYSGIRTNGATSACRRSGSSFYAEMKWLLSNTDNAAFPQTTKSYKNTRKDPALIIWGIHHSGSTTEQTKLYGSGNKLITVGSSNYQQSFVPSPGARPQVNGQSGRIDFHWLMLNPNDTVTFSFNGAFIAPDRASFLRGKSMGIQSGVQVDANCEGDCYHNGGTIISNLPFQNINSRAVGKCPRYVKQESLLLATGMKNVPEIPKGRGLFGAIAGFIENGWEGLIDGWYGFRHQNAQGEGTAADYKSTQSAIDQITGKLNRLIEKTNQQFELIDNEFTEVERQIGNVINWTRDSMTEVWSYNAELLVAMENQHTIDLADSEMNKLYERVRRQLRENAEEDGTGCFEIFHKCDDDCMASIRNNTYDHSKYREEAMQNRIQIDPVKLSSGYKDVILWFSFGASCFILLAIAMGLVFICVKNGNMRCTICI

SEQ ID NO: 10181 - protein, 560 aa, synthetic construct; identical to SEQ ID NO: 10180
  REGION 1..560: note = hemagglutinin__InfluenzaA__AGQ80954

SEQ ID NO: 10182 - protein, 560 aa, synthetic construct; identical to SEQ ID NO: 10180
  REGION 1..560: note = hemagglutinin__InfluenzaA__AGQ80955

SEQ ID NO: 10183 - protein, 560 aa, synthetic construct; identical to SEQ ID NO: 10180
  REGION 1..560: note = hemagglutinin__InfluenzaA__AGQ80956

SEQ ID NO: 10184 - protein, 560 aa, synthetic construct; identical to SEQ ID NO: 10180
  REGION 1..560: note = hemagglutinin__InfluenzaA__AGQ80957

SEQ ID NO: 10185 - protein, 560 aa, synthetic construct; identical to SEQ ID NO: 10180
  REGION 1..560: note = hemagglutinin__InfluenzaA__AGQ80958

SEQ ID NO: 10186 - protein, 560 aa, synthetic construct
  REGION 1..560: note = hemagglutinin__InfluenzaA__AGQ80959
MNTQILVFALIAIIPTNADKICLGHHAVSNGTKVNTLTERGVEVVNATETVERTNIPRICSKGKRTVDLGQCGLLGTITGPPQCDQFLEFSADLIIERREGSDVCYPGKFVNEEALRQILRESGGIDKEAMGFTYSGIRTNGATSACRRSGSSFYAEMKWLLSNTDNAAFPQMTKSYKNTRKDPALIIWGIHHSGSTAEQTKLYGSGNKLVTVGSSNYQQSFVPSPGARPQVNGQSGRIDFHWLMLNPNDTVTFSFNGAFIAPDRASFLRGKSMGIQSGVQVDANCEGDCYHGGGTIISNLPFQNIDSRAVGKCPRYVKQKSLLLATGMKNVPESPKGRGLFGAIAGFIENGWEGLIDGWYGFRHQNAQGEGTAADYKSTQSAIDQITGKLNRLIEKTNQQFELIDNEFTEVEKQIGNVINWTRDSITEVWSYNAELLVAMENQHTIDLADSEMNKLYERVKRQLRENAEEDGTGCFEIFHKCDDDCMASIRNNTYDHSKYREEAMQNRIQIDPVKLSSGYKDVILWFSFGASCFILLAIAMGLVFICVKNGNMRCTICI

SEQ ID NO: 10187 - protein, 560 aa, synthetic construct
  REGION 1..560: note = hemagglutinin__InfluenzaA__AGQ80961
MNTQILVFALVAIIPTNADKICLGHHAVSNGTKVNTLTERGVEVVNATETVERTNVPKICSKGKRTVDLGQCGLLGTITGPPQCDQFLEFSADLIIERREGSDVCYPGKFVNEETLRQILRESGGIDKETMGFTYSGIRTNGATSACRRSGSSFYAEMKWLLSNTDNAAFPQMTKSYKNARKDPALIIWGIHHSGSTTEQTKLYGSGNKLITVGSSNYQQSFVPSPGARPQVNGQSGRIDFHWLMLNPNDTVTFSFNGAFIAPDRACFLRGKSMGIQSGVQVDASCEGDCYHSGGTIISNLPFQNINSRAVGKCPRYVKQESLMLATGMKNVPEIPKGRGLFGAIAGFIENGWEGLIDGWYGFRHQNAQGEGTAADYKSTQSAIDQITGKLNRLIEKTNQQFELIDNEFTEVEKQIGNVINWTRDSMTEVWSYNAELLVAMENQHTIDLADSEMNKLYERVKRQLRENAEEDGTGCFEIFHKCDDDCMASIRNNTYDHSKYREEAMQNRIKIDPVKLSSGYKDVILWFSFGASCFILLAIAMGLVFICVKNGNMRCTICI

SEQ ID NO: 10188 - protein, 560 aa, synthetic construct; identical to SEQ ID NO: 10187
  REGION 1..560: note = hemagglutinin__InfluenzaA__AGQ80962

SEQ ID NO: 10189 - protein, 560 aa, synthetic construct
  REGION 1..560: note = hemagglutinin__InfluenzaA__AGQ80964
MNTQILVFALIAIIPTNADKICLGHHAVSNGTKVNTLTERGVEVVNATETVERTNIPRICSKGKRTVDLGQCGLLGTITGPPQCDQFLEFSADLIIERREGSDVCYPGKFVNEEALRQILRESGGIDKEAMGFTYSGIRTNGATSACRRSGSSFYAEMKWLLSNTDNAAFPQMTKSYKNTRKDPALIIWGIHHSGSTAEQTKLYGSGNKLVTVGSSNYQQSFVPSPGARPQVNGQSGRIDFHWLMLNPNDTVTFSFNGAFIAPDRASFLRGKSMGIQSGVQVDADCEGDCYHSGGTIISNLPFQNIDSRAVGKCPRYVKQRSLLLATGMKNVPEIPKGRGLFGAIAGFIENGWEGLIDGWYGFRHQNAQGEGTAADYKSTQSAIDQITGKLNRLIEKTNQQFELIDNEFTEVEKQIGNVINWTRDSITEVWSYNAELLVAMENQHTIDLADSEMNKLYERVKRQLRENAEEDGTGCFEIFHKCDDDCMASIRNNTYDHSKYREEAMQNRIQIDPVKLSSGYKDVILWFSFGASCFILLAIAMGLVFICVKNGNMRCTICI

SEQ ID NO: 10190 - protein, 560 aa, synthetic construct; identical to SEQ ID NO: 10180
  REGION 1..560: note = hemagglutinin__InfluenzaA__AGQ80965

SEQ ID NO: 10191 - protein, 560 aa, synthetic construct; identical to SEQ ID NO: 10180
  REGION 1..560: note = hemagglutinin__InfluenzaA__AGQ80966

SEQ ID NO: 10192 - protein, 560 aa, synthetic construct; identical to SEQ ID NO: 10180
  REGION 1..560: note = hemagglutinin__InfluenzaA__AGQ80968

SEQ ID NO: 10193 - protein, 560 aa, synthetic construct
  REGION 1..560: note = hemagglutinin__InfluenzaA__AGQ80970
MNTQILVFALVAIIPTNADKICLGHHAVSNGTKVNTLTERGVEVVNATETVERTSIPRICSKGKKAVDLGQCGLLGTITGPPQCDQFLEFSADLIIERREGSDVCYPGKFVNEEALRQILRESGGIDKETMGFTYSGIRTNGATSACRRSGSSFYAEMKWLLSNTDNAAFPQTTKSYKNTRKDPALIIWGIHHSGSTTEQTKLYGSGNKLITVGSSNYQQSFVPSPGARPQVNGQSGRIDFHWLMLNPNDTVTFSFNGAFIAPDRASFLRGKSMGIQSGVQVDANCEGDCYHNGGTIISNLPFQNINSRAVGKCPRYVKQESLLLATGMKNVPEIPKGRGLFGAIAGFIENGWEGLIDGWYGFRHQNAQGEGTAADYKSTQSAIDQITGKLNRLIEKTNQQFELIDNEFTEVERQIGNVINWTRDSMTEVWSYNAELLVAMENQHTIDLADSEMNKLYERVRRQLRENAEEDGTGCFEIFHKCDDDCMASIRNNTYDHSKYREEAMQNRIQIDPVKLSSGYKDVILWFSFGASCFILLAIAMGLVFICVKNGNMRCTICI

SEQ ID NO: 10194 - protein, 560 aa, synthetic construct
  REGION 1..560: note = hemagglutinin__InfluenzaA__AGQ80971
MNTQILVFALVAIIPTNADKICLGHHAVSNGTKVNTLTERGVEVVNATETVERTSIPRICSKGKKTVDLGQCGLLGTITGPPQCDQFLEFSADLIIERREGSDVCYPGKFVNEEALRQILRESGGIDKETMGFTYSGIRTNGATSACRRSGSSFYAEMKWLLSNTDNAAFPQTTKSYKNTRKDPALIIWGIHHSGSTTEQTKLYGSGNKLITVGSSNYQQSFVPSPGARPQVNGQSGRIDFHWLMLNPNDTVTFSFNGAFIAPDRASFLRGKSMGIQSGVQVDANCEGDCYHNGGTIISNLPFQNINSRAVGKCPRYVKQESLLLATGMKNVPEIPKGRGLFGAIAGFIENGWEGLIDGWYGFRHQNAQGEGTAADYKSTQSAIDQITGKLNRLIEKTNQQFELIDNEFTEVERQIGNVINWTRDSMTEVWSYNAELLVAMENQHTIDLADSEMNKLYERVRRQLRENAEEDGTGCFEIFHKCDDDCMASIRNNTYDHSKYREEAMQNRIQIDPVKLSSGYKDVILWFSFGASCFILLAIAMGLVFICVKNGNMRCTICI

SEQ ID NO: 10195 - protein, 560 aa, synthetic construct
  REGION 1..560: note = hemagglutinin__InfluenzaA__AGQ80974
MNTQILVFALVAIIPTNADKICLGHHAVSNGTKVNTLTERGVEVVNATETVERTSIPRICSKGKRAVDLGQCGLLGTITGPPQCDQFLEFSADLIIERREGSDVCYPGKFVNEEALRQILRESGGIDKETMGFTYSGIRTNGATSACRRSGSSFYAEMKWLLSNTDNAAFPQTTKSYKNTRKDPALIIWGIHHSGSTTEQTKLYGSGNKLITVGSSNYQQSFVPSPGARPQVNGQSGRIDFHWLMLNPNDTVTFSFNGAFIAPDRASFLRGKSMGIQSGVQVDANCEGDCYHNGGTIISNLPFQNINSRAVGKCPRYVKQESLLLATGMKNVPEIPKGRGLFGAIAGFIENGWEGLVDGWYGFRHQNAQGEGTAADYKSTQSAIDQITGKLNRLIEKTNQQFELIDNEFTEVERQIGNVINWTRDSMTEVWSYNAELLVAMENQHTIDLADSEMNKLYERVRRQLRENAEEDGTGCFEIFHKCDDDCMASIRNNTYDHSKYREEAMQNRIQIDPVKLSSGYKDVILWFSFGASCFILLAIAMGLVFICVKNGNMRCTICI

SEQ ID NO: 10196 - protein, 560 aa, synthetic construct
  REGION 1..560: note = hemagglutinin__InfluenzaA__AGQ80977
MNTQILALALAAIIPTNADKICLGHHAVSNGTKVNTLTERGVEVVNATETVERTSIPRICSKGKRAVDLGQCGLLGTITGPPQCDQFLEFSADLIIERREGSDVCYPGKFVNEEALRQILRESGGIDKETMGFTYSGIRTNGATSACRRSGSSFYAEMKWLLSNTDNAAFPQTTKSYKNTRKDPALIIWGVHHSGSTTEQTKLYGSGNKLITVGSSNYQQSFVPSPGARPQVNGQSGRIDFHWLMLNPNDTVTFSFNGAFIAPDRASFLRGKSMGIQSGVQVDANCEGDCYHNGGTIISNLPFQNINSRAVGKCPRYVKQESLLLATGMKNVPEIPKGRGLFGAIAGFIENGWEGLVDGWYGFRHQNAQGEGTAADYKSTQSAIDQITGKLNRLIEKTNQQFELIDNEFTEVERQIGNVINWTRDSMTEVWSYNAELLVAMENQHTIDLADSEMNKLYERVRRQLRENAEEDGTGCFEIFHKCDDDCMASIRNNTYDHSKYREEAMQNRIQIDPVKLSSGYKDVILWFSFGASCFILLAIAMGLVFICVKSGNMRCTICI

SEQ ID NO: 10197 - protein, 560 aa, synthetic construct
  REGION 1..560: note = hemagglutinin__InfluenzaA__AGQ80978
MNTQILVFALVAIIPTNADKICLGHHAVSNGTKVNTLTERGVEVVNATETVERTSIPRICSKGKRAVDLGQCGLLGTITGPPQCDQFLEFSADLIIERREGSDVCYPGKFVNEEALRQILRESGGIDKETMGFTYSGIRTNGATSACRRSGSSFYAEMKWLLSNTDNAAFPQTTKSYKNTRKDPALIIWGIHHSGSITEQTKLYGSGNKLITVGSSNYQQSFVPSPGARPQVNGQSGRIDFHWLMLNPNDTVTFSFNGAFIAPDRASFLRGKSMGIQSGVQVDANCEGDCYHNGGTIISNLPFQNINSRAVGKCPRYVKQESLLLATGMKNVPEIPKGRGLFGAIAGFIENGWEGLVDGWYGFRHQNAQGEGTAADYKSTQSAIDQITGKLNRLIEKTNQQFELIDNEFTEVERQIGNVINWTRDSMTEVWSYNAELLVAMENQHTIDLADSEMNKLYERVRRQLRENAEEDGTGCFEIFHKCDDDCMASIRNNTYDHSKYREEAMQNRIQIDPVKLSSGYKDVILWFSFGASCFILLAIAMGLVFICVKNGNMRCTICI

SEQ ID NO: 10198 - protein, 560 aa, synthetic construct
  REGION 1..560: note = hemagglutinin__InfluenzaA__AGQ80979
MNTQILVFALVAIIPTNADKICLGHHAVSNGTKVNTLTERGVEVVNATETVERTSIPRICSKGKRAVDLGQCGLLGTITGPPQCDQFLEFSADLIIERREGSDVCYPGKFVNEEALRQILRESGGIDKETMGFTYSGIRTNGATSACRRSGSSFYAEMKWLLSNTDNAAFPQTTKSYKNTRKDPALIIWGIHHSGSTTEQTKLYGSGNKLITVGSSNYQQSFVPSPGARPQVNGQSGRIDFHWLMLNPNDTVTFSFNGAFIAPDRASFLRGKSIGIQSGVQVDANCEGDCYHNGGTIISNLPFQNINSRAVGKCPRYVKQESLLLATGMKNVPEIPKGRGLFGAIAGFIENGWEGLIDGWYGFRHQNAQGEGTAADYKSTQSAIDQITGKLNRLIEKTNQQFELIDNEFTEVERQIGNVINWTRDSMTEVWSYNAELLVAMENQHTIDLADSEMNKLYERVRRQLRENAEEDGTGCFEIFHKCDDDCMASIRNNTYDHSKYREEAMQNRIQIDPVKLSSGYKDVILWFSFGASCFILLAIAMGLVFICVKNGNMRCTICI

SEQ ID NO: 10199 - protein, 560 aa, synthetic construct; identical to SEQ ID NO: 10195
  REGION 1..560: note = hemagglutinin__InfluenzaA__AGQ80980

SEQ ID NO: 10200 - protein, 560 aa, synthetic construct; identical to SEQ ID NO: 10180
  REGION 1..560: note = hemagglutinin__InfluenzaA__AGQ80981

SEQ ID NO: 10201 - protein, 560 aa, synthetic construct; identical to SEQ ID NO: 10180
  REGION 1..560: note = hemagglutinin__InfluenzaA__AGQ80982

SEQ ID NO: 10202 - protein, 560 aa, synthetic construct; identical to SEQ ID NO: 10180
  REGION 1..560: note = hemagglutinin__InfluenzaA__AGQ80983

SEQ ID NO: 10203 - protein, 560 aa, synthetic construct; identical to SEQ ID NO: 10180
  REGION 1..560: note = hemagglutinin__InfluenzaA__AGQ80984

SEQ ID NO: 10204 - protein, 560 aa, synthetic construct; identical to SEQ ID NO: 10180
  REGION 1..560: note = hemagglutinin__InfluenzaA__AGQ80985

SEQ ID NO: 10205 - protein, 560 aa, synthetic construct; identical to SEQ ID NO: 10180
  REGION 1..560: note = hemagglutinin__InfluenzaA__AGQ80986

SEQ ID NO: 10206 - protein, 560 aa, synthetic construct; identical to SEQ ID NO: 10180
  REGION 1..560: note = hemagglutinin__InfluenzaA__AGQ80987

SEQ ID NO: 10207 - protein, 560 aa, synthetic construct; identical to SEQ ID NO: 10180
  REGION 1..560: note = hemagglutinin__InfluenzaA__AGQ80988

SEQ ID NO: 10208 - protein, 560 aa, synthetic construct
  REGION 1..560: note = hemagglutinin__InfluenzaA__AGQ80990
MNTQILVFALVAIIPTNADKICLGHHAVSNGTKVNTLTERGVEVVNATETVERTSIPKICSKGKRAVDLGQCGLLGTITGPPQCDQFLEFSADLIIERREGSDVCYPGKFVNEEALRQILRESGGIDKETMGFTYSGIRTNGATSACRRSGSSFYAEMKWLLSNTDNAAFPQTTKSYKNTRKDPALIIWGIHHSGSTTEQTKLYGSGNKLITVGSSNYQQSFVPSPGARPQVNGQSGRIDFHWLMLNPNDTVTFSFNGAFIAPDRASFLRGKSMGIQSGVQVDANCEGDCYHNGGTIISNLPFQNINSRAVGKCPRYVKQESLLLATGMKNVPEIPKGRGLFGAIAGFIENGWEGLIDGWYGFRHQNAQGEGTAADYKSTQSAIDQITGKLNRLIEKTNQQFELIDNEFTEVERQIGNVINWTRDSMTEVWSYNAELLVAMENQHTIDLADSEMNKLYERVRRQLRENAEEDGTGCFEIFHKCDDDCMASIRNNTYDHSKYREEAMQNRIQIDPVKLSSGYKDVILWFSFGASCFILLAIAMGLVFICVKNGNMRCTICI

SEQ ID NO: 10209 - protein, 560 aa, synthetic construct; identical to SEQ ID NO: 10194
  REGION 1..560: note = hemagglutinin__InfluenzaA__AGQ80991

SEQ ID NO: 10210 - protein, 560 aa, synthetic construct
  REGION 1..560: note = hemagglutinin__InfluenzaA__AGQ80992
MNTQILVFALVAIIPTNADKICLGHHAVSNGTKVNTLTERGVEVVNATETVERTNVPRICSKGKRTVDLGQCGLLGTITGPPQCDQFLEFSADLIIERREGSDVCYPGKFMNEEALRQILRESGGIDKETMGFTYSGIRTNGATSACRRSGSSFYAEMKWLLSNTDNAAFPQMTKSYKNTRKDPALIIWGIHHSGSTTEQTKLYGSGNKLITVGSSNYQQSFVPSPGARPQVNGQSGRIDFHWLMLNPNDTVTFSFNGAFIAPDRACFLRGKSMGIQSGVQVDASCEGDCYHSGGTIISNLPFQNINSRAVGKCPRYVKQESLMLATGMKNVPEIPKGRGLFGAIAGFIENGWEGLIDGWYGFRHQNAQGEGTAADYKSTQSAIDQITGKLNRLIEKTNQQFELIDNEFTEVEKQIGNVINWTRDSMTEVWSYNAELLVAMENQHTIDLADSEMNKLYERVKRQLRENAEEDGTGCFEIFHKCDDDCMASIRNNTYDHSKYREEAMQNRIQIDPVKLSSGYKDVILWFSFGASCFILLAIAMGLVFICVKNGNMRCTICI

SEQ ID NO: 10211 - protein, 560 aa, synthetic construct; identical to SEQ ID NO: 10180
  REGION 1..560: note = hemagglutinin__InfluenzaA__AGQ80993

SEQ ID NO: 10212 - protein, 560 aa, synthetic construct; identical to SEQ ID NO: 10187
  REGION 1..560: note = hemagglutinin__InfluenzaA__AGQ80994

SEQ ID NO: 10213 - protein, 560 aa, synthetic construct; identical to SEQ ID NO: 10189
  REGION 1..560: note = hemagglutinin__InfluenzaA__AGQ80995

SEQ ID NO: 10214 - protein, 560 aa, synthetic construct; identical to SEQ ID NO: 10189
  REGION 1..560: note = hemagglutinin__InfluenzaA__AGQ80996

SEQ ID NO: 10215 - protein, 560 aa, synthetic construct
  REGION 1..560: note = hemagglutinin__InfluenzaA__AGQ80997
MNTQILVFALVAIIPTNADKICLGHHAVSNGTKVNTLTERGVEVVNATETVERTNIPRICSKGKRTVDLGQCGLLGTITGPPQCDQFLEFSADLIIERREGSDVCYPGKFVNEEALRQILRESGGIDKETMGFTYSGIRTDGATSACRRSGSSFYAEMKWLLSNTDNAAFPQMTKSYKNTRKDPALIIWGIHHSGSTTEQTKLYGSGNKLITVGSSNYQQSFVPSPGARPQVNGQSGRIDFHWLMLNPNDTVTFSFNGAFIAPDRASFLRGKSMGIQSGVQVDANCEGDCYHSGGTIISNLPFQNINSRAVGKCPRYVKQESLLLATGMKNVPEIPKGRGLFGAIAGFIENGWEGLIDGWYGFRHQNSQGEGTAADYKSTQSAIDQITGKLNRLIEKTNQQFELIDNEFTEVEKQIGNVINWTRDSMTEVWSYNAELLVAMENQHTIDLADSEMNKLYERVKRQLRENAEEDGTGCFEIFHKCDDDCMASIRNNTYDHSKYREEAMQNRIQIDPVKLSSGYKDVILWFSFGASCFILLAIAMGLVFICVKNGNMRCTICI

SEQ ID NO: 10216 - protein, 560 aa, synthetic construct
  REGION 1..560: note = hemagglutinin__InfluenzaA__AGQ81000
MNTQILVFALVAIIPTNADKICLGHHAVSNGTKVNTLTERGVEVVNATETVERTNIPRICSKGKRTVDLGQCGLLGTITGPPQCDQFLEFSADLIIERREGSDVCYPGKFVNEEALRQILRESGGIGKETMGFTYSGIRTNGATSACRRSGSSFYAEMKWLLSNTDNAAFPQMTKSYKNTRKDPALIIWGIHHSGSTTEQTKLYGSGNKLITVGSSNYQKSFVPSPGARPQVNGQSGRIDFHWLMLNPNDTVTFSFNGAFIAPDRASFLRGKSMGIQSGVQVDANCEGDCYHNGGTIISNLPFQNINSRAVGKCPRYVKQESLLLATGMKNVPEIPKGRGLFGAIAGFIENGWEGLIDGWYGFRHQNAQGEGTAADYKSTQSAIDQITGKLNRLIEKTNQQFELIDNEFTEVEKQIGNVINWTRDSMTEVWSYNAELLVAMENQHTIDLADSEMNKLYERVKRQLRENAEEDGTGCFEIFHKCDDDCMASIRNNTYDHSKYREEAMQNRIQIDPVKLSSGYKDVILWFSFGASCFILLAIAMGLVFICVKNGNMRCTICI

SEQ ID NO: 10217 - protein, 560 aa, synthetic construct
  REGION 1..560: note = hemagglutinin__InfluenzaA__AGQ81001
MNTQILVFALVAIIPTNADKICLGHHAVSNGTKVNTLTERGVEVVNATETVERTNIPRICSKGKRTVDLGQCGLLGTITGPPQCDQFLEFSADLIIERREGSDVCYPGKFVNEEALRQILRESGGIDKETMGFTYSGIRTNGATSACRRSGSSFYAEMKWLLSNTDNAAFPQMTKSYKNTRKDPALIIWGIHHSGSTTEQTKLYGSGNKLITVGTSNYQQSFVPSPGARPQVNGQSGRIDFHWLMLNPNDTVTFSFNGAFIAPDRASFLRGKSMGIQSGVQVDANCEGDCYHNGGTIISNLPFQNINSRAVGKCPRYVKQESLLLATGMKNVPEIPKGRGLFGAIAGFIENGWEGLIDGWYGFRHQNAQGEGTAADYKSTQSAIDQITGKLNRLIEKTNQQFELIDNEFTEIEKQIGNVINWTRDSMTEVWSYNAELLVAMENQHTIDLADSEMNKLYERVKRQLRENAEEDGTGCFEIFHKCDDDCMASIRNNTYDHSKYREEAMQNRIQIDPVKLSSGYKDVILWFSFGASCFILLAIAMGLVFICVKNGNMRCTICI

SEQ ID NO: 10218 - protein, 560 aa, synthetic construct; identical to SEQ ID NO: 10195
  REGION 1..560: note = hemagglutinin__InfluenzaA__AGQ81002

SEQ ID NO: 10219 - protein, 560 aa, synthetic construct; identical to SEQ ID NO: 10195
  REGION 1..560: note = hemagglutinin__InfluenzaA__AGQ81003

SEQ ID NO: 10220 - protein, 560 aa, synthetic construct; identical to SEQ ID NO: 10195
  REGION 1..560: note = hemagglutinin__InfluenzaA__AGQ81004

SEQ ID NO: 10221 - protein, 560 aa, synthetic construct; identical to SEQ ID NO: 10195
  REGION 1..560: note = hemagglutinin__InfluenzaA__AGQ81005

SEQ ID NO: 10222 - protein, 560 aa, synthetic construct; identical to SEQ ID NO: 10195
  REGION 1..560: note = hemagglutinin__InfluenzaA__AGQ81006

SEQ ID NO: 10223 - protein, 560 aa, synthetic construct; identical to SEQ ID NO: 10195
  REGION 1..560: note = hemagglutinin__InfluenzaA__AGQ81007

SEQ ID NO: 10224 - protein, 560 aa, synthetic construct; identical to SEQ ID NO: 10195
  REGION 1..560: note = hemagglutinin__InfluenzaA__AGQ81008

SEQ ID NO: 10225 - protein, 560 aa, synthetic construct
  REGION 1..560: note = hemagglutinin__InfluenzaA__AGQ81009
MNTQILVFALVAIIPTNADKICLGHHAVSNGTKVNTLTERGVEVVNATETVERTSIPRICSKGKRAVDLGQCGLLGTITGPPQCDQFLEFSADLIIERQEGSDVCYPGKFVNEEALRQILRESGGINKETMGFTYSGIRTNGATSACRRSGSSFYAEMKWLLSNTDNAAFPQTTKSYKNTRKDPALIIWGIHHSGSTTEQTKLYGSGNKLITVGSSNYQQSFVPSPGARPQVNGQSGRIDFHWLMLNPNDTVTFSFNGAFIAPDRASFLRGKSMGIQSGVQVDANCEGDCYHNGGTIISNLPFQNINSRAVGKCPRYVKQESLLLATGMKNVPEIPKGRGLFGAIAGFIENGWEGLVDGWYGFRHQNAQGEGTAADYKSTQSAIDQITGKLNRLIEKTNQQFELIDNEFTEVERQIGNVINWTRDSMTEVWSYNAELLVAMENQHTIDLADSEMNKLYERVRRQLRENAEEDGTGCFEIFHKCDDDCMASIRNNTYDHSKYREEAMQNRIQIDPVKLSSGYKDVILWFSFGASCFILLAIAMGLVFICVKNGNMRCTICI

SEQ ID NO: 10226 - protein, 560 aa, synthetic construct
  REGION 1..560: note = hemagglutinin__InfluenzaA__AGQ81011
MNTQILVFALIAITPTNSDKICLGHHAVSNGTKVNTLTERGVEVVNATETVERTSIPRICSKGKRTVDLGQCGLLGTITGPPQCDQFLEFSADLIIERREGSDVCYPGKFVNEEALRQILRESGGIDKEAMGFTYSGIRTNGATSACRRSESSFYAEMKWLLSNTDNAAFPPMTKSYKNTRKAPALIIWGIHHSGSTAEQTKLYGSGNKLVTVRSSNYQQSFVPSPGAGPKVNGQSGRIDFHWLMLNPNDTVTFSFNGAFIAPDRASFLRGKSMGIQSGVQVDANCEGDCYHSGGTIISNLPFQNIDSRVVGKCPRYVKQKSLLLATGMKNVPEIPKGRGLFGAIAGFIENGWEGLIDGWYGFRHQNAQGEGTAADYKSTQSAINQMTGKLNRLIEKTNQQFELIDNEFTEVEKQIGNVINWTRDSITEVWSYNAELLVAMENQHTIDLADSEMNKLYERVKRQLRENAEEDGTGCFEIFHKCDDDCMASIRNNTYDHSKYREEAMQNRIQIDPVKLSSGYKDVILWFSFGASCLILLAIAMGLVFICVKNGNMRCTICI

SEQ ID NO: 10227 - protein, 560 aa, synthetic construct
  REGION 1..560: note = hemagglutinin__InfluenzaA__AGQ81012
MNTQILVFALIAIIPTNSDKICLGHHAVSNGTKVNTLTERGVEVVNATETVERTSIPRICSKGKRTVDLGQCGLLGTITGPPQCDQFLEFSADLIIERREGSDVCYPGKFVNEEALRQILRESGGINKEAMGFTYSGIRTNGATSACRRSGSSFYAEMKWLLSNTDNAAFPPMTKSYKNTRKAPALIIWGIHHSGSTAEQTKLYGSGNKLVTVRSSNYQQSFVPSPGAGPQVNGQSGRIDFHWLMLNPNDTVTFSFNGAFIAPDRASFLRGKSMGIQSGVQVDANCEGDCYHSGGTIISNLPFQNIDSRVVGKCPRYVKQKSLLLATGMKNVPEIPKGRGLFGAIAGFIENGWEGLIDGWYGFRHQNAQGEGTAADYKSTQSAINQMTGKLNRLIEKTNQQFELIDNEFTEVEKQIGNVINWTRDSITEVWSYNAELLVAMENQHTIDLADSEMNKLYERVKRQLRENAEEDGTGCFEIFHKCDDDCMASIRNNTYDHSKYREEAMQNRIQIDPVKLSSGYKDVILWFSFGASCFILLAIAMGLVFICVKNGNMRCTICI

SEQ ID NO: 10228 - protein, 560 aa, synthetic construct
  REGION 1..560: note = hemagglutinin__InfluenzaA__AGQ81017
MNTQILVFALIAITPTNSDKICLGHHAVSNGTKVNTLTERGVEVVNATETVERTSIPRICSKGKRTVDLGQCGLLGTITGPPQCDQFLEFSADLIIERREGSDVCYPGKFVNEEALRQILRESGGIDKEAMGFTYSGIRTNGATSACRRSGSSFYAEMKWLLSNTDNAAFPPMTKSYKNTRKAPALIIWGIHHSGSTAEQTKLYGSGNKLVTVRSSNYQQSFVPSPGAGPQVNGQSGRIDFHWLMLNPNDTVTFSFNGAFIAPDRASFLRGKSMGIQSGVQVDANCEGDCYHSGGTIISNLPFQNIDSRVVGKCPRYVKQKSLLLATGMKNVPEIPKGRGLFGAIAGFIENGWEGLIDGWYGFRHQNAQGEGTAADYKSTQSAINQMTGKLNRLIEKTNQQFELIDNEFTEVEKQIGNVINWTRDSITEVWSYNAELLVAMENQHTIDLADSEMNKLYERVKRQLRENAEEDGTGCFEIFHKCDDDCMASIRNNTYDHSKYREEAMQNRIQIDPVKLSSGYKDVILWFSFGASCFILLAIAMGLVFICVKNGNMRCTICI

SEQ ID NO: 10229 - protein, 560 aa, synthetic construct
  REGION 1..560: note = hemagglutinin__InfluenzaA__AGQ81018
MNTQILVFALIAIIPTNSDKICLGHHAVSNGTKVNTLTERGVEVVNATETVERTSIPRICSKGKRTVDLGQCGLLGTITGPPQCDQFLEFSADLIIERREGSDVCYPGKFVNEEALRQILRESGGIVKEAMGFTYSGIRTNGATSACRRSGSSFYAEMKWLLSNTDNAAFPPMTKSYKNTRKAPAIIIWGIHHSGSTAEQTKLYGSGNKLVTVRSSNYQQSFVPSPGAGPQVNGQSGRIDFHWLMLNPNDTVTFSFNGAFIAPDRASFLRGKSMGIQSGVQVDANCEGDCYHSRGTIISNLPFQNIDSRVVGKCPRYVKQKSLLLATGMKNVPEIPKGRGLFGAIAGFIENGWEGLIDGWYGFRHQNAQGEGTAADYKSTQSAINQMTGKLNRLIEKTNQQFELIDNEFTEVEKQIGNVINWTRDSITEVWSYNAELLVAMENQHTIDLADSEMNKLYERVKRQLRENAEEDGTGCFEIFHKCDDDCMASIRNNTYDHSKYREEAMQNRIQIDPVKLSSGYKDVILWFSFGASCFILLAIAMGLVFICVKNGNMRCTICI

SEQ ID NO: 10230 - protein, 560 aa, synthetic construct; identical to SEQ ID NO: 10229
  REGION 1..560: note = hemagglutinin__InfluenzaA__AGQ81019

SEQ ID NO: 10231 - protein, 560 aa, synthetic construct; identical to SEQ ID NO: 10228
  REGION 1..560: note = hemagglutinin__InfluenzaA__AGQ81020

SEQ ID NO: 10232 - protein, 560 aa, synthetic construct; identical to SEQ ID NO: 10229
  REGION 1..560: note = hemagglutinin__InfluenzaA__AGQ81021

SEQ ID NO: 10233 - protein, 560 aa, synthetic construct; identical to SEQ ID NO: 10228
  REGION 1..560: note = hemagglutinin__InfluenzaA__AGQ81022

SEQ ID NO: 10234 - protein, 560 aa, synthetic construct; identical to SEQ ID NO: 10229
  REGION 1..560: note = hemagglutinin__InfluenzaA__AGQ81023

SEQ ID NO: 10235 - protein, 560 aa, synthetic construct
  REGION 1..560: note = hemagglutinin__InfluenzaA__AGQ81025
MNTQILVFALIAIIPTNADKICLGHHAVSNGTKVNTLTERGVEVVNATETVERTSIPRICSKGKRTVDLGQCGLLGTITGPPQCDQFLEFSADLIIERREGSDVCYPGKFVNEEALRQILRESGGIDKEAMGFTYSGIRTNGVTSACRRSGSSFYAEMKWLLSNTDNAAFPPMTKSYKNTRKAPALIIWGIHHSGSTAEQTKLYGSGNKLVTVRSSNYQQSFVPSPGAGPQVNGQSGRIDFHWLMLNPNDTVTFSFNGAFIAPDRASFLRGKSMGIQSGVQVDANCEGDCYHSGGTIISNLPFQNIDSRVVGKCPRYVKQKSLLLATGMKNVPEIPKGRGLFGAIAGFIENGWEGLIDGWYGFRHQNAQGEGTAADYKSTQSAINQMTGKLNRLIEKTNQQFGLIDNEFTEVEKQIGNVINWTRDSITEVWSYNAELLVAMENQHTIDLADSEMNKLYERVKRQLRENAEEDGTGCFEIFHKCDDDCMASIRNNTYDHSKYREEAMQNRIQIDPVKLSSGYKDVILWFSFGASCFILLAIAMGLVVICVKNGNMRCTICI

SEQ ID NO: 10236 - protein, 560 aa, synthetic construct
  REGION 1..560: note = hemagglutinin__InfluenzaA__AGQ81026
MNTQILVFALIAIIPTNADKICLGHHAVSNGTKVNTLTERGVEVVNATETVERTSIPRICSKGKRTVDLGQCGLLGTITGPPQCDQFLEFSADLIIERREGSDVCYPGKFVNEEALRQILRESGGIDKEAMGFTYSGIRTNGATSACRRSGSSFYAEMKWLLSNTDNAAFPPTTKSYKNTRKAPALIIWGIHHSGSTAEQTKLYGSGNKLVTVRSSNYQQSFVPSPGAGPQVNGQSGRIDFHWLMLNPNDTVTFSFNGAFIAPDRASFLRGKSMGIQSGVQVDANCEGDCYHSGGTIISNLPFQNIDSRVVGKCPRYVKQKSLLLATGMKNVPEIPKGRGLFGAIAGFIENGWEGLIDGWYGFRHQNAQGEGTAADYKSTQSAINQMTGKLNRLIEKTNQQFELIDNEFTEVEKQIGNVINWTRDSITEVWSYNAELLVAMENQHTIDLADSEMNKLYERVKRQLRENAEEDGTGCFEIFHKCDDDCMASIRNNTYDHSKYREEAMQNRIQIDPVKLSSGYKDVILWFSFGASCFILLAIAMGLVFICVKNGNMRCTICI

SEQ ID NO: 10237 - protein, 560 aa, synthetic construct
  REGION 1..560: note = hemagglutinin__InfluenzaA__AGQ81027
MNTQILVFALIAIIPTNADKICLGHHAVSNGTKVNTLTERGVEVVNATETVERTSIPRICSKGKRTVDLGQCGLLGTITGPPQCDQFLEFSADLIIERREGSDVCYPGKFVNEEALRQILRESGGIDKEAMGFTYSGIRTNGVTSACRRSGSSFYAEMKWLLSNTDNAAFPPMTKSYKNTRKAPALIIWGIHHSGSTAEQTKLYGSGNKLVTVRSSNYQQSFVPSPGAGPQVNGQSGRIDFHWLMLNPNDTVTFSFNGAFIAPDRASFLRGKSMGIQSGVQVDANCEGDCYHSGGTIISNLPFQNIDSRVVGKCPRYVKQKSLLLATGMKNVPEIPKGRGLFGAIAGFIENGWEGLIDGWYGFRHQNAQGEGTAADYKSTQSAINQMTGKLNRLIEKTNQQFELIDNEFTEVEKQIGNVINWTRDSITEVWSYNAELLVAMENQHTIDLADSEMNKLYERVKRQLRENAEEDGTGCFEIFHKCDDDCMASIRNNTYDHSKYREEAMQNRIQIDPVKLSSGYKDVILWFSFGASCFILLAIAMGLVFICVKNGNMRCTICI

SEQ ID NO: 10238 - protein, 560 aa, synthetic construct
  REGION 1..560: note = hemagglutinin__InfluenzaA__AGQ81028
MNTQILVFALIAIIPTNADKICLGHHAVSNGTKVNTLTERGVEVVNATETVERTSIPRICSKGKRTVDLGQCGLLGTITGPPQCDQFLEFSADLIIERREGSDVCYPGKFVNEEALRQILRESGGIDKEAMGFTYSGIRTNGATSACRRSGSSFYAEMKWLLSNTDNAAFPPTTKSYKNTRKAPALIIWGIHHSGSTAEQTKLYGSGNKLVTVRSSNYQQSFVPSPGAGPQVNGQSGRIDFHWLMLNPNDTVTFSFNGAFIAPDRASFLRGKSMGIQSGVQVDANCEGDCYHSGGTIISNLPFQNIDSRVVGKCPRYVKQKSLLLATGMKNVPEIPKGRGLFGAIAGFIENGWEGLIDGWYGFRHQNAQGEGTAADYKSTQSAINQMTGKLNRLIEKTNQQFELIDNEFTEVEKQIGNVINWTRDSITEMWSYNAELLVAMENQHTIDLADSEMNKLYERVKRQLRENAEEDGTGCFEIFHKCDDDCMASIRNNTYDHSKYREEAMQNRIQIDPVKLSSGYKDVILWFSFGASCFILLAIAMGLVFICVKNGNMRCTICI

SEQ ID NO: 10239 - protein, 560 aa, synthetic construct
  REGION 1..560: note = hemagglutinin__InfluenzaA__AGQ81029
MNTQILVFALIAIIPTNADKICLGHHAVSNGTKVNTLTERGVEVVNATETVERTSIPRICSKGKRTVDLGQCGLLGTITGPPQCDQFLEFSADLIIERREGSDVCYPGKFVNEEALRQILRESGGIDKEAMGFTYSGIRTNGVTSACRRSGSSFYAEMKWLLSNTDNAAFPPMTKSYKNTRKAPALIIWGIHHSGSTAEQTKLYGSGNKLVTVRSSNYQQSFMPSPGAGPQVNGQSGRIDFHWLMLNPNDTVTFSFNGAFIAPDRASFLRGKSMGIQSGVQVDANCEGDCYHSGGTIISNLPFQNIDSRVVGKCPRYVKQKSLLLATGMKNVPEIPKGRGLFGAIAGFIENGWEGLIDGWYGFRHQNAQGEGTAADYKSTQSAINQMTGKLNRLIEKTNQQFELIDNEFTEVEKQIGNVINWTRDSITEVWSYNAELLVAMENQHTIDLADSEMNKLYERVKRQLRENAEEDGTGCFEIFHKCDDDCMASIRNNTYDHSKYREEAMQNRIQIDPVKLSSGYKDVILWFSFGASCFILLAIAMGLVFICVKNGNMRCTICI

SEQ ID NO: 10240 - protein, 560 aa, synthetic construct
  REGION 1..560: note = hemagglutinin__InfluenzaA__AGQ81031
MNTQILVFALIAIIPTNADKICLGHHAVSNGTKVNTLTERGVEVVNATETVERTSIPRICSKGKRTVDLGQCGLLGTITGPPQCDQFLEFSADLIIERREGSDVCYPGKFVNEEALRQILRESGGINKEAMGFTYSGIRTNGATSACRRSGSSFYAEMKWLLSNTDNAAFPPMTKSYKNTRKAPALIIWGIHHSGSTAEQTKLYGSGNKMVTVRSSNYQQSFVPSPGAGPQVNGQSGRIDFHWLMLNPNDTVTFSFNGAFIAPDRASFLRGKSMGIQSGVQVDANCEGDCYHSGGTIISNLPFQNIDSRVVGKCPRYVKQKSLLLATGMKNVPEIPKGRGLFGAIAGFIENGWEGLIDGWYGFRHQNAQGEGTAADYKSTQSAINQMTGKLNRLIEKTNQQFELIDNEFTEVERQIGNVINWTRDSITEVWSYNAELLVAMENQHTIDLADSEMNKLYERVKRQLRENAEEDGTGCFEIFHKCDDDCMASIRNNTYDHSKYREEAMQNRIQIDPVKLSSGYKDVILWFSFGASCFILLAIAMGLVFICVKNGNMRCTICI

SEQ ID NO: 10241 - protein, 560 aa, synthetic construct; identical to SEQ ID NO: 10236
  REGION 1..560: note = hemagglutinin__InfluenzaA__AGQ81032

SEQ ID NO: 10242 - protein, 560 aa, synthetic construct; identical to SEQ ID NO: 10237
  REGION 1..560: note = hemagglutinin__InfluenzaA__AGQ81033

SEQ ID NO: 10243 - protein, 560 aa, synthetic construct; identical to SEQ ID NO: 10236
  REGION 1..560: note = hemagglutinin__InfluenzaA__AGQ81034

SEQ ID NO: 10244 - protein, 560 aa, synthetic construct; identical to SEQ ID NO: 10237
  REGION 1..560: note = hemagglutinin__InfluenzaA__AGQ81035

SEQ ID NO: 10245 - protein, 560 aa, synthetic construct; identical to SEQ ID NO: 10237
  REGION 1..560: note = hemagglutinin__InfluenzaA__AGQ81036

SEQ ID NO: 10246 - protein, 560 aa, synthetic construct; identical to SEQ ID NO: 10237
  REGION 1..560: note = hemagglutinin__InfluenzaA__AGQ81037

SEQ ID NO: 10247 - protein, 560 aa, synthetic construct; identical to SEQ ID NO: 10229
  REGION 1..560: note = hemagglutinin__InfluenzaA__AGQ81038

SEQ ID NO: 10248 - protein, 560 aa, synthetic construct; identical to SEQ ID NO: 10229
  REGION 1..560: note = hemagglutinin__InfluenzaA__AGQ81039

SEQ ID NO: 10249 - protein, 560 aa, synthetic construct
  REGION 1..560: note = hemagglutinin__InfluenzaA__AGQ81040
MNTQILVFALIAIIPTNADKICLGHHAVSNGTKVNTLTERGVEVVNATETVERTNIPRICSKGKRTVDLGQCGLLGTITGPPQCDQFLEFSADLIIERREGSDVCYPGKFVNEEALRQILRESGGIDKEAMGFTYSGIRTNGATSACRRSGSSFYAEMKWLLSNTDNAAFPQMTKSYKNTRKDPALIIWGIHHSGSTAEQTKLYGSGNKLVTVGSSNYQQSFVPSPGARPQVNGQSGRIDFHWLMLNPNDTVTFSFNGAFIAPDRASFLRGKSMGIQSGVQIDANCEGDCYHSGGTIISNLPFQNIDSRAVGKCPRYVKQKSLLLATGMKNVPEIPKGRGLFGAIAGFIENGWEGLIDGWYGFRHQNAQGEGTAADYKSTQSAIDQITGKLNRLIEKTNQQFELIDNEFTEVEKQIGNVINWTRDSITEVWSYNAELLVAMENQHTIDLADSEMNKLYERVKRQLRENAEEDGTGCFEIFHKCDDDCMASIRNNTYDHSKYREEAMQNRIQIDPVKLSSGYKDVILWFSFGASCFILLAIAMGLVFICVKNGNMRCTICI

SEQ ID NO: 10250 - protein, 560 aa, synthetic construct
  REGION 1..560: note = hemagglutinin__InfluenzaA__AGQ81041
MNTQILVFALIAIIPTNADKICLGHHAVSNGTKVNTLTERGVEVVNATETVERTNIPRICSKGKRTVDLGQCGLLGTITGPPQCDQFLEFSADLIIERREGSDVCYPGKFVNEEALRQILRESGGIDKEAMGFTYSGIRTNGATSACRRSGSSFYAEMKWLLSNTDNAAFPQTTKSYKNTRKDPALIIWGIHHSGSTAEQTKLYGSGNKLVTVGSSNYQQSFVPSPGARPQVNGQSGRIDFHWLMLNPNDTVTFSFNGAFIAPDRASFLRGKSMGIQSGVQVDANCEGDCYHSGGTIISNLPFQNIDSRAVGKCPRYVKQKSLLLATGMKNVPEIPKGRGLFGAIAGFIENGWEGLIDGWYGFRHQNAQGEGTAADYKSTQSAIDQITGKLNRLIEKTNQQFELIDNEFTEVEKQIGNVINWTRDSITEVWSYNAELLVAMENQHTIDLADSEMNKLYERVKRQLRENAEEDGTGCFEIFHKCDDDCMASIRNNTYDHSKYREEAMQNRIQIDPVKLSSGYKDVILWFSFGASCFILLAIAMGLVFICVKNGNMRCTICI

SEQ ID NO: 10251 - protein, 560 aa, synthetic construct
  REGION 1..560: note = hemagglutinin__InfluenzaA__AGQ81042
MNTQILVFALIAIIPTNADKICLGHHAVSNGTKVNTLTERGVEVVNATETVERTNIPRICSKGKRTVDLGQCGLLGTITGPPQCDQFLEFSADLIIERREGSDVCYPGKFVNEEALRQILRESGGIDKEAMGFTYSGIRTNGATSACRRSGSSFYAEMKWLLSNTDNAAFPQMTKSYKNTRKDPALIIWGIHHSGSTAEQTKLYGSGNKLVTVGSSNYQQSFVPSPGARPQVNGQSGRIDFHWLMLNPNDTVTFSFNGAFIAPDRASFLRGKSMGIQSGVQVDANCEGDCYHSGGTIISNLPFQNIDSRAVGKCPRYVKQKSLLLATGMKNVPEIPKGRGLFGAIAGFIENGWEGLIDGWYGFRHQNAQGEGTAADYKSTQSAIDQITGKLNRLIEKTNQQFELIDNEFTEVEKQIGNVINWTRDSITEVWSYNAELLVAMENQHTIDLADSEMNKLYERVKRQLRENAEEDGTGCFEIFHKCDDDCMASIRNNTYDHSKYREEAMQNRIQIDPVKLSSGYKDVILWFSFGASCFILLAIAMGLVFICVKNGNMRCTICI

SEQ ID NO: 10252 - protein, 560 aa, synthetic construct
  REGION 1..560: note = hemagglutinin__InfluenzaA__AGQ81043
MNTQILVFALIAIIPTNADKICLGHHAVSNGTKVNTLTERGVEVVNATETVERTNIPRICSKGKRTVDLGQCGLLGTITGPPQCDQFLEFSADLIIERREGSDVCYPGKFVNEEALRQILRESGGIDKEEMGFTYSGIRTNGATSACRRSGSSFYAEMKWLLSNTDNAAFPQMTKSYKNTRKSPALIVWGIHHSVSTAEQTKLYGSGNKLVTVGSSNYQQSFVPSPGARPQVNGLSGRIDFHWLMLNPNDTVTFSFNGAFIAPDRASFLRGKSMGIQSGVQVDANCEGDCYHSGGTIISNLPFQNIDSRAVGKCPRYVKQRSLLLATGMKNVPEIPKGRGLFGAIAGFIENGWEGLIDGWYGFRHQNAQGEGTAADYKSTQSAIDQITGKLNRLIEKTNQQFELIDNEFNEVEKQIGNVINWTRDSITEVWSYNAELLVAMENQHTIDLADSEMDKLYERVKRQLRENAEEDGTGCFEIFHKCDDDCMASIRNNTYDHSKYREEAMQNRIQIDPVKLSSGYKDVILWFSFGASCFILLAIVMGLVFICVKNGNMRCTICI

SEQ ID NO: 10253 - protein, 560 aa, synthetic construct; identical to SEQ ID NO: 9988
  REGION 1..560: note = hemagglutinin__InfluenzaA__AGQ81044

SEQ ID NO: 10254 - protein, 560 aa, synthetic construct; identical to SEQ ID NO: 9988
  REGION 1..560: note = hemagglutinin__InfluenzaA__AGQ81045

SEQ ID NO: 10255 - protein, 560 aa, synthetic construct; identical to SEQ ID NO: 9988
  REGION 1..560: note = hemagglutinin__InfluenzaA__AGQ81046

SEQ ID NO: 10256 - protein, 560 aa, synthetic construct; identical to SEQ ID NO: 10237
  REGION 1..560: note = hemagglutinin__InfluenzaA__AGQ81047

SEQ ID NO: 10257 - protein, 560 aa, synthetic construct; identical to SEQ ID NO: 10236
  REGION 1..560: note = hemagglutinin__InfluenzaA__AGQ81049

SEQ ID NO: 10258 - protein, 560 aa, synthetic construct; identical to SEQ ID NO: 10237
  REGION 1..560: note = hemagglutinin__InfluenzaA__AGQ81050

SEQ ID NO: 10259 - protein, 560 aa, synthetic construct
  REGION 1..560: note = hemagglutinin__InfluenzaA__AGQ81051
MNTQILVFALIAIIPTNADKICLGHHAVSNGTKVNTLTERGVEVVNATETVERTSIPRICSKGKRTVDLGQCGLLGTITGPPQCDQFLEFSADLIIERREGSDVCYPGKFVNEEALRQILRESGGINKEAMGFTYSGIRTNGATSACRRSGSSFYAEMKWLLSNTDNAAFPPMTKSYKNTRKAPALIIWGIHHSGSTAEQTKLYGSGNKLVTVRSSNYQQSFVPSPGAGPQVNGQSGRIDFHWLMLNPNDTVTFSFNGAFIAPDRASFLRGKSMGIQSGVQVDANCEGDCYHSGGTIISNLPFQNIDSRVVGKCPRYVKQKSLLLATGMKNVPEIPKGRGLFGAIAGFIENGWEGLIDGWYGFRHQNAQGEGTAADYKSTQSAINQMTGKLNRLIEKTNQQFELIDNEFTEVEKQIGNVINWTRDSITEVWSYNAELLVAMENQHTIDLADSEMNKLYERVKRQLRENAEEDGTGCFEIFHKCDDDCMASIRNNTYDHSKYREEAMQNRIQIDPVKLSSGYKDVILWFSFGASCFILLAIAMGLVFICVKNGNMRCTICI

SEQ ID NO: 10260 - protein, 560 aa, synthetic construct; identical to SEQ ID NO: 10237
  REGION 1..560: note = hemagglutinin__InfluenzaA__AGQ81052

SEQ ID NO: 10261 - protein, 560 aa, synthetic construct
  REGION 1..560: note = hemagglutinin__InfluenzaA__AGQ81053
MNTQILVFALIAIIPTNADKICLGHHAVSNGTKVNTLTERGVEVVNATETVERTSIPRICSKGKRTVDLGQCGLLGTITGPPQCDQFLEFSADLIIERREGSDVCYPGKFVNEEALRQILRESGGINKEAMGFTYSGIRTNGATSACRRSGSSFYAEMKWLLSNTDNAAFPPMTKSYKNTRKAPALIIWGIHHSGSTAEQTKLYGSGNKMVTVRSSNYQQSFVPSPGAGPQVNGQSGRIDFHWLMLNPNDTVTFSFNGAFIAPDRASFLRGKSMGIQSGVQVDANCEGDCYHSGGTIISNLPFQNIDSRVVGKCPRYVKQKSLLLATGMKNVPEIPKGRGLFGAIAGFIENGWEGLIDGWYGFRHQNAQGEGTAADYKSTQSAINQMTGKLNRLIEKTNQQFELIDNEFTEVEKQIGNVINWTRDSITEVWSYNAELLVAMENQHTIDLADSEMNKLYERVKRQLRENAEEDGTGCFEIFHKCDDDCMASIRNNTYDHSKYRKEAMQNRIQIDPVKLSSGYKDVILWFSFGASCFILLAIAMGLVFICVKNGNMRCTICI

SEQ ID NO: 10262 - protein, 560 aa, synthetic construct; identical to SEQ ID NO: 10237
  REGION 1..560: note = hemagglutinin__InfluenzaA__AGQ81055

SEQ ID NO: 10263 - protein, 560 aa, synthetic construct; identical to SEQ ID NO: 10237
  REGION 1..560: note = hemagglutinin__InfluenzaA__AGQ81056

SEQ ID NO: 10264 - protein, 560 aa, synthetic construct; identical to SEQ ID NO: 10237
  REGION 1..560: note = hemagglutinin__InfluenzaA__AGQ81057

SEQ ID NO: 10265 - protein, 560 aa, synthetic construct; identical to SEQ ID NO: 10237
  REGION 1..560: note = hemagglutinin__InfluenzaA__AGQ81058

SEQ ID NO: 10266 - protein, 560 aa, synthetic construct; identical to SEQ ID NO: 9988
  REGION 1..560: note = hemagglutinin__InfluenzaA__AGQ81059

SEQ ID NO: 10267 - protein, 560 aa, synthetic construct; identical to SEQ ID NO: 9988
  REGION 1..560: note = hemagglutinin__InfluenzaA__AGQ81060

SEQ ID NO: 10268 - protein, 560 aa, synthetic construct; identical to SEQ ID NO: 9988
  REGION 1..560: note = hemagglutinin__InfluenzaA__AGQ81061

SEQ ID NO: 10269 - protein, 560 aa, synthetic construct
  REGION 1..560: note = hemagglutinin__InfluenzaA__AGQ81081
MEVVSLITILLVITGSNADKICIGYQSTNSTETVDTLTENNVPVTHAKELLHTEHNGMLCATNLGRPLILDTCTIEGLIYGNPSCDILLGGREWSYIVERPSAVNGLCYPGNVENLEELRSLFSSASSYQRIQIFPDTIWNVSYSGTSKACSDSFYRSMRWLTQKNNAYPVQDAQYTNNRGRNILFMWGINHPPTDTAQTNLYTRTDTTTSVATEDINRTFKPLIGPRPLVNGLQGRIDYYWAVLRPGQTLRIRSNGNLIAPWYGHILSGESHGRILKTDLNSGNCVVQCQTERGGLNTTLPFHNVSKYAFGNCPKYVGVKSLKLAVGLRNVPARSSRGLFGAIAGFIEGGWSGLVAGWYGFQHSNDQGTGMAADRDSTQKAIDKITSKVNNIVDKMNKQYEIIDHEFSEIETRLNMINNKIDDQIQDIWAYNAELLVLLENQKTLDEHDANVNNLYNKVKRALGSNAVEDGKGCFELYHKCDNQCMETIRNGTYNRRKYKEESRLERQKIEGVKLESEGTYKILTIYSTVASSLVIAMGFAAFLFWAMSNGSCRCNICI

SEQ ID NO: 10270 - protein, 560 aa, synthetic construct
  REGION 1..560: note = hemagglutinin__InfluenzaA__AGQ81086
MEVVSLITILLVITGSNADKICIGYQSTNSTETVDTLTENNVPVTHAKELLHTEHNGMLCATNLGRPLILDTCTIEGLIYGNPSCDLLLGGREWSYIVERPSAVNGLCYPGNVENLEELRSLFSSASSYQRIQIFPDTIWNVSYSGTSKACSDSFYRSMRWLTQKNNAYPVQDAQYTNNRGRNILFMWGINHPPTDTAQTNLYTRTDTTTSVATEDINRTFKPLIGPRPLVNGLQGRIDYYWAVLRPGQTLRIRSNGNLIAPWYGHILSGESHGRILKTDLNSGNCVVQCQTERGGLNTTLPFHNVSKYAFGNCPKYVGVKSLKLAVGLRNVPARSSRGLFGAIAGFIEGGWSGLVAGWYGFQHSNDQGTGMAADRDSTQKAIDKITSKVNNIVDKMNKQYEIIDHEFSEIETRLNMINNKIDDQIQDIWAYNAELLVLLENQKTLDEHDANVNNLYNKVKRALGSNAVEDGKGCFELYHKCDNQCMETIRNGTYNRRKYKEESRLERQKIEGVKLESEGTYKILTIYSTVASSLVIAMGFAAFLFWAMSNGSCRCNICI

SEQ ID NO: 10271 - protein, 560 aa, synthetic construct
  REGION 1..560: note = hemagglutinin__InfluenzaA__AGQ81087
METVSLITMLLVATVINADKICIGYQSTNSTETVDTLTENNVPVTHAKELLHTEHNGMLCATNLGHPLILDTCTIEGLIYGNPSCDLLLGGREWSYIVERPSAVNGLCYPGNVENLEELRSLFSSASSYQRIQIFPDTIWNVSYSGTSKACSDSFYRSMRWLTQKNNAYPIQDAQYTNNREKNILFMWGINHPPTDTAQTNLYTRTDTTTSVATEEINRTFKPLIGPRPLVNGLQGRIDYYWSVLKPGQTLRIRSNGNLIAPWYGHILSGESHGRVLKTDLKRGSCTVQCQTEKGGLNTTLPFQNVSKYAFGNCSKYVGVKSLKLAVGLRNVPSRSSRGLFGAIAGFIEGGWSGLVAGWYGFQHSNDQGVGMAADRDSTQKAIDKMTSKVNNIVDKMNKQYEIINHEFSEIETRLNMINNKIDDQIQDIWAYNAELLVLLENQKTLDEHDANVNNLYNKVKRALGSNAVEDGKGCFELYHKCDDQCMETIRNGTYNRRRYQEESKLERQKIEGVKLESEGTYKILTIYSTVASSLVIAMGFAAFLFWAMSNGSCRCNICI

SEQ ID NO: 10272 - protein, 560 aa, synthetic construct
  REGION 1..560: note = hemagglutinin__InfluenzaA__AGQ81092
MEVVSLITILLVITGSNADKICIGYQSTNSTETVDTLTENNVPVTHAKELLHTEHNGMLCATNLGRPLILDTCTIEGLIYGNPSCDLLLGGREWSYIVERPSAVNGLCYPGNVENLEELRSLFSSASSYQRIQIFPDTIWNVSYTGTSKACSDSFYRSMRWLTQKNNAYPVQDAQYTNNRGRNILFMWGINHPPTDTTQTNLYTRTDTTTSVATEDINRTFKPLIGPRPLVNGLQGRIDYYWAVLRPGQTLRIRSNGNLIAPWYGHILSGESHGRILKTDLKSGNCVVQCQTERGGLNTTLPFHNVSKYAFGNCPKYVGVKSLKLAVGLRNVPARSSRGLFGAIAGFIEGGWSGLVAGWYGFQHSNDQGTGMAADRDSTQKAIDKITSKVNNIVDKMNKQYEIIDHEFSEIETRLNMINNKIDDQIQDIWAYNAELLVLLENQKTLDEHDANVNNLYNKVKRALGSNAVEDGKGCFELYHKCDNQCMETIRNGTYNRRKYKEESRLERQKIEGVKLESEGTYKILTIYSTVASSLVIAMGFAAFLFWAMSNGSCRCNICI

SEQ ID NO: 10273 - protein, 560 aa, synthetic construct
  REGION 1..560: note = hemagglutinin__InfluenzaA__AGQ81095
MEVVSLITILLVITVSNADKICIGYQSTNSTETVNTLTEDNVPVTHAKELLHTEHNGMLCATNLGRPLILDTCTIEGLIYGNPSCDLLLGGREWSYIVERPSAVNGLCYPGNVENLEELRSLFSSASSYQRIQIFPDTIWNVSYSGTSKACSDSFYRSMRWLTQKNNAYPVQDAQYTNNRGRNILFMWGINHPPTDTAQTNLYTRTDTTTSVATEDINRTFKPLIGPRPLVNGLQGRIDYYWAVLKPGQTLRIRSNGNLIAPWYGHILSGESHGRILKTDLNSGNCVVQCQSERGGLNTTLPFHNVSKYAFGNCPKYVGVKSLKLAVGLRNVPARSSRGLFGAIAGFIEGGWSGLVAGWYGFQHSNDQGTGMAADRDSTQKAIDKITSKVNNIVDKMNKQYEIIDHEFSEIETRLNMINNKIDDQIQDIWAYNAELLVLLENQKTLDEHDANVNNLYNKVKRALGSNAVEDGKGCFELYHKCDNQCMETIRNGTYDRRKYKEESRLERQKIEGVKLESEGTYKILTIYSTVASSLVIAMGFAAFLFWAMSNGSCRRNICI

SEQ ID NO: 10274 - protein, 560 aa, synthetic construct
  REGION 1..560: note = hemagglutinin__InfluenzaA__AGQ81099
METVSLITILLIVTVSNADKICIGYQSTNSTETVDTLTENNVPVTHAKELLHTEHNGMLCATNLGHPLILDTCTIEGLIYGNPSCDLLLGGREWSYIVERPSAVNGLCYPGNVENLEELRSLFSSANSYQRIQIFPDTIWNVSYSGTSKACSDSFYRSMRWLTQKNNAYPTQDAQYTNNREKNILFMWGINHPPTDTAQTNLYTRTDTTTSVATEEINRTFKPLIGPRPLVNGLQGRIDYYWSVLKPGQTLRIRSNGNLIAPWYGHILSGESHGRILKTDLKRGSCTVQCQTEKGGLNTTLPFQNVSKYAFGNCSKYVGVKSLKLAVGLRNVPSRSSRGLFGAIAGFIEGGWSGLVAGWYGFQHSNDQGVGMAADRDSTQKAIDKVTSKVNNIVDKMNKQYEIIDHEFSEVETRLNMINNKIDDQIQDIWAYNAELLVLLENQKTLDEHDANVNNLYNKVKRALGSNAVEDGKGCFELYHKCDDQCMETIRNGTYNRRKYQEESKLERQKIEGVKLESEGTYKILTIYSTVASSLVIAMGFAAFLFWAMSNGSCRRNICI

SEQ ID NO: 10275 - protein, 560 aa, synthetic construct
  REGION 1..560: note = hemagglutinin__InfluenzaA__AGQ81100
METVSLITMLLVATVINADKICIGYQSTNSTETVDTLTENNVPVTHAKELLHTEHNGMLCATNLGHPLILDTCTIEGLIYGNPSCDLLLGGREWSYIVERPSAVNGLCYPGNVENLEELRSLFSSASSYQRIQIFPDTIWNVSYSGTSKACSDSFYRSMRWLTQKNNAYPIQDAQYTNNREKNILFMWGINHPPTDTAQTNLYTRTDTTTSVATEEINRTFKPLIGPRPLVNGLQGRIDYYWSVLKPGQTLRIRSNGNLIAPWYGHILSGESHGRILKTDLKRGSCTVQCQTEKGGLNTTLPFQNVSKYAFGNCSKYVGVKSLKLAVGLRNVPSRSSRGLFGAIAGFIEGGWSGLVAGWYGFQHSNDQGVGMAADRDSTQKAIDKITSKVNNIVDKMNKQYEIIDHEFSEVETRLNMINNKIDDQIQDIWAYNAELLVLLENQKTLDEHDANVNNLYNKVKRALGSNAVEDGKGCFELYHKCDDQCMETIRNGTYNRRRYQEESKLERQKIEGVKLESEGTYKILTIYSTVASSLVIAMGFAAFLFWAMSNGSCRRNICI

SEQ ID NO: 10276 - protein, 560 aa, synthetic construct
  REGION 1..560: note = hemagglutinin__InfluenzaA__AGQ81123
MEVVSLITILLVITVSNADKICIGYQSTNSTETVNTLTEDNVPVTHAKELLHTEHNGMLCATNLGRPLILDTCTIEGLIYGNPSCDLLLGGREWSYIVERPSAVNGLCYPGNVENLEELRSLFSSASSYQRIQIFPDTIWNVSYSGTSKACSDSFYRSMRWLTQKNNAYPVQDAQYTNNKGRNILFMWGINHPPTDTAQTNLYTRTDTTTSVATEDINRTFKPLIGPRPLVNGLQGRIDYYWAVLKPGQTLRIRSNGNLIAPWYGHILLGESHGRILKTDLNSGDCVVQCQSERGGLNTTLPFHNVSKYAFGNCPKYVGVKSLKLAVGLRNVPARSTRGLFGAIAGFIEGGWSGLVAGWYGFQHSNDQGTGMAADRDSTQKAIDKITSKVNNIVDKMNKQYEIIDHEFSEIETRLNMINNKIDDQIQDIWAYNAELLVLLENQKTLDEHDANVNNLYNKVKRALGSNAVEDGKGCFELYHKCDNQCMETIRNGTYDRRKYKEESRLERQKIEGVKLESEGTYKILTIYSTVASSLVIAMGFAAFLFWAMSNGSCRCNICI

SEQ ID NO: 10277 - protein, 560 aa, synthetic construct
  REGION 1..560: note = hemagglutinin__InfluenzaA__AGQ81124
MEVATLITILLVITGSNADKICIGYQSTNSTETVDTLTENNVPVTHAKELLHTEHNGMLCATNLGRPLILDTCTIEGLIYGNPSCDLPLEGREWSYIVERPSAVNGVCYPGNVENLEELRSLFSSASSYQRIQIFPDSIWNVSYSGTSKACSDSFYRNMRWLTQKDNNYPVQDAQYTNNRGKNILFMWGINHPPTDTAQTNLYTRTDTTTSVATEDINRTFKPLIGPRPLVNGLQGRIDYYWAVLKPGQTLRVRSNGNLIAPWYGHILLGESHGRILKTDLKSGNCVVQCQTERGGLNTTLPFHNVSKYAFGNCPKYIGVKSLKLAVGLRNVPARSSRGLFGAIAGFIEGGWSGLVAGWYGFQHSNDQGTGMAADRDSTQKAIDKITSKVNNIVDKMNKQYEIIDHEFSEIETRLNMINDKIDDQIQDIWAYNAELLVLLENQKTLDEHDANVNNLYNKVKRALGSNAVEDGKGCFDLYHKCDNQCMETIRNGTYNRRKYQKESRLERQKIEGVKLESEGTYKILTIYSTVASSLVIAMGFAAFLFWAMSNGSCRCNICI

SEQ ID NO: 10278 - protein, 560 aa, synthetic construct
  REGION 1..560: note = hemagglutinin__InfluenzaA__AGQ81125
MEVATLITILLVITGSNADKICIGYQSTNSTETVDTLTENNVPVTHAKELLHTEHNGMLCATNLGRPLILDTCTIEGLIYGNPSCDLPLEGREWSYIVERPSAVNGVCYPGNVENLEELRSLFSSASSYQRIQIFPDSIWNVSYSGTSKACSDSFYRSMRWLTQKDNNYPVQDAQYTNNRGKNILFMWGINHPPTDTAQTNLYTRTDTTTSVATEDINRTFKPLIGPRPLVNGLQGRIDYYWAVLKPGQTLRVRSNGNLIAPWYGHILLGVSHGRILKTDLKSGNCVVQCQTERGGLNTTLPFHNVSKYAFGNCPKYIGVKSLKLAVGLRNVPARSSRGLFGAIAGFIEGGWSGLVAGWYGFQHSNDQGTGMAADRDSTQKAIDKITSKVNNIVDKMNKQYEIIDHEFSEIETRLNMINDKIDDQIQDIWAYNAELLVLLENQKTLDEHDANVNNLYNKVKRALGSNAVEDGKGCFDLYHKCDNQCMETIRNGTYNRRKYQEESRLERQKIEGVKLESEGTYKILTIYSTVASSLVIAMGFAAFLFWAMSNGSCRCNICI

SEQ ID NO: 10279 - protein, 560 aa, synthetic construct
  REGION 1..560: note = hemagglutinin__InfluenzaA__AGQ81126
METISLMTILLITTASNADKICIGHQSTNSTETVDTLTETNVPVTHAKELLQTEHNGMLCATNLGHPLILDTCTIEGLIYGNPSCDLLLEGREWSYIVERPSAVNGTCYPGNVENLEELRTLFSSASSYQRIQIFPDTIWNVTYTGTSRSCSGSFYRSMRWLTQKSGFYPVQDAKYTNNRGKNILFVWGIHHPHTYTDQTTLYIRNDTTTSVTTEELNRIFKPVIVPRLLVNGQQGRIDYYWSVLKPGQTLRVRSNGNLIAPWYGHVLSGGSHGRILKTDLKGGNCVVQCQTEKGGFNSTLPFHNISKYAFGTCPKYVKVNSLKLAIGLRNVPARSNRGLFGAIAGFIEGGWPGLVAGWYGFQHSNDQGVGMAADRDSTQKAVDKITSKVNNIVDKMNKQYEIIDHEFSEVETRLNMINNKIDDQIQDIWAYNAELLVLLENQKTLDEHDANVNNLYNKVKRALGSNAMEDGKGCFELYHKCDDQCMETIRNGTYNRRKYREESRLEQQRIEGVKLESEGTYKILTIYSTVASSLVLAMGFAAFLFWAMSNGSCRCNICI

SEQ ID NO: 10280 - protein, 560 aa, synthetic construct
  REGION 1..560: note = hemagglutinin__InfluenzaA__AGQ81127
MEVATLITILLLITGSNADKICIGYQSTNSTETVDTLTENNVPVTHAKELLHTEHNGMLCATNLGRPLILDTCTIEGLIYGNPSCDLPLEGREWSYIVERPSAVNGVCYPGNVENLEELRSLFSSASSYQRIQIFPDSIWNVSYSGTSKACSDSFYRSMRWLTQKNNNYPVQDAQYTNNRGKNILFMWGINHPPTDTAQTNLYTRTDTTTSVATEDINRTFKPLIGPRPLVNGLQGRIDYYWAVLKPGQTLRVRSNGNLIAPWYGHILLGESHGRILKTDLKSGNCVVQCQTERGGLNTTLPFHNVSKYAFGNCPKYIGVKSLKLAVGLRNVPARSSRGLFGAIAGFIEGGWSGLVAGWYGFQHSNDQGTGMAADRDSTQKAIDKITSKVNNIVDKMNKQYEIIDHEFSEIETRLNMINDKIDDQIQDIWAYNAELLVLLENQKTLDEHDANVNNLYNKVKRALGSNAVEDGKGCFDLYHKCDNQCMETIRNGTYNRRKYQEESRLERQKIEGVKLESEGTYKILTIYSTVASSLVIAMGFAAFLFWAMSNGSCRCNICI

SEQ ID NO: 10281 - protein, 560 aa, synthetic construct
  REGION 1..560: note = hemagglutinin__InfluenzaA__AGQ81128
MEAATIITILLVITGSNADKICIGYQSTNSTETVDTLTENNVPVTHAKELLHTEHNGMLCATNLGRPLILDTCTIEGLIYGNPSCDLPLEGREWSYIVERPSAVNGVCYPGNVENLEELRSLFSSASSYQRIQIFPDSIWNVSYSGTSKACSDSFYRSMRWLTQKNNNYPVQDAQYTNNRGKNILFMWGINHPPTDTAQTNLYTRTDTTTSVATEDINRTFKPLIGPRPLVNGLQGRIDYYWAVLKPGQTLRVRSNGNLIAPWYGHILLGESHGRILKTDLKSGNCVVQCQTERGGLNTTLPFHNVSKYAFGNCPKYIGVKSLKLAVGLRNVPARSSRGLFGAIAGFIEGGWSGLVAGWYGFQHSNDQGTGMAADRDSTQKAIDKITSKVNNIVDKMNKQYDIIDHEFSEIETRLNMINDKIDDQIQDIWAYNAELLVLLENQKTLDEHDANVNNLYNKVKRALGSNAVEDGKGCFDLYHKCDNQCMETIRNGTYNRRKYQEESRLERQKIEGVKLESEGTYKILTIYSTVASSLVVAMGFAAFLFWAMSNGSCRCNICI

SEQ ID NO: 10282 - protein, 560 aa, synthetic construct
  REGION 1..560: note = hemagglutinin__InfluenzaA__AGQ81130
METVSLITILLVVTIGNADKICIGYQSTNSTETVDTLTENNVPVTHAKELLHTEHNGMLCATSLGHPLILDTCTIEGLIYGNPSCDLLLGGREWSYIVERPSAVNGLCYPGNVENLEELRSLFSSARSYQRIQIFPDTIWNVSYSGTSKACSDSFYRSMRWLTQKNNAYPIQDAQYTNNQEKNILFMWGINHPPTDTVQTNLYTRTDTTTSVATEEINRTFKPLIGPRPLVNGLQGRIDYYWSVLKPGQTLRIRSNGNLIAPWYGHILSGESHGRILKTDLKRGSCTVQCQTEKGGLNTTLPFQNVSKYAFGNCSKYIGMKSLKLAVGLRNVPSRSSRGLFGAIAGFIEGGWSGLVAGWYGFQHSNDQGVGMAADRDSTQKAIDKITSKVNNIVDKMNKQYEIIDHEFSEVETRLNMINNKIDDQIQDIWAYNAELLVLLENQKTLDEHDANVNNLYNKVKRALGFNAVEDGKGCFELYHKCDDQCMETIRNGTYNRRKYQEESKLERQKIEGVKLESEGTYKILTIYSTVASSLVIAMGFAAFLFWAMSNGSCRCNICI

SEQ ID NO: 10283 - protein, 560 aa, synthetic construct
  REGION 1..560: note = hemagglutinin__InfluenzaA__AGQ81132
METISLMTILLITTASNADKICIGHQSTNSTETVDTLTETNVPVTHAKELLQTEHNGMLCATNLGHPLILDTCTIEGLIYGNPSCDLLLEGREWSYIVERPSAVNGTCYPGNVENLEELRTLFSSASSYQRIQIFPDTIWNVTYTGTSRSCSGSFYRSMRWLTQKSGFYPVQDAKYTNNRGKNILFVWGIHHPHTYTDQTTLYIRNDTTTSVTTEELNRIFKPVIVPRLLVNGQQGRIDYYWSVLKPGQTLRVRSNGNLIAPWYGHVLSGGSHGRILKTDLKGGNCVVQCQTEKGGFNSTLPFHNISKYAFGTCPKYVKVNSLKLAIGLRNVPARSNRGLFGAIAGFIEGGWPGLVAGWYGFQHSNDQGVGMAADRDSTQKAVDKITSKVNNIVDKMNRQYEIIDHEFSEVETRLNMINNKIDDQIQDIWAYNAELLVLLENQKTLDEHDANVNNLYNKVKRALGSNAMEDGKGCFELYHKCDDQCMETIRNGTYNRRKYREESRLEQQRIEGVKLESEGTYKILTIYSTVASSLVLAMGFAAFLFWAMSNGSCRCNICI

SEQ ID NO: 10284 - protein, 560 aa, synthetic construct
  REGION 1..560: note = hemagglutinin__InfluenzaA__AGQ81133
METISLMTILLITTASNADKICIGHQSTNSTETVDTLTETNVPVTHAKELLQTEHNGMLCATNLGHPLILDTCTIEGLIYGNPSCDLLLEGREWSYIVERPSAVNGTCYPGNVENLEELRTLFSSASSYQRIQIFPDTIWNVTYTGTSRSCSGSFYRSMRWLTQKSGFYPVQDAKYTNNRGKNILFVWGIHHPHTYTDQTTLYIRNDTTTSVTTEELNRIFKPVIVPRLLVNGQQGRIDYYWSVLKPGQTLRVRSNGNLIAPWYGHILSGGSHGRILKTDLKSGNCVVQCQTEKGGFNSTLPFHNISKYAFGTCPKYVKVNSLKLAIGLRNVPARSNRGLFGAIAGFIEGGWPGLVAGWYGFQHSNDQGVGMAADRDSTQKAVDKITSKVNNIVDKMNKQYEIIDHEFSEVETRLNMINNKIDDQIQDIWAYNAELLVLLENQKTLDEHDANVNNLYNKVKRALGSNAMEDGKGCFELYHKCDDQCMETIRNGTYNRRKYREESRLEQQRIEGVKLESEGTYKILTIYSTVASSLVLAMGFAAFLFWAMSNGSCRCNICI

SEQ ID NO: 10285 - protein, 560 aa, synthetic construct
  REGION 1..560: note = hemagglutinin__InfluenzaA__AGQ81134
METISLMTILLITTASNADKICIGHQSTNSTETVDTLTETNVPVTHAKELLQTEHNGMLCATNLGHPLILDTCTIEGLIYGNPSCDLLLEGREWSYIVERPSAANGTCYPGNVENPEELRTLFSSASSYQRIQIFPDTIWNVTYTGTSRSCSGSFYRSMRWLTQKSGFYPVQDAKYTNNRGKNILFVWGIHHPHTYTDQTTLYIRNDTTTSVTTEELNRIFKPVIVPRLLVNGQQGRIDYYWSVLKPGQTLRVRSNGNLIAPWYGHVLSGGSHGRILKTDLKSGNCVVQCQTEKGGFNSTLPFHNISKYAFGTCPKYVKVNSLKLAIGLRNVPARSNRGLFGAIAGFIEGGWPGLVAGWYGFQHSNDQGVGMAADRDSTQKAVDKITSKVNNIVDKMNKQYEIIDHEFSEVETRLNMINNKIDDQIQDIWAYNAELLVLLENQKTLDEHDANVNNLYNKVKRALGSNAMEDGKGCFELYHKCDDQCMETIRNGTYNRRKYREESRLEQQRIEGVKLESEGTYKILTIYSTVASSLVLAMGFAAFLFWAMSNGSCRCNICI

SEQ ID NO: 10286 - protein, 560 aa, synthetic construct
  REGION 1..560: note = hemagglutinin__InfluenzaA__AGQ81135
MEVATIITILLVITGSNADKICIGYQSTNSTETVDTLTENNVPVTHAKELLHTEHNGMLCATNLGRPLILDTCTIEGLIYGNPSCDLPLEGREWSYIVERPSAVNGVCYPGNVENLEELRSLFSSASSYQRIQIFPDSIWNVSYSGTSKACSDSFYRSMRWLTQKNNNYPVQDAQYTNNRGKNILFMWGINHPPTDNAQTNLYTRTDTTTSVATEDINRTFKPLIGPRPLVNGLQGRIDYYWAVLKPGQTLRVRSNGNLIAPWYGHILLGESHGRILKTDLKSGNCVVQCQTERGGLNTTLPFHNVSKYSFGNCPKYIGVKSLKLAVGLRNVPARSSRGLFGAIAGFIEGGWSGLVAGWYGFQHSNDQGTGMAADRDSTQKAIDKITSKVNNIVDKMNKQYEIIDHEFNEIETRLNMINNKIDDQIQDIWAYNAELLVLLENQKTLDEHDANVNNLYNKVKRALGSNAVEDGKGCFDLYHKCDNQCMETIRNGTYNRRKYQEESRLERQKIEGVKLESEGTYKILTIYSTVASSLVIAMGFAAFLFWAMSNGSCRCNICI

SEQ ID NO: 10287 - protein, 560 aa, synthetic construct
  REGION 1..560: note = hemagglutinin__InfluenzaA__AGQ81136
METISLMTILLITTASNADKICIGHQSTNSTETVDTLTETNVPVTHAKELLQTEHNGMLCATNLGHPLILDTCTIEGLIYGNPSCDLLLEGREWSYIVERPSAVNGTCYPGNVENLEELRTLFSSASSYQRIQIFPDTIWNVTYTGTSRSCSGSFYRSMRWLTQKSGFYPVQDAKYTNNRGKNILFVWGIHHPHTYTDQTTLYIRNDTTTSVTTEELNRIFKPVIVPRLLVNGQQGRIDYYWSVLKPGQTLRVRSNGNLIAPWYGHVLSGGSHGRILKTDLKGGNCVVQCQTEKGGFNSTLPFHNISKYAFGTCPKYVKVNSLKLAIGLRNVPARSNRGLFGAIAGFIEGGWPGLVAGWYGFQHSNDQGVGMAADRDSTQKAVDKITSKVNNIVDKMNRQYEIIDHEFSEVETRLNMINNKIDDQIQDIWTYNAELLVLLENQKTLDEHDANVNNLYNKVKRALGSNAMEDGKGCFELYHKCDDQCMETIRNGTYNRRKYREESRLEQQRIEGVKLESEGTYKILTIYSTVASSLVLAMGFAAFLFWAMSNGSCRCNICI

SEQ ID NO: 10288 - protein, 560 aa, synthetic construct; identical to SEQ ID NO: 10283
  REGION 1..560: note = hemagglutinin__InfluenzaA__AGQ81137

SEQ ID NO: 10289 - protein, 560 aa, synthetic construct
  REGION 1..560: note = hemagglutinin__InfluenzaA__AGQ81138
MEAATIITILLAITGSNADKICIGYQSTNSTETVDTLTENNVPVTHAKELLHTEHNGMLCATNLGRPLILDTCTIEGLIYGNPSCDLPLEGREWSYIVERPSAVNGVCYPGHVENLEELRSLFSSASSYQRVQIFPDSIWNVSYSGTSKACSDSFYRSMRWLTQKNNNYPVQDAQYTNNKGKNILFMWGINHPPTDTAQTNLYTRTDTTTSVATEDINRTFKPLIGPRPLVNGLQGRIDYYWAVLKPGQTLRVRSNGNLIAPWYGHILLGESHGRILKTDLKSGNCVVQCQTERGGLNTTLPFHNVSKYAFGNCPKYIGVKSLKLAVGLRNVHARSSRGLFGAIAGFIEGGWSGLVAGWYGFQHSNDQGTGMAADRDSTQKAIDKITSKVNNIVDKMNKQYEIIDHEFSEIETRLNMINDKIDDQIQDIWAYNAELLVLLENQKTLDEHDANVNNLYNKVKRALGSNAVEDGKGCFDLYHKCDNQCMETIRNGTYNRRKYQEESRLERQKIEGVKLESEGTYKILTIYSTVASSLVIAMGFAAFLFWAMSNGSCRCNICI

SEQ ID NO: 10290 - protein, 560 aa, synthetic construct
  REGION 1..560: note = hemagglutinin__InfluenzaA__AGQ81139
MEVATIITILLVITGGNADKICIGYQSTNSTETVDTLTENNVPVTHAKELLHTEHNGMLCATNLGRPLILDTCTIEGLIYGNPSCDLPLEGREWSYIVERSSAVNGVCYPGNVENLEELRSLFSSASSYQRIQIFPDSIWNVSYSGTSKACSDSFYRSMRWLTQKNNNYPVQDAQYTNNRGKNILFMWGINHPPTDNAQTNLYTRTDTTTSVATEDINRTFKPLIGPRPLVNGLQGRIDYYWAVLKPGQTLRVRSNGNLIAPWYGHILLGESHGRILKTDLKSGNCVVQCQTERGGLNTTLPFHNVSKYSFGNCPKYIGVKSLKLAVGLRNVPARSSRGLFGAIAGFIEGGWSGLVAGWYGFQHSNDQGTGMAADRDSTQKAIDKITSKVNNIVDKMNKQYEIIDHEFSEIETRLNMINNKIDDQIQDIWAYNAELLVLLENQKTLDEHDANVNNLYNKVKRALGSNAVEDGKGCFDLYHKCDNQCMETIRNGTYNRRKYQEESRLERQKIEGVKLESEGTYKILTIYSTVASSLVIAMGFAAFLFWAMSNGSCRCNICI

SEQ ID NO: 10291 - protein, 560 aa, synthetic construct
  REGION 1..560: note = hemagglutinin__InfluenzaA__AGQ81141
MEAATIITILLVITGSNADKICIGYQSTNSTETVDTLTENNVPVTHAKELLHTEHNGMLCATDLGRPLILDTCTIEGLIYGNPSCDLPLEGREWSYIVERPSAVNGVCYPGNVENLEELRSLFSSASSYQRIQIFPDSIWNVSYSGTSKACSDSFYRSMRWLTQKNNNYPVQDAQYTNNRGKNILFMWGINHPPTDTAQTNLYTRTDTTTSVATEDINRTFKPLIGPRPLVNGLQGRIDYYWAVLKPGQTLRVRSNGNLIAPWYGHILLGESHGRILKTDLKSGNCVVQCQTERGGLNTTLPFHNVSKYAFGNCPKYIGVKSLKLAVGLRNVPARSRRGLFGAIAGFIEGGWTGLVAGWYGFQHSNDQGTGMAADRDSTQKAIDKITSKVNNIVDKMNKQYDIIDHEFSEIETRLNMINDKIDDQIQDIWAYNAELLVLLENQKTLDEHDANVNNLYNKVKGALGSNAVEDGKGCFDLYHKCDNQCMETIRNGTYNRRKYQEESRLERQKIEGVKLESEGTYKILTIYSTVASSLVIAMGFAAFLFWAMSNGSCRCNICI

SEQ ID NO: 10292 - protein, 560 aa, synthetic construct
  REGION 1..560: note = hemagglutinin__InfluenzaA__AGQ81143
MEVATIITILLVITGSNADKICIGYQSTNSTETVDTLTENNVPVTHAKELLHTEHNGMLCATNLGRPLILDTCTIEGLIYGNPSCDLPLEGREWSYIVERPSAVNGVCYPGNVENLEELRSLFSSASSYQRIQIFPDSIWNVSYSGTSKACSDSFYRSMRWLTQKNNNYPVQDAQYTNNRGKNILFMWGINHPPTDNAQTNLYTRTDTTTSVATEDINRTFKPLIGPRPLVNGLQGRIDYYWAVLKPGQTLRVRSNGNLIAPWYGHILLGESHGRILKTDLKSGNCVVQCQTERGGLNTTLPFHNVSKYSFGNCPKYIGVKSLKLAVGLRNVPARSSRGLFGAIAGFIEGGWSGLVAGWYGFQHSNDQGTGMAADRDSTQKAIDKITSKVNNIVDKMNKQYEIIDHEFSEIETRLNMINNKIDDQIQDIWAYNAELLVLLENQKTLDEHDANVNNLYNKVKRALGSNAVEDGKGCFDLYHKCDNQCMETIRNGTYNRRKYQEESRLERQKIEGVKLESEGTYKILTIYSTVASSLVIAMGFAAFLFWAMSNGSCRCNICI

SEQ ID NO: 10293 - protein, 560 aa, synthetic construct
  REGION 1..560: note = hemagglutinin__InfluenzaA__AGQ81144
MEAATIITILLVVTGSNADKICIGYQSTNSTETVDTLTENNVPVTHAKELLHTEHNGMLCATNLGRPLILDTCTIEGLIYGNPSCDLPLEGREWSYIVERPSAVNGVCYPGNVENLEELRSLFSSASSYQRIQIFPDSIWNVSYGGTSKACSDSFYRSMRWLTQKNNNYPVQDAQYTNNRGKNILFMWGINHPPTDTAQTNLYTRTDTTTSVATEDINRTFKPLIGPRPLVNGLQGRIDYYWAVLKPGQTLRVRSNGNLIAPWYGHILLGESHGRILKTDLKSGNCVVQCQTERGGLNTTLPFHNVSKYAFGNCPKYIGVKSLKLAVGLRNMPARSSRGLFGAIAGFIEGGWSGLVAGWYGFQHSNDQGTGMAADRDSTQKAIDKITSKVNNIVDKMNKQYEIIDHEFSEIETRLNMINDKIDDQIQDIWAYNAELLVLLENQKTLDEHDANVNNLYNKVKRALGSNAVEDGKGCFDLYHKCDNQCMETIRNGTYNRRKYQEESRLERQKIEGVKLESEGTYKILTIYSTVASSLVIAMGFAAFLFWAMSNGSCRCNICI

SEQ ID NO: 10294 - protein, 560 aa, synthetic construct
  REGION 1..560: note = hemagglutinin__InfluenzaA__AGQ81146
MEAATIITILLVITGSNADKICIGYQSTNSTETVDTLTENNVPVTHAKELLHTEHNGMLCATNLGRPLILDTCTIEGLIYGNPSCDLPLEGKEWSYIVERPSAVNGMCYPGNVENLEELRSLFSSASSYQRIQIFPDSIWNVSYSGTSKACSDSFYRSMRWLTQKNNNYPVQDAQYTNNRGKNILFMWGINHPPTDTAQTNLYTRTDTKTSVATEEINRTFKPLIGPRPLVNGLQGRIDYYWAVLKPGQTLRVRSNGNLIAPWYGHILLGESHGRILKTDLKSGNCVVQCQTERGGLNTTLPFHNVSKYAFGNCPKYIGVKSLKLAVGLRNVPARSSRGLFGAIAGFIEGGWSGLVAGWYGFQHSNDQGTGMAADRDSTQKAIDKITSKVNNIVDKMNKQYEIIDHEFSEIETRLNMINDKIDDQIQDIWAYNAELLVLLENQKTLDEHDSNVNNLYNKVKRALGSNAVEDGKGCFDLYHKCDNQCMETIRNGTYNRRKYQEESRLERQKIEGVKLESEGTYKILTIYSTVASSLVIAMGFAAFLFWAMSNGSCRCNICI

SEQ ID NO: 10295 - protein, 560 aa, synthetic construct
  REGION 1..560: note = hemagglutinin__InfluenzaA__AGQ81147
MEAATIITILLVITGSNADKICIGYQSTNSTETVDTLTENNVPVTHAKELLHTEHNGMLCATNLGRPLILDTCTIEGLIYGNPSCDLPLEGKEWSYIVERPSAVNGMCYPGNVENLEELRSLFSSASSYQRIQIFPDSIWNVSYSGTSKACSDSFYRSMRWLTQKNNNYPVQDAQYTNNRGKNILFMWGINHPPTDTVQTNLYTRTDTKTSVATEEINRTFKPLIGPRPLVNGLQGRIDYYWAVLKPGQTLRVRSNGNLIAPWYGHILLGESHGRILKTDLKSGNCVVQCQTERGGLNTTLPFHNVSKYAFGNCPKYIGVKSLKLAVGLRNVPARSSRGLFGAIAGFIEGGWSGLVAGWYGFQHSNDQGTGMAADRDSTQKAIDKITSKVNNIVDKMNKQYEIIDHEFSEIETRLNMINDKIDDQIQDIWAYNAELLVLLENQKTLDEHDANVNNLYNKVKRALGSNAVEDGKGCFDLYHKCDNQCMETIRNGTYNRRKYQEESRLERQKIEGVKLESEGTYKILTIYSTVASSLVIAMGFAAFLFWAMSNGSCRCNICI

SEQ ID NO: 10296 - protein, 560 aa, synthetic construct
  REGION 1..560: note = hemagglutinin__InfluenzaA__AGQ81148
MEAATIITILLVITGSNADKICIGYQSTNSTETVDTLTENNVPVTHAKELLHTEHNGMLCATNLGRPLILDTCTIEGLIYGNPSCDLPLEGKEWSYIVERPSAVNGMCYPGNVENLEELRSLFSSASSYQRIQIFPDSIWNVSYSGTSKACSDSFYRSMRWLTQKNNNYPVQDAQYTNNRGKNILFMWGINHPPTDTAQTNLYTRTDTKTSVATEEINRTFKPLIGPRPLVNGLQGRIDYYWAVLKPGQTLRVRSNGNLIAPWYGHILLGESHGRILKTDLKSGNCVVQCQTERGGLNTTLPFHNVSKYAFGNCPKYIGVKSLKLAVGLRNVPARSSRGLFGAIAGFIEGGWSGLVAGWYGFQHSNDQGTGMAADRDSTQKAIDKITSKVNNIVDKMNKQYEIIDHEFSEIETRLNMINDKIDDQIQDIWAYNAELLVLLENQKTLDEHDANVNNLYNKVKRALGSNAVEDGKGCFDLYHKCDNQCMETIRNGTYNRRKYQEESRLERQKIEGVKLESEGTYKILTIYSTVASSLVIAMGFAAFLFWAMSNGSCRCNICI

SEQ ID NO: 10297 - protein, 560 aa, synthetic construct
  REGION 1..560: note = hemagglutinin__InfluenzaA__AGQ81149
MEAATIITILLVITGSNADKICIGYQSTNSTETVDTLTENNVPVTHAKELLHTGHNGMLCATNLGRPLILDTCTIEGLIYGNPSCDLPLEGREWSYIVERPSAINGVCYPGNVENLEELRSLFSSASSYQRIQIFPDSIWNVSYSGTSKACSDSFYRSMRWLTQKNNNYPVQDAQYTNNRGKNILFMWGINHPPTDTAQTNLYTRTDTTTSVATEDINRTFKPLIGPRPLVNGLQGRIDYYWAVLKPGQTLRVRSNGNLIAPWYGHILLGESHGRILKTDLKSGNCVVQCQTERGGLNTTLPFHNVSKYAFGNCPKYIGVKSLKLAVGLRNVPARSSRGLFGAIAGFIEGGWSGLVAGWYGFQHSNDQGTGMAADRDSTQKAIDKITSKVNNIVDKMNKQYEIIDHEFSEIETRLNMINDKIDDQIQDIWAYNAELLVLLENQKTLDEHDANVNNLYNKVKRALGSNAVEDGKGCFDLYHKCDNQCMETIRNGTYNRRKYQEESRLERQKIEGVKLESEGTYKILTIYSTVASSLVIAMGFAAFLFWAMSNGSCRCNICI

SEQ ID NO: 10298 - protein, 560 aa, synthetic construct
  REGION 1..560: note = hemagglutinin__InfluenzaA__AGQ81150
MEAATIITILLVITGSNADKICIGYQSTNSTETVDTLTENNVPVTHAKELLHTEHNGMLCATDLGRPLILDTCTIEGLIYGNPSCDLPLEGREWSYIVERPSAVNGVCYPGNVENLEELRSLFSSASSYQRIQIFPDSIWNVSYSGTSKACSDSFYRSMRWLTQKNNNYPVQDAQYTNDRGNNILFMWGINHPPTDTVQTNLYTRTDTTTSVATEDINRTFKPLIGPRPLVNGLQGRIDYYWAVLKPGQTLRVRSNGNLIAPWYGHILLGESHGRILKTDLKSGNCVVQCQTERGGLNTTLPFHNVSKYAFGNCPKYIGVKSLKLAVGLRNVPARSSRGLFGAIAGFIEGGWSGLVAGWYGFQHSNDQGTGMAADRDSTQKAIDKITSKVNNIVDKMNKQYDIIDHEFSEIETRLNMINDKIDDQIQDIWAYNAELLVLLENQKTLDEHDANVNNLYNKVKRALGSNAVEDGKGCFDLYHKCDNQCMETIRNGTYNRRKYQEESRLERQKIEGVKLESEGTYKILTIYSTVASSLVIAMGFAAFLFWAMSNGSCRCNICI

SEQ ID NO: 10299 - protein, 560 aa, synthetic construct
  REGION 1..560: note = hemagglutinin__InfluenzaA__AGQ81152
MEAATIITILLVITGSNADKICIGYQSTNSTETVDTLTENNVPVTHAKELLHTEHNGMLCATNLGRPLILDTCTIEGLIYGNPSCDLPLEGRDWSYIVERPSAVNGVCYPGNVENLEELRSLFSSASSYQKIQIFPDSIWNVSYSGTSKACSDSFYRSMRWLTQKNNNYPVQDAQYTNNRGKNILFMWGINHPPTDTVQTNLYTRTDTTTSVATEDINRTFKPLIGPRPLVNGLQGRIDYYWAVLKPGQTLRVRSNGNLIAPWYGHILLGESHGRILKTDLKSGNCVVQCQTERGGLNTTLPFHNVSKYAFGNCPKYIGVKSLKLAVGLRNVPARSSRGLFGAIAGFIEGGWSGLVAGWYGFQHSNDQGTGMAADRDSTQKAIDKITSKVNNIVDKMNKQYEIIDHEFSEIETRLNMINDKIDDQIQDIWAYNAELLVLLENQKTLDEHDANVNNLYNKVKRALGSNAVEDGKGCFDLYHKCDNQCMETIRNGTYNRRKYQEESRLERQKIEGVKLESEGTYKILTIYSTVASSLVIAMGFAAFLFWAMSNGSCRCNICI

SEQ ID NO: 10300 - protein, 560 aa, synthetic construct
  REGION 1..560: note = hemagglutinin__InfluenzaA__AGQ81153
MEAATIITILLVITGSNADKICIGYQSTNSTETVDTLTENNVPVTHAKELLHTEHNGMLCATNLGRPLILDTCTIEGLIYGNPSCDLPLEGRDWSYIVERPSAVNGVCYPGNVENLEELRSLFSSASSYQKIQIFPDSIWNVSYGGISKACSNSFYRSMRWLTQKNNNYPVQDAQYTNNRGKNILFMWGINHPPTNTTQTDLYTRTDTTTSVATEDIHRTFKPLIGPRPLVNGLQGRIDYYWAVLKPGQTLRVRSNGNLIAPWYGHILLGKSHGRILKTDLKSGNCVVQCQTERGGLNTTLPFHNVSKYAFGNCPKYIGVKSLKLAVGLRNVPARSSRGLFGAIAGFIEGGWSGLVAGWYGFQHSNDQGTGMAADRDSTQKAIDKITSKVNNIVDKMNKQYEIIDHEFSEIETRLNMINDKIDDQIQDIWAYNAELLVLLENQKTLDEHDANVNNLYNKVKRALGSNAVEDGKGCFDLYHKCDNQCMETIRNGTYNRRKYQEESRLERQKIEGVKLESEGTYKILTIYSTVASSLVIAMGFAAFLFWAMSNGSCRCNICI

SEQ ID NO: 10301 - protein, 560 aa, synthetic construct
  REGION 1..560: note = hemagglutinin__InfluenzaA__AGQ81155
MEAATIITILLVITGSNADKICIGYQSTNSTETVDTLTENNVPVTHAKELLHTEHNGMLCATNLGRPLILDTCTIEGLIYGNPSCDLPLEGRDWSYIVERPSAVNGVCYPGNVENLEELRSLFSSASSYQKIQIFPDSIWNVSYNGTSKACSDSFYRSMRWLTQKNNNYPVQDAQYTNNRGKNILFMWGINHPPTDTTQTNLYTRTDTTTSVATEDINRTFKPLIGPRPLVNGLQGRIDYYWAVLKPGQTLRVRSNGNLIAPWYGHILLGESHGRILKTDLKSGNCVVQCQTERGGLNTTLPFHNVSKYAFGDCPKYIGVKSLKLAVGLRNVPARSSRGLFGAIAGFIEGGWSGLVAGWYGFQHSNDQGTGMAADRDSTQKAIDKITSKVNNIVDKMNKQYEIIDHEFSEIETRLNMINDKIDDQIQDIWAYNAELLVLLENQKTLDEHDANVNNLYNKVKRALGSNAVEDGKGCFDLYHKCDNQCMETIRNGTYNRRKYQEESRLERQEIEGVKLESEGTYKILTIYSTVASSLVIAMGFAAFLFWAMSNGSCRCNICI

SEQ ID NO: 10302 - protein, 560 aa, synthetic construct
  REGION 1..560: note = hemagglutinin__InfluenzaA__AGQ81156
MEAATIITILLVITGSNADKICIGYQSTNSTETVDTLTENNVPVTHAKELLHTEHNGMLCATNLGRPLILDTCTIEGLIYGNPSCDLPLEGRDWSYIVERPSAVNGVCYPGNVENLEELRSLFSSASSYQKIQIFPDSIWNVSYGGISKACSNSFYRSMRWLTQKNNNYPVQDAQYTNNRGKNILFMWGINHPPTNTTQTDLYTRTDTTTSVATEDIHRTFKPLIGPRPLVNGLQGRIDYYWAVLKPGQTLRVRSNGNLIAPWYGHILLGESHGRILKTDLKSGNCVVQCQTERGGLNTTLPFHNVSKYAFGNCPKYIGVKSLKLAVGLRNVPARSSRGLFGAIAGFIEGGWSGLVAGWYGFQHSNDQGTGMAADRDSTQKAIDKITSKVNNIVDKMNKQYEIIDHEFSEIETRLNMINDKIDDQIQDIWAYNAELLVLLENQKTLDEHDANVNNLYNKVKRALGSNAVEDGKGCFDLYHKCDNQCMETIRNGTYNRRKYQEESRLERQKIEGVKLESEGTYKILTIYSTVASSLVIAMGFAAFLFWAMSNGSCRCNICI

SEQ ID NO: 10303 - protein, 560 aa, synthetic construct
  REGION 1..560: note = hemagglutinin__InfluenzaA__AGQ81157
MEAATIITILLVITGNNADKICIGYQSTNSTETVDTLTENNVPVTHAKELLHTEHNGMLCATNLGRPLILDTCTIEGLIYGNPSCDLPLEGRDWSYIVERPSAVNGVCYPGNVENLEELRSLFSSASSYQKIQIFPDSIWNVSYNGTSKACSDSFYRSMRWLTQKNNNYPVQDAQYTNNRGKNILFMWGINHPPTDTTQTNLYTRTDTTTSVATEDINRTFKPLIGPRPLVNGLQGRIDYYWAVLKPGQTLRVRSNGNLIAPWYGHILLGESHGRILKTDLKSGNCVVQCQTERGGLNTTLPFHNVSKYAFGDCPKYIGVKSLKLAVGLRNVPARSSRGLFGAIAGFIEGGWSGLVAGWYGFQHSNDQGTGMAADRDSTQKAIDKITSKVNNIVDKMNKQYEIIDHEFSEIETRLNMINDKIDDQIQDIWAYNAELLVLLENQKTLDEHDANVNNLYNKVKRALGSNAVEDGKGCFDLYHKCDNQCMETIRNGTYNRRKYQEESRLERQKIEGVKLESEGTYKILTIYSTVASSLVIAMGFAAFLFWAMSNGSCRCNICI

SEQ ID NO: 10304 - protein, 560 aa, synthetic construct
  REGION 1..560: note = hemagglutinin__InfluenzaA__AGQ81158
MEVVTIITILLVITRSNADKICIGYQSTNSTETVDTLTENNVPVTHAKELLHTEHNGMLCATNLGRPLILDTCTIEGLIYGNPSCDLPLEGREWSYIVERPSAVNGVCYPGNVENLEELRSLFSSASSYQRIQIFPDSIWNVSYSGTSKACSDSFYRSMRWLTQKNNNYPVQDAQYTNNRGKNILFMWGINHPPTDTAQTNLYTRTDTTTSVATEDINRTFKPLIGPRPLVNGLQGRIDYYWAVLKPGQTLRVRSNGNLIAPWYGHILLGESHGRILKTDLKSGSCVVQCQTERGGLNTTLPFHNVSKYAFGNCPKYIGVKSLKLAVGLRNVPARSSRGLFGAIAGFIEGGWSGLVAGWYGFQHSNDQGTGMAADRDSTQKAIDKITSKVNNIVDKMNKQYEIINHEFSEIETRLNMINDKIDDQIQDIWAYNAELLVLLENQKTLDEHDANVNNLYNKVKRALGSNAVEDGKGCFDLYHKCDNQCMETIRNGTYNRRMYQEESRLERQKIEGVKLESEGTYKILTIYSTVASSLVIAMGFAAFLFWAMSNGSCRCNICI

SEQ ID NO: 10305 - protein, 560 aa, synthetic construct
  REGION 1..560: note = hemagglutinin__InfluenzaA__AGQ81159
MEAATIITILLVITGSNADKICIGYQSTNSTETVDTLTENNVPVTHAKELLHTEHNGMLCATNLGRPLILDTCTIEGLIYGNPSCDLPLEGRDWSYIVERPSAVNGVCYPGNVENLEELRSLFSSASSYQKIQIFPDSIWNVSYDGISKACSNSFYRSMRWLTKKNNSYPVQDAQYTNNIGKNILFMWGINHPPTNTTQTDLYTRTDTTTSVATEDIHRTFKPLIGPRPPVNGLLGRIDYYWAVLKPGQTLRVRSNGNLIAPWYGHILLGESHGRILKTDLKSGNCVVQCQTERGGLNTTLPFHNVSKYAFGNCPKYIGVKSLKLAVGLRNVPARSSRGLFGAIAGFIEGGWSGLVAGWYGFQHSNDQGTGMAADRDSTQKAIDKITSKVNNIVDKMNKQYEIIDHEFSEIETRLNMINDKIDDQIQDIWAYNAELLVLLENQKTLDEHDANVNNLYNKVKRALGSNAVEDGKGCFDLYHKCDNQCMETIRNGTYNRRKYQEESRLERQKIEGVKLESEGTYKILTIYSTVASSLVIAMGFAAFLFWAMSNGSCRCNICI

SEQ ID NO: 10306 - protein, 560 aa, synthetic construct
  REGION 1..560: note = hemagglutinin__InfluenzaA__AGQ81161
METVSLITILLVATVSNADKICIGYQSTNSTETVDTLTENNVPVTHAKELLHTEHNGMLCATSLGQPLILDTCTIEGLIYGNPSCDPLLEGREWSYIVERPSAVNGLCYPGNVENLEELRSLFSSARSYQRIQIFPDTIWNVSYDGTSKACSGSFYRNMRWLTQKNSDYPIQDAQYTNNQGKNILFMWGINHPPTDTTQRDLYTRTDTTTSVATEEINRIFKPLIGPRPLVNGLMGRIDYYWSVLKPGQTLRIKSDGNLIAPWYGHILSGESHGRILKTDLKKGSCTVQCQTEKGGLNTTLPFQNVSKYAFGNCSKYIGIKSLKLAVGLRNVPSRSSRGLFGAIAGFIEGGWSGLVAGWYGFQHSNDQGVGMAADRDSTQKAIDKITSKVNNIVDKMNKQYEIIDHEFSEVETRLNMINNKIDDQIQDIWAYNAELLVLLENQKTLDEHDANVNNLYNKVKRALGSNAVEDGKGCFELYHKCDDQCMETIRNGTYNRRKYQEESKLERQKIEGVKLESEGTYKILTIYSTVASSLVIAMGFAAFLFWAMSNGSCRCNICI

SEQ ID NO: 10307 - protein, 560 aa, synthetic construct
  REGION 1..560: note = hemagglutinin__InfluenzaA__AGQ81162
METVSLITILLVATVSNADKICIGYQSTNSTETVDTLTENNVPVTHAKELLHTEHNGMLCATSLGQPLILDTCTIEGLIYGNPSCDLLLEGREWSYIVERPSAVNGLCYPGNVENLEELRSLFSSARSYQRIQIFPDTIWNVSYDGTSKACSGSFYRSMRWLTQKNSDYPIQDAQYTNNQGKNILFMWGINHPPTDTTQRDLYTRTDTTTSVATEEINRIFKPLIGPRPLVNGLMGRIDYYWSVLKPGQTLRIKSDGNLIAPWYGHILSGESHGRILKTDLKKGSCTVQCQTEKGGLNTTLPFQNVSKYAFGNCSKYIGIKSLKLAVGLRNVPSRSSRGLFGAIAGFIEGGWSGLVAGWYGFQHSNDQGVGMAADRDSTQKAIDKITSKVNNIVDKMNKQYEIIDHEFSEVETRLNMINNKIDDQIQDIWAYNAELLVLLENQKTLDEHDANVNNLYNKVKRALGSNAVEDGKGCFELYHKCDDQCMETIRNGTYNRKKYQEESKLERQKIEGVKLESEGTYKILTIYSTVASSLVIAMGFAAFLFWAMSNGSCRCNICI

SEQ ID NO: 10308 - protein, 560 aa, synthetic construct
  REGION 1..560: note = hemagglutinin__InfluenzaA__AGQ81164
METVSLITILLVATVSNADKICIGYQSTNSTETVDTLTENNVPVTHAKELLHTEHNGMLCATSLGQPLILDTCTIEGLIYGNPSCDLLLEGREWSYIVERPSAVNGLCYPGNVENLEELRSLFSSARSYQRIQIFPDTIWNVSYDGTSKACSGSFYRSMRWLTQKNSDYPIQDAQYTNNQGKNILFMWGINHPPTDTTQRDLYTRTDTTTSVATEEINRIFKPLIGPRPLVNGLMGRIDYYWSVLKPGQTLRIKSDGNLIAPWYGHILSGESHGRILKTDLKKGSCTVQCQTEKGGLNTTLPFQNVSKYAFGNCSKYIGIKSLKLAVGLRNVPSRSSRGLFGAIAGFIEGGWSGLVAGWYGFQHSNDQGVGMAADRDSTQKAIDKITSKVNNIVDKMNKQYEIIDHEFSEVETRLNMINNKIDDQIQDIWAYNAELLVLLENQKTLDEHDANVNNLYNKVKRALGSNAVEDGKGCFELYHKCDDQCMETIRNGTYNRRKYQEESKLERQKIEGVKLESEGTYKILTIYSTVASSLVIAMGFAAFLFWAMSNGSCRCNICI

SEQ ID NO: 10309 - protein, 560 aa, synthetic construct
  REGION 1..560: note = hemagglutinin__InfluenzaA__AGQ81167
METVSLITILLVATVSNADKICIGYQSTNSTETVDTLTENNVPVTHAKELLHTEHNGMLCATSLGQPLILDTCTIEGLIYGNPSCDLLLEGREWSYIVERPSAVNGLCYPGNVENLEELRSLFSSARSYQRIQIFPDTIWNVSYNGTSKACSGSFYRSMRWLTQKNSNYPIQDAQYTNNQGKNILFMWGINHPPTDTTQRDLYTRTDTTTSVATEEINRIFKPLIGPRPLVNGLMGRIDYYWSVLKPGQTLRIKSDGNLIAPWYGHILSGESHGRILKTDLKKGSCTVQCQTEKGGLNTTLPFQNVSKYAFGNCSKYIGIKSLKLAVGLRNVPSRSSRGLFGAIAGFIEGGWSGLVAGWYGFQHSNDQGVGMAADRDSTQKAIDKITSKVNNIVDKMNKQYEIIDHEFSEVETRLNMINNKIDDQIQDIWAYNAELLVLLENQKTLDEHDANVNNLYNKVKRALGSNAVEDGKGCFELYHKCDDQCMETIRNGTYNRRKYQEESKLERQKIEGVKLESEGTYKILTIYSTVASSLVIAMGFAAFLFWAMSNGSCRCNICI

SEQ ID NO: 10310 - protein, 560 aa, synthetic construct
  REGION 1..560: note = hemagglutinin__InfluenzaA__AGQ81168
METVSLITILLVVTVSNADKICIGYQSTNSTETVDTLTENNVPVTHARELLHTEHNGMLCATSLGHPLILDTCTIEGLIYGNPSCDLLLGGREWSYIVERPSAVNGLCYPGNVENLEELRSLFSSARSYQRIQIFPDTIWNVSYSGTSKACSDSFYRSMRWLTQKGNAYPIQDAQYTNNQGKNILFMWGINHPPTDTAQTNLYTRTDTTTSVATEEINRTFKPLIGPRPLVNGLMGRINYYWSVLKPGQTLRIKSNGNLIAPWYGHILSGESHGRILKTDLKRGSCTVQCQTEKGGLNTTLPFQNVSKYAFGNCSKYIGMKSLKLAVGLRNVPSRSSRGLFGAIAGFIEGGWSGLVAGWYGFQHSNDQGVGMAADRDSTQKAIDKITSKVNNIVDKMNKQYEIIDHEFSEVETRLNMINNKIDDQIQDIWAYNAELLVLLENQKTLDEHDANVNNLYNKVKRALGSNAVEDGKGCFELYHKCDDQCMETIRNGTYNRRKYQEESKLERQKIEGVKLESEGTYKILTIYSTVASSLVIAMGFAAFLFWAMSNGSCRCNICI

SEQ ID NO: 10311 - protein, 560 aa, synthetic construct
  REGION 1..560: note = hemagglutinin__InfluenzaA__AGQ81169
METVSLITILLVVTVSNADKICIGYQSTNSTETVDTLTENNVPVTHARELLHTEHNGMLCATSLGHPLILDTCTIEGLIYGNPSCDLLLGGREWSYIVERPSAVNGLCYPGNVENLEELRSLFSSARSYQRIQIFPDTIWNVSYSGTSKACSDSFYRSMRWLTQKDNAYPIQDAQYTNNQEKNILFMWGINHPPTDTVQTNLYTRTDTTTSVATEEINRTFKPLIGPRPLVNGLMGRINYYWSVLKPGQTLRIKSNGNLIAPWYGHILSGESHGRILKTDLKRGSCTVQCQTEKGGLNTTLPFQNVSKYAFGNCSKYIGMKSLKLAVGLRNVPSRSSRGLFGAIAGFIEGGWSGLVAGWYGFQHSNDQGVGMAADRDSTQKAIDKITSKVNNIVDKMNKQYEIIDHEFSEVETRLNMINNKIDDQIQDIWAYNAELLVLLENQKTLDEHDANVNNLYNKVKRALGSNAVEDGKGCFELYHKCDDQCMETIRNGTYNRRKYQEESKLERQKIEGVKLESEGTYKILTIYSTVASSLVIAMGFAAFLFWAMSNGSCRCNICI

SEQ ID NO: 10312 - protein, 560 aa, synthetic construct
  REGION 1..560: note = hemagglutinin__InfluenzaA__AGQ81170
METVSLITILLVVTVSNADKICIGYQSTNSTETVDTLTENNVPVTHARELLHTEHNGMLCATSLGHPLILDTCTIEGLIYGNPSCDLLLGGREWSYIVERPSAVNGLCYPGNVENLEELRSLFSSARSYQRIQIFPDTIWNVSYSGTSKACSDSFYRSMRWLTQKDNAYPIQDAQYTNNQGKNILFMWGINHPPTDTAQTNLYTRTDTTTSVATEEINRTFKPLIGPRPLVNGLMGRINYYWSVLKPGQTLRIKSNGNLIAPWYGHILSGESHGRILKTDLKRGSCTVQCQTEKGGLNTTLPFQNVSKYAFGNCSKYIGMKSLKLAVGLRNVPSRSSRGLFGAIAGFIEGGWSGLVAGWYGFQHSNDQGVGMAADRDSTQKAIDKITSKVNNIVDKMNKQYEIIDHEFSEVETRLNMINNKIDDQIQDIWAYNAELLVLLENQKTLDEHDANVNNLYNKVKRALGSNAVEDGKGCFELYHKCDDQCMETIRNGTYNRRKYQEESKLERQKIEGVKLESEGTYKILTIYSTVASSLVIAMGFAAFLFWAMSNGSCRCNICI

SEQ ID NO: 10313 - protein, 560 aa, synthetic construct; identical to SEQ ID NO: 10312
  REGION 1..560: note = hemagglutinin__InfluenzaA__AGQ81171

SEQ ID NO: 10314 - protein, 560 aa, synthetic construct; identical to SEQ ID NO: 10312
  REGION 1..560: note = hemagglutinin__InfluenzaA__AGQ81172

SEQ ID NO: 10315 - protein, 560 aa, synthetic construct
  REGION 1..560: note = hemagglutinin__InfluenzaA__AGQ81173
METASLITILLVVTVSNADKICIGYQSTNSTETVDTLTENNVPVTHAKELLHTEHNGMLCATSLGNPLILDTCTIEGLIYGNPSCDLLLGGREWSYIVERPSAVNGLCYPGNVENLEELRSLFSSARSYQRIQIFPDTIWNVSYSGTSKACSDSFYRSMRWLTQKDNAYPIQDAQYTNNQGKNILFMWGINHPPTDTAQTNLYTRTDTTTSVATEEINRTFKPLIGPRPLVNGLMGRINYYWSVLKPGQTLRIKSNGNLIAPWYGHILSGESHGRILKTDLKRGSCTVQCQTEKGGLNTTLPFQNVSKYAFGNCSKYIGMKSLKLAVGLRNVPSRSSRGLFGAIAGFIEGGWSGLVAGWYGFQHSNDQGVGMAADRDSTQKAIDKITSKVNNIVDKMNKQYEIIDHEFSEVETRLNMINNKIDDQIQDIWAYNAELLVLLENQKTLDEHDANVNNLYNKVKRALGSNAVEDGKGCFELYHKCDDQCMETIRNGTYNRRKYQEESKLERQKIEGVKLESEGTYKILTIYSTVASSLVIAMGFAAFLFWAMSNGSCRCNICI

SEQ ID NO: 10316 - protein, 560 aa, synthetic construct; identical to SEQ ID NO: 10312
  REGION 1..560: note = hemagglutinin__InfluenzaA__AGQ81175

SEQ ID NO: 10317 - protein, 560 aa, synthetic construct
  REGION 1..560: note = hemagglutinin__InfluenzaA__AGQ81177
METVSLITILLVATVSNADKICIGYQSTNSTETVDTLTENNVPVTHAKELLHTEHNGMLCATSLGQPLILDTCTIEGLIYGNPSCDLLLEGREWSYIVERPSAVNGLCYPGNVENLEELRSLFSSARSYQRIQIFPDTIWNVSYNGTSKACSGSFYRSMRWLTRKNGDYPIQDAQYTNNQGKNILFMWGINHPPTDTTQRDLYTRTDTTTSVATEEINRIFKPLIGPRPLVNGLMGRIDYYWSVLKPGQTLRIKSDGNLIAPWYGHILSGESHGRILKTDLKRGSCTVQCQTEKGGLNTTLPFQNVSKYAFGNCSKYIGIKSLKLAVGLRNVPSRSSRGLFGAIAGFIEGGWSGLVAGWYGFQHSNDQGVGMAADRDSTQKAIDKITSKVNNIVDKMNKQYEIIDHEFSEVETRLNMINNKIDDQIQDIWAYNAELLVLLENQKTLDEHDANVNNLYNKVKRALGSNAVEDGKGCFELYHKCDDQCMETIRNGTYNRRKYQEESKLERQKIEGVKLESEGTYKILTIYSTVASSLVIAMGFAAFLFWAMSNGSCRCNICI

SEQ ID NO: 10318 - protein, 560 aa, synthetic construct; identical to SEQ ID NO: 10317
  REGION 1..560: note = hemagglutinin__InfluenzaA__AGQ81178

SEQ ID NO: 10319 - protein, 560 aa, synthetic construct; identical to SEQ ID NO: 10309
  REGION 1..560: note = hemagglutinin__InfluenzaA__AGQ81181

SEQ ID NO: 10320 - protein, 560 aa, synthetic construct; identical to SEQ ID NO: 10309
  REGION 1..560: note = hemagglutinin__InfluenzaA__AGQ81183

SEQ ID NO: 10321 - protein, 560 aa, synthetic construct; identical to SEQ ID NO: 10308
  REGION 1..560: note = hemagglutinin__InfluenzaA__AGQ81184

SEQ ID NO: 10322 - protein, 560 aa, synthetic construct
  REGION 1..560: note = hemagglutinin__InfluenzaA__AGQ81185
METASLITILLVATVSNADKICIGYQSTNSTETVDTLTENNVPVTHAKELLHTEHNGMLCATSLGQPLILDTCTIEGLIYGNPSCDLLLEGREWSYIVERPSAVNGLCYPGNVENLEELRSLFSSARSYQRIQIFPDTTWNVSYNGTSKACSGSFYRSMRWLTQKNSNYPIQDAQYTNNQGKNILFMWGINHPPTDTTQRDLYTRTDTTTSVATEEINRIFKPLIGPRPLVNGLMGRIDYYWSVLKPGQTLRIKSDGNLIAPWYGHILSGESHGRILKTDLKRGSCTVQCQTEKGGLNTTLPFQNVSKYAFGNCSKYIGIKSLKLAVGLRNVPSRSSRGLFGAIAGFIEGGWSGLVAGWYGFQHSNDQGVGMAADRDSTQKAIDKITSKVNNIVDKMNKQYEIIDHEFSEVETRLNMINNKIDDQIQDIWAYNAELLVLLENQKTLDEHDANVNNLYNKVKRALGSNAVEDGKGCFELYHKCDNQCMETIRNGTYNRRKYQEESKLERQKIEGVKLESEGTYKILTIYSTVASSLVIAMGFAAFLFWAMSNGSCRCNICI

SEQ ID NO: 10323 - protein, 560 aa, synthetic construct
  REGION 1..560: note = hemagglutinin__InfluenzaA__AGQ81186
METVSLITILLVATVSNADKICIGYQSTNSTETVDTLTENNVPVTHAKELLHTEHNGMLCATSLGQPLILDTCTIEGLIYGNPSCDLLLEGREWSYIVERPSAVNGLCYPGNVENLEELRSLFSSARSYQRIQIFPDTIWNVSYDGTSKACSGSFYRSMRWLTQKNSDYPIQDAQYTNNQGKNILFMWGINHPPTDTTQRDLYTRTDTTTSVATEEINRIFKPLIGPRPLVNGLMGRIDYYWSVLKPGQTLRIKSDGNLIAPWYGHILSGESHGRILKTDLKKGSCTVQCQTEKGGLNTTLPFQNVSKYAFGNCSKYIGIKSLKLAIGLRNVPSRSSRGLFGAIAGFIEGGWSGLVAGWYGFQHSNDQGVGMAADRDSTQKAIDKITSKVNNIVDKMNKQYEIIDHEFSEVETRLNMINNKIDDQIQDIWAYNAELLVLLENQKTLDEHDANVNNLYNKVKRALGSNAVEDGKGCFELYHKCDDQCMETIRNGTYNRKKYQEESKLERQKIEGVKLESEGTYKILTIYSTVASSLVIAMGFAAFLFWAMSNGSCRCNICI

SEQ ID NO: 10324 - protein, 560 aa, synthetic construct; identical to SEQ ID NO: 10312
  REGION 1..560: note = hemagglutinin__InfluenzaA__AGQ81190

SEQ ID NO: 10325 - protein, 560 aa, synthetic construct; identical to SEQ ID NO: 10312
  REGION 1..560: note = hemagglutinin__InfluenzaA__AGQ81191

SEQ ID NO: 10326 - protein, 560 aa, synthetic construct; identical to SEQ ID NO: 10317
  REGION 1..560: note = hemagglutinin__InfluenzaA__AGQ81192

SEQ ID NO: 10327 - protein, 560 aa, synthetic construct
  REGION 1..560: note = hemagglutinin__InfluenzaA__AGQ81193
METVSLITILLVATVSNADKICIGYQSTNSTETVDTLTENNVPVTHAKELLHTEHNGMLCATSLGQPLILDTCTIEGLIYGNPSCDLLLEGREWSYIVERPSAVNGLCYPGNVENLEELRSLFSSARSYQRIQIFPDTIWNVSYTGTSKACSGSFYRSMRWLTQKNGDYPIQDAQYTNNQGKNILFMWGINHPPTDTTQRDLYTRTDTTTSVATEEINRIFKPLIGPRPLVNGLMGRIDYYWSVLKPGQTLRIKSDGNLIAPWYGHVLSGESHGRILKTDLKRGSCTVQCQTEKGGLNTTLPFQNVSKYAFGNCSKYIGIKSLKLAVGLRNVPSRSSRGLFGAIAGFIEGGWSGLVAGWYGFQHSNDQGVGMAADRDSTQKAIDKITSKVNNIVDKMNKQYEIIDHEFSEVETRLNMINNKIDDQIQDIWAYNAELLVLLENQKTLDEHDANVNNLYNKVKRALGSNAVEDGKGCFELYHKCDDQCMETIRNGTYNRRKYQEESKLERQKIEGVKLESEGTYKILTIYSTVASSLVIAMGFAAFLFWAMSNGSCRCNICI

SEQ ID NO: 10328 - protein, 560 aa, synthetic construct; identical to SEQ ID NO: 10312
  REGION 1..560: note = hemagglutinin__InfluenzaA__AGQ81194

SEQ ID NO: 10329 - protein, 561 aa, synthetic construct
  REGION 1..561: note = hemagglutinin__InfluenzaA__AGQ81195
MYKIVVIITLLGTVKGLDKICLGHHAVANGTIVKTLTNEQEEVTNATETVEGKSLNRLCMKGRNHKDLGNCHPIGMLIGTPACDLHLTGTWDTLIERENAIAYCYPGATINEEALRQKIMESGGISKISTGFTYGSSINSAGTTRACMRNGGNSFYAELKWLVSKSKGQNFPQTTNTYRNTDTSEHLIMWGIHHPSSTQEKNDLYGTQSLSISVGSSTYQNNFVPVVGARPQVNGQSGRIDFHWTLVQPGDNITFSHNGGLIAPSRVSKLIGRGLGIQSDASIDNNCESKCFWRGGSINTRLPFQNLSPRTVGQCPKYVNKRSLMLATGMRNVPEIMQGRGLFGAIAGFIENGWEGMVDGWYGFRHQNAQGTGQAADYKSTQAAIDQITGKLNRLIEKTNTEFESIESEFSEIEHQIGNVINWTKDSITDIWTYQAELLVAMENQHTIDMADSEMLNLYERVRKQLRQNAEEDGKGCFEIYHACDDSCMESIRNNTYDHSQYREEALLNRLNINPVTLSSGYKDIILWFSFGASCFVLLAVVMGLVFFCLKNGNMRCTICI

SEQ ID NO: 10330 - protein, 561 aa, synthetic construct
  REGION 1..561: note = hemagglutinin__InfluenzaA__AGQ81196
MYKIVVIIALLGAVKGLDKICLGHHAVANGTIVKTLTNEQEEVTNATETVESASLNRLCMKGRSHKDLGNCHPIGMLIGTPACDLHLTGTWDTLIERENAIAYCYPGATVNEEALRQKIMESGGISKISTGFTYGSSINSAGTTKACMRNRGNSFYAELKWLVSKSKGQNFPQTTNTYRNTDTAEHLIMWGIHHPSSTQEKNDLYGTQSLSISVGSSTYQNNFVPVVGARPQVNGQSGRIDFHWTLVQPGDNITFSHNGGLIAPSRVSKLVGRGLGIQSDAPIDNNCESKCFWRGGSINTRLPFQNLSPRTVGQCPKYVNKRSLMLATGMRNVPEIMQGRGLFGAIAGFIENGWEGMVDGWYGFRHQNAQGTGQAADYKSTQTAIDQITGKLNRLIEKTNTEFESIESEFSEIEHQIGNVINWTKDSITDIWTYQAELLVAMENQHTIDMADSEMLNLYERVRKQLRQNAEEDGKGCFEIYHACDDSCMESIRNNTYDHSQYREEALLNRLNINPVKLSSGYKDIILWFSFGASCFVLLAVVMGLVFFCLKNGNMRCTICI

SEQ ID NO: 10331 - protein, 561 aa, synthetic construct
  REGION 1..561: note = hemagglutinin__InfluenzaA__AGQ81198
MYKIVVIIALLGAVKGLDKICLGHHAVANGTIVKTLTNEQEEVTNATETVESTSLNRLCMKGRNHKDLGNCHPIGMLIGTPACDLHLTGTWDTLIERENAIAYCYPGATINEEALRQKIMESGGISKISTGFTYGSSINSAGNTKACMRNGGNSFYAELRWLVSKNKGQNFPQTTNTYRNTDTAEHLIIWGIHHPSSTKEKNDLYGTQSLSISVGSSTYQNNFVPVVGARPQVNGQSGRIDFHWTLVQPGDNITFSHNGGLIAPSRVSKLIGRGLGIQSDAPIDNNCESKCFWRGGSINTRLPFQNLSPRTVGQCPKYVNKKSLMLATGMRNVPEIMQGRGLFGAIAGFIENGWEGMVDGWYGFRHQNAQGTGQAADYKSTQAAIDQITGKLNRLIEKTNTEFESIESEFSEIEHQIGNVINWTKDSITDIWTYQAELLVAMENQHTIDMADSEMLNLYERVRKQLRQNAEEDGKGCFEIYHACDDSCMESIRNNTYDHSQYREEALLNRLNINPVTLSSGYKDIILWFSFGASCFVLLAVVMGLVFFCLKNGNMRCTICI

SEQ ID NO: 10332 - protein, 561 aa, synthetic construct
  REGION 1..561: note = hemagglutinin__InfluenzaA__AGQ81199
MYKIVVIIALLGAVKGLDKICLGHHAVANGTIVKTLTNEQEEVTNATETVESASLNRLCMKGRSHKDLGNCHPIGMLIGTPACDLHLTGTWDTLIERENAIAYCYPGATVNEEALRQKIMESGGISKISTGFTYGSSINSAGTTKACMRNGGNSFYAELKWLVSKSKGQNFPQTTNTYRNTDTAEHLIMWGIHHPSSTQEKNDLYGTQSLSISVGSSTYQNNFVPVVGARPQVNGQSGRIDFHWTLVQPGDNITFSHNGGLIAPSRVSKLVGRGLGIQSDAPIDNNCESKCFWRGGSINTRLPFQNLSPRTVGQCPKYVNKRSLMLATGMRNVPEIMQGRGLFGAIAGFIENGWEGMVDGWYGFRHQNAQGTGQAADYKSTQTAIDQITGKLNRLIEKTNTEFESIESEFSEIEHQIGNVINWTKDSITDIWTYQAELLVAMENQHTIDMADSEMLNLYERVRKQLRQNAEEDGKGCFEIYHACDDSCMESIRNNTYDHSQYREEALLNRLNINPVKLSSGYKDIILWFSFGASCFVLLAVVMGLVFFCLKNGNMRCTICI

SEQ ID NO: 10333 - protein, 565 aa, synthetic construct
  REGION 1..565: note = hemagglutinin__InfluenzaA__AGQ81200
MKKTLLFAAIFLYVKADEICIGYLSNNSTDKVDTIIENNVTVTSSVELVETEHTGSFCSINGKQPIGLGDCSFAGWILGNPMCDDLIGKTSWSYIVEKPNPANGICYPGTLENEEELRLKFSGVLEFSKFEAFTSTGWGAVNSGAGVTAACKFGSSNSFFRNMVWLIHQSGTYPVIKRTFNNTKGRDVLVVWGIHHPATLKEHQDLYKKDSSYVAVGSETYNRRFIPEISTRPKVNGQAGRMTFYWTIVKPGESITFESNGAFLAPRYAFEIVSVGNGKLFRSELNIESCSTKCQTEIGGINTNKSFHSVHRNTIGDCPKYVNVKSLKLATGLRNVPAIASRGLFGAIAGFIEGGWPGLINGWYGFQHRNEEGTGIAADKESTQKAIDQITSKVNNIVDKMNTNFESVQHEFSEIEERINQLSKHVDDSVVDIWSYNAQLLVLLENEKTLDLHDSNVRNLHEKVRRMLKDNAKDEGNGCFTFYHKCDNECIERVRNGTYDHKEFEEESKINRQEIEGVKLDSSGNVYKILSIYSCIASSLVLAALIMGFILWACSNGSCRCTICI

SEQ ID NO: 10334 - protein, 565 aa, synthetic construct
  REGION 1..565: note = hemagglutinin__InfluenzaA__AGQ81202
MKKTLLFAAIFLYVKADEICIGYLSNNSTDKVDTIIENNVTVTSSVELVETEHTGSFCSINGKQPISLGDCSFAGWILGNPMCDDLIGKTSWSYIVEKPNPANGICYPGTLENEEELRLKFSGVLEFSKFEAFTSNGWGAVNSGAGVTAACKFGSSNSFFRNTVWLIHQSGTYPVIKRTFNNTKGRDVLVVWGVHHPATLKEHQDLYKKDSSYVAVGSETYNRRFIPEISTRPKVNGQAGRMTFYWTIVKPGESITFESNGAFLAPRYAFEIVSVGNGKLFRSELNIESCSTKCQTEIGGINTNKSFHSVHRNTIGDCPKYVNVKSLKLATGLRNVPAIASRGLFGAIAGFIEGGWPGLINGWYGFQHRNEEGTGIAADKESTQKAIDQITSKVNNIVDRMNTNFESVQHESSEIEERINQLSKHVDDSMVDIWSYNAQLLVLLENEKTLDLHDSNVRNLHEKVRRMLKDNAKDEGNGCFTFYHKCDNKCIERVRNGTYDHKEFEEESKINRQEIEGVKLDSSGNVYKILSIYSCIASSLVLAALIMGFILWACSNGSCRCTICI

SEQ ID NO: 10335 - protein, 565 aa, synthetic construct
  REGION 1..565: note = hemagglutinin__InfluenzaA__AGQ81203
MKKTLLFAAIFLYVKADEICIGYLSNNSTDKVDTIIENNVTVTSSVELVETEHTGSFCSINGKQPISLGDCSFAGWILGNPMCDDLIGKTSWSYIVEKPNPANGICYPGTLENEEELRLKFSGVLEFNKFEAFTSNGWGAVNSGAGVTAACKFGSSNSFFRNMVWLIHQSGTYPVIKRTFNNTKGRDVLVVWGIHHPATLKEHQDLYKKDSSYVAVGSETYNRRFIPEISTRPKVNGQAGRMTFYWTIVKPGESITFESNGAFLAPRYAFEIVSVGNGKLFRSELNIESCSTKCQTEIGGINTNKSFHSVHRNTIGDCPKYVNVKSLKLATGLRNVPAIASRGLFGAIAGFIEGGWPGLINGWYGFQHRNEEGTGIAADKESTQKAIDQITSKVNNIVDRMNTNFESVQHEFSEIEERINQLSKHVDDSVVDIWSYNAQLLVLLENEKTLDLHDSNVRNLHEKVRRMLKDNAKDEGNGCFTFYHKCDNECIERVRNGTYDHKEFEEESKINRQEIEGVKLDSSGNVYKILSIYSCIASSLVLAALIMGFILWACSNGSCRCTICI

SEQ ID NO: 10336 - protein, 565 aa, synthetic construct
  REGION 1..565: note = hemagglutinin__InfluenzaA__AGQ81204
MKKTLLFAAIFLYVKADEICIGYLSNNSTDKVDTIIENNVTVTSSVELVETEHTGSFCSINGKQPISLGDCSFAGWILGNPMCDDLIGKTSWSYIVEKPNPANGICYPGTLENEEELRLKFSGVLEFNKFEAFTSNGWGAVNSGAGVTAACKFGSSNSFFRNMVWLIHQSGTYPVIKRTFNNTKGRDVLVVWGIHHPATLKEHQDLYKKDSSYVAVGSETYNRRFIPEISTRPKVNGQAGRMTFYWTIVKPGESITFESNGAFLAPRYAFEIVSVGNGKLFRSELNIESCSTKCQTEIGGINTNKSFHSVHRNTIGDCPKYVNVKSLKLATGLRNVPAIASRGLFGAIAGFIEGGWPGLINGWYGFQHRNEEGTGIAADKESTQKAIDQITSKVNNIVDRMNTNFGSVQHEFSEIEERINQLSKHVDDSVVDIWSYNAQLLVLLENEKTLDLHDSNVRNLHEKVRRMLKDNAKDEGNGCFTFYHKCDNECIERVRNGTYDHKEFEEESKINRQEIEGVKLDSSGNVYKILSIYSCIASSLVLAALIMGFILWACSNGSCRCTICI

SEQ ID NO: 10337 - protein, 565 aa, synthetic construct
  REGION 1..565: note = hemagglutinin__InfluenzaA__AGQ81205
MKKTLLFAAIFLYVKADEICIGYLSNNSTDKVDTIIENNVTVTSSVELVETEHTGSFCSINGKQPISLGDCSFAGWILGNPMCDDLIGKTSWSYIVEKPNPANGICYPGTLENEEELRLKFSGVLEFNKFEAFTSNGWGAVNSGAGVTATCKFGSSNSFFRNMVWLIHQSGTYPVIKRTFNNTKGRDVLVVWGIHHPATLKEHQDLYKKDSSYVAVGSETYNRRFIPEISTRPKVNGQAGRMTFYWTIVKPGESITFESNGAFLAPRYAFEIVSVGNGKLFRSELNIESCSTKCQTEIGGINTNKSFHSVHRNTIGDCPKYVNVKSLKLATGLRNVPAIASRGLFGAIAGFIEGGWPGLINGWYGFQHRNEEGTGIAADKESTQKAIDQITSKVNNIVDRMNTNFESVQYEFSEIEERINQLSKHVDDSVVDIWSYNAQLLVLLENEKTLDLHDSNVRNLHEKVRRMLKDNAKDEGNGCFTFYHKCDNECIERVRNGTYDHKEFEEESKINRQEIEGVKLDSSGNVYKILSIYSCIASSLVLAALIMGFILWACSNGSCRCTICI

SEQ ID NO: 10338 - protein, 565 aa, synthetic construct
  REGION 1..565: note = hemagglutinin__InfluenzaA__AGQ81206
MKKTLLFAAIFLYAKADEICIGYLSNNSTDKVDTIIENNVTVTSSVELVETEHTGSFCSINGKQPISLGDCSFAGWILGNPMCDDLIGKTSWSYIVEKPNPANGICYPGTLENEEELRSKFSGVLEFSKFEAFTSNGWGAVNSGAGVTAACKFGSSNSFFRNMVWLIHQSGTYPVIKRTFNNTKGRDVLVVWGIHHPATLKEHQDLYKKDSSYVAVGSETYNRRFIPEISTRPKVNGQAGRMTFYWTIVKPEESITFESNGAFLAPRYAFEIVSVGNGKLFRSELNIESCSTKCQTEIGGINTNKSFHSVHRNTIGDCPKYVNVKSLKLATGLRNVPAIASRGLFGAIAGFIEGGWPGLINGWYGFQHRNEEGTGIAADKESTQKAIDQITSKVNNIVDRMNTNFESVQHEFSEIEERINQLSKHVDDSVVDIWSYNAQLLVLLENEKTLDLHDSNVRNLHEKVRRMLKDNAKDEGNGCFTFYHKCDNECIERVRNGTYDHKEFEEESKINRQEIEGVKLDSSGNVYKILSIYSCIASSLILAALIMGFILWACSNGSCRCTICI

SEQ ID NO: 10339 - protein, 565 aa, synthetic construct
  REGION 1..565: note = hemagglutinin__InfluenzaA__AGQ81209
MKKTLLFAAIFLYVKADEICIGYLSNNSTDKVDTIIENNVTVTSSVELVETEHTGSFCSINGKQPISLGDCSFAGWILGNPMCDDLIGKTSWSYIVEKPNPANGICYPGTLENEEELRLKFSGILEFSKFEAFTSNGWGAVNSGAGVTAACKFGSSNSFFRNMVWLIHQSGTYPVIKRTFNNTKGRDVLIVWGIHHPATLKEHQDLYKKDSSYVAVGSETYNRRFIPEISTRPKVNGQAGRMTFYWTIVKPGESITFESNGAFLAPRYAFEIVSVGNGKLFRSELNIESCSTKCQTEIGGINTNKSFHSVHRNTIGDCPKYVNVKSLKLATGLRNVPAIASRGLFGAIAGFIEGGWPGLINGWYGFQHRNEEGTGIAADKESTQKAIDQITSKVNNIVDRMNTNFESVQHEFSEIEERINQLSKHVDDSVVDIWSYNAQLLVLLENEKTLDLHDSNVRNLHEKVRRMLKDNAKDEGNGCFTFYHKCDNECIERVRNGTYDHKEFEEESKINRQEIEGVKLDSSGNVYRILSIYSCIASSLVLAALIMGFILWACSNGSCRCTICI

SEQ ID NO: 10340 - protein, 565 aa, synthetic construct
  REGION 1..565: note = hemagglutinin__InfluenzaA__AGQ81211
MKKTLLFAAIFLYVKADEICIGYLSNNSTDKVDTIIENNVTVTSSVELVETEHTGSFCSINGKQPISLGDCSFAGWILGNPMCDDLIGKTSWSYIVEKPNPANGICYPGTLENEEELRLKFSGVLEFSKFEAFTSNGWGAVNSGAGVTAACKFGSSNSFFRNMVWLIHQSGTYPVIKRTFNNTKGRDVLIVWGIHHPATLKEHQDLYKKDSSYVAVGSETYNRRFIPEISTRPKVNGQAGRMTFYWTIVKPGESITFESNGAFLAPRYAFEIVSVGNGKLFRSELNIESCSTKCQTEIGGINTNKSFHSVHRNTIGDCPKYVNVKSLKLATGLRNVPAIASRGLFGAIAGFIEGGWPGLINGWYGFQHRNEEGTGIAADKESTQKAIDQITSKVNNIVDRMNTNFESVQHEFSEIEERINQLSKHVDDSVVDIWSYNAQLLVLLENEKTLDLHDFNVRNLHEKVRRMLKDNAKDEGNGCFTFYHKCDNECIERVRNGTYDHKEFEEESKINRQEIEGVKLDSSGNVYRILSIYSCIASSLVLAALIMGFILWACSNGSCRCTICI

SEQ ID NO: 10341 - protein, 565 aa, synthetic construct
  REGION 1..565: note = hemagglutinin__InfluenzaA__AGQ81213
MKKTLLFAAIFLYVRADEICIGYLSNNSTDKVDTIIENNVTVTSSVELVETEHTGSFCSINGKQPISLGDCSFAGWILGNPMCDGLIGKTSWSYIVEKPNPANGICYPGTLENEEELRLKFSRVLEFSKFEAFTSNGWGAVNSGAGVTAACKFGSSNSFFRNMVWLIHQSGTYPVIKRTFNNTKGRDVLVVWGIHHPATLKEHQDLYKKDSSYVAVGSETYNRRFIPEISTRPTVNGQAGRMTFYWTIVKPGESITFESNGAFLAPRYAFEIVSVGNGKLFRSELNIESCSTKCQTEIGGINTNKSFHSVHRNTIGDCPKYVNVKSLKLATGLRNVPAIASRGLFGAIAGFIEGGWPGLINGWYGFQHRNEEGTGIAADKESTQKAIDQITSKVNNIVDRMNTNFESVQHEFSEIEERINQLSKHVDDSVVDIWSYNAQLLVLLENEKTLDLHDSNVRNLHEKVRRMLKDNAKDEGNGCFTFYHKCDNECIERVRNGTYDHKEFEEESKINRQEIEGVKLDSSGNVYKILSIYSCIASSLVLAALIMGFILWACSNGSCRCTICI

SEQ ID NO: 10342 - protein, 565 aa, synthetic construct
  REGION 1..565: note = hemagglutinin__InfluenzaA__AGQ81214
MKKTLLFAAIFLYVKADEICIGYLSNNSTDKVDTIIENNVTVTSSVELVETEHTGSFCSINGKQPISLGDCSFAGWILGNPMCDDLIGKTSWSYIVEKPNPANGICYPGTLENEEELRLKFSGVLEFSKFEAFTSNGWGAVNSGAGVTAACKFGSSNSFFRNMVWLIHQSGTYPVIKRTFNNTKGRDVLIVWGIHHPATLKEHQDLYKKDSSYVAVGSETYNRRFIPEISTRPKVNGQAGRMTFYWTIVKPGESITFESNGAFLAPRYAFEIVSVGNGKLFRSELNIESCSTKCQTEIGGINTNKSFHSVHRNTIGDCPKYVNVKSLKLATGLRNVPAITSRGLFGAIAGFIEGGWPGLINGWYGFQHRNEEGTGIAADKESTQKAIDQITSKVNNIVDRMNTNFESVQHEFSEIEGRINQLSKHVDDSVVDIWSYNAQLLVLLENEKTLDLHDSNVRNLHEKVRRMLKDNAKDEGNGCFTFYHKCDNECIERVRNGTYDHKEFEEESKINRQEIEGVKLDSSGNVYKILSIYSCIASSLVLAALIMGFILWACSNGSCRCTICI

SEQ ID NO: 10343 - protein, 565 aa, synthetic construct
  REGION 1..565: note = hemagglutinin__InfluenzaA__AGQ81215
MKKTLLFAAIFLYVKADEICIGYLSNNSTDKVDTIIENNVTVTSSVELVETEHTGSFCSINGKQPISLGDCSFAGWILGNPMCDGLIGKTSWSYIVEKPNPANGICYPGTLENEEELRLKFSGILEFSKFEAFTSNGWGAVNSGAGVTAACKFGSSNSFFRHMVWLIHQSGTYPVIKRTFNNTKGRDVLVVWGIHHPATLKEQQDLYKKDSSYVAVGSETYNRRFIPEISTRPKVNGQAGRMTFYWTIVKPGESITFESNGAFLAPRYAFEIVSVGNGKLFRSELNIESCSTKCQTEIGGINTNKSFHSVHRNTIGDCPKYVNVKSLKLATGLRNVPAIASRGLFGAIAGFIEGGWPGLINGWYGFQHRNEEGTGIAADKESTQKAIDQITSKVNNIVDRMNTNFESVQHEFSEIEERINQLSKHVDDSVVDIWSYNAQLLVLLENEKTLDLHDSNVRNLHEKVRRMLKDNAKDEGNGCFTFYHKCDNECIERVRNGTYDHKEFEEESKINRQEIEGVKLDSSGNVYKILSIYSCIASSLVLAALIMGFILWACSNGSCRCTICI

SEQ ID NO: 10344 - protein, 565 aa, synthetic construct
  REGION 1..565: note = hemagglutinin__InfluenzaA__AGQ81216
MKKTLLFAAIFLYVKADEICIGYLSNNSTDKVDTIIENNVTVTSSVELVETEHTGSFCSINGKQPISLGDCSFAGWILGNPMCDDLIGKTSWSYIVEKPNPANGICYPGTLENEEELRLKFSGVLEFSKFEAFTSNGWGAVNSGAGVTAACKFGSSNSFFRNMVWLIHQSGTYPVTKRTFNNTKGRDVLVVWGIHHPATLKEHQDLYKKDSSYVAVGSETYNRRFTPEISTRPKVNGQAGRMTFYWTIVKPGESITFESNGAFLAPRYAFEIVSVGNGKLFRSELNIESCSTKCQTEIGGINTNKSFHSVHRNTIGDCPKYVNVKSLKLATGLRNVPAIASKGLFGAIAGFIEGGWPGLINGWYGFQHRNEEGTGIAADKESTQKAIDQITSKVNNIVDRMNTNFESVRHEFSEIEERINQLSKHVDDSVVDIWSYNAQLLVLLENEKTLDLHDSNVRNLHERVRRMLKDNAKDEGNGCFTFYHKCDNECIERVRNGTYDHKEFEEESKINRQEIEGVKLDSSGNVYKILSIYSCIASSLVLAALIMGFILWACGNGSCRCTICI

SEQ ID NO: 10345 - protein, 565 aa, synthetic construct
  REGION 1..565: note = hemagglutinin__InfluenzaA__AGQ81217
MKKTLLFAAIFLYAKADEICIGYLSNNSTDKVDTIIENNVTVTSSVELVETEHTGSFCSINGKQPISLGDCSFAGWILGNPMCDDLIGKTSWSYIVEKPNPANGICYPGTLENEEELRLKFSGVLEFSRFEAFTSNGWGAVNSGAGVTAACKFGSSNSFFRNMVWLIHQSGTYPVIKRTFNNTKGRDVLVVWGIHHPATLKEHQDLYKKDSSYVAVGSETYNRRFIPEISTRPKVNGQAGRMTFYWTIVKPEESITFESNGAFLAPRYAFEIVSVGNGKLFRSELNIESCSTKCQTEIGGINTNKSFHSVHRNTIGDCPKYVNVKSLKLATGLRNVPAIASRGLFGAIAGFIEGGWPGLINGWYGFQHRNEEGTGIAADKESTQKAIDQITSKVNNIVDRMNTNFESVQHEFSEIEERINQLSKHVDDSVVDIWSYNAQLLVLLENEKTLDLHDSNVRNLHEKVRRMLKDNAKDEGNGCFTFYHKCDNECIERVRNGTYDHKEFEEESKINRQEIEGVKLDSSGNVYKILSIYSCIASSLILAALIMGFILWACSNGSCRCTICI

SEQ ID NO: 10346 - protein, 567 aa, synthetic construct
  REGION 1..567: note = hemagglutinin__InfluenzaA__AGQ88499
MEKIVLLFATISLVKSDHICIGYHANNSTEQVDTIMEKNVTVTHAQDILEKTHNGKLCDLNGVKPLILKDCSVAGWLLGNPMCDEFINVPEWSYIVEKANPANDLCYPGNFNDYEELKHLLSRINHFEKIQIIPKDSWTDHEASLGVSAACPYQGNSSFFRNVVWLIKKDNAYPTIKKGYNNTNQEDLLVLWGIHHPNNEAEQTRLYQNPTTYISIGTSTLNQRLVPKIATRSKINGQSGRIDFFWTILKPNDAIHFESNGNFIAPEYAYKIVKKGDSTIMKSEVEYGNCNTRCQTPIGAINSSMPFHNIHPLTIGECPKYVKSNKLVLATGLRNSPQRERRRKRGLFGAIAGFIEGGWQGMVDGWYGYHHSNEQGSGYAADKESTQKAIDGVTNKVNSIIDKMNTQFEAVGREFNNLERRIENLNKKMEDGFLDVWTYNAELLVLMENERTLDYHDSNVRNLYDKVRLQLKDNAKELGNGCFEFYHKCNNECMESVRNGTYDYPQYSEEARLKREEISGVKLESIGIYQILSIYSTVASSLVLAIMMAGLSLWMCSNGSLQCRICI

SEQ ID NO: 10347 - protein, 560 aa, synthetic construct; identical to SEQ ID NO: 10237
  REGION 1..560: note = hemagglutinin__InfluenzaA__AGR33888

SEQ ID NO: 10348 - protein, 560 aa, synthetic construct; identical to SEQ ID NO: 10237
  REGION 1..560: note = hemagglutinin__InfluenzaA__AGR33889

SEQ ID NO: 10349 - protein, 560 aa, synthetic construct
  REGION 1..560: note = hemagglutinin__InfluenzaA__AGR33890
MNTQILVFALIAITPTNSDKICLGHHAVSNGTKVNTLTERGVEVVNATETVERTSIPRICSKGKRTVDLGQCGLLGTITGPPQCDQFLEFSADLIIERREGSDVCYPGKFVNEEALRQILRESGGIDKEAMGFTYSGIRTNGATSACRRSGSSFYAEMKWLLSNTDNAAFPPMTKSYKNTRKAPALIIWGIHHSVSTAEQTKLYGSGNKLVTVRSSNYQQSFVPSPGAGPQVNGQSGRIDFHWLMLNPNDTVTFSFNGAFIAPDRASFLRGKSMGIQSGVQVDANCEGDCYHSGGTIISNLPFQNIDSRVVGKCPRYVKQKSLLLATGMKNVPEIPKGRGLFGAIAGFIENGWEGLIDGWYGFRHQNAQGEGTAADYKSTQSAINQMTGKLNRLIEKTNQQFELIDNEFTEVEKQIGNVINWTRDSITEVWSYNAELLVAMENQHTIDLADSEMNKLYERVKRQLRENAEEDGTGCFEIFHKCDDDCMASIRNNTYDHSKYREEAMQNRIQIDPVKLSSGYKDVILWFSFGASCFILLAIAMGLVFICVKNGNMRCTICI

SEQ ID NO: 10350 - protein, 560 aa, synthetic construct
  REGION 1..560: note = hemagglutinin__InfluenzaA__AGR33892
MNTQILVFALIAIIPTNADKICLGHHAVSNGTKVNTLTERGVEVVNATETVERTSIPRICSKGKRTVDLGQCGLLGTITGPPQCDQFLEFSADLIIERREGSDVCYPGKFVNEEALRQILRESGGINKEAMGFTYSGIRTNGATSACRRSGSSFYAEMKWLLSNTDNAAFPPMTKSYKNTRKAPALIIWGIHHSGSTAEQTKLYGSGNKMVTVRSSNYQQSFVPSPGAGPQVNGQSGRIDFHWLMLNPNDTVTFSFNGAFIAPDRASFLRGKSMGIQSGVQVDANCEGDCYHSGGTIISNLPFQNIDSRVVGKCPRYVKQKSLLLATGMKNVPEIPKGRGLFGAIAGFIENGWEGLIDGWYGFRHQNAQGEGTAADYKSTQSAINQMTGKLNRLIEKTNQQFELIDNEFTEVEKQIGNVINWTRDSITEVWSYNAELLVAMENQHTIDLADSEMNKLYERVKRQLRENAEEDGTGCFEIFHKCDDDCMASIRNNTYDHSKYREEAMQNRIQIDPVKLSSGYKDVILWFSFGASCFILLAIAMGLVFICVENGNMRCTICI

SEQ ID NO: 10351 - protein, 560 aa, synthetic construct; identical to SEQ ID NO: 10229
  REGION 1..560: note = hemagglutinin__InfluenzaA__AGR33895

SEQ ID NO: 10352 - protein, 560 aa, synthetic construct; identical to SEQ ID NO: 10308
  REGION 1..560: note = hemagglutinin__InfluenzaA__AGR33897

SEQ ID NO: 10353 - protein, 560 aa, synthetic construct
  REGION 1..560: note = hemagglutinin__InfluenzaA__AGR33899
METVSLITILLVATVSNADKICIGYQSTNSTETVDTLTENNVPVTHAKELLHTEHNGMLCATSLGQPLILDTCTIEGLIYGNPSCDLLLEGREWSYIVERPSAVNGLCYPGNVENLEELRSLFSSARSYQRIQIFPDTIWNVSYNGTSKACSGSFYRSMRWLTQKNSNYPIQDAQYTNNQGKNILFMWGINHPPTDTTQRDLYTRTDTTTSVATEEINRIFKPLIGPRPLVNGLMGRIDYYWSVLKPGQTLRIKSDGNLIAPWYGHILSGESHGRILKTDLKKGSCTVQCQTEKGGLNTTLPFQNVSKYAFGNCSKYIGIKSLKLAVGLRNVPSRSSRGLFGAIAGFIEGGWSGLVAGWYGFQHSNDQGVGMAADRDSTQKAIDKITSKVNNIVDKMNKQYEIIDHEFSEVETRLNMINNKIDDQIQDIWAYNAELLVLLENQKTLDEHDANVNNLYNKVKRALGSNAVEDGKGCFELYHKCDDQCMETIRNGTYNRSKYQEESKLERQKIEGVKLESEGTYKILTIYSTVASSLVIAMGFAAFLFWAMSNGSCRCNICI

SEQ ID NO: 10354 - protein, 560 aa, synthetic construct
  REGION 1..560: note = hemagglutinin__InfluenzaA__AGR33900
METVSLITILLVATVSNADKICIGYQSTNSTETVDTLTENNVPVTHAKELLHTEHNGMLCATSLGQPLILDTCTIEGLIYGNPSCDLLLEGREWSYIVERPSAVNGLCYPGNVENLEELRSLFSSARSYQRIQIFPDTIWNVSYNGTSKACSGSFYRSMRWLTQKNSDYPIQDAQYTNNQGKNILFMWGINHPPTDTTQRDLYTRTDTTTSVATEEINRIFKPLIGPRPLVNGLMGRIDYYWSVLKPGQTLRIKSDGNLIAPWYGHILSGESHGRILKTDLKKGSCTVQCQTEKGGLNTTLPFQNVSKYAFGNCSKYIGIKSLKLAVGLRNVPSRSSRGLFGAIAGFIEGGWSGLVAGWYGFQHSNDQGVGMAADRDSTQKAIDKITSKVNNIVDKMNKQYEIIDHEFSEVETRLNMINNKIDDQIQDIWAYNAELLVLLENQKTLDEHDANVNNLYNKVKRALGSNAVEDGKGCFDLYHKCDDQCMETIRNGTYNRRKYQEESKLERQKIEGVKLESEGTYKILTIYSTVASSLVIAMGFAAFLFWAMSNGSCRCNICI

SEQ ID NO: 10355 - protein, 560 aa, synthetic construct
  REGION 1..560: note = hemagglutinin__InfluenzaA__AGR33902
METASLITILLVATVSNADKICIGYQSTNSTETVDTLTENNVPVTHAKELLHTEHNGMLCATSLGQPLILDTCTIEGLIYGNPSCDLLLEGREWSYIVERPSAVNGLCYPGNVENLEELRSLFSSARSYQRIQIFPDTTWNVSYNGISKACSGSFYRSMRWLTQKNSNYPIQDAQYTNNQGKNILFMWGINHPPTDTTQRDLYTRTDTTTSVATEEINRIFKPLIGPRPLVNGLMGRIDYYWSVLKPGQTLRIKSDGNLIAPWYGHILSGESHGRILKTDLKRGSCTVQCQTEKGGLNTTLPFQNVSKYAFGNCSKYIGIKSLKLAVGLRNVPSRSSRGLFGAIAGFIEGGWSGLVAGWYGFQHSNDQGVGMAADRDSTQKAIDKITSKVNNIVDKMNKQYEIIDHEFSEVETRLNMINNKIDDQIQDIWAYNAELLVLLENQKTLDEHDANVNNLYNKVKRALGSNAVEDGKGCFELYHKCDNQCMETIRNGTYNRRKYQEESKLERQKIEGVKLESEGTYKILTIYSTVASSLVIAMGFAAFLFWAMSNGSCRCNICI

SEQ ID NO: 10356 - protein, 565 aa, synthetic construct; identical to SEQ ID NO: 5513
  REGION 1..565: note = hemagglutinin__InfluenzaA__AGR49817

SEQ ID NO: 10357 - protein, 565 aa, synthetic construct
  REGION 1..565: note = hemagglutinin__InfluenzaA__AGR49841
MKVKLLVLLCTFTATYADTICIGYHANNSTDTVDTVLEKNVTVTHSVNLLENSHNGKLCLLKGIAPLQLGNCSVAGWILGNPECELLISKESWSYIVEKPNPENGTCYPGHFADYEELREQLSSVSSFERFEIFPKESSWPNHTVTGVSASCSHNGESSFYRNLLWLTGKNGLYPNLSKSYANNKEKEVLVLWGVHHPPNIVDQKTLYRTENAYVSVVSSHYSRKFTPEIAKRPKVRDQEGRINYYWTLLEPRDTIIFEANGNLIAPRYAFALSRGFGSGIINSNAPMGKCDAKCQTPQGAINSSLPFQNVHPVTIGECPKYVRSAKLRMVTGLRNIPSIQSRGLFGAIAGFIEGGWTGMVDGWYGYHHQNEQGSGYAADQKSTQNAINGITNKVNSVIEKMNTQFTAVGKEFNKLERRMENLNKKVDDGFIDIWTYNAELLVLLENERTLDFHDSNVKNLYEKVKSQLKNNAKEIGNGCFEFYHKCNDECMESVKNGTYDYPKYSEESKLNREKIDGVKLESIGVYQILAIYSTVASSLVLLVSLGAISFWMCSNGSLQCRICI

SEQ ID NO: 10358 - protein, 565 aa, synthetic construct; identical to SEQ ID NO: 5513
  REGION 1..565: note = hemagglutinin__InfluenzaA__AGR49853

SEQ ID NO: 10359 - protein, 565 aa, synthetic construct
  REGION 1..565: note = hemagglutinin__InfluenzaA__AGR49865
MKVKLLVLLCTFTATYADTICIGYHANNSTDTVDTVLEKNVTVTHSVNLLENNHNGKLCLLKGIAPLQLGNCSVAGWILGNPECELLISKESWSYIVEKPNPENGTCYPGHFADYEELREQLSSVSSFERFEIFPKESSWPNHTVTGVSASCSHNGESSFYRNLLWLTGKNGLYPNLSKSYANNKEKEVLVLWGVHHPPNIVNQKTLYRTENAYVSVVSSHYSRKFTPEIAKRPKVRDQEGRINYYWTLLEPGDTIIFEANGNLIAPRYAFALNRGFGSGIINSNAPMDKCDAKCQTPQGAINSSLPFQNVHPVTIGECPKYVRSAKLRMVTGLRNIPSIQSRGLFGAIAGFIEGGWTGMVDGWYGYHHQNEQGSGYAADQKSTQNAINGITNKVNSVIEKMNTQFTAVGKEFNKLERRMENLNKKVDDGFIDVWTYNAELLVLLENERTLDFHDSNVKNLYEKVKSQLKNNAKEIGNGCFEFYHKCNDECMESVKNGTYDYPKYSEESKLNREKIDGVKLESMGVYQILAIYSTVASSLVLLVSLGAISFWMCSNGSLQCRICI

SEQ ID NO: 10360 - protein, 566 aa, synthetic construct; identical to SEQ ID NO: 2656
  REGION 1..566: note = hemagglutinin__InfluenzaA__AGR49877

SEQ ID NO: 10361 - protein, 566 aa, synthetic construct; identical to SEQ ID NO: 2434
  REGION 1..566: note = hemagglutinin__InfluenzaA__AGR49888

SEQ ID NO: 10362 - protein, 566 aa, synthetic construct
  REGION 1..566: note = hemagglutinin__InfluenzaA__AGR49900
MKTIIALSYILCLVFAQKLPGNDNSTATLCLGHHAVPNGTIVKTITNDQIEVTNATELVQSSSTGEICDSPHQILDGENCTLIDALLGDPQCDGFQNKKWDLFVERSKAYSKCYPYDVPDYASLRSLVASSGTLEFNNESFNWTGVTQNGTSSACIRRSNNSFFSRLNWLTHLKFKYPALNVTMPNNEKFDKLYIWGVHHPGTDNDQIFLYAQASGRITVSTKRSQQTVIPNIGSRPRVRNIPSRISIYWTIVKPGDILLINSTGNLIAPRGYFKIRSGKSSIMRSDAPIGKCNSECITPNGSIPNDKPFQNVNRITYGACPRYVKQNTLKLATGMRNVPEKQTRGIFGAIAGFIENGWEGMVDGWYGFRHQNSEGIGQAADLKSTQAAIDQINGKLNRLIGKTNEKFHQIEKEFSEVEGRIQDLEKYVEDTKIDLWSYNAELLVALENQHTIDLTDSEMNKLFEKTKKQLRENAEDMGNGCFKIYHKCDNACIGSIRNGTYDHDVYRDEALNNRFQIKGVELKSGYKDWILWISFAISCFLLCVALLGFIMWACQKGNIRCNICI

SEQ ID NO: 10363 - protein, 566 aa, synthetic construct
  REGION 1..566: note = hemagglutinin__InfluenzaA__AGR49912
MKTIIALSYILCLVSAQKLPGNDNSTATLCLGHHAVPNGTIVKTITNDQIEVTNATELVQSSSTGEICDSPHQILDGENCTLIDALLGDPQCDGFQNKKWDLFVERSKAYSNCYPYDVPDYASLRSLVASSGTLEFNNESFNWTGVTQNGTSSACIRRSNNSFFSRLNWLTHLKFKYPALNVTMPNNEEFDKLYIWGVHHPGTDNDQIFLYAQASGRITVSTKRSQQTVIPNIGSRPRVRNIPSRISIYWTIVKPGDILLINSTGNLIAPRGYFKIRSGKSSIMRSDAPIGKCNSKCITPNGSIPNDKPFQNVNRITYGACPRYVKQNTLKLATGMRNVPEKQTRGIFGAIAGFIENGWEGMVDGWYGFRHQNSEGIGQAADLKSTQAAIDQINGKLNRLIGKTNEKFHQIEKEFSEVEGRIQDLEKYVEDTKIDLWSYNAELLVALENQHTIDLTDSEMNKLFEKTKKQLRENAEDMGNGCFKIYHKCDNACIGSIRNGTYDHDVYRDEALNNRFQIKGVELKSGYKDWILWISFAISCFLLCVALLGFIMWACQKGNIRCNICI

SEQ ID NO: 10364 - protein, 566 aa, synthetic construct
  REGION 1..566: note = hemagglutinin__InfluenzaA__AGR49924
MKTIIALSYILCLVSAQKLPGNDNSTATLCLGHHAVPNGTIVKTITNDQIEVTNATELVQSSSTGEICDSPHQILDGENCTLIDALLGDPQCDGFQNKKWDLFVERSKAYSNCYPYDVPDYASLRSLVASSGTLEFNNESFNWTGVTQNGTSSACIRRSNNSFFSRLNWLTHLKFKYPALNVTMPNNEEFDKLYIWGVHHPGTDNDQIFLYAQASGRITVSTKRSQQTVIPNIGSRPRVRNIPSRISIYWTIVKPGDILLINSTGNLIAPRGYFKIRSGKSSIMRSDAPIGKCNSKCITPNGSIPNDKPFQNVNRITYGACPRYVKQNTLKLATGMRNVPEKQTRGIFGAIAGFIENGWEGMVDGWYGFRHQNSEGIGQAADLKSTQAAVDQINGKLNRLIGKTNEKFHQIEKEFSEVEGRIQDLEKYVEDTKIDLWSYNAELLVALENQHTIDLTDSEMNKLFEKTKKQLRENAEDMGNGCFKIYHKCDNACIGSIRNGTYDHDVYRDEALNNRFQIKGVELKSGYKDWILWISFAISCFLLCVALLGFIMWACQKGNIRCNICI

SEQ ID NO: 10365 - protein, 566 aa, synthetic construct
  REGION 1..566: note = hemagglutinin__InfluenzaA__AGR49936
MKTIIALSYILCLISAQKFPGNDNSTATLCLGHHAVPNGTIVKTITNDQIEVTNATELVQSSSTGEICDSPHQILDGENCTLIDALLGDPQCDGFQNKKWDLFVERSKAYSNCYPYDVPGYASLRSLVASSGTLEFNNESFNWTGVTQNGTSSACIRRSNNSFFSRLNWLTHLKFKYPALNVTMPNNEEFDKLYIWGVHHPGTDNDQIFLYAQASGRITVSTKRSQQTVIPNIGSRPRVRNIPSRISIYWTIVKPGDILLINSTGNLIAPRGYFKIRSGKSSIMRSDAPIGKCNSECITPNGSIPNDKPFQNVNRITYGACPRYVKQNTLKLATGMRNVPEKQTRGIFGAIAGFIENGWEGMVDGWYGFRHQNSEGIGQAADLKSTQAAIDQINGKLNRLIGKTNEKFHQIEKEFSEVEGRIQDLEKYVEDTKIDLWSYNAELLVALENQHTIDLTDSEMNKLFEKTKKQLRENAEDMGNGCFKIYHKCDNACIGSIRNGTYDHDVYRDEALNNRFQIKGVELKSGYKDWILWISFAISCFLLCVALLGFIMWACQKGNIRCNICI

SEQ ID NO: 10366 - protein, 566 aa, synthetic construct; identical to SEQ ID NO: 7694
  REGION 1..566: note = hemagglutinin__InfluenzaA__AGR49948

SEQ ID NO: 10367 - protein, 566 aa, synthetic construct; identical to SEQ ID NO: 2527
  REGION 1..566: note = hemagglutinin__InfluenzaA__AGR49960

SEQ ID NO: 10368 - protein, 566 aa, synthetic construct
  REGION 1..566: note = hemagglutinin__InfluenzaA__AGR49972
MKAILVVLLYTFATANADTLCIGYHANNSTDTVDTVLEKNVTVTHSVNLLEDKHNGKLCKLRGVAPLHLGKCNIAGWILGNPECESLSTASSWSYIVETSSSDNGTCYPGDFIDYEELREQLSSVSSFERFEIFPKTSSWPNHDSNKGVTAACPHAGAKSFYKNLIWLVKKGNSYPKLSKSYINDKGKEVLVLWGIHHPSTSADQQSLYQNADAYVFVGSSRYSKKFKPEIAIRPKVRDQEGRMNYYWTIVEPGDKITFEATGNLVVPRYAFAMERNAGSGIIISDTPVHDCNTTCQTPKGAINTSLPFQNIHPITIGKCPKYVKSTKLRLATGLRNVPSIQSRGLFGAIAGFIEGGWTGMVDGWYGYHHQNEQGSGYAADLKSTQNAIDEITNKVNSVIEKMNTQFTAVGKEFNHLEKRIENLNKKVDDGFLDIWTYNAELLVLLENERTLDYHDSNVKNLYEKVRSQLKNNAKEIGNGCFEFYHKCDNTCMESVKNGTYDYPKYSEEAKLNREEIDGVKLESTRIYQILAIYSTVASSLVLVVSLGAISFWMCSNGSLQCRICI

SEQ ID NO: 10369 - protein, 565 aa, synthetic construct; identical to SEQ ID NO: 6698
  REGION 1..565: note = hemagglutinin__InfluenzaA__AGR49983

SEQ ID NO: 10370 - protein, 565 aa, synthetic construct; identical to SEQ ID NO: 6698
  REGION 1..565: note = hemagglutinin__InfluenzaA__AGR49995

SEQ ID NO: 10371 - protein, 566 aa, synthetic construct; identical to SEQ ID NO: 2656
  REGION 1..566: note = hemagglutinin__InfluenzaA__AGR50007

SEQ ID NO: 10372 - protein, 566 aa, synthetic construct; identical to SEQ ID NO: 2656
  REGION 1..566: note = hemagglutinin__InfluenzaA__AGR50018

SEQ ID NO: 10373 - protein, 566 aa, synthetic construct; identical to SEQ ID NO: 2656
  REGION 1..566: note = hemagglutinin__InfluenzaA__AGR50029

SEQ ID NO: 10374 - protein, 566 aa, synthetic construct
  REGION 1..566: note = hemagglutinin__InfluenzaA__AGR50040
MKTIIALSYILCLVFAQKLPGNDNSTATLCLGHHAVPNGTIVKTITNDQIEVTNATELVQSSSTGEICDSPHQILDGENCTLIDALLGDPQCDGFQNKKWDLFVERSKAYSNCYPYDVPDYASLRSLVASSGTLEFNNESFNWTGVTQNGTSSACIRRSNNSFFSRLNWLTHLKFKYPALNVTMPNNEQFDKLYIWGVHHPGTDNDQIFLYAQASGRITVSTKRSQQTVIPNIGSRPRVRNIPSRISIYWTIVKPGDILLINSTGNLIAPRGYFKIRSGKSSIMRSDAPIGKCNSECITPNGSIPNDKPFQNVNRITYGACPRYVKQNTLKLATGMRNVPEKQTRGIFGAIAGFIENGWEGMVDGWYGFRHQNSEGRGQAADLKSTQAAIDQINGKLNRLIGKTNEKFHQIEKEFSEVEGRIQDLEKYVEDTKIDLWSYNAELLVALENQHTIDLTDSEMNKLFEKTKKQLRENAEDMGNGCFKIYHKCDNACMGSIRNGTYDHDVYRDEALNNRFQIKGVELKSGYKDWILWISFAISCFLLCVALLGFIMWACQKGNIRCNICI

SEQ ID NO: 10375 - protein, 566 aa, synthetic construct; identical to SEQ ID NO: 2656
  REGION 1..566: note = hemagglutinin__InfluenzaA__AGR50052

SEQ ID NO: 10376 - protein, 566 aa, synthetic construct; identical to SEQ ID NO: 2656
  REGION 1..566: note = hemagglutinin__InfluenzaA__AGR50063

SEQ ID NO: 10377 - protein, 566 aa, synthetic construct
  REGION 1..566: note = hemagglutinin__InfluenzaA__AGR50074
MKAILVVLLYTFATANADTLCIGYHANNSTDTVDTVLEKNVTVTHSVNLLEDKHNGKLCKLRGVAPLHLGKCNIAGWILGNPECESLSTASSWSYIVETSSSDNGTCYPGDFIDYEELREQLSSVSSFERFEIFPKTSSWPNHDSNKGVTAACPHAGAKSFYKNLIWLVKKGNSYPKLSKSYINDKGKEVLVLWGIHHPSTSADQQSLYQNADAYVFVGSSRYSKKFKPEIAIRPKVRNQEGRMNYYWTLVEPGDKITFEATGNLVVPRYAFAMERNAGSGIIISDTPVHDCNTTCQTPKGAINTSLPFQNIHPITIGKCPKYVKSTKLRLATGLRNVPSIQSRGLFGAIAGFIEGGWTGMVDGWYGYHHQNEQGSGYAADLKSTQNAIDEITNKVNSVIEKMNTQFTAVGKEFNHLEKRIENLNKKVDDGFLDIWTYNAELLVLLENERTLDYHDSNVKNLYEKVRSQLKNNAKEIGNGCFEFYHKCDNTCMESVKNGTYDYPKYSEEAKLNREEIDGVKLESTRIYQILAIYSTVASSLVLVVSLGAISFWMCSNGSLQCRICI

SEQ ID NO: 10378 - protein, 566 aa, synthetic construct; identical to SEQ ID NO: 2656
  REGION 1..566: note = hemagglutinin__InfluenzaA__AGR50085

SEQ ID NO: 10379 - protein, 566 aa, synthetic construct; identical to SEQ ID NO: 2656
  REGION 1..566: note = hemagglutinin__InfluenzaA__AGR50096

SEQ ID NO: 10380 - protein, 566 aa, synthetic construct; identical to SEQ ID NO: 2656
  REGION 1..566: note = hemagglutinin__InfluenzaA__AGR50107

SEQ ID NO: 10381 - protein, 566 aa, synthetic construct; identical to SEQ ID NO: 2849
  REGION 1..566: note = hemagglutinin__InfluenzaA__AGR50118

SEQ ID NO: 10382 - protein, 566 aa, synthetic construct
  REGION 1..566: note = hemagglutinin__InfluenzaA__AGR50129
MKAILVVLLYTFATANADTLCIGYHANNSTDTVDTVLEKNVTVTHSVNLLEDKHNGKLCKLRGVAPLHLGKCNIAGWILGNPECESLSTASSWSYIVETSSSDNGTCYPGDFIDYEELREQLSSVSSFERFEIFPKTSSWPNHDSNKGVTAACPHAGAKSFYKNLIWLVKKGNSYPKLSKSYINDKGKEVLVLWGIHHPSTSADQQSLYQNADAYVFVGSSRYSKKFKPEIAIRPKVRDQEGRMNYYWTLVEPGDKITFEATGNLVVPRYAFAMERNAGSGIIISDTPVHDCNTTCQTPKGAINTSLPFQNIHPITIGQCPKYVKSTKLRLATGLRNVPSIQSRGLFGAIAGFIEGGWTGMVDGWYGYHHQNEQGSGYAADLKSTQNAIDEITNKVNSVIEKMNTQFTAVGKEFNHLEKRIENLNKKVDDGFLDIWTYNAELLVLLENERTLDYHDSNVKNLYEKVRSQLKNNAKEIGNGCFEFYHKCDNTCMESVKNGTYDYPKYSEEAKLNREEIDGVKLESTRIYQILAIYSTVASSLVLVVSLGAISFWMCSNGSLQCRICI

SEQ ID NO: 10383 - protein, 566 aa, synthetic construct; identical to SEQ ID NO: 2656
  REGION 1..566: note = hemagglutinin__InfluenzaA__AGR50140

SEQ ID NO: 10384 - protein, 566 aa, synthetic construct; identical to SEQ ID NO: 2851
  REGION 1..566: note = hemagglutinin__InfluenzaA__AGR50151

SEQ ID NO: 10385 - protein, 565 aa, synthetic construct; identical to SEQ ID NO: 6698
  REGION 1..565: note = hemagglutinin__InfluenzaA__AGR50162

SEQ ID NO: 10386 - protein, 566 aa, synthetic construct; identical to SEQ ID NO: 2656
  REGION 1..566: note = hemagglutinin__InfluenzaA__AGR50174

SEQ ID NO: 10387 - protein, 566 aa, synthetic construct; identical to SEQ ID NO: 2695
  REGION 1..566: note = hemagglutinin__InfluenzaA__AGR50185

SEQ ID NO: 10388 - protein, 566 aa, synthetic construct; identical to SEQ ID NO: 2656
  REGION 1..566: note = hemagglutinin__InfluenzaA__AGR50196

SEQ ID NO: 10389 - protein, 566 aa, synthetic construct
  REGION 1..566: note = hemagglutinin__InfluenzaA__AGR50207
MKAILVVLLYTFATANADTLCIGYHANNSTDTVDTVLEKNVTVTHSVNLLEDKHNGKLCKLRGVAPLHLGKCNIAGWILGNPECESLSTASSWSYIVETSSSDNGTCYPGDFIDYEELREQLSSVSSFERFEIFPKTSSWPNHDSNKGVTAACPHAGAKSFYKNLIWLVKKGKSYPKLSKSYINDKGKEVLVLWGIHHPSTSADQQSLYQNADAYVFVGSSRYSKKFKPEIAIRPKVRDQEGRMNYYWTLVEPGDKITFEATGNLVVPRYAFAMERNAGSGIIISDTPVHDCNTTCQTPKGAINTSLPFQNIHPITIGKCPKYVKSTKLRLATGLRNVPSIQSRGLFGAIAGFIEGGWTGMVDGWYGYHHQNEQGSGYAADLKSTQNAIDEITNKVNSVIEKMNTQFTAVGKEFNHLEKRIENLNKKVDDGFLDIWTYNAELLVLLENERTLDYHDSNVKNLYEKVRSQLKNNAKEIGNGCFEFYHKCDNTCMESVKNGTYDYPKYSEEAKLNREEIDGVKLESTRIYQILAIYSTVASSLVLVVSLGAISFWMCSNGSLQCRICI

SEQ ID NO: 10390 - protein, 566 aa, synthetic construct; identical to SEQ ID NO: 2656
  REGION 1..566: note = hemagglutinin__InfluenzaA__AGR50218

SEQ ID NO: 10391 - protein, 566 aa, synthetic construct; identical to SEQ ID NO: 2656
  REGION 1..566: note = hemagglutinin__InfluenzaA__AGR50229

SEQ ID NO: 10392 - protein, 566 aa, synthetic construct; identical to SEQ ID NO: 2851
  REGION 1..566: note = hemagglutinin__InfluenzaA__AGR50240

SEQ ID NO: 10393 - protein, 566 aa, synthetic construct; identical to SEQ ID NO: 2709
  REGION 1..566: note = hemagglutinin__InfluenzaA__AGR50251

SEQ ID NO: 10394 - protein, 566 aa, synthetic construct
  REGION 1..566: note = hemagglutinin__InfluenzaA__AGR50262
MKAILVVLLYTFATANADTLCIGYHANNSTDTVDTVLEKNVTVTHSVNLLEDKHNGKLCKLRGVAPLHLGKCNIAGWILGNPECESLSTASSWSYIVETSSSDNGTCYPGDFIDYEELREQLSSVSSFERFEIFPKTSSWPNHDSNKGVTAACPHAGAKSFYKNLIWLVKKGNSYPKLSKSYINDKGKEVLVLWGIHHPSTSADQQSLYQNADAYVFVGSSRYSKKFKPEIAIRPKVRDQEGRMNYYWTLVEPGDKITFEATGNLVVPRYAFAMERNAGSGIIISDTPVHDCNTTCQTPKGAINTSLPFQNIHPITIGKCPKYVKSTKLRLATGLRNVPSIQSRGLFGAIAGFIEGGWTGMVDGWYGYHHQNEQGSGYAADLKSTQNAIDEITNKVNSVIEKMNTQFTAVGKEFNHLEKRIENLNKKVDDGFLDIWTYNAELLVLLENEKTLDYHDSNVKNLYEKVRSQLKNNAKEIGNGCFEFYHKCDNTCMESVKNGTYDYPKYSEEAKLNREEIDGVKLESTRIYQILAIYSTVASSLVLVVSLGAISFWMCSNGSLQCRICI

SEQ ID NO: 10395 - protein, 566 aa, synthetic construct; identical to SEQ ID NO: 2656
  REGION 1..566: note = hemagglutinin__InfluenzaA__AGR50273

SEQ ID NO: 10396 - protein, 566 aa, synthetic construct
  REGION 1..566: note = hemagglutinin__InfluenzaA__AGR50284
MKAILVVLLYTFATANADTLCIGYHANNSTDTVDTVLEKNVTVTHSVNLLEDKHNGKLCKLRGVAPLHLGKCNIAGWILGNPECESLSTASSWSYIVETSSSDNGTCYPGDFIDYEELREQLSSVSSFERFEIFPKTSSWPNHDSNKGVTAACPHAGAKSFYKNLIWLVKKGNSYPKLSKSYINDKGKEVLVLWGIHHPSTSADQQSLYQNADAYVFVGSSRYSKKFKPEIAIRPKVRDQEGRMNYYWTLVEPGDKITFEATGNLVVPRYAFAMERNAGSGIIISDSPVHDCNTTCQTPKGAINTSLPFQNIHPITIGKCPKYVKSTKLRLATGLRNVPSIQSRGLFGAIAGFIEGGWTGMVDGWYGYHHQNEQGSGYAADLKSTQNAIDEITNKVNSVIEKMNTQFTAVGKEFNHLEKRIENLNKKVDDGFLDIWTYNAELLVLLENERTLDYHDSNVKNLYEKVRSQLKNNAKEIGNGCFEFYHKCDNTCMESVKNGTYDYPKYSEEAKLNREEIDGVKLESTRIYQILAIYSTVASSLVLVVSLGAISFWMCSNGSLQCRICI

SEQ ID NO: 10397 - protein, 566 aa, synthetic construct; identical to SEQ ID NO: 3399
  REGION 1..566: note = hemagglutinin__InfluenzaA__AGR50295

SEQ ID NO: 10398 - protein, 566 aa, synthetic construct; identical to SEQ ID NO: 2656
  REGION 1..566: note = hemagglutinin__InfluenzaA__AGR50306

SEQ ID NO: 10399 - protein, 566 aa, synthetic construct; identical to SEQ ID NO: 2656
  REGION 1..566: note = hemagglutinin__InfluenzaA__AGR50317

SEQ ID NO: 10400 - protein, 566 aa, synthetic construct; identical to SEQ ID NO: 10389
  REGION 1..566: note = hemagglutinin__InfluenzaA__AGR50328

SEQ ID NO: 10401 - protein, 566 aa, synthetic construct
  REGION 1..566: note = hemagglutinin__InfluenzaA__AGR50339
MKAILVVLLYTFATANADTLCIGYHANNSTDTVDTVLEKNVTVTHSVNLLEDKHNGKLCKLRGVAPLHLGKCNIAGWILGNPECESLSTASSWSYIVETSSSDNGTCYPGDFIDYEELREQLSSVSSFERFEIFPKTSSWPNHDSNKGVTAACPHAGAKSFYKNLIWLVKKGNSYPKLSKSYINDKGKEVLVLWGIHHPSTSADQQSLYQNADAYVFVGSSRYSKKFKPEIAIRPKVRDQEGRMNYYWTLVEPGDKITFEATGNLVVPRYAFAMERNAGSGIIISDTPVHDCNTTCQTSKGAINTSLPFQNIHPITIGKCPKYVKSTKLRLATGLRNVPSIQSRGLFGAIAGFIEGGWTGMVDGWYGYHHQNEQGSGYAADLKSTQNAIDEITNKVNSVIEKMNTQFTAVGKEFNHLEKRIENLNKKVDDGFLDIWTYNAELLVLLENERTLDYHDSNVKNLYEKVRSQLKNNAKEIGNGCFEFYHKCDNTCMESVKNGTYDYPKYSEEAKLNREEIDGVKLESTRIYQILAIYSTVASSLVLVVSLGAISFWMCSNGSLQCRICI

SEQ ID NO: 10402 - protein, 566 aa, synthetic construct
  REGION 1..566: note = hemagglutinin__InfluenzaA__AGR50350
MKAILVVLLYTFATANADTLCIGYHANNSTDTVDTVLEKNVTVTHSVNLLEDKHNGKLCKLRGVAPLHLGKCNIAGWIMGNPECESLSTASSWSYIVETSSSDNGTCYPGDFIDYEELREQLSSVSSFERFEIFPKTSSWPNHDSNKGVTAACPHAGAKSFYKNLIWLVKKGNSYPKLSKSYINDKGKEVLVLWGIHHPSTSADQQSLYQNADAYVFVGSSRYSKKFKPEIAIRPKVRDQEGRMNYYWTLVEPGDKITFEATGNLVVPRYAFAMERNAGSGIIISDTPVHDCNTTCQTPKGAINTSLPFQNIHPITIGKCPKYVKSTKLRLATGLRNVPSIQSRGLFGAIAGFIEGGWTGMVDGWYGYHHQNEQGSGYAADLKSTQNAIDEITNKVNSVIEKMNTQFTAVGKEFNHLEKRIENLNKKVDDGFLDIWTYNAELLVLLENERTLDYHDSNVKNLYEKVRSQLKNNAKEIGNGCFEFYHKCDNTCMESVKNGTYDYPKYSEEAKLNREEIDGVKLESTRIYQILAIYSTVASSLVLVVSLGAISFWMCSNGSLQCRICI

SEQ ID NO: 10403 - protein, 565 aa, synthetic construct
  REGION 1..565: note = hemagglutinin__InfluenzaA__AGR50361
MKVQLLVLLCTFTATYADTICIGYHANNSTDTVDTVLEKNVTVTHSVNLLENSHNGKLCLLKGIAPLQLGNCSVAGWILGNPECELLISKESWSYIVEKPNPENGTCYPGHFADYEELREQLSSVSSFERFEIFPKESSWPNHTVTGVSASCSHNGESSFYRNLLWLTGKNGLYPNLSKSYANNKEKEVLVLWGVHHPPNIVDQKTLYRTENAYVSVVSSHYSRKFTPEIAKRPKVRDQEGRINYYWTLLEPGDTIIFEANGNLIAPRYAFALSRGFGSGIINSNAPMGKCDAKCQTPQGAINSSLPFQNVHPVTIGECPKYVRSAKLRMVTGLRNIPSIQSRGLFGAIAGFIEGGWTGMVDGWYGYHHQNEQGSGYAADQKSTQNAINGITNKVNSVIEKMNTQFTAVGKEFNKLERRMENLNKKVDDGFIDIWTYNAELLVLLENERTLDFHDSNVKNLYEKVKSQLKNNAKEIGNGCFEFYHKCNDECMESVKNGTYDYPKYSEESKLNREKIDGVKLESMGVYQILAIYSTVASSLVLLVSLGAISFWMCSNGSLQCRICI

SEQ ID NO: 10404 - protein, 566 aa, synthetic construct
  REGION 1..566: note = hemagglutinin__InfluenzaA__AGT18718
MKVILVVLLYTFATANADTLCIGYHANNSTDTVDTVLEKNVTVTHSVNLLEDKHNGKLCKLRGVAPLHLGKCNIAGWILGNPECESLSTASSWSYIVETSSSDNGTCYPGDFINYEELREQLSSVSSFERFEIFPKTSSWPNHDSNKGVTAACPHAGAKSFYKNLIWLVKKGNSYPKLSKSYINDKGKEVLVLWGIHHPSTTADQQSLYQNADAYVFVGTSRYSKKFKPEIAIRPKVRDQEGRMNYYWTLIEPGDKITFEATGNLVVPRYAFAMERNAGSGIIISDTPVHDCNTTCQTPEGAINTSLPFQNIHPITIGKCPKYVKSTKLRLATGLRNVPSIQSRGLFGAIAGFIEGGWTGMVDGWYGYHHQNEQGSGYAADLKSTQNAIDKITNKVNSVIEKMNTQFTAVGKEFNHLEKRIENLNKKVDDGFLDIWTYNAELLVLLENERTLDYHDSNVKNLYEKVRNQLKNNAKEIGNGCFEFYHKCDNTCMESVKNGTYDYPKYSEEAKLNREKIDGVKLESTRIYQILAIYSTVASSLVLVVSLGAISFWMCSNGSLQCRICI

SEQ ID NO: 10405 - protein, 566 aa, synthetic construct
  REGION 1..566: note = hemagglutinin__InfluenzaA__AGT18720
MKVILVVLLYTFATANADTLCIGYHANNSTDTVDTVLEKNVTVTHSVNLLEDKHNGKLCKLRGVAPLHLGKCNIAGWILGNPECESLSTASSWSYIVETSSSDNGTCYPGDFINYEELREQLSSVSSFERFEIFPKASSWPNHDSNKGVTAACPHAGAKSFYKNLIWLVKKGNSYPKLSKSYINDKGKEVLVLWGIHHPNTTADQQSLYQNADAYVFVGTSRYSKKFKPEIAIRPKVRDQERRMNYYWTLIEPGDKITFEATGNLVVPRYAFAMERNAGSGIIISDTPVHDCNTTCQTPEGAINTSLPFQNIHPITIGKCPKYVKSTKLRLATGLRNVPSIQSRGLFGAIAGFIEGGWTGMVDGWYGYHHQNEQGSGYAADLKSTQNAIDKITNKVNSVIEKMNTQFTAVGKEFNHLEKRIENLNKKVDDGFLDIWTYNAELLVLLENERTLDYHDSNVKNLYEKVRNQLKNNAKEIGNGCFEFYHKCDNTCMESVKNGTYDYPKYSEEAKLNREKIDGVKLESTRIYQILAIYSTVASSLVLVVSLGAISFWMCSNGSLQCRICI

SEQ ID NO: 10406 - protein, 566 aa, synthetic construct
  REGION 1..566: note = hemagglutinin__InfluenzaA__AGT18721
MKAILVVLLYTFATANADTLCIGYHANNSTDTVDTVLEKNVTVTHSVNLLEDKHNGKLCKLRGVAPLHLGKCNIAGWILGNPECESLSTASSWSYIVETSSSDNGTCYPGDFINYEELREQLSSVSSIQRSEICTKTSSWPNHDSNKGVTAACPHAGAKSFYKNLIWLVKKGNSYPKLSKSYINDKGKEVLVLWGIHHQNSRGHQQSLYQNADAYVFVGTSRYSKKFKPEIAIRPKVKEQDGRMDYYWTLIEPGDKITFEATGNLVVPRYAFAMERNAGSGIIISDTPVHDCNTTCQTPEGAINTSLPFQNIHPITIGKCPKYVKSTKLRLATGLRNVPSIQSRGLFGAIAGFIEGGWTGMVDGWYGYHHQNEQGSGYAADLKSTQNAIDKITNKVNSVIEKMNTQFTAVGKEFNHLEKRIENLNKKVDDGFLDIWTYNAELLVLLENERTLDYHDSNVKNLYEKVRNQLKNNAKEIGNGCFEFYHKCDNTCMESVKNGTYDYPKYSEEAKLNREKIDGVKLESTRIYQILAIYSTVASSLVLVVSLGAISFWMCSNGSLQCRICI

SEQ ID NO: 10407 - protein, 566 aa, synthetic construct
  REGION 1..566: note = hemagglutinin__InfluenzaA__AGT18722
MKAILVVLLYTFATANADTLCIGYHANNSTDTVDTVLEKNVTVTHSVNLLEDKHNGKLCKLRGVAPLHLGKCNIAGWILGNPECESLSTASSWSYIVETSKSNNRTCYPGDFINYEELREQLSSVSSFERFEIFPKTSSWPNHDSNKGVTAACPHAGAKSFYKNLIWLVKKGNSYPKLSKSYINDKGKEVLVLWGIHHPSTTADQQSLYQNADAYVFVGTSRYSKKFKPEIAIRPKVRDQEGRMNYYWTLIEPGDKITFEATGNLVVPRYAFAMERNAGSGIIISDTPVHDCNTTCQTPEGAINTSLPFQNIHPITIGKCPKYVKSTKLRLATGLRNVPSIQSRGLFGAIAGFIEGGWTGMVDGWYGYHHQNEQGSGYAADLKSTQNAIDKITNKVNSVIEKMNTQFTAVGKEFNHLEKRIENLNKKVDDGFLDIWTYNAELLVLLENERTLDYHDSNVKNLYEKVRNQLKNNAKEIGNGCFEFYHKCDNTCMESVKNGTYDYPKYSEEAKLNREKIDGVKLESTRIYQILAIYSTVASSLVLVVSLGAISFWMCSNGSLQCRICI

SEQ ID NO: 10408 - protein, 566 aa, synthetic construct
  REGION 1..566: note = hemagglutinin__InfluenzaA__AGT18723
MKAILVVLLYTFATANADTLCIGYHANNSTDTVDTVLEKNVTVTHSVNLLEDKHNGKLCKLRGVAPLHLGKCNIAGWILGNPECESLSTASSWSYIVETSKTNNRTCYPGDFINYEELREQLSSVSSFERFEIFPKTSSWPNHDSNKGVTAACPHAGAKSFYKNLIWLVKKGNSYPKLSKSYINDKGKEVLVLWGIHHQNKKAEQQTPYQNADAYVFVGTSRYSKKFKPEIAIRPKVRDQEGRMDYYWTLIEPGDKITFEATGNLVVPRYAFAMERNAGSGIIISDTPVHDCNTTCQTPEGAINTSLPFQNIHPITIGKCPKYVKSTKLRLATGLRNVPSIQSRGLFGAIAGFIEGGWTGMVDGWYGYHHQNEQGSGYAADLKSTQNAIDKITNKVNSVIEKMNTQFTAVGKEFNHLEKRIENLNKKVDDGFLDIWTYNAELLVLLENERTLDYHDSNVKNLYEKVRNQLKNNAKEIGNGCFEFYHKCDNTCMESVKNGTYDYPKYSEEAKLNREKIDGVKLESTRIYQILAIYSTVASSLVLVVSLGAISFWMCSNGSLQCRICI

SEQ ID NO: 10409 - protein, 566 aa, synthetic construct
  REGION 1..566: note = hemagglutinin__InfluenzaA__AGT18724
MKAILVVLLYTFATANADTLCIGYHANNSTDTVDTVLEKNVTVTHSVNLLEDKHNGKLCKLRGVVPLHLGKCNIAGWILGNPECESLSTASSWSYIVETSKTNNRTCYPGDFINYEELREQLSSVSSFERFEIFPKTSSWPNHDSNKGVTAACPHAGAKSFYKNLIWLVKKGNSYPKLSKSYINDKGKEVLVLWGIHHPSTTADQQTLYQNADAYVFVGTSRYSKKFKPEIAIRPKVRDQEGRMNYYRTLIEPENKITFEATGNLVVPRYAFAMERNAGSGIIISDTPVHDCNTTCQTPEGAINTSLPFQNIHPITIGKCPKYVKSTKLRLATGLRNVPSIQSRGLFGAIAGFIEGGWTGMVDGWYGYHHQNEQGSGYAADLKSTQNAIDKITNKVNSVIEKMNTQFTAVGKEFNHLEKRIENLNKKVDDGFLDIWTYNAELLVLLENERTLDYHDSNVKNLYEKVRNQLKNNAKEIGNGCFEFYHKCDNTCMESVKNGTYDYPKYSEEAKLNREKIDGVKLESTRIYQILAIYSTVASSLVLVVSLGAISFWMCSNGSLQCRICI

SEQ ID NO: 10410 - protein, 566 aa, synthetic construct
  REGION 1..566: note = hemagglutinin__InfluenzaA__AGT18725
MKVILVVLLYTFATANADTLCIGYHANNSTDTVDTVLEKNVTVTHSVNLLEDKHNGKLCKLRGVAPLHLGKCNIAGWILGNPECESLSTASSWSYIVETSSSDNGTCYPGDFINYEELREQLSSVSSFERFEIFPKTSSWPNHDSNKGVTAACPHAGAKSFYKNLIWLVKKGNSYPKLSKSYINDKGKEVLVLWGIHHPSTSADQQSLYQNADAYVFVGTSRYSKKFKPEIAIRPKVRDQEGRMNYYWTLVEPGDKITFEATGNLVVPRYAFAMERNAGSGIIISDTPVHDCNTTCQTPEGAINTSLPFQNIHPITIGKCPKYVKSTKLRLATGLRNVPSIQSRGLFGAIAGFIEGGWTGMVDGWYGYHHQNEQGSGYAADLKSTQNAIDKITNKVNSVIEKMNTQFTAVGKEFNHLEKRIENLNKKVDDGFLDIWTYNAELLVLLENERTLDYHDSNVKNLYEKVRTQLKNNAKEIGNGCFEFYHKCDNTCMESVKNGTYDYPKYSEEAKLNREKIDGVKLESTRIYQILAIYSTVASSLVLVVSLGAISFWMCSNGSLQCRICI

SEQ ID NO: 10411 - protein, 566 aa, synthetic construct
  REGION 1..566: note = hemagglutinin__InfluenzaA__AGT18734
MKAILVVLLYTFATANADTLCIGYHANNSTDTVDTVLEKNVTVTHSVNLLEDKHNGKLCKLRGVAPLHLGKCNIAGWILGNPECESLSTASSWSYIVETSSSDNGTCYPGDFINYEELREQLSSVSSFERFEIFPKTSSWPNHDSNKGVTAACPHAGAKSFYKNLIWLVKKGNSYPKLSKSYINDKGKEVLVLWGIHHPSTTADQQSLYQNADAYVFVGTSRYSKKFKPEIAIRPKVRDQEGRINYYWTLIEPGDKITFEATGNLVVPRYAFAMERNAGSGIIISDTPVHDCNTTCQTPEGAINTSLPFQNIHPITIGKCPKYVKSTKLRLATGLRNVPSIQSRGLFGAIAGFIEGGWTGMVDGWYGYHHQNEQGSGYAADLKSTQNAIDKITNKVNSVIEKMNTQFTAVGKEFNHLEKRIENLNKKVDDGFLDIWTYNAELLVLLENERTLDYHDSNVKNLYEKVRNQLKNNAKEIGNGCFEFYHKCDNTCMESVKNGTYDYPKYSEEAKLNREKIDGVKLESTRIYQILAIYSTVASSLVLVVSLGAISFWMCSNGSLQCRICI

SEQ ID NO: 10412 - protein, 566 aa, synthetic construct; identical to SEQ ID NO: 10123
  REGION 1..566: note = hemagglutinin__InfluenzaA__AGT18735

SEQ ID NO: 10413 - protein, 566 aa, synthetic construct
  REGION 1..566: note = hemagglutinin__InfluenzaA__AGT18748
MKTIIALSYILCLVFAQKLPGNDNSTATLCLGHHAVPNGTIVKTITNDRIEVTNATELVQNSSIGEICDSPHQILDEENCTLIDALLGDPQCDDFQNKKWDLFVERSKAYSNCYPYDVPDYASLRSLVASSGTLEFNNESFNWAGVTQNGTSSACRRGSNSSFFSRLNWLTHLNFKYPALNVTMPNNEQFDKLYIWGVHHPSTDKDQIFLYAQSSGRITVSTKRSQQAVIPNIGSRPRIRNIPSRISIYWTIVKPGDILLINSTGNLIAPRGYFKIRSGKSSIMRSDAPIGKCKSECITPNGSIPNDKPFQNVNRITYGACPRYVKQSTLKLATGMRNVPEKQTRGIFGAIAGFIENGWEGMVDGWYGFRHQNSEGRGQAADLKSTQAAIDQINGKLNRLIGKTNEKFHQIEKEFSEVEGRIQDLEKYVEDTKIDLWSYNAELLVALENQHTIDLTDSEMNKLFEKTKKQLRENAEDMGNGCFKIYHKCDNACIGSIRNGTYDHDVYRDEALNNRFQIKGVELKSGYKDWILWISFAISCFLLCVALLGFIMWACQKGNIRCNICI

SEQ ID NO: 10414 - protein, 566 aa, synthetic construct
  REGION 1..566: note = hemagglutinin__InfluenzaA__AGT18749
MKTIIALSYILCLVFAQKLPENDNSTATLCLGHHAVPNGTIVKTITDDQIEVTNATELVQNSSTGEICDSPHQILDGENCTLIDALLGDPQCDGFQNKKWDLFVERSKAYSNCYPYDVPDYASLRSLVASSGTLEFNNESFNWTGVTQNGTSSACIRRSNNSFFSRLNWLTHLNFKYPALNVTMPNNEQFDKLYIWGVHHPGTDKDQIFLYAQASGRITVSTKRSQQAVIPNIGSRPRVRNIPSRISIYWTIVKPGDILLINSTGNLIAPRGYFRIRSGRSSIMRSDAPIGKCNSECITPNGSIPNDKPFQNVNRITYGACPRYVKQNTLKLATGMRNVPEKQTRGIFGAIAGFIENGWEGMVDGWYGFRHQNSEGRGQAADLKSTQAAIDQINGKLNRLIGKTNEKFHQIEKEFSEVEGRIQDLEKYVEDTKIDLWSYNAELLVALENQHTIDLTDSEMNKLFEKTKKQLRENAEDMGNGCFKIYHKCDNACIGSIRNGTYDHDVYRDEALNNRFQIKGVELKSGYKDWILWISFAISCFLLCVALLGFIMWACQKGNIRCNICI

SEQ ID NO: 10415 - protein, 566 aa, synthetic construct
  REGION 1..566: note = hemagglutinin__InfluenzaA__AGT18751
MKTVIALSYILCLVFAQKLPGNDNSTATLCLGHHAVPNGTIVKTITNDQIEVTNATELVQNSSTGEICDSPHQILDGENCTLIDALLGDPQCDGFQNKKWDLFVERSKAYSNCYPYDVPDYASLRSLVASSGTLEFNNESFNWTGVTQNGTSSACIRRSNNSFFSRLNWLTHLNFKYPALNVTMPNNEQFDKLYIWGVHHPGTDKDQIFLYAQASGRITVSTKRSQQAVIPNIGSRPRVRNIPSRISIYWTIVKPGDILLINSTGNLIAPRGYFKIRSGRSSIMRSDAPIGKCNSECITPNGSIPNDKPFQNVNRITYGACPRYVKQNTLKLATGMRNVPEKQTRGIFGAIAGFIENGWEGMVDGWYGFRHQNSEGRGQAADLKSTQAAIDQINGKLNRLIGKTNEKFHQIEKEFSEVEGRIQDLEKYVEDTKIDLWSYKSELLVALENQHTIDLTDSEMNKLFEKTKKQLRENAEDMGNGCFKIYHKCDNACIGSIRNGTYDHDVYRDEALNNRFQIKGVELKSGYKDWILWISFAISCFLLCVALLGFIMWACQKGNIRCNICI

SEQ ID NO: 10416 - protein, 566 aa, synthetic construct
  REGION 1..566: note = hemagglutinin__InfluenzaA__AGT18752
MKTIIALSYIICLVFAQKLPGNDNSTATLCLGHHAVPNGTIVKTITNDQIEVTNATELVQNSSTGEICNSPHQILDGENCTLIDALLGDPQCDGFQNKKWDLFVERSKAYSNCYPYDVPDYASLRSLVASSGTLEFNNESFNWTGVTQNGTSSACIRRSNNSFFSRLNWLTHLNFKYPALNVTMPNNEQFDKLYIWGVHHPGTDKDQIFLYAQASGRITVSTKRSQQAVIPNIGSRPRVRNIPSRISIYWTIVKPGDILLINSTGNLIAPRGYFKIRSGRSSIMRSDAPIGKCNSECITPNGSIPNDKPFQNVNRITYGACPRYVKQNTLKLATGMRNVPEKQTRGIFGAIAGFIENGWEGMVDGWYGFRHQNSEGRGQAADLKSTQAAIDQINGKLNRLIGKTNEKFHQIEKEFSEVEGRIQDLEKYVEDTKIDLWSYSSELLVALENQHTIDLTDSEMNKLFEKTKKQLRENAEDMGNGCFKIYHKCDNACIGSIRNGTYDHDVYRDEALNNRFQIKGVELKSGYKDWILWISFAISCFLLCVALLGFIMWACQKGNIRCNICI

SEQ ID NO: 10417 - protein, 566 aa, synthetic construct
  REGION 1..566: note = hemagglutinin__InfluenzaA__AGT18753
MKTIIALSYILCLVFAQKLPGNDNSTATLCLGHHAVPNGTIVKTITNDQIEVTNATELVQNSSTGEICNSPHQILDGENCTLIDALLGDPQCDGFQNKKWDLFVERSKAYSNCYPYDVPDYASLRSLVASSGTLEFNNESFNWTGVTQNGTSSACIRRSNNSFFSRLNWLTHLNFKYPALNVTMPNNEQFDKLYIWGVHHPGTDKDQIFLYAQASGRITVSTKRSQQAVIPNIGSRPRVRNIPSRISIYWTIVKPGDILLINSTGNLIAPRGYFKIRSGRSSIMRSDAPIGKCNSECITPNGSIPNDKPFQNVNRITYGACPRYVKQNTLKLATGMRNVPEKQTRGIFGAIAGFIENGWEGMVDGWYGFRHQNSEGRGQAADLKSTQAAIDQINGKLNRLIGKTNEKFHQIEKEFSEVEGRIQDLEKYVEDTKIDLWSYKSELLVALENQHTIDLTDSEMNKLFEKTKKQLRENAEDMGNGCFKIYHKCDNACIGSIRNGTYDHDVYRDEALNNRFQIKGVELKSGYKDWILWISFAISCFLLCVALLGFIMWACQKGNIRCNICI

SEQ ID NO: 10418 - protein, 566 aa, synthetic construct
  REGION 1..566: note = hemagglutinin__InfluenzaA__AGT18754
MKTIIALSYILCLVFAQKLPENDNSTATLCLGHHAVPNGTIVKTITDDQIEVTNATELVQNSSTGEICDSPHQILDGENCTLIDALLGDPQCDGFQNKKWDLFVERGKAYSNCYPYDVPDYASLRSLVATSGTLEFNNESFNWTGVTQNGTSSACIRRSNNSFFSRLNWLTHLNFKYPALNVTMPNNEQFDKLYIWGVHHPGTDKDQIFLYAQASGRITVSTKRSQQAVIPNIGSRPRVRNIPSRISIYWTIVKPGDILLINSTGNLIAPRGYFKIRSGRSSIMRSDAPIGKCNSECITPNGSIPNDKPFQNVNRITYGACPRYVKQNTLKLATGMRNVPEKQTRGIFGAIAGFIENGWEGMVDGWYGFRHQNSEGRGQAADLKSTQAAIDQINGKLNRLIGKTNEKFHQIEKEFSEVEGRIQDLEKYVEDTKIDLWSYNAELLVALENQHTIDLTDSEMNKLFEKTKKQLRENAEDMGNGCFKIYHKCDNACIGSIRNGTYDHDVYRDEALNNRFQIKGVELKSGYKDWILWISFAISCFLLCVALLGFIMWACQKGNIRCNICI

SEQ ID NO: 10419 - protein, 566 aa, synthetic construct
  REGION 1..566: note = hemagglutinin__InfluenzaA__AGT18756
MKTIIALSYVLCLVFAQKLPGNDNSTATLCLGHHAVPNGTIVKTITNDRIEVTNATELVQNSSIGEICDSPHQILDGENCTLIDALLGDPQCDDFQNKKWDLFVERSKAYSNCYPYDVPDYASLRSLVASSGTLEFNNESFNWAGVTQNGTSSACRRGSNSSFFSRLNWLTHLNFKYPALNVTMPNNEQFDKLYIWGVHHPGTDKDQIFLYAQSSGRITVSTKRSQQAVIPNIGSRPRIRNIPSRISIYWTIVKPGDILLINSTGNLIAPRGYFKIRSGKSSIMRSDAPIGKCKSECITPNGSIPNDKPFQNVNRITYGACPRYVKQSTLKLATGMRNVPEKQTRGIFGAIAGFIENGWEGMVDGWYGFRHQNSEGRGQAADLKSTQAAIDQINGKLNRLIGKTNEKFHQIEKEFSEVEGRIQDLEKYVEDTKIDLWSYKSELLVALENQHTIDLTDSEMNKLFEKTKKQLRENAEDMGNGCFKIYHKCDNACIGSIRNGTYDHDVYRDEALNNRFQIKGVELKSGYKDWILWISFAISCFLLCVALLGFIMWACQKGNIRCNICI

SEQ ID NO: 10420 - protein, 566 aa, synthetic construct
  REGION 1..566: note = hemagglutinin__InfluenzaA__AGT18757
MKTIIALSYILCLVFAQKLPGNDNSTATLCLGHHAVPNGTIVKTITNDRIEVTNATELVQNSSIGEICDSPHQILDGENCTLIDALLGDPQCDDFQNKKWDLFVERSKAYSNCYPYDVPDYASLRSLVASSGTLEFNNESFNWAGVTQNGTSSACRRGSNSSFFSRLNWLTHLNFKYPALNVTMPNNEQFDKLYIWGVHHPGTDKDQIFLYAQSSGRITVSTKRSQQAVIPNIGSRPRIRNIPSRISIYWTIVKPGDILLINSTGNLIAPRGYFKIRSGKSSIMRSDAPIGKCKSECITPNGSIPNDKPFQNVNRITYGACPRYVKQSTLKLATGMRNVPEKQTRGIFGAIAGFIENGWEGMVDGWYGFRHQNSEGRGQAADLKSTQAAIDQINGKLNRLIGKTNEKFHQIEKEFSEVEGRIQDLEKYVEDTKIDLWSYNAELLVALENQHTIDLTDSEMNKLFEKTKKQLRENAEDMGNGCFKIYHKCDNACIGSIRNGTYDHDVYRDEALNNRFQIKGVELKSGYKDWILWISFAISCFLLCVALLGFIMWACQKGNIRCNICI

SEQ ID NO: 10421 - protein, 566 aa, synthetic construct
  REGION 1..566: note = hemagglutinin__InfluenzaA__AGT18758
MKTIIALSYILCLVFAQKLPGNDNSTATLCLGHHAVPNGTIVKTITNDRIEVTNATELVQNSSIGEICDSPHQILDGENCTLIDALLGDPQCDDFQNKKWDLFVERSKAYSNCYPYDVPDYASLRSLVASSGTLEFNNESFNWAGVTQNGTSSACRRGSNSSFFSRLNWLTHLNFKYPALNVTMPNNEQFDKLYIWGVHHPGTDKDQIFLYAQSSGRITVSTKRSQQAVIPNIGSRPRIRNIPSRISIYWTIVKPGDILLINSTGNLIAPRGYFKIRSGKSSIMRSDAPIGKCKSECITPNGSIPNDKPFQNVNRITYGACPRYVKQSTLKLATGMRNVPEKQTRGIFGAIAGFIENGWEGMVDGWYGFRHQNSEGRGQAADLKSTQAAIDQINGKLNRLIGKTNEKFHQIEKEFSEVEGRIQDLEKYVEDTKIDLWSYSSELLVALENQHTIDLTDSEMNKLFEKTKKQLRENAEDMGNGCFKIYHKCDNTCIGSIRNGTYDHDVYRDEALNNRFQIKGVELKSGYKDWILWISFAISCFLVCVALLGFIMWACQKGNIRCNICI

SEQ ID NO: 10422 - protein, 566 aa, synthetic construct
  REGION 1..566: note = hemagglutinin__InfluenzaA__AGT18759
MKTIIALSYILCLVFAQKLPGNDNSTATLCLGHHAVPNGTIVKTITNDRIEVTNATELVQNSSIGEICDSPHQILDGENCTLIDALLGDPQCDDFQNKKWDLFVERSKAYSNCYPYDVPDYASLRSLVASSGTLEFNNESFNWAGVTQNGTSSACRRGSNSSFFSRLNWLTHLNFKYPALNVTMPNNEQFDKLYIWGVHHPGTDKDQIFLYAQSSGRITVSTKRSQQAVIPNIGSRPRIRNIPSRISIYWTIVKPGDILLINSTGNLIAPRGYFKIRSGKSSIMRSDAPIGKCKSECITPNGSIPNDKPFQNVNRITYGACPRYVKQSTLKLATGMRNVPEKQTRGIFGAIAGFIENGWEGMVDGWYGFRHQNSEGRGQAADLKSTQAAIDQINGKLNRLIGKTNEKFHQIEKEFSEVEGRIQDLEKYVEDTKIDLWSYSSELLVALENQHTIDLTDSEMNKLFEKTKKQLRENAEDMGNGCFKIYHKCDNACIGSIRNGTYDHDVYRDEALNNRFQIKGVELKSGYKDWILWISFAISCFLVCVALLGFIMWACQKGNIRCNICI

SEQ ID NO: 10423 - protein, 566 aa, synthetic construct
  REGION 1..566: note = hemagglutinin__InfluenzaA__AGT18760
MKTIIALSYILCLVFAQKLPGNDNSTATLCLGHHAVPNGTIVKTITNDRIEVTNATELVQNSSIGEICDSPHQILDGENCTLIDALLGDPQCDDFQNKKWDLFVERNKAYSNCYPYDVPDYASLRSLVASSGTLEFNNESFNWAGVTQNGTSSACRRGSNSSFFSRLNWLTHLNFKYPALNVTMPNNEQFDKLYIWGVHHPGTDKDQIFLYAQSSGRITVSTKRSQQAVIPNIGSRPRIRNIPSRISIYWTIVKPGDILLINSTGNLIAPRGYFKIRSGKSSIMRSDAPIGKCKSECITPNGSIPNDKPFQNVNRITYGACPRYVKQSTLKLATGMRNVPEKQTRGIFGAIAGFIENGWEGMVDGWYGFRHQNSEGRGQAADLKSTQAAIDQINGKLNRLIGKTNEKFHQIEKEFSEVEGRIQDLEKYVEDTKIDLWSYKSELLVALENQHTIDLTDSEMNKLFEKTKKQLRENAEDMGNGCFKIYHKCDNACIGSIRNGTYDHDVYRDEALNNRFQIKGVELKSGYKDWILWISFAISCFLVCVALLGFIMWACQKGNIRCNICI

SEQ ID NO: 10424 - protein, 566 aa, synthetic construct
  REGION 1..566: note = hemagglutinin__InfluenzaA__AGT18761
MKTIIALSYILCLVFAQKLPGNDNSTATLCLGHHAVPNGTIVKTITNDRIEVTNATELVQNSSIGEICDSPHQILDGENCTLIDALLGDPQCDDFQNKKWDLFVERSKAYSNCYPYDVPDYASLRSLVASSGTLEFNNESFNWAGVTQNGTSSACRRGSNSSFFSRLNWLTHLNFKYPALNVTMPNNEQFDKLYIWGVHHPGTDKDQIFLYAQSSGRITVSTKRSQQAVIPNIGSRPRIRNIPSRISIYWTIVKPGDILLINSTGNLIAPRGYFKIRSGKSSIMRSDAPIGKCKSECITPNGSIPNDKPFQNVNRITYGACPRYVKQSTLKLATGMRNVPEKQTRGIFGAIAGFIENGWEGMVDGWYGFRHQNSEGRGQAADLKSTQAAIDQINGKLNRLIGKTNEKFHQIEKEFSEVEGRIQDLEKYVEDTKIDLWSYSSEFLVALENQHTIDLTDSEMNKLFEKTKKQLRENAEDMGNGCFKIYHKCDNACIGSIRNGTYDHDVYRDEALNNRFQIKGVELKSGYKDWILWISFAISCFLVCVALLGFIMWACQKGNIRCNICI

SEQ ID NO: 10425 - protein, 566 aa, synthetic construct
  REGION 1..566: note = hemagglutinin__InfluenzaA__AGT37102
MEAKLVVLFCAFTTLKADIICVGYHANNSTDTVDTIMEKNVTVTHSVNLLENSHNGKLCSLNGKAPLQLGNCNVAGWILGNPECDLLLTANSWSYIIETSSSKNGTCYPGEFSDYEELRELLSTVSSFERFEIFPKATSWPNHETTKGATIACSHSGASSFYRNLLWIVKKGNSYPKISKSYTNNRGKEVLVIWGVHHPPTDSSQQALYQNTHTYISVGSSKYYQRFTPVVAARPKIREQEGRMNYYWTLLEQGDTITFEATGNLIAPWYAFALDMGSSSGIMVSDAPVHNCTTKCQTPHGALKSNLPFQNVHPITIGECPKYVKSTQLRMATGLRNIPSIQSRGLFGAIAGFIEGGWTGMIDGWYGYHHQNEQGSGYAADQKSTQIAIDGISNKVNSIIEKMNVQFTSVGKEFNDLEKRIENLNKKVDDGFLDVWTYNAELLVLLENERTLDFHDFNVKNLYEKVKSQLRNNAKEIGNGCFEFYHKCDNECMENVKNGTYNYPKYSEESKLNREKIDGVKLESIGVHQILAIYSTVASSLVLLVSLGAISFWMCSNGSLQCRICI

SEQ ID NO: 10426 - protein, 566 aa, synthetic construct
  REGION 1..566: note = hemagglutinin__InfluenzaA__AGU01877
MKAILVVLLYTFATANADTLCIGYHANNSTDTVDTVLEKNVTVTHSVNLLEDKHNGKLCKLRGVAPLHLGKCNIAGWILGNPECESLSTASSWSYIVETSSSDNGTCYPGDFINYEELREQLSSVSSFERFEIFPKTSSWPNHDSNKGVTAACPHAGAKSFYKNLIWLVKKGNSYPKLSKSYINDKGKEVLVLWGIHHPSTTTDQQSLYQNADAYVFVGTSRYSKKFKPEIAIRPKVRDQEGRMNYYWTLIEPGDKITFEATGNLVVPRYAFAMERNAGSGIIISDTPVHDCNTTCQTPEGAINTSLPFQNIHPITIGKCPKYVKSTKLRLATGLRNVPSIQSRGLFGAIAGFIEGGWTGMVDGWYGYHHQNEQGSGYAADLKSTQNAIDKITNKVNSVIEKMNTQFTAVGKEFNHLEKRIENLNKKVDDGFLDIWTYNAELLVLLENERTLDYHDSNVKNLYEKVRNQLKNNAKEIGNGCFEFYHKCDNTCMESVKNGTYDYPKYSEEAKLNREKIDGVKLESTRIYQILAIYSTVASSLVLVVSLGAISFWMCSNGSLQCRICI

SEQ ID NO: 10427 - protein, 566 aa, synthetic construct
  REGION 1..566: note = hemagglutinin__InfluenzaA__AGU01878
MKAILVVMLYTLATANADTLCIGYHANNSTDTVDTVLEKNVTVTHSVNLLEDKHDGKLCKLRGVAPLHLGKCNIAGWILGNPECESLSTASSWSYIVETSGSDNGTCYPGDFIDYEELREQLSSVSSFERFEIFPKTSSWPNHDSNKGVTAACPHAGAKGFYKNLIWLVKKGNSYPKLSISYINDKGKEVLVLWGIHHPSTTADQQSLYQNADTYVFVGTSRYSKKFKPEIAIRPKVRDQEGRMNYYWTLVEPGDKITFEATGNLVVPRYAFAMERNAGSGIIISDTPVHDCNTTCQTPKGAINTSLPFQNIHPITIGKCPKYVKSTKLRLATGLRNVPSIQSRGLFGAIAGFIEGGWTGMVDGWYGYHHQNEQGSGYAADLKSTQNAIDKITNKVNSVIEKMNTQFTAVGKEFNHLEKRIENLNKKVDDGFLDIWTYNAELLVLLENERTLDYHDSNVKNLYEKVRNQLKNNAKEIGNGCFEFYHKCDNTCMESVKNGTYDYPKYSEEAKLNREEIDGVKLESTRIYQILAIYSTAASSLVLVVSLGAISFWMCSNGSLQCRICI

SEQ ID NO: 10428 - protein, 566 aa, synthetic construct
  REGION 1..566: note = hemagglutinin__InfluenzaA__AGU01879
MKAILVVMLYTFATANADTLCIGYHANNSTDTVDTVLEKNVTVTHSVNLLEDKHNEKLCKLRGVAPLHLGKCNIAGWILGNPECESLSTASSWSYIVETSGSDNGTCYPGDFIDYEELREQLSSVSSFERFEIFPKTSSWPNHDSNKGVTAACPQAGAKGFYKNLIWLVKKGNSYPKLSKSYINDKGKEVLVLWGIHHPSTTADQQSLYQNADTYVFVGTSRYSKKFKPEIAIRPKVRDQEGRMNYYWTLVEPGDKITFEATGNLVVPRYAFAMERNAGSGIIISDTPVHDCNTTCQTPKGAINTSLPFQNIHPITIGKCPKYVKSTKLRLATGLRNVPSIQSRGLFGAIAGFIEGGWTGMVDGWYGYHHQNEQGSGYAADLKSTQNAIDKITNKVNSVIEKMNTQFTAVGKEFNHLEKRIENLNKKVDDGFLDIWTYNAELLVLLENERTLDYHDSNVKNLYEKVRNQLKNNAKEIGNGCFEFYHKCDNTCMESVKNGTYDYPKYSEEAKLNREEIDGVKLESTRIYQILAIYSTVASSLVLVVSLGAISFWMCSNGSLQCRICI

SEQ ID NO: 10429 - protein, 566 aa, synthetic construct
  REGION 1..566: note = hemagglutinin__InfluenzaA__AGU01881
MKAILVVLLYTFATANADTLCIGYHANNSTDTVDTVLEKNVTVTHSVNLLEDKHNGKLCKLRGVTPLHLGKCNIAGWILGNPECESLSTASSWSYIVETSSSDNGTCYPGDFINYEELREQLSSVSSFERFEMFPKTSSWPNHDSNKGVTAACPQAGAKSFYKNLIWLVKKGNSYPKLSKSYINDKGKEVLVLWGIHHPSTTADQQSLYQNADAYVFVGTSRYSKKFKPEIAIRPKVRDQEGRMNYYWTLIEPGDKITFEATGNLVVPRYAFAMERNAGSGIIISDTPVHDCNTTCQTPEGAINTSLPFQNIHPITIGKCPKYVKSTKLRLATGLRNVPSIQSRGLFGAIAGFIEGGWTGMVDGWYGYHHQNEQGSGYAADLKSTQNAIDKITNKVNSVIEKMNTQFTAVGKEFNHLEKRIENLNKKVDDGFLDIWTYNAELLVLLENERTLDYHDSNVKNLYEKVRNQLKNNAKEIGNGCFEFYHKCDNTCMESVKNGTYDYPKYSEEAKLNREKIDGVKLESTRIYQILAIYSTVASSLVLVVSLGAISFWMCSNGSLQCRICI

SEQ ID NO: 10430 - protein, 566 aa, synthetic construct
  REGION 1..566: note = hemagglutinin__InfluenzaA__AGU01883
MKAILVVMLYTFATANADTLCIGYHANNSTDTVDTVLEKNVTVTHSVNLLEDKHNGKLCKLRGVAPLHLGKCNIAGWILGNPECESLSTASSWSYIVETSGSDNGTCYPGDFIDYEELREQLSSVSSFERFEIFPKTSSWPNHDSNKGVTAACPHAGAKGFYKNLIWLVKKGNSYPKLSISYINNKEKEVLVLWGIHHPSTTADQQSLYQNADTYVFVGTSRYSKKFKPEIAIRPKVRDQEGRMNYYWTLVEPGDKITFEATGNLVVPRYAFAMERNAGSGIIISDTPVHDCNTTCQTPKGAINTSLPFQNIHPITIGKCPKYVKSTKLRLATGLRNVPSIQSRGLFGAIAGFIEGGWTGMVDGWYGYHHQNEQGSGYAADLKSTQNAIDKITNKVNSVIEKMNTQFTAVGKEFNHLEKRIENLNKKVDDGFLDIWTYNAELLVLLENERTLDYHDSNVKNLYEKVRNQLKNNAKEIGNGCFEFYHKCDNTCMESVKNGTYDYPKYSEEAKLNREEIDGVKLESTRIYQILAIYSTAASSLVLVVSLGAISFWMCSNGSLQCRICI

SEQ ID NO: 10431 - protein, 566 aa, synthetic construct; identical to SEQ ID NO: 10060
  REGION 1..566: note = hemagglutinin__InfluenzaA__AGU01884

SEQ ID NO: 10432 - protein, 566 aa, synthetic construct
  REGION 1..566: note = hemagglutinin__InfluenzaA__AGU01885
MKAILVVMLYTFATANADTLCIGYHANNSTDTVDTVLEKNVTVTHSVNLLEDKHNEKLCKLRGVAPLHLGKCNIAGWILGNPECESLSTASSWSYIVETSGSDNGTCYPGDFIDYEELREQLSSVSSFERFEIFPKTSSWPNHDSNKGVTAACPQAGAKGFYKNLIWLVKKGNSYPKLSKSYINDKGKEVLVLWGIHHPSTTADQQSLYQNADTYVFVGTSRYSKKFKPEIAIRPKVRDQEGRMNYYWTLVEPGDKITFEATGNLVVPRYAFAMERNAGSGIIISDTPVHDCNTTCQTPKGAINTSLPFQNVHPITIGKCPKYVKSTKLRLATGLRNVPSIQSRGLFGAIAGFIEGGWTGMVDGWYGYHHQNEQGSGYAADLKSTQNAIDKITNKVNSVIEKMNTQFTAVGKEFNHLEKRIENLNKKVDDGFLDIWTYNAELLVLLENERTLDYHDSNVKNLYEKVRNQLKNNAKEIGNGCFEFYHKCDNTCMESVKNGTYDYPKYSEEAKLNREEIDGVKLESTRIYQILAIYSTVASSLVLVVSLGAISFWMCSNGSLQCRICI

SEQ ID NO: 10433 - protein, 566 aa, synthetic construct
  REGION 1..566: note = hemagglutinin__InfluenzaA__AGU01887
MKAILVVLLYTFATANADTLCIGYHANNSTDTVDTVLEKNVTVTHSVNLLEDKHNGKLCKLRGVAPLHLGKCNIAGWILGNPECESLSTASSWSYIVETSSSDNGTCYPGDFINYEELREQLSSVSSFERFEIFPKTSSWPNHDSNKGVTAACPHAGAKSFYKNLIWLVKKGNSYPKLSKSYINDKGKEVLVLWGIHHPSTTADQQSLYQNADAYVFVGTSRYSKKFKPEIAIRPKVRDQEGRMNYYWTLIEPGDKITFEATGNLVVPRYAFAVERNAGSGIIISDTPVHNCNTTCQTPEGAINTSLPFQNIHPITIGKCPKYVKSTKLRLATGLRNVPSIQSRGLFGAIAGFIEGGWTGMVDGWYGYHHQNEQGSGYAADLKSTQNAIDKITNKVNSVIEKMNTQFTAVGKEFNHLEKRIENLNKKVDDGFLDIWTYNAELLVLLENERTLDYHDSNVKNLYEKVRNQLKNNAKEIGNGCFEFYHKCDNTCMESVKNGTYDYPKYSEEAKLNREKIDGVKLESTRIYQILAIYSTVASSLVLVVSLGAISFWMCSNGSLQCRICI

SEQ ID NO: 10434 - protein, 566 aa, synthetic construct
  REGION 1..566: note = hemagglutinin__InfluenzaA__AGU01888
MKAILVVMLYTFATANADTLCIGYHANNSTDTVDTVLEKNVTVTHSVNLLEDKHNGKLCKLRGVAPLHLGKCNIAGWILGNPECESLSTASSWSYIVETSGSDNGTCYPGDFIDYEELREQLSSVSSFERFEIFPKTSSWPNHDSNKGVTAACPQAGAKGFYKNLIWLVKKGNSYPKLSKSYINDKGKEVLVLWGIHHPSTTADQQSLYQNADTYVFVGTSRYSKKFKPEIAIRPKVRDQEGRMNYYWTLVEPGDKITFEATGNLVVPRYAFAMERNAGSGIIISDTPVHDCNTTCQTPKGAINTSLPFQNIHPITIGKCPKYVKSTKLRLATGLRNVPSIQSRGLFGAIAGFIEGGWTGMVDGWYGYHHQNEQGSGYAADLKSTQNAIDKITNKVNSVIEKMNTRFTAVGKEFNHLEKRIENLNKKVDDGFLDIWTYNAELLVLLENERTLDYHDSNVKNLYEKVRNQLKNNAKEIGNGCFEFYHKCDNTCMESVKNGTYDYPKYSEEAKLNREEIDGVKLESTRIYQILAIYSTVASSLVLVVSLGAISFWMCSNGSLQCRICI

SEQ ID NO: 10435 - protein, 566 aa, synthetic construct; identical to SEQ ID NO: 10426
  REGION 1..566: note = hemagglutinin__InfluenzaA__AGU01889

SEQ ID NO: 10436 - protein, 566 aa, synthetic construct
  REGION 1..566: note = hemagglutinin__InfluenzaA__AGU01890
MKAILVVMLYTFATANADTLCIGYHANNSTDTVDTVLEKNVTVTHSVNLLEDKHNGKLCKLRGVAPLHLGKCNIAGWILGNPECESLSTASSWSYIVETSGSDNGTCYPGDFIDYEELREQLSSVSSFERFEIFPKTSSWPNHDSNKGVTAACPQAGAKGFYKNLIWLVKKGNSYPKLSKSYINDKGKEVLVLWGIHHPSTTADQQSLYQNADTYVFVGTSRYSKKFKPEIAIRPKVRDQEGRMNYYWTLVEPGDKITFEATGNLVVPRYAFAMERNAGSGIIISDTPVHDCNTTCQTPKGAINTSLPFQNIHPITIGKCPKYVKSTKLRLATGLRNVPSIQSRGLFGAIAGFIEGGWTGMVDGWYGYHHQNEQGSGYAADLKSTQNAIDKITNKVNSVIEKMNTQFTAVGKEFNHLEKRIENLNKKVDDGFLDIWTYNAELLVLLENERTLDYHDSNVKNLYEKVRNQLKNNAKEIGNGCFEFYHKCDNTCMESVKNGTYDYPKYSEEAKLNREEIDGVKLESTRIYQILAIYSTVASSLVLVVSLGAISFWMCSNGSLQCRICI

SEQ ID NO: 10437 - protein, 566 aa, synthetic construct
  REGION 1..566: note = hemagglutinin__InfluenzaA__AGU92645
MKAILVVLLYTFATANADTLCIGYHANNSTDTVDTVLEKNVTVTHSVNLLEDKHNGKLCKLRGVAPLHLGKCNIAGWILGNPECETLSTASSWSYIVETSSSDNGTCYPGDFIDYEELREQLSSVSSFERFEIFPKTSSWPNHDSNKGVTAACPHAGAKGFYKNLIWLVKKGNSYPKLSKSYINDKGKEVLVLWGIHHPSTTADQQSLYQNADTYVFVGTSRYSKKFKPEIETRPKVRDQEGRMNYYWTLVEPGDKITFEATGNLVVPRYAFAMERDAGSGIIISDTPVHDCNTTCQTPKGAINTSLPFQNIHPITIGKCPKYVKSTKLRLATGLRNVPSIQSRGLFGAIAGFIEGGWTGMVDGWYGYHHQNEQGSGYAADLKSTQNAIDKITNKVNSVIEKMNTQFTAVGKEFNHLEKRIENLNKKVDDGFLDIWTYNAELLVLLENERTLDYHDSNVKNLYEKVRNQLKNNAKEIGNGCFEFYHKCDNTCMESVKNGTYDYPKYSEEAKLNREEIDGVKLESTRIYQILAIYSTAASSLVLVVSLGAISFWMCSNGSLQCRICI

SEQ ID NO: 10438 - protein, 566 aa, synthetic construct
  REGION 1..566: note = hemagglutinin__InfluenzaA__AGU92667
MKAILVVLLYTFATANADTLCIGYHANNSTDTVDTVLEKNVTVTHSVNLLEDKHNGKLCKLRGVAPLHLGKCNIAGWILGNPECETLSTASSWSYIVETSSSDNGTCYPGDFIDYEELREQLSSVSSFERFEIFPKTSSWPNHDSNKGVTAACPHAGAKGFYKNLIWLVKKGNSYPKLSKSYINDKGKEVLVLWGIHHPSTTADQQSLYQNADTYVFVGTSRYSKKFKPEIATRPKVRDQEGRMNYYWTLVEPGDKITFEATGNLVVPRYAFAMERDAGSGIIISDTPVHDCNTTCQTPKGAINTSLPFQNIHPITIGKCPKYVKSTKLRLATGLRNVPSIQSRGLFGAIAGFIEGGWTGMVDGWYGYHHQNEQGSGYAADLKSTQNAIDKITNKVNSVIEKMNTQFTAVGKEFNHLEKRIENLNKKVDDGFLDIWTYNAELLVLLENERALDYHDSNVKNLYEKVRNQLKNNAKEIGNGCFEFYHKCDNTCMESVKNGTYDYPKYSEEAKLNREEIDGVKLESTRIYQILAIYSTAASSLVLVVSLGAISFWMCSNGSLQCRICI

SEQ ID NO: 10439 - protein, 566 aa, synthetic construct
  REGION 1..566: note = hemagglutinin__InfluenzaA__AGU92678
MKAILVVLLYTFATANADTLCIGHHANNSTDTVDTVLEKNVTVTHSVNLLEDKHNGKLCKLRGVAPLHLGKCNIAGWILGNPECETLSTASSWSYIVETSSSDNGTCYPGDFIDYEELREQLSSVSSFERFEIFPKTSSWPNHDSNKGVTAACPHAGAKGFYKNLIWLVKKGNSYPKLSKSYINDKGKEVLVLWGIHHPSTTADQQSLYQNADTYVFVGTSRYSKKFKPEIATRPKVRDQEGRMNYYWTLVEPGDKITFEATGNLVVPRYAFAMERDAGSGIIISDTPVHDCNTTCQTPKGAINTSLPFQNIHPITIGKCPKYVKSTKLRLATGLRNVPSIQSRGLFGAIAGFIEGGWTGMVDGWYGYHHQNEQGSGYAADLKSTQNAIDKITNKVNSVIEKMNTQFTAVGKEFNHLEKRIENLNKKVDDGFLDIWTYNAELLVLLENERTLDYHDSNVKNLYEKVRNQLKNNAKEIGNGCFEFYHKCDNTCMESVKNGTYDYPKYSEEAKLNREEIDGVKLESTRIYQILAIYSTAASSLVLVVSLGAISFWMCSNGSLQCRICI

SEQ ID NO: 10440 - protein, 566 aa, synthetic construct
  REGION 1..566: note = hemagglutinin__InfluenzaA__AGU92711
MKAILVVLLYTFATANADTLCIGYHANNSTDTVDTVLEKNVTVTHSVNLLEDKHNGKLCKLRGVAPLHLGKCNIAGWILGNPECESLSTASSWSYIVETSSSDNGTCYPGDFIDYEELREQLSSVSSFERFEIFPKTSSWPNHDSNKGVTAACPHAGAKSFYKNLIWLVKQGNSYPKLSKSYINDKGKEVLVLWGIHHPSTSADQQSLYQNADAYVFVGSSRYSKKFKPEIAIRPKVRDQEGRMNYYWTLVEPGDKITFEATGNLVVPRYAFAMERNAGSGIIISDTPVHDCNTTCQTPKGAINTSLPFQNIHPITIGKCPKYVKSTKLRLATGLRNVPSIQSRGLFGAIAGFIEGGWTGMVDGWYGYHHQNEQGSGYAADLKSTQNAIDEITNKVNSVIEKMNTQFTAVGKEFNHLEKRIENLNKKVDDGFLDIWTYNAELLVLLENERTLDYHDSNVKNLYEKVRSQLKNNAKEIGNGCFEFYHKCDNTCMESVKNGTYDYPKYSEEAKLNREEIDGVKLESTRIYQILAIYSTVASSLVLVVSLGAISFWMCSNGSLQCRICI

SEQ ID NO: 10441 - protein, 566 aa, synthetic construct
  REGION 1..566: note = hemagglutinin__InfluenzaA__AGU92722
MKAILVVLLYTFATANADTLCIGYHANNSTDTVDTVLEKNVTVTHSVNLLEDKHNGKLCKLRGVAPLHLGKCNIAGWILGNPECESLSTASSWSYIVETSSSDNGTCYPGDFIDYEELREQLSSVSSFERFEIFPKTSSWPNHDSDKGVTAACPHAGAKSFYKNLIWLVKKGNSYPKLSKSYINDKGKEVLVLWGIHHPSTSADQQSLYQNADAYVFVGSSRYSKKFKPEIAIRPKVRDQEGRMNYYWTLVEPGDKITFEATGNLVVPRYAFAMERNAGSGIIISDTPVHDCNTTCQTPKGAINTSLPFQNIHPITIGKCPKYVKSTKLRLATGLRNVPSIQSRGLFGAIAGFIEGGWTGMVDGWYGYHHQNEQGSGYAADLKSTQNAIDEITNKVNSVIEKMNTQFTAVGKEFNHLEKRIENLNKKVDDGFLDIWTYNAELLVLLENERTLDYHDSNVKNLYEKVRSQLKNNAKEIGNGCFEFYHKCDNTCMESVKNGTYDYPKYSEEAKLNREEIDGVKLESTRIYQILAIYSTVASSLVLVVSLGAISFWMCSNGSLQCRICI

SEQ ID NO: 10442 - protein, 566 aa, synthetic construct; identical to SEQ ID NO: 10441
  REGION 1..566: note = hemagglutinin__InfluenzaA__AGU92733

SEQ ID NO: 10443 - protein, 566 aa, synthetic construct
  REGION 1..566: note = hemagglutinin__InfluenzaA__AGU92744
MKAILVVLLYTFATANADTLCIGYHANNSTDTVDTVLEKNVTVTHSVNLLEDKHNGKLCKLRGVAPLHLGKCNIAGWILGNPECESLSTASSWSYIVETSSSDNGTCYPGDFIDYEELREQLSSVSSFERFEIFPKTSSWPNHDSDKGVTAACPHAGAKSFYKNLIWLVKKGNSYPKLSKSYINDKGKEVLVLWGIHHPSTSADQQSLYQNADAYVFVGSSRYSKKFKPEIAIRPKVRDQEGRMNYYWTLVEPGDKITFEATGNLVVPRYAFAMERNAGSGIIISDTPVHDCNTTCQTPKGAINTSLPFQNIHPITIGKCPKYVKSTKLRLATGLRNVPSIQSRGLFGAIAGFIEGGWTGMVDGWYGYHHQNEQGSGYAADLKSTQNAIDEITNKVNSVIEKMNTQFTAVGKEFNHLEKRIENLNKKVDDGFLDIWTYNAELLVLLENERTLDYHDSNVKNLYEKVRSQLKNNAKEIGNGCFEFYHKCDNTCMESVKNGAYDYPKYSEEAKLNREEIDGVKLESTRIYQILAIYSTVASSLVLVVSLGAISFWMCSNGSLQCRICI

SEQ ID NO: 10444 - protein, 566 aa, synthetic construct
  REGION 1..566: note = hemagglutinin__InfluenzaA__AGU92755
MKAILVVLLYTFATANADTLCIGYHANNSTDTVDTVLEKNVTVTHSVNLLEDKHNGKLCKLRGVAPLHLGKCNIAGWILGNPECESLSTASSWSYIVETSSSDNGTCYPGDFIDYEELREQLSSVSSFERFEIFPKTSSWPNHDSNKGVTAACPHAGAKSFYKNLIWLVKKGNSYPKLSKSYINDKGKEVLVLWGIHHPSTSADQQSLYQNADAYVFVGSSRYSKEFKPEIAIRPKVRDQEGRMNYYWTLVEPGDKITFEATGNLVVPRYAFAMERNAGSGIIISDTPVHDCNTTCQTPKGAINTSLPFQNIHPITIGKCPKYVKSTKLRLATGLRNVPSIQSRGLFGAIAGFIEGGWTGMVDGWYGYHHQNEQGSGYAADLKSTQNAIDEITNKVNSVIEKMNTQFTAVGKEFNHLEKRIENLNKKVDDGFLDIWTYNAELLVLLENERTLDYHDSNVKNLYEKVRSQLKNNAKEIGNGCFEFYHKCDNTCMESVKNGTYDYPKYSEEAKLNREEIDGVKLESTRIYQILAIYSTVASSLVLVVSLGAISFWMCSNGSLQCRICI

SEQ ID NO: 10445 - protein, 566 aa, synthetic construct
  REGION 1..566: note = hemagglutinin__InfluenzaA__AGU92766
MKAILVVLLYTFATANADTLCIGYHANNSTDTVDTVLEKNVTVTHSVNLLEDKHNGKLCKLRGVAPLHLGKCNIAGWILGNPECETLSTASSWSYIVETSSSDNGTCYPGDFIDYEELREQLSSVSSFERFEIFPKTSSWPNHESNKGVTAACPHAGAKGFYKNLIWLVKKGNSYPKLSKSYINDKGKEVLVLWGIHHPSTTADQQSLYQNADAYVFVGTSRYSKKFKPEIATRPKVRDQEGRMNYYWTLVEPGDKITFEATGNLVVPRYAFAMERDAGSGIIISDTPVHDCNTTCQTPKGAINTSLPFQNIHPITIGKCPKYVKSTKLRLATGLRNVPSIQSRGLFGAIAGFIEGGWTGMVDGWYGYHHQNEQGSGYAADLKSTQNAIDKITNKVNSVIEKMNTQFTAVGKEFNHLEKRIENLNKKVDDGFLDIWTYNAELLVLLENERTLDYHDSNVKNLYEKVRNQLKNNAKEIGNGCFEFYHKCDNTCMESVKNGTYDYPKYSEEAKLNREEIDGVKLESTRIYQILAIYSTAASSLVLVVSLGAISFWMCSNGSLQCRICI

SEQ ID NO: 10446 - protein, 566 aa, synthetic construct
  REGION 1..566: note = hemagglutinin__InfluenzaA__AGU92777
MKAILVVLLYTFATANADTLCIGYHANNSTDTVDTVLEKNVTVTHSVNLLEDKHNGKLCKLRGVAPLHLGKCNIAGWILGNPECETLSTASSWSYIVETSSSDNGTCYPGDFIDYEELREQLSSVSSFERFEIFPKTSSWPNHESNKGVTAACPHAGAKGFYKNLIWLVKKGNSYPKLSKSYINDKGKEVLVLWGIHHPSTTADQQSIYQNADTYVFVGTSRYSKKFKPEIATRPKVRDQEGRMNYYWTLVEPGDKITFEATGNLVVPRYAFAMERDAGSGIIISDTPVHDCNTTCQTPKGAINTSLPFQNIHPITIGKCPKYVKSTKLRLATGLRNVPSIQSRGLFGAIAGFIEGGWTGMVDGWYGYHHQNEQGSGYAADLKSTQNAIDKITNKVNSVIEKMNTQFTAVGKEFNHLEKRIENLNKKVDDGFLDIWTYNAELLVLLENERTLDYHDSNVKNLYEKVRNQLKNNAKEIGNGCFEFYHKCDNTCMESVKNGTYDYPKYSEEAKLNREEIDGVKLESTRIYQILAIYSTAASSLVLVVSLGAISFWMCSNGSLQCRICI

SEQ ID NO: 10447 - protein, 566 aa, synthetic construct
  REGION 1..566: note = hemagglutinin__InfluenzaA__AGU92788
MKAILVVLLYTFATANADTLCIGYHANNSTDTVDTVLEKNVTVTHSVNLLEDKHNGKLCKLRGVAPLHLGKCNIAGWILGNPECETLSTASSWSYIVETSSSDNGTCYPGDFIDYEELREQLSSVSSFERFEIFPKTSSWPNHDSDKGVTAACPHAGAKGFYKNLIWLVKKGNSYPKLSKSYINDKGKEVLVLWGIHHPSTTADQQSLYQNADAYVFVGTSRYSKKFKPEIATRPKVRDREGRMNYYWTLVEPGDKITFEATGNLVVPRYAFAMERDAGSGIIISDTPVHDCNTTCQTPKGAINTSLPFQNIHPITIGKCPKYVKSTKLRLATGLRNVPSIQSRGLFGAIAGFIEGGWTGMLDGWYGYHHQNEQGSGYAADLKSTQNAIDKITNKVNSVIEKMNTQFTAVGKEFNHLEKRIENLNKKVDDGFLDIWTYNAELLVLLENERTLDYHDSNVKNLYEKVRNQLKNNAKEIGNGCFEFYHKCDNTCMESVKNGTYDYPKYSEEAKLNREEIDGVKLESTRIYQILAIYSTAASSLVLVVSLGAISFWMCSNGSLQCRICI

SEQ ID NO: 10448 - protein, 566 aa, synthetic construct
  REGION 1..566: note = hemagglutinin__InfluenzaA__AGU92799
MKAILVVLLYTFATANADTLCIGYHANNSTDTVDTVLEKNVTVTHSVNLLEDKHNGKLCKLRGVAPLHLGKCNIAGWILGNPECETLSTASSWSYIVETSSSDNGTCYPGDFIDYEELREQLSSVSSFERFEIFPKTSSWPDHDSNKGVTAACPHAGAKGFYKNLIWLVKKGNSYPKLSKSYINDKGKEVLVLWGIHHPSTTADQQSLYQNADAYVFVGTSRYSKKFKPEIATRPKVRDREGRMNYYWTLVEPGDKITFEATGNLVVPRYAFAMERDAGSGIIISDTPVHDCNTTCQTPKGAINTSLPFQNIHPITIGKCPKYVKSTKLRLATGLRNVPSIQSRGLFGAIAGFIEGGWTGMVDGWYGYHHQNEQGSGYAADLKSTQNAIDKITNKVNSVIEKMNTQFTAVGKEFNHLEKRIENLNKKVDDGFLDIWTYNAELLVLLENERTLDYHDSNVKNLYEKVRNQLKNNAKEIGNGCFEFYHKCDNTCMESVKNGTYDYPKYSEEAKLNREEIDGVKLESTRIYQILAIYSTAASSLVLVVSLGAISFWMCSNGSLQCRICI

SEQ ID NO: 10449 - protein, 566 aa, synthetic construct
  REGION 1..566: note = hemagglutinin__InfluenzaA__AGU92821
MKAILVVLLYTFATANADTLCIGYHANNSTDTVDTVLEKNVTVTHSVNLLEDKHNGKLCKLRGVAPLHLGKCNIAGWILGNPECETLSTASSWSYIVETSSSDNGTCYPGDFIDYEELREQLSSVSSFERFEIFPKTSSWPNHDSNKGVTAACPHAGAKGFYKNLIWLVKKGNSYPKLSKSYINDKGKEVLVLWGIHHPSTTADQQSLYQNADTYVFVGTSRYSKMFKPEIATRPKVRDREGRMNYYWTLVEPGDKITFEATGNLVVPRYAFAMERDAGSGIIISDTPVHDCNTTCQTPKGAINTSLPFQNIHPITIGKCPKYVKSTKLRLATGLRNVPSIQSRGLFGAIAGFIEGGWTGMVDGWYGYHHQNEQGSGYAADLKSTQNAIDKITNKVNSVIEKMNTQFTAVGKEFNHLEKRIENLNKKVDDGFLDIWTYNAELLVLLENERTLDYHDSNVKNLYEKVRNQLKNNAKEIGNGCFEFYHKCDNTCMESVKNGTYDYPKYSEEAKLNREEIDGVKLESTRIYQILAIYSTAASSLVLVVSLGAISFWMCSNGSLQCRICI

SEQ ID NO: 10450 - protein, 566 aa, synthetic construct
  REGION 1..566: note = hemagglutinin__InfluenzaA__AGU92843
MKAILVVLLYTFATANADTLCIGYHANNSTDTVDTVLEKNVTVTHSVNLLEDKHNGKLCKLRGVAPLHLGKCNIAGWILGNPECESLSTASSWSYIVETSSSDNGTCYPGDFIDYEELREQLSSVSSFERFEIFPKTSSWPNHDSNKGVTAACPHAGAKSFYKNLIWLVKKGDSYPKLSKSYINDKGKEVLVLWGIHHPSTSADQQSLYQNADAYVFVGSSRYSKKFKPEIAIRPKVRDREGRMNYYWTLVEPGDKITFEATGNLVVPRYAFAMERNAGSGIIISDTPVHDCNTTCQTPKGAINTSLPFQNIHPITIGKCPKYVKSTKLRLATGLRNVPSIQSRGLFGAIAGFIEGGWTGMVDGWYGYHHQNEQGSGYAADLKSTQNAIDEITNKVNSVIEKMNTQFTAVGKEFNHLEKRIENLNKKVDDGFLDIWTYNAELLVLLENERTLDYHDSNVKNLYEKVRSQLKNNAKEIGNGCFEFYHKCDNTCMESVKNGTYDYPKYSEEAKLNREEIDGVKLESTRIYQILAIYSTVASSLVLVVSLGAISFWMCSNGSLQCRICI

SEQ ID NO: 10451 - protein, 569 aa, synthetic construct
  REGION 1..569: note = hemagglutinin__InfluenzaA__AGU92854
MKAILVVLLYTFATANADTLCIGYHANNSTDTVDTVLEKNVTVTHSVNLLEDKHNGKLCKLRGVAPLHLGKCNIAGWILGNPECESLSTASSWSYIVETSSSDNGTCYPGDFIDYEELREQLSSVSSFERFEIFPKTSSWPNHDSDKGVTAACPHAGAKSFYKNLIWLVKKGNSYPKLSKSYINDKGKEVLVLWGIHHPSTSADQQSLYQNADAYVFVGSSRYSKKFKPEIAIRPKVRDREGRMNYYWTLVEPGDKITFEATGNLVVPRYAFAMERNAGSGIIISDTPVHDCNTTCQTPKGAINTSLTSLPFQNIHPITIGKCPKYVKSTKLRLATGLRNVPSIQSRGLFGAIAGFIEGGWTGMVDGWYGYHHQNEQGSGYAADLKSTQNAIDEITNKVNSVIEKMNTQFTAVGKEFNHLEKRIENLNKKVDDGFLDIWTYNAELLVLLENERTLDYHDSNVKNLYEKVRSQLKNNAKEIGNGCFEFYHKCDNTCMESVKNGTYDYPKYSEEAKLNREEIDGVKLESTRIYQILAIYSTVASSLVLVVSLGAISFWMCSNGSLQCRICI

SEQ ID NO: 10452 - protein, 566 aa, synthetic construct
  REGION 1..566: note = hemagglutinin__InfluenzaA__AGU92887
MKAILVVLLYTFATANADTLCIGYHANNSTDTVDTVLEKNVTVTHSVNLLEDKHNGKLCKLRGVAPLHLGKCNIAGWILGNPECESLSTASSWSYIVETSSSDNGTCYPGDFIDYEELREQLSSVSSFERFEIFPKTSSWPNHDSNKGVTAACPHAGAKSFYKNLIWLVKKGNSYPKLSKSYINDKGKEVLVLWGIHHPSTSDDQQSLYQNADAYVFVGSSRYSKKFKPEIAIRPKVRDREGRMNYYWTLVEPGDKITFEATGNLVVPRYAFAMERNAGSGIIISDTPVHDCNTTCQTPKGAINTSLPFQNIHPITIGKCPKYVKSTKLRLATGLRNVPSIQSRGLFGAIAGFIEGGWTGMVDGWYGYHHQNEQGSGYAADLKSTQNAIDEITNKVNSVIEKMNTQFTAVGKEFNHLEKRIENLNKKVDDGFLDIWTYNAELLVLLENERTLDYHDSNVKNLYEKVRSQLKNNAKEIGNGCFEFYHKCDNTCMESVKNGTYDYPKYSEEAKLNREEIDGVKLESTRIYQILAIYSTVASSLVLVVSLGAISFWMCSNGSLQCRICI

SEQ ID NO: 10453 - protein, 566 aa, synthetic construct; identical to SEQ ID NO: 10437
  REGION 1..566: note = hemagglutinin__InfluenzaA__AGU92898

SEQ ID NO: 10454 - protein, 566 aa, synthetic construct; identical to SEQ ID NO: 10438
  REGION 1..566: note = hemagglutinin__InfluenzaA__AGU92909

SEQ ID NO: 10455 - protein, 566 aa, synthetic construct; identical to SEQ ID NO: 10440
  REGION 1..566: note = hemagglutinin__InfluenzaA__AGU92931

SEQ ID NO: 10456 - protein, 566 aa, synthetic construct; identical to SEQ ID NO: 10441
  REGION 1..566: note = hemagglutinin__InfluenzaA__AGU92942

SEQ ID NO: 10457 - protein, 566 aa, synthetic construct; identical to SEQ ID NO: 10441
  REGION 1..566: note = hemagglutinin__InfluenzaA__AGU92953

SEQ ID NO: 10458 - protein, 566 aa, synthetic construct
  REGION 1..566: note = hemagglutinin__InfluenzaA__AGU92964
MKAILVVLLYTFATANADTLCIGYHANNSTDTVDTVLEKNVTVTHSVNLLEDKHNGKLCKLRGVAPLHLGKCNIAGWILGNPECETLSTASSWSYIVETSSSDNGTCYPGDFIDYEELREQLSSVSSFERFEIFPKTSSWPNHDSNKGVTAACPHAGAKGFYKNLIWLVKKGNSYPKLSKSYINDKGKEVLVLWGIHHPSTTADQQSLYQNADAYVFVGTSRYSKKFKPEIATRPKVRDREGRMNYYWTLVEPGDKITFEATGNLVVPRYAFAMERDAGSGIIISDTPVHDCNTTCQTPKGAINTSLPFQNIHPITIGKCPKYVKSTKLRLATGLRNVPSIQSRGLFGAIAGFIEGGWTGMLDGWYGYHHQNEQGSGYAADLKSTQNAIDKITNKVNSVIEKMNTQFTAVGKEFNHLEKRIENLNKKVDDGFLDIWTYNAELLVLLENERTLDYHDSNVKNLYEKVRNQLKNNAKEIGNGCFEFYHKCDNTCMESVKNGTYDYPKYSEEAKLNREEIDGVKLESTRIYQILAIYSTAASSLVLVVSLGAISFWMCSNGSLQCRICI

SEQ ID NO: 10459 - protein, 566 aa, synthetic construct
  REGION 1..566: note = hemagglutinin__InfluenzaA__AGU92975
MKAILVVLLYTFATANADTLCIGYHANNSTDTVDTVLEKNVTVTHSVNLLEDKHNGKLCKLRGVAPLHLGKCNIAGWILGNPECETLSTASSWSYIVETSSSDNGTCYPGDFIDYEELREQLSSVSSFERFEIFPKTSSWPNHDSNKGVTAACPHAGAKGFYKNLIWLVKKENSYPKLSKSYINDKGKEVLVLWGIHHPSTTADQQSLYQNADTYVFVGTSRYSKKFKPEIATRPKVRDREGRMNYYWTLVEPGDKITFEATGNLVVPRYAFAMERDAGSGIIISDTPVHDCNTTCQTPKGAINTSLPFQNIHPITIGKCPKYVKSTKLRLATGLRNVPSIQSRGLFGAIAGFIEGGWTGMVDGWYGYHHQNEQGSGYAADLKSTQNAIDKITNKVNSVIEKMNTQFTAVGKEFNHLEKRIENLNKKVDDGFLDIWTYNAELLVLLENERTLDYHDSNVKNLYEKVRNQLKNNAKEIGNGCFEFYHKCDNTCMESVKNGTYDYPKYSEEAKLNREEIDGVKLESTRIYQILAIYSTAASSLVLVVSLGAISFWMCSNGSLQCRICI

SEQ ID NO: 10460 - protein, 566 aa, synthetic construct; identical to SEQ ID NO: 10450
  REGION 1..566: note = hemagglutinin__InfluenzaA__AGU92986

SEQ ID NO: 10461 - protein, 566 aa, synthetic construct
  REGION 1..566: note = hemagglutinin__InfluenzaA__AGU92997
MKAILVVLLYTFATANADTLCIGYHANNSTDTVDTVLEKNVTVTHSVNLLEDKHNGKLCKLRGVAPLHLGKCNIAGWILGNPECESLSTASSWSYIVETSSSDNGTCYPGDFIDYEELREQLSSVSSFERFEIFPKTSSWPNHDSNKGVTAACPHAGAKSFYKNLIWLVKKGNSYPKLSKSYINDKGKEVLVLWGIHHPSTSADQQSLYQNADAYVFVGSSRYSKMFKPEIAIRPKVRDREGRMNYYWTLVEPGDKITFEATGNLVVPRYAFAMERNAGSGIIISDTPVHDCNTTCQTPKGAINTSLPFQNIHPITIGKCPKYVKSTKLRLATGLRNVPSIQSRGLFGAIAGFIEGGWTGMVDGWYGYHHQNEQGSGYAADLKSTQNAIDEITNKVNSVIEKMNTQFTAVGKEFNHLEKRIENLNKKVDDGFLDIWTYNAELLVLLENERTLDYHDSNVKNLYEKVRSQLKNNAKEIGNGCFEFYHKCDNTCMESVKNGTYDYPKYSEEAKLNREEIDGVKLESTRIYQILAIYSTVASSLVLVVSLGAISFWMCSNGSLQCRICI

SEQ ID NO: 10462 - protein, 566 aa, synthetic construct; identical to SEQ ID NO: 10452
  REGION 1..566: note = hemagglutinin__InfluenzaA__AGU93008

SEQ ID NO: 10463 - protein, 565 aa, synthetic construct; identical to SEQ ID NO: 6554
  REGION 1..565: note = hemagglutinin__InfluenzaA__AGU93019

SEQ ID NO: 10464 - protein, 566 aa, synthetic construct; identical to SEQ ID NO: 7050
  REGION 1..566: note = hemagglutinin__InfluenzaA__AGU93031

SEQ ID NO: 10465 - protein, 566 aa, synthetic construct
  REGION 1..566: note = hemagglutinin__InfluenzaA__AGU93042
MKAILVVLLYTFATANADTLCIGYHANNSTDTVDTVLEKNVTVTHSVNLLEDKHNGKLCKLRGVAPLHLGKCNIAGWILGNPECETLSTANSWSYIVETSSSDNGTCYPGDFIDYEELREQLSSVSSFERFEIFPKTSSWPNHDSNKGVTAACPHAGAKGFYKNLIWLVKKGNSYPKLSKSYINDKGKEVLVLWGIHHPSTTADQQSLYQNADTYVFVGTSRYSKKFKPEIAIRPKVRDQEGRMNYYWTLVEPGDKITFEATGNLVVPRYAFAMERDAGSGIIISDTPVHDCNTTCQTPKGAINTSLPFQNIHPITIGKCPKYVKSTKLRLATGLRNVPSIQSRGLFGAIAGFIEGGWTGMVDGWYGYHHQNEQGSGYAADLKSTQNAIDKITNKVNSVIEKMNIQFTAVGKEFNHLEKRIENLNKKVDDGFLDIWTYNAELLVLLENERTLDYHDSNVKNLYEKVRNQLKNNAKEIGNGCFEFYHKCDNTCMESVKNGTYDYPKYSEEAKLNREEIDGVKLESTRIYQILAIYSTAASSLVLVVSLGAISFWMCSNGSLQCRICI

SEQ ID NO: 10466 - protein, 566 aa, synthetic construct
  REGION 1..566: note = hemagglutinin__InfluenzaA__AGU93053
MKAILVVLLYTFATANADTLCIGYHANNSTDTVDTVLEKNVTVTHSVNLLEDKHNGKLCKLRGVAPLHLGKCNIAGWILGNPECETLSTASSWSYIVETSSSDNGTCYPGDFIDYEELREQLSSVSSFERFEIFPKTSSWPNHDSNKGVTAACPHAGAKGFYKNLIWLVKKGNSYPKLSKSYINDKGKEVLVLWGIHHPSTTADQQSLYQNADTYVFVGTSRYSKKFKPEIATRPKVRDQEGRMNYYWTLVEPGDKITFEATGNLVVPRYAFAMERDAGSGIIISDTPVHDCNTTCQTPKGAINTSLPFQNIHPITIGKCPKYVKSTKLRLATGLRNVPSIQSRGLFGAIAGFIEGGWTGMVDGWYGYHHQNEQGSGYAADLKSTQNAIDKITNKVNSVIEKMNTQFTAVGKEFNHLEKRIENLNKKVDDGFLDIWTYNAELLVLLENERTLDYHDSNVKNLYEKVRNQLKNNAKEIGNGCFEFYHKCDNTCMESVKNGTYDYPKYSEEAKLNREEIDGVKLESTRIYQILAIYSTAASSLVLVVSLGAISFWMCSNGSLQCRICI

SEQ ID NO: 10467 - protein, 566 aa, synthetic construct
  REGION 1..566: note = hemagglutinin__InfluenzaA__AGV99014
MKTIIALSYILCLVFAQKLPGNDNSTATLCLGHHAVPNGTIVKTITNDRIEVTNATELVQNSSIGEICDSPHQILDGENCTLIDALLGDPQCDGFQNKKWDLFVERSKAYSNCYPYDVPDYASLRSLVASSGTLEFNNESFNWTGVTQNGTSSACIRRSNNSFFSRLNWLTHSNFKYPALNVTMPNNEQFDKLYIWGVHHPGTDKDQIFLYAQSSGRITVSTKRSQQAVIPNIGSRPRIRNIPSRISIYWTIVKPGDILLINSTGNLIAPRGYFKIRSGKSSIMRSDAPIGKCKSECITPNGSIPNDKPFQNVNRITYGACPRYVKQSTLKLATGMRNVPEKQTRGIFGAIAGFIENGWEGMMDGWYGFRHQNSEGRGQAADLKSTQAAIDQINGKLNRLIGKTNEKFHQIEKEFSEVEGRIQDLEKYVEDTKIDLWSYNAELLVALENQHTIDLTDSEMNKLFEKTKKQLRENAEDMGNGCFKIYHKCDNACIGSIRNGTYDHDVYRDEALNNRFQIKGVELKSGYKDWILWISFAISCFLLCVALLGFIMWACQKGNIRCNICI

SEQ ID NO: 10468 - protein, 566 aa, synthetic construct; identical to SEQ ID NO: 9994
  REGION 1..566: note = hemagglutinin__InfluenzaA__AGV99037

SEQ ID NO: 10469 - protein, 566 aa, synthetic construct
  REGION 1..566: note = hemagglutinin__InfluenzaA__AGV99049
MKTIIALSYILCLVFAQKLPGNDNSTATLCLGHHAVPNGTVVKTITNDRIEVTNATELVQNSSIGEICDSPHQILDGENCTLIDALLGDPQCDGFQNKKWDLFVERSKAYSNCYPYDVPDYASLRSLVASSGTLEFNNESFNWTGVTQNGTSSACIRRSNNSFFSRLNWLTHLNFKYPALNVTMPNNEQFDKLYIWGVHHPGTDKDQIFLYAQSSGRITVSTKRSQQAVIPNIGSRPRIRNIPSRISIYWTIVKPGDILLINSTGNLIAPRGYFKIRSGKSSIMRSDAPIGKCKSECITPNGSIPNDKPFQNVNRITYGACPRYVKQSTLKLATGMRNVPEKQTRGIFGAIAGFIENGWEGMVDGWYGFRHQNSEGRGQAADLKSTQAAIDQINGKLNRLIGKTNGKFHQIEKEFSEVEGRIQDLEKYVEDTKIDLWSYNAELLVALENQHTIDLTDSEMNKLFEKTKKQLRENAEDMGNGCFKIYHKCDNACIGSIRNGTYDHDVYRDEALNNRFQIKGVELKSGYKDWILWISFAISCFLLCVVLLGFIMWACQKGNIRCNICI

SEQ ID NO: 10470 - protein, 566 aa, synthetic construct
  REGION 1..566: note = hemagglutinin__InfluenzaA__AGV99073
MKTIIALSYILCLVFAQKIPGNDNSTATLCLGHHAVPNGTIVKTITNDRIEVTNATELVQNSSIGEICDSPHQILDGENCTLIDALLGDPQCDGFQNKKWDLFVERSKAYSNCYPYDVPDYASLRSLVASSGTLEFNNESFNWTGVTQNGTSSACIRGSNSSFFSRLNWLTHLNFKYPALNVTMPNNEQFDKLYIWGVHHPGTDKDQIFLYAQSSGRITVSTKRSQQAVIPNIGSRPRIRNIPSRISIYWTIVKPGDILLINSTGNLIAPRGYFKIRSGKSSIMRSDAPIGKCKSECITPNGSIPNDKPFQNVNRITYGACPRYVKQSTLKLATGMRNVPEKQTRGIFGAIAGFIENGWEGMVDGWYGFRHQNSEGRGQAADLKSTQAAIDQINGKLNRLIGKTNEKFHQIEKEFSEVEGRIQDLEKYVEDTKIDLWSYNAELLVALENQHTIDLTDSEMNKLFEKTKKQLRENAEDMGNGCFKIYHKCDNACIGSIRNGTYDHDVYRDEALNNRFQIKGVELKPGYKDWILWISFAISCFLLCVALLGFIMWACQKGNIRCNICI

SEQ ID NO: 10471 - protein, 566 aa, synthetic construct; identical to SEQ ID NO: 9858
  REGION 1..566: note = hemagglutinin__InfluenzaA__AGV99085

SEQ ID NO: 10472 - protein, 566 aa, synthetic construct
  REGION 1..566: note = hemagglutinin__InfluenzaA__AGV99097
MKTIIALSYILCLVFAQKLPGNDNSTATLCLGHHAVPNGTIVKTITNDRIEVTNATELVQNSSIGEICDSPHQILDGENCTLIDALLGDPQCDGFQNKKWDLFVERSKAYSNCYPYDVPDYASLRSLVASSGTLEFNNESFNWTGVTQNGTSSACIRRSNSSFFSRLNWLTHLNFKYPALNVTMPNNEQFDKLYIWGVHHPGTDKDQIFLYAQSSGRITVSTKRSQQAVIPNIGSRPRIRNIPSRISIYWTIVKPGDILLINSTGNLIAPRGYFKIRSGKSSIMRSDAPIGKCKSECITPNGSIPNDKPFQNVNRITYGACPRYVKQSTLKLATGMRNVPEKQTRGIFGAIAGFIENGWEGMVDGWYGFRHQNSEGRGQAADLKSTQAAIDQINGKLNRLIGKTNEKFHQIEKEFSEVEGRIQDLEKYVEDTKIDLWSYNAEILVALENQHTIDLTDSEMNKLFEKTKKQLRENAEDMGNGCFKIYHKCDNACIGSIRNGTYDHDVYRDEALNNRFQIKGVELKSGYKDWILWISFAISCFLLCVALLGFIMWACQKGNIRCNICI

SEQ ID NO: 10473 - protein, 566 aa, synthetic construct
  REGION 1..566: note = hemagglutinin__InfluenzaA__AGV99121
MKTIIALSYILCLVFAQKLPGNDNSTATLCLGHHAVPNGTIVKTITNDRIEVTNATELVQNSSIGEICDSPHQILDGENCTLIDALLGDPQCDDFQNKKWDLFVERSKAYSNCYPYDVPDYASLRSLVASSGTLEFNNESFNWAGVTQNGTSSACIRGSNSSFFSRLNWLTHLNFKYPALNVTMPNNEQFDKLYIWGVHHPGTDKDQIFLYAQSSGRITVSTKRSQQAVIPNIGSRPRIRNIPSRISIYWTIVKPGDILLINSTGNLIAPRGYFKIRSGKSSIMRSDAPIGKCKSECITPNGSIPNDKPFQNVNRITYGACPRYVKQSTLKLATGMRNVPEKQTRGIFGAIAGFIENGWEGMVDGWYGFRHQNSEGRGQAADLKSTQAAIDQINGKLNRLIGKTNEKFHQIEKEFSEVEGRIQDLEKYVEDTKIDLWSYNAELLVALENQHTIDLTDSEMNKLFEKTKKQLRENAEDMGNGCFKIYHKCDNACIGSIRNGTYDHDVYRDEALNNRFQIKGVELKSGYKDWILWISFAISCFLLCVALLGFIMWACQKGNIRCNICI

SEQ ID NO: 10474 - protein, 566 aa, synthetic construct; identical to SEQ ID NO: 10473
  REGION 1..566: note = hemagglutinin__InfluenzaA__AGV99133

SEQ ID NO: 10475 - protein, 566 aa, synthetic construct; identical to SEQ ID NO: 10467
  REGION 1..566: note = hemagglutinin__InfluenzaA__AGV99145

SEQ ID NO: 10476 - protein, 566 aa, synthetic construct
  REGION 1..566: note = hemagglutinin__InfluenzaA__AGV99157
MKTIIALSYILCLVFAQKLPGNDNSTATLCLGHHAVPNGTIVKTITNDRIEVTNATELVQNSSIGEICDSPHQILDGENCTLIDALLGDPQCDGFQNKKWDLFIERSKAYSNCYPYDVPDYASLRSLVASSGTLEFNNESFNWTGVTQNGTSSACIRRSNNSFFSRLNWLTHSNFKYPALNVTMPNNEQFDKLYIWGVHHPGTDKDQIFLYAQSSGRITVSTKRSQQAVIPNIGSRPRIRNIPSRISIYWTIVKPGDILLINSTGNLIAPRGYFKIRSGKSSIMRSDTPIGKCKSECITPNGSIPNDKPFQNVNRITYGACPRYVKQSTLKLATGMRNVPEKQTRGIFGAIAGFIENGWEGMMDGWYGFRHQNSEGRGQAADLKSTQAAIDQINGKLNRLIGKTNEKFHQIEKEFSEVEGRIQDLEKYVEDTKIDLWSYNAELLVALENQHTIDLTDSEMNKLFEKTKKQLRENAEDMGNGCFKIYHKCDNACIGSIRNGTYDHDVYRDEALNNRFQIKGVELKSGYKDWILWISFAISCFLLCVALLGFIMWACQKGNIRCNICI

SEQ ID NO: 10477 - protein, 566 aa, synthetic construct; identical to SEQ ID NO: 9994
  REGION 1..566: note = hemagglutinin__InfluenzaA__AGV99169

SEQ ID NO: 10478 - protein, 566 aa, synthetic construct; identical to SEQ ID NO: 10467
  REGION 1..566: note = hemagglutinin__InfluenzaA__AGV99181

SEQ ID NO: 10479 - protein, 566 aa, synthetic construct
  REGION 1..566: note = hemagglutinin__InfluenzaA__AGV99193
MKTIIALSYILCLVFAQKLPGNDNSTATLCLGHHAVPNGTIVKTITNDRIEVTNATELVQNSSIGEICDSPHQILDGENCTLIDALLGDPQCDGFQNKKWDLFVERSKAYSNCYPYDVPDYASLRSLVASSGTLEFNNESFNWTGVTQNGTSSACIRRSNNSFFSRLNWLTHSNFKYPALNVTMPNNEQFDKLYIWGVHHPGTDKDQIFLYAQSSGRITVSTKRSQQAVIPNIGSRPRIRNIPSRISIYWTIVKPGDILLINSTGNLIAPRGYFKIRSGKSSIMRSDTPIGKCKSECITPNGSIPNDKPFQNVNRITYGACPRYVKQSTLKLATGMRNVPEKQTRGIFGAIAGFIENGWEGMMDGWYGFRHQNSEGRGQAADLKSTQAAIDQINGKLNRLIGKTNEKFHQIEKEFSEVEGRIQDLEKYVEDTKIDLWSYNAELLVALENQHTIDLTDSEMNKLFEKTKKQLRENAEDMGNGCFKIYHKCDNACIGSIRNGTYDHDVYRDEALNNRFQIKGVELKSGYKDWILWISFAISCFLLCVALLGFIMWACQKGNIRCNICI

SEQ ID NO: 10480 - protein, 566 aa, synthetic construct; identical to SEQ ID NO: 9868
  REGION 1..566: note = hemagglutinin__InfluenzaA__AGV99956

SEQ ID NO: 10481 - protein, 566 aa, synthetic construct
  REGION 1..566: note = hemagglutinin__InfluenzaA__AGV99986
MKTIIALSYILCLVFAQKLPGNDNSTATLCLGHHAVPNGTIVKTITNDRIEVTNATELVQNSSIGEICDSPHQILDGENCTLIDALLGDPQCDGFQNKKWDLFVERSKAYSNCYPYDVPDYASLRSLIASSGTLEFNNESFNWTGVTQNGTSSACIRRSNNSFFSRLNWLTHSNFKYPALNVTMPNNEQFDKLYIWGVHHPGTDKDQIFLYAQSSGRITVSTKRSQQAVIPNIGSRPRIRNIPSRISIYWTIVKPGDILLINSTGNLIAPRGYFKIRSGKSSIMRSDAPIGKCKSECITPNGSIPNDKPFQNVNRITYGACPRYVKQSTLKLATGMRNVPEKQTRGIFGAIAGFIENGWEGMMDGWYGFRHQNSEGRGQAADLKSTQAAIDQINGKLNRLIGKTNEKFHQIEKEFSEVEGRIQDLEKYVEDTKIDLWSYNAELLVALENQHTIDLTDSEMNKLFEKTKKQLRENAEDMGNGCFKIYHKCDNACIGSIRNGTYDHDVYRDEALNNRFQIKGVELKSGYKDWILWISFAISCFLLCVALLGFIMWACQKGNIRCNICI

SEQ ID NO: 10482 - protein, 566 aa, synthetic construct
  REGION 1..566: note = hemagglutinin__InfluenzaA__AGW00065
MKTIIALSYILCLVFAQKLPGNDNSTATLCLGHHAVPNGTIVKTITNDRIEVTNATELVQNSSIGEICDSPHQILDGENCTLIDALLGDPQCDGFQNKKWDLFVERSKAYSNCYPYDVPDYTSLRSLVASSGTLEFNNESFNWTGVTQNGTSSACIRRSNSSFFSRLNWLTHLNFKYPALNVTMPNNEQFDKLYIWGVHHPGTDKDQIFLYAQSSGRITVSTKRSQQAVIPNIGSRPRIRNIPSRISIYWTIVKPGDILLINSTGNLIAPRGYFKIRSGKSSIMRSDAPIGKCKSECITPNGSIPNDKPFQNVNRITYGACPRYVKQSTLKLATGMRNVPEKQTRGIFGAIAGFIENGWEGMVDGWYGFRHQNSEGRGQAADLKSTQAAIDQINGKLNRLIGKTNEKFHQIEKEFSEVEGRIQDLEKYVEDTKIDLWSYNAELLVALENQHTIDLTDSEMNKLFEKTKKQLRENAEDMGNGCFKIYHKCDNACIGSIRNGTYDHDVYRDEALNNRFQIKGVELKSGYKDWILWISFAISCFLLCVALLGFIMWACQKGNIRCNICI

SEQ ID NO: 10483 - protein, 566 aa, synthetic construct; identical to SEQ ID NO: 9994
  REGION 1..566: note = hemagglutinin__InfluenzaA__AGW00077

SEQ ID NO: 10484 - protein, 566 aa, synthetic construct; identical to SEQ ID NO: 9858
  REGION 1..566: note = hemagglutinin__InfluenzaA__AGW00089

SEQ ID NO: 10485 - protein, 566 aa, synthetic construct; identical to SEQ ID NO: 9994
  REGION 1..566: note = hemagglutinin__InfluenzaA__AGW00101

SEQ ID NO: 10486 - protein, 566 aa, synthetic construct
  REGION 1..566: note = hemagglutinin__InfluenzaA__AGW00113
MKTIIALSYILCLVFAQKLPGNDNSTATLCLGHHAVPNGTIVKTITNDRIEVTNATELVQNSSIGEICDSPHQILDGENCTLIDALLGDPQCDGFQNKKWDLFVERSKAYSNCYPYDVPDYASLRSLVASSGTLEFNNESFNWAGVTQNGTSSACIRGSNSSFFSRLNWLTHLNFKYPALNVTMPNNEQFDKLYIWGVHHPGTDKDQTFLYAQSSGRITVSTKRSQQAVIPNIGSRPRIRNIPSRISIYWTIVKPGDILLINSTGNLIAPRGYFKIRSGKSSIMRSDAPIGKCKSECITPNGSIPNDKPFQNVNRITYGACPRYVKQSTLKLATGMRNVPEKQTRGIFGAIAGFIENGWEGMVDGWYGFRHQNSEGRGQAADLKSTQAAIDQINGKLNRLIGKTNEKFHQIEKEFSEVEGRIQDLEKYVEDTKIDLWSYNAELLVALENQHTIDLTDSEMNKLFEKTKKQLRENAEDMGNGCFKIYHKCDNACIGSIRNGTYDHDVYRDEALNNRFQIKGVELKSGYKDWILWISFAISCFLLCVALLGFIMWACQKGNIRCNICI

SEQ ID NO: 10487 - protein, 566 aa, synthetic construct; identical to SEQ ID NO: 9994
  REGION 1..566: note = hemagglutinin__InfluenzaA__AGW00125

SEQ ID NO: 10488 - protein, 566 aa, synthetic construct; identical to SEQ ID NO: 9994
  REGION 1..566: note = hemagglutinin__InfluenzaA__AGW00137

SEQ ID NO: 10489 - protein, 566 aa, synthetic construct; identical to SEQ ID NO: 9994
  REGION 1..566: note = hemagglutinin__InfluenzaA__AGW00149

SEQ ID NO: 10490 - protein, 566 aa, synthetic construct; identical to SEQ ID NO: 9994
  REGION 1..566: note = hemagglutinin__InfluenzaA__AGW00161

SEQ ID NO: 10491 - protein, 566 aa, synthetic construct; identical to SEQ ID NO: 9994
  REGION 1..566: note = hemagglutinin__InfluenzaA__AGW00173

SEQ ID NO: 10492 - protein, 566 aa, synthetic construct
  REGION 1..566: note = hemagglutinin__InfluenzaA__AGW00185
MKTIIALSYILCLVFAQKLPGNDNSTATLCLGHHAVPNGTIVKTITNDRIEVTNATELVQNSSIGEICDSPHQILDGENCTLIDALLGDPQCDGFQNKKWDLFIERSKAYSNCYPYDVPDYASLRSLVASSGTLEFNNESFNWTGVTQNGTSSACIRRSNNSFFSRLNWLTHSNFKYPALNVTMPNNEQFDKLYIWGVHHPGTDKDQIFLYAQSSGRITVSTKRSQQAVIPNIGSRPRIRNIPSRISIYWTIVKPGDILLINSTGNLIAPRGYFKIRSGKSSIMRSDAPIGKCKSECITPNGSIPNDKPFQNVNRITYGACPRYVKQSTLKLATGMRNVPEKQTRGIFGAIAGFIENGWEGMMDGWYGFRHQNSEGRGQAADLKSTQAAIDQINGKLNRLIGKTNEKFHQIEKEFSEVEGRIQDLEKYVEDTKIDLWSYNAELLVALENQHTIDLTDSEMNKLFEKTKKQLRENAEDMGNGCFKIYHKCDNACIGSIRNGTYDHDVYRDEALNNRFQIKGVELKSGYKDWILWISFAISCFLLCVALLGFIMWACQKGNIRCNICI

SEQ ID NO: 10493 - protein, 566 aa, synthetic construct; identical to SEQ ID NO: 9994
  REGION 1..566: note = hemagglutinin__InfluenzaA__AGW00709

SEQ ID NO: 10494 - protein, 566 aa, synthetic construct; identical to SEQ ID NO: 9994
  REGION 1..566: note = hemagglutinin__InfluenzaA__AGW00721

SEQ ID NO: 10495 - protein, 566 aa, synthetic construct; identical to SEQ ID NO: 9994
  REGION 1..566: note = hemagglutinin__InfluenzaA__AGW00733

SEQ ID NO: 10496 - protein, 566 aa, synthetic construct; identical to SEQ ID NO: 9994
  REGION 1..566: note = hemagglutinin__InfluenzaA__AGW00745

SEQ ID NO: 10497 - protein, 566 aa, synthetic construct
  REGION 1..566: note = hemagglutinin__InfluenzaA__AGW00757
MKTIIALSYILCLVFAQKLPGNDNSTATLCLGHHAVPNGTIVKTITNDRIEVTNATELVQNSSIGEICDSPHQILDGENCTLIDALLGDPQCDGFQNKKWDLFVERSKAYSNCYPYDVPDYASLRSLVASSGTLEFNNESFNWAGVTQNGTSSACIRGSNSSFFSRLNWLTHLNFKYPALNVTMPNNEQFDKLYIWGVHHPGTDKDQIFLYAQSSGRITVSTKRSQQAVIPNIGSRPRIRNIPSRISIYWTIVKPGDILLINSTGNLIAPRGYFKIRSGKSSIMRSDAPIGKCKSECITPNGSIPNDKPFQNLNRITYGACPRYVKQSTLKLATGMRNVPEKQTRGIFGAIAGFIENGWEGMVDGWYGFRHQNSEGRGQAADLKSTQAAIDQINGKLNRLIGKTNEKFHQIEKEFSEVEGRIQDLEKYVEDTKIDLWSYNAELLVALENQHTIDLTDSEMNKLFEKTKKQLRENAEDMGNGCFKIYHKCDNACIGSIRNGTYDHDVYRDEALNNRFQIKGVELKSGYKDWILWISFAISCFLLCVALLGFIMWACQKGNIRCNICI

SEQ ID NO: 10498 - protein, 566 aa, synthetic construct; identical to SEQ ID NO: 9997
  REGION 1..566: note = hemagglutinin__InfluenzaA__AGW00769

SEQ ID NO: 10499 - protein, 566 aa, synthetic construct; identical to SEQ ID NO: 9883
  REGION 1..566: note = hemagglutinin__InfluenzaA__AGW00781

SEQ ID NO: 10500 - protein, 566 aa, synthetic construct; identical to SEQ ID NO: 10482
  REGION 1..566: note = hemagglutinin__InfluenzaA__AGW00793

SEQ ID NO: 10501 - protein, 566 aa, synthetic construct; identical to SEQ ID NO: 9994
  REGION 1..566: note = hemagglutinin__InfluenzaA__AGW00805

SEQ ID NO: 10502 - protein, 566 aa, synthetic construct; identical to SEQ ID NO: 9835
  REGION 1..566: note = hemagglutinin__InfluenzaA__AGW00817

SEQ ID NO: 10503 - protein, 566 aa, synthetic construct; identical to SEQ ID NO: 10481
  REGION 1..566: note = hemagglutinin__InfluenzaA__AGW00829

SEQ ID NO: 10504 - protein, 566 aa, synthetic construct
  REGION 1..566: note = hemagglutinin__InfluenzaA__AGW00841
MKTIIALSYILCLVFAQKLPGNDNSTATLCLGHHAVPNGTIVKTITNGRIEVTNATELVQNSSIGEICDSPHQILDGENCTLIDALLGDPQCDGFQNKKWDLFVERSKAYSNCYPYDVPDYASLRSLVASSGTLEFNNESFNWAGVTQNGTSSACIRGSNSSFFSRLNWLTHLNFKYPALNVTMPNNEQFDKLYIWGVHHPGTDKDQIFLYAQSSGRITVSTKRSQQAVIPNIGSRPRIRNIPSRISIYWTIVKPGDILLINSTGNLIAPRGYFKIRSGKSSIMRSDAPIGKCKSECITPNGSIPNDKPFQNVNRITYGACPRYVKQSTLKLATGMRNVPEKQTRGIFGAIAGFIENGWEGMVDGWYGFRHQNSEGRGQAADLKSTQAAIDQINGKLNRLIGKTNEKFHQIEKEFSEVEGRIQDLEKYVEDTKIDLWSYNAELLVALENQHTIDLTDSEMNKLFEKTKKQLRENAEDMGNGCFKIYHKCDNACIGSIRNGTYDHDVYRDEALNNRFQIKGVELKSGYKDWILWISFAISCFLLCVALLGFIMWACQKGNIRCNICI

SEQ ID NO: 10505 - protein, 566 aa, synthetic construct
  REGION 1..566: note = hemagglutinin__InfluenzaA__AGW00853
MKTIIALSYILCLVFAQKLPGNDNSTATLCLGHHAVPNGTIVKTITNDRIEVTNATELVQNSSIGEICDSPHQILDGENCTLIDALLGDPQCDGFQNKKWDLFVERSKAYSNCYPYDVPDYASLRSLVASSGTLEFNNESFNWTGVTQNGTSSACIRRSNSSFFSRLNWLTHLNFKYPALNVTMPNNEQFDKLYIWGVHHPGTDKDQIFLYAQPSGRITVSTKRSQQAVIPNIGSRPRIRNIPSRISIYWTIVKPGDILLINSTGNLIAPRGYFKIRSGKSSIMRSDAPIGKCKSECITPNGSIPNDKPFQNVNRITYGACPRYVKQSTLKLATGMRNVPEKQTRGIFGAIAGFIENGWEGMVDGWYGFRHQNSEGRGQAADLKSTQAAIDQINGKLNRLIGKTNEKFHQIEKEFSEVEGRIQDLEKYVEDTKIDLWSYNAELLVALENQHTIDLTDSEMNKLFEKTKKQLRENAEDMGNGCFKIYHKCDNACIGSIRNGTYDHNVYRDEALNNRFQIKGVELKSGYKDWILWISFAISCFLLCVALLGFIMWACQKGNIRCNICI

SEQ ID NO: 10506 - protein, 566 aa, synthetic construct; identical to SEQ ID NO: 9858
  REGION 1..566: note = hemagglutinin__InfluenzaA__AGW00865

SEQ ID NO: 10507 - protein, 566 aa, synthetic construct
  REGION 1..566: note = hemagglutinin__InfluenzaA__AGW00877
MKTIIALSYILCLVFAQELPGNDDSTATLCLGHHAVPNGTIVKTITNDQIEVTNATELVQSSSTGEICNSPHQILDGENCTLIDALLGDPQCDGFQNKKWDLFVERSKAHSNCYPYDVPDYASLRSLVASSGTLEFNNESFNWTGVTQNGTSSACIRRSNNSFFSRLNWLTHLNFKYPALNVTMPNNEQFDKLYIWGVHHPGTDKDQIFLYAQASGRITVSTKRSQQAVIPNIGFRPRVRNIPSRVSIYWTIVKPGDILLINSTGNLIAPRGYFKIRSGKSSIMRSDAPIGKCNSACITPNGSIPNDKPFQNVNRITYGACPRYVKQNTLKLATGMRNVPEKQTRGIFGAIAGFIENGWEGMVDGWYGFRHQNSEGRGQAADLKSTQAAIDQINGKLNRLIGKTNEKFHQIEKEFSEVEGRIQDLEKYVEDTKIDLWSYNAELLVALENQHTIDLTDSEMNKLFEKTKKQLRENAEDMGNGCFKIYHKCDNACIGSIRNGTYDHDVYRDEALNNRFQIKGVELKSGYKDWILWISFAISCFLLCVALLGFIMWACQKGNIRCNICI

SEQ ID NO: 10508 - protein, 566 aa, synthetic construct
  REGION 1..566: note = hemagglutinin__InfluenzaA__AGW00889
MKTIIALSYILCLVFAQKLPGNDNSTATLCLGHHAVPNGTIVKTITNDRIEVTNATELVQNSSIGEICDSPHQILDGENCTLIDALLGDPQCDGFQNKKWDLFVERSKAYSNCYPYDVPDYASLRSLVASSGTLEFNNESFNWTGVTQNGTSSACIRRSNSSFFSRLNWLTHLNFKYPALNVTMPNNEQFDKLYIWGVHHPGTDKDQIFLYAQSSGRITVSTKRSQQAVIPNIGSRPRIRNIPSRISIYWTIVKPGDILLINSTGNLIAPRGYFKIRSGKSSIMRSDAPIGKCKSECITPNGSIPNDKPFQNVNRITYGACPRYVKQSTLKLATGMRNVPEKQTRGIFGAIAGFIENGWEGMVDGWYGFRHQNSEGRGQAADLKSTQAAIDQINGKLNRLIGKTNEKFHQIEKEFSEVEGRIQDLEKYVEDTKIDLWSYNAELLVALENQHTIDLTDSEMNKLFEKTKKQLRENAEDMGNGCFKIYHKCDNACIGSIRNGTYDHNVYRDEALNNRFQIKGVELKSGYKDWVLWISFAISCFLLCVALLGFIMWACQKGNIRCNICI

SEQ ID NO: 10509 - protein, 566 aa, synthetic construct; identical to SEQ ID NO: 9858
  REGION 1..566: note = hemagglutinin__InfluenzaA__AGW00901

SEQ ID NO: 10510 - protein, 566 aa, synthetic construct; identical to SEQ ID NO: 9858
  REGION 1..566: note = hemagglutinin__InfluenzaA__AGW00913

SEQ ID NO: 10511 - protein, 566 aa, synthetic construct; identical to SEQ ID NO: 9994
  REGION 1..566: note = hemagglutinin__InfluenzaA__AGW00931

SEQ ID NO: 10512 - protein, 566 aa, synthetic construct; identical to SEQ ID NO: 9994
  REGION 1..566: note = hemagglutinin__InfluenzaA__AGW01244

SEQ ID NO: 10513 - protein, 566 aa, synthetic construct; identical to SEQ ID NO: 9868
  REGION 1..566: note = hemagglutinin__InfluenzaA__AGW01256

SEQ ID NO: 10514 - protein, 566 aa, synthetic construct
  REGION 1..566: note = hemagglutinin__InfluenzaA__AGW01295
MKTIIALSYILCLVFAQKLPGNDNSTATLCLGHHAVPNGTIVKTITNDRIEVTNATELVQNSSIGEICDSPHQILDGENCTLIDALLGDPQCDGFQNKKWDLFVERSKAYSNCYPYDVPDYASLRSLVASSGTLEFNNESFNWTGVTQNGTSSACIRRSNSSFFSRLNWLTHLNFKYPALNVTMPNNEQFDKLYIWGVHHPGTDKDQIFLYAQSSGRITVSTKRSQQAVIPNIGSRPRIRNIPSRISIYWTIVKPGDILLINSTGNLIAPRGYFKIRSGKSSIMRSDAPIGKCKSECITPNGSIPNDKPFQNVNRITYGACPRYVKQSTLKLATGMRNVPEKQTRGIFGAIAGFIENGWEGMVDGWYGFRHQNSEGRGQAADLKSTQAAIDQINGKLNRLIGKTNEKFHQIEKEFSEVEGRIQDLEKYVEDTKIDLWSYNAEILVALENQHTIDLTDSEMNKLFEKTKKQLRENAEDMGNGCFKIYHKCDNACIGSIRNGTYDHNVYRDEALNNRFQIKGVELKSGYKDWILWISFAISCFLLCVALLGFIMWACQKGNIRCNICI

SEQ ID NO: 10515 - protein, 566 aa, synthetic construct; identical to SEQ ID NO: 9858
  REGION 1..566: note = hemagglutinin__InfluenzaA__AGW01307

SEQ ID NO: 10516 - protein, 566 aa, synthetic construct
  REGION 1..566: note = hemagglutinin__InfluenzaA__AGW01319
MKTIIALSYILCLVFAQELPGNDDSTATLCLGHHAVPNGTIVKTITNDQIEVTNATELVQSSSTGEICNSPHQILDGENCTLIDALLGDPQCDGFQNKKWDLFVERSKAHSNCYPYDVPDYASLRSLVASSGTLEFNNESFNWTGVTQDGTSSACIRRSNNSFFSRLNWLTHLNFKYPALNVTMPNNEQFDKLYIWGVHHPGTDKDQIFLYAQASGRITVSTKRSQQAVIPNIGSRPRVRNIPSRVSIYWTIVKPGDILLINSTGNLIAPRGYFKIRSGKSSIMRSDAPIGKCNSACITPNGSIPNDKPFQNVNRITYGACPRYVKQNTLKLATGMRNVPEKQTRGIFGAIAGFIENGWEGMVDGWYGFRHQNSEGRGQAADLKSTQAAIDQINGKLNKLIGKTNEKFHQIEKEFSEVEGRIQDLEKYVEDTKIDLWSYNAELLVALENQHTIDLTDSEMNKLFEKTKKQLRENAEDMGNGCFKIYHKCDNACIGSIRNGTYDHDVYRDEALNNRFQIKGVELKSGYKDWILWISFAISCFLLCVALLGFIMWACQKGNIRCNICI

SEQ ID NO: 10517 - protein, 566 aa, synthetic construct
  REGION 1..566: note = hemagglutinin__InfluenzaA__AGW01331
MKTIIALSYILCLVFAQKLPGNDNSTATLCLGHHAVPNGTIVKTITNDRIEVTNATELVQNSSIGEICDSPHQILDGENCTLIDALLGDPQCDGFQNKKWDLFVERSKAYSNCYPYDVPDYASLRSLVASSGTLEFNNESFNWAGVTQNGTSSACIRGSNSSFFSRLNWLTHLNFKYPALNVTMPNNEQFDKLYIWGVHHPGTDKDQIFLYAQSSGRITVSTKRSQQAVIPNIGSRPRIRNIPSRISIYWTIVKPGDILLINSTGNLIAPRGYFKIRSGKSSIMRSDAPIGKCKSECITPNGSIPNDKPFQNVNRITYGACPRYVKQSTLKLATGMRNVPEKQTRGIFGAIAGFIENGWEGMVDGWYGFRHQNSEGRGQAADLKSTQAAIDQINGKLNRLIGKTNEKFHQIEKEFSEVEGRIQDLEKYVEDTKIDLWSYNAELLVALENQHTIDLTDSEMNKLFEKTKKQLRENAEDMGNGCFKIYHKCDNACIGSIRNGTYEHDVYRDEALNNRFQIKGVELKSGYKDWILWISFAISCFLLCVALLGFIMWACQKGNIRCNICI

SEQ ID NO: 10518 - protein, 566 aa, synthetic construct; identical to SEQ ID NO: 9994
  REGION 1..566: note = hemagglutinin__InfluenzaA__AGW01343

SEQ ID NO: 10519 - protein, 566 aa, synthetic construct; identical to SEQ ID NO: 9997
  REGION 1..566: note = hemagglutinin__InfluenzaA__AGW01355

SEQ ID NO: 10520 - protein, 566 aa, synthetic construct; identical to SEQ ID NO: 9868
  REGION 1..566: note = hemagglutinin__InfluenzaA__AGW01367

SEQ ID NO: 10521 - protein, 566 aa, synthetic construct; identical to SEQ ID NO: 9994
  REGION 1..566: note = hemagglutinin__InfluenzaA__AGW01391

SEQ ID NO: 10522 - protein, 566 aa, synthetic construct
  REGION 1..566: note = hemagglutinin__InfluenzaA__AGW01403
MKTIIALSYILCLIFAQKLPGNDNSTATLCLGHHAVPNGTIVKTITNDQIEVTNATELVQSSSTGEICNSPHQILDGENCTLIDALLGDPQCDGFQNKKWDLFVERSKAHSNCYPYDVPDYASLRSLVASSGTLEFNNESFNWTGVTQNGTSSACIRRSNNSFFSRLNWLTHLNFKYPALNVTMPNNEQFDKLYIWGVHHPGTDKDQIFLYAQAAGRITVSTKRSQQAVIPNIGSRPRVRNIPSRVSIYWTIVKPGDILLINSTGNLIAPRGYFKIRSGKSSIMRSDAPIGKCNSACITPNGSIPNDKPFQNVNRITYGACPRYVKQNTLKLATGMRNVPEKQTRGIFGAIAGFIENGWEGMVDGWYGFRHQNSEGRGQAADLKSTQAAIDQINGKLNRLIGKTNEKFHQIEKEFSEVEGRIQDLEKYVEDTKIDLWSYNAELLVALENQHTIDLTDSEMNKLFEKTKKQLRENAEDMGNGCFKIYHKCDNACIGSIRNGTYDHYVYRDEALNNRFQIKGVELKSGYKDWILWISFATSCFLLCVALLGFIMWACQKGNIRCNICI

SEQ ID NO: 10523 - protein, 566 aa, synthetic construct; identical to SEQ ID NO: 9858
  REGION 1..566: note = hemagglutinin__InfluenzaA__AGW01415

SEQ ID NO: 10524 - protein, 566 aa, synthetic construct; identical to SEQ ID NO: 9858
  REGION 1..566: note = hemagglutinin__InfluenzaA__AGW01427

SEQ ID NO: 10525 - protein, 566 aa, synthetic construct; identical to SEQ ID NO: 9858
  REGION 1..566: note = hemagglutinin__InfluenzaA__AGW01439

SEQ ID NO: 10526 - protein, 566 aa, synthetic construct
  REGION 1..566: note = hemagglutinin__InfluenzaA__AGW01451
MKTIIALSYILCLVFAQKLPGNDNSTATLCLGHHAVPNGTIVKTITNDRIEVTNATELVQNSSIGEICDSPHQILDGENCTLIDALLGDPQCDGFQNKKWDLFVERSKAYSNCYPYDVPDYASLRSLVASSGTLEFNNESFNWAGVTQNGTSSACIRGSNSSFFSRLNWLTHLNFKYPALNVTMPNNEQFDKLYIWGVHHPGTDKDQIFLYAQSSGRITVSTKRSQQAVIPNIGSRPRIRNIPSRISIYWTIVKPGDILLINSTGNLIAPRGYFKIRSGKSSIMRSDAPIGKCKSECITPNGSIPNDKPFQNVNRITYGACPRYVKQSTLKLATGMRNVPEKQTRGIFGAIAGFIENGWEGMMDGWYGFRHQNSEGRGQAADLKSTQAAIDQINGKLNRLIGKTNEKFHQIEKEFSEVEGRIQDLEKYVVDTKIDLWSYNAELLVALENQHTIDLTDSEMNKLFEKTKKQLRENAEDMGNGCFKIYHKCDNACIGSIRNGTYDHDVYRDEALNNRFQIKGVELKSGYKDWILWISFAISCFLLCVALLGFIMWACQKGNIRCNICI

SEQ ID NO: 10527 - protein, 566 aa, synthetic construct; identical to SEQ ID NO: 9994
  REGION 1..566: note = hemagglutinin__InfluenzaA__AGW01463

SEQ ID NO: 10528 - protein, 566 aa, synthetic construct; identical to SEQ ID NO: 9994
  REGION 1..566: note = hemagglutinin__InfluenzaA__AGW01475

SEQ ID NO: 10529 - protein, 566 aa, synthetic construct
  REGION 1..566: note = hemagglutinin__InfluenzaA__AGW01487
MKTIIALSYILCLVFAQKLPGNDNSTATLCLGHHAVPNGTIVKTITNDRIEVTNATELVQNSSIGEICDSPHQILDGENCTLIDALLGDPQCDGFQNKKWDLFVERSKAYSNCYPYDVPDYASLRSLVASSGTLEFNNESFNWTGVTQNGTSSACIRRSNNSFFSRLNWLTHSNFKYPALNVTMPNNEQFDKLYIWGVHHPGTGKDQIFLYAQSSGRITVSTKRSQQAVIPNIGSRPRIRNIPSRISIYWTIVKPGDILLINSTGNLIAPRGYFKIRSGKSSIMRSDAPIGKCKSECITPNGSIPNDKPFQNVNRITYGACPRYVKQSTLKLATGMRNVPEKQTRGIFGAIAGFIENGWEGMMDGWYGFRHQNSEGRGQAADLKSTQAAIDQINGKLNRLIGKTNEKFHQIEKEFSEVEGRIQDLEKYVEDTKIDLWSYNAELLVALENQHTIDLTDSEMNKLFEKTKKQLRENAEDMGNGCFKIYHKCDNACIGSIRNGTYDHDVYRDEALNNRFQIKGVELKSGYKDWILWISFAISCFLLCVALLGFIMWACQKGNIRCNICI

SEQ ID NO: 10530 - protein, 566 aa, synthetic construct; identical to SEQ ID NO: 9858
  REGION 1..566: note = hemagglutinin__InfluenzaA__AGW01499

SEQ ID NO: 10531 - protein, 566 aa, synthetic construct
  REGION 1..566: note = hemagglutinin__InfluenzaA__AGW01511
MKTIIALSYILCLVFAQKLPGNDNSTATLCLGHHAVPNGTIVKTITNDRIEVTNATELVQNSSIGEICDSPHQILDGENCTLIDALLGDPQCDGFQNKKWDLFVERSKAYSNCYPYDVPDYASLRSLVASSGTLEFNNESFNWAGVTQNGTSSACIRGSNSSFFSRLNWLTHLNFKYPALNVTMPNNEQFDKLYIWGVHHPGTDKDQIFLYAQSSGRITVSTKRSQQAVIPNIGSRPRIRNIPSRISIYWTIVKPGDILLINSTGNLIAPRGYFKIRSGKSSIMRSDAPIGKCKSECITPNGSIPNDKPFQNVNRITYGACPRYVKQSTLKLATGMRNVPEKQTRGIFGAIAGFIENGWEGMVDGWYGFRHQNSEGRGQAADLKSTQAAIDQINGKLNRLIGKTNEKFHQIEKEFSEVEGRIQDLEKYVEDTKIDLWSYNAELLVALENQHTIDLTDSEMNKLFEKTKKQLRENAEDMGNGCFKIYHKCDNACIGSIRNGTYDHDVYRDEALNNRFQIKGVELKSGYKDWILWISFAISCFLLCAALLGFIMWACQKGNIRCNICI

SEQ ID NO: 10532 - protein, 566 aa, synthetic construct
  REGION 1..566: note = hemagglutinin__InfluenzaA__AGW01535
MKTIIALSYILCLVFAQKLPGNDNSTATLCLGHHAVPNGTIVKTITNDRIEVTNATELVQNSSIGEICDSPHQILDGENCTLIDALLGDPQCDGFQNKKWDLFVERSKAYSNCYPYDVPDYASLRSLVASSGTLEFNKESFNWAGVTQNGTSSACIRGSNSSFFSRLNWLTHLNFKYPALNVTMPNNEQFDKLYIWGVHHPGTDKDQIFLYAQSSGRITVSTKRSQQAVIPNIGSRPRIRNIPSRISIYWTIVKPGDILLINSTGNLIAPRGYFKIRSGKSSIMRSDAPIGKCKSECITPNGSIPNDKPFQNVNRITYGACPRYVKQSTLKLATGMRNVPEKQTRGIFGAIAGFIENGWEGMVDGWYGFRHQNSEGRGQAADLKSTQAAIDQINGKLNRLIGKTNEKFHQIEKEFSEVEGRIQDLEKYVEDTKIDLWSYNAELLVALENQHTIDLTDSEMNKLFEKTKKQLRENAEDMGNGCFKIYHKCDNACIGSIRNGTYDHDVYRDEALNNRFQIKGVELKSGYKDWILWISFAISCFLLCVALLGFIMWACQKGNIRCNICI

SEQ ID NO: 10533 - protein, 566 aa, synthetic construct; identical to SEQ ID NO: 9858
  REGION 1..566: note = hemagglutinin__InfluenzaA__AGW01547

SEQ ID NO: 10534 - protein, 566 aa, synthetic construct; identical to SEQ ID NO: 9994
  REGION 1..566: note = hemagglutinin__InfluenzaA__AGW01559

SEQ ID NO: 10535 - protein, 566 aa, synthetic construct; identical to SEQ ID NO: 9994
  REGION 1..566: note = hemagglutinin__InfluenzaA__AGW01571

SEQ ID NO: 10536 - protein, 566 aa, synthetic construct; identical to SEQ ID NO: 9994
  REGION 1..566: note = hemagglutinin__InfluenzaA__AGW01583

SEQ ID NO: 10537 - protein, 566 aa, synthetic construct; identical to SEQ ID NO: 9994
  REGION 1..566: note = hemagglutinin__InfluenzaA__AGW01595

SEQ ID NO: 10538 - protein, 566 aa, synthetic construct
  REGION 1..566: note = hemagglutinin__InfluenzaA__AGW01607
MKTIIALSYILCLVLAQKLPGNDNSTATLCLGHHAVPNGTIVKTITNDRIEVTNATELVQNSSIGEICDSPHQILDGENCTLIDALLGDPQCDGFQNKKWDLFVERSKAYSNCYPYDVPDYASLRSLVASSGTLEFNNESFNWAGVTQNGTSSACIRGSNSSFFSRLNWLTHLNFKYPALNVTMPNNEQFDKLYIWGVHHPGTDKDQIFLYAQSSGRITVSTKRSQQAVIPNIGSRPRIRNIPSRISIYWTIVKPGDILLINSTGNLIAPRGYFKIRSGKSSIMRSDAPIGKCKSECITPNGSIPNDKPFQNVNRITYGACPRYVKQSTLKLATGMRNVPEKQTRGIFGAIAGFIENGWEGMVDGWYGFRHQNSEGRGQAADLKSTQAAIDQINGKLNRLIGKTNEKFHQIEKEFSEVEGRIQDLEKYVEDTKIDLWSYNAELLVALENQHTIDLTDSEMNKLFEKTKKQLRENAEDMGNGCFKIYHKCDNACIGSIRNGTYDHDVYRDEALNNRFQIKGVELKSGYKDWILWISFAISCFLLCVALLGFIMWACQKGNIRCNICI

SEQ ID NO: 10539 - protein, 566 aa, synthetic construct; identical to SEQ ID NO: 9997
  REGION 1..566: note = hemagglutinin__InfluenzaA__AGW01619

SEQ ID NO: 10540 - protein, 566 aa, synthetic construct; identical to SEQ ID NO: 9994
  REGION 1..566: note = hemagglutinin__InfluenzaA__AGW01631

SEQ ID NO: 10541 - protein, 566 aa, synthetic construct
  REGION 1..566: note = hemagglutinin__InfluenzaA__AGW01643
MKTIIALSYILCLVFAQKLPGNDNSTATLCLGHHAVPNGTIVKTITNDRIEVTNATELVQNSSIGEICDSPHQILDGENCTLIDALLGDPQCDGFQNKKWDLFVERSKAYSNCYPYDVPDYASLRSLVASSGTLEFNNESFNWTGVTQNGTSSACIRGSNSSFFSRLNWLTHLNFKYPALNVTMPNNEQFDKLYIWGVHHPGTDKDQIFLYAQSSGRITVSTKRSQQAVIPNIGSRPRIRNIPSRISIYWTIVKPGDILLINSTGNLIAPRGYFKIRSGKSSIMRSDAPIGKCKSECITPNGSIPNDKPFQNVNRITYGACPRYVKQSTLKLATGMRNVPEKQTRGIFGAIAGFIENGWEGMMDGWYGFRHQNSEGRGQAADLKSTQAAIDQINGKLNRLIGKTNEKFHQIEKEFSEVEGRIQDLEKYVEDTKIDLWSYNAELLVALENQHTIDLTDSEMNKLFEKTKKQLRENAEDMGNGCFKIYHKCDNACIGSIRNGTYDHDVYRDEALNNRFQIKGVELKSGYKDWILWISFAISCFLLCVALLGFIMWACQKGNIRCNICI

SEQ ID NO: 10542 - protein, 566 aa, synthetic construct; identical to SEQ ID NO: 9994
  REGION 1..566: note = hemagglutinin__InfluenzaA__AGW01655

SEQ ID NO: 10543 - protein, 566 aa, synthetic construct
  REGION 1..566: note = hemagglutinin__InfluenzaA__AGW01667
MKTIIALSYILCLVFAQKLPGNDNSTATLCLGHHAVPNGTIVKTITNDRIEVTNATELVQNSSIGEICDSPHQILDGENCTLIDALLGDPQCDGFQNKKWDLFVERSKAYSNCYPYDVPDYASLRSLVASSGTLEFNNESFNWAGVTQNGTSSACIRGSNSSFFSRLNWLTHLNFKYPALNVTMPNNEQFDKLYIWGVHHPGTDKDQIFLYAQSSGRITVSTKRSQQAVIPNIGSRPRIRNIPSRISIYWTIVKPGDILLINSTGNLIAPRGYFKIRSGKSSIMRSDAPIGKCKSECITPNGSIPNDKPFQNVNRITYGACPRYVKQSTLKLATGMRNVPEKQTRGIFGAIAGFIENGWEGMVDGWYGFRHQNSEGRGQAADLKSTQAAIDQINGKLNRLIGKTNEKFHQIEKEFSEVEGRIQDLEKYVEDTKIDLWSYNAELLVALENQHTIDLTDSEMNKLFEKTKKQLRENAEDMGNGCFKIYHKCDNACIGSIRNETYDHDVYRDEALNNRFQIKGVELKSGYKDWILWISFAISCFLLCVALLGFIMWACQKGNIRCNICI

SEQ ID NO: 10544 - protein, 566 aa, synthetic construct; identical to SEQ ID NO: 9994
  REGION 1..566: note = hemagglutinin__InfluenzaA__AGW01679

SEQ ID NO: 10545 - protein, 566 aa, synthetic construct
  REGION 1..566: note = hemagglutinin__InfluenzaA__AGW01691
MKTIIALSYILCLVFAQKLPGNDNSTATLCLGHHAVPNGTIVKTITNDRIEVTNATELVQNSSIGEICDSPHQILDGENCTLIDALLGDPQCDGFQNKKWDLFVERSKAYSNCYPYDVPDYASLRSLVASSGTLEFNNESFNWTGVTQNGTSSACIRRSNSSFFSRLNWLTHLNFKYPALNVTMPNNEQFDKLYIWGVHHPGTDKDQIFLYAQSSGRITVSTKRSQQAVIPNIGSRPRIRNIPSRISIYWTIVKPGDILLINSTGNLIAPRGYFKIRSGKSSIMRSDAPIGKCKSECITPNGSIPNDKPFQNVNRITYGACPRYVKQSTLKLATGMRNVPEKQTRGIFGAIAGFIENGWEGMVDGWYGFRHQNSEGRGQAADLKSTQAAIDQINGKLNRLIGKTNEKFHQIEKEFSEVEGRIQDLEKYVEDTKIDLWSYNAELLVALENQHTIDLTDSEMNKLFEKTKKQLRENAEDMGNGCFKIYHKCDNACIGSIRNGTYDHDVYRDEALNNRFQIKGVELKSGYKDWILWISFAISCFLLCVALLGFVMWACQKGNIRCNICI

SEQ ID NO: 10546 - protein, 566 aa, synthetic construct; identical to SEQ ID NO: 9858
  REGION 1..566: note = hemagglutinin__InfluenzaA__AGW01701

SEQ ID NO: 10547 - protein, 566 aa, synthetic construct; identical to SEQ ID NO: 9858
  REGION 1..566: note = hemagglutinin__InfluenzaA__AGW01713

SEQ ID NO: 10548 - protein, 566 aa, synthetic construct
  REGION 1..566: note = hemagglutinin__InfluenzaA__AGW01725
MKTIIALSYILCLVFAQKLPGNDNSTATLCLGHHAVPNGTIVKTITNDRIEVTNATELVQNSSIGEICDSPHQILDGENCTLIDALLGDPQCDGFQNKKWDLFVERSKAYSNCYPYDVPDYASLRSLVASSGTLEFNNESFNWTGVTQNGTSSACIRRSNSSFFSRLNWLTHLNFKYPALNVTMPNNEQFDKLYIWGVHHPGTDKDQIFLYAQSSGRITVSTKRSQQAVIPNIGSRPRIRNIPSRISIYWTIVKPGDILLINSTGNLIAPRGYFKIRSGKSSIMRSDAPIGKCKSECITPNGSIPNDKPFQNVNRITYGACPRYVKQSTLKLATGMRNVPEKQTRGIFGAIAGFIENGWEGMVDGWYGFRHQNSEGRGQAADLKSTQAAIDQINGKLNRLIGKTNEKFHQIEKEFSEVEGRIQDLEKYVEDTKIDLWSYNAELLVALENQHTIDLTDSEMNKLFEKTKKQLRENAEDMGNGCFKIYHKCDNACIGSIRNGTYDHNVYRDEALNNRFQIKGVELKSGYKDWILWISFAISCFLICVALLGFIMWACQKGNIRCNICI

SEQ ID NO: 10549 - protein, 566 aa, synthetic construct; identical to SEQ ID NO: 9858
  REGION 1..566: note = hemagglutinin__InfluenzaA__AGW01737

SEQ ID NO: 10550 - protein, 566 aa, synthetic construct; identical to SEQ ID NO: 9994
  REGION 1..566: note = hemagglutinin__InfluenzaA__AGW01749

SEQ ID NO: 10551 - protein, 566 aa, synthetic construct; identical to SEQ ID NO: 9994
  REGION 1..566: note = hemagglutinin__InfluenzaA__AGW01761

SEQ ID NO: 10552 - protein, 566 aa, synthetic construct; identical to SEQ ID NO: 9858
  REGION 1..566: note = hemagglutinin__InfluenzaA__AGW01773

SEQ ID NO: 10553 - protein, 566 aa, synthetic construct; identical to SEQ ID NO: 9994
  REGION 1..566: note = hemagglutinin__InfluenzaA__AGW01785

SEQ ID NO: 10554 - protein, 566 aa, synthetic construct; identical to SEQ ID NO: 9858
  REGION 1..566: note = hemagglutinin__InfluenzaA__AGW01797

SEQ ID NO: 10555 - protein, 566 aa, synthetic construct; identical to SEQ ID NO: 9994
  REGION 1..566: note = hemagglutinin__InfluenzaA__AGW01809

SEQ ID NO: 10556 - protein, 566 aa, synthetic construct; identical to SEQ ID NO: 9994
  REGION 1..566: note = hemagglutinin__InfluenzaA__AGW01821

SEQ ID NO: 10557 - protein, 566 aa, synthetic construct; identical to SEQ ID NO: 9993
  REGION 1..566: note = hemagglutinin__InfluenzaA__AGW01833

SEQ ID NO: 10558 - protein, 566 aa, synthetic construct
  REGION 1..566: note = hemagglutinin__InfluenzaA__AGW01845
MKTIIALSYILCLVFAQKLPGNDNSTATLCLGHHAVPNGTIVKTITNDRIEVTNATELVQNSSIGEICDSPHQILDGENCTLIDALLGDPQCDGFQNKKWDLFVERSKAYSNCYPYDVPDYASLRSLVASSGTLEFTNESFNWTGVTQNGTSSACIRRSNSSFFSRLNWLTHLNFKYPALNVTMPNNEQFDKLYIWGVHHPGTDKDQIFLYAQSSGRITVSTKRSQQAVIPNIGSRPRIRNIPSRISIYWTIVKPGDILLINSTGNLIAPRGYFKIRSGKSSIMRSDAPIGKCKSECITPNGSIPNDKPFQNVNRITYGACPRYVKQSTLKLATGMRNVPEKQTRGIFGAIAGFIENGWEGMVDGWYGFRHQNSEGRGQAADLKSTQAAIDQINGKLNRLIGKTNEKFHQIEKEFSEVEGRIQDLEKYVEDTKIDLWSYNAELLVALENQHTIDLTDSEMNKLFEKTKKQLRENAEDMGNGCFKIYHKCDNACIGSIRNGTYDHNVYRDEALNNRFQIKGVELKSGYKDWILWISFAISCFLLCVALLGFIMWACQKGNIRCNICI

SEQ ID NO: 10559 - protein, 566 aa, synthetic construct; identical to SEQ ID NO: 9994
  REGION 1..566: note = hemagglutinin__InfluenzaA__AGW01857

SEQ ID NO: 10560 - protein, 566 aa, synthetic construct; identical to SEQ ID NO: 9994
  REGION 1..566: note = hemagglutinin__InfluenzaA__AGW01869

SEQ ID NO: 10561 - protein, 566 aa, synthetic construct; identical to SEQ ID NO: 10545
  REGION 1..566: note = hemagglutinin__InfluenzaA__AGW01881

SEQ ID NO: 10562 - protein, 566 aa, synthetic construct; identical to SEQ ID NO: 9868
  REGION 1..566: note = hemagglutinin__InfluenzaA__AGW01893

SEQ ID NO: 10563 - protein, 566 aa, synthetic construct; identical to SEQ ID NO: 9883
  REGION 1..566: note = hemagglutinin__InfluenzaA__AGW01905

SEQ ID NO: 10564 - protein, 566 aa, synthetic construct; identical to SEQ ID NO: 9994
  REGION 1..566: note = hemagglutinin__InfluenzaA__AGW01917

SEQ ID NO: 10565 - protein, 566 aa, synthetic construct; identical to SEQ ID NO: 9858
  REGION 1..566: note = hemagglutinin__InfluenzaA__AGW01929

SEQ ID NO: 10566 - protein, 566 aa, synthetic construct; identical to SEQ ID NO: 9994
  REGION 1..566: note = hemagglutinin__InfluenzaA__AGW01941

SEQ ID NO: 10567 - protein, 566 aa, synthetic construct; identical to SEQ ID NO: 9858
  REGION 1..566: note = hemagglutinin__InfluenzaA__AGW01953

SEQ ID NO: 10568 - protein, 566 aa, synthetic construct
  REGION 1..566: note = hemagglutinin__InfluenzaA__AGW01965
MKTIIALSYILCLVFAQELPGNDDSMATLCLGHHAVPNGTIVKTITNDQIEVTNATELVQSSSTGEICNSPHQILDGENCTLIDALLGDPQCDGFQNKKWDLFVERSKAHSNCYPYDVPDYASLRSLVASSGTLEFNNESFNWTGVTQNGTSSACIRRSNNSFFSRLNWLTHLNFKYPALNVTMPNNEQFDKLYIWGVHHPGTDKDQIFLYAQASGRITVSTKRSQQAVIPNIGSRPRVRNIPSRVSIYWTIVKPGDILLINSTGNLIAPRGYFKIRSGKSSIMRSDAPIGKCNSACITPNGSIPNDKPFQNVNRITYGACPRYVKQNTLKLATGMRNVPEKQTRGIFGAIAGFIENGWEGMVDGWYGFRHQNSEGRGQAADLKSTQAAIDQINGKLNRLIGKTNEKFHQIEKEFSEVEGRIQDLEKYVEDTKIDLWSYNAELLVALENQHTIDLTDSEMNKLFEKTKKQLRENAEDMGNGCFKIYHKCDNDCIGSIRNGTYDHNVYRDEALNNRFQIKGIELKSGYKDWILWISFAISCFLLCVALLGFIMWACQKGNIRCNICI

SEQ ID NO: 10569 - protein, 566 aa, synthetic construct; identical to SEQ ID NO: 9994
  REGION 1..566: note = hemagglutinin__InfluenzaA__AGW01977

SEQ ID NO: 10570 - protein, 566 aa, synthetic construct; identical to SEQ ID NO: 9994
  REGION 1..566: note = hemagglutinin__InfluenzaA__AGW01989

SEQ ID NO: 10571 - protein, 566 aa, synthetic construct; identical to SEQ ID NO: 9994
  REGION 1..566: note = hemagglutinin__InfluenzaA__AGW02001

SEQ ID NO: 10572 - protein, 566 aa, synthetic construct; identical to SEQ ID NO: 9994
  REGION 1..566: note = hemagglutinin__InfluenzaA__AGW02013

SEQ ID NO: 10573 - protein, 566 aa, synthetic construct; identical to SEQ ID NO: 9858
  REGION 1..566: note = hemagglutinin__InfluenzaA__AGW02025

SEQ ID NO: 10574 - protein, 566 aa, synthetic construct; identical to SEQ ID NO: 9994
  REGION 1..566: note = hemagglutinin__InfluenzaA__AGW02037

SEQ ID NO: 10575 - protein, 566 aa, synthetic construct; identical to SEQ ID NO: 9994
  REGION 1..566: note = hemagglutinin__InfluenzaA__AGW02061

SEQ ID NO: 10576 - protein, 566 aa, synthetic construct; identical to SEQ ID NO: 9994
  REGION 1..566: note = hemagglutinin__InfluenzaA__AGW02073

SEQ ID NO: 10577 - protein, 566 aa, synthetic construct; identical to SEQ ID NO: 9994
  REGION 1..566: note = hemagglutinin__InfluenzaA__AGW02085

SEQ ID NO: 10578 - protein, 566 aa, synthetic construct; identical to SEQ ID NO: 9883
  REGION 1..566: note = hemagglutinin__InfluenzaA__AGW02097

SEQ ID NO: 10579 - protein, 566 aa, synthetic construct; identical to SEQ ID NO: 9858
  REGION 1..566: note = hemagglutinin__InfluenzaA__AGW02109

SEQ ID NO: 10580 - protein, 566 aa, synthetic construct; identical to SEQ ID NO: 9994
  REGION 1..566: note = hemagglutinin__InfluenzaA__AGW02133

SEQ ID NO: 10581 - protein, 566 aa, synthetic construct; identical to SEQ ID NO: 9994
  REGION 1..566: note = hemagglutinin__InfluenzaA__AGW02157

SEQ ID NO: 10582 - protein, 566 aa, synthetic construct; identical to SEQ ID NO: 9858
  REGION 1..566: note = hemagglutinin__InfluenzaA__AGW02169

SEQ ID NO: 10583 - protein, 566 aa, synthetic construct; identical to SEQ ID NO: 9994
  REGION 1..566: note = hemagglutinin__InfluenzaA__AGW02181

SEQ ID NO: 10584 - protein, 566 aa, synthetic construct; identical to SEQ ID NO: 9868
  REGION 1..566: note = hemagglutinin__InfluenzaA__AGW02193

SEQ ID NO: 10585 - protein, 566 aa, synthetic construct; identical to SEQ ID NO: 9835
  REGION 1..566: note = hemagglutinin__InfluenzaA__AGW04171

SEQ ID NO: 10586 - protein, 568 aa, synthetic construct
  REGION 1..568: note = hemagglutinin__InfluenzaA__AGW27061
MEKIVLLFAIVNLVKSDHICIGYHANNSTEQVDTIMEKNVTVTHAQDILEKTHNGKLCDLNGVKPLILKDCSVAGWLLGNPMCDEFIDVPEWSYIVEKANPANDLCYPGNFNDYEELKHLLSRINHFEKIRIIPKDSWPDHEASLGVSAACSYQGNSSFFRNVVWLLKKNDAYPIIKKSYNNTNKEDLLVLWGIHHPNDEAEQIRLYQNPTTYVSTGTSTLNQRLVPRIATRSKVNGQSGRIDFFWTILKPNDAINFESNGNFIAPEYAYKIVKKGDSTIMRSEVEYGNCSTRCQTPMGAINSSMPFHNIHPLTIGECPKYVKSNKLVLATGLRNSPQIERRRRKRGLFGAIAGFIEGGWQGMVDGWYGYHHSNEQGSGYAADKESTQKAIDGVTNKVNSIIDKMNTQFEAVGREFNNLERRIENLNKKMEDGFLDVWTYNAELLVLMENERTLDFHDSNVKNLYDKVRLQLRDNAKELGNGCFEFYHKCDNECMESVRNGTYDYPQYSEEARLKREEISGVKLESIGTYQILSIYSTVASSLVLSIMVAGLSLWMCSNGSLQCRMCI

SEQ ID NO: 10587 - protein, 565 aa, synthetic construct
  REGION 1..565: note = hemagglutinin__InfluenzaA__AGY14471
MKVKLLILLCTFTATYADTICIGYHANNSTDTVDTILEKNVTVTHSVNLLEDSHNGKLCLLKGIAPLQLGNCSVAGWILGNPECGLLIPKESWSYIVETPNPENGTCYPGYFDDYEELREQLSSVSSFERFEIFPKESSWPNHTVTGVSASCSHNGKSSFYRNLLWLTGKNGLYPNLSKSYANNKEKEVLILWGVHHPSNIGNQRTLYHTENTYVSVVSSHYSRRFTPEITKRPKVRDQEGRINYYWTLLEPGDTIIFEANGNLIAPWYAFALSKGFGSGIITSNAPMDECDAKCQTPQGAINSNLPFQNVHPVTIGECPKYVRSTKLRMVTGLRNIPSIQSRGLFGAIAGFIEGGWTGMVDGWYGYHHQNEQGSGYAADQESTQNAINGITNKVNSVIEKMNTQFTVVGKEFNKLERRMENLNKKVDDGFLDIWTYNAELLVLLENERTLDFHDSNVMNLYEKVKGQLKNNAKEIGNGCFEFYHKCNNECMESVKNGTYDYPKYSEESKLNREKIDGVKLESMGVYQILAIYSTVASSLVLLVSLGAISFWMCSNGSLQCRICI

SEQ ID NO: 10588 - protein, 565 aa, synthetic construct; identical to SEQ ID NO: 10587
  REGION 1..565: note = hemagglutinin__InfluenzaA__AGY14477

SEQ ID NO: 10589 - protein, 566 aa, synthetic construct
  REGION 1..566: note = hemagglutinin__InfluenzaA__AHC57459
MKTIIALSYILCLVFAQKLPGNDNSTATLCLGHHAVPNGTIVKTITNDQIEVTNATELVQSSSTGEICNSPHQILDGENCTLIDALLGDPQCDGFQNKKWDLFVERSKAHSNCYPYDVPDYASLRSLVASSGTLEFNNESFNWTGVTQNGTSSACIRRSNNSFFSRLNWLTHLNFKYPALNVTMPNNEQFDKLYIWGVHHPGTDKDQIFLYAQAAGRITVSTKRSQQAVIPNIGSRPRIRNIPSRVSIYWTIVKPGDILLINSTGNLIAPRGYFKIRSGKSSIMRSDAPIGKCNSACITPNGSIPNDKPFQNVNRITYGACPRYVKQNTLKLATGMRNVPEKQTRGIFGAIAGFIENGWEGMVDGWYGFRHQNSEGRGQAADLKSTQAAIDQINGKLNRLIGKTNEKFHQIEKEFSEVEGRIQDLEKYVEDTKIDLWSYNAELLVALENQHTIDLTDSEMNKLFEKTKKQLRENAEDMGNGCFKIYHKCDNACIGSIRNGTYDHDVYRDEALNNRFQIKGVELKSGYKDWILWISFAISCFLLCVALLGFIMWACQKGNIRCNICI

SEQ ID NO: 10590 - protein, 566 aa, synthetic construct; identical to SEQ ID NO: 6982
  REGION 1..566: note = hemagglutinin__InfluenzaA__AHC57465

SEQ ID NO: 10591 - protein, 566 aa, synthetic construct; identical to SEQ ID NO: 6855
  REGION 1..566: note = hemagglutinin__InfluenzaA__AHC57487

SEQ ID NO: 10592 - protein, 566 aa, synthetic construct; identical to SEQ ID NO: 7782
  REGION 1..566: note = hemagglutinin__InfluenzaA__AHC57499

SEQ ID NO: 10593 - protein, 566 aa, synthetic construct; identical to SEQ ID NO: 7782
  REGION 1..566: note = hemagglutinin__InfluenzaA__AHC57511

SEQ ID NO: 10594 - protein, 566 aa, synthetic construct; identical to SEQ ID NO: 7782
  REGION 1..566: note = hemagglutinin__InfluenzaA__AHC57523

SEQ ID NO: 10595 - protein, 566 aa, synthetic construct; identical to SEQ ID NO: 6982
  REGION 1..566: note = hemagglutinin__InfluenzaA__AHC57675

SEQ ID NO: 10596 - protein, 566 aa, synthetic construct; identical to SEQ ID NO: 6982
  REGION 1..566: note = hemagglutinin__InfluenzaA__AHC57827

SEQ ID NO: 10597 - protein, 566 aa, synthetic construct; identical to SEQ ID NO: 6855
  REGION 1..566: note = hemagglutinin__InfluenzaA__AHC57956

SEQ ID NO: 10598 - protein, 566 aa, synthetic construct
  REGION 1..566: note = hemagglutinin__InfluenzaA__AHC57981
MKTIIALSYILCLVFAQKIPGNDNSTATLCLGHHAVPNGTIVKTITNDQIEVTNATELVQNSSTGEICDSPHQILDGENCTLIDALLGDPQCDGFQNKKWDLFVERSKAYSNCYPYDVPDYASLRSLIASSGTLEFNNESFNWTGVTQNGTSSACIRRSNNSFFSRLNWLTHLNFKYPALNVTMPNNEQFDKLYIWGVHHPGTDKDQIFLYAQASGRITVSTKRSQQAVIPNIGSRPRVRNIPSRISIYWTIVKPGDILLINSTGNLIAPRGYFKIRSGKSSIMRSDAPIGKCNSECITPNGSIPNDKPFQNVNRITYGACPRYVKQNTLKLATGMRNVPEKQTRGIFGAIAGFIENGWEGMVDGWYGFRHQNSEGRGQAADLKSTQAAIDQINGNLNRLIGKTNEKFHQIEKEFSEVEGRIQDLEKYVEDTKIDLWSYNAELLVALENQHTIDLTDSEMNKLFEKTKKQLRENAEDMGNGCFKIYHKCDNACIGSIRNGTYDHDVYRDEALNNRFQIKGVELKSGYKDWILWISFAISCFLLCVALLGFIMWACQKGNIRCNICI

SEQ ID NO: 10599 - protein, 566 aa, synthetic construct; identical to SEQ ID NO: 7782
  REGION 1..566: note = hemagglutinin__InfluenzaA__AHC57993

SEQ ID NO: 10600 - protein, 566 aa, synthetic construct; identical to SEQ ID NO: 9074
  REGION 1..566: note = hemagglutinin__InfluenzaA__AHC58005

SEQ ID NO: 10601 - protein, 566 aa, synthetic construct
  REGION 1..566: note = hemagglutinin__InfluenzaA__AHC58017
MKTIIALSYILCLVFAQKLPGNDNSTATLCLGHHAVPNGTIVKTITNDQIEVTNATELVQSSSTGEICNSPHQILDGENCTLIDALLGDPQCDGFQNKKWDLFVERSKAHSNCYPYDVPDYASLRSLVASSGTLEFNNESFNWTGVTQNGTSSACIRRSNNSFFSRLNWLTHLNFKYPALNVTMPNNEQFDKLYIWGVHHPGTDKDQIFLYAQAAGRITVSTKRSQQAVIPNIGSRPRVRNIPSRVSIYWTIVKPGDILLINSTGNLIAPRGYFKIRSGKSSIMRSDAPIGKCNSACITPNGSIPNDKPFQNVNRITYGACPRYVKQNTLKLATGMRNVPEKQTRGIFGAIAGFIENGWEGMVDGWYGFRHQNSEGRGQAADLKSTQAAIDQINGKLNRLIGKTNEKFHQIEKEFSEVEGRIQDLEKYVEDTKIDLWSYNAELLVALENQHTIDLTDSEMNKLFEKTKKQLRENAEDMGNGCFKIYHKCDNACIVSIRNGTYDHDVYRDEALNNRFQIKGVELKSGYKDWILWISFAISCFLLCVALLGFIMWACQKGNIRCNICI

SEQ ID NO: 10602 - protein, 566 aa, synthetic construct
  REGION 1..566: note = hemagglutinin__InfluenzaA__AHC58029
MKTIIALSYILCLVFAQKLPGNDNSTATLCLGHHAVPNGTIVKTITNDQIEVTNATELVQSSSTGEICNSPHQILDGENCTLIDALLGDPQCDGFQNKKWDLFVERSKAHSNCYPYDVPDYASLRSLVASSGTLEFNNESFNWTGVTQNGTSSACIRGSNNSFFSRLNWLTQLNFKYPALNVTMPNNEQFDKLYIWGVHHPGTDKDQIFLYAQASGRITVSTKRSQQAVIPNIGSRPRVRNIPSRVSIYWTIVKPGDILLINSTGNLIAPRGYFKIRSGKSSIMRSDAPIGKCNSACITPNGSIPNDKPFQNVNRITYGACPRYVKQNTLKLATGMRNVPEKQTRGIFGAIAGFIENGWEGMVDGWYGFRHQNSEGRGQAADLKSTQAAIDQINGKLNRLIGKTNEKFHQIEKEFSEVEGRIQDLEKYVEDTKIDLWSYNAELLVALENQHTIDLTDSEMNKLFEKTKKQLRENAEDMGNGCFKIYHKCDNACIGSIRNGTYDHDVYRDEALNNRFQIKGVELKSGYKDWILWISFAISCFLLCVALLGFIMWACQKGNIRCNICI

SEQ ID NO: 10603 - protein, 566 aa, synthetic construct
  REGION 1..566: note = hemagglutinin__InfluenzaA__AHC58050
MKTIIALSYILCLVFAQKLPGNDNSTATLCLGHHAVPNGTIVKTITNDQIEVTNATELVQSSSTGEICDSPHQILDGENCTLIDALLGDPQCDGFQNKKWDLFVERSKAYSNCYPYDVPDYASLRSLVASSGTLEFNNESFNWTGVTQNGTSSACIRRSNSSFFSRLNWLTHLNFKYPALNVTMPNNEQFDKLYIWGVHHPGTDKDQIFLYAQSSGRITVSTRRSQQAVIPNIGSRPRIRNIPSRISIYWTIVKPGDILLINSTGNLIAPRGYFKIRSGKSSIMRSDAPIGKCNSECITPNGSIPNDKPFQNVNRITYGACPRYVKQSTLKLATGMRNVPEKQTRGIFGAIAGFIENGWEGMVDGWYGFRHQNSEGRGQAADLKSTQAAIDQINGKLNRLIGKTNEKFHQIEKEFSEVEGRIQDLEKYVEDTKIDLWSYNAELLVALENQHTIDLTDSEMNKLFEKTKKQLRENAEDMGNGCFKIYHKCDNACIGSIRNGTYNHDVYRDEALNNRFQIKGVELKSGYKDWILWISFAISCFLLCVALLGFIMWACQKGNIRCNICI

SEQ ID NO: 10604 - protein, 566 aa, synthetic construct; identical to SEQ ID NO: 7782
  REGION 1..566: note = hemagglutinin__InfluenzaA__AHC58074

SEQ ID NO: 10605 - protein, 566 aa, synthetic construct; identical to SEQ ID NO: 7782
  REGION 1..566: note = hemagglutinin__InfluenzaA__AHC58098

SEQ ID NO: 10606 - protein, 566 aa, synthetic construct; identical to SEQ ID NO: 7782
  REGION 1..566: note = hemagglutinin__InfluenzaA__AHC58110

SEQ ID NO: 10607 - protein, 566 aa, synthetic construct; identical to SEQ ID NO: 7782
  REGION 1..566: note = hemagglutinin__InfluenzaA__AHC58126

SEQ ID NO: 10608 - protein, 566 aa, synthetic construct; identical to SEQ ID NO: 7782
  REGION 1..566: note = hemagglutinin__InfluenzaA__AHC58138

SEQ ID NO: 10609 - protein, 566 aa, synthetic construct; identical to SEQ ID NO: 7782
  REGION 1..566: note = hemagglutinin__InfluenzaA__AHC58162

SEQ ID NO: 10610 - protein, 566 aa, synthetic construct; identical to SEQ ID NO: 9074
  REGION 1..566: note = hemagglutinin__InfluenzaA__AHC58186

SEQ ID NO: 10611 - protein, 566 aa, synthetic construct
  REGION 1..566: note = hemagglutinin__InfluenzaA__AHC58198
MKTIIALSYILCLVFAQKLPGNDNSTATLCLGHHAVPNGTIVKTITNDQIEVTNATELVQNSSTGEICDSPHQILDGENCTLIDALLGDPQCDGFQNKKWDLFVERSKAYSNCYPYDVPDYASLRSLVASSGTLEFNNESFNWTGVTQNGTSSACIRRSNNSFFSRLNWLTHLNFKYPALNVTMPNNEQFDKLYIWGVHHPGTDKDQIFLYAQASGRITVSTKRSQQAVIPNIGSRPRVRNIPSRISIYWTIVKPGDILLINSTGNLIAPRGYFKIRSGKSSIMRSDAPIGKCNSECITPNGSIPNDKPFQNVNRITYGACPRYVKQNTLKLATGMRNVPEKQTRGIFGAIAGFIENGWEGMVDGWYGFRHQNSEGRGQAADLKSTQAAIDQINGKLNRLIGKTNEKFHQIEKEFSEVEGRIQNLEKYVEDTKIDLWSYNAELLVALENQHTIDLTDSEMNKLFEKTKKQLRENAEDMGNGCFKIYHKCDNACIGSIRNGTYDHDVYRDEALNNRFQIKGVELKSGYKDWILWISFAISCFLLCVALLGFIMWDCQKGNIRCNICI

SEQ ID NO: 10612 - protein, 566 aa, synthetic construct
  REGION 1..566: note = hemagglutinin__InfluenzaA__AHC58210
MKTIIALSYILCLVFAQKLPGNDNSTATLCLGHHAVPNGTIVKTITNDQIEVTNATELVQNSSTGEICDSPHQILDGENCTLIDALLGDPQCDGFQNKKWDLFVERSKAYSNCYPYDVPDYASLRSLVASSGTLEFNNESFNWAGVTQNGTSSACIRRSNNSFFSRLNWLTHLNFKYPALNVTMPNNEQFDKLYIWGVHHPGTDKDQIFLYAQASGRITVSTKRSQQAVIPNIGSRPRVRNIPSRISIYWTIVKPGDILLINSTGNLIAPRGYFKIRSGKSSIMRSDAPIGKCNSECITPNGSIPNDKPFQNVNRITYGACPRYVKQNTLKLATGMRNVPEKQTRGIFGAIAGFIENGWEGMVDGWYGFRHQNSEGRGQAADLKSTQAAIDQINGKLNRLIGKTNEKFHQIEKEFSEVEGRIQDLEKYVEDTKIDLWSYNAELLVALENQHTIDLTDSEMNKLFEKTKKQLRENAEDMGNGCFKIYHKCDNACIGSIRNGTYDHDVYRDEALNNRFQIKGVELKSGYKDWILWISFAISCFLLCVALLGFIMWACQKGNIRCNICI

SEQ ID NO: 10613 - protein, 566 aa, synthetic construct; identical to SEQ ID NO: 6982
  REGION 1..566: note = hemagglutinin__InfluenzaA__AHC58234

SEQ ID NO: 10614 - protein, 566 aa, synthetic construct; identical to SEQ ID NO: 7782
  REGION 1..566: note = hemagglutinin__InfluenzaA__AHC58246

SEQ ID NO: 10615 - protein, 566 aa, synthetic construct; identical to SEQ ID NO: 6982
  REGION 1..566: note = hemagglutinin__InfluenzaA__AHC58258

SEQ ID NO: 10616 - protein, 566 aa, synthetic construct; identical to SEQ ID NO: 6855
  REGION 1..566: note = hemagglutinin__InfluenzaA__AHC58270

SEQ ID NO: 10617 - protein, 566 aa, synthetic construct
  REGION 1..566: note = hemagglutinin__InfluenzaA__AHC58372
MKTIIALSYILCLVFAQKLPGNDNSTATLCLGHHAVPNGTIVKTITNDQIEVTNATELVQSSSTGEICDSPHQILDGENCTLIDALLGDPQCDGFQNKKWDLFVERSKAYSNCYPYDVPDYASLRSLVASSGTLEFNNESFNWTGVTQNGTSSACIRRSNSSFFSRLNWLTHLNFKYPALNVTMPNNEQFDKLYIWGVHHPGTDKDQIFLYAQSSGRITVSTKRSQQAVTPNIGSRPRIRNIPSRISIYWTIVKPGDILLINSTGNLIAPRGYFKIRSGKSSIMRSDAPIGKCNSECITPNGSIPNDKPFQNVNRITYGACPRYVKQSTLKLATGMRNVPEKQTRGIFGAIAGFIENGWEGMVDGWYGFRHQNSEGRGQAADLKSTQAAIDQINGKLNRLIGKTNEKFHQIEKEFSEVEGRIQDLEKYVEDTKIDLWSYNAELLVALENQHTIDLTDSEMNKLFEKTKKQLRENAEDMGNGCFKIYHKCDNACIGSIRNGTYNHDVYRDEALNNRFQIKGVELKSGYKDWILWISFAISCFLLCVALLGFIMWACQKGNIRCNICI

SEQ ID NO: 10618 - protein, 566 aa, synthetic construct
  REGION 1..566: note = hemagglutinin__InfluenzaA__AHC58396
MKTIIALSYILCLVFAQKLPGNDNSTATLCLGHHAVPNGTIVKTITNDQIEVTNATELVQSSSTGEICNSPHQILDGENCTLIDALLGDPQCDGFQNKKWDLFVERSKAHSNCYPYDVPDYASLRSLVASSGTLEFNNESFNWTGVTQNGTSSACIRGSNNSFFSRLNWLTHLNFKYPALNVTMPNNEQFDKLYIWGVHHPGTDKDQIFLYAQASGRITVSTKRSQQAVIPNIGSRPRVRNIPSRVSIYWTIVKPGDILLINSTGNLIAPRGYFKIRSGKSSIMRSDAPIGKCNSACITPNGSIPNDKPFQNVNRITYGACPRYVKQNTLKLATGMRNVPEKQTRGIFGAIAGFIENGWEGMVDGWYGFRHQNSEGRGQAADLKSTQAAIDQINGKLNRLIGKTNEKFHQIEKEFSEVEGRIQDLEKYVEDTKIDLWSYNAELLVALENQHTIDLTDSEMNKLFEKTKKQLRENAEDMGNGCFKIYHKCDNACIGSIRNGTYDHDVYRDEALNNRFQIKGVELKSGYKDWILWISFAISCFLLCVALLGFIMWACQKGNIRCNICI

SEQ ID NO: 10619 - protein, 566 aa, synthetic construct; identical to SEQ ID NO: 7782
  REGION 1..566: note = hemagglutinin__InfluenzaA__AHC58408

SEQ ID NO: 10620 - protein, 566 aa, synthetic construct; identical to SEQ ID NO: 9074
  REGION 1..566: note = hemagglutinin__InfluenzaA__AHC58420

SEQ ID NO: 10621 - protein, 566 aa, synthetic construct; identical to SEQ ID NO: 9074
  REGION 1..566: note = hemagglutinin__InfluenzaA__AHC58432

SEQ ID NO: 10622 - protein, 566 aa, synthetic construct; identical to SEQ ID NO: 6982
  REGION 1..566: note = hemagglutinin__InfluenzaA__AHC58444

SEQ ID NO: 10623 - protein, 566 aa, synthetic construct; identical to SEQ ID NO: 10618
  REGION 1..566: note = hemagglutinin__InfluenzaA__AHC58456

SEQ ID NO: 10624 - protein, 566 aa, synthetic construct
  REGION 1..566: note = hemagglutinin__InfluenzaA__AHC58468
MKAILVVLLYTFATANADTLCIGYHANNSTDTVDTVLEKNVTVTHSVNLLEDKHNGKLCKLRGVAPLHLGKCNIAGWILGNPECESLSTASSWSYIVETSSSDNGTCYPGDFINYEELREQLSSVSSFERFEIFPKTSSWPNHDSNKGVTAACPQAGAKSFYKNLIWLVKKGNSYPKLSKSYINDKGKEVLVLWGIHHPSTSADQQSLYQNADAYVFVGTSKYSKKFKPEIAVRPKVRDQEGRMNYYWTLVEPGDKITFEATGNLLVPRYAFAMERNAGSGIIISDTPVHDCNTTCQTPKGAINTSLPFQNIHPITIGKCPKYVKSTKLRLATGLRNVPSIQSRGLFGAIAGFIEGGWTGMVDGWYGYHHQNAQGSGYAADLKSTQNAIDKITNKVNSVIEKMNTQFTAVGKEFNHLERRIENLNKKVDDGFLDIWTYNAELLVLLENERTLDYHDSNVKNLYEKVRSQLKNNAKEIGNGCFEFYHKCDNTCMESVKNGTYDYPKYSEEAKLNREEIDGVKLESTRIYQILAIYSTVASSLVLVVSLGAISFWMCSNGSLQCRICI

SEQ ID NO: 10625 - protein, 566 aa, synthetic construct
  REGION 1..566: note = hemagglutinin__InfluenzaA__AHC58479
MKTIIALSYILCLVFAQKLPGNDNSTATLCLGHHAVPNGTIVKTITNDQIEVTNATELVQNSSTGEICDSPHQIIDGENCTLIDALLGDPQCDGFQNKKWDLFVERSKAYSNCYPYDVPDYASLRSLVASSGTLEFNNESFNWTGVTQNGTSSACIRRSNNSFFSRLNWLTHLNFKYPALNVTMPNNEQFDKLYIWGVHHPGTDKDQIFLYAQASGRITVSTKRSQQAVIPNIGSRPRVRNIPSRISIYWTIVKPGDILLINSTGNLIAPRGYFKIRSGKSSIMRSDAPIGKCNSECITPNGSIPNDKPFQNVNRITYGACPRYVKQNTLKLATGMRNVPEKQTRGIFGAIAGFIENGWEGMVDGWYGFRHQNSEGRGQAADLKSTQAAINQINGKLNRLIGKTNEKFHQIEKEFSEVEGRIQDLEKYVEDTKIDLWSYNAELLVALENQHTIDLTDSEMNKLFEKTKKQLRENAEDMGNGCFKIYHKCDNACIGSIRNGTYDHDVYRDEALNNRFKIKGVELKSGYKDWILWISFAISCFLLCVALLGFIMWACQKGNIRCNICI

SEQ ID NO: 10626 - protein, 566 aa, synthetic construct; identical to SEQ ID NO: 10618
  REGION 1..566: note = hemagglutinin__InfluenzaA__AHC58491

SEQ ID NO: 10627 - protein, 566 aa, synthetic construct; identical to SEQ ID NO: 6982
  REGION 1..566: note = hemagglutinin__InfluenzaA__AHC58515

SEQ ID NO: 10628 - protein, 566 aa, synthetic construct; identical to SEQ ID NO: 7782
  REGION 1..566: note = hemagglutinin__InfluenzaA__AHC58527

SEQ ID NO: 10629 - protein, 566 aa, synthetic construct
  REGION 1..566: note = hemagglutinin__InfluenzaA__AHC58563
MKTIIALSYILCLVFAQKLPGNDNSTATLCLGHHAVPNGTIVKTITNDQIEVTNATELVQNSSTGEICDSPHQIIDGENCTLIDALLGDPQCDGFQNKKWDLFVERSKAYSNCYPYDVPDYASLRSLVASSGTLEFNNESFNWTGVTQNGTSSACIRRSNNSFFSRLNWLTHLNFKYPALNVTMPNNEQFDKLYIWGVHHPGTDKDQIFLYAQASGRITVSTKRSQQAVIPNIGSRPRVRNIPSRISIYWTIVKPGDILLINSTGNLIAPRGYFKIRSGKSSIMRSDAPIGKCNSECITPNGSIPNDKPFQNVNRITYGACPRYVKQNTLKLATGMRNVPEKQTRGIFGAIAGFIENGWEGMVDGWYGFRHQNSEGRGQAADLKSTQAAIDQINGKLNRLIGKTNEKFHQIEKEFSEVEGRIQDLEKYVEDTKIDLWSYNAELLVALENQHTIDLTDSEMNKLFEKTKKQLRENAEDMGNGCFKIYHKCDNACIGSIRNGTYDHDVYRDEALNNRFQIKGVELKSGYKDWILWISFAISCFLLCVALLGFIMWACQKGNIRCNICI

SEQ ID NO: 10630 - protein, 566 aa, synthetic construct; identical to SEQ ID NO: 7782
  REGION 1..566: note = hemagglutinin__InfluenzaA__AHC58575

SEQ ID NO: 10631 - protein, 566 aa, synthetic construct; identical to SEQ ID NO: 6855
  REGION 1..566: note = hemagglutinin__InfluenzaA__AHC58587

SEQ ID NO: 10632 - protein, 566 aa, synthetic construct; identical to SEQ ID NO: 6982
  REGION 1..566: note = hemagglutinin__InfluenzaA__AHC58599

SEQ ID NO: 10633 - protein, 566 aa, synthetic construct; identical to SEQ ID NO: 7782
  REGION 1..566: note = hemagglutinin__InfluenzaA__AHC58611

SEQ ID NO: 10634 - protein, 566 aa, synthetic construct; identical to SEQ ID NO: 7782
  REGION 1..566: note = hemagglutinin__InfluenzaA__AHC58623

SEQ ID NO: 10635 - protein, 566 aa, synthetic construct; identical to SEQ ID NO: 7782
  REGION 1..566: note = hemagglutinin__InfluenzaA__AHC58647

SEQ ID NO: 10636 - protein, 566 aa, synthetic construct; identical to SEQ ID NO: 6982
  REGION 1..566: note = hemagglutinin__InfluenzaA__AHC58659

SEQ ID NO: 10637 - protein, 566 aa, synthetic construct; identical to SEQ ID NO: 6855
  REGION 1..566: note = hemagglutinin__InfluenzaA__AHC58671

SEQ ID NO: 10638 - protein, 566 aa, synthetic construct; identical to SEQ ID NO: 9074
  REGION 1..566: note = hemagglutinin__InfluenzaA__AHC58683

SEQ ID NO: 10639 - protein, 566 aa, synthetic construct; identical to SEQ ID NO: 6855
  REGION 1..566: note = hemagglutinin__InfluenzaA__AHC58695

SEQ ID NO: 10640 - protein, 566 aa, synthetic construct; identical to SEQ ID NO: 9074
  REGION 1..566: note = hemagglutinin__InfluenzaA__AHC58707

SEQ ID NO: 10641 - protein, 566 aa, synthetic construct; identical to SEQ ID NO: 9074
  REGION 1..566: note = hemagglutinin__InfluenzaA__AHC58719

SEQ ID NO: 10642 - protein, 566 aa, synthetic construct; identical to SEQ ID NO: 10618
  REGION 1..566: note = hemagglutinin__InfluenzaA__AHC58731

SEQ ID NO: 10643 - protein, 566 aa, synthetic construct
  REGION 1..566: note = hemagglutinin__InfluenzaA__AHC58743
MKTIIAWSYILCLVFAQKLPGNDNSTATLCLGHHAVPNGTIVKTITNDQIEVTNATELVQNSSTGEICDSPHQILDGENCTLIDALLGDPQCDGFQNKKWDLFVERSKAYSNCYPYDVPDYASLRSLVASSGTLEFNNESFNWTGVTQNGTSSACIRRSNNSFFSRLNWLTHLNFKYPALNVTMPNNEQFDKLYIWGVHHPGTDKDQIFLYAQASGRITVSTKRSQQAVIPNIGSRPRVRNIPSRISIYWTIVKPGDILLINSTGNLIAPRGYFKIRSGKSSIMRSDAPIGKCNSECITPNGSIPNDKPFQNVNRITYGACPRYVKQNTLKLATGMRNVPEKQTRGIFGAIAGFIENGWEGMVDGWYGFRHQNSEGRGQAADLKSTQAAIDQINGKLNRLIGKTNEKFHQIEKEFSEVEGRIQDLEKYVEDTKIDLWSYNAELLVALENQHTIDLTDSEMNKLFEKTKKQLRENAEDMGNGCFKIYHKCDNACIGSIRNGTYDHDVYRDEALNNRFQIKGVELKSGYKDWILWISFAISCFLLCVALLGFIMWACQKGNIRCNICI

SEQ ID NO: 10644 - protein, 566 aa, synthetic construct; identical to SEQ ID NO: 10618
  REGION 1..566: note = hemagglutinin__InfluenzaA__AHC58755

SEQ ID NO: 10645 - protein, 566 aa, synthetic construct; identical to SEQ ID NO: 6855
  REGION 1..566: note = hemagglutinin__InfluenzaA__AHC58779

SEQ ID NO: 10646 - protein, 566 aa, synthetic construct; identical to SEQ ID NO: 10617
  REGION 1..566: note = hemagglutinin__InfluenzaA__AHC58791

SEQ ID NO: 10647 - protein, 566 aa, synthetic construct
  REGION 1..566: note = hemagglutinin__InfluenzaA__AHC58803
MKTIIALSYILCLVFAQKLPGNDNSTATLCLGHHAVPNGTIVKTITNDQIEVTNATELVQNSSTGEICDSPHQIIDGENCTLIDALLGDPQCDGFQNKKWDLFVERSKAYSNCYPYDVPDYASLRSLVASSGTLEFNNESFNWTGVTQNGTSSACIRRSNNSFFSRLNWLTHLNFKYPALNVTMPNNEQFDKLYIWGVHHPGTDKDQIFLYAQASGRITVSTKRSQQAVIPNIGSRPRVRNIPSRISIYWTIVKPGDILLINSTGNLIAPRGYFKIRSGKSSIMKSDAPIGKCNSECITPNGSIPNDKPFQNVNRITYGACPRYVKQNTLKLATGMRNVPEKQTRGIFGAIAGFIENGWEGMVDGWYGFRHQNSEGRGQAADLKSTQAAIDQINGKLNRLIGKTNEKFHQIEKEFSEVEGRIQDLEKYVEDTKIDLWSYNAELLVALENQHTIDLTDSEMNKLFEKTKKQLRENAEDMGNGCFKIYHKCDNACIGSIRNGTYDHDVYRDEALNNRFKIKGVELKSGYKDWILWISFAISCFLLCVALLGFIMWACQKGNIRCNICI

SEQ ID NO: 10648 - protein, 566 aa, synthetic construct
  REGION 1..566: note = hemagglutinin__InfluenzaA__AHC58815
MKTIIALSYILCLVFAQKLPGNDNSTATLCLGHHAVPNGTIVKTITNDQIEVTNATELVQSSSTGEICNSPHQILDGGNCTLIDALLGDPQCDGFQNKKWDLFVERSKAYSNCYPYDVPDYASLRSLVASSGTLEFNNESFNWTGVTQNGTSSACIRRSNNSFFSRLNWLTHLNFKYPALNVTMPNNEQFDKLYIWGVHHPGTDKDQIFLYAQASGRITVSTKRSQQAVIPNIGSRPRVRNIPSRISIYWTIVKPGDILLINSTGNLIAPRGYFKIRSGKSSIMRSDAPIGKCNSECITPNGSIPNDKPFQNVNRITYGACPRYVKQNTLKLATGMRNVPEKQTRGIFGAIAGFIENGWEGMVDGWYGFRHQNSEGRGQAADLKSTQAAIDQINGKLNRLIGKTNEKFHQIEKEFSEVEGRIQDLEKYVEDTKIDLWSYNAELLVALENQHTIDLTDSEMNKLFEKTKKQLRENAEDMGNGCFKIYHKCDNACIGSIRNGTYDHNVYRDEALNNRFQIKGVELKSGYKDWILWISFAISCFLLCVALLGFIMWACQKGNIRCNICI

SEQ ID NO: 10649 - protein, 566 aa, synthetic construct; identical to SEQ ID NO: 6855
  REGION 1..566: note = hemagglutinin__InfluenzaA__AHC58827

SEQ ID NO: 10650 - protein, 566 aa, synthetic construct; identical to SEQ ID NO: 7782
  REGION 1..566: note = hemagglutinin__InfluenzaA__AHC58839

SEQ ID NO: 10651 - protein, 566 aa, synthetic construct
  REGION 1..566: note = hemagglutinin__InfluenzaA__AHC58863
MKTIIALSYILCLVFAQKLPGNDNSTATLCLGHHAVSNGTIVKTITNDQIEVTNATELVQSSSTGEICNSPHQILDGENCTLIDALLGDPQCDGFQNKKWDLFVERSKAHSNCYPYDVPDYASLRSLVASSGTLEFNNESFNWTGVTQNGTSSACIRGSNNSFFSRLNWLTHLNFKYPALNVTMPNNEQFDKLYIWGVHHPGTDKDQIFLYAQASGRITVSTKRSQQAVIPNIGSRPRVRNIPSRVSIYWTIVKPGDILLINSTGNLIAPRGYFKIRSGKSSIMRSDAPIGKCNSACITPNGSIPNDKPFQNVNRITYGACPRYVKQNTLKLATGMRNVPEKQTRGIFGAIAGFIENGWEGMMDGWYGFRHQNSEGRGQAADLKSTQAAIDQINGKLNRLIGKTNEKFHQIEKEFSEVEGRIQDLEKYVEDTKIDLWSYNAELLVALENQHTIDLTDSEMNKLFEKTKKQLRENAEDMGNGCFKIYHKCDNACIGSIRNGTYDHDVYRDEALNNRFQIKGVELKSGYKDWILWISFAISCFLLCVALLGFIMWACQKGNIRCNICI

SEQ ID NO: 10652 - protein, 566 aa, synthetic construct; identical to SEQ ID NO: 6855
  REGION 1..566: note = hemagglutinin__InfluenzaA__AHC58875

SEQ ID NO: 10653 - protein, 566 aa, synthetic construct; identical to SEQ ID NO: 7782
  REGION 1..566: note = hemagglutinin__InfluenzaA__AHC58887

SEQ ID NO: 10654 - protein, 566 aa, synthetic construct; identical to SEQ ID NO: 10618
  REGION 1..566: note = hemagglutinin__InfluenzaA__AHC58899

SEQ ID NO: 10655 - protein, 566 aa, synthetic construct; identical to SEQ ID NO: 7782
  REGION 1..566: note = hemagglutinin__InfluenzaA__AHC58981

SEQ ID NO: 10656 - protein, 566 aa, synthetic construct; identical to SEQ ID NO: 7782
  REGION 1..566: note = hemagglutinin__InfluenzaA__AHC58993

SEQ ID NO: 10657 - protein, 566 aa, synthetic construct; identical to SEQ ID NO: 7782
  REGION 1..566: note = hemagglutinin__InfluenzaA__AHC59005

SEQ ID NO: 10658 - protein, 566 aa, synthetic construct
  REGION 1..566: note = hemagglutinin__InfluenzaA__AHC59017
MKTIIALSYILCLVFAQKLPGNDNSTATLCLGHHAVPNGTIVKTITNDQIEVTNATELVQSSSTGEICNSPHQILDGENCTLIDALLGDPQCDGFQNKKWDLFVERSKAHSNCYPYDVPDYASLRSLVASSGTLEFNNESFNWTGVTQNGTSSACIRGSNNSFFSRLNWLTHLNFKYPALNVTMPNNEQFDKLYIWGVHHPGTDKDQIFLYAQASGRITVSTKRSQQAVIPNIGSRPRVRNIPSRVSIYWTIVKPGDILLINSTGNLIAPRGYFKIRSGKSSIMRSDAPIGKCNSACITPNGSIPNDKPFQNVNRITYGACPRYVKQNTLKLATGMRNVPEKQTRGIFGAIAGFIENGWEGMVDGWYGFRHQNSEGRGQAADLKSTQAAIDQINGKLNRLIGKTNEKFHQIEKEFSEVEGRIQDLEKYVEDTKIDLWSYNAELLVALENQHTIDLTDSEMSKLFEKTKKQLRENAEDMGNGCFKIYHKCDNACIGSIRNGTYDHDVYRDEALNNRFQIKGVELKSGYKDWILWISFAISCFLLCVALLGFIMWACQKGNIRCNICI

SEQ ID NO: 10659 - protein, 566 aa, synthetic construct; identical to SEQ ID NO: 10618
  REGION 1..566: note = hemagglutinin__InfluenzaA__AHC59029

SEQ ID NO: 10660 - protein, 566 aa, synthetic construct; identical to SEQ ID NO: 6982
  REGION 1..566: note = hemagglutinin__InfluenzaA__AHC59041

SEQ ID NO: 10661 - protein, 566 aa, synthetic construct
  REGION 1..566: note = hemagglutinin__InfluenzaA__AHC59053
MKTIIALSYILCLVFAQKLPGNDNSTATLCLGHHAVPNGTIVKTITNDQIEVTNATELVQSSSTGEICNSPHQILDGENCTLIDALLGDPQCDGFQNKKWDLFVERSKAHSNCYPYDVPDYASLRSLVASSGTLEFNNESFNWTGVTQNGTSSACIRRSNNSFFSRLNWLTHLNFKYPALNVTMPNNEQFDKLYIWGVHHPGTDKDQIFLYAQAAGRITVSTKRSQQAVIPNIGSRPRVRNIPSRVSIYWTIVKPGDILLINSTGNLIAPRGYFKIQSGKSSIMRSDAPIGKCNSACITPNGSIPNDKPFQNVNRITYGACPRYVKQNTLKLATGMRNVPEKQTRGIFGAIAGFIENGWEGMVDGWYGFRHQNSEGRGQAADLKSTQAAIDQINGKLNRLIGKTNEKFHQIEKEFSEVEGRIQDLEKYVEDTKIDLWSYNAELLVALENQHTIDLTDSEMNKLFEKTKKQLRENAEDMGNGCFKIYHKCDNACIGSIRNGTYDHDVYRDEALNNRFQIKGVELKSGYKDWILWISFAISCFLLCVALLGFIMWTCQKGNIRCNICI

SEQ ID NO: 10662 - protein, 566 aa, synthetic construct
  REGION 1..566: note = hemagglutinin__InfluenzaA__AHC59077
MKTIIALSYILCLVFAQKLPGNDNSTATLCLGHHAVPNGTIVKTITNDQIEVTNATELVQNSSTGEICDSPHQILDGENCTLIDALLGDPQCDGFQNKKWDLFVERSKAYSNCYPYDVPDYASLRSLVASSGTLEFNNESFNWTGVTQNGTSSACIRRSNNSFFSRLNWLTHLNFKYPALNVTMPNNEQFDKLYIWGVHHPGTDKDQIFLYAQASGRITVSTKRSQQAVIPNIGSRPRVRNIPSRISIYWTIVKPGDILLINSTGNLIAPRGYFKIRSGKSSIMRSDAPIGKCNSECITPNGSIPNDKPFQNVNRITYGACPRYVKQNTLKLATGMRNVPEKQTRGIFGAIAGFIENGWEGMVDGWYGFRHQNSEGRGQAADLKSTQAAIDQINGKLNRLIGKTNEKFHQIEKEFSEVEGRIQDLEKYVEDTKIDLWSYNAELLVALENQHTIDLTDSEMNKLFEKTKKQLRENAEDMGNGCFKIYHKCDNACIGSIRNGTYDHDVYRDEALNNRFQIKGVELKSGYKDWILWISFAISCFLLCVVLLGFIMWACQKGNIRCNICI

SEQ ID NO: 10663 - protein, 566 aa, synthetic construct; identical to SEQ ID NO: 9074
  REGION 1..566: note = hemagglutinin__InfluenzaA__AHC59089

SEQ ID NO: 10664 - protein, 566 aa, synthetic construct; identical to SEQ ID NO: 7782
  REGION 1..566: note = hemagglutinin__InfluenzaA__AHC59101

SEQ ID NO: 10665 - protein, 566 aa, synthetic construct; identical to SEQ ID NO: 6982
  REGION 1..566: note = hemagglutinin__InfluenzaA__AHC59113

SEQ ID NO: 10666 - protein, 566 aa, synthetic construct; identical to SEQ ID NO: 7782
  REGION 1..566: note = hemagglutinin__InfluenzaA__AHC59125

SEQ ID NO: 10667 - protein, 566 aa, synthetic construct
  REGION 1..566: note = hemagglutinin__InfluenzaA__AHC59137
MKTIIALSYILCLVFAQKIPGNDNSTATLCLGHHAVSNGTIVKTITNDQIEVTNATELVQSSSTGEICNSPHQILDGENCTLIDALLGDPQCDGFQNKKWDLFVERSKAHSNCYPYDVPDYASLRSLVASSGTLEFNNESFNWTGVTQNGTSSACIRGSNNSFFSRLNWLTHLNFKYPALNVTMPNNEQFDKLYIWGVHHPGTDKDQIFLYAQASGRITVSTKRSQQAVIPNIGSRPRVRNIPSRVSIYWTIVKPGDILLINSTGNLIAPRGYFKIRSGKSSIMRSDAPIGKCNSACITPNGSIPNDKPFQNVNRITYGACPRYVKQNTLKLATGMRNVPEKQTRGIFGAIAGFIENGWEGMMDGWYGFRHQNSEGRGQAADLKSTQAAIDQINGKLNRLIGKTNEKFHQIEKEFSEVEGRIQDLEKYVEDTKIDLWSYNAELLVALENQHTIDLTDSEMNKLFEKTKKQLRENAEDMGNGCFKIYHKCDNACIGSIRNGTYDHDVYRDEALNNRFQIKGVELKSGYKDWILWISFAISCFLLCVALLGFIMWACQKGNIRCNICI

SEQ ID NO: 10668 - protein, 566 aa, synthetic construct; identical to SEQ ID NO: 6982
  REGION 1..566: note = hemagglutinin__InfluenzaA__AHC59149

SEQ ID NO: 10669 - protein, 566 aa, synthetic construct
  REGION 1..566: note = hemagglutinin__InfluenzaA__AHC59185
MKTIIALSYILCLVFAQKLPGNDNSTATLCLGHHAVPNGTIVKTITNDQIEVTNATELVQSSSTGEICDSPHQILDGENCTLIDALLGDPQCDGFQNKKWDLFVERSKAYSNCYPYDVPDYASLRSLVASSGTLEFNNESFNWTGVTQNGTSSACIRRSNSSFFSRLNWLTHLNFKYPALNVTMPNNEQFDKLYIWGVHHPGTDKDQIFLYAQSSGRITVSTKRSQQAVIPNIGSRPRIRNIPSRISIYWTIVKPGDILLINSTGNLIAPRGYFKIRSGKSSIMRSDAPIGKCNSECITPNGSIPNDKPFQNVNRITYGACPRYVKQSTLKLATGMRNVPEKQTRGIFGAIAGFIENGWEGMVDGWYGFRHQNSEGRGQAADLKSTQAAIDQINGKLNRLIGKTNEKFHQIEKEFSEVEGRIQDLEKYVEDTKIDLWSYNAELLVALENQHTIDLTDSEMNKLFEKTKKQLRENAEDMGNGCFKIYHKCDNACIGSIRNGTYDHNVYRDEALNNRFQIKGVELKSGYKDWILWISFAISCFLLCVALLGFIMWACQKGNIRCNICI

SEQ ID NO: 10670 - protein, 566 aa, synthetic construct; identical to SEQ ID NO: 6855
  REGION 1..566: note = hemagglutinin__InfluenzaA__AHC59197

SEQ ID NO: 10671 - protein, 566 aa, synthetic construct
  REGION 1..566: note = hemagglutinin__InfluenzaA__AHC59209
MKTIIALSYILCLVFAQEIPGNDNSTATLCLGHHAVPNGTIVKTITNDQIEVTNATELVQSSSTGEICNSPHQILDGENCTLIDALLGDPQCDDFQNKKWDLFVERSKAHSNCYPYDVPDYASLRSLVASSGTLEFNNESFNWTGVTQNGTSSACIRRSNNSFFSRLNWLTHLNFKYPALNVTMPNNEQFDKLYIWGVHHPGTDKDQIFLYAQASGRITVSTKRSQQAVIPNIGSRPRVRNIPSRVSIYWTIVKPGDILLINSTGNLIAPRGYFKIRSGKSSIMRSDAPIGECNSACITPNGSIPNDKPFQNVNRITYGACPRYVKQNTLKLATGMRNVPEKQTRGIFGAIAGFIENGWEGMVDGWYGFRHQNSEGRGQAADLKSTQAAIDQINGKLNRLIGKTNEKFHQIEKEFSEVEGRIQDLEKYVEDTKIDLWSYNAELLVALENQHTIDLTDSEMNKLFEKTKKQLRENAEDMGNGCFKIYHKCDNACIGSIRNGTYDHAVYRDEALNNRFQIKGVELKSGYKDWILWISFAISCFLLCVALLGFIMWACQKGNIRCNICI

SEQ ID NO: 10672 - protein, 566 aa, synthetic construct; identical to SEQ ID NO: 6982
  REGION 1..566: note = hemagglutinin__InfluenzaA__AHC59221

SEQ ID NO: 10673 - protein, 566 aa, synthetic construct; identical to SEQ ID NO: 10651
  REGION 1..566: note = hemagglutinin__InfluenzaA__AHC59245

SEQ ID NO: 10674 - protein, 566 aa, synthetic construct; identical to SEQ ID NO: 10618
  REGION 1..566: note = hemagglutinin__InfluenzaA__AHC59257

SEQ ID NO: 10675 - protein, 566 aa, synthetic construct; identical to SEQ ID NO: 7782
  REGION 1..566: note = hemagglutinin__InfluenzaA__AHC59269

SEQ ID NO: 10676 - protein, 566 aa, synthetic construct; identical to SEQ ID NO: 10618
  REGION 1..566: note = hemagglutinin__InfluenzaA__AHC59281

SEQ ID NO: 10677 - protein, 566 aa, synthetic construct; identical to SEQ ID NO: 6982
  REGION 1..566: note = hemagglutinin__InfluenzaA__AHC59293

SEQ ID NO: 10678 - protein, 566 aa, synthetic construct
  REGION 1..566: note = hemagglutinin__InfluenzaA__AHC59305
MKTIIALSYILCLVFAQKLPGNDNSTATLCLGHHAVPNGTIVKTITNDQIEVTNATELVQSSSTGEICSSPHQILDGENCTLIDALLGDPQCDGFQNKKWDLFVERSKAHSNCYPYDVPDYASLRSLVASSGTLEFNNESFNWTGVTQNGTSSACIRRSNNSFFSRLNWLTHLNFKYPALNVTMPNNEQFDKLYIWGVHHPGTDKDQIFLYAQASGRITVSTKRSQQAVIPNIGSRPRVRNIPSRVSIYWTIVKPGDILLINSTGNLIAPRGYFKIRSGKSSIMRSDAPIGKCNSACITPNGSIPNDKPFQNVNRITYGACPRYVKQNTLKLATGMRNVPEKQTRGIFGAIAGFIENGWEGMVDGWYGFRHQNSEGRGQAADLKSTQAAIDQINGKLNRLIGKTNEKFHQIEKEFSEVEGRIQDLEKYVEDTKIDLWSYNAELLVALENQHTIDLTDSEMNKLFEKTKKQLRENAEDMGNGCFKIYHKCDNACIGSIRNGTYDHDVYRDEALNNRFQIKGVELKSGYKDWILWISFAISCFLLCVALLGFIMWACQKGNIRCNICI

SEQ ID NO: 10679 - protein, 566 aa, synthetic construct
  REGION 1..566: note = hemagglutinin__InfluenzaA__AHC59329
MKTIIALSYILCLVFAQKLPGNDNSTATLCLGHHAVPNGTIVKTITNDRIEVTNATELVQNSSIGEICDSPHQILDGENCTLIDALLGDPQCDGFQNKKWDLFVERSKAYSNCYPYDVPDYASLRSLVASSGTLEFNNESFNWTGVTQNGTSSACIRRSNNSFFSRLNWLTHLNFKYPALNVTMPNNEQFDKLYIWGVHHPGTEKDQIFLYAQSSGRITVSTKRSQQAVIPNIGSRPRIRNIPSRISIYWTIVKPGDILLINSTGNLIAPRGYFKIRSGKSSIMRSDAPIGKCKSECITPNGSIPNDKPFQNVNRITYGACPRYVKQSTLKLATGMRNVPEKQTRGIFGAIAGFIENGWEGMVDGWYGFRHQNSEGRGQAADLKSTQAAIDQINGKLNRLIGKTNEKFHQIEKEFSEVEGRIQDLEKYVEDTKIDLWSYNAELLVALENQHTIDLTDSEMNKLFEKTKKQLRENAEDMGNGCFKIYHKCDNACIGSIRNGTYDHDVYRDEALNNRFQIKGVELKSGYKDWILWISFAISCFLLCVALLGFIMWACQKGNIRCNICI

SEQ ID NO: 10680 - protein, 566 aa, synthetic construct; identical to SEQ ID NO: 9074
  REGION 1..566: note = hemagglutinin__InfluenzaA__AHC59341

SEQ ID NO: 10681 - protein, 566 aa, synthetic construct; identical to SEQ ID NO: 10618
  REGION 1..566: note = hemagglutinin__InfluenzaA__AHC59365

SEQ ID NO: 10682 - protein, 566 aa, synthetic construct
  REGION 1..566: note = hemagglutinin__InfluenzaA__AHC59377
MKTIIALSYILCLVFAQKLPGNDNSTATLCLGHHAVPNGTVVKTITNDQIEVTNATELVQNSSTGEICDSPHQILDGENCTLIDALLGDPQCDGFQNKKWDLFVERSKAYSNCYPYDVPDYASLRSLVASSGTLEFNNESFNWTGVTQNGTSSACIRRSNNSFFSRLNWLTHLNFKYPALNVTMPNNEQFDKLYIWGVHHPGTDKDQIFLYAQASGRITVSTKRSQQAVIPNIGSRPRVRNIPSRISIYWTIVKPGDILLINSTGNLIAPRGYFKIRSGKSSIMRSDAPIGKCNSECITPNGSIPNDKPFQNVNRITYGACPRYVKQNTLKLATGMRNVPEKQTRGIFGAIAGFIENGWEGMVDGWYGFRHQNSEGRGQAADLKSTQAAIDQINGKLNRLIGKTNEKFHQIEKEFSEVEGRIQNLEKYVEDTKIDLWSYNAELLVALENQHTIDLTDSEMNKLFEKTKKQLRENAEDMGNGCFKIYHKCDNACIGSIRNGTYDHDVYRDEALNNRFQIKGVELKSGYKDWILWISFAISCFLLCVALLGFIMWACQKGNIRCNICI

SEQ ID NO: 10683 - protein, 566 aa, synthetic construct; identical to SEQ ID NO: 6982
  REGION 1..566: note = hemagglutinin__InfluenzaA__AHC59413

SEQ ID NO: 10684 - protein, 566 aa, synthetic construct; identical to SEQ ID NO: 7782
  REGION 1..566: note = hemagglutinin__InfluenzaA__AHC59425

SEQ ID NO: 10685 - protein, 566 aa, synthetic construct; identical to SEQ ID NO: 9074
  REGION 1..566: note = hemagglutinin__InfluenzaA__AHC59437

SEQ ID NO: 10686 - protein, 566 aa, synthetic construct
  REGION 1..566: note = hemagglutinin__InfluenzaA__AHC59449
MKTIIALSYILCLVFAQKLPGNDNSTATLCLGHHAVPNGTIVKTITNDQIEVTNATELVQSSSTGEICNSPHQILDGENCTLIDALLGDPQCDGFQNKKWDLFVERSKAHSNCYPYDVPDYASLRSLVASSGTLEFNNESFNWTGVTQNGTSSACIRGSNNSFFSRLNWLTHLNFKYPALNVTMPNNEQFDKLYIWGVHHPGTDKDQIFLYAQASGRITVSTKRSQQAVIPNIGSRPRVRNIPSRVSIYWTIVKPGDILLINSTGNLIAPRGYFKIRSGKSSIMRSDAPIGKCNSACITPNGSIPNDKPFQNVNRITYGACPRYVKQNTLKLATGMRNVPEKQTRGIFGAIAGFIENGWEGMVDGWYGFRHQNSEGRGQAADLKSTQAAIDQINGKLNRLIGRTNEKFHQIEKEFSEVEGRIQDLEKYVEDTKIDLWSYNAELLVALENQHTIDLTDSEMNKLFEKTKKQLRENAEDMGNGCFKIYHKCDNACIGSIRNGTYDHDVYRDEALNNRFQIKGVELKSGYKDWILWISFAISCFLLCVALLGFIMWACQKGNIRCNICI

SEQ ID NO: 10687 - protein, 566 aa, synthetic construct; identical to SEQ ID NO: 6855
  REGION 1..566: note = hemagglutinin__InfluenzaA__AHC59461

SEQ ID NO: 10688 - protein, 566 aa, synthetic construct; identical to SEQ ID NO: 10679
  REGION 1..566: note = hemagglutinin__InfluenzaA__AHC59473

SEQ ID NO: 10689 - protein, 566 aa, synthetic construct; identical to SEQ ID NO: 6982
  REGION 1..566: note = hemagglutinin__InfluenzaA__AHC59485

SEQ ID NO: 10690 - protein, 566 aa, synthetic construct; identical to SEQ ID NO: 6982
  REGION 1..566: note = hemagglutinin__InfluenzaA__AHC59497

SEQ ID NO: 10691 - protein, 566 aa, synthetic construct; identical to SEQ ID NO: 6855
  REGION 1..566: note = hemagglutinin__InfluenzaA__AHC59509

SEQ ID NO: 10692 - protein, 566 aa, synthetic construct; identical to SEQ ID NO: 6855
  REGION 1..566: note = hemagglutinin__InfluenzaA__AHC59521

SEQ ID NO: 10693 - protein, 566 aa, synthetic construct
  REGION 1..566: note = hemagglutinin__InfluenzaA__AHC59533
MKTIIALSYILCLVFAQKLPGNDNSTATLCLGHHAVPNGTIVKTITNDQIEVTNATELVQSSSTGEICNSPHQILDGENCTLIDALLGDPQCDGFQNKKWDLFVERSKAHSNCYPYDVPDYASLRSLVASSGTLEFKNESFNWTGVTQNGTSSACIRRSNNSFFSRLNWLTHLNFKYPALNVTMPNNEQFDKLYIWGVHHPGTDKDQIFLYAQASGRITVSTKRSQQAVIPNIGSRPRVRNIPSRVSIYWTIVKPGDILLINSTGNLIAPRGYFKIRSGKSSIMRSDAPIGKCNSACITPNGSIPNDKPFQNVNRITYGACPRYVKQNTLKLATGMRNVPEKQTRGIFGAIAGFIENGWEGMVDGWYGFRHQNSEGRGQAADLKSTQAAIDQINGKLNRLIGKTNEKFHQIEKEFSEVEGRIQDLEKYVEDTKIDLWSYNAELLVALENQHTIDLTDSEMNKLFEKTKKQLRENAEDMGNGCFKIYHKCDNACIGSIRNGTYDHDVYRDEALNNRFQIKGVELKSGYKDWILWISFAISCFLLCVALLGFIMWACQKGNIRCNICI

SEQ ID NO: 10694 - protein, 566 aa, synthetic construct; identical to SEQ ID NO: 6982
  REGION 1..566: note = hemagglutinin__InfluenzaA__AHC59545

SEQ ID NO: 10695 - protein, 566 aa, synthetic construct; identical to SEQ ID NO: 10618
  REGION 1..566: note = hemagglutinin__InfluenzaA__AHC59557

SEQ ID NO: 10696 - protein, 566 aa, synthetic construct
  REGION 1..566: note = hemagglutinin__InfluenzaA__AHC59569
MKTIIALSYILCLVFAQKLPGNDNSTATLCLGHHAVPNGTIVKTITNDQIEVTNATELVQNSSTGEICDSPHQILDGENCTLIDALLGDPQCDGFQNKKWDLFVERSKAYSNCYPYDVPDYASLRSLVASSGTLEFNNESFNWTGVTQNGTSSACIRRSNNSFFSRLNWLTHLNFKYPALNVTMPNNEQFDKLYIWGVHHPGTDKDQIFLYAQASGRITVSTKRSQQAVIPNIGSRPRVRNIPSRISIYWTIVKPGDILLINSTGNLIAPRGYFKIRSGKSSIMRSDAPIGKCNSECITPNGSIPNDKPFQNVNRITYGACPRYVKQNTLKLATGMRNVPEKQTRGIFGAIAGFIENGWEGMMDGWYGFRHQNSEGRGQAADLKSTQAAIDQINGKLNRLIGKTNEKFHQIEKEFSEVEGRIQDLEKYVEDTKIDLWSYNAELLVALENQHTIDLTDSEMNKLFEKTKKQLRENAEDMGNGCFKIYHKCDNACIGSIRNGTYDHDVYRDEALNNRFQIKGVELKSGYKDWILWISFAISCFLLCVALLGFIMWACQKGNIRCNICI

SEQ ID NO: 10697 - protein, 566 aa, synthetic construct; identical to SEQ ID NO: 6982
  REGION 1..566: note = hemagglutinin__InfluenzaA__AHC59581

SEQ ID NO: 10698 - protein, 566 aa, synthetic construct; identical to SEQ ID NO: 6855
  REGION 1..566: note = hemagglutinin__InfluenzaA__AHC59593

SEQ ID NO: 10699 - protein, 566 aa, synthetic construct; identical to SEQ ID NO: 9074
  REGION 1..566: note = hemagglutinin__InfluenzaA__AHC59605

SEQ ID NO: 10700 - protein, 566 aa, synthetic construct; identical to SEQ ID NO: 6982
  REGION 1..566: note = hemagglutinin__InfluenzaA__AHC59617

SEQ ID NO: 10701 - protein, 566 aa, synthetic construct; identical to SEQ ID NO: 6982
  REGION 1..566: note = hemagglutinin__InfluenzaA__AHC59629

SEQ ID NO: 10702 - protein, 566 aa, synthetic construct; identical to SEQ ID NO: 10618
  REGION 1..566: note = hemagglutinin__InfluenzaA__AHC59641

SEQ ID NO: 10703 - protein, 566 aa, synthetic construct
  REGION 1..566: note = hemagglutinin__InfluenzaA__AHC59653
MKTIIALSYILCLVFAQKLPGNDNSTATLCLGHHAVPNGTIVKTITNDQIEVTNATELVQSSSTGEICNSPHQILDGENCTLIDALLGDPQCDGFQNKKWDLFVERSKAHSNCYPYDVPDYASLRSLVASSGTLEFNNESFNWTGVTQNGTSSACIRRSNNSFFSRLNWLTHLNFKYPALNVTMPNNEQFDKLYIWGVHHPGTDKDQIFLYAQASGRITVSTQRSQQAVIPNIGSRPRVRNIPSRVSIYWTIVKPGDILLINSTGNLIAPRGYFKIRSGKSSIMRSDAPIGKCNSACITPNGSIPNDKPFQNVNRITYGACPRYVKQNTLKLATGMRNVPEKQTRGIFGAIAGFIENGWEGMVDGWYGFRHQNSEGRGQAADLKSTQAAIDQINGKLNRLIGKTNEKFHQIEKEFSEVEGRIQDLEKYVEDTKIDLWSYNAELLVALENQHTIDLTDSEMNKLFEKTKKQLRENAEDMGNGCFKIYHKCDNACIGSIRNGTYDHDVYRDEALNNRFQIKGVELKSGYKDWILWISFAISCFLLCVALLGFIMWACQKGNIRCNICI

SEQ ID NO: 10704 - protein, 566 aa, synthetic construct; identical to SEQ ID NO: 6855
  REGION 1..566: note = hemagglutinin__InfluenzaA__AHC59665

SEQ ID NO: 10705 - protein, 566 aa, synthetic construct; identical to SEQ ID NO: 6982
  REGION 1..566: note = hemagglutinin__InfluenzaA__AHC59677

SEQ ID NO: 10706 - protein, 566 aa, synthetic construct; identical to SEQ ID NO: 10703
  REGION 1..566: note = hemagglutinin__InfluenzaA__AHC59689

SEQ ID NO: 10707 - protein, 566 aa, synthetic construct; identical to SEQ ID NO: 10618
  REGION 1..566: note = hemagglutinin__InfluenzaA__AHC59701

SEQ ID NO: 10708 - protein, 566 aa, synthetic construct; identical to SEQ ID NO: 6855
  REGION 1..566: note = hemagglutinin__InfluenzaA__AHC59713

SEQ ID NO: 10709 - protein, 566 aa, synthetic construct; identical to SEQ ID NO: 10629
  REGION 1..566: note = hemagglutinin__InfluenzaA__AHC59737

SEQ ID NO: 10710 - protein, 566 aa, synthetic construct; identical to SEQ ID NO: 6855
  REGION 1..566: note = hemagglutinin__InfluenzaA__AHC59749

SEQ ID NO: 10711 - protein, 566 aa, synthetic construct; identical to SEQ ID NO: 6982
  REGION 1..566: note = hemagglutinin__InfluenzaA__AHC59761

SEQ ID NO: 10712 - protein, 566 aa, synthetic construct; identical to SEQ ID NO: 6982
  REGION 1..566: note = hemagglutinin__InfluenzaA__AHC59773

SEQ ID NO: 10713 - protein, 566 aa, synthetic construct; identical to SEQ ID NO: 7782
  REGION 1..566: note = hemagglutinin__InfluenzaA__AHC59785

SEQ ID NO: 10714 - protein, 566 aa, synthetic construct; identical to SEQ ID NO: 6982
  REGION 1..566: note = hemagglutinin__InfluenzaA__AHC59797

SEQ ID NO: 10715 - protein, 566 aa, synthetic construct; identical to SEQ ID NO: 9074
  REGION 1..566: note = hemagglutinin__InfluenzaA__AHC59809

SEQ ID NO: 10716 - protein, 566 aa, synthetic construct
  REGION 1..566: note = hemagglutinin__InfluenzaA__AHC59821
MKTIIALSYILCLVFAQKLPGNDNSTATLCLGHHAVPNGTIVKTITNDQIEVTNATELVQNSSTGEICDSPHQILDGENCTLIDALLGDPQCDGLQNKKWDLFVERSKAYSNCYPYDVPDYASLRSLVASSGTLEFNNESFNWTGVTQNGTSSACIRRSNNSFFSRLNWLTHLNFKYPALNVTMPNNEQFDKLYIWGVHHPGTDKDQIFLYAQASGRITVSTKRSQQAVIPNIGSRPRVRNIPSRISIYWTIVKPGDILLINSTGNLIAPRGYFKIRSGKSSIMRSDAPIGKCNSECITPNGSIPNDKPFQNVNRITYGACPRYVKQNTLKLATGMRNVPEKQTRGIFGAIAGFIENGWEGMVDGWYGFRHQNSEGRGQAADLKSTQAAIDQINGKLNRLIGKTNEKFHQIEKEFSEVEGRIQDLEKYVEDTKIDLWSYNAELLVALENQHTIDLTDSEMNKLVEKTKKQLRENAEDMGNGCFKIYHKCDNACIGSIRNGTYDHDVYRDEALNNRFQIKGVELKSGYKDWILWISFAISCFLLCVALLGFIMWACQKGNIRCNICI

SEQ ID NO: 10717 - protein, 566 aa, synthetic construct; identical to SEQ ID NO: 10618
  REGION 1..566: note = hemagglutinin__InfluenzaA__AHC59833

SEQ ID NO: 10718 - protein, 566 aa, synthetic construct; identical to SEQ ID NO: 10617
  REGION 1..566: note = hemagglutinin__InfluenzaA__AHC59845

SEQ ID NO: 10719 - protein, 566 aa, synthetic construct; identical to SEQ ID NO: 7782
  REGION 1..566: note = hemagglutinin__InfluenzaA__AHC59857

SEQ ID NO: 10720 - protein, 566 aa, synthetic construct; identical to SEQ ID NO: 6982
  REGION 1..566: note = hemagglutinin__InfluenzaA__AHC59869

SEQ ID NO: 10721 - protein, 566 aa, synthetic construct; identical to SEQ ID NO: 6982
  REGION 1..566: note = hemagglutinin__InfluenzaA__AHC59881

SEQ ID NO: 10722 - protein, 566 aa, synthetic construct; identical to SEQ ID NO: 6855
  REGION 1..566: note = hemagglutinin__InfluenzaA__AHC59892

SEQ ID NO: 10723 - protein, 566 aa, synthetic construct
  REGION 1..566: note = hemagglutinin__InfluenzaA__AHC59904
MKTIIALSYILCLVFAQKLPGNDNSTATLCLGHHAVPNGTIVKTITNDQIEVTNATELVQSSSTGEICNSPHQILDGENCTLIDALLGDPQCDGFQNKKWDLFVERSKAHSNCYPYDVPDYASLRSLVASSGTLEFNNESFNWTGVTQNGTSSACIRGSNNSFFSRLNWLTHLNFKYPALNVTMPNNEQFDKLYIWGVHHPGTDKDQIFLYAQASGRITVSTKRSQQAVIPNIGSRPRVRNIPSRVSIYWTIVKPGDILLINSTGNLIAPRGYFKIRSGKSSIMRSDAPIGKCNSACITPNGSIPNDKPFQNVNRITYGACPRYVKQNTLKLATGMRNVPEKQTRGIFGAIAGFIENGWEGMMDGWYGFRHQNSEGRGQAADLKSTQAAIDQINGKLNRLIGKTNEKFHQIEKEFSEVEGRIQDLEKYVEDTKIDLWSYNAELLVALENQHTIDLTDSEMNKLFEKTKKQLRENAEDMGNGCFKIYHKCDNACIGSIRNGTYDHDVYRDEALNNRFQIKGVELKSGYKDWILWISFAISCFLLCVALLGFIMWACQKGNIRCNICI

SEQ ID NO: 10724 - protein, 566 aa, synthetic construct
  REGION 1..566: note = hemagglutinin__InfluenzaA__AHC59915
MKTVIALSYILCLAFAQKLPGNDNSTATLCLGHHAVPNGTIVKTITNDQIEVTNATELVQSSSTGEICDSPHQILDGENCTLIDALLGDPQCDGFQNKKWDLFVERSKAYSNCYPYDVPDYASLRSLVASSGTLEFNNESFNWTGVTQNGTSSACIRRSNNSFFSRLNWLTHLNFKYPALNVTMPNNEQFDKLYIWGVHHPGTDKDQIFLYAQASGRITVSTKRSQQAVIPNIGSRPRVRNIPSRISIYWTIVKPGDILLINSTGNLIAPRGYFKIRSGKSSIMRSDAPIGKCNSECITPNGSIPNDKPFQNVNRITYGACPRYVKQNTLKLATGMRNVPEKQTRGIFGAIAGFIENGWEGMVDGWYGFRHQNSEGRGQAADLKSTQAAIDQINGKLNRLIGKTNEKFHQIEKEFSEVEGRIQDLEKYVEDTKIDLWSYNAELLVALENQHTIDLTDSEMNKLFEKTKKQLRENAEDMGNGCFKIYHKCDNACIGSIRNGTYDHDVYRDEALNNRFQIKGVELKSGYKDWILWISFAISCFLLCVALLGFIMWACQKGNIRCNICI

SEQ ID NO: 10725 - protein, 566 aa, synthetic construct; identical to SEQ ID NO: 6982
  REGION 1..566: note = hemagglutinin__InfluenzaA__AHC59939

SEQ ID NO: 10726 - protein, 566 aa, synthetic construct
  REGION 1..566: note = hemagglutinin__InfluenzaA__AHC59963
MKTIIALSYILCLVFAQKLPGNDNSTATLCLGHHAVPNGTIVKTITNDQIEVTNATELVQSSSTGEICDSPHQILDGENCTLIDALLGDPQCDGFQNKKWDLFVERSKAYSNCYPYDVPDYASLRSLVASSGTLEFNNESFNWTGVTQNGTSSACIRRSNSSFFSRLNWLTHLNFKYPALNVTMPNNEQFDKLYIWGVHHPGTDKDQIFLYAQSSGRITVSTKRSQQAVIPNIGSRPRIRNIPSRISIYWTIVKPGDILLINSTGNLIAPRGYFKIRSGKSSIMRSDAPIGKCNSECITPNGSIPNDKPFQNVNRITYGACPRYIKQSTLKLATGMRNVPEKQTRGIFGAIAGFIENGWEGMVDGWYGFRHQNSEGRGQAADLKSTQAAIDQINGKLNRLIGKTNEKFHQIEKEFSEVEGRIQDLEKYVEDTKIDLWSYNAELLVALENQHTIDLTDSEMNKLFEKTKKQLRENAEDMGNGCFKIYHKCDNACIGSIRNGTYNHDVYRDEALNNRFQIKGVELKSGYKDWILWISFAISCFLLCVALLGFIMWACQKGNIRCNICI

SEQ ID NO: 10727 - protein, 566 aa, synthetic construct; identical to SEQ ID NO: 6855
  REGION 1..566: note = hemagglutinin__InfluenzaA__AHC59987

SEQ ID NO: 10728 - protein, 566 aa, synthetic construct; identical to SEQ ID NO: 6855
  REGION 1..566: note = hemagglutinin__InfluenzaA__AHC59999

SEQ ID NO: 10729 - protein, 566 aa, synthetic construct; identical to SEQ ID NO: 6982
  REGION 1..566: note = hemagglutinin__InfluenzaA__AHC60011

SEQ ID NO: 10730 - protein, 566 aa, synthetic construct; identical to SEQ ID NO: 6855
  REGION 1..566: note = hemagglutinin__InfluenzaA__AHC60023

SEQ ID NO: 10731 - protein, 566 aa, synthetic construct; identical to SEQ ID NO: 7782
  REGION 1..566: note = hemagglutinin__InfluenzaA__AHC60035

SEQ ID NO: 10732 - protein, 566 aa, synthetic construct; identical to SEQ ID NO: 7782
  REGION 1..566: note = hemagglutinin__InfluenzaA__AHC60047

SEQ ID NO: 10733 - protein, 566 aa, synthetic construct
  REGION 1..566: note = hemagglutinin__InfluenzaA__AHC60059
MKTIIALSYILCLVFAQKLPGNDNSTATLCLGHHAVPNGTIVKTITNDQIEVTNATELVQNSSTGEICDSPHQILDGENCTLIDALLGDPQCDGFQNKKWDLFVERSKAYSNCYPYDVPDYASLRSLVASSGTLEFNNESFNWTGVTQNGTSSACIRRSNNSFFSRLNWLTHLNFKYPALNVTMPNNEQFDKLYIWGVHHPGTDKDQIFLYAQASGRITVSTKRSQQAVIPNIGSRPRVRNIPSRISIYWTIVKPGDILLINSTGNLIAPRGYFKIRSGKSSIMRSDAPIGKCNSACITPNGSIPNDKPFQNVNRITYGACPRYVKQNTLKLATGMRNVPEKQTRGIFGAIAGFIENGWEGMVDGWYGFRHQNSEGRGQAADLKSTQAAIDQINGKLNRLIGKTNEKFHQIEKEFSEVEGRIQDLEKYVEDTKIDLWSYNAELLVALENQHTIDLTDSEMNKLFEKTKKQLRENAEDMGNGCFKIYHKCDNACIGSIRNGTYNHDVYRDEALNNRFQIKGVELKSGYKDWILWISFAISCFLLCVALLGFIMWACQKGNIRCNICI

SEQ ID NO: 10734 - protein, 566 aa, synthetic construct; identical to SEQ ID NO: 9074
  REGION 1..566: note = hemagglutinin__InfluenzaA__AHC60071

SEQ ID NO: 10735 - protein, 566 aa, synthetic construct; identical to SEQ ID NO: 10618
  REGION 1..566: note = hemagglutinin__InfluenzaA__AHC60083

SEQ ID NO: 10736 - protein, 566 aa, synthetic construct; identical to SEQ ID NO: 7782
  REGION 1..566: note = hemagglutinin__InfluenzaA__AHC60095

SEQ ID NO: 10737 - protein, 566 aa, synthetic construct
  REGION 1..566: note = hemagglutinin__InfluenzaA__AHC60107
MKTIIALSYILCLVFAQKLPGNDNSTATLCLGHHAVPNGTIVKTITNDQIEVTNATELVQNSSTGEICDSPHQIIDGENCTLIDALLGDPQCDGFQNKKWDLFVERSKAYSNCYPYDVPDYASLRSLVASSGTLEFNNESFNWTGVTQNGTSSACIRRSNNSFFSRLNWLTHLNFKYPALNVTMPNNEQFDKLYIWGVHHPGTDKDQIFLYAQASGRITVSTKRSQQAVIPNIGSRPRVRNIPSRISIYWTIVKPGDILLINSTGNLIAPRGYFKIRSGKSSIMRSDAPIGKCNSECITPNGSIPNDKPFQNVNRITYGACPRYVKQNTLKLATGMRNVPEKQTRGIFGAIAGFIENGWEGMVDGWYGFRHQNSEGRGQAADLKSTQAAIDQINGKLNRLIGKTNEKFHQIEKEFSEVEGRIQDLEKYVEDTKIDLWSYNAELLVALENQHTIDLTDSEMNKLFEKTKKQLRENAEDMGNGCFKIYHKCDNACIGSIRNGTYDHDVYRDEALNNRFKIKGVELKSGYKDWILWISFAISCFLLCVALLGFIMWACQKGNIRCNICI

SEQ ID NO: 10738 - protein, 566 aa, synthetic construct; identical to SEQ ID NO: 6982
  REGION 1..566: note = hemagglutinin__InfluenzaA__AHC60119

SEQ ID NO: 10739 - protein, 566 aa, synthetic construct; identical to SEQ ID NO: 6982
  REGION 1..566: note = hemagglutinin__InfluenzaA__AHC60131

SEQ ID NO: 10740 - protein, 566 aa, synthetic construct; identical to SEQ ID NO: 10648
  REGION 1..566: note = hemagglutinin__InfluenzaA__AHC60143

SEQ ID NO: 10741 - protein, 566 aa, synthetic construct
  REGION 1..566: note = hemagglutinin__InfluenzaA__AHC60155
MKTVIALSYILCLAFAQKLPGNDNSTATLCLGHHAVPNGTIVKTITNDQIEVTNATELVQSSPTGEICDSPHQILDGENCTLIDALLGDPQCDGFQNKKWDLFVERSKAYSNCYPYDVPDYASLRSLVASSGTLEFNNESFNWTGVTQNGTSSACIRRSNNSFFSRLNWLTHLNFKYPALNVTMPNNEQFDKLYIWGVHHPGTDKDQIFLYAQASGRITVSTKRSQQAVIPNIGSRPRVRNIPSRISIYWTIVKPGDILLINSTGNLIAPRGYFKIRSGKSSIMRSDAPIGKCNSECITPNGSIPNDKPFQNVNRITYGACPRYVKQNTLKLATGMRNVPEKQTRGIFGAIAGFIENGWEGMVDGWYGFRHQNSEGRGQAADLKSTQAAIDQINGKLNRLIGKTNEKFHQIEKEFSEVEGRIQDLEKYVEDTKIDLWSYNAELLVALENQHTIDLTDSEMNKLFEKTKKQLRENAEDMGNGCFKIYHKCDNACIGSIRNGTYDHDVYRDEALNNRFQIKGVELKSGYKDWILWISFAISCFLLCVALLGFIMWACQKGNIRCNICI

SEQ ID NO: 10742 - protein, 566 aa, synthetic construct; identical to SEQ ID NO: 6855
  REGION 1..566: note = hemagglutinin__InfluenzaA__AHC60167

SEQ ID NO: 10743 - protein, 566 aa, synthetic construct; identical to SEQ ID NO: 7782
  REGION 1..566: note = hemagglutinin__InfluenzaA__AHC60179

SEQ ID NO: 10744 - protein, 566 aa, synthetic construct; identical to SEQ ID NO: 10693
  REGION 1..566: note = hemagglutinin__InfluenzaA__AHC60191

SEQ ID NO: 10745 - protein, 566 aa, synthetic construct; identical to SEQ ID NO: 10693
  REGION 1..566: note = hemagglutinin__InfluenzaA__AHC60203

SEQ ID NO: 10746 - protein, 566 aa, synthetic construct; identical to SEQ ID NO: 9074
  REGION 1..566: note = hemagglutinin__InfluenzaA__AHC60215

SEQ ID NO: 10747 - protein, 566 aa, synthetic construct; identical to SEQ ID NO: 7782
  REGION 1..566: note = hemagglutinin__InfluenzaA__AHC60239

SEQ ID NO: 10748 - protein, 566 aa, synthetic construct; identical to SEQ ID NO: 7782
  REGION 1..566: note = hemagglutinin__InfluenzaA__AHC60251

SEQ ID NO: 10749 - protein, 566 aa, synthetic construct
  REGION 1..566: note = hemagglutinin__InfluenzaA__AHC60263
MKTIIALSYILCLVFAQKLPGNENSTATLCLGHHAVPNGTIVKTITNDQIEVTNATELVQNSSTGEICDSPHQILDGENCTLIDALLGDPQCDGFQNKKWDLFVERSKAYSNCYPYDVPDYASLRSLVASSGTLEFNNESFNWTGVTQNGTSSACIRRSNNSFFSRLNWLTHLNFKYPALNVTMPNNEQFDKLYIWGVHHPGTDKDQIFLYAQASGRITVSTKRSQQAVIPNIGSRPRVRNIPSRISIYWTIVKPGDILLINSTGNLIAPRGYFKIRSGKSSIMRSDAPIGKCNSECITPNGSIPNDKPFQNVNRITYGACPRYVKQNTLKLATGMRNVPEKQTRGIFGAIAGFIENGWEGMVDGWYGFRHQNSEGRGQAADLKSTQAAIDQINGKLNRLIGKTNEKFHQIEKEFSEVEGRIQDLEKYVEDTKIDLWSYNAELLVALENQHTIDLTDSEMNKLFEKTKKQLRENAEDMGNGCFKIYHKCDNACIGSIRNGTYDHDVYRDEALNNRFQIKGVELKSGYKDWILWISFAISCFLLCVALLGFIMWACQKGNIRCNICI

SEQ ID NO: 10750 - protein, 566 aa, synthetic construct; identical to SEQ ID NO: 6855
  REGION 1..566: note = hemagglutinin__InfluenzaA__AHC60275

SEQ ID NO: 10751 - protein, 566 aa, synthetic construct; identical to SEQ ID NO: 10737
  REGION 1..566: note = hemagglutinin__InfluenzaA__AHC60287

SEQ ID NO: 10752 - protein, 566 aa, synthetic construct; identical to SEQ ID NO: 10618
  REGION 1..566: note = hemagglutinin__InfluenzaA__AHC60299

SEQ ID NO: 10753 - protein, 566 aa, synthetic construct
  REGION 1..566: note = hemagglutinin__InfluenzaA__AHC60311
MKTIIALSYILCLVFAQKLPGNDNSTATLCLGHHAVPNGTIVKTITNDQIEVTNATELVQNSSTGEICDSPHQILDGENCTLIDALLGDPQCDGFQNKKWDLFVERSKAYSNCYPYDVPDYASLRSLVASSGTLEFDNESFNWTGVTQNGTSSACIRRSNNSFFSRLNWLTHLNFKYPALNVTMPNNEQFDKLYIWGVHHPGTDKDQIFLYAQASGRITVSTKRSQQAVIPNIGSRPRVRNIPSRISIYWTIVKPGDILLINSTGNLIAPRGYFKIRSGKSSIMRSDAPIGKCNSECITPNGSIPNDKPFQNVNRITYGACPRYVKQNTLKLATGMRNVPEKQTRGIFGAIAGFIENGWEGMVDGWYGFRHQNSEGRGQAADLKSTQAAIDQINGKLNRLIGKTNEKFHQIEKEFSEVEGRIQDLEKYVEDTKIDLWSYNAELLVALENQHTIDLTDSEMNKLFEKTKKQLRENAEDMGNGCFKIYHKCDNACIGSIRNGTYDHDVYRDEALNNRFQIKGVELKSGYKDWILWISFAISCFLLCVALLGFIMWACQKGNIRCNICI

SEQ ID NO: 10754 - protein, 566 aa, synthetic construct; identical to SEQ ID NO: 7782
  REGION 1..566: note = hemagglutinin__InfluenzaA__AHC60323

SEQ ID NO: 10755 - protein, 566 aa, synthetic construct; identical to SEQ ID NO: 9074
  REGION 1..566: note = hemagglutinin__InfluenzaA__AHC60335

SEQ ID NO: 10756 - protein, 566 aa, synthetic construct; identical to SEQ ID NO: 6855
  REGION 1..566: note = hemagglutinin__InfluenzaA__AHC60347

SEQ ID NO: 10757 - protein, 566 aa, synthetic construct; identical to SEQ ID NO: 6982
  REGION 1..566: note = hemagglutinin__InfluenzaA__AHC60359

SEQ ID NO: 10758 - protein, 566 aa, synthetic construct; identical to SEQ ID NO: 10679
  REGION 1..566: note = hemagglutinin__InfluenzaA__AHC60371

SEQ ID NO: 10759 - protein, 566 aa, synthetic construct; identical to SEQ ID NO: 6855
  REGION 1..566: note = hemagglutinin__InfluenzaA__AHC60383

SEQ ID NO: 10760 - protein, 566 aa, synthetic construct; identical to SEQ ID NO: 6982
  REGION 1..566: note = hemagglutinin__InfluenzaA__AHC60395

SEQ ID NO: 10761 - protein, 566 aa, synthetic construct; identical to SEQ ID NO: 10693
  REGION 1..566: note = hemagglutinin__InfluenzaA__AHC60407

SEQ ID NO: 10762 - protein, 566 aa, synthetic construct; identical to SEQ ID NO: 6855
  REGION 1..566: note = hemagglutinin__InfluenzaA__AHC60419

SEQ ID NO: 10763 - protein, 566 aa, synthetic construct; identical to SEQ ID NO: 6982
  REGION 1..566: note = hemagglutinin__InfluenzaA__AHC60431

SEQ ID NO: 10764 - protein, 566 aa, synthetic construct; identical to SEQ ID NO: 6855
  REGION 1..566: note = hemagglutinin__InfluenzaA__AHC60455

SEQ ID NO: 10765 - protein, 566 aa, synthetic construct; identical to SEQ ID NO: 6855
  REGION 1..566: note = hemagglutinin__InfluenzaA__AHC60467

SEQ ID NO: 10766 - protein, 566 aa, synthetic construct; identical to SEQ ID NO: 10617
  REGION 1..566: note = hemagglutinin__InfluenzaA__AHC60479

SEQ ID NO: 10767 - protein, 566 aa, synthetic construct; identical to SEQ ID NO: 7782
  REGION 1..566: note = hemagglutinin__InfluenzaA__AHC60491

SEQ ID NO: 10768 - protein, 566 aa, synthetic construct
  REGION 1..566: note = hemagglutinin__InfluenzaA__AHC60503
MKTIIALSYILCLVFAQKLPGNDNSTATLCLGHHAVPNGTIVKTITNDQIEVTNATELVQSSSTGEICNSPHQILDGENCTLIDALLGDPQCDGFQNKKWDLFVERSKAYSNCYPYDVPDYASLRSLVASSGTLEFNNESFNWTGVTQNGTSSACIRRSNNSFFSRLNWLTHLNFKYPALNVTMPNNEQFDKLYIWGVHHPGTDKDQIFLYAQASGRITVSTKRSQQAVIPNIGSRPRVRNIPSRISIYWTIVKPGDILLINSTGNLIAPRGYFKIRSGKSSIMRSDAPIGKCNSACITPNGSIPNDKPFQNVNRITYGACPRYVKQNTLKLATGMRNVPEKQTRGIFGAIAGFIENGWEGMVDGWYGFRHQNSEGRGQAADLKSTQAAIDQINGKLNRLIGKTNEKFHQIEKEFSEVEGRIQDLEKYVEDTKIDLWSYNAELLVALENQHTIDLTDSEMNKLFEKTKKQLRENAEDMGNGCFKIYHKCDNACIGSIRNGTYDHDVYRDEALNNRFQIKGVELKSGYKDWILWISFAISCFLLCVVLLGFIMWACQKGNIRCNICI

SEQ ID NO: 10769 - protein, 566 aa, synthetic construct; identical to SEQ ID NO: 6982
  REGION 1..566: note = hemagglutinin__InfluenzaA__AHC60515

SEQ ID NO: 10770 - protein, 566 aa, synthetic construct; identical to SEQ ID NO: 7782
  REGION 1..566: note = hemagglutinin__InfluenzaA__AHC60527

SEQ ID NO: 10771 - protein, 566 aa, synthetic construct; identical to SEQ ID NO: 6982
  REGION 1..566: note = hemagglutinin__InfluenzaA__AHC60539

SEQ ID NO: 10772 - protein, 566 aa, synthetic construct; identical to SEQ ID NO: 10629
  REGION 1..566: note = hemagglutinin__InfluenzaA__AHC60551

SEQ ID NO: 10773 - protein, 566 aa, synthetic construct; identical to SEQ ID NO: 9074
  REGION 1..566: note = hemagglutinin__InfluenzaA__AHC60563

SEQ ID NO: 10774 - protein, 566 aa, synthetic construct; identical to SEQ ID NO: 9074
  REGION 1..566: note = hemagglutinin__InfluenzaA__AHC60575

SEQ ID NO: 10775 - protein, 566 aa, synthetic construct
  REGION 1..566: note = hemagglutinin__InfluenzaA__AHC60587
MKTIIALSYILCLVFAQKLPGNDNSTATLCLGHHAVPNGTIVKTITNDQIEVTNATELVQNSSTGEICDSPHQILDGENCTLIDALLGDPQCDGFQNKKWDLFVERSKAYSNCYPYDVPDYASLRSLVASSGTLEFNNESFNWTGVTQNGTSSACIRRSNNSFFSRLNWLTHLNFKYPALNVTMPNNEQFDKLYIWGVHHPGTDKDQIFLYAQASGRITVSTKRSQQAVIPNIGSRPRVRNIPSRISIYWTIVKPGDILLINSTGNLIAPRGYFKIRSGKSSIMRSDAPIGKCNSECITPNGSIPNDKPFQNVNRITYGACPRYVKQNTLKLATGMRNVPEKQTRGIFGAIAGFIENGWEGMVDGWYGFRHQNSEGRGQAADLKSTQAAIDQINGKLNRLIGKTNEKFHQIEKEFSEVEGRIQNLEKYVEDTKIDLWSYNAELLVALENQHTIDLTDSEMNKLFEKTKKQLRENAEDMGNGCFKIYHKCDNACIGSIRNGTYDHDVYRDEALNNRFQIKGVELKSGYKDWILWISFAISCFLLCVALLGFIMWACQKGNIRCNICI

SEQ ID NO: 10776 - protein, 566 aa, synthetic construct; identical to SEQ ID NO: 9074
  REGION 1..566: note = hemagglutinin__InfluenzaA__AHC60599

SEQ ID NO: 10777 - protein, 566 aa, synthetic construct; identical to SEQ ID NO: 6855
  REGION 1..566: note = hemagglutinin__InfluenzaA__AHC60611

SEQ ID NO: 10778 - protein, 566 aa, synthetic construct
  REGION 1..566: note = hemagglutinin__InfluenzaA__AHC60623
MKTIIALSYILCLVFAQKLPGNDNSTATLCLGHHAVPNGTIVKTITNDQIEVTNATELVQSSSTGEICDSPHQILDGENCTLIDALLGDPQCDGFQNKKWDLFVERSKAYSNCYPYDVPDYASLRSLVASSGTLEFNNESFNWTGVTQNGTSSACIRRSNSSFFSRLNWLTHLNFKYPALNVTMPNNEQFDKLYIWGVHHPGTDKDQIFLYAQSSGRITVSTKRSQQAVIPNIGSRPRIRNIPSRISIYWTIVKPGDILLINSTGNLIAPRGYFKIRNGKSSIMRSDAPIGKCNSECITPNGSIPNDKPFQNVNRITYGACPRYVKQSTLKLATGMRNVPEKQTRGIFGAIAGFIENGWEGMVDGWYGFRHQNSEGRGQAADLKSTQAAIDQINGKLNRLIGKTNEKFHQIEKEFSEVEGRIQDLEKYVEDTKIDLWSYNAELLVALENQHTIDLTDSEMNKLFEKTKKQLRENAEDMGNGCFKIYHKCDNACIGSIRNGTYNHDVYRDEALNNRFQIKGVELKSGYKDWILWISFAISCFLLCVALLGFIMWACQKGNIRCNICI

SEQ ID NO: 10779 - protein, 566 aa, synthetic construct; identical to SEQ ID NO: 9074
  REGION 1..566: note = hemagglutinin__InfluenzaA__AHC60635

SEQ ID NO: 10780 - protein, 566 aa, synthetic construct
  REGION 1..566: note = hemagglutinin__InfluenzaA__AHC60647
MKTIIALSYILCLVFTQKLPGNDNSTATLCLGHHAVPNGTIVKTITNDQIEVTNATELVQNSSTGEICDSPHQILDGENCTLIDALLGDPQCDGFQNKKWDLFVERSKAYSNCYPYDVPDYASLRSLVASSGTLEFNNESFNWTGVTQNGTSSACIRRSNNSFFSRLNWLTHLNFKYPALNVTMPNNEQFDKLYIWGVHHPGTDKDQIFLYAQASGRITVSTKRSQQAVIPNIGSRPRVRNIPSRISIYWTIVKPGDILLINSTGNLIAPRGYFKIRSGKSSIMRSDAPIGKCNSECITPNGSIPNDKPFQNVNRITYGACPRYVKQNTLKLATGMRNVPEKQTRGIFGAIAGFIENGWEGMVDGWYGFRHQNSEGRGQAADLKSTQAAIDQINGKLNRLIGKTNEKFHQIEKEFSEVEGRIQDLEKYVEDTKIDLWSYNAELLVALENQHTIDLTDSEMNKLFEKTKKQLRENAEDMGNGCFKIYHKCDNACIGSIRNGTYDHDVYRDEALNNRFQIKGVELKSGYKDWILWISFAISCFLLCVALLGFIMWACQKGNIRCNICI

SEQ ID NO: 10781 - protein, 566 aa, synthetic construct
  REGION 1..566: note = hemagglutinin__InfluenzaA__AHC60659
MKTIIALSYILCLVFTQKLPGNDNSTATLCLGHHAVPNGTIVKTITNDQIEVTNATELVQSSSTGEICNSPHQILDGENCTLIDALLGDPQCDGFQNKKWDLFVERSKAHSNCYPYDVPDYASLRSLVASSGTLEFNNESFNWTGVTQNGTSSACIRRSNNSFFSRLNWLTHLNFKYPALNVTMPNNEQFDKLYIWGVHHPGTDKDQIFLYAQAAGRITVSTKRSQQAVIPNIGSRPRVRNIPSRVSIYWTIVKPGDILLINSTGNLIAPRGYFKIRSGKSSIMRSDAPIGKCNSACITPNGSIPNDKPFQNVNRITYGACPRYVKQNTLKLATGMRNVPEKQTRGIFGAIAGFIENGWEGMVDGWYGFRHQNSEGRGQAADLKSTQAAIDQINGKLNRLIGKTNEKFHQIEKEFSEVEGRIQDLEKYVEDTKIDLWSYNAELLVALENQHTIDLTDSEMNKLFEKTKKQLRENAEDMGNGCFKIYHKCDNACIGSIRNGTYDHDVYRDEALNNRFQIKGVELKSGYKDWILWISFAISCFLLCVALLGFIMWACQKGNIRCNICI

SEQ ID NO: 10782 - protein, 566 aa, synthetic construct
  REGION 1..566: note = hemagglutinin__InfluenzaA__AHC60671
MKTIIALSYILCLVFAQKLPGNDNSTATLCLGHHAVPNGTIVKTITNDQIEVTNATELVQSSSTGEICNSPHQILDGENCTLIDALLGDPQCDGFQNKEWDLFVERSKAHSNCYPYDVPDYASLRSLVASSGTLEFNNESFNWTGVTQNGTSSACIRRSNNSFFSRLNWLTHLNFKYPALNVTMPNNEQFDKLYIWGVHHPGTDKDQIFLYAQASGRITVSTKRSQQAVIPNIGSRPRVRNIPSRVSIYWTIVKPGDILLINSTGNLIAPRGYFKIRSGKSSIMRSDAPIGKCNSACITPNGSIPNDKPFQNVNRITYGACPRYVKQNTLKLATGMRNVPEKQTRGIFGAIAGFIENGWEGMVDGWYGFRHQNSEGRGQAADLKSTQAAIDQINGKLNRLIGKTNEKFHQIEKEFSEVEGRIQDLEKYVEDTKIDLWSYNAELLVALENQHTIDLTDSEMNKLFEKTKKQLRENAEDMGNGCFKIYHKCDNACIGSIRNGTYDHDVYRDEALNNRFQIKGVELKSGYKDWILWISFAISCFLLCVALLGFIMWACQKGNIRCNICI

SEQ ID NO: 10783 - protein, 566 aa, synthetic construct
  REGION 1..566: note = hemagglutinin__InfluenzaA__AHC60683
MKTIIALSYILCLVFAQKLPGNDNSTATLCLGHHAVPNGTIVKTITNDQIEVTNATELVQSSSTGEICNSPHQILDGENCTLIDALLGDPQCDGFQNKKWDLFVERSKAHSNCYPYDVPDYASLRSLVASSGTLEFNNESFNWTGVTQNGTSSACIRRSNNSFFSRLNWLTHLNFKYPALNVTMPNNEQFDKLYIWGVHHPGTDKDQIFLYAQAAGRITVSTKRSQQAVIPNIGSRPRVRNIPSRVSIYWTIVKPGDILLINSTGNLIAPRGYFKIRSGKSSIIRSDAPIGKCNSACITPNGSIPNDKPFQNVNRITYGACPRYVKQNTLKLATGMRNVPEKQTRGIFGAIAGFIENGWEGMVDGWYGFRHQNSEGRGQAADLKSTQAAIDQINGKLNRLIGKTNEKFHQIEKEFSEVEGRIQDLEKYVEDTKIDLWSYNAELLVALENQHTIDLTDSEMNKLFEKTKKQLRENAEDMGNGCFKIYHKCDNACIGSIRNGTYDHDVYRDEALNNRFQIKGVELKSGYKDWILWISFAISCFLLCVALLGFIMWACQKGNIRCNICI

SEQ ID NO: 10784 - protein, 566 aa, synthetic construct
  REGION 1..566: note = hemagglutinin__InfluenzaA__AHC60695
MKTIIALSYILCLVFAQKLPGNDNSTATLCLGHHAVPNGTIVKTITNDQIEVTNATELVQSSSTGEICNSPHQILDGENCTLIDALLGDPQCDGFQNKKWDLFVERSKAHSNCYPYDVPDYASLRSLVASSGTLEFNNESFNWTGVTQNGTSSACMRGSNNSFFSRLNWLTHLNFKYPALNVTMPNNEQFDKLYIWGVHHPGTDKDQIFLYAQASGRITVSTKRSQQAVIPNIGSRPRVRNIPSRVSIYWTIVKPGDILLINSTGNLIAPRGYFKIRSGKSSIMRSDAPIGKCNSACITPNGSIPNDKPFQNVNRITYGACPRYVKQNTLKLATGMRNVPEKQTRGIFGAIAGFIENGWEGMVDGWYGFRHQNSEGRGQAADLKSTQAAIDQINGKLNRLIGKTNEKFHQIEKEFSEVEGRIQDLEKYVEDTKIDLWSYNAELLVALENQHTIDLTDSEMNKLFEKTKKQLRENAEDMGNGCFKIYHKCDNACIGSIRNGTYDHDVYRDEALNNRFQIKGVELKSGYKDWILWISFAISCFLLCVALLGFIMWACQKGNIRCNICI

SEQ ID NO: 10785 - protein, 566 aa, synthetic construct
  REGION 1..566: note = hemagglutinin__InfluenzaA__AHC60707
MKTIIALSYILCLVFAQKLPGNDNSTATLCLGHHAVPNGTIVKTITDDQIEVTNATELVQNSSTGEICDSPHQILDGENCTLIDALLGDPQCDGFQNKKWDLFVERSKAYSNCYPYDVPDYASLRSLVASSGTLEFNNESFNWTGVTQNGTSSACIRRSNNSFFSRLNWLTHLNFKYPALNVTMPNNEQFDKLYIWGVHHPGTDKDQIFLYAQASGRITVSTKRSQQAVIPNIGSRPRVRNIPSRISIYWTIVKPGDILLINSTGNLIAPRGYFKIRSGKSSIMRSDAPIGKCNSECITPNGSIPNDKPFQNVNRITYGACPRYVKQNTLKLATGMRNVPEKQTRGIFGAIAGFIENGWEGMVDGWYGFRHQNSEGRGQAADLKSTQAAIDQINGKLNRLIGKTNEKFHQIEKEFSEVEGRIQDLEKYVEDTKIDLWSYNAELLVALENQHTIDLTDSEMNKLFEKTKKQLRENAEDMGNGCFKIYHKCDNACIGSIRNGTYDHDVYRDEALNNRFQIKGVELKSGYKDWIIWISFAISCFLLCVALLGFIMWACQKGNIRCNICI

SEQ ID NO: 10786 - protein, 566 aa, synthetic construct; identical to SEQ ID NO: 6855
  REGION 1..566: note = hemagglutinin__InfluenzaA__AHC60719

SEQ ID NO: 10787 - protein, 566 aa, synthetic construct; identical to SEQ ID NO: 6982
  REGION 1..566: note = hemagglutinin__InfluenzaA__AHC60731

SEQ ID NO: 10788 - protein, 566 aa, synthetic construct; identical to SEQ ID NO: 10693
  REGION 1..566: note = hemagglutinin__InfluenzaA__AHC60743

SEQ ID NO: 10789 - protein, 566 aa, synthetic construct; identical to SEQ ID NO: 3411
  REGION 1..566: note = hemagglutinin__InfluenzaA__AHC60767

SEQ ID NO: 10790 - protein, 566 aa, synthetic construct
  REGION 1..566: note = hemagglutinin__InfluenzaA__AHC60779
MKTIIALSYILCLVFAQKLPGNDNSTATLCLGHHAVPNGTIVKTITNDQIEVTNATELVQSSSTGEICNSPHQILDGENCTLIDALLGDPQCDGFQNKKWDLFVERSKAHSNCYPYDVPDYASLRSLVASSGTLEFNNERFNWTGVTQNGTSSACIRRSNNSFFSRLNWLTHLNFKYPALNVTMPNNEQFDKLYIWGVHHPGTDKDQIFLYAQAAGRITVSTKRSQQAVIPNIGSRPRVRNIPSRVSIYWTIVKPGDILLINSTGNLIAPRGYFKIRSGKSSIMRSDAPIGKCNSACITPNGSIPNDKPFQNVNRITYGACPRYVKQNTLKLATGMRNVPEKQTRGIFGAIAGFIENGWEGMVDGWYGFRHQNSEGRGQAADLKSTQAAIDQINGKLNRLIGKTNEKFHQIEKEFSEVEGRIQDLEKYVEDTKIDLWSYNAELLVALENQHTIDLTDSEMNKLFEKTKKQLRENAEDMGNGCFKIYHKCDNACIGSIRNGTYDHDVYRDEALNNRFQIKGVELKSGYKDWILWISFAISCFLLCVALLGFIMWACQKGNIRCNICI

SEQ ID NO: 10791 - protein, 566 aa, synthetic construct; identical to SEQ ID NO: 6982
  REGION 1..566: note = hemagglutinin__InfluenzaA__AHC60791

SEQ ID NO: 10792 - protein, 566 aa, synthetic construct; identical to SEQ ID NO: 10651
  REGION 1..566: note = hemagglutinin__InfluenzaA__AHC60803

SEQ ID NO: 10793 - protein, 566 aa, synthetic construct; identical to SEQ ID NO: 6855
  REGION 1..566: note = hemagglutinin__InfluenzaA__AHC60815

SEQ ID NO: 10794 - protein, 566 aa, synthetic construct
  REGION 1..566: note = hemagglutinin__InfluenzaA__AHC60827
MKTIIALSYILCLVFAQKLPGNDNSTATLCLGHHAVPNGTIVKTITNDQIEVTNATELVQSSSTDEICNSPHQILDGENCTLIDALLGDPQCDGFQNKKWDLFVERSKAHSNCYPYDVPDYASLRSLVASSGTLEFNNESFNWTGVTQNGTSSACIRGSNNSFFSRLNWLTHLNFKYPALNVTMPNNEQFDKLYIWGVHHPGTDKDQIFLYAQASGRITVSTKRSQQAVIPNIGSRPRVRNIPSRVSIYWTIVKPGDILLINSTGNLIAPRGYFKIRSGKSSIMRSDAPIGKCNSACITPNGSIPNDKPFQNVNRITYGACPRYVKQNTLKLATGMRNVPEKQTRGIFGAIAGFIENGWEGMVDGWYGFRHQNSEGRGQAADLKSTQAAIDQINGKLNRLIGKTNEKFHQIEKEFSEVEGRIQDLEKYVEDTKIDLWSYNAELLVALENQHTIDLTDSEMNKLFEKTKKQLRENAEDMGNGCFKIYHKCDNACIGSIRNGTYDHDVYRDEALNNRFQIKGVELKSGYKDWILWISFAISCFLLCVALLGFIMWACQKGNIRCNICI

SEQ ID NO: 10795 - protein, 566 aa, synthetic construct; identical to SEQ ID NO: 10629
  REGION 1..566: note = hemagglutinin__InfluenzaA__AHC60839

SEQ ID NO: 10796 - protein, 566 aa, synthetic construct; identical to SEQ ID NO: 6982
  REGION 1..566: note = hemagglutinin__InfluenzaA__AHC60851

SEQ ID NO: 10797 - protein, 566 aa, synthetic construct
  REGION 1..566: note = hemagglutinin__InfluenzaA__AHC60863
MKTIIALSYILCLVFAQKLPGNDNSTATLCLGHHAVPNGTIVKTITNDQIEVTNATELVQSSSTGEICNSPHQILDGENCTLIDALLGDPQCDGFQNKKWDLFVERSKAHSNCYPYDVPDYASLRSLVASSGTLEFNNESFNWTGVTQNGTSSACIRRSNNSFFSRLNWLTHLNFKYPALNVTMPNNEQFDKLYIWGVHHPGTDKDQIFLYAQAAGRITVSTKRSQQAVIPNIGSRPRVRNIPSRVSIYWTIVKPGDILLINSTGNLIAPRGYFKIRSGKSSIMRSDAPIGKCNSACITPNGSIPNDKPFQNVNRITYGACPRYVKQNTLKLATGMRNVPEKQTRGIFGAIAGFIENGWEGMVDGWYGFRHQNSEGRGQAADLKSTQAAIDQINGKLNRLIGKTNEKFHQIEKEFSEVEGRIQDLEKYVEDTKIDLWSYNAELLVALENQHTIDLTDSEMNKLFEKTKKQLRENAEDMGNGCFKIYHKCDNACIGSIRNGTYDHDVYRDEALNNRFQIKGVELKAGYKDWILWISFAISCFLLCVALLGFIMWACQKGNIRCNICI

SEQ ID NO: 10798 - protein, 566 aa, synthetic construct; identical to SEQ ID NO: 6982
  REGION 1..566: note = hemagglutinin__InfluenzaA__AHC60875

SEQ ID NO: 10799 - protein, 566 aa, synthetic construct; identical to SEQ ID NO: 6982
  REGION 1..566: note = hemagglutinin__InfluenzaA__AHC60887

SEQ ID NO: 10800 - protein, 566 aa, synthetic construct; identical to SEQ ID NO: 3411
  REGION 1..566: note = hemagglutinin__InfluenzaA__AHC60899

SEQ ID NO: 10801 - protein, 566 aa, synthetic construct; identical to SEQ ID NO: 7782
  REGION 1..566: note = hemagglutinin__InfluenzaA__AHC60911

SEQ ID NO: 10802 - protein, 566 aa, synthetic construct; identical to SEQ ID NO: 10618
  REGION 1..566: note = hemagglutinin__InfluenzaA__AHC60923

SEQ ID NO: 10803 - protein, 566 aa, synthetic construct; identical to SEQ ID NO: 7782
  REGION 1..566: note = hemagglutinin__InfluenzaA__AHC60935

SEQ ID NO: 10804 - protein, 566 aa, synthetic construct; identical to SEQ ID NO: 6982
  REGION 1..566: note = hemagglutinin__InfluenzaA__AHC60947

SEQ ID NO: 10805 - protein, 566 aa, synthetic construct; identical to SEQ ID NO: 7782
  REGION 1..566: note = hemagglutinin__InfluenzaA__AHC60959

SEQ ID NO: 10806 - protein, 566 aa, synthetic construct; identical to SEQ ID NO: 6855
  REGION 1..566: note = hemagglutinin__InfluenzaA__AHC60971

SEQ ID NO: 10807 - protein, 566 aa, synthetic construct; identical to SEQ ID NO: 7782
  REGION 1..566: note = hemagglutinin__InfluenzaA__AHC60983

SEQ ID NO: 10808 - protein, 566 aa, synthetic construct; identical to SEQ ID NO: 6982
  REGION 1..566: note = hemagglutinin__InfluenzaA__AHC61007

SEQ ID NO: 10809 - protein, 566 aa, synthetic construct; identical to SEQ ID NO: 6855
  REGION 1..566: note = hemagglutinin__InfluenzaA__AHC61019

SEQ ID NO: 10810 - protein, 566 aa, synthetic construct
  REGION 1..566: note = hemagglutinin__InfluenzaA__AHC61031
MKTIIALSYILCLVFAQKLPGNDNSTATLCLGHHAVPNGTIVKTITNDQIEVTNATELVQSSSTGEICNSPHQILDGENCTLIDALLGDPQCDGFQNKKWDLFVERSKAHSNCYPYDVPDYASLRSLVASSGTLEFNNESFNWTGVTQNGTSSACIRRSNNSFFSRLNWLTHLNFKYPALNVTMPNNEQFDKLYIWGVHHPGTDKDQIFLYAQAAGRITVSTKRSQQAVIPNIGSRPRVRNIPSRVSIYWTIVKPGDILLINSTGNLIAPRGYFKIRSGKSSIMRSDAPIGKCNSACITPNGSIPNDKPFQNVNRITYGACPRYVKQNTLKLATGMRNVPEKQTRGIFGAIAGFIENGWEGMVDGWYGFRHQNSEGRGQAADLKSTQAAIDQINGKLNRLIGKTNEKFHQIEKEFSEVEGRIQDLEKYVEDTKIDLWSYNAELLVALENQHTIDLTDSEMNKLFEKTKKQLRENAEDMGNGCFKIYHKCDNACIGSIRNGTYDHDVYRDEALNNRFQIKGVELKSGYKDWILWISFAISCFLLCVVLLGFIMWACQKGNIRCNICI

SEQ ID NO: 10811 - protein, 566 aa, synthetic construct; identical to SEQ ID NO: 7782
  REGION 1..566: note = hemagglutinin__InfluenzaA__AHC61043

SEQ ID NO: 10812 - protein, 566 aa, synthetic construct
  REGION 1..566: note = hemagglutinin__InfluenzaA__AHC61055
MKTIIALSYILCLVFAQKLPGNDNSTATLCLGHHAVPNGTIVKTITNDQIEVTNATELVQSSSTGEICNSPHQILDGENCTLIDALLGDPQCDGFQNKKWDLFVERSKAHSNCYPYDVPDYASLRSLVASSGTLEFNNESFNWTGVTQNGTSSACIRRSNNSFFSRLNWLTHLNFKYPALNVTMPNNEQFDKLYIWGVHHPGTDKDQIFLYAQAAGRITVSTKRSQQAVIPNIGSRPRVRNIPSRVSIYWTIVKPGDILLINSTGNLIAPRGYFKIRSGKSSIMRSDAPIGKCNSACITPNGSIPNDKPFQNVNRITYGACPRYVKQNTLKLATGMRNVPEKQTRGIFGAIAGFIENGWEGMVDGWYGFRHQNSEGRGQAADLKSTQAAIDQINGKLNRLIGKTNEKFHQIEKEFSEVEGRIQNLEKYVEDTKIDLWSYNAELLVALENQHTIDLTDSEMNKLFEKTKKQLRENAEDMGNGCFKIYHKCDNACIGSIRNGTYDHDVYRDEALNNRFQIKGVELKSGYKDWILWISFAISCFLLCVALLGFIMWACQKGNIRCNICI

SEQ ID NO: 10813 - protein, 566 aa, synthetic construct; identical to SEQ ID NO: 10679
  REGION 1..566: note = hemagglutinin__InfluenzaA__AHC61067

SEQ ID NO: 10814 - protein, 566 aa, synthetic construct; identical to SEQ ID NO: 9074
  REGION 1..566: note = hemagglutinin__InfluenzaA__AHC61079

SEQ ID NO: 10815 - protein, 566 aa, synthetic construct; identical to SEQ ID NO: 6982
  REGION 1..566: note = hemagglutinin__InfluenzaA__AHC61103

SEQ ID NO: 10816 - protein, 566 aa, synthetic construct; identical to SEQ ID NO: 6982
  REGION 1..566: note = hemagglutinin__InfluenzaA__AHC61115

SEQ ID NO: 10817 - protein, 566 aa, synthetic construct; identical to SEQ ID NO: 7782
  REGION 1..566: note = hemagglutinin__InfluenzaA__AHC61127

SEQ ID NO: 10818 - protein, 566 aa, synthetic construct
  REGION 1..566: note = hemagglutinin__InfluenzaA__AHC61139
MKTIIALSYILCLVFAQKLPGNDNSTATLCLGHHAVPNGTIVKTITNDQIEVTNATELVQSSSTGEICNSPHQILDGENCTLIDALLGDPQCDGFQNKKWDLFVERSKAHSNCYPYDVPDYASLRSLVASSGTLEFNNESFNWTGVTQNGTSSACIRRSNNSFFSRLNWLTHLNFKYPALNVTMPNNEQFDKLYIWGVHHPGTDKDQIFLYAQASGRITVSTQRSQQAVIPNIGSRPRVRNIPSRVSIYWTIVKPGDILLINSTGNLIAPRGYFKIRSGKSSIMRSDAPIGKCNSACITPNGSIPNDKPFQNVNRITYGACPRYVKQNTLKLATGMRNVPEKQTRGIFGAIAGFIENGWEGMVDGWYGFRHQNSEGRGQAADLKSTQAAIDQINGKLNRLIGKTNEKFHQIEKEFSEVEGRIQDLEKYVEDTKIDLWSYNAELLVALENQHTIDLTDSEMNKLFEKTKKQLRENAEDMGNGCFKIYHKCDNACIGSIRNGTYNHDVYRDEALNNRFQIKGVELKSGYKDWILWISFAISCFLLCVALLGFIMWACQKGNIRCNICI

SEQ ID NO: 10819 - protein, 566 aa, synthetic construct; identical to SEQ ID NO: 6982
  REGION 1..566: note = hemagglutinin__InfluenzaA__AHC61151

SEQ ID NO: 10820 - protein, 566 aa, synthetic construct
  REGION 1..566: note = hemagglutinin__InfluenzaA__AHC61163
MKTIIALSYILCLVFAQKLPGNDNSTATLCLGHHAVPNGTIVKTITNDQIEVTNATELVQSSSTGEICNSPHQILDGENCTLIDALLGDPQCDGFQNKKWDLFVERSKAHSNCYPYDVPDYASLRSLVASSGTLEFKNESFNWTGVTQNGTSSACIRRSNNSFFSRLNWLTHLNFKYPALNVTMPNNEQFDKLYIWGVHHPGTDKDQIFLYAQASGRITVSTKRSQQAVVPNIGSRPRVRNIPSRVSIYWTIVKPGDILLINSTGNLIAPRGYFKIRSGKSSIMRSDAPIGKCNSACITPNGSIPNDKPFQNVNRITYGACPRYVKQNTLKLATGMRNVPEKQTRGIFGAIAGFIENGWEGMVDGWYGFRHQNSEGRGQAADLKSTQAAIDQINGKLNRLIGKTNEKFHQIEKEFSEVEGRIQDLEKYVEDTKIDLWSYNAELLVALENQHTIDLTDSEMNKLFEKTKKQLRENAEDMGNGCFKIYHKCDNACIGSIRNGTYDHDVYRDEALNNRFQIKGVELKSGYKDWILWISFAISCFLLCVALLGFIMWACQKGNIRCNICI

SEQ ID NO: 10821 - protein, 566 aa, synthetic construct; identical to SEQ ID NO: 7782
  REGION 1..566: note = hemagglutinin__InfluenzaA__AHC61175

SEQ ID NO: 10822 - protein, 566 aa, synthetic construct; identical to SEQ ID NO: 6982
  REGION 1..566: note = hemagglutinin__InfluenzaA__AHC61187

SEQ ID NO: 10823 - protein, 566 aa, synthetic construct; identical to SEQ ID NO: 6855
  REGION 1..566: note = hemagglutinin__InfluenzaA__AHC61199

SEQ ID NO: 10824 - protein, 566 aa, synthetic construct; identical to SEQ ID NO: 10618
  REGION 1..566: note = hemagglutinin__InfluenzaA__AHC61211

SEQ ID NO: 10825 - protein, 566 aa, synthetic construct; identical to SEQ ID NO: 6855
  REGION 1..566: note = hemagglutinin__InfluenzaA__AHC61223

SEQ ID NO: 10826 - protein, 566 aa, synthetic construct; identical to SEQ ID NO: 6982
  REGION 1..566: note = hemagglutinin__InfluenzaA__AHC61235

SEQ ID NO: 10827 - protein, 566 aa, synthetic construct; identical to SEQ ID NO: 7782
  REGION 1..566: note = hemagglutinin__InfluenzaA__AHC61247

SEQ ID NO: 10828 - protein, 566 aa, synthetic construct; identical to SEQ ID NO: 7782
  REGION 1..566: note = hemagglutinin__InfluenzaA__AHC61259

SEQ ID NO: 10829 - protein, 566 aa, synthetic construct; identical to SEQ ID NO: 6982
  REGION 1..566: note = hemagglutinin__InfluenzaA__AHC61271

SEQ ID NO: 10830 - protein, 566 aa, synthetic construct; identical to SEQ ID NO: 6855
  REGION 1..566: note = hemagglutinin__InfluenzaA__AHC61283

SEQ ID NO: 10831 - protein, 566 aa, synthetic construct; identical to SEQ ID NO: 9074
  REGION 1..566: note = hemagglutinin__InfluenzaA__AHC61295

SEQ ID NO: 10832 - protein, 566 aa, synthetic construct; identical to SEQ ID NO: 10686
  REGION 1..566: note = hemagglutinin__InfluenzaA__AHC61307

SEQ ID NO: 10833 - protein, 566 aa, synthetic construct; identical to SEQ ID NO: 6982
  REGION 1..566: note = hemagglutinin__InfluenzaA__AHC61319

SEQ ID NO: 10834 - protein, 566 aa, synthetic construct; identical to SEQ ID NO: 10618
  REGION 1..566: note = hemagglutinin__InfluenzaA__AHC61331

SEQ ID NO: 10835 - protein, 566 aa, synthetic construct
  REGION 1..566: note = hemagglutinin__InfluenzaA__AHC61343
MKTIIALSYILCLVFAQKLPGNDNSTATLCLGHHAVPNGTIVKTITNDQIEVTNATELVQSSSTGEICNSPHQILDGENCTLIDALLGDPQCDGFQNKKWDLFVERSKAHSNCYPYDVPDYASLRSLVASSGTLEFNNESFNWTGVTQNGTSSACIRGSNNSFFSRLNWLTHLNFKYPALNVTMPNNEQFDKLYIWGVHHPGTDKDQIFLYAQASGRITVSTKRSQQAVIPNIGSRPRVRNIPSRISIYWTIVKPGDILLINSTGNLIAPRGYFKIRSGKSSIMRSDAPIGKCNSACITPNGSIPNDKPFQNVNRITYGACPRYVKQNTLKLATGMRNVPEKQTRGIFGAIAGFIENGWEGMVDGWYGFRHQNSEGRGQAADLKSTQAAIDQINGKLNRLIGKTNEKFHQIEKEFSEVEGRIQDLEKYVEDTKIDLWSYNAELLVALENQHTIDLTDSEMNKLFEKTKKQLRENAEDMGNGCFKIYHKCDNACIGSIRNGTYDHDVYRDEALNNRFQIKGVELKSGYKDWILWISFAISCFLLCVALLGFIMWACQKGNIRCNICI

SEQ ID NO: 10836 - protein, 566 aa, synthetic construct; identical to SEQ ID NO: 6855
  REGION 1..566: note = hemagglutinin__InfluenzaA__AHC61355

SEQ ID NO: 10837 - protein, 566 aa, synthetic construct; identical to SEQ ID NO: 6855
  REGION 1..566: note = hemagglutinin__InfluenzaA__AHC61367

SEQ ID NO: 10838 - protein, 566 aa, synthetic construct; identical to SEQ ID NO: 6982
  REGION 1..566: note = hemagglutinin__InfluenzaA__AHC61379

SEQ ID NO: 10839 - protein, 566 aa, synthetic construct; identical to SEQ ID NO: 6855
  REGION 1..566: note = hemagglutinin__InfluenzaA__AHC61391

SEQ ID NO: 10840 - protein, 566 aa, synthetic construct
  REGION 1..566: note = hemagglutinin__InfluenzaA__AHC61403
MKTIIALSYILCLVFAQKLPGNDNSTATLCLGHHAVPNGTIVKTITNDQIEVTNATELVQSSSTGEICNSPHQILDGENCTLIDALLGDPQCDGFQNKKWDLFVERSKAHSNCYPYDVPDYASLRSLVASSGTLEFNNESFNWTGVTQNGTSSACIRRSNNSFFSRLNWLTHLNFKYPALNVTMPNNEQFDKLYIWGVHHPGTDKDQIFLYAQASGRITVSTKRSQQAVIPNIGSRPRVRNIPSRVSIYWTIVKPGDILLINSTGNLIAPRGYFKIRSGKSSIMRSDAPIGKCNSACITPNGSIPNDKPFQNVNRITYGACSRYVKQNTLKLATGMRNVPEKQTRGIFGAIAGFIENGWEGMVDGWYGFRHQNSEGRGQAADLKSTQAAIDQINGKLNRLIGKTNEKFHQIEKEFSEVEGRIQDLEKYVEDTKIDLWSYNAELLVALENQHTIDLTDSEMNKLFEKTKKQLRENAEDMGNGCFKIYHKCDNACIGSIRNGTYDHDVYRDEALNNRFQIKGVELKSGYKDWILWISFAISCFLLCVALLGFIMWACQKGNIRCNICI

SEQ ID NO: 10841 - protein, 566 aa, synthetic construct; identical to SEQ ID NO: 6982
  REGION 1..566: note = hemagglutinin__InfluenzaA__AHC61415

SEQ ID NO: 10842 - protein, 566 aa, synthetic construct
  REGION 1..566: note = hemagglutinin__InfluenzaA__AHC61427
MKTIIALSYILCLVFAQKLPGNDNSTATLCLGHHAVPNGTIVKTITNDQIEVTNATELVQSSSTGEICNSPHQILDGENCTLIDALLGDPQCDGFQNNKWDLFVERSKAHSNCYPYDVPDYASLRSLVASSGTLEFNNESFNWTGVTQNGTSSACIRRSNNSFFSRLNWLTHLNFKYPALNVTMPNNEQFDKLYIWGVHHPGTDKDQIFLYAQAAGRITVSTKRSQQAVIPNIGSRPRVRNIPSRVSIYWTIVKPGDILLINSTGNLIAPRGYFKIRSGKSSIIRSDAPIGKCNSACITPNGSIPNDKPFQNVNRITYGACPRYVKQNTLKLATGMRNVPEKQTRGIFGAIAGFIENGWEGMVDGWYGFRHQNSEGRGQAADLKSTQAAIDQINGKLNRLIGKTNEKFHQIEKEFSEVEGRIQDLEKYVEDTKIDLWSYNAELLVALENQHTIDLTDSEMNKLFEKTKKQLRENAEDMGNGCFKIYHKCDNACIGSIRNGTYDHDVYRDEALNNRFQIKGVELKSGYKDWILWISFAISCFLLCVALLGFIMWACQKGNIRCNICI

SEQ ID NO: 10843 - protein, 566 aa, synthetic construct
  REGION 1..566: note = hemagglutinin__InfluenzaA__AHC61439
MKTIIALSYILCLVFAQKLPGNDNSTATLCLGHHAVPNGTIVKTITNDQIEVTNATELVQSSSTGEICNSPHQILDGENCTLIDALLGDPQCDGFQNKKWDLFVERSKAHSNCYPYDVPDYASLRSLVASSGTLEFNNESFNWTGVTQNGTSSACIRRSNNSFFSRLNWLTHLNFKYPALNVTMPNNEQFDKLYIWGVHHPGTDKDQIFLYAQAAGRITVSTKRSQQAVIPNIGSRPRVRNIPSRVSIYWTIVKPGDILLINSTGNLIAPRGYFKIRSGKSSIMRSDAPIGKCNSTCITPNGSIPNDKPFQNVNRITYGACPRYVKQNTLKLATGMRNVPEKQTRGIFGAIAGFIENGWEGMVDGWYGFRHQNSEGRGQAADLKSTQAAIDQINGKLNRLIGKTNEKFHQIEKEFSEVEGRIQDLEKYVEDTKIDLWSYNAELLVALENQHTIDLTDSEMNKLFEKTKKQLRENAEDMGNGCFKIYHKCDNACIGSIRNGTYDHDVYRDEALNNRFQIKGVELKSGYKDWILWISFAISCFLLCVALLGFIMWACQKGNIRCNICI

SEQ ID NO: 10844 - protein, 566 aa, synthetic construct; identical to SEQ ID NO: 6855
  REGION 1..566: note = hemagglutinin__InfluenzaA__AHC61451

SEQ ID NO: 10845 - protein, 566 aa, synthetic construct; identical to SEQ ID NO: 6855
  REGION 1..566: note = hemagglutinin__InfluenzaA__AHC61463

SEQ ID NO: 10846 - protein, 566 aa, synthetic construct; identical to SEQ ID NO: 7782
  REGION 1..566: note = hemagglutinin__InfluenzaA__AHC61475

SEQ ID NO: 10847 - protein, 566 aa, synthetic construct; identical to SEQ ID NO: 6982
  REGION 1..566: note = hemagglutinin__InfluenzaA__AHC61487

SEQ ID NO: 10848 - protein, 566 aa, synthetic construct; identical to SEQ ID NO: 7782
  REGION 1..566: note = hemagglutinin__InfluenzaA__AHC61499

SEQ ID NO: 10849 - protein, 566 aa, synthetic construct; identical to SEQ ID NO: 6855
  REGION 1..566: note = hemagglutinin__InfluenzaA__AHC61511

SEQ ID NO: 10850 - protein, 566 aa, synthetic construct; identical to SEQ ID NO: 9074
  REGION 1..566: note = hemagglutinin__InfluenzaA__AHC61523

SEQ ID NO: 10851 - protein, 566 aa, synthetic construct
  REGION 1..566: note = hemagglutinin__InfluenzaA__AHC61535
MKTIIALSYILCLVFAQKLPGNDNSTATLCLGHHAVPNGTIVKTITNDQIEVTNATELVQSSSTGEICNSPHQILDGENCTLIDALLGDPQCDGFQNKKWDLFVERSKAHSNCYPYDVPDYASLRSLVASSGTLEFNNESFNWTGVTQNGTSSACIRRSNNSFFSRLNWLTHLNFKYPALNVTMPNNEQFDKLYIWGVHHPGTDKDQIFLYAQASGRITVSTKRSQQAVIPNIGSRPRVRNIPSRVSIYWTIVKPGDILLINSTGNLIAPRGYFKIRSGKSSIMRSDAPIGKCNSACITPNGSIPNDKPFQNVNRITYGACPRYVKQNTLKLATGMRNVPEKQTRGIFGAIAGFIENGWEGMVDGWYGFRHQNSEGRGQAADLKSTQAAIDQINGKLNRLIGKTNEKFHQIEKEFSEVEGRIQDLEKYVEDTKIDLWSYNAELLVALENQHTIDLTDSEMTKLFEKTKKQLRENAEDMGNGCFKIYHKCDNACIGSIRNGTYDHDVYRDEALNNRFQIKGVELKSGYKDWILWISFAISCFLLCVALLGFIMWACQKGNIRCNICI

SEQ ID NO: 10852 - protein, 566 aa, synthetic construct; identical to SEQ ID NO: 6855
  REGION 1..566: note = hemagglutinin__InfluenzaA__AHC61547

SEQ ID NO: 10853 - protein, 566 aa, synthetic construct
  REGION 1..566: note = hemagglutinin__InfluenzaA__AHC61559
MKTIIALSYILCLVFAQKLPGNDNSTATLCLGHHAVPNGTIVKTITNDQIEVTNATELVQNSSTGEICDSPHQIIDGENCTLIDALLGDPQCDGFQNKKWDLFVERSKAYSNCYPYDVPDYASLRSLVASSGTLEFNNESFNWTGVTQNGTSSACIRRSNNSFFSRLNWLTHLNFKYPALNVTMPNNEQFDKLYIWGVHHPGTDKDQIFLYAQASGRITVSTKRSQQAVIPNIGSRPRVRNIPSRISIYWTIVKPGDILLINSTGNLIAPRGYFKIRSGKSSIMRSDAPIGKCNSECITPNGSIPNDKPFQNVNRITYGACPRYVKQNTLKLATGMRNVPEKQTRGIFGAIAGFIENGWEGMVDGWYGFRHQNSEGRGQAADLKSTQAAIDQINGKLNRLIRKTNEKFHQIEKEFSEVEGRIQDLEKYVEDTKIDLWSYNAELLVALENQHTIDLTDSEMNKLFEKTKKQLRENAEDMGNGCFKIYHKCDNACIGSIRNGTYDHDVYRDEALNNRFQIKGVELKSGHKDWILWISFAISCFLLCVALLGFIMWACQKGNIRCNICI

SEQ ID NO: 10854 - protein, 566 aa, synthetic construct; identical to SEQ ID NO: 9074
  REGION 1..566: note = hemagglutinin__InfluenzaA__AHC61571

SEQ ID NO: 10855 - protein, 566 aa, synthetic construct; identical to SEQ ID NO: 6855
  REGION 1..566: note = hemagglutinin__InfluenzaA__AHC61583

SEQ ID NO: 10856 - protein, 566 aa, synthetic construct; identical to SEQ ID NO: 9074
  REGION 1..566: note = hemagglutinin__InfluenzaA__AHC61595

SEQ ID NO: 10857 - protein, 566 aa, synthetic construct
  REGION 1..566: note = hemagglutinin__InfluenzaA__AHC61607
MKTIIALSYILCLVFAQKLPGNDNSTATLCLGHHAVPNGTIVKTITNDQIEVTNATELVQNSSTGEICDSPHQILDGENCTLIDALLGDPQCDGFQNKKWDLFVERSKAYSNCYPYDVPDYASLRSLVASSGTLEFNNESFNWTGVTQNGTSSACIRRSNNSFFSRLNWLTHLNFKYPALNVTMPNNEQFDKLYIWGVHHPGTDKDQIFLYAQASGRITVSTKRSQQAVIPNIGSRPRVRNIPSRISIYWTIVKPGDILLINSTGNLIAPRGYFKIRSGKSSIMRSDAPIGKCNSECITPNGSIPNDKPFQNVNRITYGACPRYVKQHTLKLATGMRNVPEKQTRGIFGAIAGFIENGWEGMVDGWYGFRHQNSEGRGQAADLKSTQAAIDQINGKLNRLIGKTNEKFHQIEKEFSEVEGRIQDLEKYVEDTKIDLWSYNAELLVALENQHTIDLTDSEMNKLFEKTKKQLRENAEDMGNGCFKIYHKCDNACIGSIRNGTYDHDVYRDEALNNRFQIKGVELKSGYKDWILWISFAISCFLLCVALLGFIMWACQKGNIRCNICI

SEQ ID NO: 10858 - protein, 566 aa, synthetic construct; identical to SEQ ID NO: 9074
  REGION 1..566: note = hemagglutinin__InfluenzaA__AHC61619

SEQ ID NO: 10859 - protein, 566 aa, synthetic construct
  REGION 1..566: note = hemagglutinin__InfluenzaA__AHC61631
MKTIIALSYILCLVFAQKLPGNDNSTATLCLGHHAVPNGTIVKTITNDQIEVTNATELVQSSSTGEICNSPHQILDGENCTIIDALLGDPQCDGFQNKKWDLFVERSKAHSNCYPYDVPDYASLRSLVASSGTLEFNNESFNWTGVTQNGTSSACIRRSNNSFFSRLNWLTHLNFKYPALNVTMPNNEQFDKLYIWGVHHPGTDKDQIFLYAQAAGRITVSTKRSQQAVIPNIGSRPRVRNIPSRVSIYWTIVKPGDILLINSTGNLIAPRGYFKIRSGKSSIMRSDAPIGKCNSACITPNGSIPNDKPFQNVNRITYGACPRYVKQNTLKLATGMRNVPEKQTRGIFGAIAGFIENGWEGMVDGWYGFRHQNSEGRGQAADLKSTQAAIDQINGKLNRLIGKTNEKFHQIEKEFSEVEGRIQDLEKYVEDTKIDLWSYNAELLVALENQHTIDLTDSEMNKLFEKTKKQLRENAEDMGNGCFKIYHKCDNACIGSIRNGTYDHDVYRDEALNNRFQIKGVELKSGYKDWILWISFAISCFLLCVALLGFIMWACQKGNIRCNICI

SEQ ID NO: 10860 - protein, 566 aa, synthetic construct
  REGION 1..566: note = hemagglutinin__InfluenzaA__AHC61643
MKTIIALSYVLCLVFAQKLPGNDNSTATLCLGHHAVPNGTIVKTITNDQIEVTNATELVQSSSTGEICNSPHQILDGENCTLIDALLGDPQCDGFQNKKWDLFVERSKAHSNCYPYDVPDYASLRSLVASSGTLEFNNESFNWTGVTQNGTSSACIRRSNNSFFSRLNWLTHLNFKYPALNVTMPNNEQFDKLYIWGVHHPGTDKDQIFLYAQAAGRITVSTKRSQQAVIPNIGSRPRVRNIPSRVSIYWTIVKPGDILLINSTGNLIAPRGYFKIRSGKSSIMRSDAPIGKCNSACITPNGSIPNDKPFQNVNRITYGACPRYVKQNTLKLATGMRNVPEKQTRGIFGAIAGFIENGWEGMVDGWYGFRHQNSEGRGQAADLKSTQAAIDQINGKLNRLIGKTNEKFHQIEKEFSEVEGRIQDLEKYVEDTKIDLWSYNAELLVALENQHTIDLTDSEMNKLFEKTKKQLRENAEDMGNGCFKIYHKCDNACIGSIRNGTYDHDVYRDEALNNRFQIKGVELKSGYKDWILWISFAISCFLLCVALLGFIMWACQKGNIRCNICI

SEQ ID NO: 10861 - protein, 566 aa, synthetic construct
  REGION 1..566: note = hemagglutinin__InfluenzaA__AHC61655
MKTIIALSYILCLVFTQKLPGNDNSTATLCLGHHAVPNGTIVKTITNDQIEVTNATELVQSSSTGEICNSPHQILDGENCTLIDALLGDPQCDGFQNNKWDLFVERSKAHSNCYPYDVPDYASLRSLVASSGTLEFNNESFNWTGVTQNGTSSACIRRSNNSFFSRLNWLTHLNFKYPALNVTMPNNEQFDKLYIWGVHHPGTDKDQIFLYAQAAGRITVSTKRSQQAVIPNIGSRPRVRNIPSRVSIYWTIVKPGDILLINSTGNLIAPRGYFKIRSGKSSIIRSDAPIGKCNSACITPNGSIPNDKPFQNVNRITYGACPRYVKQNTLKLATGMRNVPEKQTRGIFGAIAGFIENGWEGMVDGWYGFRHQNSEGRGQAADLKSTQAAIDQINGKLNRLIGKTNEKFHQIEKEFSEVEGRIQDLEKYVEDTKIDLWSYNAELLVALENQHTIDLTDSEMNKLFEKTKKQLRENAEDMGNGCFKIYHKCDNACIGSIRNGTYDHDVYRDEALNNRFQIKGVELKSGYKDWILWISFAISCFLLCVALLGFIMWACQKGNIRCNICI

SEQ ID NO: 10862 - protein, 566 aa, synthetic construct
  REGION 1..566: note = hemagglutinin__InfluenzaA__AHC61667
MKTIIALSYILCLVFAQKLPGNDNSTATLCLGHHAVPNGTIVKTITNDQIEVTNATELVQSSSTGEICDSPHQILDGENCTLIDALLGDPQCDGFQNKKWDLFVERSKAYSNCYPYDVPDYASLRSLVASSGTLEFNNESFNWTGVTQNGTSSACIRRSNNSFFSRLNWLTHLNFKYPALNVTMPNNEQFDKLYIWGVHHPGTDKDQIFLYAQSSGRITVSTKRSQQAVIPNIGSRPRIRNIPSRISIYWTIVKPGDILLINSTGNLIAPRGYFKIRSGKSSIMRSDAPIGKCNSECITPNGSIPNDKPFQNVNRITYGACPRYVKQSTLKLATGMRNVPEKQTRGIFGAIAGFIENGWEGMVDGWYGFRHQNSEGRGQAADLKSTQAAIDQINGKLNRLIGKTNEKFHQIEKEFSEVEGRIQDLEKYVEDTKIDLWSYNAELLVALENQHTIDLTDSEMNKLFEKTKKQLRENAEDMGNGCFKIYHKCDNACIGSIRNGTYNHDVYRDEALNNRFQIKGVELKSGYKDWILWISFAISCFLLCVALLGFIMWACQKGNIRCNICI

SEQ ID NO: 10863 - protein, 566 aa, synthetic construct; identical to SEQ ID NO: 10618
  REGION 1..566: note = hemagglutinin__InfluenzaA__AHC61679

SEQ ID NO: 10864 - protein, 566 aa, synthetic construct; identical to SEQ ID NO: 9074
  REGION 1..566: note = hemagglutinin__InfluenzaA__AHC61691

SEQ ID NO: 10865 - protein, 566 aa, synthetic construct; identical to SEQ ID NO: 6855
  REGION 1..566: note = hemagglutinin__InfluenzaA__AHC61703

SEQ ID NO: 10866 - protein, 566 aa, synthetic construct; identical to SEQ ID NO: 10651
  REGION 1..566: note = hemagglutinin__InfluenzaA__AHC61715

SEQ ID NO: 10867 - protein, 566 aa, synthetic construct; identical to SEQ ID NO: 7782
  REGION 1..566: note = hemagglutinin__InfluenzaA__AHC61727

SEQ ID NO: 10868 - protein, 566 aa, synthetic construct; identical to SEQ ID NO: 6855
  REGION 1..566: note = hemagglutinin__InfluenzaA__AHC61739

SEQ ID NO: 10869 - protein, 566 aa, synthetic construct
  REGION 1..566: note = hemagglutinin__InfluenzaA__AHC61751
MKTIIALSYILCLVFAQKLPGNDNSTATLCLGHHAVPNGTIVKTITNDQIEVTNATELVQNSSTGEICDSPHQILDGENCTLIDALLGDPQCDGFQNKKWDLFVERSKAYSNCYPYDVPDYASLRSLVASSGTLEFNNESFNWTGVTQNGTSSACIRRSNNSFFSRLNWLTHLNFKYPALNVTMPNNEQFDKLYIWGVHHPGTDKDQIFLYAQASGRITVSTKRSQQAVIPNVGSRPRVRNIPSRISIYWTIVKPGDILLINSTGNLIAPRGYFKIRSGKSSIMRSDAPIGKCNSECITPNGSIPNDKPFQNVNRITYGACPRYVKQNTLKLATGMRNVPEKQTRGIFGAIAGFIENGWEGMVDGWYGFRHQNSEGRGQAADLKSTQAAIDQINGKLNRLIGKTNEKFHQIEKEFSEVEGRIQDLEKYVEDTKIDLWSYNAELLVALENQHTIDLTDSEMNKLFEKTKKQLRENAEDMGNGCFKIYHKCDNACIGSIRNGTYDHDVYRDEALNNRFQIKGVELKSGYKDWILWISFAISCFLLCVALLGFIMWACQKGNIRCNICI

SEQ ID NO: 10870 - protein, 566 aa, synthetic construct
  REGION 1..566: note = hemagglutinin__InfluenzaA__AHC61763
MKTIIALSYILCLVFAQKLPGNDNSTATLCLGHHAVPNGTIVKTITNDQIEVTNATELVQSSSTGEICNSPHQILDGENCTLIDALLGDPQCDGFQNKKWDLFVERSKAHSNCYPYDVPDYASLRSLVASSGTLEFNNESFNWTGVTQNGTSSACIRRSNNSFFSRLNWLTHLNFKYPALNVTMPNNEQFDKLYIWGVHHPGTDKDQIFLYAQAAGRITVSTKRSQQTVIPNIGSRPRVRNIPSRVSIYWTIVKPGDILLINSTGNLIAPRGYFKIRSGKSSIMRSDAPIGKCNSACITPNGSIPNDKPFQNVNRITYGACPRYVKQNTLKLATGMRNVPEKQTRGIFGAIAGFIENGWEGMVDGWYGFRHQNSEGRGQAADLKSTQAAIDQINGKLNRLIGKTNEKFHQIEKEFSEVEGRIQDLEKYVEDTKIDLWSYNAELLVALENQHTIDLTDSEMNKLFEKTKKQLRENAEDMGNGCFKIYHKCDNACIGSIRNGTYDHDVYRDEALNNRFQIKGVELKSGYKDWILWISFAISCFLLCVALLGFIMWACQKGNIRCNICI

SEQ ID NO: 10871 - protein, 566 aa, synthetic construct; identical to SEQ ID NO: 6982
  REGION 1..566: note = hemagglutinin__InfluenzaA__AHC61775

SEQ ID NO: 10872 - protein, 566 aa, synthetic construct; identical to SEQ ID NO: 7782
  REGION 1..566: note = hemagglutinin__InfluenzaA__AHC61787

SEQ ID NO: 10873 - protein, 566 aa, synthetic construct; identical to SEQ ID NO: 10618
  REGION 1..566: note = hemagglutinin__InfluenzaA__AHC61799

SEQ ID NO: 10874 - protein, 566 aa, synthetic construct
  REGION 1..566: note = hemagglutinin__InfluenzaA__AHC61823
MKTIIALSYILCLVFAQKLPGNDNSTATLCLGHHAVPNGTIVKTITNDQIEVTNATELVQSSSTGEICDSPHQILDGENCTLIDALLGDPQCDGFQNKKWDLFVERSKAYSNCYPYDVPDYASLRSLVASSGTLEFNNESFNWTGVTQNGTSSACIRRSNSSFFSRLNWLTHLNFKYPALNVTMPNNEQFDKLYIWGVHHPGTDKDQIFLYAQSSGRITVSTKRSQQAVIPNIGSRPRIRNIPSRISIYWTIVKPGDILLINSTGNLIAPRGYFKIRSGKSSIMKSDAPIDKCNSECITPNGSIPNDKPFQNVNRITYGACPRYVKQSTLKLATGMRNVPEKQTRGIFGAIAGFIENGWEGMVDGWYGFRHQNSEGRGQAADLKSTQAAIDQINGKLNRLIGKTNEKFHQIEKEFSEVEGRIQDLEKYVEDTKIDLWSYNAELLVALENQHTIDLTDSEMNKLFEKTKKQLRENAEDMGNGCFKIYHKCDNACIGSIRNGTYNHDVYRDEALNNRFQIKGVELKSGYKDWILWISFAISCFLLCVALLGFIMWACQKGNIRCNICI

SEQ ID NO: 10875 - protein, 566 aa, synthetic construct; identical to SEQ ID NO: 7782
  REGION 1..566: note = hemagglutinin__InfluenzaA__AHC61835

SEQ ID NO: 10876 - protein, 566 aa, synthetic construct; identical to SEQ ID NO: 6982
  REGION 1..566: note = hemagglutinin__InfluenzaA__AHC61847

SEQ ID NO: 10877 - protein, 566 aa, synthetic construct; identical to SEQ ID NO: 6855
  REGION 1..566: note = hemagglutinin__InfluenzaA__AHC61859

SEQ ID NO: 10878 - protein, 566 aa, synthetic construct; identical to SEQ ID NO: 7782
  REGION 1..566: note = hemagglutinin__InfluenzaA__AHC61871

SEQ ID NO: 10879 - protein, 566 aa, synthetic construct
  REGION 1..566: note = hemagglutinin__InfluenzaA__AHC61883
MKTIIALSYILCLVFAQKLPGNDNSTATLCLGHHAVPNGTIVKTITNDQIEVTNATELVQSSSTGEICDSPHQILDGENCTLIDALLGDPQCDGFQNKKWDLFVERSKAYSNCYPYDVPDYASLRSLVASSGTLEFNNESFNWTGVTQNGTSSACIRRSNSSFFSRLNWLTHLNFKYPALNVTMPNNEQFDKLYIWGVHHPGTDKDQIFLYAQSSGRITVSTKRSQQAVIPNIGSRPRIRNIPSRISIYWTIVKPGDILLINSTGNLIAPRGYFKIRSGKSSIMRSDAPIGKCNSECITPNGSIPNDKPFQNVNRITYGACPRYVKQSTLKLATGMRNVPEKQTRGIFGAIAGFIENGWEGMVDGWYGFRHQNSEGRGQAADLKSTQAAIDQINGKLNRLIGKTNEKFHQIEKEFSEVEGRIQDLEKYVEDTKIDLWSYNAELLVALENQHTIDLADSEMNKLFEKTKKQLRENAEDMGNGCFKIYHKCDNACIGSIRNGTYNHDVYRDEALNNRFQIKGVELKSGYKDWILWISFAISCFLLCVALLGFIMWACQKGNIRCNICI

SEQ ID NO: 10880 - protein, 566 aa, synthetic construct; identical to SEQ ID NO: 6982
  REGION 1..566: note = hemagglutinin__InfluenzaA__AHC61895

SEQ ID NO: 10881 - protein, 566 aa, synthetic construct; identical to SEQ ID NO: 6982
  REGION 1..566: note = hemagglutinin__InfluenzaA__AHC61907

SEQ ID NO: 10882 - protein, 566 aa, synthetic construct
  REGION 1..566: note = hemagglutinin__InfluenzaA__AHC61931
MKTIIALSYILCLVFAQKLPGNDNSTATLCLGHHAVPNGTIVKTITNDQIEVTNATELVQSSSTGEICNSPHQILDGENCTLIDALLGDPQCDGFQNKKWDLFVERSKAHSNCYPYDVPDYASLRSLVASSGTLEFNNESFNWTGVTQNGTSSACIRRSNNSFFSRLNWLTHLNFKYPALNVTMPNNEQFDKLYIWGVHHPGTDKDQIFLYAQAAGRITVSTKRSQQAVIPNIGSRPRVRNIPSRVSIYWTIVKPGDILLINSTGNLIAPRGYFKIRSGKSSIMRSDAPIGKCNSACITPNGSIPNDKPFQNVNRITYGACPRYVKQNTLKLATGMRNVPEKQTRGIFGAIAGFIENGWEGMVDGWYGFRHQNSEGRGQAADLKSTQAAIDQINGKLNRLIGKTNEKFHQIEKEFSEVEGRIQDLEKYVEDTKIDLWSYNAELLVALENQHTIDLTDSEMNKLFEKTKKQLRENAEDMGNGCFKIYHKCDNACIGSIRNGTYDHDVYRDEALNNRFQIKGVELKSGYKGWILWISFAISCFLLCVALLGFIMWACQKGNIRCNICI

SEQ ID NO: 10883 - protein, 566 aa, synthetic construct; identical to SEQ ID NO: 7782
  REGION 1..566: note = hemagglutinin__InfluenzaA__AHC61943

SEQ ID NO: 10884 - protein, 566 aa, synthetic construct; identical to SEQ ID NO: 9074
  REGION 1..566: note = hemagglutinin__InfluenzaA__AHC61955

SEQ ID NO: 10885 - protein, 566 aa, synthetic construct; identical to SEQ ID NO: 7782
  REGION 1..566: note = hemagglutinin__InfluenzaA__AHC61967

SEQ ID NO: 10886 - protein, 566 aa, synthetic construct; identical to SEQ ID NO: 6855
  REGION 1..566: note = hemagglutinin__InfluenzaA__AHC61979

SEQ ID NO: 10887 - protein, 566 aa, synthetic construct; identical to SEQ ID NO: 6982
  REGION 1..566: note = hemagglutinin__InfluenzaA__AHC61991

SEQ ID NO: 10888 - protein, 566 aa, synthetic construct; identical to SEQ ID NO: 10693
  REGION 1..566: note = hemagglutinin__InfluenzaA__AHC62003

SEQ ID NO: 10889 - protein, 566 aa, synthetic construct; identical to SEQ ID NO: 7782
  REGION 1..566: note = hemagglutinin__InfluenzaA__AHC62015

SEQ ID NO: 10890 - protein, 566 aa, synthetic construct; identical to SEQ ID NO: 9074
  REGION 1..566: note = hemagglutinin__InfluenzaA__AHC62027

SEQ ID NO: 10891 - protein, 566 aa, synthetic construct
  REGION 1..566: note = hemagglutinin__InfluenzaA__AHC62039
MKTIIALSYILCLVFAQKLPGNDNSTATLCLGHHAVPNGTIVKTITNDQIEVTNATELVQSSSTGEICNSPHQILDGENCTLIDALLGDPQCDGFQNKKWDLFVERSKAHSNCYPYDVPDYASLRSLVASSGTLEFNNESFNWTGVTQNGTSSACIRGSNNSFFSRLNWLTHLNFKYPALNVTMPNNEQFDKLYIWGVHHPGTDKDQIFLYAQASGRITVSTKRSQQAVIPNIGSRPRVRNIPSRVSIYWTIVKPGDILLINSTGNLIAPRGYFKIRSGKSSIMKSDAPIGKCNSACITPNGSIPNDKPFQNVNRITYGACPRYVKQNTLKLATGMRNVPEKQTRGIFGAIAGFIENGWEGMMDGWYGFRHQNSEGRGQAADLKSTQAAIDQINGKLNRLIGKTNEKFHQIEKEFSEVEGRIQDLEKYVEDTKIDLWSYNAELLVALENQHTIDLTDSEMNKLFEKTKKQLRENAEDMGNGCFKIYHKCDNACIGSIRNGTYDHDVYRDEALNNRFQIKGVELKSGYKDWILWISFAISCFLLCVALLGFIMWACQKGNIRCNICI

SEQ ID NO: 10892 - protein, 566 aa, synthetic construct
  REGION 1..566: note = hemagglutinin__InfluenzaA__AHC62050
MKTIIALSYILCLVFAQKLPGNDNSTATLCLGHHAVPNGTIVKTITNDQIEVTNATELVQSSSTGEICNSPHQILDGENCTLIDALLGDPQCDGFQNKKWDLFVERSKAHSNCYPYDVPDYASLRSLVASSGTLEFNNESFNWTGVTQNGTSSACIRRSNNSFFSRLNWLTHLNFKYPALNVTMPNNEQFDKLYIWGVHHPGTDKDQIFLYAQASGRITVSTKRSQQAVIPNIGSRPRVRNVPSRVSIYWTIVKPGDILLINSTGNLIAPRGYFKIRSGKSSIMRSDAPIGKCNSACITPNGSIPNDKPFQNVNRITYGACPRYVKQNTLKLATGMRNVPEKQTRGIFGAIAGFIENGWEGMVDGWYGFRHQNSEGRGQAADLKSTQAAIDQINGKLNRLIGKTNEKFHQIEKEFSEVEGRIQDLEKYVEDTKIDLWSYNAELLVALENQHTIDLTDSEMNKLFEKTKKQLRENAEDMGNGCFKIYHKCDNACIGSIRNGTYDHDVYRDEALNNRFQIKGVELKSGYKDWILWISFAISCFLLCVALLGFIMWACQKGNIRCNICI

SEQ ID NO: 10893 - protein, 566 aa, synthetic construct; identical to SEQ ID NO: 9074
  REGION 1..566: note = hemagglutinin__InfluenzaA__AHC62062

SEQ ID NO: 10894 - protein, 566 aa, synthetic construct
  REGION 1..566: note = hemagglutinin__InfluenzaA__AHC62074
MKTIIALSYILCLVFAQKLPGNDNSTATLCLGHHAVPNGTIVKTITNDQIEVTNATELVQSSSTGEICDSPHQILDGENCTLIDALLGDPQCDGFQNKKWDLFVERSKAYSNCYPYDVPDYASLRSLVASSGTLEFNNESFNWTGVTQNGTSSACIRRSNNSFFSRLNWLTHLNFKYPALNVTMPNNEQFDKLYIWGVHHPGTDKDQIFLYAQASGRITVSTKRNQQAVIPNIGSRPRVRNIPSRISIYWTIVKPGDILLINSTGNLIAPRGYFKIRSGKSSIMRSDAPIGKCNSECITPNGSIPNDKPFQNVNRITYGACPRYVKQNTLKLATGMRNVPEKQTRGIFGAIAGFIENGWEGMVDGWYGFRHQNSEGRGQAADLKSTQAAIDQINGKLNRLIGKTNEKFHQIEKEFSEVEGRIQDLEKYVEDTKIDLWSYNAELLVALENQHTIDLTDSEMNKLFEKTKKQLRENAEDMGNGCFKIYHKCDNACIGSIRNGTYNHDVYRDEALNNRFQIKGVELKSGYKDWILWISFAISCFLLCVALLGFIMWACQKGNIRCNICI

SEQ ID NO: 10895 - protein, 566 aa, synthetic construct; identical to SEQ ID NO: 6855
  REGION 1..566: note = hemagglutinin__InfluenzaA__AHC62086

SEQ ID NO: 10896 - protein, 566 aa, synthetic construct; identical to SEQ ID NO: 7782
  REGION 1..566: note = hemagglutinin__InfluenzaA__AHC62098

SEQ ID NO: 10897 - protein, 566 aa, synthetic construct; identical to SEQ ID NO: 6855
  REGION 1..566: note = hemagglutinin__InfluenzaA__AHC62110

SEQ ID NO: 10898 - protein, 566 aa, synthetic construct
  REGION 1..566: note = hemagglutinin__InfluenzaA__AHC62122
MKTIIALSYILCLVFAQKLPGNDNSTATLCLGHHAVPNGTIVKTITNDQIEVTNATEMVQSSSTGEICNSPHQILDGENCTLIDALLGDPQCDGFQNKKWDLFVERSKAHSNCYPYDVPDYASLRSLVASSGTLEFNNESFNWTGVTQNGTSSACIRGSNNSFFSRLNWLTHSNFKYPALNVTMPNNEQFDKLYIWGVHHPGTDKDQIFLYAQASGRITVSTKRSQQAVIPNIGSRPRVRNIPSRVSIYWTIVKPGDILLINSTGNLIAPRGYFKIRSGKSSIMRSDAPIGKCNSACITPNGSIPNDKPFQNVNRITYGACPRYVKQNTLKLATGMRNVPEKQTRGIFGAIAGFIENGWEGMVDGWYGFRHQNSEGRGQAADLKSTQAAIDQINGKLNRLIGKTNEKFHQIEKEFSEVEGRIQDLEKYVEDTKIDLWSYNAELLVALENQHTIDLTDSEMNKLFEKTKKQLRENAEDMGNGCFKIYHKCDNACIGSIRNGTYDHDVYRDEALNNRFRIKGVELKSGYKDWILWISFAISCFLLCVALLGFIMWACQKGNIRCNICI

SEQ ID NO: 10899 - protein, 566 aa, synthetic construct; identical to SEQ ID NO: 6855
  REGION 1..566: note = hemagglutinin__InfluenzaA__AHC62134

SEQ ID NO: 10900 - protein, 566 aa, synthetic construct
  REGION 1..566: note = hemagglutinin__InfluenzaA__AHC62146
MKTIIALSYILCLVFAQKLPGNDNSTATLCLGHHAVPNGTIVKTITNDQIEVTNATELVQSSSTGEICNSPHQILDGENCTLIDALLGDPQCDGFQNKKWDLFVERSKAYSNCYPYDVPDYASLRSLVASSGTLEFNNESFNWTGVTQNGTSSACIRRSNSSFFSRLNWLTHLNFKYPALNVTMPNNEQFDKLYIWGVHHPGTDKDQIFLYAQSSGRITVSTKRSQQAVIPNIGSRPRIRNIPSRISIYWTIVKPGDILLINSTGNLIAPRGYFKIRSGKSSIMRSDAPIGKCNSECITPNGSIPNDKPFQNVNRITYGACPRYVKQSTLKLATGMRNVPEKQTRGIFGAIAGFIENGWEGMVDGWYGFRHQNYEGRGQAADLKSTQAAIDQINGKLNRLIGKTNEKFHQIEKEFSEVEGRIQDLEKYVEDTKIDLWSYNAELLVALENQHTIDLTDSEMNKLFEKTKKQLRENAEDMGNGCFKIYHKCDNACIGSIRNGTYNHDVYRDEALNNRFQIKGVELKSGYKDWILWISFAISCFLLCVALLGFIMWACQKGNIRCNICI

SEQ ID NO: 10901 - protein, 566 aa, synthetic construct; identical to SEQ ID NO: 6982
  REGION 1..566: note = hemagglutinin__InfluenzaA__AHC62158

SEQ ID NO: 10902 - protein, 566 aa, synthetic construct
  REGION 1..566: note = hemagglutinin__InfluenzaA__AHC62170
MKTIIALSYILCLVFAQKLPGNDNSTATLCLGHHAVPNGTIVKTITNDQIEVTNATELVQSSSTGEICNSPHQILDGENCTLIDALLGDPQCDGFQNKKWDLFVERSKAHSNCYPYDVPDYASLRSLVASSGTLEFNNESFNWTGVTQNGTSSACIRGSNNSFFSRLNWLTHLNFKYPALNVTMPNNEQFDKLYIWGVHHPGTDKDQIFLYAQASGRITVSTKRSQQAVIPNIGSRPRVRNIPSRVSIYWTIVKPGDILLINSTGNLIAPRGYFKIRSGKSSIMRSDAPIGKCNSACITPNGSIPNDKPFQNVNRITYGACPRYVKQNTLKLATGMRNVPEKQTRGIFGAIAGFIENGWEGMMDGWYGFRHQNSEGRGQAADLKSTQAAIDQINGKLNRLIGKTNEKFHQIEKEFSEVEGRIQDLEKYVEDTKIDLWSYNAELLVALENQHTIDLTDSEMNKLFEKTKKQLRENAEDMGNGCFKIYHKCDNACIGSIRNGTYDHNVYRDEALNNRFQIKGVELKSGYKDWILWISFAISCFLLCVALLGFIMWACQKGNIRCNICI

SEQ ID NO: 10903 - protein, 566 aa, synthetic construct; identical to SEQ ID NO: 6855
  REGION 1..566: note = hemagglutinin__InfluenzaA__AHC62182

SEQ ID NO: 10904 - protein, 566 aa, synthetic construct; identical to SEQ ID NO: 9074
  REGION 1..566: note = hemagglutinin__InfluenzaA__AHC62194

SEQ ID NO: 10905 - protein, 566 aa, synthetic construct
  REGION 1..566: note = hemagglutinin__InfluenzaA__AHC62206
MKTIIALSYILCLVFAQKLPGNDNSTATLCLGHHAVPNGTIVKTITNDQIEVTNATELVQSSSTGEICDSPHQILDGENCTLIDALLGDPQCDGFQNKKWDLFVERSKAYSNCYPYDVPDYASLRSLVASSGTLEFNNESFIWTGVTQNGTSSACIRRSNSSFFSRLNWLTHLNFKYPALNVTMPNNEQFDKLYIWGVHHPGTDKDQIFLYAQSSGRITVSTKRSQQAVIPNIGSRPRIRNIPSRISIYWTIVKPGDILLINSTGNLIAPRGYFKIRSGKSSIMRSDAPIGKCNSECITPNGSIPNDKPFQNVNRITYGACPRYVKQSTLKLATGMRNVPEKQTRGIFGAIAGFIENGWEGMVDGWYGFRHQNSEGRGQAADLKSTQAAIDQINGKLNRLIGKTNEKFHQIEKEFSEVEGRIQDLEKYVEDTKIDLWSYNAELLVALENQHTIDLTDSEMNKLFEKTKKQLRENAEDMGNGCFKIYHKCDNACIGSIRNGTYNHDVYRDEALNNRFQIKGVELKSGYKDWILWISFAISCFLLCVALLGFIMWACQKGNIRCNICI

SEQ ID NO: 10906 - protein, 566 aa, synthetic construct; identical to SEQ ID NO: 6982
  REGION 1..566: note = hemagglutinin__InfluenzaA__AHC62218

SEQ ID NO: 10907 - protein, 566 aa, synthetic construct
  REGION 1..566: note = hemagglutinin__InfluenzaA__AHC62242
MKTIIALSYILCLVFAQKIPGNDNSTATLCLGHHAVPNGTIVKTITNDQIEVTNATELVQNSSTGEICDSPHQILDGENCTLIDALLGDPQCDGFQNKKWDLFVERSKAYSNCYPYDVPDYASLRSLVASSGTLEFNNESFNWTGVTQNGTSSACIRRSNNSFFSRLNWLTHLNFKYPALNVTMPNNEQFDKLYIWGVHHPGTDKDQIFLYAQASGRITVSTKRSQQAVIPNIGSRPRVRNIPSRISIYWTIVKPGDILLINSTGNLIAPRGYFKIRSGKSSIMRSDAPIGKCNSECITPNGSIPNDKPFQNVNRITYGACPRYVKQNTLKLATGMRNVPEKQTRGIFGAIAGFIENGWEGMVDGWYGFRHQNSEGRGQAADLKSTQAAIDQINGKLNRLIGKTNEKFHQIEKEFSEVEGRIQDLEKYVEDTKIDLWSYNAELLIALENQHTIDLTDSEMNKLFEKTKKQLRENAEDMGNGCFKIYHKCDNACIGSIRNGTYDHDVYRDEALNNRFQIKGVELKSGYKDWILWISFAISCFLLCVALLGFIMWACQKGNIRCNICI

SEQ ID NO: 10908 - protein, 566 aa, synthetic construct; identical to SEQ ID NO: 10617
  REGION 1..566: note = hemagglutinin__InfluenzaA__AHC62254

SEQ ID NO: 10909 - protein, 566 aa, synthetic construct; identical to SEQ ID NO: 6982
  REGION 1..566: note = hemagglutinin__InfluenzaA__AHC62266

SEQ ID NO: 10910 - protein, 566 aa, synthetic construct; identical to SEQ ID NO: 10781
  REGION 1..566: note = hemagglutinin__InfluenzaA__AHC62278

SEQ ID NO: 10911 - protein, 566 aa, synthetic construct
  REGION 1..566: note = hemagglutinin__InfluenzaA__AHC62290
MKTIIALSYILCLIFAQKLPGNDNSTATLCLGHHAVPNGTIVKTITNDQIEVTNATELVQSSSTGEICNSPHQILDGENCTLIDALLGDPQCDGFQNKKWDLFVERSKAHSNCYPYDVPDYASLRSLVASSGTLEFNNESFNWTGVTQNGTSSACIRRSNNSFFSRLNWLTHLNFKYPALNVTMPNNEQFDKLYIWGVHHPGTDKDQIFLYAQASGRITVSTKRSQQAVIPNIGSRPRVRNIPSRVSIYWTIVKPGDILLINSTGNLIAPRGYFKIRSGKSSIMRSDAPIGKCNSACITPNGSIPNDKPFQNVNRITYGACPRYVKQNTLKLATGMRNVPEKQTRGIFGAIAGFIENGWEGMVDGWYGFRHQNSEGRGQAADLKSTQAAIDQINGKLNRLIGKTNEKFHQIEKEFSEVEGRIQDLEKYVEDTKIDLWSYNAELLVALENQHTIDLTDSEMNKLFEKTKKQLRENAEDMGNGCFKIYHKCDNACIGSIRNGTYDHDVYRDEALNNRFQIKGVELKSGYKDWILWISFAISCFLLCVALLGFIMWACQKGNIRCNICI

SEQ ID NO: 10912 - protein, 566 aa, synthetic construct
  REGION 1..566: note = hemagglutinin__InfluenzaA__AHC62302
MKTIIALSYILCLVFAQKLPGNDNSTATLCLGHHAVPNGTIVKTITNDQIEVTNATELVQSSSTGEICNSPHQILDGENCTLIDALLGDPQCDGFQNKKWDLFVERSKAHSNCYPYDVPDYASLRSLVASSGTLEFNNESFNWTGVTQNGTSSACIRRSNNSFFSRLNWLTHLNFKYPALNVTMPNNEQFDKLYIWGVHHPGTDKDQIFLYAQAAGRITVSTKRSQQAVIPNIGSRPRVRNIPSRVSIYWTIVKPGDILLINSTGNLIAPRGYFKIRNGKSSIMRSDAPIGKCNSACITPNGSIPNDKPFQNVNRITYGACPRYVKQNTLKLATGMRNVPEKQTRGIFGAIAGFIENGWEGMVDGWYGFRHQNSEGRGQAADLKSTQAAIDQINGKLNRLIGKTNEKFHQIEKEFSEVEGRIQDLEKYVEDTKIDLWSYNAELLVALENQHTIDLTDSEMNKLFEKTKKQLRENAEDMGNGCFKIYHKCDNACIGSIRNGTYDHDVYRDEALNNRFQIKGVELKSGYKDWILWISFAISCFLLCVALLGFIMWACQKGNIRCNICI

SEQ ID NO: 10913 - protein, 566 aa, synthetic construct
  REGION 1..566: note = hemagglutinin__InfluenzaA__AHC62314
MKTIIALSYILCLVFAQKLPGNDNSTATLCLGHHAVPNGTIVKTITNDQIEVTNATELVQNSSTGEICDSPHQILDGENCTLIDALLGDPQCDGFQNKKWDLFVERSKAYSNCYPYDVPDYASLRSLVASSGTLEFNNESFNWTGVTQNGTSSACIRRSNNSFFSRLNWLTHLNFKYPALNVTMPNNEQFDKLYIWGVHHPGTDKDQIFLYAQASGRITVSTKRSQQAVIPNIGSRPRVRNIPSRISIYWTIVKPGDILLINSTGNLIAPRGYFKIRSGKSSIMRSDAPIGKCNSECITPNGSIPNDKPFQNVNRITYGACPRYVKQNTLKLATGMRNVPEKQTRGIFGAIAGFIENGWEGMVDGWYGFRHQNSEGRGQAADLKSTQAAIDQINGKLNRLIGKTNEKFHQIEKEFSEVEGRIQDLEKYVEDTKIDLWSYNAELLVALENQHTIDLTDSEMNKLFEKTKKQLRENAEDMGNGCFKIYHKCDNACIGSIRNGTYDHDVYRDEALNNRFQIRGVELKSGYKDWILWISFAISCFLLCVALLGFIMWACQKGNIRCNICI

SEQ ID NO: 10914 - protein, 566 aa, synthetic construct; identical to SEQ ID NO: 10778
  REGION 1..566: note = hemagglutinin__InfluenzaA__AHC62326

SEQ ID NO: 10915 - protein, 566 aa, synthetic construct; identical to SEQ ID NO: 7782
  REGION 1..566: note = hemagglutinin__InfluenzaA__AHC62338

SEQ ID NO: 10916 - protein, 566 aa, synthetic construct; identical to SEQ ID NO: 6855
  REGION 1..566: note = hemagglutinin__InfluenzaA__AHC62350

SEQ ID NO: 10917 - protein, 566 aa, synthetic construct; identical to SEQ ID NO: 7782
  REGION 1..566: note = hemagglutinin__InfluenzaA__AHC62362

SEQ ID NO: 10918 - protein, 566 aa, synthetic construct; identical to SEQ ID NO: 7782
  REGION 1..566: note = hemagglutinin__InfluenzaA__AHC62374

SEQ ID NO: 10919 - protein, 566 aa, synthetic construct; identical to SEQ ID NO: 10781
  REGION 1..566: note = hemagglutinin__InfluenzaA__AHC62386

SEQ ID NO: 10920 - protein, 566 aa, synthetic construct; identical to SEQ ID NO: 6855
  REGION 1..566: note = hemagglutinin__InfluenzaA__AHC62398

SEQ ID NO: 10921 - protein, 566 aa, synthetic construct
  REGION 1..566: note = hemagglutinin__InfluenzaA__AHC62410
MKTIIALSYILCLVFAQKLPGNDNSTATLCLGHHAVPNGTIVKTITNDQIEVTNATELVQSSSTGEICNSPHQILDGENCTLIDALLGDPQCDGFQNKKWDLFVERSKAHSNCYPYDVPDYASLRSLVASSGTLEFNNESFNWTGVTQNGTSSACIRRSNNSFFSRLNWLTHLNFKYPALNVTMPNNEQFDKLYIWGVHHPGTDKDQIFLYAQASGRITVSTKRSQQAVIPNIGSRPRVRNIPSRVSIYWTIVKPGDILLINSTGNLIAPRGYFKIRSGKSSIIRSDAPIGKCNSACITPNGSIPNDKPFQNVNRITYGACPRYVKQNTLKLATGMRNVPEKQTRGIFGAIAGFIENGWEGMVDGWYGFRHQNSEGRGQAADLKSTQAAIDQINGKLNRLIGKTNEKFHQIEKEFSEVEGRIQDLEKYVEDTKIDLWSYNAELLVALENQHTIDLTDSEMNKLFEKTKKQLRENAEDMGNGCFKIYHKCDNACIGSIRNGTYDHDVYRDEALNNRFQIKGVELKSGYKDWILWISFAISCFLLCVALLGFIMWACQKGNIRCNICI

SEQ ID NO: 10922 - protein, 566 aa, synthetic construct; identical to SEQ ID NO: 10724
  REGION 1..566: note = hemagglutinin__InfluenzaA__AHC62422

SEQ ID NO: 10923 - protein, 566 aa, synthetic construct
  REGION 1..566: note = hemagglutinin__InfluenzaA__AHC62434
MKTIIALSYILCLVFAQKLPGNDNSTATLCLGHHAVPNGTIVKTITNDQIEVTNATELVQSSSTGEICNSPHQILDGENCTLIDALLGDPQCDGFQNKKWDLFVERSKAHSNCYPYDVPDYASLRSLVASSGTLEFNNESFNWTGVTQNGTSSACIRRSNNSFFSRLNWLTHLNFKYPALNVTMPNNEQFDKLYIWGVHHPGTDKDQIFLYAQAAGRITVSTKRSQQAVIPNIGSRPRVRNIPSRVSIYWTIVKPGDILLINSTGNLIAPRGYFKIQSGKSSIMRSDAPIGKCNSACITPNGSIPNDKPFQNVNRITYGACPRYVKQNTLKLATGMRNVPEKQTRGIFGAIAGFIENGWEGMVDGWYGFRHQNSEGRGQAADLKSTQAAIDQINGKLNRLIGKTNEKFHQIEKEFSEVEGRIQDLEKYVEDTKIDLWSYNAELLVALENQHTIDLTDSEMNKLFEKTKKQLRENAEDMGNGCFKIYHKCDNACIGSIRNGTYDHDVYRDEALNNRFQIKGVELKSGYKDWILWISFAISCFLLCVALLGFIMWACQKGNIRCNICI

SEQ ID NO: 10924 - protein, 566 aa, synthetic construct; identical to SEQ ID NO: 6855
  REGION 1..566: note = hemagglutinin__InfluenzaA__AHC62446

SEQ ID NO: 10925 - protein, 566 aa, synthetic construct; identical to SEQ ID NO: 6982
  REGION 1..566: note = hemagglutinin__InfluenzaA__AHC62458

SEQ ID NO: 10926 - protein, 566 aa, synthetic construct
  REGION 1..566: note = hemagglutinin__InfluenzaA__AHC62470
MKTIIALSYILCLVFAQKLPGNDNSTATLCLGHHAVPNGTIVKTITNDQIEVTNATELVQNSSTGEICDSPHQILDGENCTLIDALLGDPQCDGFQNKKWDLFVERSKAYSNCYPYDVPDYASLRSLVASSGTLEFNNESFNWTGVTQNGTSSACIRRSNNSFFSRLNWLTHLNFKYPALNVTMPNNEQFDKLYIWGVHHPGTDKDQIFLYAQASGRITVSTKRSQQAVIPNIGSRPRVRNIPSRISIYWTIVKPGDILLINSTGNLIAPRGYFKIRSGKSSIMRSDAPIGKCNSECITPNGSIPNGKPFQNVNRITYGACPRYVKQNTLKLATGMRNVPEKQTRGIFGAIAGFIENGWEGMVDGWYGFRHQNSEGRGQAADLKSTQAAIDQINGKLNRLIGKTNEKFHQIEKEFSEVEGRIQDLEKYVEDTKIDLWSYNAELLVALENQHTIDLTDSEMNKLFEKTKKQLRENAEDMGNGCFKIYHKCDNACIGSIRNGTYDHDVYRDEALNNRFQIKGVELKSGYKDWILWISFAISCFLLCVALLGFIMWACQKGNIRCNICI

SEQ ID NO: 10927 - protein, 566 aa, synthetic construct; identical to SEQ ID NO: 10679
  REGION 1..566: note = hemagglutinin__InfluenzaA__AHC62482

SEQ ID NO: 10928 - protein, 566 aa, synthetic construct; identical to SEQ ID NO: 6855
  REGION 1..566: note = hemagglutinin__InfluenzaA__AHC62506

SEQ ID NO: 10929 - protein, 566 aa, synthetic construct; identical to SEQ ID NO: 6982
  REGION 1..566: note = hemagglutinin__InfluenzaA__AHC62518

SEQ ID NO: 10930 - protein, 566 aa, synthetic construct
  REGION 1..566: note = hemagglutinin__InfluenzaA__AHC62530
MKTIIALSYILCLVFAQKIPGNDNSTATLCLGHHAVPNGTIVKTITNDQIEVTNATELVQSSSTGEICNSPHQILDGENCTLIDALLGDPQCDGFQNKKWDLFVERSKAHSNCYPYDVPDYASLRSLVASSGTLEFNNESFNWTGVTQNGTSSACIRRSNNSFFSRLNWLTHLNFKYPALNVTMPNNEQFDKLYIWGVHHPGTDKDQIFLYAQASGRITVSTKRSQQAVIPNIGSRPRVRNIPSRVSIYWTIVKPGDILLINSTGNLIAPRGYFKIRSGKSSIMRSDAPIGKCNSACITPNGSIPNDKPFQNVNRITYGACPRYVKQNTLKLATGMRNVPEKQTRGIFGAIAGFIENGWEGMVDGWYGFRHQNSEGRGQAADLKSTQAAIDQINGKLNRLIGKTNEKFHQIEKEFSEVEGRIQDLEKYVEDTKIDLWSYNAELLVALENQHTIDLTDSEMNKLFEKTKKQLRENAEDMGNGCFKIYHKCDNACIGSIRNGTYDHDVYRDEALNNRFQIKGVELKSGYKDWILWISFAISCFLLCVALLGFIMWACQKGNIRCNICI

SEQ ID NO: 10931 - protein, 566 aa, synthetic construct; identical to SEQ ID NO: 10651
  REGION 1..566: note = hemagglutinin__InfluenzaA__AHC62542

SEQ ID NO: 10932 - protein, 566 aa, synthetic construct; identical to SEQ ID NO: 6855
  REGION 1..566: note = hemagglutinin__InfluenzaA__AHC62554

SEQ ID NO: 10933 - protein, 566 aa, synthetic construct
  REGION 1..566: note = hemagglutinin__InfluenzaA__AHC62566
MKTIIALSYILCLVFAQKLPGNDNSTATLCLGHHAVPNGTMVKTITNDQIEVTNATELVQNSSTGEICDSPHQILDGENCTLIDALLGDPQCDGFQNKKWDLFVERSKAYSNCYPYDVPDYASLRSLVASSGTLEFNNESFNWTGVTQNGTSSACIRRSNNSFFSRLNWLTHLNFKYPALNVTMPNNEQFDKLYIWGVHHPGTDKDQIFLYAQASGRITVSTKRSQQAVIPNIGSRPRVRNIPSRISIYWTIVKPGDILLINSTGNLIAPRGYFKIRSGKSSIMRSDAPIGKCNSECITPNGSIPNDKPFQNVNRITYGACPRYVKQNTLKLATGMRNVPEKQTRGIFGAIAGFIENGWEGMVDGWYGFRHQNSEGRGQAADLKSTQAAIDQINGKLNRLIGKTNEKFHQIEKEFSEVEGRIQDLEKYVEDTKIDLWSYNAELLVALENQHTIDLTDSEMNKLFEKTKKQLRENAEDMGNGCFKIYHKCDNACIGSIRNGTYDHDVYRDEALNNRFQIKGVELKSGYKDWILWISFAISCFLLCVALLGFIMWACQKGNIRCNICI

SEQ ID NO: 10934 - protein, 566 aa, synthetic construct; identical to SEQ ID NO: 6855
  REGION 1..566: note = hemagglutinin__InfluenzaA__AHC62578

SEQ ID NO: 10935 - protein, 566 aa, synthetic construct; identical to SEQ ID NO: 6855
  REGION 1..566: note = hemagglutinin__InfluenzaA__AHC62590

SEQ ID NO: 10936 - protein, 566 aa, synthetic construct; identical to SEQ ID NO: 6982
  REGION 1..566: note = hemagglutinin__InfluenzaA__AHC62602

SEQ ID NO: 10937 - protein, 566 aa, synthetic construct
  REGION 1..566: note = hemagglutinin__InfluenzaA__AHC62614
MKTIIALSYILCLVFAQKLPGNDNSTATLCLGHHAVPNGTIVKTITNDQIEVTNATELVQSSSTGEICNSPHQIIDGENCTLIDALLGDPQCDGFQNKKWDLFVERSKAHSNCYPYDVPDYASLRSLVASSGTLEFNNESFNWTGVTQNGTSSACIRGSNNSFFSRLNWLTHLNFKYPALNVTMPNNEQFDKLYIWGVHHPGTDKDQIFLYAQASGRITVSTKRSQQAVIPNIGSRPRVRNIPSRVSIYWTIVKPGDILLINSTGNLIAPRGYFKIRSGKSSIMRSDAPIGKCNSACITPNGSIPNDKPFQNVNRITYGACPRYVKQNTLKLATGMRNVPEKQTRGIFGAIAGFIENGWEGMVDGWYGFRHQNSEGRGQAADLKSTQAAIDQINGKLNRLIGKTNEKFHQIEKEFSEVEGRIQDLEKYVEDTKIDLWSYNAELLVALENQHTIDLTDSEMNKLFEKTKKQLRENAEDMGNGCFKIYHKCDNACIGSIRNGTYDHDVYRDEALNNRFQIKGVELKSGYKDWILWISFAISCFLLCVALLGFIMWACQKGNIRCNICI

SEQ ID NO: 10938 - protein, 566 aa, synthetic construct; identical to SEQ ID NO: 10618
  REGION 1..566: note = hemagglutinin__InfluenzaA__AHC62626

SEQ ID NO: 10939 - protein, 566 aa, synthetic construct; identical to SEQ ID NO: 6982
  REGION 1..566: note = hemagglutinin__InfluenzaA__AHC62638

SEQ ID NO: 10940 - protein, 566 aa, synthetic construct; identical to SEQ ID NO: 10782
  REGION 1..566: note = hemagglutinin__InfluenzaA__AHC62650

SEQ ID NO: 10941 - protein, 566 aa, synthetic construct
  REGION 1..566: note = hemagglutinin__InfluenzaA__AHC62662
MKTIIALSYILCLVFAQKLPGNDNSTATLCLGHHAVPNGTIVKTITNDQIEVTNATELVQSSSTGEICNSPHQILDGENCTLIDALLGDPQCDGFQNKKWDLFVERSKAHSSCYPYDVPDYASLRSLVASSGTLEFNNESFNWTGVTQNGTSSACIRGSNNSFFSRLNWLTHLNFKYPALNVTMPNNEQFDKLYIWGVHHPGTDKDQIFLYAQASGRITVSTKRSQQAVIPNIGSRPRVRNIPSRVSIYWTIVKPGDILLINSTGNLIAPRGYFKIRSGKSSIMRSDAPIGKCNSACITPNGSIPNDKPFQNVNRITYGACPRYVKQNTLKLATGMRNVPEKQTRGIFGAIAGFIENGWEGMVDGWYGFRHQNSEGRGQAADLKSTQAAIDQINGKLNRLIGKTNEKFHQIEKEFSEVEGRIQDLEKYVEDTKIDLWSYNAELLVALENQHTIDLTDSEMNKLFEKTKKQLRENAEDMGNGCFKIYHKCDNACIGSIRNGTYDHDVYRDEALNNRFQIKGVELKSGYKDWILWISFAISCFLLCVALLGFIMWACQKGNIRCNICI

SEQ ID NO: 10942 - protein, 566 aa, synthetic construct
  REGION 1..566: note = hemagglutinin__InfluenzaA__AHC62674
MKTIIALSYILCLVFAQKLPGNDNSTATLCLGHHAVPNGTIVKTITNDQIEVTNATELVQSSSTGEICNSPHQILDGENCTLIDALLGDPQCDGFQNKKWDLFVERSKAHSNCYPYDVPDYASLRSLIASSGTLEFNNESFNWTGVTQNGTSSACIRGSNNSFFSRLNWLTHLNFKYPALNVTMPNNEQFDKLYIWGVHHPGTDKDQIFLYAQASGRITVSTKRSQQAVIPNIGSRPRVRNIPSRVSIYWTIVKPGDILLINSTGNLIAPRGYFKIRSGKSSIMRSDAPIGKCNSACITPNGSIPNDKPFQNVNRITYGACPRYVKQNTLKLATGMRNVPEKQTRGIFGAIAGFIENGWEGMVDGWYGFRHQNSEGRGQAADLKSTQAAIDQINGKLNRLIGKTNEKFHQIEKEFSEVEGRIQDLEKYVEDTKIDLWSYNAELLVALENQHTIDLTDSEMNKLFEKTKKQLRENAEDMGNGCFKIYHKCDNTCIESIRNGTYDHDVYRDEALNNRFQIKGVELKSGYKDWILWISFAISCFLLCVALLGFIMWACQKGNIRCNICI

SEQ ID NO: 10943 - protein, 566 aa, synthetic construct; identical to SEQ ID NO: 10060
  REGION 1..566: note = hemagglutinin__InfluenzaA__AHE37972

SEQ ID NO: 10944 - protein, 566 aa, synthetic construct
  REGION 1..566: note = hemagglutinin__InfluenzaA__AHE37973
MKAILVVLLYTFATANADTLCIGYHANNSTDTVDTVLEKNVTVTHSVNLLEDKHNGKLCKLRGVAPLHLGKCNIAGWILGNPECESLSTASSWSYIVETSSSDNGTCYPGDFINYEELREQLSSVSSFERFEIFPKTSSWPNHDSNKGVTAACPHAGTKSFYKNLIWLVKKGNSYPKLSKSYINDKGKEVLVLWGIHHPSTTADQQSLYQNADAYVFVGTSRYSKKFKPEIAIRPKVRDQEGRINYYWTLIEPGDKITFEATGNLVVPRYAFAMERNAGSGIIISDTPVHDCNTTCQTPEGAINTSLPFQNIHPITIGKCPKYVKSTKLRLATGLRNVPSIQSRGLFGAIAGFIEGGWTGMVDGWYGYHHQNEQGSGYAADLKSTQNAIDKITNKVNSVIEKMNTQFTAVGKEFNHLEKRIENLNKKVDDGFLDIWTYNAELLVLLENERTLDYHDSNVKNLYEKVRNQLKNNAKEIGNGCFEFYHKCDNTCMESVKNGTYDYPKYSEEAKLNREKIDGVKLESTRIYQILAIYSTVASSLVLVVSLGAISFWMCSNGSLQCRICI

SEQ ID NO: 10945 - protein, 566 aa, synthetic construct
  REGION 1..566: note = hemagglutinin__InfluenzaA__AHE37974
MKAILVVLLYTFATANADTLCIGYHANNSTDTVDTVLEKNVTVTHSVNLLEDKHNGKLCKLRGVAPLHLGKCNIAGWILGNPECESLSTASSWSYIVETSSSDNGTCYPGDFINYEELREQLSSVSSFERFEMFPKTSSWPNHDSNKGVTAACPHAGAKSFYKNLIWLVKKGNSYPKLSKSYINDKGKEVLVLWGIHHPSTTADQQSLYQNADAYVFVGTSKYSKKFKPEIAIRPKVRDQEGRMNYYWTLIEPGDKITFEATGNLVVPRYAFAMERNAGSGIIISDTPVHDCNTTCQTPEGAINTSLPFQNIHPITIGKCPKYVKSTKLRLATGLRNVPSIQSRGLFGAIAGFIEGGWTGMVDGWYGYHHQNEQGSGYAADLKSTQNAIDKITNKVNSVIEKMNTQFTAVGKEFNHLEKRIENLNKKVDDGFLDIWTYNAELLVLLENERTLDYHDSNVKNLYEKVRNQLKNNAKEIGNGCFEFYHKCDNTCMESVKNGTYDYPKYSEEAKLNREKIDGVKLESTRIYQILAIYSTVASSLVLVVSLGAISFWMCSNGSLQCRICI

SEQ ID NO: 10946 - protein, 566 aa, synthetic construct; identical to SEQ ID NO: 10040
  REGION 1..566: note = hemagglutinin__InfluenzaA__AHE37975

SEQ ID NO: 10947 - protein, 566 aa, synthetic construct
  REGION 1..566: note = hemagglutinin__InfluenzaA__AHE37976
MKAILVVLLYTFATANADTLCIGYHANNSTDTVDTVLEKNVTVTHSVNLLEDKHNGKLCKLRGVAPLHLGKCNIAGWILGNPECESLSAASSWSYIVETSSSNNGTCYPGDFINYEELREQLSSVSSFERFEIFPKTSSWPNHDSNKGVTAACPHAGAKSFYKNLIWLVKKGNSYPKLSKSYINDKGKEILVLWGIHHPSTTTDQQSLYQNADAYVFVGTSRYSKKFKPEIAIRPKVRDQEGRMNYYWTLIEPGDKITFEATGNLVVPRYAFAMERNAGSGIIISDTPVHDCNTTCQTPEGAINTSLPFQNIHPITIGKCPKYVKSTKLRLATGLRNVPSIQSRGLFGAIAGFIEGGWTGMVDGWYGYHHQNEQGSGYAADLKSTQNAIDKITNKVNSVIEKMNTQFTAVGKEFNHLEKRIENLNKKVDDGFLDIWTYNAELLVLLENERTLDYHDSNVKNLYEKVRNQLKNNAKEIGNGCFEFYHKCDNTCMESVKNGTYDYPKYSEEAKLNRGKIDGVKLESTRIYQILAIYSTVASSLVLVVSLGAISFWMCSNGSLQCRICI

SEQ ID NO: 10948 - protein, 566 aa, synthetic construct; identical to SEQ ID NO: 10040
  REGION 1..566: note = hemagglutinin__InfluenzaA__AHE37977

SEQ ID NO: 10949 - protein, 566 aa, synthetic construct; identical to SEQ ID NO: 10060
  REGION 1..566: note = hemagglutinin__InfluenzaA__AHE37978

SEQ ID NO: 10950 - protein, 566 aa, synthetic construct; identical to SEQ ID NO: 10040
  REGION 1..566: note = hemagglutinin__InfluenzaA__AHE37979

SEQ ID NO: 10951 - protein, 566 aa, synthetic construct
  REGION 1..566: note = hemagglutinin__InfluenzaA__AHE37980
MKAILVVLLYTFATANADTLCIGYHANNSTDTVDTVLEKNVTVTHSVNLLEDKHNGKLCKLRGVTPLHLGKCNIAGWILGNPECESLSTASSWSYIVETSSSDNGTCYPGDFINYEELREQLSSVSSFERFEIFPKTSSWPNHDSNKGVTAACPHAGAKSFYKNLIWLVKKGNSYPKLSKSYINDKGKEVLVLWGIHHPSTTADQQSLYQNADAYVFVGTSRYSKKFKPEIAIRPKVRDQEGRMNYYWTLIEPGDKITFEATGNLVVPRYAFAMERNAGSGIIISDTPVHDCNTTCQTPEGAINTSLPFQNIHPITIGKCPKYVKSTKLRLATGLRNVPSIQSRGLFGAIAGFIEGGWTGMVDGWYGYHHQNEQGSGYAADLKSTQNAIDKITNKVNSVIEKMNTQFTAVGKEFNHLEKRIENLNKKVDDGFLDIWTYNAELLVLLENERTLDYHDSNVKNLYEKVRNQLKNNAKEIGNGCFEFYHKCDNTCMESVKNGTYDYPKYSEEAKLNREKIDGVKLESTRIYQILAIYSTVASSLVLVVSLGAISFWMCSNGSLQCRICI

SEQ ID NO: 10952 - protein, 566 aa, synthetic construct
  REGION 1..566: note = hemagglutinin__InfluenzaA__AHE37981
MKAILVVLLYTFATANADTLCIGYHANNSTDTVDTVLEKNVTVTHSVNLLEDKHNGKLCKLRGVAPLHLGKCNIAGWILGNPECESLSTASSWSYIVETSSSDNGTCYPGDFINYEELREQLSSVSSFERFEMFPKTSSWPNHDSNKGVTAACPHAGAKSFYKNLIWLVKKGNSYPKLSKSYINDKGKEVLVLWGIHHPSTTADQQSLYQNADAYVFVGTSKYSKKFKPEIAIRPKVRDQEGRMNYYWTLIEPGDKITFEATGNLVVPRYAFAMERNAGSGIIISDTPVHDCNTTCQTPEGAINTSLPFQNIHPITIGKCPKYVKSTKLRLATGLRNVPSIQSRGLFGAIAGFIEGGWTGMVDGWYGYHHQNEQGSGYAADLKSTQNAIDKITNKVNSVIEKMNIQFTAVGKEFNHLEKRIENLNKKVDDGFLDIWTYNAELLVLLENERTLDYHDSNVKNLYEKVRNQLKNNAKEIGNGCFEFYHKCDNTCMESVKNGTYDYPKYSEEAKLNREKIDGVKLESTRIYQILAIYSTVASSLVLVVSLGAISFWMCSNGSLQCRICI

SEQ ID NO: 10953 - protein, 566 aa, synthetic construct; identical to SEQ ID NO: 10040
  REGION 1..566: note = hemagglutinin__InfluenzaA__AHE37982

SEQ ID NO: 10954 - protein, 566 aa, synthetic construct
  REGION 1..566: note = hemagglutinin__InfluenzaA__AHE37983
MKAILVVLLYTFATANADTLCIGYHANNSTDTVDTVLEKNVTVTHSVNLLEDKHNGKLCKLRGVAPLHLGKCNIAGWILGNPECESLSTASSWSYIVETSSSDNGTCYPGDFINYEELREQLSSVSSFERFEIFPKTSSWPNHDSNKGVTAACPHAGAKSFYKNLIWLVKKGNSYPKLSESYINDKGKEVLVLWGIHHPSTTADQQSLYQNADAYVFVGTSRYSKKFKPEIAIRPKVRDQEGRMNYYWTLIEPGDKITFEATGNLVVPRYAFAMERNAGSGIIISDTPVHDCNTTCQTPEGAINTSLPFQNIHPITIGKCPKYVKSTKLRLATGLRNVPSIQSRGLFGAIAGFIEGGWTGMVDGWYGYHHQNEQGSGYAADLKSTQNAIDKITNKVNSVIEKMNTQFTAVGKEFNHLEKRIENLNKKVDDGFLDIWTYNAELLVLLENERTLDYHDSNVKNLYEKVRNQLKNNAKEIGNGCFEFYHKCDNTCMESVKNGTYDYPKYSEEAKLNREKIDGVKLESTRIYQILAIYSTVASSLVLVVSLGAISFWMCSNGSLQCRICI

SEQ ID NO: 10955 - protein, 566 aa, synthetic construct
  REGION 1..566: note = hemagglutinin__InfluenzaA__AHE37984
MEAILVVLLYTFATANADTLCIGYHANNSTDTVDTVLEKNVTVTHSVNLLEDKHNGKLCKLRGVAPLHLGKCNIAGWILGNPECESLSTASSWSYIVETSSSDNGTCYPGDFINYEELREQLSSVSSFERFEIFPKTSSWPNHDSNKGVTAACPHAGAKSFYKNLIWLVKKGNSYPKLSKSYINDKGKEVLVLWGIHHPSTTADQQSLYQNADAYVFVGTSRYSKKFKPEIAIRPKVRDQEGRMNYYWTLIEPGDKITFEATGNLVVPRYAFAMERNAGSGIIISDTPVHDCNTTCQTPEGAINTSLPFQNIHPITIGKCPKYVKSTKLRLATGLRNVPSIQSRGLFGAIAGFIEGGWTGMVDGWYGYHHQNEQGSGYAADLKSTQNAIDKITNKVNSVIEKMNTQFTAVGKEFNHLEKRIENLNKKVDDGFLDIWTYNAELLVLLENERTLDYHDSNVKNLYEKVRNQLKNNAKEIGNGCFEFYHKCDNTCMESVKNGTYDYPKYSEEAKLNREKIDGVKLESTRIYQILAIYSTVASSLVLVVSLGAISFWMCSNGSLQCRICI

SEQ ID NO: 10956 - protein, 566 aa, synthetic construct
  REGION 1..566: note = hemagglutinin__InfluenzaA__AHE37985
MKTIIALSYILCLVFAQELPGNDDSTATLCLGHHAVPNGTIVKTITNDQIEVTNATELVQSSSTGEICNSPHQILDGENCTLIDALLGDPQCDGFQNKKWDLFVERSKAHSNCYPYDVPDYASLRSLVASSGTLEFNNESFNWTGVTQNGTSSACIRRSNNSFFSRLNWLTHLNFKYPALNVTMPNNEQFDKLYIWGVHHPGTDKDQIFLYAQASGRITVSTKRSQQAVIPNIGSRPRVRNIPSRVSIYWTIVKPGDILLINSTGNLIAPRGYFKIRSGKSSIMKSDAPIGKCNSACITPNGSIPNDKPFQNVNRITYGACPRYVKQNTLKLATGMRNVPEKQTRGIFGAIAGFIENGWEGMVDGWYGFRHQNSEGRGQAADLKSTQAAIDQINGKLNRLIGKTNEKFHQIEKEFSEVEGRIQDLEKYVEDTKIDLWSYNAELLVALENQHTIDLTDSEMNKLFEKTKKQLRENAEDMGNGCFKIYHKCDNACIGSIRNGTYDHDVYRDEALNNRFQIKGVELKSGYKDWILWISFAISCFLLCVALLGFIMWACQKGNIRCNICI

SEQ ID NO: 10957 - protein, 566 aa, synthetic construct; identical to SEQ ID NO: 9922
  REGION 1..566: note = hemagglutinin__InfluenzaA__AHE37986

SEQ ID NO: 10958 - protein, 566 aa, synthetic construct; identical to SEQ ID NO: 9858
  REGION 1..566: note = hemagglutinin__InfluenzaA__AHE37987

SEQ ID NO: 10959 - protein, 566 aa, synthetic construct
  REGION 1..566: note = hemagglutinin__InfluenzaA__AHE37988
MKTIIALSYILCLVFAQKLPGNDNSTATLCLGHHAVPNGTIVKTITNDRIEVTNATELVQNSSIGEICDSPHQILDGENCTLIDALLGDPQCDGFQNKKWDLFVERSKAYSNCYPYDVPDYASLRSLVASSGTLEFNNESFNWTGVTQNGTSSACIRRSNSSFFSRLNWLTHLNFKYPALNVTMPNNEQFDKLYIWGVHHPGTDKDQIFLYAQSSGRITVSTKRSQQAVIPNIGSRPRIRNIPSRISIYWTIVKPGDILLINSTGNLIAPRGYFKIRSGKSSIMRSDAPIGKCKSECITPNGSIPNDKPFQNVNRITYGACPRYVKQSTLKLATGMRNVPEKQTRGIFGAIAGFIENGWEGMMDGWYGFRHQNSEGRGQAADLKSTQAAIDQINGKLNRLIGKTNEKFHQIEKEFSEVEGRIQNLEKYVEDTKIDLWSYNAELLVALENQHTIDLTDSEMNKLFEKTKKQLRENAEDMGNGCFKIYHKCDNACIGSIRNGTYDHNVYRDEALNNRFQIKGVELKSGYKDWILWISFAISCFLLCVALLGFIMWACQKGNIRCNICI

SEQ ID NO: 10960 - protein, 566 aa, synthetic construct; identical to SEQ ID NO: 9994
  REGION 1..566: note = hemagglutinin__InfluenzaA__AHE37989

SEQ ID NO: 10961 - protein, 566 aa, synthetic construct; identical to SEQ ID NO: 9858
  REGION 1..566: note = hemagglutinin__InfluenzaA__AHE37990

SEQ ID NO: 10962 - protein, 566 aa, synthetic construct; identical to SEQ ID NO: 9858
  REGION 1..566: note = hemagglutinin__InfluenzaA__AHE37991

SEQ ID NO: 10963 - protein, 566 aa, synthetic construct
  REGION 1..566: note = hemagglutinin__InfluenzaA__AHE37992
MKTIIALSYILCLVFAQELPGNDDSTATLCLGHHAVPNGTIVKTITNDQIEVTNATELVQSSSTGEICNSPHQILDGENCTLIDALLGDPQCDGFQNKKWDLFVERSKAHSNCYPYDVPDYASLRSLVASSGTLEFDNESFNWTGVTQNGTSSACIRRSNNSFFSRLNWLTHLNFKYPALNVTMPNNEQFDKLYIWGVHHPGTDKDQIFLYAQASGRITVSTKRSQQAVIPNIGSRPRVRNIPSRVSIYWTIVKPGDILLINSTGNLIAPRGYFKIRSGKSSIMRSDAPIGKCNSACITPNGSIPNDKPFQNVNRITYGACPRYVKQNTLKLATGMRNVPEKQTRGIFGAIAGFIENGWEGMVDGWYGFRHQNSEGRGQAADLKSTQAAIDQINGKLNRLIGKTNEKFHQIEKEFSEVEGRIQDLEKYVEDTKIDLWSYNAELLVALENQHTIDLTDSEMNKLFEKTKKQLRENAEDMGNGCFKIYHKCDNACIGSIRNGTYDHDVYRDEALNNRFQIKGVELKSGYKDWILWISFAISCFLLCVALLGFIMWACQKGNIRCNICI

SEQ ID NO: 10964 - protein, 566 aa, synthetic construct; identical to SEQ ID NO: 10040
  REGION 1..566: note = hemagglutinin__InfluenzaA__AHE38023

SEQ ID NO: 10965 - protein, 566 aa, synthetic construct
  REGION 1..566: note = hemagglutinin__InfluenzaA__AHE38024
MKAILVVLLYTFATANADTLCIGYHANNSTDTVDTVLEKNVTVTHSVNLLEDKHNGKLCKLRGVAPLHLGKCNIAGWILGNPECESLSTASSWSYIVETSSSDNGTCYPGDFINYEELREQLSSVSSFERFEIFPKTSSWPNHDSNKGVTAACPHAGAKSFYKNLIWLVKKGNSYPKLSQSYINDKGKEVLVLWGIHHPSTTADQQSLYQNADAYVFVGTSRYSKKFKPEIATRPKVRDQEGRMNYYWTLVEPGDKITFEATGNLVVPRYAFTMERNAGSGIIISDTPVHDCNTTCQTPEGAINTSLPFQNIHPITIGKCPKYVKSTKLRLATGLRNVPSIQSRGLFGAIAGFIEGGWTGMVDGWYGYHHQNEQGSGYAADLKSTQNAIDKITNKVNSVIEKMNTQFTAVGKEFNHLEKRIENLNKKVDDGFLDIWTYNAELLVLLENERTLDYHDSNVKNLYEKVRNQLKNNAKEIGNGCFEFYHKCDNTCMESVKNGTYDYPKYSEEAKLNREKIDGVKLESTRIYQILAIYSTVASSLVLVVSLGAISFWMCSNGSLQCRICI

SEQ ID NO: 10966 - protein, 566 aa, synthetic construct
  REGION 1..566: note = hemagglutinin__InfluenzaA__AHE38026
MKAILVVLLYTFATANADTLCIGYHANNSTDTVDTVLEKNVTVTHSVNLLEDKHNGKLCKLRGVAPLHLGKCNIAGWILGNPECESLSTASSWSYIVETSSSDNGTCYPGDFINYEELREQLSSVSSFERFEIFPKTSSWPNHDSNKGVTAACPHAGAKSFYKNLIWLVKKGNSYPKLSQSYINEKGKEVLVLWGIHHPSTTADQQSLYQNADAYVFVGTSRYSKKFKPEIAIRPKVRDQEGRMNYYWTLVEPGDKITFEATGNLVVPRYAFTMERNAGSGIIISDTPVHDCNTTCQTPEGAINTSLPFQNIHPITIGKCPKYVKSTKLRLATGLRNVPSIQSRGLFGAIAGFIEGGWTGMVDGWYGYHHQNEQGSGYAADLKSTQNAIDKITNKVNSVIEKMNTQFTAVGKEFNHLEKRIENLNKKVDDGFLDIWTYNAELLVLLENERTLDYHDSNVKNLYEKVRNQLKNNAKEIGNGCFEFYHKCDNTCMESVKNGTYDYPKYSEEAKLNREKIDGVKLESTRIYQILAIYSTVASSLVLVVSLGAISFWMCSNGSLQCRICI

SEQ ID NO: 10967 - protein, 566 aa, synthetic construct; identical to SEQ ID NO: 9883
  REGION 1..566: note = hemagglutinin__InfluenzaA__AHE38027

SEQ ID NO: 10968 - protein, 560 aa, synthetic construct
  REGION 1..560: note = hemagglutinin__InfluenzaA__AHF20558
MNTQILVFALIAIIPTNADKICLGHHAVSNGTKVNTLTERGVEVVNATETVERTNIPRICSKGKRTVDLGQCGLLGTITGPPQCDQFLEFSADLIIERREGSDVCYPGKFVNEEALRQILRESGGIDKEAMGFTYSGIRTNGATSACRRSGSSFYAEMKWLLSNTDNAAFPQMTKSYKNTRKSPALIVWGIHHSVSTAEQTKLYGSGNKLVTVGSSNYQQSFVPSPGARPQVNGLSGRIDFHWLMLNPNDTVTFSFNGAFIAPDRASFLRGKSMGIQSGVQVDANCEGDCYHSGGTIISNLPFQNIDSRAVGKCPRYVKQRSLLLATGMKNVPEIPKGRGLFGAIAGFIENGWEGLIDGWYGFRHQNAQGEGTAADYKSTQSAIDQITGKLNRLIEKTNQQFELIDNEFNEVEKQIGNVINWTRDSITEVWSYNAELLVAMENQHTIDLADSEMDKLYERVKRQLRENAEEDGTGCFEIFHKCDDDCMASIRNNTYDHSKYREEAMQNRIQIDPVKLSSGYKDVILWFSFGASCFILLAIVMGLVFICVQNGNMRCTIGI

SEQ ID NO: 10969 - protein, 560 aa, synthetic construct
  REGION 1..560: note = hemagglutinin__InfluenzaA__AHF20568
MNTQILVFALIAIIPTNADKICLGHHAVSNGTKVNTLTERGVEVVNATETVERTNIPRICSKGKRTVDLGQCGLLGTITGPPQCDQFLEFSADLIIERREGSDVCYPGKFVNEEALRQILRESGGIDKEAMGFTYSGIRTNGATSACRRSGSSFYAEMKWLLSNTDNAAFPQMTKSYKNTRKSPALIVWGIHHSVSTAEQTKLYGSGNKLVTVGSSNYQQSFVPSPGARPQVNGLSGRIDFHWLMLNPNDTVTFSFNGAFIAPDRASFLRGKSMGIQSGVQVDANCEGDCYHSGGTIMSNLPFQNIDSRAVGKCPRYVKQRSLLLATGMKNVPEIPKGRGLFGAIAGFIENGWEGLIDGWYGFRHQNAQGEGTAADYKSTQSAIDQITGKLNRLIEKTNQQFELIDNEFNEVEKQIGNVINWTRDSITEVWSYNAELLVAMENQHTIDLADSEMDKLYERVKRQLRENAEEDGTGCFEIFHKCDDDCMASIRNNTYDHSKYREEAMQNRIQIDPVKLSSGYKDVILWFSFGASCFILLAIVMGLVFICVKNGNMRCTICI

SEQ ID NO: 10970 - protein, 565 aa, synthetic construct; identical to SEQ ID NO: 7793
  REGION 1..565: note = hemagglutinin__InfluenzaA__AHG96108

SEQ ID NO: 10971 - protein, 565 aa, synthetic construct; identical to SEQ ID NO: 7793
  REGION 1..565: note = hemagglutinin__InfluenzaA__AHG96120

SEQ ID NO: 10972 - protein, 565 aa, synthetic construct; identical to SEQ ID NO: 7793
  REGION 1..565: note = hemagglutinin__InfluenzaA__AHG96132

SEQ ID NO: 10973 - protein, 565 aa, synthetic construct
  REGION 1..565: note = hemagglutinin__InfluenzaA__AHG96144
MKVKLLVLLCTFTATYADTICIGYHANNSTDTVDTVLEKNVTVTHSVNLLENSHNGKLCLLKGIAPLQLGNCSVAGWILGNPECELLISKESWSYIVEKPNPENGTCYPGHFADYEELREQLSSVSSFERFEIFPKESSWPNHTVTGVSASCSHNGESSFYRNLLWLTGKNGLYPNLSKSYANNKEKEVLVLWGVHHPPNIGVQKALYHTENAYVSVVSSHYSRKFTPEIAKRPKVRDQEGRINYYWTLLEPGDTIIFEANGNLIAPRYAFALSRGFGSGIINSNAPMDKCDAKCQTPQGAINSSLPFQNVHPVTIGECPKYVRSAKLRMVTGLRNIPSIQSRGLFGAIAGFIEGGWTGMVDGWYGYHHQNEQGSGYAADQKSTQNAINGITNKVNSVIEKMNTQFTAVGKEFNKLERRMENLNKKVDDGFIDIWTYNAELLVLLENERTLDFHDSNVKNLYEKVKSQLKNNAKEIGNGCFEFYHKCNDECMESVKNGTYDYPKYSEESKLNREKIDGVKLESMGVYQILAIYSTVASSLVLLVSLGAISFWMCSNGSLQCRICI

SEQ ID NO: 10974 - protein, 565 aa, synthetic construct; identical to SEQ ID NO: 7793
  REGION 1..565: note = hemagglutinin__InfluenzaA__AHG96156

SEQ ID NO: 10975 - protein, 565 aa, synthetic construct; identical to SEQ ID NO: 7793
  REGION 1..565: note = hemagglutinin__InfluenzaA__AHG96168

SEQ ID NO: 10976 - protein, 565 aa, synthetic construct; identical to SEQ ID NO: 7793
  REGION 1..565: note = hemagglutinin__InfluenzaA__AHG96180

SEQ ID NO: 10977 - protein, 565 aa, synthetic construct; identical to SEQ ID NO: 7793
  REGION 1..565: note = hemagglutinin__InfluenzaA__AHG96192

SEQ ID NO: 10978 - protein, 565 aa, synthetic construct; identical to SEQ ID NO: 7793
  REGION 1..565: note = hemagglutinin__InfluenzaA__AHG96204

SEQ ID NO: 10979 - protein, 565 aa, synthetic construct; identical to SEQ ID NO: 7793
  REGION 1..565: note = hemagglutinin__InfluenzaA__AHG96216

SEQ ID NO: 10980 - protein, 565 aa, synthetic construct; identical to SEQ ID NO: 7793
  REGION 1..565: note = hemagglutinin__InfluenzaA__AHG96228

SEQ ID NO: 10981 - protein, 565 aa, synthetic construct; identical to SEQ ID NO: 10973
  REGION 1..565: note = hemagglutinin__InfluenzaA__AHG96240

SEQ ID NO: 10982 - protein, 565 aa, synthetic construct; identical to SEQ ID NO: 7793
  REGION 1..565: note = hemagglutinin__InfluenzaA__AHG96252

SEQ ID NO: 10983 - protein, 565 aa, synthetic construct; identical to SEQ ID NO: 7793
  REGION 1..565: note = hemagglutinin__InfluenzaA__AHG96264

SEQ ID NO: 10984 - protein, 565 aa, synthetic construct; identical to SEQ ID NO: 7793
  REGION 1..565: note = hemagglutinin__InfluenzaA__AHG96276

SEQ ID NO: 10985 - protein, 565 aa, synthetic construct; identical to SEQ ID NO: 7793
  REGION 1..565: note = hemagglutinin__InfluenzaA__AHG96288

SEQ ID NO: 10986 - protein, 565 aa, synthetic construct; identical to SEQ ID NO: 7793
  REGION 1..565: note = hemagglutinin__InfluenzaA__AHG96300

SEQ ID NO: 10987 - protein, 566 aa, synthetic construct
  REGION 1..566: note = hemagglutinin__InfluenzaA__AHG96312
MKAILVVLLYTFATANADTLCIGYHANNSTDTVDTVLEKNVTVTHSVNLLEDKHNGKLCKLRGVVPLHLGKCNIAGWILGNPECESLSTASSWSYIVETSSSDNGTCYPGDFINYEELREQLSSVSSFERFEIFPKTSSWPNHDSNKGVTAACPHAGAKSFYKNLIWLVKKGNSYPKLSQSYINDKGKEVLVLWGIHHPSTTADQQSLYQNADAYVFVGTSRYSKKFKPEIAIRPKVRDQEGRMNYYWTLVEPGDKITFEATGNLVVPRYAFTMERNAGSGIIISDTPVHDCNTTCQTPEGAINTSLPFQNIHPITIGKCPKYVKSTKLRLATGLRNVPSIQSRGLFGAIAGFIEGGWTGMVDGWYGYHHQNEQGSGYAADLKSTQNAIDKITNKVNSVIEKMNTQFTAVGKEFNHLEKRIENLNKKVDDGFLDIWTYNAELLVLLENERTLDYHDSNVKNLYEKVRNQLKNNAKEIGNGCFEFYHKCDNTCMESVKNGTYDYPKYSEEAKLNREKIDGVKLESTRIYQILAIYSTVASSLVLVVSLGAISFWMCSNGSLQCRICI

SEQ ID NO: 10988 - protein, 566 aa, synthetic construct; identical to SEQ ID NO: 10040
  REGION 1..566: note = hemagglutinin__InfluenzaA__AHG96313

SEQ ID NO: 10989 - protein, 566 aa, synthetic construct
  REGION 1..566: note = hemagglutinin__InfluenzaA__AHG96314
MKAILVVLLYTFATANADTLCIGYHANNSTDTVDTVLEKNVTVTHSVNLLEDKHNGKLCKLRGVAPLHLGKCNIAGWILGNPECESLSTASSWSYIVETSSSDNGTCYPGDFINYEELREQLSSVSSFERFEIFPKTSSWPNHDSNKGVTAACPHAGAKSFYKNLIWLVKKGNSYPKLSQSYINDKGKEVLVLWGIHHPSTTADQQSLYQNADAYVFVGTSRYSKKFKPEIAIRPKVRDQEGRMNYYWTLVEPGDKITFEATGNLVVPRYAFTMERNAGSGIIISDTPVHDCNTTCQTPEGAINTSLPFQNIHPITIGKCPKYVKSTKLRLATGLRNVPSIQSRGLFGAIAGFIEGGWTGMVDGWYGYHHQNEQGSGYAADLKSTQNAIDKITNKVNSVIEKMNTQYTAVGKEFNHLEKRIENLNKKVDDGFLDIWTYNAELLVLLENERTLDYHDSNVKNLYEKVRNQLKNNAKEIGNGCFEFYHKCDNTCMESVKNGTYDYPKYSEEAKLNREKIDGVKLESTRIYQILAIYSTVASSLVLVVSLGAISFWMCSNGSLQCRICI

SEQ ID NO: 10990 - protein, 566 aa, synthetic construct; identical to SEQ ID NO: 10040
  REGION 1..566: note = hemagglutinin__InfluenzaA__AHG96315

SEQ ID NO: 10991 - protein, 566 aa, synthetic construct; identical to SEQ ID NO: 10040
  REGION 1..566: note = hemagglutinin__InfluenzaA__AHG96316

SEQ ID NO: 10992 - protein, 566 aa, synthetic construct; identical to SEQ ID NO: 10040
  REGION 1..566: note = hemagglutinin__InfluenzaA__AHG96317

SEQ ID NO: 10993 - protein, 566 aa, synthetic construct; identical to SEQ ID NO: 10040
  REGION 1..566: note = hemagglutinin__InfluenzaA__AHG96320

SEQ ID NO: 10994 - protein, 566 aa, synthetic construct; identical to SEQ ID NO: 10040
  REGION 1..566: note = hemagglutinin__InfluenzaA__AHG96321

SEQ ID NO: 10995 - protein, 566 aa, synthetic construct; identical to SEQ ID NO: 10040
  REGION 1..566: note = hemagglutinin__InfluenzaA__AHG96322

SEQ ID NO: 10996 - protein, 566 aa, synthetic construct; identical to SEQ ID NO: 10040
  REGION 1..566: note = hemagglutinin__InfluenzaA__AHG96324

SEQ ID NO: 10997 - protein, 566 aa, synthetic construct; identical to SEQ ID NO: 10040
  REGION 1..566: note = hemagglutinin__InfluenzaA__AHG96325

SEQ ID NO: 10998 - protein, 566 aa, synthetic construct
  REGION 1..566: note = hemagglutinin__InfluenzaA__AHG96326
MKAILVVLLYTFATANADTLCIGYHANNSTDTVDTVLEKNVTVTHSVNLLEDKHNGKLCKLRGVAPLHLGKCNIAGWILGNPECESLSTASSWSYIVETSNSDNGTCYPGDFINYEELREQLSSVSSFERFEIFPKTSSWPNHDSNKGVTAACPHAGAKSFYKNLIWLVKKGNSYPKLSQSYINDKGKEVLVLWGIHHPSTTADQQSLYQNADAYVFVGTSRYSKKFKPEIAIRPKVRDQEGRMNYYWTLVEPGDKITFEATGNLVVPRYAFTMERNAGSGIIISDTPVHDCNTTCQTPEGAINTSLPFQNIHPITIGKCPKYVKSTKLRLATGLRNVPSIQSRGLFGAIAGFIEGGWTGMVDGWYGYHHQNEQGSGYAADLKSTQNAIDKITNKVNSVIEKMNTQFTAVGKEFNHLEKRIENLNKKVDDGFLDIWTYNAELLVLLENERTLDYHDSNVKNLYEKVRNQLKNNAKEIGNGCFEFYHKCDNTCMESVKNGTYDYPKYSEEAKLNREKIDGVKLESTRIYQILAIYSTVASSLVLVVSLGAISFWMCSNGSLQCRICI

SEQ ID NO: 10999 - protein, 566 aa, synthetic construct; identical to SEQ ID NO: 10040
  REGION 1..566: note = hemagglutinin__InfluenzaA__AHG96327

SEQ ID NO: 11000 - protein, 566 aa, synthetic construct
  REGION 1..566: note = hemagglutinin__InfluenzaA__AHG96329
MKAILVVLLYTFTTANADTLCIGYHANNSTDTVDTVLEKNVTVTHSVNLLEDKHNGKLCKLRGVAPLHLGKCNIAGWILGNPECESLSTASSWSYIVETSSSDNGTCYPGDFINYEELREQLSSVSSFERFEIFPKTSSWPNHDSNKGVTAACPHAGAKSFYKNLIWLVKKGNSYPKLSQSYINDKGKEVLVLWGIHHPSTTADQQSLYQNADAYVFVGTSRYSKKFKPEIAIRPKVRDQEGRMNYYWTLVEPGDKITFEATGNLVVPRYAFTMERNAGSGIIISDTPVHDCNTTCQTPEGAINTSLPFQNIHPITIGKCPKYVKSTKLRLATGLRNVPSIQSRGLFGAIAGFIEGGWTGMVDGWYGYHHQNEQGSGYAADLKSTQNAIDKITNKVNSVIEKMNTQFTAVGKEFNHLEKRIENLNKKVDDGFLDIWTYNAELLVLLENERTLDYHDSNVKNLYEKIRNQLKNNAKEIGNGCFEFYHKCDNTCMESVKNGTYEYPKYSEEAKLNREKIDGVKLESTKIYQILAIYSTVASSLVLVVSLGAISFWMCSNGSLQCRICI

SEQ ID NO: 11001 - protein, 566 aa, synthetic construct
  REGION 1..566: note = hemagglutinin__InfluenzaA__AHG96330
MKAILVVLLYTFATATADTLCIGYHANNSTDTVDTVLEKNVTVTHSVNLLEDKHNGKLCKLRGVAPLHLGKCNIAGWILGNPECESLSTASSWSYIVETSSSDNGTCYPGDFINYEELREQLSSVSSFERFEIFPKTSSWPNHDSNKGVTAACPHAGAKSFYKNLIWLVKKGNSYPKLSQSYINDKGKEVLVLWGIHHPSTTADQQSLYQNADAYVFVGTSRYSKKFKPEIAIRPKVRDQEGRMNYYWTLVEPGDKITFEATGNLVVPRYAFTMERNAGSGIIISDTPVHDCNTTCQTPEGAINTSLPFQNIHPITIGKCPKYVKSTKLSLATGLRNVPSIQSRGLFGAIAGFIEGGWTGMVDGWYGYHHQNEQGSGYAADLKSTQNAIDKITNKVNSVIEKMNTQFTAVGKEFNHLEKRIENLNKKVDDGFLDIWTYNAELLVLLENERTLDYHDSNVKNLYEKIRNQLKNNAKEIGNGCFEFYHKCDNTCMESVKNGTYDYPKYSEEAKLNREKIDGVKLESTRIYQILAIYSTVASSLVLVVSLGAISFWMCSNGSLQCRICI

SEQ ID NO: 11002 - protein, 566 aa, synthetic construct; identical to SEQ ID NO: 10040
  REGION 1..566: note = hemagglutinin__InfluenzaA__AHG96332

SEQ ID NO: 11003 - protein, 566 aa, synthetic construct
  REGION 1..566: note = hemagglutinin__InfluenzaA__AHG96334
MKAILVVLLYTLATANADTLCIGYHANNSTDTVDTVLEKNVTVTHSVNLLEDKHNGKLCKLRGVAPLHLGKCNIAGWILGNPECESLSTASSWSYIVETSSSDNGTCYPGDFINYEELREQLSSVSSFERFEIFPKTSSWPNHDSNKGVTAACPHAGAKSFYKNLIWLVKKGNSYPKLSQSYINDKGKEVLVLWGIHHPSTTADQQSLYQNADAYVFVGTSRYSKKFKPEIAIRPKVRDQEGRMNYYWTLVEPGDKITFEATGNLVVPRYAFTMERNAGSGIIISDTPVHDCNTTCQTPEGAINTSLPFQNIHPITIGKCPKYVKSTKLRLATGLRNVPSIQSRGLFGAIAGFIEGGWTGMVDGWYGYHHQNEQGSGYAADLKSTQNAIDKITNKVNSVIEKMNTQFTAVGKEFNHLEKRIENLNKKVDDGFLDIWTYNAELLVLLENERTLDYHDSNVKNLYEKVRNQLKNNAKEIGNGCFEFYHKCDNTCMESVKNGTYDYPKYSEEAKLNREKIDGVKLESTRIYQILAIYSTVASSLVLVVSLGAISFWMCSNGSLQCRICI

SEQ ID NO: 11004 - protein, 566 aa, synthetic construct
  REGION 1..566: note = hemagglutinin__InfluenzaA__AHG96335
MKAILVVLLYTFETANADTLCIGYHANNSTDTVDTVLEKNVTVTHSVNLLEDKHNGKLCKLKGVAPLHLGKCNIAGWILGNPECESLSTASSWSYIVETSSSDNGTCYPGDFINYEELREQLSSVSSFERFEIFPKTSSWPNHDSNKGVTAACPHAGAKSFYKNLIWLVKKGNSYPKLSQSYINDKGKEVLVLWGIHHPSTTADQQSLYQNADAYVFVGTSRYSKKFKPEIAIRPKVRDQEGRMNYYWTLVEPGDKITFEATGNLVVPRYAFTMERNAGSGIIISDTPVHDCNTTCQTPEGAINTSLPFQNIHPITIGKCPKYVKSTKLRLATGLRNVPSIQSRGLFGAIAGFIEGGWTGMVDGWYGYHHQNEQGSGYAADLKSTQNAIDKITNKVNSVIEKMNTQFTAVGKEFNHLEKRIENLNKKVDDGFLDIWTYNAELLVLLENERTLDYHDSNVKNLYEKVRNQLKNNAKEIGNGCFEFYHKCDNTCMESVKNGTYDYPKYSEEAKLNREKIDGVKLESTRIYQILAIYSTVASSLVLVVSLGAISFWMCSNGSLQCRICI

SEQ ID NO: 11005 - protein, 566 aa, synthetic construct
  REGION 1..566: note = hemagglutinin__InfluenzaA__AHG96336
MKAILVVLLYTFATANADTLCIGYHANNSTDTVDTVLEKNVTVTHSVNLLEDKHNGKLCKLRGVAPLHLGKCNIAGWILGNPECESLSTASSWSYIVETSSSDNGTCYPGDFINYEELREQLSSVSSFERFEIFPKTSSWPNHDSNKGVTAACPHAGAKSFYKNLIWLVKKGNSYPKLSQSYINDKGKEVLVLWGIHHPSTTADQQSLYQNADAYVFVGTSRYSKKFKPEIAIRPKVRDQEGRMNYYWTLVEPGDKITFEATGNLVVPRYAFTMERNAGSGIIISDTPVRDCNTTCQTPEGAINTSLPFQNIHPITIGKCPKYVKSTKLRLATGLRNVPSIQSRGLFGAIAGFIEGGWTGMVDGWYGYHHQNEQGSGYAADLKSTQNAIDKITNKVNSVIEKMNTQFTAVGKEFNHLEKRIENLNKKVDDGFLDIWTYNAELLVLLENERTLDYHDSNVKNLYEKVRNQLKNNAKEIGNGCFEFYHKCDNTCMESVKNGTYDYPKYSEEAKLNREKIDGVKLESTRIYQILAIYSTVASSLVLVVSLGAISFWMCSNGSLQCRICI

SEQ ID NO: 11006 - protein, 566 aa, synthetic construct
  REGION 1..566: note = hemagglutinin__InfluenzaA__AHG96338
MKAILVVLLYTFATANADTLCIGYHANNSTDTVDTVLEKNVTVTHSVNLLEDKHNGKLCKLRGVAPLHLGKCNIAGWILGNPECESLSTASSWSYIVETSSSDNGTCYPGDFINYEELREQLSSVSSFERFEIFPKTSSWPNHDSNKGVTAACSHAGAKSFYKNLIWLVKKGNSYPKLSQSYINDKGKEVLVLWGIHHPSTTADQQSLYQNADAYVFVGTSRYSKKFKPEIAIRPKVRDQEGRMNYYWTLVEPGDKITFEATGNLVVPRYAFTMERNAGSGIIISDTPVHDCNTTCQTPEGAINTSLPFQNIHPITIGKCPKYVKSTKLRLATGLRNVPSIQSRGLFGAIAGFIEGGWTGMVDGWYGYHHQNEQGSGYAADLKSTQNAIDKITNKVNSVIEKMNTQFTAVGKEFNHLEKRIENLNKKVDDGFLDIWTYNAELLVLLENERTLDYHDSNVKNLYEKVRNQLKNNAKEIGNGCFEFYHKCDNTCMESVKNGTYDYPKYSEEAKLNREKIDGVKLESTRIYQILAIYSTVASSLVLVVSLGAISFWMCSNGSLQCRICI

SEQ ID NO: 11007 - protein, 566 aa, synthetic construct
  REGION 1..566: note = hemagglutinin__InfluenzaA__AHG96339
MKAILVVLLYTFATANADTLCIGYHANNSTDTVDTVLEKNVTVTHSVNLLEDKHNGKLCKLRGVAPLHLGKCNIAGWILGNPECESLSTASSWSYIVETSSSDNGTCYPGDFINYEELREQLSSVSSFERFEIFPKTSSWPNHDSNKGVTAACPHAGAKSFYKNLIWLVKKGNSYPKLSQSYINDKGKEILVLWGIHHPSTTADQQSLYQNADAYVFVGTSRYSKKFKPEIAIRPKVRDQEGRMNYYWTLVEPGDKITFEATGNLVVPRYAFTMERNAGSGIIISDTPVHDCNTTCQTPEGAINTSLPFQNIHPITIGKCPKYVKSTKLRLATGLRNVPSIQSRGLFGAIAGFIEGGWTGMVDGWYGYHHQNEQGSGYAADLKSTQNAIDKITNKVNSVIEKMNTQFTAVGKEFNHLEKRIENLNKKVDDGFLDIWTYNAELLVLLENERTLDYHDSNVKNLYEKVRNQLKNNAKEIGNGCFEFYHKCDNTCMESVKNGTYDYPKYSEEAKLNREKIDGVKLESTRIYQILAIYSTVASSLVLVVSLGAISFWMCSNGSLQCRICI

SEQ ID NO: 11008 - protein, 566 aa, synthetic construct; identical to SEQ ID NO: 10040
  REGION 1..566: note = hemagglutinin__InfluenzaA__AHG96340

SEQ ID NO: 11009 - protein, 566 aa, synthetic construct
  REGION 1..566: note = hemagglutinin__InfluenzaA__AHG96341
MKAILVVLLYTFATANADTLCIGYHANNSTDTVDTVLEKNVTVTHSVNLLEDKHNGKLCKLRGVAPLHLGKCNIAGWILGNPECESLSTASSWSYIVETSSSDNGTCYPGDFINYEELREQLSSVSSFERFEIFPKTSSWPNHDSNKGVTAACPHAGAKSFYKNLIWLVKKGNSYPKLSQSYINDKGKEVLVLWGIHHPSTTADQQSLYQNADAYVFVGTSKYSKKFKPEIAIRPKVRDQEGRMNYYWTLVEPGDKITFEATGNLVVPRYAFTMERNAGSGIIISDTPVHDCNTTCQTPEGAINTSLPFQNIHPITIGKCPKYVKSTKLRLATGLRNIPSIQSRGLFGAIAGFIEGGWTGMVDGWYGYHHQNEQGSGYAADLKSTQNAIDKITNKVNSVIEKMNTQFTAVGKEFNHLEKRIENLNKKVDDGFLDIWTYNAELLVLLENERTLDYHDSNVKNLYEKVRNQLKNNAKEIGNGCFEFYHKCDNTCMESVKNGTYDYPKYSEEAKLNREKIDGVKLESTRIYQILAIYSTVASSLVLVVSLGAISFWMCSNGSLQCRICI

SEQ ID NO: 11010 - protein, 566 aa, synthetic construct
  REGION 1..566: note = hemagglutinin__InfluenzaA__AHG96342
MKAILVVLLYTFATANADTLCIGYHANNSTDTVDTVLEKNVTVTHSVNLLEDKHNGKLCKLRGVAPLHLGKCNIAGWILGNPECESLSTASSWSYIVETSSSDNGTCYPGDFINYEELREQLSSVSSFERFEIFPKTSSWPNHDSNKGVTAACPHAGAKSFYKNLIWLVKKGNSYPKLSQSYINDKGKEVLVLWGIHHPSTTADQQSLYQNADAYVFVGTSRYSKKFKPEIAIRPKVRDQEGRMNYYWTLVEPGDKITFEATGNLVVPRYAFTMERNAGSGIIISDTPVHDCNTTCQTPEGAINTSLPFQNIHPITIGKCPKYVKSTKLRLATGLRNIPSIQSRGLFGAIAGFIEGGWTGMVDGWYGYHHQNEQGSGYAADLKSTQNAIDKITNKVNSVIEKMNTQFTAVGKEFNHLEKRIENLNKKVDDGFLDIWTYNAELLVLLENERTLDYHDSNVKNLYEKVRNQLKNNAKEIGNGCFEFYHKCDNMCMESVKNGTYDYPKYSEEAKLNREKIDGVKLESTRIYQILAIYSTVASSLVLVVSLGAISFWMCSNGSLQCRICI

SEQ ID NO: 11011 - protein, 566 aa, synthetic construct
  REGION 1..566: note = hemagglutinin__InfluenzaA__AHG96343
MKAILVVLLYTFATATADTLCIGYHANNSTDTVDTVLEKNVTVTHSVNLLEDKHNGKLCKLRGVAPLHLGKCNIAGWILGNPECESLSTASSWSYIVETSNSDNGTCYPGDFINYEELREQLSSVSSFERFEIFPKTSSWPNHDSNKGVTAACPHAGAKSFYKNLIWLVKKGNSYPKLSQSYINDKGKEVLVLWGIHHPSTTADQQSLYQNADAYVFVGTSRYSKKFKPEIAIRPKVRDQEGRMNYYWTLVEPGDKITFEATGNLVVPRYAFTMERNAGSGIIISDTPVHDCNTTCQTPEGAINTSLPFQNIHPITIGKCPKYVKSTKLRLATGLRNVPSIQSRGLFGAIAGFIEGGWTGMVDGWYGYHHQNEQGSGYAADLKSTQNAIDKITNKVNSVIEKMNTQFTAVGKEFNHLEKRIENLNKKVDDGFLDIWTYNAELLVLLENERTLDYHDSNVKNLYEKVRNQLKNNAKEIGNGCFEFYHKCDNTCMESVKNGTYDYPKYSEEAKLNREKIDGVKLESTRIYQILAIYSTVASSLVLVVSLGAISFWMCSNGSLQCRICI

SEQ ID NO: 11012 - protein, 566 aa, synthetic construct; identical to SEQ ID NO: 10040
  REGION 1..566: note = hemagglutinin__InfluenzaA__AHG96344

SEQ ID NO: 11013 - protein, 566 aa, synthetic construct; identical to SEQ ID NO: 11003
  REGION 1..566: note = hemagglutinin__InfluenzaA__AHG96345

SEQ ID NO: 11014 - protein, 566 aa, synthetic construct; identical to SEQ ID NO: 10040
  REGION 1..566: note = hemagglutinin__InfluenzaA__AHG96346

SEQ ID NO: 11015 - protein, 566 aa, synthetic construct; identical to SEQ ID NO: 10040
  REGION 1..566: note = hemagglutinin__InfluenzaA__AHG96347

SEQ ID NO: 11016 - protein, 566 aa, synthetic construct; identical to SEQ ID NO: 10040
  REGION 1..566: note = hemagglutinin__InfluenzaA__AHG96348

SEQ ID NO: 11017 - protein, 566 aa, synthetic construct; identical to SEQ ID NO: 10040
  REGION 1..566: note = hemagglutinin__InfluenzaA__AHG96349

SEQ ID NO: 11018 - protein, 566 aa, synthetic construct; identical to SEQ ID NO: 10040
  REGION 1..566: note = hemagglutinin__InfluenzaA__AHG96350

SEQ ID NO: 11019 - protein, 566 aa, synthetic construct; identical to SEQ ID NO: 10040
  REGION 1..566: note = hemagglutinin__InfluenzaA__AHG96351

SEQ ID NO: 11020 - protein, 566 aa, synthetic construct; identical to SEQ ID NO: 10040
  REGION 1..566: note = hemagglutinin__InfluenzaA__AHG96352

SEQ ID NO: 11021 - protein, 566 aa, synthetic construct
  REGION 1..566: note = hemagglutinin__InfluenzaA__AHG96353
MKAILVVLLYTFATTNADTLCIGYHANNSTDTVDTVLEKNVTVTHSVNLLEDKHNGKLCKLRGVAPLHLGKCNIAGWILGNPECESLSTASSWSYIVETSSSDNGTCYPGDFINYEELREQLSSVSSFERFEIFPKTSSWPNHDSNKGVTAACPHAGAKSFYKNLIWLVKKGNSYPKLSQSYINDKGKEVLVLWGIHHPSTTADQQSLYQNADAYVFVGTSRYSKKFKPEIAIRPKVRDQEGRMNYYWTLVEPGDKITFEATGNLVVPRYAFTMERNAGSGIIISDTPVHDCNTTCQTPEGAINTSLPFQNIHPITIGKCPKYVKSTKLRLATGLRNVPSIQSRGLFGAIAGFIEGGWTGMVDGWYGYHHQNEQGSGYAADLKSTQNAIDKITNKVNSVIEKMNTQFTAVGKEFNHLEKRIENLNKKVDDGFLDIWTYNAELLVLLENERTLDYHDSNVKNLYEKVRNQLKNNAKEIGNGCFEFYHKCDNTCMESVKNGTYDYPKYSEEAKLNREKIDGVKLESTRIYQILAIYSTVASSLVLVVSLGAISFWMCSNGSLQCRICI

SEQ ID NO: 11022 - protein, 566 aa, synthetic construct; identical to SEQ ID NO: 10040
  REGION 1..566: note = hemagglutinin__InfluenzaA__AHG96354

SEQ ID NO: 11023 - protein, 566 aa, synthetic construct
  REGION 1..566: note = hemagglutinin__InfluenzaA__AHG96355
MKAILVVLLYTLATANADTLCIGYHANNSTDTVDTVLEKNVTVTHSVNLLEDKHNGKLCKLRGVAPLHLGKCNIAGWILGNPECESLSTASSWSYIVETSSSDNGTCYPGDFINYEELREQLSSVSSFERFEIFPKTSSWPNHDSNKGVTAACPHAGAKSFYKNLIWLVKKGNSYPKLSQSYINDKGKEVLVLWGIHHPSTTADQQSLYQNADAYVFVGTSRYSKKFKPEIAIRPKVRDQEGRMNYYWTLVEPGDKITFEATGNLVVPRYAFTMERNAGSGIIISDTPVHDCNTTCQTPEGAINTSLPFQNIHPITIGKCPKYVKSTKLRLATGLRNVPSIQSRGLFGAIAGFIEGGWTGMVDGWYGYHHQNEQGSGYAADLKSTQNAIDKITNKVNSVIEKMNTQFTAVGKEFNQLEKRIENLNKKVDDGFLDIWTYNAELLVLLENERTLDYHDSNVKNLYEKVRNQLKNNAKEIGNGCFEFYHKCDNTCMESVKNGTYDYPKYSEEAKLNREKIDGVKLESTRIYQILAIYSTVASSLVLVVSLGAISFWMCSNGSLQCRICI

SEQ ID NO: 11024 - protein, 566 aa, synthetic construct; identical to SEQ ID NO: 9858
  REGION 1..566: note = hemagglutinin__InfluenzaA__AHG96356

SEQ ID NO: 11025 - protein, 566 aa, synthetic construct
  REGION 1..566: note = hemagglutinin__InfluenzaA__AHG96359
MKTIIALSYILCLVFAQKLPGNDNSTATLCLGHHAVPNGTIVKTITNDQIEVTNATELVQSSSTGGICDSPHQILDGENCTLIDALLGDPQCDGFQNKKWDLFVERSKAYSNCYPYDVPDYASLRSLVASSGTLEFNDESFNWTGVTQNGTSSSCKRRSNNSFFSRLNWLTHLKFKYPALNVTMPNNEKFDKLYIWGVHHPVTDNDQIFLYAQASGRITVSTKRSQQTVIPNIGSRPRIRNIPSRISIYWTIVKPGDILLINSTGNLIAPRGYFKIRSGKSSIMRSDAPIGKCNSECITPNGSIPNDKPFQNVNRITYGACPRYVKQNTLKLATGMRNVPEKQTRGIFGAIAGFIENGWEGMVDGWYGFRHQNSEGIGQAADLKSTQAAINQINGKLNRLIGKTNEKFHQIEKEFSEVEGRIQDLEKYVEDTKIDLWSYNAELLVALENQHTIDLTDSEMNKLFERTKKQLRENAEDMGNGCFKIYHKCDNACIGSIRNGTYDHDVYRDEALNNRFQIKGVELKSGYKDWILWISFAISCFLLCVALLGFIMWACQKGNIRCNICI

SEQ ID NO: 11026 - protein, 566 aa, synthetic construct; identical to SEQ ID NO: 11025
  REGION 1..566: note = hemagglutinin__InfluenzaA__AHG96371

SEQ ID NO: 11027 - protein, 566 aa, synthetic construct; identical to SEQ ID NO: 11025
  REGION 1..566: note = hemagglutinin__InfluenzaA__AHG96383

SEQ ID NO: 11028 - protein, 565 aa, synthetic construct; identical to SEQ ID NO: 7793
  REGION 1..565: note = hemagglutinin__InfluenzaA__AHG96395

SEQ ID NO: 11029 - protein, 566 aa, synthetic construct; identical to SEQ ID NO: 11025
  REGION 1..566: note = hemagglutinin__InfluenzaA__AHG96407

SEQ ID NO: 11030 - protein, 566 aa, synthetic construct; identical to SEQ ID NO: 11025
  REGION 1..566: note = hemagglutinin__InfluenzaA__AHG96419

SEQ ID NO: 11031 - protein, 566 aa, synthetic construct; identical to SEQ ID NO: 11025
  REGION 1..566: note = hemagglutinin__InfluenzaA__AHG96431

SEQ ID NO: 11032 - protein, 566 aa, synthetic construct; identical to SEQ ID NO: 11025
  REGION 1..566: note = hemagglutinin__InfluenzaA__AHG96443

SEQ ID NO: 11033 - protein, 566 aa, synthetic construct; identical to SEQ ID NO: 11025
  REGION 1..566: note = hemagglutinin__InfluenzaA__AHG96455

SEQ ID NO: 11034 - protein, 566 aa, synthetic construct; identical to SEQ ID NO: 11025
  REGION 1..566: note = hemagglutinin__InfluenzaA__AHG96467

SEQ ID NO: 11035 - protein, 566 aa, synthetic construct; identical to SEQ ID NO: 11025
  REGION 1..566: note = hemagglutinin__InfluenzaA__AHG96479

SEQ ID NO: 11036 - protein, 566 aa, synthetic construct; identical to SEQ ID NO: 11025
  REGION 1..566: note = hemagglutinin__InfluenzaA__AHG96491

SEQ ID NO: 11037 - protein, 566 aa, synthetic construct; identical to SEQ ID NO: 2356
  REGION 1..566: note = hemagglutinin__InfluenzaA__AHG96503

SEQ ID NO: 11038 - protein, 565 aa, synthetic construct; identical to SEQ ID NO: 7793
  REGION 1..565: note = hemagglutinin__InfluenzaA__AHG96515

SEQ ID NO: 11039 - protein, 565 aa, synthetic construct; identical to SEQ ID NO: 7793
  REGION 1..565: note = hemagglutinin__InfluenzaA__AHG96527

SEQ ID NO: 11040 - protein, 565 aa, synthetic construct; identical to SEQ ID NO: 7793
  REGION 1..565: note = hemagglutinin__InfluenzaA__AHG96539

SEQ ID NO: 11041 - protein, 565 aa, synthetic construct; identical to SEQ ID NO: 7793
  REGION 1..565: note = hemagglutinin__InfluenzaA__AHG96551

SEQ ID NO: 11042 - protein, 565 aa, synthetic construct; identical to SEQ ID NO: 10973
  REGION 1..565: note = hemagglutinin__InfluenzaA__AHG96563

SEQ ID NO: 11043 - protein, 565 aa, synthetic construct; identical to SEQ ID NO: 7793
  REGION 1..565: note = hemagglutinin__InfluenzaA__AHG96575

SEQ ID NO: 11044 - protein, 565 aa, synthetic construct; identical to SEQ ID NO: 7793
  REGION 1..565: note = hemagglutinin__InfluenzaA__AHG96587

SEQ ID NO: 11045 - protein, 565 aa, synthetic construct; identical to SEQ ID NO: 7793
  REGION 1..565: note = hemagglutinin__InfluenzaA__AHG96599

SEQ ID NO: 11046 - protein, 565 aa, synthetic construct; identical to SEQ ID NO: 7793
  REGION 1..565: note = hemagglutinin__InfluenzaA__AHG96611

SEQ ID NO: 11047 - protein, 565 aa, synthetic construct; identical to SEQ ID NO: 7793
  REGION 1..565: note = hemagglutinin__InfluenzaA__AHG96623

SEQ ID NO: 11048 - protein, 565 aa, synthetic construct; identical to SEQ ID NO: 7793
  REGION 1..565: note = hemagglutinin__InfluenzaA__AHG96635

SEQ ID NO: 11049 - protein, 565 aa, synthetic construct; identical to SEQ ID NO: 7793
  REGION 1..565: note = hemagglutinin__InfluenzaA__AHG96647

SEQ ID NO: 11050 - protein, 565 aa, synthetic construct; identical to SEQ ID NO: 7793
  REGION 1..565: note = hemagglutinin__InfluenzaA__AHG96659

SEQ ID NO: 11051 - protein, 565 aa, synthetic construct; identical to SEQ ID NO: 7793
  REGION 1..565: note = hemagglutinin__InfluenzaA__AHG96671

SEQ ID NO: 11052 - protein, 565 aa, synthetic construct; identical to SEQ ID NO: 7793
  REGION 1..565: note = hemagglutinin__InfluenzaA__AHG96683

SEQ ID NO: 11053 - protein, 566 aa, synthetic construct; identical to SEQ ID NO: 11025
  REGION 1..566: note = hemagglutinin__InfluenzaA__AHG96695

SEQ ID NO: 11054 - protein, 566 aa, synthetic construct; identical to SEQ ID NO: 11025
  REGION 1..566: note = hemagglutinin__InfluenzaA__AHG96707

SEQ ID NO: 11055 - protein, 566 aa, synthetic construct; identical to SEQ ID NO: 11025
  REGION 1..566: note = hemagglutinin__InfluenzaA__AHG96719

SEQ ID NO: 11056 - protein, 566 aa, synthetic construct; identical to SEQ ID NO: 11025
  REGION 1..566: note = hemagglutinin__InfluenzaA__AHG96731

SEQ ID NO: 11057 - protein, 566 aa, synthetic construct; identical to SEQ ID NO: 11025
  REGION 1..566: note = hemagglutinin__InfluenzaA__AHG96743

SEQ ID NO: 11058 - protein, 566 aa, synthetic construct; identical to SEQ ID NO: 11025
  REGION 1..566: note = hemagglutinin__InfluenzaA__AHG96755

SEQ ID NO: 11059 - protein, 566 aa, synthetic construct; identical to SEQ ID NO: 11025
  REGION 1..566: note = hemagglutinin__InfluenzaA__AHG96767

SEQ ID NO: 11060 - protein, 566 aa, synthetic construct; identical to SEQ ID NO: 11025
  REGION 1..566: note = hemagglutinin__InfluenzaA__AHG96779

SEQ ID NO: 11061 - protein, 566 aa, synthetic construct
  REGION 1..566: note = hemagglutinin__InfluenzaA__AHG96791
MKTIIALSYILCLVFAQKLPGNDNSTATLCLGHHAVPNGTIVKTITNDQIEVTNATELVQSSSTGGICDSPHQILDGENCTLIDALLGDPQCDGFQNKKWDLFVERSKAYSNCYPYDVPDYASLRSLVASSGTLEFNDESFNWTGVTQNGTSSSCKRRSNNSFFSRLNWLTQLKFKYPALNVTMPNNEKFDKLYIWGVHHPVTDNDQIFLYAQASGRITVSTKRSQQTVIPNIGSRPRIRNIPSRISIYWTIVKPGDILLINSTGNLIAPRGYFKIRSGKSSIMRSDAPIGKCNSECITPNGSIPNDKPFQNVNRITYGACPRYVKQNTLKLATGMRNVPEKQTRGIFGAIAGFIENGWEGMVDGWYGFRHQNSEGIGQAADLKSTQAAINQINGKLNRLIGKTNEKFHQIEKEFSEVERRIQDLEKYVEDTKIDLWSYNAELLVALENQHTIDLTDSEMNKLFERTKKQLRENAEDMGNGCFKIYHKCDNACIGSIRNGTYDHDVYRDEALNNRFQIKGVELKSGYKDWILWISFAISCFLLCVALLGFIMWACQKGNIRCNICI

SEQ ID NO: 11062 - protein, 566 aa, synthetic construct; identical to SEQ ID NO: 11025
  REGION 1..566: note = hemagglutinin__InfluenzaA__AHG96803

SEQ ID NO: 11063 - protein, 566 aa, synthetic construct; identical to SEQ ID NO: 11025
  REGION 1..566: note = hemagglutinin__InfluenzaA__AHG96815

SEQ ID NO: 11064 - protein, 566 aa, synthetic construct; identical to SEQ ID NO: 11025
  REGION 1..566: note = hemagglutinin__InfluenzaA__AHG96827

SEQ ID NO: 11065 - protein, 566 aa, synthetic construct; identical to SEQ ID NO: 11025
  REGION 1..566: note = hemagglutinin__InfluenzaA__AHG96839

SEQ ID NO: 11066 - protein, 566 aa, synthetic construct; identical to SEQ ID NO: 11025
  REGION 1..566: note = hemagglutinin__InfluenzaA__AHG96851

SEQ ID NO: 11067 - protein, 566 aa, synthetic construct; identical to SEQ ID NO: 11025
  REGION 1..566: note = hemagglutinin__InfluenzaA__AHG96863

SEQ ID NO: 11068 - protein, 566 aa, synthetic construct; identical to SEQ ID NO: 11025
  REGION 1..566: note = hemagglutinin__InfluenzaA__AHG96875

SEQ ID NO: 11069 - protein, 566 aa, synthetic construct; identical to SEQ ID NO: 11025
  REGION 1..566: note = hemagglutinin__InfluenzaA__AHG96887

SEQ ID NO: 11070 - protein, 566 aa, synthetic construct; identical to SEQ ID NO: 11025
  REGION 1..566: note = hemagglutinin__InfluenzaA__AHG96899

SEQ ID NO: 11071 - protein, 566 aa, synthetic construct; identical to SEQ ID NO: 11025
  REGION 1..566: note = hemagglutinin__InfluenzaA__AHG96911

SEQ ID NO: 11072 - protein, 566 aa, synthetic construct; identical to SEQ ID NO: 11025
  REGION 1..566: note = hemagglutinin__InfluenzaA__AHG96923

SEQ ID NO: 11073 - protein, 566 aa, synthetic construct; identical to SEQ ID NO: 11025
  REGION 1..566: note = hemagglutinin__InfluenzaA__AHG96935

SEQ ID NO: 11074 - protein, 566 aa, synthetic construct; identical to SEQ ID NO: 11025
  REGION 1..566: note = hemagglutinin__InfluenzaA__AHG96947

SEQ ID NO: 11075 - protein, 566 aa, synthetic construct; identical to SEQ ID NO: 11025
  REGION 1..566: note = hemagglutinin__InfluenzaA__AHG96959

SEQ ID NO: 11076 - protein, 566 aa, synthetic construct; identical to SEQ ID NO: 11025
  REGION 1..566: note = hemagglutinin__InfluenzaA__AHG96971

SEQ ID NO: 11077 - protein, 566 aa, synthetic construct; identical to SEQ ID NO: 11025
  REGION 1..566: note = hemagglutinin__InfluenzaA__AHG96983

SEQ ID NO: 11078 - protein, 566 aa, synthetic construct; identical to SEQ ID NO: 11025
  REGION 1..566: note = hemagglutinin__InfluenzaA__AHG96995

SEQ ID NO: 11079 - protein, 566 aa, synthetic construct; identical to SEQ ID NO: 11025
  REGION 1..566: note = hemagglutinin__InfluenzaA__AHG97007

SEQ ID NO: 11080 - protein, 566 aa, synthetic construct; identical to SEQ ID NO: 11025
  REGION 1..566: note = hemagglutinin__InfluenzaA__AHG97019

SEQ ID NO: 11081 - protein, 566 aa, synthetic construct; identical to SEQ ID NO: 11025
  REGION 1..566: note = hemagglutinin__InfluenzaA__AHG97031

SEQ ID NO: 11082 - protein, 566 aa, synthetic construct; identical to SEQ ID NO: 11025
  REGION 1..566: note = hemagglutinin__InfluenzaA__AHG97043

SEQ ID NO: 11083 - protein, 566 aa, synthetic construct
  REGION 1..566: note = hemagglutinin__InfluenzaA__AHH00866
MKTIIALSYILCLAFAQKLPGNDNSTATLCLGHHAVPNGTLVKTITNDQIEVTNATELVQSSSTGRICDSPHQILDGENCTLIDALLGDPHCDGFQNKEWDLFVERSKAYSNCYPYDVPDYASLRSLVASSGTLEFNNESFNWTGVAQNGTSSACKRRSIKSFFSRLNWLHQLENRYPALNVTMPNNDKFDKLYIWGVHHPSTDSDQISVYAQASGRVTVSTKRSQQTVIPNIGSRPWVRGISSRISIYWTIVNPGDILLINSTGNLIAPRGYFKIRSGKSSIMRSDAPIGKCNSECITPNGSIPNDKPFQNVNRITYGACPRYVKQNTLKLATGMRNVPEKQTRGIFGAIAGFIENGWEGMMDGWYGFRHQNSEGTGQAADLKSTQAAINQINGKLNKLIEKTNEKFHQIEKEFSEVEGRIQDLEKYVEDTKIDLWSYNAELLVALENQHTIDLTDSEMNKLFERTRKQLRENAEDMGNGCFKIYHKCDNACIGSIRNGTYDHDVYRDEALNNRFQIKGVELKSGYKDWILWISFAISCFLLCVVLLGFIMWACQKGNIRCNICI

SEQ ID NO: 11084 - protein, 566 aa, synthetic construct
  REGION 1..566: note = hemagglutinin__InfluenzaA__AHH00870
MKTIIALSYILCLAFAQKLPGNDNSTATLCLGHHAVPNGTLVKTITNDQIEVTNATELVQSSSTGRICDSPHQILDGENCTLIDALLGDPHCDGFQNKEWDLFVERSKAYSNCYPYDVPDYASLRSLVASSGTLEFNNESFNWTGVAQNGTSSACKRRSIKSFFSRLNWLHQLENRYPALNVTMPNNDKFDKLYIWGVHHPSTDSDQISVYAQASGRVTVSTKRSQQTVIPNIGSRPWVRGISSRISIYWTIVKPGDILLINSTGNLIAPRGYFKIRSGKSSIMRSDAPIGKCNSECITPNGSIPNDKPFQNVNRITYGACPRYVKQNTLKLATGMRNVPEKQTRGIFGAIAGFIENGWEGMMDGWYGFRHQNSEGTGQAADLKSTQAAINQINGKLNKLIEKTNEKFHQIEKEFSEVEGRIQDLEKYVEDTKIDLWSYNAELLVALENQHTIDLTDSEMNKLFERTRKQLRENAEDMGNGCFKIYHKCDNACIGSIRNGTYDHDVYRDEALNNRFQIKGVELKSGYKDWILWISFAISCFLLCVVLLGFIMWACQKGNIRCNICI

SEQ ID NO: 11085 - protein, 566 aa, synthetic construct
  REGION 1..566: note = hemagglutinin__InfluenzaA__AHJ57430
MKAILVVLLYTFATANADTLCIGYHANNSTDTVDTVLEKNVTVTHSVNLLEDKHNGKLCRLRGVAPLHLGKCNIAGWILGNPECESLSTASSWSYIVETSSSDNGTCYPGDFINYEELREQLSSVSSFERFEISPKTSSWPNHDSNKGVRAACPHAGAKSFYKNLIWLVKKGNSYPKLSKSYINDKGKEVLVLWGIHHPSTSADQQSLYQNADAYVFVGTSRYSKKFKPEIAIRPKVRGQEGRMNYYWTLVEPGDKITFEATGNLVVPRYAFAMERNAASGIIISDTPVHDCNTTCQTPKGAVNTSLPFQNIHPITIGKCPKYVKSTKLRLATGLRNIPSIQSRGLFGAIAGFIEGGWTGMVDGWYGYHHQNEQGSGYAADLKSTQNAIDEITNKVNSVIEKMNTQFTAVGKEFNHLEKRIENLNKKVDDGFLDIWTYNAELLVLLENERTLDYHDSNVKNLYEKVRSQLKNNAKEIGNGCFEFYHKCNNTCMESVKNGTYDYPKYSEEAKLNREKIDGVKLESTRIYQILAIYSTVASSLVLVVSLGAISFWMCSNGSLQCRICI

SEQ ID NO: 11086 - protein, 566 aa, synthetic construct
  REGION 1..566: note = hemagglutinin__InfluenzaA__AHJ57431
MKAILVVLLYTFATANADTLCIGYHANNSTDTVDTVLEKNVTVTHSVNLLEDKHNGKLCKLRGVAPLHLGKCNIAGWILGNPECESLSTASSWSYIVETSSSDNGTCYPGDFIDYEELREQLSSVSSFERFEIFPKTSSWPNHDSNKGVRAACPHAGAKSFYKNLIWLVKKGNSYPKLSQSYINDKGKEVLVLWGIHHPSTSADQQSLYQNADAYVFVGTSRYSKKFKPEIAIRPKVRDQEGRMNYYWTLVEPGDKITFEATGNLVVPRYAFAMERNAGSGIIISDTPVHDCNTTCQTPKGAINTSLPFQNIHPITIGKCPKYVKSTKLRLATGLRNIPSIQSRGLFGAIAGFIEGGWTGMVDGWYGYHHQNEQGSGYAADLKSTQNAIDKITNKVNSVIEKMNTQFTAVGKEFNHLEKRIENLNKKVDDGFLDIWTYNAELLVLLENERTLDYHDSNVKNLYEKVRNQLKNNAKEIGNGCFEFYHKCDNTCMESVKNGTYDYPKYSEEAKLNREKIDGVKLESTRIYQILAIYSTVASSLVLVVSLGAISFWMCSNGSLQCRICI

SEQ ID NO: 11087 - protein, 566 aa, synthetic construct
  REGION 1..566: note = hemagglutinin__InfluenzaA__AHJ57432
MKAILVVLLYTFATANADTLCIGYHANNSTDTVDTVLEKNVTVTHSVNLLEDKHNGKLCKLRGVAPLHLGKCNIAGWILGNPECESLSTASSWSYIVETSSSDNGTCYPGDFIDYEELREQLSSVSSFERFEIFPKTSSWPNHDSNKGVTAACPHAGAKSFYKNLIWLVKKGNSYPKLSKSYINDKGKEVLVLWGIHHPSTTADQQSLYQNADAYVFVGTSRYSKKFKPQIAIRPKVRDQEGRMNYYWTLVEPGDKITFEATGNLVVPRYAFALERNAGSGIIISDTPVHDCNTTCQTPKGAINTSLPFQNIHPITIGKCPKYVKSTKLRLATGLRNVPSIQSRGLFGAIAGFIEGGWTGMVEGWYGYHHQNEQGSGYAADLKSTQNAIDKITNKVNSVIEKMNTQFTAVGKEFNHLEKRIENLNKKVDDGFLDIWTYNAELLVLLENERTLDYHDSNVKNLYEKVRNQLKNNAKEIGNGCFEFYHKCDNTCMESVKNGTYDYPKYSEEAKLNREKIDGVKLESTRIYQILAIYSTVASSLVLVVSLGAISFWMCSNGSLQCRICI

SEQ ID NO: 11088 - protein, 566 aa, synthetic construct
  REGION 1..566: note = hemagglutinin__InfluenzaA__AHJ57433
MKAILVVLLYTFATANADTLCIGYHANNSTDTVDTVLEKNVTVTHSVNLLEDKHNGKLCKLRGVAPLHLGKCNIAGWILGNPECESLSTASSWSYIVETSSSDNGTCYPGDFINYEELREQLSSVSSFERFEIFPKTSSWPNHDSNKGVTAACPHAGAKSFYKNLIWLVKEGNSYPKLSKSYINDKGKEVLVLWGIHHPSTTADQQSLYQNADAYVFVGTSRYSKKFKPEIAIRPKVRDQEGRMNYYWTLIEPGDKITFEATGNLVVPRYAFAMERNAGSGIIISDTPVHDCNTTCQTPEGAINTSLPFQNIHPITIGKCPKYVKSTKLRLATGLRNVPSIQSRGLFGAIAGFIEGGWTGMVDGWYGYHHQNEQGSGYAADLKSTQNAIDKITNKVNSVIEKMNTQFTAVGKEFNHLEKRIENLNKKVDDGFLDIWTYNAELLVLLENERTLDYHDSNVKNLYEKVRNQLKNNAKEIGNGCFEFYHKCDNTCMESVKNGTYDYPKYSEEAKLNREKIDGVKLESTRIYQILAIYSTVASSLVLVVSLGAISFWMCSNGSLQCRICI

SEQ ID NO: 11089 - protein, 566 aa, synthetic construct
  REGION 1..566: note = hemagglutinin__InfluenzaA__AHJ57434
MKAILVVLLYTFATANADTLCIGYHANNSTDTVDTVLEKNVTVTHSVNPLEDKHNGKLCKLRGVAPLHLGKCNIAGWILGNPECESLSTASSWSYIVETSSSDNGTCYPGDFIDYEELREQLSSVSSFERFEIFPKTSSWPNHDSNKGVTAACPHAGAKSFYKNLIWLVKEGNSYPKLSKSYINDKGKEVLVLWGIHHPSTTADQQSLYQNADAYVFVGTSRYSKKFKPEIAIRPKVRDQEGRMNYYWTLVEPGDKITFEATGNLVVPRYAFAMERNAGSGIIISDTPVHDCNTTCQTPEGAINTSLPFQNIHPITIGKCPKYVKSTKLRLATGLRNVPSIQSRGLFGAIAGFIEGGWTGMVDGWYGYHHQNEQGSGYAADLKSTQNAIDKITNKVNSVIEKMNTQFTAVGKEFNHLEKRIENLNKKVDDGFLDIWTYNAELLVLLENERTLDYHDSNVKNLYEKVRNQLKNNAKEIGNGCFEFYHKCDNTCMESVKNGTYDYPKYSEEAKLNREKIDGVKLESTRIYQILAIYSTVASSLVLVVSLGAISFWMCSNGSLQCRICI

SEQ ID NO: 11090 - protein, 566 aa, synthetic construct
  REGION 1..566: note = hemagglutinin__InfluenzaA__AHJ57435
MKAILVVLLYTFATANADTLCIGYHANNSTDTVDTVLEKNVTVTHSVNLLEDKHNGKLCKLRGVAPLHLGKCNIAGWILGNPECESLSTASSWSYIVETSSSDNGTCYPGDFINYEELREQLSSVSSFERFEIFPKTSSWPNHDSNRGVTAACPHAGAKSFYKNLIWLVKKGNSYPKLSQSYINDKGKEVLVLWGIHHPSTTADQQSLYQNADAYVFVGTSRYSKKFKPEIAIRPKVRDQEGRMNYYWTLVEPGDKITFEATGNLVVPRYAFAMERNAGSGIIISDTPVHDCNTTCQTPEGAINTSLPFQNIHPITIGKCPKYVKSTKLRLATGLRNVPSIQSRGLFGAIAGFIEGGWTGMVDGWYGYHHQNEQGSGYAADLKSTQNAIDKITNKVNSVIEKMNTQFTAVGKEFNHLEKRIENLNKKVDDGFLDIWTYNAELLVLLENERTLDYHDSNVKNLYEKVRNQLKNNAKEIGNGCFEFYHKCDNTCMESVKNGTYDYPKYSEEAKLNREKIDGVKLESTRIYQILAIYSTVASSLVLVVSLGAISFWMCSNGSLQCRICI

SEQ ID NO: 11091 - protein, 566 aa, synthetic construct
  REGION 1..566: note = hemagglutinin__InfluenzaA__AHJ57436
MKTIIALSYILCLVFAQKLPGNDNSTATLCLGHHAVPNGTIVKTITNDQIEVTNATELVQSSSTGEICDSPHQILDGENCTLIDALLGDPQCDGFQNKKWDLFVERSKAYSNCYPYDVPDYASLRSLVASSGTLEFNNESFNWTGVTQNGTSSACIRRSNSSFFSRLNWLTHLNFKYPALNVTIPNNEQFDKLYIWGVHHPGTDKDQIFLYAQASGRITVSTKRSQQTVIPNIGSRPRVRNIPSRISIYWTIVKPGDILLINSTGNLIAPRGYFKIRSGKSSIMRSDAPIGKCNSECITPNGSIPNDKPFQNVNRITYGACPRYVKQNTLKLATGMRNVPEKQTRGIFGAIAGFIENGWEGMVDGWYGFRHQNSEGRGQAADLKSTQAAIDQINGKLNRLIGKTNEKFHQIEKEFSEVEGRIQDLEKYVEDTKIDLWSYNAELLVALENQHTIDLTDSELNKLFEKTKKQLRENAEDMGNGCFKIYHKCDNACIGSIRNGTYDHDVYRDEALNNRFQIKGVELKSGYKDWILWISFAISCFLLCVALLGFIMWACQKGNIRCNICI

SEQ ID NO: 11092 - protein, 566 aa, synthetic construct
  REGION 1..566: note = hemagglutinin__InfluenzaA__AHJ57437
MKTIIALSYILCLVFAQKLPGNDNSTATLCLGHHAVPNGTIVKTITNDQIEVTNATELVQNSSTGEICDSPHQILDGENCTLIDALLGDPQCDGFQNKKWDLFVERSKAYSNCYPYDVPDYASLRSLVASSGTLEFNNESFNWTGVTQNGTSSACIRRSNSSFFSRLNWLTHLNFKYPALNVTMPNNEQFDKLYIWGVHHPGTDKDQIFLYAQSSGRITVSTKRSQQTVIPNIGSRPRVRNIPSRISIYWTIVKPGDILLINSTGNLIAPRGYFKIRSGKSSIMRSDAPIGKCNSECITPNGSIPNDKPFQNVNRITYGACPRYVKQSTLKLATGMRNVPEKQTRGIFGAIAGFIENGWEGMVDGWYGFRHQNSEGRGQAADLKSTQAAIDQINGKLNRLIGKTNEKFHQIEKEFSEVEGRIQDLEKYVEDTKIDLWSYNAELLVALENQHTIDLTDSEMNKLFEKTKKQLKENAEDMGNGCFKIYHKCDNACIGSIRNGTYDHDVYRDEALNNRFQIKGVELKSGYKDWILWISFAISCFLLCVALLGFIMWACQKGNIRCNICI

SEQ ID NO: 11093 - protein, 566 aa, synthetic construct
  REGION 1..566: note = hemagglutinin__InfluenzaA__AHJ57438
MKTIIALSYILCLVFAQKLPGNDNSTATLCLGHHAVPNGTIVKTITNDQIEVTNATELVQNSSTGEICDSPHQILDGENCTLIDALLGDPQCDGFQNKKWDLFVERSKAYSNCYPYDVPDYASLRSLVASSGTLEFNNESFNWTGVTQNGTSSACIRRSNSSFFSRLKWLTHLNFKYPALNVTMPNNEQFDKLYIWGVHHPGTDKDQIFLYAQASGRITVSTKRSQQAVIPNIGSRPRIRNIPSRISIYWTIVKPGDILLINSTGNLIAPRGYFKIRSGKSSIMRSDAPIGKCNSECITPNGSIPNDKPFQNVNRITYGDCPRYVKQSTLKLATGMRNVPEKQTRGIFGAIAGFIENGWEGMVDGWYGFRHQNSEGRGQAADLKSTQAAIDQINGKLNRLIGKTNEKFHQIEKEFSEVEGRIQDLEKYVEDTKIDLWSYNAELLVALENQHTIDLTDSEMNKLFEKTKKQLRENAEDMGNGCFKIYHKCDNACTGSIRNGTYDHDVYRDEALNNRFQIKGVEVKSGYKDWILWISFAISCFLLCVALLGFIMWACQKGNIRCNICI

SEQ ID NO: 11094 - protein, 566 aa, synthetic construct
  REGION 1..566: note = hemagglutinin__InfluenzaA__AHJ57651
MIAFIVIAILAATGKSDKICIGYHANNSTTKVDTILEKNVTVTHSVELLENQKEERFCKISNKAPLDLRDCTLEGWILGNPRCGILLADQSWSYIVERPNARNGICYPGTLNEVEELKALIGSGERVERFEMFPKSTWAGVDTDSGVSSACPLGNGPSFYRNLLWIIKLKSSEYPVIRGTFNNTGDKSILYFWGVHHPPVTTEQEALYGSGDRYVRMGTESMNFARSPEIAARPAVNGQRGRIDYFWSILKPGETLNVESNGNLIAPWYAYRFVNKDSKGAIFRSTLPIENCDATCQTTEGVIRTNKTFQNVSPLWIGECPKYVKSKSLRLATGLRNVPQIETRGLFGAIAGFIEGGWTGMIDGWYGYHHENSQGSGYAADRESTQKAIDGITNKVNSIIDKMNTQFEAVGHEFSNLERRIDNLNKRMEDGFLDVWTYNAELLVLLENERTLDMHDANVKILYEKVRSQLRDNAKDLGNGCFEFWHKCDNECIESVKNGTYNYPKYQSESRLNRQTIESVKLENLGVYQILAIYSTVSSSLVLVGLILAMGLWMCSNGSMQCRICI

SEQ ID NO: 11095 - protein, 566 aa, synthetic construct
  REGION 1..566: note = hemagglutinin__InfluenzaA__AHJ57663
MIAFIVIATLVATGKSDKICIGYHANNSTTKVDTILEKNVTVTHSVELLENQKEERFCKISNKAPLDLRDCTLEGWILGNPRCGILLADQSWSYIVERPNARNGICYPGTLNEAEELKALIGSGERVERFEMFPKSTWTGVDTESGVSSACPLGNGPSFYRNLLWIIKLKSSEYPVIRGTFNNTGDKSILYFWGVHHPPVTTEQNALYGSGDRYVRMGTESMNFARSPEIAARPAVNGQRGRIDYFWSILKPGETLNVESNGNLIAPWYAYRFVNKDSKGAIFRSNLPIENCDATCQTTEGVIRTNKTFQNVSPLWIGECPKYVKSKSLRLATGLRNVPQIETRGLFGAIAGFIEGGWTGMIDGWYGYHHENSQGSGYAADKESTQKAIDGITNKVNSIIDKMNTQFEAVGHEFSNLERRIDNLNKRMEDGFLDVWTYNAELLVLLENERTLDLHDANVKNLHERVKSQLRDNANDLGNGCFEFWHKCDNECMESVKNGTYNYPKYQAESRLNKQKIESVKLEEFGVYQILAIYSTVSSSLVLVGLIMAMGLWMCPNGSMQCRICI

SEQ ID NO: 11096 - protein, 566 aa, synthetic construct
  REGION 1..566: note = hemagglutinin__InfluenzaA__AHJ57674
MIAFIVIAILVTTGKSDKICIGYHANNSTTKVDTILEKNVTVTHSVELLENQKEERFCKISNKAPLDLRDCTLEGWILGNPRCGILLADQSWSYIVERPNARNGICYPGTLNEVEELKALIGSGERVERFEMFPKSTWAGVDTNSGVSSACPLGEGPSFYRNLLWIIKHTTSGYPVIKGTYRNTGDKSVLYFWGVHHPPDTTEQNVLYGSGNRYVRMGTESMNFARSPEIAARPAVNGQRGRIDYFWSILKPGETLNVESNGNLIAPWYAYRFVNKDSKGAIFRSNLPIENCDATCQTTEGVIRTNKTFQNVSPLWIGECPKYVKSKSLRLATGLRNVPQIETRGLFGAIAGFIEGGWTGMIDGWYGYHHENSQGSGYAADRESTQKAIDGITNKVNSIIDKMNTQFEAVGHEFSNLERRIDNLNKRMEDGFLDVWTYNAELLVLLENERTLDLHDANVKNLHERVRSQLRDNANDLGNGCFEFWHKCDNECMESVKNGTYNYPKYQAESRLNRQKIESVKLEEFGVYQILAIYSTVSSSLVLVGLIMAMGLWMCSNGSMQCRICI

SEQ ID NO: 11097 - protein, 566 aa, synthetic construct
  REGION 1..566: note = hemagglutinin__InfluenzaA__AHJ57686
MIAFIVIAILAATGKSDKICIGYHANNSTTKVDTILEKNVTVTHSVELLENQKEGRFCKISNKAPLDLRDCTLEGWILGNPRCGILLADQSWSYIVERPNARNGICYPGILNEAEELKALIGSGERVERFEMFPKSTWAGVDTNSGVSSACPLGNGPSFYRNLLWIIKLKSSAYPVIRGTFNNTGDKSILYFWGVHHPPVATEQEALYGSGNRYVRMGTESMNFARNPEIAARPAVNGQRGRIDYFWSILKPGETLNVESNGNLIAPWYAYRFVNKDSKGAIFRSNLPIENCEATCQTTEGVIRTNKTFQNVSPLWIGECPKYVKSKSLRLATGLRNVPQIETRGLFGAIAGFIEGGWTGMIDGWYGYHHENSQGSGYAADRESTQKAIDGITNKVNSIIDKMNTQFEAVGHEFSNLERRIDNLNKRMEDGFLDVWTYNAELLVLLENERTLDLHDANVKNLHEKVRSQLRDNANDLGNGCFEFWHKCDNECMESVKNGTYDYPKYQAESRLNRQKIESVKLENFDVYQILAIYSTVSSSLVLVGLIMAMGLWMCSNGSMQCRICI

SEQ ID NO: 11098 - protein, 566 aa, synthetic construct
  REGION 1..566: note = hemagglutinin__InfluenzaA__AHJ57697
MIAFIVIAILAATGKSDKICIGYHANNSTTKVDTILEKNVTVTHSVELLENQKEERFCKISNKAPLDLRDCTLEGWILGNPRCGILLADQSWSYIVERPNARNGICYPGTLNEVEELKALIGSGERVERFEMFPKSTWAGVDTNSGVSSACPLGNGPSFYRNLLWIIKLKSSEYPVIRGTFNNTGDKSILYFWGVHHPPVTTEQEALYGSGDRYVRMGTESMNFARSPEIAARPAVNGQRGRIDYFWSILKPGETLNVESNGNLIAPWYAYRFVNKDSKGAIFRSNLPIENCDATCQTTEGVIRTNKTFQNVSPLWIGECPKYVKSKSLRLATGLRNVPQIETRGLFGAIAGFIEGGWTGMIDGWYGYHHENSQGSGYAADRESTQKAIDGITNKVNSIIDKMNTQFEAVGHEFSNLERRIDNLNKRMEDGFLDVWTYNAELLVLLENERTLDLHDANVKNLHEKVKSQLRDNANDLGNGCFEFWHKCDNECMESVKNGTYDYPKYQAESRLNRQKIESVKLENFDVYQILAIYSTVSSSLVLVGLIMAMGLWMCSNGSMQCRICI

SEQ ID NO: 11099 - protein, 566 aa, synthetic construct
  REGION 1..566: note = hemagglutinin__InfluenzaA__AHJ57707
MIAFIVIAILVTTGKSDKICVGYHANNSTTKVDTILEKNVTVTHSVELLENQKEERFCKISNKAPLDLRDCTLEGWILGNPRCGILLADQSWSYIVERPNARNGICYPGTLNEVEELKALIGSGERVERFEMFPKSTWTGVDTNSGVSSACPLGEGPSFYRNLLWIIKHTTSGYPVIKGTYRNTGDKSVLYFWGVHHPPDTTEQNVLYGSGNRYVRMGTESMNFARSPEIAARPAVNGQRGRIDYFWSILKPGETLNVESNGNLIAPWYAYRFVNKDSKGAIFRSNLPIENCDATCQTTEGVIRTNKTFQNVSPLWIGECPKYVKSKSLRLATGLRNVPQIETRGLFGAIAGFIEGGWTGMIDGWYGYHHENSQGSGYAADRESTQKAIDGITNKVNSIIDKMNTQFEAVGHEFSNLERRIDNLNKRMEDGFLDVWTYNAELLVLLENERTLDLHDANVKNLHERVRSQLRDNANDLGNGCFEFWHKCDNECMESVKNGTYNYPKYQAESRLNKQKIESVKLEEFGVYQILAIYSTVSSSLVLVGLIMAMGLWMCSNGSMQCRICI

SEQ ID NO: 11100 - protein, 566 aa, synthetic construct
  REGION 1..566: note = hemagglutinin__InfluenzaA__AHJ57719
MIAFIVIAILAATGKSDKICIGYHANNSTTKVDTILEKNVTVTHSVELLENQKEERFCKISNKAPLDLRDCTLEGWILGNPRCGILLSDQSWSYIVERPNARNGICYPGILNEAEELKALIGSGERVERFEMFPKSTWAGVDTNSGVSSACPLGNGPSFFRNLLWIIKLKSSTYPVIRGTFNNTGDKSILYFWGVHHPSVTTEQEALYGSGNRYVRMGTESMNFARSPEIAARPAVNGQRGRIDYFWSILKPGETLNVESNGNLIAPWYAYRFVNKDSKGAIFRSNLPIENCDATCQTIEGVIRTNKTFQNVSPLWIGECPKYVKSKSLRLATGLRNVPQIETRGLFGAIAGFIEGGWTGMIDGWYGYHHENSQGSGYADDKESTQKAIDGITNKVNSIIDKMNTQFEAVGHEFSNLERRIDNLNKRMEDGFLDVWTYNAELLVLLENERTLDLHDANVKNLHEKVRSQLRDNANDLGNGCFEFWHKCDNECMESVKNGTYDYPKYQAESRLNRQKIESVKLENFDVYQILAIYSTVSSSLVLVGLIMAMGLWMCSNGSMQCRICI

SEQ ID NO: 11101 - protein, 566 aa, synthetic construct
  REGION 1..566: note = hemagglutinin__InfluenzaA__AHJ57731
MIAFIVIAILAATGKSDKICIGYHANNSTTKVDTILEKNVTVTHSVELLENQKEERFCKISNKAPLDLRDCTLEGWILGNPRCGILLADQSWSYIVERPNARNGICYPGILNEAEELKALIGSGERVERFEMFPKSTWAGVDTDSGVSSACPLGNGPSFYRNLLWIIKLKSSEYPVIRGTFNNTGDKSILYFWGVHHPPVTTEQEALYGSGNRYVRMGTESMNFARSPEIAARPAVNGQRGRIDYFWSILKPGETLNVESNGNLIAPWYAYRFVNKDSKGAIFRSNLPIENCDATCQTTEGVIRTNKTFQNVSPLWIGECPKYVKSKSLRLATGLRNVPQIETRGLFGAIAGFIEGGWTGMIDGWYGYHHENSQGSGYAADRESTQKAIDGITNKVNSIIDKMNTQFEAVGHEFSNLERRIDNLNKRMEDGFLDVWTYNAELLVLLENERTLDLHDANVKNLHEKVRSQLRDNANDLGNGCFEFWHKCDNECMESVKNGTYDYPKYQTESRLNRQKIESVKLENFDVYQILAIYSTVSSSLVLVGLIMAMGLWMCSNGSMQCRICI

SEQ ID NO: 11102 - protein, 566 aa, synthetic construct
  REGION 1..566: note = hemagglutinin__InfluenzaA__AHJ57743
MIAFIVIAILVATGKSDKICIGYHANNSTTKVDTILEKNVTVTHSVELLENQKEERFCKISNKAPLDLRDCTIEGWILGNPRCGILLADQSWSYIVERPDARNGICYPGTLNEAEELKALIGSGEKVERFEMFPKSTWAGVDTSSGVSSACPLGNGPSFYRNLLWIIKLKSSEYPVIRGTFNNTGDKSVLYFWGVHHPPVTTEQNALYGSGNRYVRMGTESMNFARSPEIAARPAVNGQRGRIDYFWSILKPGETLNVESNGNLIAPWYAYRFVNKDSKGAIFRSNLPIENCDATCQTIEGVIRTNKTFQNVSPLWIGECPKYVKSKSLRLATGLRNVPQIETRGLFGAIAGFIEGGWTGMIDGWYGYHHENSQGSGYAADRESTQKAIDGITNKVNSIIDKMNTQFEAAGHEFSNLERRIDNLNKRMEDGFLDVWTYNAELLVLLENERTLDLHDANVKNLHEKVKSQLRDNANDLGNGCFEFWHKCDNECMESVKNGTYDYPKYQKESRLNRQKIESVKLENFDVYQILAIYSTVSSSLVLVGLIMAMGLWMCSNGSMQCRICI

SEQ ID NO: 11103 - protein, 566 aa, synthetic construct
  REGION 1..566: note = hemagglutinin__InfluenzaA__AHJ57755
MIAFIVIAILVATGKSDKICIGYHANNSTTKVDTILEKNVTVTHSVELLENQKEERFCKISNKAPLDLRDCTIEGWILGNPRCDILLADQSWSYIVERPNARNGICYPGTLNEAEELKALIGSGEGVERFEMFPKSTWVGVDTSSGVSSACPLGNGPSFYRNLLWIIKLKSSEYPVIRGTFNNTGDKSVLYFWGVHHPPVTTEQNALYGSGNRYVRMGTESMNFARSPEIAARPAVNGQRGRIDYFWSILKPGETLNVESNGNLIAPWYAYRFVNKDNKGAIFRSNLPIENCDATCQTTEGVIRTNKTFQNVSPLWIGECPKYVKSKSLRLATGLRNVPQIETRGLFGAIAGFIEGGWTGMIDGWYGYHHENSQGSGYAADRESTQKAIDGITNKVNSIIDKMNTQFEAAGHEFSNLERRIDNLNKRMEDGFLDVWTYNAELLVLLENERTLDLHDANVKNLHEKVKSQLRDNANDLGNGCFEFWHKCDNECMESVKNGTYDYPKYQKESRLNRQKIESVKLENFDVYQILAIYSTVSSSLVVVGLIMAMGLWMCSNGSMQCRICI

SEQ ID NO: 11104 - protein, 566 aa, synthetic construct
  REGION 1..566: note = hemagglutinin__InfluenzaA__AHJ57767
MIAFIVIAILAATGKSDKICIGYHANNSTTKVDTILEKNVTVTHSVELLENQKEERFCKISNKAPLDLRDCTLEGWILGNPRCGILLADQSWSYIVERPNARNGICYPGTLNEVEELKALIGSGERVERFEMFPKSTWAGVDTNSGVSSACPLGNGPSFYRNLLWIIKLKSSEYPVIRGTFNNTGDKSILYFWGVHHPPVTTEQEALYGSGDRYVRMGTESMNFARSPEIAARPAVNGQRGRIDYFWSILKPGETLNVESNGNLIAPWYAYRFVNKDSKGAIFRSNLPIENCDATCQTTEGVIRTNKTFQNVSPLWIGECPKYVKSKSLRLATGLRNVPQIETRGLFGAIAGFIEGGWTGMIDGWYGYHHESSQGSGYAADKESTQKAIDGITNKVNSIIDKMNTQFEAVGHEFSNLERRIDNLNKRMEDGFLDVWTYNAELLVLLENERTLDLHDANVKNLHEKVRSQLRDNANDLGNGCFEFWHKCNNECMESVKNGTYDYPKYQKESRLNRQKIESVKLENFDVYQILAIYSTVSSSLVLVGLILAMGLWMCSNGSMQCRICI

SEQ ID NO: 11105 - protein, 566 aa, synthetic construct
  REGION 1..566: note = hemagglutinin__InfluenzaA__AHJ57779
MIAIIIIAILVATGKSDKICIGYHANNSTTKVDTILEKNVTVTHSVELLEDQKEERFCKISNKAPLDLRDCTIEGWILGNPRCGILLADQSWSYIVERPNARNGICYPGTLNEAEELKALIGSGEGVERFEMFPKSTWAGVDTNSGVSSACPLGNGPSFYRNLLWIIKLKSSEYPVIRGTFNNTGDKSVLYFWGVHHPPVTTEQNALYGSGNRYVRMGTESMNFARSPEIAARPAVNGQRGRIDYFWSILKPGETLNVESNGNLIAPWYAYRFVNKDSKGAIFRSNLPIENCDATCQTTEGVIRTNKTFQNVSPLWIGECPKYVKSKSLRLATGLRNVPQIETRGLFGAIAGFIEGGWTGMIDGWYGYHHENSQGSGYAADRESTQKAIDGITNKVNSIIDKMNTQFEAAGHEFSNLERRIDNLNKRMEDGFLDVWTYNAELLVLLENERTLDLHDANVKNLHEKVKSQLRDNANDLGNGCFEFWHKCDNECMESVKNGTYDYPKYQKESRLNRQKIESVKLENFDVYQILAIYSTVSSSLVLVGLIMAMGLWMCSNGSMQCMICI

SEQ ID NO: 11106 - protein, 566 aa, synthetic construct
  REGION 1..566: note = hemagglutinin__InfluenzaA__AHJ57791
MIAIIIIAILVTTGKSDKICIGYHANNSTTKVDTILEKNVTVTHSVELLENKKEERFCKISNKAPLDLRDCTLEGWILGNPRCGILLADQSWSYIVERPNARNGICYPGTLNEVKELKALIGSGERVKRFEMFPKSTWAGVDTNSGVSSSCPLGNGPSFYRNLLWIIKHTTSGYPVIKGTYTNTGDKSVLYFWGIHHPPDTTEQNVLYGSGNRYVRMGTESMNFARSPEIAARPAVNGQRGRIDYFWSILKPGETLNVESNGNLIAPWYAYRFVNKDSKGAIFRSNLPIEDCDATCQTTEGVIRTNKTFQNVSPLWIGECPKYVKSKSLRLATGLRNVPQIETRGLFGAIAGFIEGGWTGMIDGWYGYHHENSQGSGYAADRESTQKAIDGITNKVNSIIDKMNTQFEAVGHEFSNLERRIDTLNKRMEDGFLDVWTYNAELLVLLENERTLDLHDANVKNLHERVKSQLRDNANDLGNGCFEFWHKCDNECMESVKNGTYNYPKYQAESRLNKQKIESVKLEEFGVYQILAIYSTVSSSLVLVGLIMAMVLWMCSNGSMQCRVCI

SEQ ID NO: 11107 - protein, 566 aa, synthetic construct
  REGION 1..566: note = hemagglutinin__InfluenzaA__AHJ57815
MIAFIIITILVTTGKSDKICIGYHANNSTTKVDTILEKNVTVTHSVELLENQKEERFCRISNKAPLDLKECTLEGWILGNPQCDLLLGDQSWSYIVERPNARNGICYPGTLNEVEELRALIGSGEGVERFEMFPKSTWAGVDTNRGVTSSCPFGSGSSFYRNLLWIVKHTTSSYPVIKGTFRNTGDKSVLYFWGVHHPFDTNEQNVLYGSGNRYVRMGTESMNFARGPEVAARPVVNGQRGRIDYFWSILKPGETLNIESNGNLIAPWYAYRFVNKDSKGAIFRSNLPIEDCDATCQTIEGVIRTNKTFQNVSPLWIGECPKYVKSESLRLATGLRNVPQIETRGLFGAIAGFIEGGWTGMIDGWYGYHHENSQGSGYAADRESTQKAIDGITTKVNSIIDKMNTQFEAVGHEFSNLERRIDNLNKRLEDGFLDVWTYNAELLVLLENERTLDLHDANVKNLHERVRSQLRDNANDLGNGCFEFWHKCDNECMESVKNGTYNYPKYQAESRLNKQRIESVKLENFDVYQILAIYSTVSSSLVLVGLILAMGLWMCSNGSMQCRICI

SEQ ID NO: 11108 - protein, 566 aa, synthetic construct
  REGION 1..566: note = hemagglutinin__InfluenzaA__AHJ57827
MIAFIVIAILVATGKSDKICIGYHANNSTTKVDTILEKNVTVTHSVELLENQKEERFCKISNKAPLDLRDCTIEGWILGNPRCGILLADQSWSYIVERPNARNGICYPGTLNEVEELKALIGSGERVERFEMFPKSTWAGVDTNSGVSSACPLGNGPSFYRNLLWIIKTKSSEYPVIKGTFNNTGDKSVLYFWGVHHPPSRNEQNVLYGSGDRYVRMGTESMNFARSPEIAARPAVNGQRGRIDYFWSILKPGETLNVESNGNLIAPWYAYRFVNKDSRGAIFRSNLPIENCDATCQTAEGVIRTNKTFQNVSPLWIGECPKYVKSKSLRLATGLRNVPQIETRGLFGAIAGFIEGGWTGMIDGWYGYHHENSQGSGYAADRESTQKAIDGITNKVNSIIDKMNTQFEAVGHEFSNLERRIDNLNKRMEDGFLDVWTYNAELLVLLENERTLDLHDANVKNLHERVKSQLRDNANDLGNGCFEFWHKCDNECMESVKNGTYDYPKYQKESRLNRQKIESVKLENFDVYQILAIYSTVSSSLVLVGLIMAMGLWMCSNGSMQCRICI

SEQ ID NO: 11109 - protein, 566 aa, synthetic construct
  REGION 1..566: note = hemagglutinin__InfluenzaA__AHJ57850
MIAFIVIAILATTGKSDKICIGYHANNSTTKVDTILEKNVTVTHSVELLENQKEERFCKISNKAPLDLRDCTLEGWILGNPRCGILLADQSWSYIVERPNARNGICYPGILNEAEELKALIGSGERVERFEMFPKSTWAGVDTDSGVSSACPLGNGPSFYRNLLWIIKLKSSEYPVIRGTFNNTGDKSILYFWGVHHPPVTTEQEALYGSGNRYVRMGTESMNFARTPEIAARPAVNGQRGRIDYFWSILKPGETLNVESNGNLIAPWYAYRFVNKDSKGAIFRSNLPIENCDATCQTTEGVIRTNKTFQNVSPLWIGECPKYVKSKSLRLATGLRNVPQIETRGLFGAIAGFIEGGWTGMIDGWYGYHHENSQGSGYAADRESTQKAIDGITNKVNSIIDKMNTQFEAVGHEFSNLERRIDNLNKRMEDGFLDVWTYNAELLVLLENERTLDLHDANVKNLHEKVRSQLRDNANDLGNGCFEFWHKCDNECMESVKNGTYDYPKYQAESRLNRQKIESVKLENFDVYQILAIYSTVSSSLVLVGLIMAMGLWMCSNGSMQCRICI

SEQ ID NO: 11110 - protein, 566 aa, synthetic construct
  REGION 1..566: note = hemagglutinin__InfluenzaA__AHJ57862
MIAFIVIAILAATGKSDKICIGYHANNSTTKVDTILEKNVTVTHSVELLENQKEERFCKISNKAPLDLRDCTLEGWILGNPRCGILLADQSWSYIVERPNARNGICYPGILNEAEELKALIGSGERVERFEMFPKSTWAGVDTNSGVSSACPLGNGPSFYRNLLWIIKLKSSEYPVIRGTFNNTGDKSILYFWGVHHPPVTTEQEALYGSGNRYVRMGTESMNFARSPEIAARPAVNGQRGRIDYFWSILKPGETLNVESNGNLIAPWYAYRFVNKDSKGAIFRSNLPIENCDATCQTTEGVIRTNKTFQNVSPLWIGECPKYVKSKSLRLATGLRNVPQIETRGLFGAIAGFIEGGWTGMIDGWYGYHHENSQGSGYAADRESTQKAIDGITNKVNSIIDKMNTQFEAVGHEFSNLERRIDNLNKRMEDGFLDVWTYNAELLVLLENERTLDLHDANVKNLHEKVRSQLRDNANDLGNGCFEFWHKCDNECMESVKNGTYDYPKYQAESRLNRQKIESVKLENFDVYQILAIYSTVSSSLVLVGLIMAMGLWMCSNGSMQCRICI

SEQ ID NO: 11111 - protein, 566 aa, synthetic construct
  REGION 1..566: note = hemagglutinin__InfluenzaA__AHJ57873
MIAFIVIATLVATGKSDKICMGYHANNSTTKVDTILEKNVTVTHSVELLENQKEERFCKISNKAPLDLRDCTLEGWILGNPRCGILLADQSWSYIVERPNARNGICYPGTLNEAEELKALIGSGERVERFEMFPKSTWTGVDTESGVSSACPLGNGPSFYRNLLWIIKLKSSEYPVIRGTFNNTGDKSILYFWGVHHPPVTTEQNALYGSGDRYVRMGTESMNFARSPEIAARPAVNGQRGRIDYFWSILTPGETLNVESNGNLIAPWYAYRFVNKDSKGAIFRSNLPIENCDATCQTTEGVIRTNKTFQNVSPLWIGECPKYVKSKSLRLATGLRNVPQIETRGLFGAIAGFIEGGWTGMIDGWYGYHHENSQGSGYAADKESTQKAIDGITNKVNSIIDKMNTQFEAVGHEFSNLERRIDNLNKRMEDGFLDVWTYNAELLVLLENERTLDLHDANVKNLHEKVRSQLRDNANDLGNGCFEFWHKCDNECMESVKNGTYDYPKYQKESRLNRQKIESVKLENFDVYQILAIYSTVSSSLVLVGLILAMGLWMCSNGSMHCRICI

SEQ ID NO: 11112 - protein, 566 aa, synthetic construct
  REGION 1..566: note = hemagglutinin__InfluenzaA__AHJ57885
MIAFIVMAILAATGKSDKICIGYHANNSTTKVDTILEKNVTVTHSVELLENQKEERFCKISNKAPLDLRDCTLEGWILGNPRCGILLADQSWSYIVERPNARNGICYPGILNEAEELKALIGSGERVERFEMFPKSTWAGVDTDSGVSSACPLGNGPSFYRNLLWIIKRKSSAYPVIRGTFNNTGDKSILYFWGVHHPPVTTEQEALYGSGNRYVRMGTESMNFARNPEIAARPAVNGQRGRIDYFWSILKPGETLNIESNGNLIAPWYAYRFVNKDSKGAIFRSNLPIEDCDASCQTTEGVIRTNKTFQNVSPLWIGECPKYVKSKSLRLATGLRNVPQIETRGLFGAIAGFIEGGWTGMIDGWYGYHHENSQGSGYAADRESTQKAIDGITNKVNSIIDKMNTQFEAVGHEFSNLERRIDNLDKRMEDGFLDVWTYNAELLVLLENERTLDLHDANVKNLHEKVRSQLRDNANDLGNGCFEFWHKCDNECMESVKNGTYDYPKYQAESRLNRQKIESVKLENFDVYQILAIYSTVSSSLVLVGLIMAMGLWMCSNGSMQCRICI

SEQ ID NO: 11113 - protein, 566 aa, synthetic construct
  REGION 1..566: note = hemagglutinin__InfluenzaA__AHJ57897
MIAFIVIAILAATGKSDKICIGYHANNSTTKVDTILEKNVTVTHSVELLENQKEERFCKISNKAPLDLRDCTLEGWILGNPRCGILLADQSWSYIVERPNARNGICYPGILNEAEELKALIGSGERVERFEMFPKSTWAGVDTDSGVSSACPLGNGPSFYRNLLWIIKRKSSAYPVIRGTFNNTGDKSILYFWGVHHPPVTTEQEALYGSGNRYVRMGTESMNFARNPEIAARPAVNGQRGRIDYFWSILKPGETLNIESNGNLIAPWYAYRFVNKDSKGAIFRSNLPIEDCDASCQTTEGVIRTNKTFQNVSPLWIGECPKYVKSKSLRLATGLRNVPQIETRGLFGAIAGFIEGGWTGMIDGWYGYHHENSQGSGYAADRESTQKAIDGITNKVNSIIDKMNTQFEAVGHEFSNLERRIDNLNKRMEDGFLDVWTYNAELLVLLENERTLDLHDANVKNLHEKVRSQLRDNANDLGNGCFEFWHKCDNECMESVKNGTYDYPKYQAESRLNRQKIESVKLENFDVYQILAIYSTVSSSLVLVGLIMAMGLWMCSNGSMQCRICI

SEQ ID NO: 11114 - protein, 566 aa, synthetic construct
  REGION 1..566: note = hemagglutinin__InfluenzaA__AHJ57908
MIAFIVIAILVATGKSDKICIGYHANNSTTKVDTILEKNVTVTHSVELLENQKEERFCKISNKAPLDLRDCTVEGWILGNPRCGILIADQSWSYIVERPNARNGICYPGTLNEAEELKALIGSGEGVERFEMFPKSTWAGVDTSSGVSSACPLGNGPSFYRNLLWIIKLKSSEYPVIRGTFNNTGDKSVLYFWGVHHPPVTTEQDALYGSGNRYVRMGTESMNFARSPEIAARPAVNGQRGRIDYFWSVLKPGETLNVESNGNLIAPWYAYRFVNKDNKGAIFRSNLPIENCDATCQTTEGVIRTNKTFQNVSPLWIGECPKYVKSKSLRLATGLRNVPQIETRGLFGAIAGFIEGGWTGMIDGWYGYHHENSQGSGYAADRESTQKAIDGITNKVNSIIDKMNTQFEAAGHEFSNLERRIDNLNKRMEDGFLDVWTYNAELLVLLENERTLDLHDANVKNLHEKVKSQLRDNANDLGNGCFEFWHKCDNECMESVKNGTYDYPKYQKESRLNRQRIESVKLENFDVYQILAIYSTVSSSLVVVGLIMAMGLWMCSNGSMQCMICI

SEQ ID NO: 11115 - protein, 566 aa, synthetic construct
  REGION 1..566: note = hemagglutinin__InfluenzaA__AHJ57920
MIAIIIIAILVATGKSDKICIGYHANNSTTKVDTILEKNVTVTHSVELLENQKEERFCKISNKAPLDLRDCTIEGWILGNPWCGILLADQSWSYIVERPNARNGICYPGTLNEVEELKALIGSGERVERFEMFPKSTWAGVDTNSGVSSACPLGNGPSFYRNLLWIIKTKSSEYPVIKGTFNNTGDKSVLYFWGVHHPPSRNEQNVLYGSGDRYVRMGTESMNFARSPEIAARPAVNGQRGRIDYFWSILKPGETLNVESNGNLIAPWYAYRFVNKDSRGAIFRSNLPIENCDATCQTAEGVIRTNKTFQNVSPLWIGECPKYVKSKSLRLATGLRNVPQIETRGLFGAIAGFIEGGWTGMIDGWYGYHHENSQGSGYAADRESTQKATDGITNKVNSIIDKMNTQFEAVGHEFSNLERRIDNLNKRMEDGFLDVWTYNAELLVLLENERTLDLHDANVKNLHERVKSQLRDNANDLGNGCFEFWHKCDNECMESVKNDTYDYPKYQKESRLNRQKIESVRLENFDVYQILAIYSTVSSSLVLVGLIMAMGLWMCSNGSMQCRICI

SEQ ID NO: 11116 - protein, 566 aa, synthetic construct
  REGION 1..566: note = hemagglutinin__InfluenzaA__AHJ57932
MIALIIITILVTTGKSDKICIGYHANNSTTKVDTILEKNVTVTHSVELLENQKEERFCRISNKAPLDLKECTLEGWILGNPQCDLLLGDQSWSYIVERPNARNGICYPGTLNEVEELRALIGSGEGVERFEMFPKSTWAGVDTNRGVTSSCPFGSGSSFYRNLLWIVKHTTSSYPVIKGTFRNTGDKSVLYFWGVHHPFDTNEQNVLYGSGNRYVRMGTESMNFARGPEVAARPVVNGQRGRIDYFWSILKPGETLNIESNGNLIAPWYAYRFVNKDSKGAIFRSNLPIEDCDATCQTIEGVIRTNKTFQNVSPLWIGECPKYVKSESLRLATGLRNVPQIETRGLFGAIAGFIEGGWTGMIDGWYGYHHENSQGSGYAADRESTQKAIDGITTKVNSIIDKMNTQFEAVGHEFSNLERRIDNLNKRLEDGFLDVWTYNAELLVLLENERTLDLHDANVKNLHERVRSQLRDNANDLGNGCFEFWHKCDNECMESVRNGTYNYPKYQAESRLNKQRIESVKLENFDVYQILAIYSTVSSSLVLVGLILAMGLWMCSNGSMQCRICI

SEQ ID NO: 11117 - protein, 566 aa, synthetic construct
  REGION 1..566: note = hemagglutinin__InfluenzaA__AHJ57943
MIAFIVIATLVATGKSDKICIGYHANNSTTKVDTILEKNVTVTHSVELLENQKEERFCKISNKAPLDLRDCTLEGWILGNPRCGILLADQSWSYIVERPNARNGICYPGTLNEAEELKALIGSGERVERFEMFPKSTWTGVDTESGVSSACPLGNGPSFYRNLLWIIKLKSSEYPVIRGTFNNTGDKSILYFWGVHHPPVTTEQNALYGSGDRYVRMGTESMNFARSPEIAARPAVNGQRGRIDYFWSILKPGETLNVESNGNLIAPWYAYRFVNKDSKGAIFRSNLPIENCDATCQTTEGVIRTNKTFQNVSPLWIGECPKYVKSKSLRLATGLRNVPQIETRGLFGAIAGFIEGGWTGMIDGWYGYHHENSQGSGYAADKESTQKAIDGITNKVNSIIDKMNTQFETVGHEFSNLERRIDNLNKRMEDGFLDVWTYNAELLVLLENERTLDLHDANVKNLHEKVRSQLRDNANDLGNGCFEFWHKCNNECMESVKNGTYDYPKYQKESRLNRQKIESVKLENFDVYQILAIYSTVSSSLVLVGLILAMGLWMCSNGSMQCRICI

SEQ ID NO: 11118 - protein, 566 aa, synthetic construct
  REGION 1..566: note = hemagglutinin__InfluenzaA__AHJ57954
MIAFIVIAILAATGKSDKICIGYHANNSTTKVDTILEKNVTVTHSVELLENQKEERFCKISNKAPLDLRDCTLEGWILGNPRCGILLADQSWSYIVERPNARNGICYPGILNEAEELKALIGSGERVERFEMFPKSTWAGVDTNSGVSSACPLGNGPSFYRNLLWIIKQKSSAYPVIRGTFNNTGDKSILYFWGVHHPPVTTEQEALYGSGNRYVRMGTESMNFARNPEIAARPAVNGQRGRIDYFWSILKPGETLNVESNGNLIAPWYAYRFVNKDSKGAIFRSNLPIENCDATCQTTEGVIRTNKTFQNVSPLWIGECPKYVKSKSLRLATGLRNVPQIETRGLFGAIAGFIEGGWTGMIDGWYGYHHENSQGSGYAADRESTQKAIDGITNKVNSIIDKMNTQFEAVGHEFSNLERRIDNLNKRMEDGFLDVWTYNAELLVLLENERTLDLHDANVKNLHEKVRSQLRDNANDLGNGCFEFWHKCDNECMESVKNGTYDYPKYQAESRLNRQKIESVKLENFDVYQILAIYSTVSSSLVLVGLIMAMGLWMCSNGSMQCRICI

SEQ ID NO: 11119 - protein, 566 aa, synthetic construct
  REGION 1..566: note = hemagglutinin__InfluenzaA__AHJ57965
MIAFIIITILVTTGKSDKICIGYHANNSTTKVDTILEKNVTVTHSVELLENQKEERFCKISNKAPLDLKECTLEGWILGNPQCDLLLGDQSWSYIVERPNARNGICYPGTLNEVEELKALIGSGERVERFEMFPKSTWAGVDTNSGVTSSCSFGSGSSFYRNLLWIIKHTTSSYPVIKGTFRNTGDKSVLYFWGVHHPIDTTEQNVLYGSGNRYVRMGTESMNFARSPEIAARPVVNGQRGRIDYFWSILKPGETLNIESNGNLIAPWYAYRFVNKDSKGAIFRSNLPIENCDATCQTIEGVIRTNKTFQNVSPLWIGECPKYVKSESLRLATGLRNVPQIETRGLFGAIAGFIEGGWTGMIDGWYGYHHENSQGSGYAADRESTQRAIDGITTKVNSIIDKMNTQFEAVGHEFSNLERRIDNLNKRMEDGFLDVWTYNAELLVLLENERTLDLHDANVKNLHERVRSQLRDNANDGGNGCFEFWHKCDNECMESVKNGTYDYPKYQAESRSNRQRIESVKLENFDVYQILAIYSTVSSSLVVVWLILAMGLWMCANGSMQCRICI

SEQ ID NO: 11120 - protein, 566 aa, synthetic construct
  REGION 1..566: note = hemagglutinin__InfluenzaA__AHJ57977
MIAFIVIAILAATGKSDKICIGYHANNSTTKVDTILEKNVTVTHSVELLENQKEERFCKISNKAPLDLRDCTIEGWILGNPRCGILLADQSWSYIVERPNARNGICYPGTLNEVEELKALIGSGERVERFEMFPKSTWAGVDTNSGVSSACPLGNGPSFYRNLLWIIKLKSSEYPVIRGTFNNTGDKSILYFWGVHHPPVTTEQEALYGSGDRYVRMGTESMNFARSPEIAARPAVNGQRGRIDYFWSILKPGETLNVESNGNLIAPWYAYRFVNKDSKGAIFRSNLPIENCDATCQTTEGVIRTNKTFQNVSPLWIGECPKYVKSKSLRLATGLRNVPQIETRGLFGAIAGFIEGGWTGMIDGWYGYHHENSQGSGYAADKESTQKAIDGITNKVNSIIDKMNTQFEAVGHEFSNLERRIDNLNKRMEDGFLDVWTYNAELLVLLENERTLDLHDANVKNLHEKVRSQLRDNANDLGNGCFEFWHKCNNECMESVKNGTYDYPKYQKESRLNRQKIESVKLENFDVYQILAIYSTVSSSLVLVGLILAMGLWMCSNGSMQCRICI

SEQ ID NO: 11121 - protein, 566 aa, synthetic construct
  REGION 1..566: note = hemagglutinin__InfluenzaA__AHJ57989
MIAFIVIAILVTTGKSDKICIGYHANNSTTKVDTILEKNVTVTHSVELLENQKEERFCKISNKAPLDLRDCTLEGWILGNPRCGILLADQSWSYIVERPNARNGICYPGTLNEVEELKALIGSGERVERFEMFPKSTWARVDTDRGVSSACPLGNGPSFYRNLLWIVKHTTSEYPVIKGTYTNTGDKSVLYFWGVHHPPDTTEQNVLYGSGNRYVRMGTESMNFARSPEIAARPAVNGQRGRIDYFWSILKPGETLNVESNGNLIAPWYAYRFVNKDSKGAIFRSNLPIENCDATCQTTEGVIRTNKTFQNVSPMWIGECPKYVKSKSLRLATGLRNVPQIETRGLFGAIAGFIEGGWTGMIDGWYGYHHENSQGSGYAADRESTQKAIDGITNKVNSIIDKMNTQFEAVGHEFSNLERRIDNLNKRMEDGFLDVWTYNAELLVLLENERTLDLHDSNVKNLHERVKSQLRDNANDLGNGCFEFWHKCDNECMESVKNGTYNYPKYQAESRLNRQKIESVKLEEFGVYQILAIYSTVSSSLVLVGLIMAMGLWMCSNGSMQCRICI

SEQ ID NO: 11122 - protein, 566 aa, synthetic construct
  REGION 1..566: note = hemagglutinin__InfluenzaA__AHJ58001
MIAFIVIAILAATGKSDKICIGYHANNSTTKVDTILEKNVTVTHSVELLENQKEERFCKISNKAPLDLRDCTLEGWILGNPRCGILLADQSWSYIVERPNARNGICYPGILNEAEELKALIGSGERVERFEMFPKSTWAGVDTDSGVSSACPLGNGPSFYRNLLWIIKLKSSEYPVIRGTFNNTGDKSILYFWGVHHPPVTTEQEALYGSGNRYVRMGTESMNFARSPEIAARPAVNGQRGRIDYFWSILKPGETLNVESNGNLIAPWYAYRFVNKDSKGAIFRSNLPIENCDATCQTTEGVIRTNKTFQNVSPMWIGECPKYVKSKSLRLATGLRNVPQIETRGLFGAIAGFIEGGWTGMIDGWYGYHHENSQGSGYAADRESTQKAIDGITNKVNSIIDKMNTQFEAVGHEFSNLERRIDNLNKRMEDGFLDVWTYNAELLVLLENERTLDLHDANVKNLHEKVRSQLRDNANDLGNGCFEFWHKCDNECMESVKNGTYDYPKYQTESRLNRQKIESVKLENFDVYQILAIYSTVSSSLVLVGLIMAMGLWMCSNGSMQCRICI

SEQ ID NO: 11123 - protein, 566 aa, synthetic construct
  REGION 1..566: note = hemagglutinin__InfluenzaA__AHJ58013
MIAFIVIAILVTTGKSDKICIGYHANNSTTKVDTILEKNVTVTHSVELLENQKEERFCKISSKAPLDLRDCSLEGWILGNPRCGILLADQSWSYIVERPNARNGICYPGTLNEVEELKALIGSGERVERFEMFPKSTWAGVDTNSGVSSACPLGEGPSFYRNLLWIIKRTTSEYPVIKGTYRNTGDKSVLYFWGVHHPPDTTEQNVLYGSGNRYVRMGTESMNFARSPEIAARPAVNGQRGRIDYFWSILKPGETLDVESNGNLIAPWYAYRFVNKESKGAIFRSNLPIENCDATCQTTEGVIRTNKTFQNVSPLWIGECPKYVKSKSLRLATGLRNVPQIETRGLFGAIAGFIEGGWTGMIDGWYGYHHENSQGSGYAADKESTQKAIDGITNKVNSIIDKMNTQFEAVGHEFSTLERRIDNLNKRMEDGFLDVWTYNAELLVLLENERTLDLHDANVKNLHERVRSQLRDNANDLGNGCFEFWHKCDNECMESVKNGTYNYPKYQAESRLNKQKIESVKLEEFGVYQILAIYSTVSSSLVLVGLIMAMGLWMCSNGSMQCRICI

SEQ ID NO: 11124 - protein, 566 aa, synthetic construct
  REGION 1..566: note = hemagglutinin__InfluenzaA__AHJ58025
MIAFIVIAILVTTGESDKICIGYHANNSTTKVDTILEKNVTVTHSVELLENQKEERFCKISNKAPLDLRDCTIEGWILGNPRCGILLADQSWSYIVERPNARNGICYPGTLNEAEELKALIGSGEGVERFEMFPKSTWAGVDTNSGVSSACPLGNGPSFYRNLLWIIKLKSSEYPVIRGTFNNTGDKSVLYFWGVHHPPVTTEQNDLYGSGNRYVRMGTESMNFARNPEIALRPAVNGQRGRIDYFWSILKPGETLNVESNGNLIAPWYAYRFVNKDSKGAIFRSSLPIENCDATCQTAEGVIRTNKTFQNVSPLWIGECPKYVKSKSLRLATGLRNVPQIETRGLFGAIAGFIEGGWTGMVDGWYGYHHENSQGSGYAADRESTQKAIDGITNKVNSIIDKMNTQFEAVDHEFSNLERRIDNLNKRMEDGFLDVWTYNAELLVLLENERTLDLHDANVKNLHEKVKSQLRDNANDLGNGCFEFWHKCDNECMESVKNGTYNYPKYQKESRLNRQKIESVKLENFDVYQILAIYSTVSSSLVLVGLIMAMGLWMCSNGSMQCRICI

SEQ ID NO: 11125 - protein, 566 aa, synthetic construct
  REGION 1..566: note = hemagglutinin__InfluenzaA__AHJ58037
MIAFIIITILVTTGESDKICIGYHANNSTTKVDTILEKNVTVTHSVELLENQKEERFCKISNKAPLDLKECTLEGWILGNPQCDLLLGDQSWSYIVERPNARNGICYPGTLNEVEELKALIGSGERVERFEMFPKSTWAGVDTNSGVTRSCPFGSGSSFYRNLLWIIKHTTSSYPVIKGTFRNTGDKSVLYFWGVHHPIDTTEQNVLYGSGNRYVRMGTESMNFARSPEIAARPVVNGQRGRIDYFWSILKPGETLNIESNGNLIAPWYAYRFVNKDSKGAIFRSNLPIENCDATCQTIEGVIRTNKTFQNVSPLWIGECPKYVKSESLRLATGLRNVPQIETRGLFGAIAGFIEGGWTGMIDGWYGYHHENSQGSGYAADRESTQRAIDGITTKVNSIIDKMNTQFEAVGHEFSNLERRIDNLNKRMEDGFLDVWTYNAELLVLLENERTLDLHDANVKNLHERVKSQLRDNANDLGNGCFEFWHKCDNECMESVKNGTYDYPKYQAESRLNKQRIESVKLENFDVYQILAIYSTVSSSLVLVGLIMAIGLWMCSNGSMQCRICI

SEQ ID NO: 11126 - protein, 566 aa, synthetic construct
  REGION 1..566: note = hemagglutinin__InfluenzaA__AHJ58049
MIAFIVIAILAATGKSDKICIGYHANNSTTKVDTILEKNVTVTHSVELLENQKEERFCKISNKAPLDLRDCTLEGWILGNPRCGILLADQSWSYIVERPNARNGICYPGILNEAEELKALIGSGERVERFEMFPKSTWAGVDTDSGVSSACPLGNGPSFYRNLLWIIKLKSSEYPVIRGTFNNTGDKSILYFWGVHHPPVTTEQEALYGSGNRYVRMGTESMNFARTPEIAARPAVNGQRGRIDYFWSILKPGETLNVESNGNLIAPWYAYRFVNKDSKGAIFRSNLPIENCDATCQTTEGVIRTNKTFQNVSPLWIGECPKYVKSKSLRLATGLRNVPQIETRGLFGAIAGFIEGGWTGMIDGWYGYHHENSQGSGYAADRESTQKAIDGITNKVNSIIDKMNTQFEAVGHEFSNLERRIDNLNKRMEDGFLDVWTYNAELLVLLENERTLDLHDANVKNLHEKVRSQLRDNANDLGNGCFEFWHKCDNECMESVKNGTYDYPKYQAESRLNRQKIESVKLENFDVYQILAIYSTVSSSLVLVGLIMAMGLWMCSNGSMQCRICI

SEQ ID NO: 11127 - protein, 566 aa, synthetic construct
  REGION 1..566: note = hemagglutinin__InfluenzaA__AHJ58061
MIAFIVIATLVATGKSDKICIGYHANNSTTKVDTILEKNVTVTHSVELLENQKEERFCKISNKAPLDLRDCTLEGWILGNPRCGILLADQSWSYIVERPNARNGICYPGTLNEAEELKALIGSGERVERFEMFPKSTWTGVDTESGVSSACPLGNGPSFYRNLLWIIKLKSSEYPVIRGTFNNTGDKSILYFWGVHHPPVTTEQNALYGSGDRYVRMGTESMNFARSPEIAARPAVNGQRGRIDYFWSILKPGETLNVESNGNLIAPWYAYRFVNKDSKGAIFRSNLPIENCDATCQTTEGVIRTNKTFQNVSPLWIGECPKYVKSKSLRLATGLRNVPQIETRGLFGAIAGFIEGGWTGMIDGWYGYHHENSQGSGYAADKESTQKAIDGITNKVNSIIDKMNTQFEAVGHEFSNLERRIDNLNKRMEDGFLDVWTYNAELLVLLENERTLDLHDANVKNLHEKVRSQLRDNANDLGNGCFEFWHKCNNECMESVKNGTYDYPKYQKESRLNRQKIESVKLENFDVYQILAIYSTVSSSLVLVGLILAMGLWMCSNGSMQCRICI

SEQ ID NO: 11128 - protein, 566 aa, synthetic construct
  REGION 1..566: note = hemagglutinin__InfluenzaA__AHJ58084
MIAFIVIATLVATGKSDKICIGYHANNSTTKVDTILEKNVTVTHSVELLENQKEERFCKISNKAPLDLRDCTLEGWILGNPRCGILLADQSWSYIVERPNARNGICYPGTLNEAEELKALIGSGERVERFEMFPKSTWTGVNTESGVSSACPLGNGPSFYRNLLWIIKLKSSEYPVIRGTFNNTGDKSILYFWGVHHPPVTTEQNALYGSGDRYVRMGTESMNFARSPEIAARPAVNGQRGRIDYFWSILKPGETLNVESNGNLIAPWYAYRFVNKDSKGAIFRSNLPIENCDATCQTTEGVIRTNKTFQNVSPLWIGECPKYVKSKSLRLATGLRNVPQIETRGLFGAIAGFIEGGWTGMIDGWYGYHHENSQGSGYAADKESTQKAIDGITNKVNSIIDKMNTQFEAVGHEFSNLERRIDNLNKRMEDGFLDVWTYNAELLVLLENERTLDLHDANVKNLHEKVRSQLRDNANDLGNGCFEFWHKCNNECMESVKNGTYDYPKYQKESRLNRQKIESVKLENFDVYQILAIYSTVSSSLVLVGLILAMGLWMCSNGSMQCRICI

SEQ ID NO: 11129 - protein, 566 aa, synthetic construct; identical to SEQ ID NO: 6855
  REGION 1..566: note = hemagglutinin__InfluenzaA__AHL80708

SEQ ID NO: 11130 - protein, 566 aa, synthetic construct
  REGION 1..566: note = hemagglutinin__InfluenzaA__AHL80718
MKAILVVLLYTFATANADTLCIGYHANNSTDTVDTVLEKNVTVTHSVNLLEDKHNGKLCKLRGVAPLHLGKCNIAGWILGNPECESLSTASSWSYIVETSSSDNGTCYPGDFINYEELREQLSSVSSFERFEIFPKISSWPNHDSNKGVTAACPHAGAKSFYKNLIWLVKKGNSYPKLSKSYINDKGKEVLVLWGIHHPSTTADQQSLYQNADAYVFVGTSRYSKKFKPEIAIRPKVRDQEGRMNYYWTLVEPGDKITFEATGNLVVPRYAFAMERNAGSGIIISDTSVHDCNTTCQTPKGAINTSLPFQNIHPITIGKCPKYVKSTKLRLATGLRNVPSIQSRGLFGAIAGFIEGGWTGMVDGWYGYHHQNEQGSGYAADLKSTQNAIDKITNKVNSVIEKMNTQFTAVGKEFNHLEKRIENLNKKVDDGFLDIWTYNAELLVLLENERTLDYHDSNVKNLYEKVRSQLKNNAKEIGNGCFEFYHKCDNTCMESVKNGTYDYPKYSEEAKLNREEIDGVKLESTRIYQILAIYSTVASSLVLVVSLGAISFWMCSNGSLQCRICI

SEQ ID NO: 11131 - protein, 569 aa, synthetic construct
  REGION 1..569: note = hemagglutinin__InfluenzaA__AHL80729
MKAILVVLLYTFATANADTLCIGYHANNSTDTVDTVLEKNVTVTHSVNLLEDKHNGKLCKLRGVAPLHLGECNIAGWILGNPECESLSTASSWSYIVETSSSDNGTCYPGDFIDYEELREQLSSVSSFERFEIFPKTSSWPNHDSNKGVTAACPHAGAKSFYKNLIWLVKKGNSYPKLSKSYINDKGKEVLVLWGIHHPSTSADQQSLYQNADAYVFVGTSRYSKKFKPEIAIRPKVRDQEGRMNYYWTLVEPGDKITFEATGNLVVPRYAFAMERNAGSGIIISDTPVHDCNTTCQTPKGAINTSLTSLPFQNVHPITIGKCPKYVKSTKLRLATGLRNVPSIQSRGLFGAIAGFIEGGWTGMVDGWYGYHHQNEQGSGYAADLKSTQNAIDEITNKVNSVIEKMNTQFTAVGKEFNHLEKRIENLNKKVDDGFLDIWTYNAELLVLLENERTLDYHDSNVKNLYEKVRSQLKNNAKEIGNGCFEFYHKCDNTCMESVKNGTYDYPKYSEEAKLNREEIDGVKLESTRIYQILAIYSTVASSLVLVVSLGAISFWMCSNGSLQCRICI

SEQ ID NO: 11132 - protein, 566 aa, synthetic construct
  REGION 1..566: note = hemagglutinin__InfluenzaA__AHL80740
MKAILVVLLYTFATANADTLCIGYHANNSTDTVDTVLEKNVTVTHSVNLLEDKHNGKLCKLRGVAPLHLGKCNIAGWILGNPECELLSTASSWSYIVETSSSDNGTCYPGDFINYEELREQLSSVSSFERFEIFPKTSSWPNHDSNKGVTAACPHAGAKSFYKNLIWLVKKGNSYPKLSKSYINDKGKEVLVLWGVHHPSTSADQQSLYQNADAYVFVGTSRYSKKFKPEIAIRPKVRDQEGRMNYYWTLVEPGDKITFEATGNLVVPRYAFAMERNAGSGIIISDTPVHDCNTTCQTPKGAINTSLPFQNIHPITIGKCPKYVKSTKLRLATGLRNVPSIQSRGLFGAIAGFIEGGWTGMVDGWYGYHHQNEQGSGYAADLKSTQNAIDKITNKVNSVIEKMNTQFTAVGKEFNHLEKRIENLNKKVDDGFLDIWTYNAELLVLLENERTLDYHDSNVKNLYEKVRSQLKNNAKEIGNGCFEFYHKCDNTCMESVKNGTYDYPKYSEEAKLNREKIDGVKLESTRIYQILAIYSTVASSLVLVVSLGAISFWMCSNGSLQCRICI

SEQ ID NO: 11133 - protein, 566 aa, synthetic construct
  REGION 1..566: note = hemagglutinin__InfluenzaA__AHL80751
MKAILVVLLYTFATANADTLCIGYHANNSTDTVDTILEKNVTVTHSVNLLEDKHNGKLCKLRGVAPLHLGKCNIAGWILGNPECESLSTASSWSYIVETSSSDNGTCYPGDFIDYEELREQLSSVSSFERFEIFPKTSSWPNHDSNKGVTAACPHAGAKSFYKNLIWLVKKGNSYPKLSKSYINDKGKEILVLWGIHHPSTSADQQSLYQNADAYVFVGTSRYSKKFKPEIAIRPKVRDQEGRMNYYWTLVEPGDKITFEATGNLVVPRYAFAMEKNAGSGIIISDTPVHDCNTTCQTPKGAINTSLPFQNIHPITIGKCPKYVKSTKLRLATGLRNVPSIQSRGLFGAIAGFIEGGWTGMVDGWYGYHHQNEQGSGYAADLKSTQNAIDEITNKVNSVIEKMNTQFTAVGKEFNHLEKRIENLNKKVDDGFLDIWTYNAELLVLLENERTLDYHDSNVKNLYEKVRSQLKNNAKEVGNGCFEFYHKCDNTCMESVKNGTYDYPKYSEEAKLNREEIDGVKLESTRIYQILAIYSTVASSLVLVVSLGAISFWMCSNGSLQCRICI

SEQ ID NO: 11134 - protein, 566 aa, synthetic construct
  REGION 1..566: note = hemagglutinin__InfluenzaA__AHL80762
MKAILVVLLYTFATANADTLCIGYHANNSTDTVDTVLEKNVTVTHSVNLLEDKHNGKLCKLRGVAPLHLGKCNIAGWILGNPECESLSTASSWSYIVETSSSDNGTCYPGDFINYEELREQLSSVSSFERFEIFPKTSSWPNHDSNKGVTAACPHAGAKSFYKNLIWLVKKGNSYPKLSKSYINDKGKEVLVLWGIHHPSTSADQQSLYQNADAYVFVGTSRYSKKFKPEIAIRPKVRDQEGRMNYYWILVEPGDKITFEATGNLVVPRYAFAMERNAGSGIIISDTPVHDCNTTCQTPKGAINTSLPFQNIHPITIGKCPKYVKSTKLRLATGLRNVPSIQSRGLFGAIAGFIEGGWTGMVDGWYGYHHQNEQGSGYAADLKSTQNAIDKITNKVNSVIEKMNTQFTAVGKEFNHLEKRIENLNKKVDDGFLDIWTYNAELLVLLENERTLDYHDSNVKNLYEKVRSQLKDNAKEIGNGCFEFYHKCDNTCMESVKNGTYDYPKYSEEAKLNREEIDGVKLESTRIYQILAIYSTVASSLVLVVSLGAISFWMCSNGSLQCRICI

SEQ ID NO: 11135 - protein, 566 aa, synthetic construct
  REGION 1..566: note = hemagglutinin__InfluenzaA__AHL80784
MKAILVVLLYTFATANADTLCIGYHANNSTDTVDTVLEKNVTVTHSVNLLEDKHNGKLCKLRGVAPLHLGKCNIAGWILGNPECESLSTASSWSYIVETSSSDNGTCYPGDFIDYEELREQLSSVSSFERFEIFPKTSSWPNHDSNKGITAACPHAGAKSFYKNLIWLVKKGNSYPKLSKSYINDKGKEVLVLWGIHHPSTSADQQSLYQNADAYVFVGTSRYSKKFKPEIAIRPKVRDQEGRMNYYWTLVEPGDKITFEATGNLVVPRYAFAMERNAGSGIIISDTPVHDCNTTCQTPKGAINTSLPFQNIHPITIGKCPKYVKSTKLRLATGLRNVPSIQSRGLFGAIAGFIEGGWTGMVDGWYGYHHQNEQGSGYAADLKSTQNAIDKITNKVNSVIEKMNTQFTAVGKEFNHLEKRIENLNKKVDDGFLDIWTYNAELLVLLENERTLDYHDSNVKNLYEKVRSQLKNNAKEIGNGCFEFYHKCDNTCMESVKNGTYDYPKYSEEAKLNREEIDGVKLESTRIYQILAIYSTVASSLVLVVSLGAISFWMCSNGSLQCRICI

SEQ ID NO: 11136 - protein, 566 aa, synthetic construct; identical to SEQ ID NO: 3833
  REGION 1..566: note = hemagglutinin__InfluenzaA__AHL80795

SEQ ID NO: 11137 - protein, 566 aa, synthetic construct
  REGION 1..566: note = hemagglutinin__InfluenzaA__AHL80817
MKAILVVLLYTFATANADTLCIGYHANNSTDTVDTVLEKNVTVTHSVNLLEDKHNGKLCKLRGVAPLHLGNCNIAGWILGNPECESLSTASSWSYIVEASSSDNGTCYPGDFIDYEELREQLSSVSSFERFEIFPKTSSWPNHDSNKGVTAACPHAGAKSFYKNLIWLVKKGNSYPKLSKSYINDKGKEVLVLWGIHHPSTSADQQSLYQNADAYVFVGTSRYSKKFKPEIAIRPKVRDQEGRMNYYWTLVEPGDKITFEATGNLVVPRYAFAMERNAGSGIIISDTPVHDCNTTCQTPKGAINTSLPFQNIHPITIGKCPKYVKSTKLRLATGLRNVPSIQSRGLFGAIAGFIEGGWTGMVDGWYGYHHQNEQGSGYAADLKSTQNAIDKITNKVNSVIEKMNTQFTAVGKEFNHLEKRIENLNKKVDDGFLDIWTYNAELLVLLENERTLDYHDSNVKNLYEKVRSQLKNNAKEIGNGCFEFYHKCDNTCMESVKNGTYDYPKYSEEAKLNREEIDGVKLESTRIYQILAIYSTVASSLVLVVSLGAISFWMCSNGSLQCRICI

SEQ ID NO: 11138 - protein, 566 aa, synthetic construct; identical to SEQ ID NO: 11137
  REGION 1..566: note = hemagglutinin__InfluenzaA__AHL80828

SEQ ID NO: 11139 - protein, 566 aa, synthetic construct
  REGION 1..566: note = hemagglutinin__InfluenzaA__AHL80839
MKAILVVLLYTFATANADTLCIGYHANNSTDTVDTVLEKNVTVTHSVNLLEDKHNGKLCKLRGVAPLHLGKCNIAGWILGNPECESLSTASSWSYIVETSSSDNGTCYPGDFIDYEELREQLSSVSSFERFEIFPKTSSWPNHDSNKGITAACPHAGAKSFYKNLIWLVKKGNSYPKLSRSYINDKGKEVLVLWGIHHPSTSADQQSLYQNADAYVFVGTSRYSKKFKPEIAIRPKVRDQEGRMNYYWTLVEPGDKITFEATGNLVVPRYAFAMERNAGSGIIISDTPVHDCNTTCQTPKGAINTSLPFQNIHPITIGKCPKYVKSTKLRLATGLRNVPSIQSRGLFGAIAGFIEGGWTGMVDGWYGYHHQNEQGSGYAADLKSTQNAIDKITNKVNSVIEKMNTQFTAVGKEFNHLEKRIENLNKKVDDGFLDIWTYNAELLVLLENERTLDYHDSNVKNLYEKVRSQLKNNAKEIGNGCFEFYHKCDNTCMESVKNGTYDYPKYSEEAKLNREEIDGVKLESTRIYQILAIYSTVASSLVLVVSLGAISFWMCSNGSLQCRICI

SEQ ID NO: 11140 - protein, 566 aa, synthetic construct
  REGION 1..566: note = hemagglutinin__InfluenzaA__AHL80861
MKAILVVLLYTFATANADTLCIGYHANNSTDTVDTVLEKNVTVTHSVNLLEDKHNGKLCKLRGVAPLHLGKCNIAGWILGNPECESLSTASSWSYIVETSSSDNGTCYPGDFIDYEELREQLSSVSSFERFEIFPKTSSWPNHDSNKGVTAACPHAGAKSFYKNLIWLVKKGNSYPKLSKSYINDKGKEVLVLWGIHHPSTSADQQSLYQNADAYVFVGTSRYSKKFKPEIAIRPKVRDQEGRMNYYWTLVEPGDKITFEATGNLVVPRYAFAMERNAGSGIIISDTPVHDCNTTCQTPKGAINTSLPFQNIHPITIGKCPKYVKSTKLRLATGLRNVPSIQSRGLFGAIAGFIEGGWTGMVDGWYGYHHQNEQGSGYAADLKSTQNAIDKITNKVNSVIEKMNTQFTAVGKEFNHLEKRIGNLNKKVDDGFLDIWTYNAELLVLLENERTLDYHDSNVKNLYEKVRSQLKNNAKEIGNGCFEFYHKCDNTCMESVKNGTYDYPKYSEEAKLNREEIDGVKLESTRIYQILAIYSTVASSLVLVVSLGAISFWMCSNGSLQCRICI

SEQ ID NO: 11141 - protein, 566 aa, synthetic construct
  REGION 1..566: note = hemagglutinin__InfluenzaA__AHL80872
MKAILVVLLYTFATANADTLCIGYHANNSTDTVDTVLEKNVTVTHSVNLLEDKHNGKLCKLRGVAPLHLGKCNIAGWILGNPECESLSTASSWSYIVETSSSDNGTCYPGDFIDYEELREQLSSVSSFERFEIFPKTSSWPNHDSNKGVTAACPHAGAKSFYKNLIWLVKKGNSYPKLSKSYINDKGKEVLVLWGIHHPSTNADQQSLYQNADAYVFVGTSRYSKKFKPEIAIRPKVRDQEGRMNYYWTLVEPGDKITFEATGNLVVPRYAFAMERNAGSGIIISDTPVHDCNTTCQTPKGAINTSLPFQNIHPITIGKCPKYVKSTKLRLATGLRNVPSIQSRGLFGAIAGFIEGGWTGMVDGWYGYHHQNEQGSGYAADLKSTQNAIDKITNKVNSVIEKMNTQFTAVGKEFNHLEKRIENLNKKVDDGFLDIWTYNAELLVLLENERTLDYHDSNVKNLYEKVRSQLKNNAKEIGNGCFEFYHKCDNTCMESVKNGTYDYPKYSEEAKLNREEIDGVKLESTRIYQILAIYSTVASSLVLVVSLGAISFWMCSNGSLQCRICI

SEQ ID NO: 11142 - protein, 566 aa, synthetic construct; identical to SEQ ID NO: 3833
  REGION 1..566: note = hemagglutinin__InfluenzaA__AHL80883

SEQ ID NO: 11143 - protein, 566 aa, synthetic construct; identical to SEQ ID NO: 3833
  REGION 1..566: note = hemagglutinin__InfluenzaA__AHL80894

SEQ ID NO: 11144 - protein, 566 aa, synthetic construct; identical to SEQ ID NO: 3833
  REGION 1..566: note = hemagglutinin__InfluenzaA__AHL80905

SEQ ID NO: 11145 - protein, 566 aa, synthetic construct; identical to SEQ ID NO: 6454
  REGION 1..566: note = hemagglutinin__InfluenzaA__AHL80916

SEQ ID NO: 11146 - protein, 566 aa, synthetic construct; identical to SEQ ID NO: 6855
  REGION 1..566: note = hemagglutinin__InfluenzaA__AHL80927

SEQ ID NO: 11147 - protein, 566 aa, synthetic construct; identical to SEQ ID NO: 6855
  REGION 1..566: note = hemagglutinin__InfluenzaA__AHL80946

SEQ ID NO: 11148 - protein, 566 aa, synthetic construct
  REGION 1..566: note = hemagglutinin__InfluenzaA__AHL80958
MKAILVVLLYTFATANADTLCIGYHANNSTDTVDTVLEKNVTVTHSVNLLEDKHNGKLCKLRGVAPLHLGKCNIAGWILGNPECESLSTASSWSYIVETSSSDNGTCYPGDFINYEELREQLSSVSSFERFEIFPKISSWPNHDSNKGVTAACPHAGAKSFYKNLIWLVKKGNSYPKLSKSYINDKGKEVLVLWGIHHPSTTADQQSLYQNADAYVFVGTSRYSKKFKPEIAIRPKVRDQEGRMNYYWTLVEPGDKITFEATGNLVVPRYAFAMERNAGSGIIISDTSVHDCNTTCQTPKGAINTSLPFQNIHPITIGKCPKYVKSTKLRLATGLRNVPSIQSRGLFGAIAGFIEGGWTGMVDGWYGYHHQNEQGSGYAADLKSTQNAIDKITNKVNSVIEKMNTQFTAVGKEFNHLEKRIENLNKKVDDGFLDIWTYNAELLVLLENERTLDYHDSNVKNLYEKVRNQLKNNAKEIGNGCFEFYHKCDNTCMESVKNGTYDYPKYSEEAKLNREEIDGVKLESTRIYQILAIYSTVASSLVLVVSLGAISFWMCSNGSLQCRICI

SEQ ID NO: 11149 - protein, 566 aa, synthetic construct
  REGION 1..566: note = hemagglutinin__InfluenzaA__AHL81001
MKTIIALSYILCLIFAQKLPGNDNSTATLCLGHHAVPNGTIVKTITNDQIEVTNATELVQSSSTGEICNSPHQILDGENCTLIDALLGDPQCDGFQNKKWDLFVERSKAHSNCYPYDVPDYASLRSLVASSGTLEFNNESFNWTGVTQNGTSSACIRRSNNSFFSRLNWLTHLNFKYPALNVTMPNNEQFDKLYIWGVHHPGTDKDQIFLYAQAAGRITVSTKRSQQAVIPNIGSRPRVRNIPSRVSIYWTIVKPGDILLINSTGNLIAPRGYFKIRSGKSSIMRSDAPIGKCNSACITPNGSIPNDKPFQNVNRITYGACPRYVKQNTLKLATGMRNVPEKQTRGIFGAIAGFIENGWEGMVDGWYGFRHQNSEGRGQAADLKSTQAAIDQINGKLNRLIGKTNEKFHQIEKEFSEVEGRIQDLEKYVEDTKIDLWSYNAELLVALENQHTIDLTDSEMNKLFEKTKKQLRENAEDMGNGCFKIYHKCDNACIGSIRNGTYDHDVYRDEALNNRFQIKGVELKSGYKDWILWISFAISCFLLCVALLGFIMWACQKGNIRCNICI

SEQ ID NO: 11150 - protein, 566 aa, synthetic construct; identical to SEQ ID NO: 6855
  REGION 1..566: note = hemagglutinin__InfluenzaA__AHL81013

SEQ ID NO: 11151 - protein, 566 aa, synthetic construct; identical to SEQ ID NO: 6855
  REGION 1..566: note = hemagglutinin__InfluenzaA__AHL81025

SEQ ID NO: 11152 - protein, 566 aa, synthetic construct; identical to SEQ ID NO: 6855
  REGION 1..566: note = hemagglutinin__InfluenzaA__AHL81037

SEQ ID NO: 11153 - protein, 566 aa, synthetic construct; identical to SEQ ID NO: 6855
  REGION 1..566: note = hemagglutinin__InfluenzaA__AHL81049

SEQ ID NO: 11154 - protein, 566 aa, synthetic construct; identical to SEQ ID NO: 11148
  REGION 1..566: note = hemagglutinin__InfluenzaA__AHL81061

SEQ ID NO: 11155 - protein, 566 aa, synthetic construct; identical to SEQ ID NO: 11148
  REGION 1..566: note = hemagglutinin__InfluenzaA__AHL81072

SEQ ID NO: 11156 - protein, 566 aa, synthetic construct; identical to SEQ ID NO: 8361
  REGION 1..566: note = hemagglutinin__InfluenzaA__AHL81083

SEQ ID NO: 11157 - protein, 566 aa, synthetic construct; identical to SEQ ID NO: 6855
  REGION 1..566: note = hemagglutinin__InfluenzaA__AHL81095

SEQ ID NO: 11158 - protein, 566 aa, synthetic construct
  REGION 1..566: note = hemagglutinin__InfluenzaA__AHL81118
MKAILVVLLYTFATANADTLCIGYHANNSTDTVDTVLEKNVTVTHSVNLLEDKHNGKLCKLRGVAPLHLGKCNIAGWILGNPECESLSTASSWSYIVETSSSDNGTCYPGDFINYEELREQLSSVSSFERFEIFPKTNSWPNHDSNKGVTAACPHAGAKSFYKNLIWLVKKGNSYPKLSKSYINDKGKEVLVLWGIHHPSTTADQQSLYQNADAYVFVGTSRYSKKFKPEIAIRPKVRDQEGRMNYYWTLVEPGDKITFEATGNLVVPRYAFAMERNAGSGIIISDTPVHDCNTTCQTPKGAINTSLPFQNIHPITIGKCPKYVKSTKLRLATGLRNVPSIQSRGLFGAIAGFIEGGWTGMVDGWYGYHHQNEQGSGYAADLKSTQNAIDKITNKVNSVIEKMNTQFTAVGKEFNHLEKRIENLNKKVDDGFLDIWTYNAELLVLLENERTLDYHDSNVKNLYEKVRNQLKNNAKEIGNGCFEFYHKCDNTCMESVKNGTYDYPKYSEEAKLNREEIDGVKLESTRIYQILAIYSTVASSLVLVVSLGAISFWMCSNGSLQCRICI

SEQ ID NO: 11159 - protein, 566 aa, synthetic construct; identical to SEQ ID NO: 6855
  REGION 1..566: note = hemagglutinin__InfluenzaA__AHL81129

SEQ ID NO: 11160 - protein, 566 aa, synthetic construct; identical to SEQ ID NO: 6855
  REGION 1..566: note = hemagglutinin__InfluenzaA__AHL81141

SEQ ID NO: 11161 - protein, 566 aa, synthetic construct; identical to SEQ ID NO: 6855
  REGION 1..566: note = hemagglutinin__InfluenzaA__AHL81153

SEQ ID NO: 11162 - protein, 566 aa, synthetic construct
  REGION 1..566: note = hemagglutinin__InfluenzaA__AHL81165
MKTIIALSYILCLVFAQKLPGNDNSTATLCLGHHAVPNGTIVKTITNDQIEVTNATELVQSSSAGEICDSPHQILDGENCTLIDALLGDPQCDGFQNKKWDLFVERSRAYSNCYPYDVPDYASLRSLVASSGTLEFNNESFNWTGVTQNGTSSACIRRSNNSFFSRLNWLTHLNFKYPALNVTMPNNEQFDKLYIWGVHHPGTDKDQIFLYAQASGRITVSTKRSQQAVIPNIGSRPRVRNIPSRISIYWTIVKPGDILLINSTGNLIAPRGYFKIRSGKSSIMRSDAPIGKCNSECITPNGSIPNDKPFQNVNRITYGACPRYVKQSTLKLATGMRNVPEKQTRGIFGAIAGFIENGWEGMMDGWYGFRHQNSEGRGQAADLKSTQAAIDQINGKLNRLIGKTNEKFHQIEKEFSEVEGRIQDLEKYVEDTKIDLWSYNAELLVALENQHTIDLTDSEMNKLFEKTKKQLRENAEDMGNGCFKIYHKCDNACIGSIRNGTYDHDVYRDEALNNRFQIKGVELKSGYKDWILWISFAISCFLLCVALLGFIMWACQKGNIRCNICI

SEQ ID NO: 11163 - protein, 566 aa, synthetic construct; identical to SEQ ID NO: 11162
  REGION 1..566: note = hemagglutinin__InfluenzaA__AHL81177

SEQ ID NO: 11164 - protein, 566 aa, synthetic construct; identical to SEQ ID NO: 11149
  REGION 1..566: note = hemagglutinin__InfluenzaA__AHL81189

SEQ ID NO: 11165 - protein, 566 aa, synthetic construct
  REGION 1..566: note = hemagglutinin__InfluenzaA__AHL81212
MKTIIALSYILCLVFAQKLPGNDNSTATLCLGHHAVPNGTIVKTITNDQIEVTNATELVQSSSTGEICNSPHQILDGENCTLIDALLGDPQCDGFQNKKWDLFVERSKAHSNCYPYDVPDYASLRSLVASSGTLEFKNESFNWTGVTQNGTSSACIRRSNNSFFSRLNWLTHLNFKYPALNVTMPNNEQFDKLYIWGVHHPGTDKDQIFLYAQAAGRITVSTKRSQQAVIPNIGSRPRVRNIPSRVSIYWTIVKPGDILLINSTGNLIAPRGYFKIRSGKSSIMRSDAPIGKCNSACITPNGSIPNDKPFQNVNRITYGACPRYVKQNTLKLATGMRNVPEKQTRGIFGAIAGFIENGWEGMVDGWYGFRHQNSEGRGQAADLKSTQAAIDQINGKLNRLIGKTNEKFHQIEKEFSEVEGRIQDLEKYVEDTKIDLWSYNAELLVALENQHTIDLTDSEMNKLFEKTKKQLRENAEDMGNGCFKIYHKCDNACIGSIRNGTYDHDVYRDEALNNRFQIKGVELKSGYKDWILWISFAISCFLLCVALLGFIMWACQKGNIRCNICI

SEQ ID NO: 11166 - protein, 566 aa, synthetic construct
  REGION 1..566: note = hemagglutinin__InfluenzaA__AHL81224
MKAILVVLLYTFATANADTLCIGYHANNSTDTVDTVLEKNVTVTHSVNLLEDKHNGKLCKLRGVAPLHLGKCNIAGWILGNPECESLSTASSWSYIVETSSSDNGTCYPGDFIDYEELREQLSSVSSFERFEIFPKTSSWPNHDSNKGVTAACPHAGAKGFYKNLIWLVKKGNSYPKLSKSYINDKGKEVLVLWGIHHPSTTADQQSLYQNADTYVFVGTSRYSKKFKPEIAIRPKVRDQEGRMNYYWTLVEPGDKITFEATGNLVVPRYAFAMERTAGSGIIISDTPVHDCNTTCQTPKGAINTSLPFQNIHPITIGKCPKYVKSTKLRLATGLRNVPSIQSRGLFGAIAGFIEGGWTGMVDGWYGYHHQNEQGSGYAADLKSTQNAIDKITNKVNSVIEKMNTQFTAVGKEFNHLEKRIENLNKKVDDGFLDIWTYNAELLVLLENERTLDYHDSNVKNLYEKVRNQLKNNAKEIGNGCFEFYHKCDNTCMESVKNGTYDYPKYSEEAKLNREEIDGVKLESTRIYQILAIYSTVASSLVLVVSLGAISFWMCSNGSLQCRICI

SEQ ID NO: 11167 - protein, 566 aa, synthetic construct; identical to SEQ ID NO: 6855
  REGION 1..566: note = hemagglutinin__InfluenzaA__AHL81235

SEQ ID NO: 11168 - protein, 566 aa, synthetic construct; identical to SEQ ID NO: 6855
  REGION 1..566: note = hemagglutinin__InfluenzaA__AHL81247

SEQ ID NO: 11169 - protein, 566 aa, synthetic construct; identical to SEQ ID NO: 6855
  REGION 1..566: note = hemagglutinin__InfluenzaA__AHL81259

SEQ ID NO: 11170 - protein, 566 aa, synthetic construct; identical to SEQ ID NO: 6855
  REGION 1..566: note = hemagglutinin__InfluenzaA__AHL81271

SEQ ID NO: 11171 - protein, 566 aa, synthetic construct; identical to SEQ ID NO: 6855
  REGION 1..566: note = hemagglutinin__InfluenzaA__AHL81283

SEQ ID NO: 11172 - protein, 566 aa, synthetic construct; identical to SEQ ID NO: 6855
  REGION 1..566: note = hemagglutinin__InfluenzaA__AHL81295

SEQ ID NO: 11173 - protein, 566 aa, synthetic construct; identical to SEQ ID NO: 11148
  REGION 1..566: note = hemagglutinin__InfluenzaA__AHL81307

SEQ ID NO: 11174 - protein, 566 aa, synthetic construct; identical to SEQ ID NO: 6867
  REGION 1..566: note = hemagglutinin__InfluenzaA__AHL81329

SEQ ID NO: 11175 - protein, 566 aa, synthetic construct
  REGION 1..566: note = hemagglutinin__InfluenzaA__AHL81340
MKTIIALSYILCLVFAQKLPGNDNSTATLCLGHHAVPNGTIVKTITNDQIEVTNATELVQSSSTGEICDSPHQILDGKNCTLIDALLGDPQCDGFQNKKWDLFVERSKAYSNCYPYDVPDYASLRSLVASSGTLEFNNESFNWTGVTQDGTSSACIRGSKNSFFSRLNWLTHLNFKYPALNVTMPNNEQFDKLYIWGVHHPGTDKDQIFLYAQASGRITVSTKRSQQAAIPNIGSRPRVRNIPSRISIYWTIVKPGDILLINSTGNLIAPRGYFKIRSGKSSIMRSDAPIGKCNSECITPNGSIPNDKPFQNVNRITYGACPRYVKQNTLKLATGMRNVPEKQTRGIFGAIAGFIENGWEGMVDGWYGFRHQNSEGRGQAADLKSTQAAIDQINGKLNRLIGKTNEKFHQIEKEFSEVEGRIQDLEKYVEDTKIDLWSYNAELLVALENQHTIDLTDSEMNKLFEKTKKQLRENAEDMGNGCFKIYHKCDNACIGSIRNGTYNHDVYRDEALNKRFQIKGIELKSGYKDWILWISFAISCFLLCVALLGFIMWACQKGNIRCNICI

SEQ ID NO: 11176 - protein, 566 aa, synthetic construct; identical to SEQ ID NO: 6855
  REGION 1..566: note = hemagglutinin__InfluenzaA__AHL81352

SEQ ID NO: 11177 - protein, 566 aa, synthetic construct
  REGION 1..566: note = hemagglutinin__InfluenzaA__AHL81364
MKAILVVLLYTFATANADTLCIGYHANNSTDTVDTVLEKNVTVTHSVNLLEDKHNGKLCKLRGVAPLHLGKCNIAGWILGNPECESLSTASSWSYIVETSSSDNGACYPGDFINYEELREQLSSVSSFERFEIFPKTNSWPNHDSNKGVTAACPHAGAKSFYKNLIWLVKKGNSYPKLSKSYINDKGKEVLVLWGIHHPSTTADQQSLYQNADAYVFVGTSRYSKKFKPEIAIRPKVRDQEGRMNYYWTLVEPGDKITFEATGNLVVPRYAFAMERNAGSGIIISDTPVHDCNTTCQTPKGAINTSLPFQNIHPITIGKCPKYVKSTKLRLATGLRNVPSIQSRGLFGAIAGFIEGGWTGMVDGWYGYHHQNEQGSGYAADLKSTQNAIDKITNKVNSVIEKMNTQFTAVGKEFNHLEKRIENLNKKVDDGFLDIWTYNAELLVLLENERTLDYHDSNVKNLYEKVRNQLKNNAKEIGNGCFEFYHKCDNTCMESVKNGTYDYPKYSEEAKLNREEIDGVKLESTRIYQILAIYSTVASSLVLVVSLGAISFWMCSNGSLQCRICI

SEQ ID NO: 11178 - protein, 566 aa, synthetic construct
  REGION 1..566: note = hemagglutinin__InfluenzaA__AHL81386
MKAILVVLLYTFATANADTLCIGYHANNSTDTVDTVLEKNVTVTHSVNLLEDKHNGKLCKLRGVAPLHLGKCNIAGWILGNPECESLSTASSWSYIVETSSSDNGTCYPGDFINYEELREQLSSVSSFERFEIFPKTNSWPNHDSNKGVTAACPHAGVKSFYKNLIWLVKKGNSYPKLSKSYINDKGKEVLVLWGIHHPSTTADQQSLYQNADAYVFVGTSRYSKKFKPEIAIRPKVRDQEGRMNYYWTLVEPGDKITFEATGNLVVPRYAFAMERNAGSGIIISDTPVHDCNTTCQTPKGAINTSLPFQNIHPITIGKCPKYVKSTKLRLATGLRNVPSIQSRGLFGAIAGFIEGGWTGMVDGWYGYHHQNEQGSGYAADLKSTQNAIDKITNKVNSVIEKMNTQFTAVGKEFNHLEKRIENLNKKVDDGFLDIWTYNAELLVLLENERTLDYHDSNVKNLYEKVRNQLKNNAKEIGNGCFEFYHKCDNTCMESVKNGTYDYPKYSEEAKLNREEIDGVKLESTRIYQILAIYSTVASSLVLVVSLGAISFWMCSNGSLQCRICI

SEQ ID NO: 11179 - protein, 566 aa, synthetic construct; identical to SEQ ID NO: 6855
  REGION 1..566: note = hemagglutinin__InfluenzaA__AHL81397

SEQ ID NO: 11180 - protein, 566 aa, synthetic construct; identical to SEQ ID NO: 11165
  REGION 1..566: note = hemagglutinin__InfluenzaA__AHL81409

SEQ ID NO: 11181 - protein, 566 aa, synthetic construct; identical to SEQ ID NO: 11135
  REGION 1..566: note = hemagglutinin__InfluenzaA__AHL81419

SEQ ID NO: 11182 - protein, 566 aa, synthetic construct; identical to SEQ ID NO: 3833
  REGION 1..566: note = hemagglutinin__InfluenzaA__AHL81430

SEQ ID NO: 11183 - protein, 566 aa, synthetic construct; identical to SEQ ID NO: 630
  REGION 1..566: note = hemagglutinin__InfluenzaA__AHL88951

SEQ ID NO: 11184 - protein, 566 aa, synthetic construct; identical to SEQ ID NO: 630
  REGION 1..566: note = hemagglutinin__InfluenzaA__AHL89030

SEQ ID NO: 11185 - protein, 566 aa, synthetic construct
  REGION 1..566: note = hemagglutinin__InfluenzaA__AHL89042
MKTIIALSYILCLVFAQKLPGNDNSTATLCLGHHAVPNGTIVKTITNDQIEVTNATELVQSSSTGEICDSPHQILDGENCTLIDALLGDPQCDGFQNKKWDLFVERSKAYSNCYPYDVPDYASLRSLVASSGTLEFNNENFNWTGVTQNGTSSACKRRSNNSFFSRLNWLTHLKFKYPALNVTMPNNEKFDKLYIWGVHHPGTDNDQIFLYAQASGRITVSTKRSQQTVIPNIGSRPRVRNIPSRISIYWTIVKPGDILLINSTGNLIAPRGYFKIRSGKSSIMRSDAPIGKCNSECITPNGSIPNDKPFQNVNRITYGACPRYVKQNTLKLATGMRNVPEKQTRGIFGAIAGFIENGWEGMVDGWYGFRHQNSEGIGQAADLKSTQAAINQINGKLNRLIGKTNEKFHQIEKEFSEVEGRIQDLEKYVEDTKIDLWSYNAELLVALENQHTIDLTDSEMNKLFERTKKQLRENAEDMGNGCFKIYHKCDNACIGSIRNGTYDHDVYRDEALNNRFQIKGVELKSGYKDWILWISFAISCFLLCVALVGFIMWACQKGNIRCNICI

SEQ ID NO: 11186 - protein, 566 aa, synthetic construct
  REGION 1..566: note = hemagglutinin__InfluenzaA__AHL89054
MKTIIALSYILCLVFAQKLPGNDNSTATLCLGHHAVPNGTIVKTITNDQIEVTNATELVQSSSTGGICDSPHQILDGENCTLIDALLGDPQCDGFQNKKWDLFVERSKAYSNCYPYDVPDYASLRSLVASSGTLEFNNESFNWTGVTQNGTSSACKRRSNNSFFSRLNWLTHLKFKYPALNVTMPNNEKFDKLYIWGVHHPGTDNDQIFLYAQASGRITVSTKRSQQTVIPNIGSRPRVRNIPSRISIYWTIVKPGDILLINSTGNLIAPRGYFKIRSGKSSIMRSDAPIGKCNSECITPNGSIPNDKPFQNVNRITYGACPRYVKQNTLKLATGMRNVPEKQTRGIFGAIAGFIENGWEGMVDGWYGFRHQNSEGIGQAADLKSTQAAINQINGKLNRLIGKTNEKFHQIEKEFSEVEGRIQDLEKYVEDTKIDLWSYNAELLVALENQHTIDLTDSEMNKLFERTKKQLRENAEDMGNGCFKIYHKCDNACIGSIRNGTYDHDVYRDEALNNRFQIKGVELKSGYKDWILWISFAMSCFLLCVALLGFIMWACQKGNIRCNICI

SEQ ID NO: 11187 - protein, 566 aa, synthetic construct; identical to SEQ ID NO: 1581
  REGION 1..566: note = hemagglutinin__InfluenzaA__AHL89066

SEQ ID NO: 11188 - protein, 566 aa, synthetic construct
  REGION 1..566: note = hemagglutinin__InfluenzaA__AHL89078
MKTIIALSYILCLVFAQKLPGDDNSTATLCLGHHAVPNGTVVKTITNDQIEVTNATELVQSSSTGGICDSPHQILDGENCTLIDALLGDPQCDGFQNKKWDLFVERSKAYSNCYPYDVPDYASLRSLVASSGTLEFNNESFNWTGVTQNGTSSACKRRSNNSFFSRLNWLTHLKFKYPALNVTMPNNEKFDKLYIWGVHHPGTDNDQIFLYAQASGRITVSTKRSQQTVIPNIGSRPRVRNIPSRISIYWTIVKPGDILLINSTGNLIAPRGYFKIRSGKSSIMRSDAPIGKCNSECITPNGSIPNDKPFQNVNRITYGACPRYVKQNTLKLATGMRNVPEKQTRGIFGAIAGFIENGWEGMVDGWYGFRHQNSEGIGQAADLKSTQAAINQINGKLNRLIGKTNEKFHQIEKEFSEVEGRIQDLEKYVEDTKIDLWSYNAELLVALENQHTIDLTDSEMNKLFERTKKQLRENAEDMGNGCFKIYHKCDNACIGSIRNGTYDHDVYRDEALNNRFQIKGVELKSGYKDWILWISFAISCFLLCVALLGFIMWACQKGNIRCNICI

SEQ ID NO: 11189 - protein, 566 aa, synthetic construct
  REGION 1..566: note = hemagglutinin__InfluenzaA__AHL89090
MKTIIALSYILCLVFAQKLPGNDNSTATLCLGHHAVPNGTIVKTITNDQIEVTNATELVQSSSTGGICDSPYQILDGENCTLIDALLGDPQCDGFQNKKWDLFVERSKAYSNCYPYDVPDYASLRSLVASSGTLEFNNESFNWTGVTQNGTSSACKRRSNNSFFSRLNWLTHLKFKYPALNVTMPNNEKFDKLYIWGVHHPGTDNDQIFLYAQASGRITVSTKRSQQTVIPNIGSRPRVRNIPSRISIYWTIVKPGDILLINSTGNLIAPRGYFKIRSGKSSIMRSDAPIGKCNSECITPNGSIPNDKPFQNVNRITYGACPRYVKQNTLKLATGMRNVPEKQTRGIFGAIAGFIENGWEGMVDGWYGFRHQNSEGIGQAADLKSTQAAINQINGKLNRLIGKTNEKFHQIEKEFSEVEGRIQDLEKYVEDTKIDLWSYNAELLVALENQHTIDLTDSEMNKLFERTKKQLRENAEDMGNGCFKIYHKCDNACIGSIRNGTYDHDVYRDEALNNRFQIKGVELKSGYKDWILWISFAISCFLLCVALLGFIMWACQKGNIRCNICI

SEQ ID NO: 11190 - protein, 566 aa, synthetic construct; identical to SEQ ID NO: 630
  REGION 1..566: note = hemagglutinin__InfluenzaA__AHL89102

SEQ ID NO: 11191 - protein, 566 aa, synthetic construct; identical to SEQ ID NO: 630
  REGION 1..566: note = hemagglutinin__InfluenzaA__AHL89114

SEQ ID NO: 11192 - protein, 566 aa, synthetic construct
  REGION 1..566: note = hemagglutinin__InfluenzaA__AHL89126
MKTIIALSYILCLVFAQKLPGNDNSTATLCLGHHAVPNGTIVKTITNDQIEVTNATELVQSSSTGGICDSPHQILDGENCTLIDALLGDPQCDGFQNKKWDLFVERSKAYSNCYPYDVPDYASLRSLVASSGTLEFNNENFNWTGVTQNGTSSACKRRSNNSFFSRLNWLTHLKFKYPALNVTMPNNEKFDKLYIWGVHHPGTDNDQIFLYAQASGRITVSTKRSQQTVIPNIGSRPRVRNIPSRISIYWTIVKPGDILLINSTGNLIAPRGYFKIRSGKSSIMRSDAPIGKCNSECITPNGSIPNDKPFQNVNRITYGACPRYVKQNTLKLATGMRNVPEKQTRGIFGAIAGFIENGWEGMVDGWYGFRHQNSEGIGQAADLKSTQAAINQINGKLNRLIGKTNEKFHQIEKEFSEVEGRIQDLEKYVEDTKIDLWSYNAELLVALENQHTIDLTDSEMNKLFERTKKQLRENAEDMGNGCFKIYHKCDNACIGSIRNGTYDHDVYRDEALNNRFQIKGVELKSGYKDWILWISFAISCFLLCVALLGFIMWACQKGNIRCNICI

SEQ ID NO: 11193 - protein, 566 aa, synthetic construct
  REGION 1..566: note = hemagglutinin__InfluenzaA__AHL89138
MKTIIALSYILCLVFAQKLPGNDNSTATLCLGHHAVPNGTIVKTITNDQIEVTNATELVQSSSTGEICDSPHQILDGENCTLIDALLGDPQCDGFQNKKWDLFVERSKAYSNCYPYDVPDYASLRSLVASSGTLEFNNESFNWTGVTQNGTSSACKRRSNNSFFSRLNWLTHLKFKYPALNVTMPNNEKFDKLYIWGVHHPGTDNDQIFLYAQSSGRITVSTKRSQQTVIPNIGSRPRVRNIPSRISIYWTIVKPGDILLINSTGNLIAPRGYFKIRSGKSSIMRSDAPIGKCNSECITPNGSIPNDKPFQNVNRITYGACPRYVKQNTLKLATGMRNVPEKQTRGIFGAIAGFIENGWEGMVDGWYGFRHQNSEGIGQAADLKSTQAAINQINGKLNRLIGKTNEKFHQIEKEFSEVEGRIQDLEKYVEDTKIDLWSYNAELLVALENQHTIDLTDSEMNKLFERTKKQLRENAEDMGNGCFKIYHKCDNACIGSIRNGTYDHDVYRDEALNNRFQIKGVELKSGYKDWILWISFAISCFLLCVALLGFIMWACQKGNIRCNICI

SEQ ID NO: 11194 - protein, 566 aa, synthetic construct
  REGION 1..566: note = hemagglutinin__InfluenzaA__AHL89150
MKTIIALSYILCLVFAQKLPGNDNSTATLCLGHHAVPNGTIVKTITNDQIEVTNATELVQSSSTGGICDSPHQILDGENCTLIDALLGDPQCDGFQNKKWDLFVERSKAYSNCYPYDVPDYASLRSLVASSGTLEFNNESFNWTGVTQNGTSSACKRRSNNSFFSRLNWLTHLKFKYPALNVTMPNNEKFDKLYIWGVHHPGTDNDQIFLYAQASGRITVSTKRSQQTVIPNIGSRPRVRNIPSRISIYWTIVKPGDILLINSTGNLIAPRGYFKIRSGKSSIMRSDAPIGKCNSECITPNGSIPNDKPFQNVNRITYGACPRYVKQNTLKLATGMRNVPEKQTRGIFGAIAGFIENGWEGMVDGWYGFRHQNSEGIGQAADLKSTQAAINQINGKLNRLIGKTNEKFHQIEKEFSEVEGRIQDLEKYVEDTKIDLWSYNAELLVALENQHTIDLTDSEMNKLFERTKKQLRENAEDMGNGCFKIYHKCDNACIGSIRNGTYDHDVYRDEALNNRFQIKGVELKSGYKDWILWISFAISCFLLCVALLVFIMWACQKGNIRCNICI

SEQ ID NO: 11195 - protein, 566 aa, synthetic construct
  REGION 1..566: note = hemagglutinin__InfluenzaA__AHL89162
MKTIIALSYILCLVFAQKLPGNDNSTATLCLGHHAVPNGTIVKTITNDQIEVTNATELVQSSSTGGICDSPHQILDGENCTLIDALLGDPQCDGFQNKKWDLFVERSKAYSNCYPYDVPDYASLRSLVASSGTLEFNNESFNWTGVTQNGTSSACKRRSNNSFFSRLNWLTHLKFKYPALNVTMPNNEKFDKLYIWGVHHPGTDNDQIFLYAQASGRITVSTKRSQQTVIPNIGSRPRVRNIPSRISIYWTIVKPGDILLINSTGNLIAPRGYFKIRSGKSSIMRSDAPIGKCNSECITPNGSIPNDKPFQNVNRITYGACPRYVKQNTLKLATGMRNVPEKQTRGIFGAIAGFIENGWEGMVDGWYGFRHQNSEGTGQAADLKSTQAATNQINGKLNRLIGKTNEKFHQIEKEFSEVEGRIQDLEKYVEDTKIDLWSYNAELLVALENQHTIDLTDSEMNKLFERTKKQLRENAEDMGNGCFKIYHKCDNACIGSIRNGTYDHDVYRDEALNNRFQIKGVELKSGYKDWILWISFAISCFLLCVALLGFIMWACQKGNIRCNICI

SEQ ID NO: 11196 - protein, 566 aa, synthetic construct
  REGION 1..566: note = hemagglutinin__InfluenzaA__AHL89174
MKTIIALSYTLCLVFAQKLPGNDNSTATLCLGHHAVPNGTIVKTITNDQIEVTNATELVQSSSTGGICDSPHQILDGENCTLIDALLGDPQCDGFQNKKWDLFVERSKAYSNCYPYDVPDYASLRSLVASSGTLEFNNESFNWTGVTQNGTSSACKRRSNNSFFSRLNWLTHLKFKYPALNVTMPNNEKFDKLYIWGVHHPGTDNDQIFLYAQASGRITVSTKRSQQTVIPNIGSRPRVRNIPSRISIYWTIVKPGDILLINSTGNLIAPRGYFKIRSGKSSIMRSDAPIGKCNSECITPNGSIPNDKPFQNVNRITYGACPRYVKQNTLKLATGMRNVPEKQTRGIFGAIAGFIENGWEGMVDGWYGFRHQNSEGIGQAADLKSTQAAINQINGKLNRLIGKTNEKFHQIEKEFSEVEGRIQDLEKYVEDTKIDLWSYNAELLVALENQHTIDLTDSEMNKLFERTKKQLRENAEDMGNGCFKIYHKCDNACIGSIRNGTYDHDVYRDEALNNRFQIKGVELKSGYKDWILWISFAISCFLLCVALLGFIMWACQKGNIRCNICI

SEQ ID NO: 11197 - protein, 566 aa, synthetic construct
  REGION 1..566: note = hemagglutinin__InfluenzaA__AHL89210
MKTIIALSYILCLVFAQKLPGNDNSTATLCLGHHAVPNGTIVKTITNDQIEVTNATELVQSSSTGEICDSPHQILDGENCTLIDALLGDPQCDGFQNKKWDLFVERSKAYSNCYPYDVPDYASLRSLVASSGTLEFNNESFNWTGVTQNGTSSACKRRSNNSFFSRLNWLTHLKFKYPALNVTMPNNEKFDKLYIWGVHHPGTDNDQIFLYAQASGRITVSTKRSQQTVIPNIGSRPRVRNIPSRISIYWTIVKPGDILLINSTGNLIAPRGYFKIRSGKSSIMRSDAPIGKCNSECITPNGSIPNDKPFQNVNRITYGACPRYVKQNTLKLATGMRNVPEKQTRGIFGAIAGFIENGWEGMVDGWYGFRHQNSEGIGQAADLKSTQAAINQINGKLNRLIGKTNEKFHQIEKEFSEVEGRIQDLEKYVEDTKIDLWSYNAELLVALENQHTIDLTDSEMNKLFERTKKQLRENAEDMGNGCFKIYHKCDNACIGSIRNGTYDHDVYRDEALNNRFQIKGVELKSGYKDWILWISFAISCFLLCVALLGFIMWACQKGNIRCNICI

SEQ ID NO: 11198 - protein, 566 aa, synthetic construct; identical to SEQ ID NO: 11197
  REGION 1..566: note = hemagglutinin__InfluenzaA__AHL89222

SEQ ID NO: 11199 - protein, 566 aa, synthetic construct
  REGION 1..566: note = hemagglutinin__InfluenzaA__AHL89234
MKTIIALSYILCLVFAQKLPGNDNSTATLCLGHHAVPNGTIVKTITNDQIEVTNATELVQSSSTGEICDSPHQILDGENCTLIDALLGDPQCDGFQNKKWDLFVERSKAYSNCYPYDVPDYASLRSLVASSGTLEFNNESFNWTGVTQNGTSSACKRRSNNSFFSRLNWLTHLKFKYPALNVTMPNNEKFDKLYIWGVHHPGTDNDQIFLYAQASGRITVSTKRSQQTVIPNIGSRPRVRNIPSRISIYWTIVKPGDILLINSTGNLIAPRGYFKIRSGKSSIMRSDAPIGKCNSECITPNGSIPNDKPFQNVNRITYGACPRYVKQNTLKLATGMRNVPEKQTRGIFGAIAGFIENGWEGMVDGWYGFRHQNSEGMGQAADLKSTQAAINQINGKLNRLIGKTNEKFHQIEKEFSEVEGRIQDLEKYVEDTKIDLWSYNAELLVALENQHTIDLTDSEMNKLFERTKKQLRENAEDMGNGCFKIYHKCDNACIGSIRNGTYDHDVYRDEALNNRFQIKGVELKSGYKDWILWISFAISCFLLCVALLGFIMWACQKGNIRCNICI

SEQ ID NO: 11200 - protein, 566 aa, synthetic construct
  REGION 1..566: note = hemagglutinin__InfluenzaA__AHL89246
MKTIIALSYILCLVFAQKLPGNDNSTATLCLGHHAVPNGTIVKTITNDQIEVTNATELVQSSSTGEICDSPHQILDGENCTLIDALLGDPQCDGFQNKKWDLFVERSKAYSNCYPYDVPDYASLRSLVASSGTLEFNNESFNWTGVTQNGTSSACKRRSNNSFFSRLNWLTHLKFKYPALNVTMPNNEKFDKLYIWGVHHPGTDNDQIFLYAQASGRITVSTKRSQQTVIPNIGSRPRVRNIPSRISIYWTIVKPGDILLINSTGNLIAPRGYFKIRSGKSSIMRSDAPIGKCNSECITPNGSIPNDKPFQNVNRITYGACPRYVKQNTLKLATGMRNVPEKQTRGIFGAIAGFIENGWEGMVDGWYGFRHQNSEGIGQAADLKSTQAAINQINGKLNRLIGKTNEKFHQIEKEFSEVEGRIQDLEKYVEDTKIDLWSYNAELLVALENQHTIDLTDSEMNKLFERTKKQLRENAEDMGNGCFKIYHKCGNACIGSIRNGTYDHDVYRDEALNNRFQIKGVELKSGYKDWILWISFAISCFLLCVALLGFIMWACQKGNIRCNICI

SEQ ID NO: 11201 - protein, 566 aa, synthetic construct
  REGION 1..566: note = hemagglutinin__InfluenzaA__AHL89258
MKTIIALSYILCLVFAQKLPGNDNSTATLCLGHHAVPNGTIVKTITNDQIEVTNATELVQSSSTGEICDSPHQILDGENCTLIDALLGDPQCDGFQNKKWDLFVERSKAYSNCYPYDVPDYASLRSLVASSGTLEFNNESFNWTGVTQNGTSSACKRRSNNSFFSRLNWLTHLKFKYQALNVTMPNNEKFDKLYIWGVHHPGTDNDQIFLYAQASGRITVSTKRSQQTVIPNIGSRPRVRNIPSRISIYWTIVKPGDILLINSTGNLIAPRGYFKIRSGKSSIMRSDAPIGKCNSECITPNGSIPNDKPFQNVNRITYGACPRYVKQNTLKLATGMRNVPEKQTRGIFGAIAGFIENGWEGMVDGWYGFRHQNSEGIGQAADLKSTQAAINQINGKLNRLIGKTNEKFHQIEKEFSEVEGRIQDLEKYVEDTKIDLWSYNAELLVALENQHTIDLTDSEMNKLFERTKKQLRENAEDMGNGCFKIYHKCDNACIGSIRNGTYDHDVYRDEALNNRFQIKGVELKSGYKDWILWISFAISCFLLCVVLLGFIMWACQKGNIRCNICI

SEQ ID NO: 11202 - protein, 566 aa, synthetic construct; identical to SEQ ID NO: 11197
  REGION 1..566: note = hemagglutinin__InfluenzaA__AHL89270

SEQ ID NO: 11203 - protein, 566 aa, synthetic construct; identical to SEQ ID NO: 11197
  REGION 1..566: note = hemagglutinin__InfluenzaA__AHL89282

SEQ ID NO: 11204 - protein, 566 aa, synthetic construct; identical to SEQ ID NO: 11197
  REGION 1..566: note = hemagglutinin__InfluenzaA__AHL89294

SEQ ID NO: 11205 - protein, 566 aa, synthetic construct; identical to SEQ ID NO: 11197
  REGION 1..566: note = hemagglutinin__InfluenzaA__AHL89306

SEQ ID NO: 11206 - protein, 566 aa, synthetic construct; identical to SEQ ID NO: 1581
  REGION 1..566: note = hemagglutinin__InfluenzaA__AHL89318

SEQ ID NO: 11207 - protein, 566 aa, synthetic construct
  REGION 1..566: note = hemagglutinin__InfluenzaA__AHL89330
MKTIIALSYILCLVFAQKLPGNDNSTATLCLGHHAVPNGTIVKTITNDQIEVTNATELVQSSSTGEICDSPHQILDGKNCTLIDALLGDPQCDGFQNKKWDLFVERSKAYSNCYPYDVPDYASLRSLVASSGTLEFNNESFNWTGVTQNGTSSACKRRSNNSFFSRLNWLTHLKFKYPALNVTMPNNEKFDKLYIWGVHHPGTDNDQIFLYAQASGRITVSTKRSQQTVIPNIGSRPRVRNIPSRISIYWTIVKPGDILLINSTGNLIAPRGYFKIRSGKSSIMRSDAPIGKCNSECITPNGSIPNDKPFQNVNRITYGACPRYVKQNTLKLATGMRNVPEKQTRGIFGAIAGFIENGWEGMVDGWYGFRHQNSEGIGQAADLKSTQAAINQINGKLNRLIGKTNEKFHQIEKEFSEVEGRIQDLEKYVEDTKIDLWSYNAELLVALENQHTIDLTDSEMNKLFERTKKQLRENAEDMGNGCFKIYHKCDNACIGSIRNGTYDHDVYRDEALNNRFQIKGVELKSGYKDWILWISFAISCFLLCVALLGFIMWACQKGNIRCNICI

SEQ ID NO: 11208 - protein, 566 aa, synthetic construct; identical to SEQ ID NO: 630
  REGION 1..566: note = hemagglutinin__InfluenzaA__AHL89342

SEQ ID NO: 11209 - protein, 566 aa, synthetic construct; identical to SEQ ID NO: 1561
  REGION 1..566: note = hemagglutinin__InfluenzaA__AHL89354

SEQ ID NO: 11210 - protein, 566 aa, synthetic construct
  REGION 1..566: note = hemagglutinin__InfluenzaA__AHL89366
MKTIIALSYILCLVFAQKLPGNDNSTATLCLGHHAVPNGTIVKTITNDQIEVTNATELVQSSSTGEICDSPHQILDGENCTLIDALLGDPQCDGFQNKKWDLFVERSKAYSNCYPYDVPDYASLRSLVASSGTLEFNNESFNWTGVTQNGTSSACKRRSNNSFFSRLNWLTHLKFKYPALNVTMPNNEKFDKLYIWGVHHPGTDNDQIFLYAQASGRITVSTKRSQQTVIPNIGSRPRVRNIPSRISIYWTIVKPGDILLINSTGNLIAPRGYFKIRSGKSSIMKSDAPIGKCNSECITPNGSIPNDKPFQNVNRITYGACPRYVKQNTLKLATGMRNVPEKQTRGIFGAIAGFIENGWEGMVDGWYGFRHQNSEGIGQAADLKSTQAAINQINGKLNRLIGKTNEKFHQIEKEFSEVEGRIQDLEKYVEDTKIDLWSYNAELLVALENQHTIDLTDSEMNKLFERTKKQLRENAEDMGNGCFKIYHKCDNACIGSIRNGTYDHDVYRDEALNNRFQIKGIELKSGYKDWILWISFAISCFLLCVVLLGFIMWACQKGNIRCNICI

SEQ ID NO: 11211 - protein, 566 aa, synthetic construct; identical to SEQ ID NO: 11197
  REGION 1..566: note = hemagglutinin__InfluenzaA__AHL89378

SEQ ID NO: 11212 - protein, 566 aa, synthetic construct; identical to SEQ ID NO: 1828
  REGION 1..566: note = hemagglutinin__InfluenzaA__AHL89390

SEQ ID NO: 11213 - protein, 566 aa, synthetic construct; identical to SEQ ID NO: 11197
  REGION 1..566: note = hemagglutinin__InfluenzaA__AHL89402

SEQ ID NO: 11214 - protein, 566 aa, synthetic construct; identical to SEQ ID NO: 1581
  REGION 1..566: note = hemagglutinin__InfluenzaA__AHL89414

SEQ ID NO: 11215 - protein, 566 aa, synthetic construct
  REGION 1..566: note = hemagglutinin__InfluenzaA__AHL89426
MKTIIALSYILCLVFAQKLPGNDNSTATLCLGHHAVPNGTIVKTITNDQIEVTNATELVQSSSTGEICDSPHQILDGENCTLIDALLGDPQCDGFQNKKWDLFVERSKAYSNCYPYDVPDYASLRSLVASSGTLEFNNESFNWTGVTQNGTSSACKRRSNNSFFSRLNWLTHLKFKYPALNVTMPNNEKFDKLYIWGVHHPGTDNDQIFLYAQASGRITVSTKRSQQTVIPNIGSRPRVRNIPSRISIYWTIVKPGDILFINSTGNLIAPRGYFKIRSGKSSIMRSDAPIGKCNSECITPNGSIPNDKPFQNVNRITYGACPRYVKQNTLKLATGMRNVPEKQTRGIFGAIAGFIENGWEGMVDGWYGFRHQNSEGIGQAADLKSTQAAINQINGKLNRLIGKTNEKFHQIEKEFSEVEGRIQDLEKYVEDTKIDLWSYNAELLVALENQHTIDLTDSEMNKLFERTKKQLRENAEDMGNGCFKIYHKCDNACIGSIRNGTYDHDVYRDEALNNRFQIKGVELKSGYKDWILWISFAISCFLLCVVLLGFIMWACQKGNIRCNICI

SEQ ID NO: 11216 - protein, 566 aa, synthetic construct; identical to SEQ ID NO: 11197
  REGION 1..566: note = hemagglutinin__InfluenzaA__AHL89438

SEQ ID NO: 11217 - protein, 566 aa, synthetic construct; identical to SEQ ID NO: 11197
  REGION 1..566: note = hemagglutinin__InfluenzaA__AHL89450

SEQ ID NO: 11218 - protein, 566 aa, synthetic construct; identical to SEQ ID NO: 11197
  REGION 1..566: note = hemagglutinin__InfluenzaA__AHL89462

SEQ ID NO: 11219 - protein, 566 aa, synthetic construct; identical to SEQ ID NO: 11197
  REGION 1..566: note = hemagglutinin__InfluenzaA__AHL89474

SEQ ID NO: 11220 - protein, 566 aa, synthetic construct; identical to SEQ ID NO: 1828
  REGION 1..566: note = hemagglutinin__InfluenzaA__AHL89486

SEQ ID NO: 11221 - protein, 566 aa, synthetic construct; identical to SEQ ID NO: 1581
  REGION 1..566: note = hemagglutinin__InfluenzaA__AHL89498

SEQ ID NO: 11222 - protein, 566 aa, synthetic construct; identical to SEQ ID NO: 1581
  REGION 1..566: note = hemagglutinin__InfluenzaA__AHL89510

SEQ ID NO: 11223 - protein, 566 aa, synthetic construct; identical to SEQ ID NO: 1581
  REGION 1..566: note = hemagglutinin__InfluenzaA__AHL89522

SEQ ID NO: 11224 - protein, 566 aa, synthetic construct
  REGION 1..566: note = hemagglutinin__InfluenzaA__AHL89534
MKTIIALSYILCLVFAQKLPGNDNSTATLCLGHHAVPNGTIVKTITNDQIEVTNATELVQSSSTGEICDSPHQILDGENCTLIDALLGDPQCDGFQNKKWDLFVERSKAYSNCYPYDVPDYASLRSLVASSGTLEFNNESFNWTGVTQNGTSSACKRRSNNSFFSRLNWLTHLKFKYPALNVTMPNNEKFDKLYIWGVHHPGTDNDQIFLYAQASGRITVSTKRSQQTVIPNIGSRPRVRNIPSRISIYWTIVKPGDILLINSTGNLIAPRGYFKIRSGKSSIMRSDAPIGKCNSECITPNGSIPNDKPFQNVNRITYGACPRYVKQNTLKLATGMRNVPEKQTRGIFGAIAGFIENGWEGMVDGWYGFRHQNSEGIGQAADLKSTQAAINQINGKLNRLIGKTNEKFHQIEKEFSEVEGRIQDLEKYVEDTKIDLWSYNAELLVALENQHTIDLTDSEMNKLFERTKKQLRENAEDMGNGCFKIYHKCDNACIGSIRNGTYDHDVYRDEALNNRFQIKGIELKSGYKDWILWISFAISCFLLCVVLLGFIMWACQKGNIRCNICI

SEQ ID NO: 11225 - protein, 565 aa, synthetic construct
  REGION 1..565: note = hemagglutinin__InfluenzaA__AHL89546
MKVKLLVLLCTFTATYADTICIGYHANNSTDTVDTVLEKNVTVTHSVNLLEDSHNGKLCLLKGIAPLQLGNCSVAGWILGNPECELLISKESWSYIVETPNPENGTCYPGYFADYEELREQLSSVSSFERFEIFPKESSWPNHTVTGVSASCSHNGKSSFYRNLLWLTGKNGLYPNLSKSYANNKEKEVLVLWGVHHPPNIGDQRALYHTESAYVSVVSSHYSRRFTPEIAKRPKVRDQEGRINYYWTLLEPGDTIIFEANGNLIAPRFAFALSRGFGSGIITSNAPMDECDAKCQTPQGAINSSLPFQNVHPVTIGECPKYVRSAKLRMVTGLRNIPSIQSRGLFGAIAGFIEGGWTGMVDGWYGYHHQNEQGSGYAADQKSTQNAINGITNKVNSVIEKMNTQFTAVGKEFNKLERRMENLNKKVDDGFLDIWTYNAELLVLLENERTLDFHDSNVKNLYEKVKSQLKNNAKEIGNGCFEFYHKCNDECMESVKNGTYDYPKYSEESKLNRERIDGVKLESMGVYQILAIYSTVASSLVLLVSLGAISFWMCSNGSLQCRICI

SEQ ID NO: 11226 - protein, 565 aa, synthetic construct; identical to SEQ ID NO: 1914
  REGION 1..565: note = hemagglutinin__InfluenzaA__AHL89558

SEQ ID NO: 11227 - protein, 565 aa, synthetic construct; identical to SEQ ID NO: 1914
  REGION 1..565: note = hemagglutinin__InfluenzaA__AHL89570

SEQ ID NO: 11228 - protein, 565 aa, synthetic construct; identical to SEQ ID NO: 1930
  REGION 1..565: note = hemagglutinin__InfluenzaA__AHL89582

SEQ ID NO: 11229 - protein, 565 aa, synthetic construct; identical to SEQ ID NO: 1930
  REGION 1..565: note = hemagglutinin__InfluenzaA__AHL89594

SEQ ID NO: 11230 - protein, 565 aa, synthetic construct; identical to SEQ ID NO: 1930
  REGION 1..565: note = hemagglutinin__InfluenzaA__AHL89606

SEQ ID NO: 11231 - protein, 565 aa, synthetic construct; identical to SEQ ID NO: 1914
  REGION 1..565: note = hemagglutinin__InfluenzaA__AHL89618

SEQ ID NO: 11232 - protein, 565 aa, synthetic construct; identical to SEQ ID NO: 1930
  REGION 1..565: note = hemagglutinin__InfluenzaA__AHL89630

SEQ ID NO: 11233 - protein, 565 aa, synthetic construct
  REGION 1..565: note = hemagglutinin__InfluenzaA__AHL89642
MKVKLLVLLCTFTATYADTICIGYHANNSTDTVDTVLEKNVTVTHSVNLLEDNHNGKLCLLKGIAPLQLGNCSVAGWILGNPECELLISKESWSYIVETPNPENGTCYPGYFADYEELREQLSSVSSFERFEIFPKESSWPNHTVTGVSASCSHNGKSSFYRNLLWLTGKNGLYPNLSKSYANNKEKEVLVLWGVHHPPNIGDQRALYHTENAYVSVVSSHYSRRFTPEIAKRPKVRDQEGRINYYWTLLEPGDTIIFEANGNLIAPRFAFALSRGFGSGIITSNAPMGECDAKCQTPQGAINSSLPFQNVHPVTIGECPKYVRSAKLRMVTGLRNIPSIQSRGLFGAIAGFIEGGWTGMVDGWYGYHHQNEQGSGYAADQKSTQNAINGITNKVNSVIEKMNTQFTAVGKEFNKLERRMENLNKKVDDGFLDIWTYNAELLVLLENERTLDFHDSNVKNLYEKVKSQLKNNAKEIGNGCFEFYHKCNDECMESVKNGTYDYPKYSEESKLNREKIDGVKLESMGVYQILAIYSTVASSLVLLVSLGAISFWMCSNGSLQCRICI

SEQ ID NO: 11234 - protein, 565 aa, synthetic construct; identical to SEQ ID NO: 1945
  REGION 1..565: note = hemagglutinin__InfluenzaA__AHL89654

SEQ ID NO: 11235 - protein, 565 aa, synthetic construct
  REGION 1..565: note = hemagglutinin__InfluenzaA__AHL89666
MKVKLLVLLCTFTATYADTICIGYHANNSTDTVDTVLEKNVTVTHSVNLLEDNHNGKLCLLKGIAPLQLGNCSVAGWILGNPECELLISKESWSYIVETPNPENGTCYPGYFADYEELREQLSSVSSFERFEIFPKESSWPNHTVTGVSASCSHNGKSSFYRNLLWLTGKNGLYPNLSKSYANNKEKEVLVLWGVHHPPNIGDQRALYHTENAYVSVVSSHYSRRFTPEIAKRPKVRDQEGRINYYWTLLEPGDTIIFEANGNLIAPRFAFALSRGFGSGIITSNAPMGECDAKCQTPQGAINSSLPFQNVHPVTIGECPKYVRSAKLRMVTGLRNIPSIQSRGLFGAIAGFIEGGWTGMVDGWYGYHHQNEQGSGYAADQKSTQNAINGITNKVNSVIEKMNTQFTAVGKEFNKLERRMENLNKKVDDGFLDIWTYNAELLVLLENERTLDFHDSNVKNLYEKVKSQLKNNAEEIGNGCFEFYHKCNDECMESVKNGTYDYPKYSEESKLNREKIDGVKLESMGVYQILAIYSTVASSLVLLVSLGAISFWMCSNGSLQCRICI

SEQ ID NO: 11236 - protein, 565 aa, synthetic construct
  REGION 1..565: note = hemagglutinin__InfluenzaA__AHL89678
MKVKLLVLLCTFTATYADTICIGYHANNSTDTVDTVLEKNVTVTHSVNLLEDSHNGKLCLLKGIAPLQLGNCSVAGWILGNPECELLISKESWSYIVETPNPENGTCYPGYFADYEELREQLSSVSSFERFEIFPKESSWPNHTVTGVSASCSHNGKSSFYRNLLWLTGKNGLYPNLSKSYANNKEKEVLVLWGVHHPPNIGDQRALYHTENAYVSVVSSHYSRRFTPEIAKRPKVRDQEGRINYYWTLLEPGDTIIFEANGNLIAPRFAFALSRGFGSGIITSNAPMGECDAKCQTPQGAINSSLPFQNVHPVTIGECPKYVRSAKLRMVTGLRNIPSIQSRGLFGAIAGFIEGGWTGMVDGWYGYHHQNEQGSGYAADQKSTQNAINGITNKVNSVIEKMNTQFTAVGKEFNKLERRMENLNKKVDDGFLDIWTYNAELLVLLENERTLDFHDSNVKNLYEKVKSQLKNNAKEIGNGCFEFYHKCNDECMESVKNGTYDYPKYSEESKLNRKKIDGVKLESMGVYQILAIYSTVASSLVLLVSLGAISFWMCSNGSLQCRICI

SEQ ID NO: 11237 - protein, 565 aa, synthetic construct
  REGION 1..565: note = hemagglutinin__InfluenzaA__AHL89690
MKVKLLVLLCTFTATYADTICIGYHANNSTDTVDTVLEKNVTVTHSVNLLEDSHNGKLCLLKGIAPLQLGNCSVAGWILGNPECELLISKESWSYIVEKPDPENGTCYPGHFADYEELREQLSSVSSFERFEIFPKESSWPNHTVTGVSASCSHNGKSSFYKNLLWLTGKNGLYPNLSKSYANNKEKEVLVLWGVHHPPNIGDQKALYHTENAYVSVVSSHYSRKFTPEIAKRPKVRDQEGRINYYWTLLEPGDTIIFEANGNLIAPRYAFALSRGFGSGIINSNAPMDKCDAKCQTPQGAINSSLPFQNVHPVTIGECPKYVRSAKLRMVTGLRNIPSIQSRGLFGAIAGFIEGGWTGMVDGWYGYHHQNEQGSGYAADQKSTQNAINGITNKVNSVIEKMNTQFTAVGKEFNKLERRMENLNKKVDDGFIDIWTYNAELLVLLENERTLDFHDSNVKNLYEKVKSQLKNNAKEIGNGCFEFYHKCNDECMESVKNGTYDYPKYSEESKLNREKIDGVKLESMGVYQILAIYSTVASSLVLLVSLGAISFWMCSNGSLQCRICI

SEQ ID NO: 11238 - protein, 565 aa, synthetic construct; identical to SEQ ID NO: 1945
  REGION 1..565: note = hemagglutinin__InfluenzaA__AHL89702

SEQ ID NO: 11239 - protein, 565 aa, synthetic construct; identical to SEQ ID NO: 1914
  REGION 1..565: note = hemagglutinin__InfluenzaA__AHL89714

SEQ ID NO: 11240 - protein, 565 aa, synthetic construct
  REGION 1..565: note = hemagglutinin__InfluenzaA__AHL89726
MKVKLLVLLCTFTATYADTICIGYHANNSTDTVDTVLEKNVTVTHSVNLLEDSHNGKLCLLKGIAPLQLGNCSVAGWILGNPECELLISKESWSYIVETPNPENGTCYPGYFADYEELREQLSSVSSFERFEIFPKESSWPNHTVTGVSASCSHNGKSSFYRNLLWLTGKNGLYPNLSKSYANNKEKEVLVLWGVHHPPNIGDQKALYHTENAYVSVVSSHYSRRFTPEIAKRPKVRDQEGRINYYWTLLEPGDTIIFEANGNLIAPRFAFALSRGFGSGIITSNAPMDECDAKCQTPQGAINSSLPFQNVHPVTIGECPKYVRSTKLRMVTGLRNIPSIQSRGLFGAIAGFIEGGWTGMVDGWYGYHHQNEQGSGYAADQKSTQNAINGITNKVNSVIEKMNTQFTAVGKEFNKLERRMENLNKKVDDGFLDIWTYNAELLVLLENERTLDFHDSNVKNLYEKVKSQLKNNAKEIGNGCFEFYHKCNDECMESVKNGTYDYPKYSEESKLNREKIDGVKLESMGVYQILAIYSTVASSLVLLVSLGAISFWMCSNGSLQCRICI

SEQ ID NO: 11241 - protein, 565 aa, synthetic construct
  REGION 1..565: note = hemagglutinin__InfluenzaA__AHL89750
MKVKLLVLLCTFTATYADTICIGYHANNSTDTVDTVLEKNVTVTHSVNLLEDSHNGKLCLLKGIAPLQLGNCSVAGWILGNPECELLISKESWSYIVETPNPENGTCYPGYFADYEELREQLSSVSSFERFEIFPKESSWPNHTVTGVSASCSHNGKSSFYRNLLWLTGKNGLYPNLSKSYANNKEKEVLVLWGVHHPPNIGDQRALYHTENAYVSVVSSHYSRRFTPEIAKRPKVRDQEGRINYYWTLLEPGDTIIFEANGNLIAPRFAFALSRGFGSGIITSNAPMDGCDAKCQTPQGAINSSLPFQNVHPVTIGECPKYVRSTKLRMVTGLRNIPSIQSRGLFGAIAGFIEGGWTGMVDGWYGYHHQNEQGSGYAADQKSTQNAINGITNKVNSVIEKMNTQFTAVGKEFNKLERRMENLNKKVDDGFLDIWTYNAELLVLLENERTLDFHDSNVKNLYEKVKSQLKNNAKEIGNGCFEFYHKCNDECMESVKNGTYDYPKYSEESKLNREKIDGVKLESMGVYQILAIYSTVASSLVLLVSLGAISFWMCSNGSLQCRICI

SEQ ID NO: 11242 - protein, 565 aa, synthetic construct; identical to SEQ ID NO: 1910
  REGION 1..565: note = hemagglutinin__InfluenzaA__AHL89762

SEQ ID NO: 11243 - protein, 565 aa, synthetic construct; identical to SEQ ID NO: 1956
  REGION 1..565: note = hemagglutinin__InfluenzaA__AHL89774

SEQ ID NO: 11244 - protein, 565 aa, synthetic construct; identical to SEQ ID NO: 1945
  REGION 1..565: note = hemagglutinin__InfluenzaA__AHL89786

SEQ ID NO: 11245 - protein, 565 aa, synthetic construct
  REGION 1..565: note = hemagglutinin__InfluenzaA__AHL89798
MKVKLLVLLCTFTATYADTICIGYHANNSTDTVDTVLEKNVTVTHSVNLLEDRHNGKLCLLKGIAPLQLGNCSVAGWILGNPECELLISKESWSYIVETPNPENGTCYPGYFADYEELREQLSSVSSFERFEIFPKESSWPNHTVTGVSASCSHNGKSSFYRNLLWLTGKNGLYPNLSRSYANNKEKEVLVLWGVHHPPSIGDQRALYHTENAYVSVVSSHYSRRFTPEIAKRPKVRDQEGRINYYWTLLEPGDTIIFEANGNLIAPRFAFALSRGFGSGIITSNAPMDECDAKCQTPQGAINSSLPFQNVHPVTIGECPKYVRSAKLRMVTGLRNIPSIQSRGLFGAIAGFIEGGWTGMVDGWYGYHHQNEQGSGYAADQKSTQNAINGITNKVNSVIEKMNTQFTAVGKEFNKLERRMENLNKKVDDGFLDIWTYNAELLVLLENERTLDFHDSNVKNLYEKVKSQLKNNAKEIGNGCFEFYHKCNDECMESVKNGTYDYPKYSEESKLNREKIDGVKLESMGVYQILAIYSTVASSLVLLVSLGAISFWMCSNGSLQCRICI

SEQ ID NO: 11246 - protein, 565 aa, synthetic construct
  REGION 1..565: note = hemagglutinin__InfluenzaA__AHL89810
MKVKLLVLLCTFTATYADTICIGYHANNSTDTVDTVLEKNVTVTHSVNLLEDSHNGKLCLLKGIAPLQLGNCSVAGWILGNPECELLISKESWSYIVETPNPENGTCYPGYFADYEELREQLSSVSSFERFEIFPKESSWPNHTVTGVSASCSHNGKSSFYRNLLWLTGKNGLYPNLSKSYANNKEKEVLVLWGVHHPPNIGDQRALYHTENAYVSVVSSHYSRRFTPEIAKRPKVRDQEGRINYYWTLLEPGDTIIFEANGNLIAPRFAFALSRGFGSGIITSNAPMGECDAECQTPQGAINSSLPFQNVHPVTIGECPKYVRSAKLRMVTGLRNIPSIQSRGLFGAIAGFIEGGWTGMVDGWYGYHHQNEQGSGYAADQKSTQNAINGITNKVNSVIEKMNTQFTAVGKEFNKLERRMENLNKKVDDGFLDIWTYNAELLVLLENERTLDFHDSNVKNLYEKVKSQLKNNAKEIGNGCFEFYHKCNDECMESVKNGTYDYPKYSEESKLNREKIDGVKLESMGVYQILAIYSTVASSLVLLVSLGAISFWMCSNGSLQCRICI

SEQ ID NO: 11247 - protein, 565 aa, synthetic construct
  REGION 1..565: note = hemagglutinin__InfluenzaA__AHL89822
MKVKLLVLLCTFTATYADTICIGYHANNSTDTVDTVLEKNVTVTHSVNLLEDRHNGKLCLLKGIAPLQLGNCSVAGWILGNPECELLISKESWSYIVETPNPENGTCYPGYFADYEELREQLSSVSSFERFEIFPKESSWPNHTVTGVSASCSHNGKSSFYRNLLWLTGKNGLYPNLSKSYANNKEKEVLVLWGVHHPPNIGDQRALYHTENAYVSVVSSHYSRRFTPEIAKRPKVRDQEGRINYYWTLLEPGDTIIFEANGNLIAPRFAFALSRGFGSGIITSNAPMDECDAKCQTPQGAINSSLPFQNVHPVTIGECPKYVRSAKLRMVTGLRNIPSIQSRGLFGAIAGFIEGGWTGMVDGWYGYHHQNEQGSGYAADQKSTQNAINGITNKVNSVIEKMNTQFTAVGKEFNKLERRMENLNKKVDDGFLDIWTYNAELLVLLENERTLDFHDSNVKNLYEKVKSQLKNNAKEIGNGCFEFYHKCNDECMESVKNGTYDYPKYSEESKLNREKIDGVKLESMGVYQILAIYSTVASSLVLLVSLGAISFWMCSNGSLQCRICI

SEQ ID NO: 11248 - protein, 565 aa, synthetic construct
  REGION 1..565: note = hemagglutinin__InfluenzaA__AHL89834
MKVKLLVLLCTFTATYADTICIGYHANNSTDTVDTVLEKNVTVTHSVNLLEDSHNGKLCLLKGIAPLQLGNCSVAGWILGNPECELLISKESWSYIVETPNPENGTCYPGNFADYEELREQLSSVSSFERFEIFPKESSWPNHTVTGVSASCSHNGKSSFYRNLLWLTGKNGLYPNLSKSYANNKEKEVLVLWGVHHPPNIGDQRALYHTENAYVSVVSSHYSRRFTPEIAKRPKVRDQEGRINYYWTLLEPGDTIIFEANGNLIAPRFAFALSRGFGSGIITSNAPMDECDAKCQTPQGAINSSLPFQNVHPVTIGECPKYVRSAKLRMVTGLRNIPSIQSRGLFGAIAGFIEGGWTGMVDGWYGYHHQNEQGSGYAADQKSTQNAINGITNKVNSVIEKMNTQFTAVGKEFNKLERRMENLNKKVDDGFLDIWTYNAELLVLLENERTLDFHDSNVKNLYEKVKSQLKNNAKEIGDGCFEFYHKCNDECMESVKNGTYDYPKYSEESKLNREKIDGVKLESMGVYQILAIYSTVASSLVLLVSLGAISFWMCSNGSLQCRICI

SEQ ID NO: 11249 - protein, 565 aa, synthetic construct; identical to SEQ ID NO: 1956
  REGION 1..565: note = hemagglutinin__InfluenzaA__AHL89846

SEQ ID NO: 11250 - protein, 566 aa, synthetic construct; identical to SEQ ID NO: 1928
  REGION 1..566: note = hemagglutinin__InfluenzaA__AHL89858

SEQ ID NO: 11251 - protein, 566 aa, synthetic construct; identical to SEQ ID NO: 1928
  REGION 1..566: note = hemagglutinin__InfluenzaA__AHL89870

SEQ ID NO: 11252 - protein, 566 aa, synthetic construct
  REGION 1..566: note = hemagglutinin__InfluenzaA__AHL89882
MKTIIALSYILCLVFAQKLPGNDNSTATLCLGHHAVPNGTIVKTITNDQIEVTNATELVQSSSTGGICDSPHQILDGENCTLIDALLGDPQCDGFQNKKWDLFVERSKAYSNCYPYDVPDYASLRSLVASSGTLEFNNESFNWTGVTQNGTSSACKRGSDNSFFSRLNWLTHLKFKYPALNVTMPNNEKFDKLYIWGVHHPGTDNDQIFLYAQASGRITVSTKRSQQTVIPNIGSRPRVRNIPSRISIYWTIVKPGDILLINSTGNLIAPRGYFKIRSGKSSIMRSDAPIGKCNSECITPNGSIPNDKPFQNVNRITYGACPRYVKQNTLKLATGMRNVPEKQTRGIFGAIAGFIENGWEGMVDGWYGFRHQNSEGIGQAADLKSTQAAINQINGKLNRLIGKTNEKFHQIEKEFSEVEGRIQDLEKYVEDTKIDLWSYNAELLVALENQHTIDLTDSEMNKLFERTKKQLRENAEDMGNGCFKIYHKCDNACIGSIRNGTYDHDVYRDEALNNRFQIKGVELKSGYKDWILWISFAISCFLLCVALLGFIMWACQKGNIRCNICI

SEQ ID NO: 11253 - protein, 566 aa, synthetic construct; identical to SEQ ID NO: 1928
  REGION 1..566: note = hemagglutinin__InfluenzaA__AHL89894

SEQ ID NO: 11254 - protein, 566 aa, synthetic construct
  REGION 1..566: note = hemagglutinin__InfluenzaA__AHL89906
MKTIIALSYILCLVYAQKLPGIDNSTATLCLGHHAVPNGTIVKTITNDQIEVTNATELVQSSSTGEICDSPHQILDGENCTLIDALLGDPQCDGFQNKKWDLFVERSKAYSNCYPYDVPDYASLRSLVASSGTLEFNNESFNWAGVTQNGTSSACKRGSNNSFFSRLNWLTHSKFKYPALNVTMPNNEEFDKLYIWGVHHPGTDNDQIFLYAQASGRITVSTKRSQQTVIPNIGSRPRVRNIPSRISIYWTIVKPGDILLINSTGNLIAPRGYFKIRSGKSSIMRSDAPIGKCNSECITPNGSIPNDKPFQNVNRITYGACPRYVRQNTLKLATGMRNVPEKQTRGIFGAIAGFIENGWEGMVDGWYGFRHQNSEGIGQAADLKSTQAAIDQINGKLNRLIGKTNEKFHQIEKEFSEVEGRIQDLEKYVEDTKIDLWSYNAELLVALENQHTIDLTDSEMNKLFEKTKKQLRENAEDMGNGCFKIYHKCDNACIGSIRNGTYDHDVYRDEALNNRFQIKGVELKSGYKDWILWISFAISCFLLCVALLGFIMWACQKGNIRCNICI

SEQ ID NO: 11255 - protein, 566 aa, synthetic construct
  REGION 1..566: note = hemagglutinin__InfluenzaA__AHL89918
MKTIIALSYILCLVFAQKLPGNDNSTATLCLGHHAVPNGTIVKTITNDQIEVTNATELVQSSSTGEICDSPHQILDGENCTLIDALLGDPQCDGFQNKKWDLFVERSKAYSNCYPYDVPDYASLRSLVASSGTLEFNNESFNWTGVTQNGTSSACIRRSNNSFFSRLNWLTHLKFKYPALNVTMPNNEKFDKLYIWGVHHPGTDNDQTFLYAQASGRITVSTKRSQQTVIPNIGSRPRVRNIPSRISIYWTIVKPGDILLINSTGNLIAPRGYFKIQSGKSSIMRSDAPIGKCNSECITPNGSIPNDKPFQNVNRITYGACPRYVKQNTLKLATGMRNVPEKQTRGIFGAIAGFIENGWEGMVDGWYGFRHQNSEGIGQAADLKSTQAAIDQINGKLNRLIGKTNEKFHQIEKEFSEVEGRIQDLEKYVEDTKIDLWSYNAELLVALENQHTIDLTDSEMNKLFEKTKKQLRENAEDMGNGCFKIYHKCDNACIGSIRNGTYDHDVYRDEALNNRFQIKGVELKSGYKDWILWISFAISCFLLCVALLGFIMWACQKGNIRCNICI

SEQ ID NO: 11256 - protein, 566 aa, synthetic construct
  REGION 1..566: note = hemagglutinin__InfluenzaA__AHL89930
MKTIIALSYILCLVFAQKLPGIDNSTATLCLGHHAVPNGTIVKTITNDQIEVTNATELVQSSSTGGICDSPHQILDGENCTLIDALLGDPQCDGFQNKKWDLFVERSKAYSNCYPYDVPDYASLRSLVASSGTLEFNNESFNWAGVTQNGTSSACKRGSNNSFFSRLNWLTHSKFKYPALNVTMPNNEEFDKLYIWGVHHPGTDNDQIFLYAQASGRITVSTKRSQQTVIPNIGSRPRVRNIPSRISIYWTIVKPGDILLINSTGNLIAPRGYFKIRSGKSSIMRSDAPISKCNSECITPNGSIPNDKPFQNVNRITYGACPRYVKQNTLKLATGMRNVPEKQTRGIFGAIAGFIENGWEGMVDGWYGFRHQNSEGMGQAADLKSTQAAIDQINGKLNRLIGKTNEKFHQIEKEFSEVEGRIQDLEKYVEDTKIDLWSYNAELLVALENQHTIDLTDSEMNKLFEKTKKQLRENAEDMGNGCFKIYHKCDNACIGSIRNGTYDHDVYRDEALNNRFQIKGVELKSGYKDWILWISFAISCFLLCVALLGFIMWACQKGNIRCNICI

SEQ ID NO: 11257 - protein, 566 aa, synthetic construct; identical to SEQ ID NO: 1915
  REGION 1..566: note = hemagglutinin__InfluenzaA__AHL89942

SEQ ID NO: 11258 - protein, 566 aa, synthetic construct
  REGION 1..566: note = hemagglutinin__InfluenzaA__AHL89954
MKTIIALSYILCLVFAQKLPGNDNSTATLCLGHHAVPNGTIVKTITNDQIEVTNATELVQSSSTGEICDSPHQILDGENCTLIDALLGDPQCDGFQNKKWDLFVERSKAYSNCYPYDVPDHASLRSLVASSGTLEFNNESFNWTGVTQNGTSSACIRRSNNSFFSRLNWLTHLKFKYPALNVTMPNNEKFDKLYIWGVHHPGTDNDQIFLYAQASGRITVSTKRSQQTVIPNIGSRPRVRNIPSRISIYWTIVKPGDILLINSTGNLIAPRGYFKIRSGKSSIMRSDAPIGKCNSECITPNGSIPNDKPFQNVNRITYGACPRYVKQNTLKLATGMRNVPEKQTRGIFGAIAGFIENGWEGMVDGWYGFRHQNSEGIGQAADLKSTQAAIDQINGKLNRLIGKTNEKFHQIEKEFSEVEGRIQDLEKYVEDTKIDLWSYNAELLVALENQHTIDLTDSEMNKLFEKTKKQLRENAEDMGNGCFKIYHKCDNACIGSIRNGTYDHDVYRDEALNNRFQIKGVELKSGYKDWILWISFAISCFLLCVALLGFIMWACQKGNIRCNICI

SEQ ID NO: 11259 - protein, 566 aa, synthetic construct; identical to SEQ ID NO: 1928
  REGION 1..566: note = hemagglutinin__InfluenzaA__AHL89966

SEQ ID NO: 11260 - protein, 566 aa, synthetic construct; identical to SEQ ID NO: 1928
  REGION 1..566: note = hemagglutinin__InfluenzaA__AHL89978

SEQ ID NO: 11261 - protein, 566 aa, synthetic construct; identical to SEQ ID NO: 1987
  REGION 1..566: note = hemagglutinin__InfluenzaA__AHL89990

SEQ ID NO: 11262 - protein, 566 aa, synthetic construct
  REGION 1..566: note = hemagglutinin__InfluenzaA__AHL90002
MKTIIALSYILCLVFAQKLPGIDNSTATLCLGHHAVPNGTIVKTITNDQIEVTNATELVQSSSTGGICDSPHQILDGENCTLIDALLGDPQCDGFQNKKWDLFVERSKAYSNCYPYDVPDYASLRSLVASSGTLEFNNESFNWAGVTQNGTSSACKRGSNNSFFSRLNWLTHSKFKYPALNVTMPNNEEFDKLYIWGVHHPGTDNDQIFLYAQASGRITVSTKRSQQTVIPNIGSRPRVRNIPSRISIYWTIVKPGDILLINSTGNLIAPRGYFKIRSGKSSIMRSDAPIGKCNSECITPNGSIPNDKPFQNVNRITYGACPRYVKQNTLKLATGMRNVPEKQTRGIFGAIAGFIENGWEGMVDGWYGFRHQNSEGMGQAADLKSTQAAIDQINGKLNRLIGKTNEKFHQIEKEFSEVEGRIQDLEKYVEDTKIDLWSYNAELLVALENQHTIDLTDSEMNKLFEKTKKQLRENAEDMGNGCFKIYHKCDNACIGSIRNGTYDHDVYRDEALNNRFQIKGVELKSGYKDWILWISFAISCFLLCVALLGFIMWACQKGNIRCNICI

SEQ ID NO: 11263 - protein, 566 aa, synthetic construct
  REGION 1..566: note = hemagglutinin__InfluenzaA__AHL90014
MKTIIALSYILCLVFAQKLPGNDNSTATLCLGHHAVPNGTIVKTITNDQVEVTNATELVQSSSTGEICDSPHQILDGENCTLIDALLGDPQCDGFQNKKWDLFVERSKAYSNCYPYDVPDYASLRSLVASSGTLEFNNESFNWTGVTQNGTSSACIRRSNNSFFSRLNWLTHLKFKYPALNVTMPNNEKFDKLYIWGVHHPGTDNDQIFLYAQASGRITVSTKRSQQTVIPNIGSRPRVRNIPSRISIYWTIVKPGDILLINSTGNLIAPRGYFKIRSGKSSIMRSDAPIGKCNSECITPNGSIPNDKPFQNVNRITYGACPRYVKQNTLKLATGMRNVPEKQTRGIFGAIAGFIENGWEGMVDGWYGFRHQNSEGIGQAADLKSTQAAIDQINGKLNRLIGKTNEKFHQIEKEFSEVEGRIQDLEKYVEDTKIDLWSYNAELLVALENQHTIDLTDSEMNKLFEKTKKQLRENAEDMGNGCFKIYHKCDNACIGSIRNGTYDHDVYRDEALNNRFQIKGVELKSGYKDWILWISFAISCFLLCVALLGFIMWACQKGNIRCNICI

SEQ ID NO: 11264 - protein, 566 aa, synthetic construct; identical to SEQ ID NO: 11263
  REGION 1..566: note = hemagglutinin__InfluenzaA__AHL90026

SEQ ID NO: 11265 - protein, 566 aa, synthetic construct
  REGION 1..566: note = hemagglutinin__InfluenzaA__AHL90050
MKTIIALSYILCLVFAQKLPGNDNSTATLCLGHHAVPNGTIVKTITNDQIEVTNATELVQSSSTGEICDSPHQILDGENCTLIDALLGDPQCDGFQNKKWDLFVERSKAYSNCYPYDVPDYASLRSLVASSGTLEFNNESFNWTGVTQNGTSSACIRRSNNSFFSRLNWLTHLKFKYPALNVTMPNNEKFDKLYIWGVHHPGTDNDQIFLYAQASGRITVSTKRSQQTVIPNIGSRPRVRNIPSRISIYWTIVKPGDILLINSTGNLIAPRGYFKIRSGKSSIMRSDAPIGKCNSECITPNGSIPNDKPFQNVNRITYGACPRYVKQNTLKLATGMRNVPEKQTRGIFGAIAGFIENGWEGMVDGWYGFRHQNSEGIGQAADLKSTQAAIDQINGKLNRLIGKTNEKFHQIEKEFSEVEGRIQDLEKYVEDTKIDLWSYNAELLVALENQHTIDLTDAEMNKLFEKTKKQLRENAEDMGNGCFKIYHKCDNACIGSIRNGTYDHDVYRDEALNNRFQIKGVELKSGYKDWILWISFAISCFLLCVALLGFIMWACQKGNIRCNICI

SEQ ID NO: 11266 - protein, 566 aa, synthetic construct
  REGION 1..566: note = hemagglutinin__InfluenzaA__AHL90062
MKTIIALSYILCLVFAQKLPENDNSTATLCLGHHAVPNGTIVKTITNDQIEVTNATELVQSSSTGEICDSPHQILDGENCTLIDALLGDPQCDGFQNKKWDLFVERSKAYSNCYPYDVPDYASLRSLVASSGTLEFNNESFNWTGVTQNGTSSACIRRSNNSFFSRLNWLTHLKFKYPALNVTMPNNEKFDKLYIWGVHHPGTDNDQIFLYAQASGRITVSTKRSQQTVIPNIGSRPRVRNIPSRISIYWTIVKPGDILLINSTGNLIAPRGYFKIRSGKSSIMRSDAPIGKCNSECITPNGSIPNYKPFQNVNRITYGACPRYVKQNTLKLATGMRNVPEKQTRGIFGAIAGFIENGWEGMVDGWYGFRHQNSEGIGQAADLKSTQAAIDQINGKLNRLIGKTNEKFHQIEKEFSEVEGRIQDLEKYVEDTKIDLWSYNAELLVALENQHTIDLTDSEMNKLFEKTKKQLRENAEDMGNGCFKIYHKCDNACIGSIRNGTYDHDVYRDEALNNRFQIKGVELKSGYKDWILWISFAISCFLLCVALLGFIMWACQKGNIRCNICI

SEQ ID NO: 11267 - protein, 566 aa, synthetic construct; identical to SEQ ID NO: 1928
  REGION 1..566: note = hemagglutinin__InfluenzaA__AHL90074

SEQ ID NO: 11268 - protein, 566 aa, synthetic construct
  REGION 1..566: note = hemagglutinin__InfluenzaA__AHL90086
MKTIIALSYILCLVFAQKLPGNDNSTATLCLGHHAVPNGTIVKTITNDQIEVTNATELVQSSSTGEICDSPHQILDGENCTLIDALLGDPQCDGFQNKKWDLFVERSKAYSNCYPYDVPDYASLRSLVASSGTLEFNNESFNWTGVTQNGTSSACIRRYNNSFFSRLNWLTHLKFKYPALNVTMPNNEKFDKLYIWGVHHPGTDNDQIFLYAQASGRITVSTKRSQQTVIPNIGSRPRVRNIPSRISIYWTIVKPGDILLINSTGNLIAPRGYFKIRSGKSSIMRSDAPIGKCNSECITPNGSIPNDKPFQNVNRITYGACPRYVKQNTLKLATGMRNVPEKQTRGIFGAIAGFIENGWEGMVDGWYGFRHQNSEGIGQAADLKSTQAAIDQINGKLNRLIGKTNEKFHQIEKEFSEVEGRIQDLEKYVEDTKIDLWSYNAELLVALENQHTIDLTDSEMNKLFEKTKKQLRENAEDMGNGCFKIYHKCDNACIGSIRNGTYDHDVYRDEALNNRFQIKGVELKSGYKDWILWISFAISCFLLCVALLGFIMWACQKGNIRCNICI

SEQ ID NO: 11269 - protein, 566 aa, synthetic construct
  REGION 1..566: note = hemagglutinin__InfluenzaA__AHL90098
MKTIIALSYILCLVFAQKLPGNDNSTATLCLGHHAVPNGTIVKTITNDQIEVTNATELVQSSSTGGICDSPHQILDGENCTLIDALLGDPQCDGFQNKKWDLFVERSKAYSNCYPYDVPDYASLRSLVASSGTLEFNNESFNWTGVTQNGTSSACKRGSDNSFFSRLNWLTHLKFKYPALNVTMPNNEKFDKLYIWGVHHPGTDNDQIFLYAQASGRITVSTKRSQQTVIPNIGSRPRVRNIPSRISIYWTIVKPGDILLINSTGNLIAPRGYFKIRSGKSSIMRSDAPIDKCNSECITPNGSIPNDKPFQNVNRITYGACPRYVKQNTLKLATGMRNVPEKQTRGIFGAIAGFIENGWEGMVDGWYGFRHQNSEGIGQAADLKSTQAAINQINGKLNRLIGKTNEKFHQIEKEFSEVEGRIQDLEKYVEDTKIDLWSYNAELLVALENQHTIDLTDSEMNKLFERTKKQLRENAEDMGNGCFKIYHKCDNACIGSIRNGTYDHDVYRDEALNNRFQIKGVELKSGYKDWILWISFAISCFLLCVALLGFIMWACQKGNIRCNICI

SEQ ID NO: 11270 - protein, 566 aa, synthetic construct
  REGION 1..566: note = hemagglutinin__InfluenzaA__AHL90110
MKTIIALSYILCLVFAQKLPGNDNSTATLCLGHHAVPNGTIVKTITNDQIEVTNATELVQSSSTGEICDSPHQILDGENCTLIDALLGDPQCDGFQNKKWDLFVERSKAYSNCYPYDVPDYASLRSLVASSGTLEFNNESFNWTGVTQNGTSSACIRRSNNSFFSRLNWLTHLKFKYPALNVTMPNNEKFDKLYIWGVHHPGTDNDQIFLYAQASGRITVSTKRSQQTVIPNIGSRPRVRNIPSRISIYWTIVKPGDILLINSTGNLIAPRGYFKIQSGKSSVMRSDAPIGKCNSECITPNGSIPNDKPFQNVNRITYGACPRYVKQNTLKLATGMRNVPEKQTRGIFGAIAGFIENGWEGMVDGWYGFRHQNSEGIGQAADLKSTQAAIDQINGKLNRLIGKTNEKFHQIEKEFSEVEGRIQDLEKYVEDTKIDLWSYNAELLVALENQHTIDLTDSEMNKLFEKTKKQLRENAEDMGNGCFKIYHKCDNACIGSIRNGTYDHDVYRDEALNNRFQIKGVELKSGYKDWILWISFAISCFLLCVALLGFIMWACQKGNIRCNICI

SEQ ID NO: 11271 - protein, 565 aa, synthetic construct; identical to SEQ ID NO: 4095
  REGION 1..565: note = hemagglutinin__InfluenzaA__AHL90122

SEQ ID NO: 11272 - protein, 565 aa, synthetic construct; identical to SEQ ID NO: 2488
  REGION 1..565: note = hemagglutinin__InfluenzaA__AHL90133

SEQ ID NO: 11273 - protein, 565 aa, synthetic construct; identical to SEQ ID NO: 4095
  REGION 1..565: note = hemagglutinin__InfluenzaA__AHL90145

SEQ ID NO: 11274 - protein, 565 aa, synthetic construct
  REGION 1..565: note = hemagglutinin__InfluenzaA__AHL90157
MKVKLLVLLCTFTATYADTICIGYHANNSTDTVDTVLEKNVTVTHSVNLLENSHNGKLCLLKGIAPLQLGNCSVAGWILGNPECELLISKESWSYIVEKPNPENGTCYPGHFADYEELREQLSSVSSFERFEIFPKESSWPNHTVTGVSASCSHNGESSFYRNLLWLTGKNGLYPNLSKSYANNKEKEVLVLWGVHHPPNIGDQKALYHTENAYVSVVSSHYSRKFTPEIAKRPKVRDQEGRINYYWTLLEPGDTIIFEANGNLIAPRYAFALSRGFGSGIINSNAPMDKCDAKCQTPQGAINSSLPFQNVHPVTIGECPKYVRSAKLRMVTGLRNIPSIQSRGLFGAIAGFIEGGWTGMVDGWYGYHHQNEQGSGYAADQKSTQNAINGITNKVNSVIEKMNTQFTAVGKEFNKLERRMENLNKKVDDGFIDIWTYNAELLVLLENERTLDFHDSNVKNLYEKVKIQLKNNAKEIGNGCFEFYHKCNDECMESVKNGTYDYPKYSEESKLNREKIDGVKLESMGVYQILAIYSTIASSLVLLVSLGAISFWMCSNGSLQCRICI

SEQ ID NO: 11275 - protein, 565 aa, synthetic construct; identical to SEQ ID NO: 4095
  REGION 1..565: note = hemagglutinin__InfluenzaA__AHL90169

SEQ ID NO: 11276 - protein, 565 aa, synthetic construct
  REGION 1..565: note = hemagglutinin__InfluenzaA__AHL90181
MKVKLLVLLCTFAATYADTICIGYHANNSTDTVDTVLEKNVTVTHSVNLLENSHNGKLCLLKGIAPLQLGNCSVAGWILGNPECELLISKESWSYIVEKPNPKNGTCYPGHFADYEELREQLSSVSSFERFEIFPKESSWPNHTVTGVSASCSHNGESSFYRNLLWLTGKNGLYPNLSKSYANNKEKEVLVLWGVHHPPNIGDQKALYHTENAYVSVVSSHYSRKFTPEIAKRPKVRDQEGRINYYWTLLEPGDTIIFEANGNLIAPRYAFALSRGFGSGIINSNAPMDKCDAKCQTPQGAINSSLPFQNVHPVTIGECPKYVRSAKLRMVTGLRNIPSIQSRGLFGAIAGFIEGGWTGMVDGWYGYHHQNEQGSGYAADQKSTQNAINGITNKVNSVIEKMNTQFTAVGKEFNKLERRMENLNKKVDDGFIDIWTYNAELLVLLENERTLDFHDSNVKNLYEKVKSQLKNNAKEIGNGCFEFYHKCNDECMESVKNGTYDYPKYSEESKLNREKIDGVKLESMGVYQILAIYSTVASSLVLLVSLGAISFWMCSNGSLQCRICI

SEQ ID NO: 11277 - protein, 565 aa, synthetic construct; identical to SEQ ID NO: 3170
  REGION 1..565: note = hemagglutinin__InfluenzaA__AHL90217

SEQ ID NO: 11278 - protein, 565 aa, synthetic construct; identical to SEQ ID NO: 3170
  REGION 1..565: note = hemagglutinin__InfluenzaA__AHL90229

SEQ ID NO: 11279 - protein, 565 aa, synthetic construct
  REGION 1..565: note = hemagglutinin__InfluenzaA__AHL90241
MKVKLLVLLCTFTATYADTICIGYHANNSTDTVDTVLEKNVTVTHSVNLLENSHNGKLCLLKGIAPLQLGNCSVAGWILGNPECELLIPKESWSYIVEKPNPENGTCYPGHFADYEELREQLSSVSSFERFEIFPKESSWPNHTVTGVSASCSHNGESSFYRNLLWLTGKNGLYPNLSKSYANNKEKEVLVLWGVHHPPNIGDQKALYHTENAYVSVVSSHYSRKFTPEIAKRPKVRDQEGRINYYWTLLEPGDTIIFEANGNLIAPRYAFALSRGFGSGIINSNAPMDKCDAKCQTPQGAINSSLPFQNVHPVTIGECPKYVRSAKLRMVTGLRNIPSIQSRGLFGAIAGFIEGGWTGMVDGWYGYHHQNEQGSGYAADQKSTQNAINGITNKVNSVIEKMNTQFTAVGKEFNKLERRMENLNKKVDDGFIDIWTYNAELLVLLENERTLDFHDSNVKNLYEKVKSQLKNNAKEIGNGCFEFYHKCNDECMESVKNGTYDYPKYSEESKLNREKIDGVKLESMGVYQILAIYSTVASSLVLLVSLGAISFWMCSNGSLQCRICI

SEQ ID NO: 11280 - protein, 565 aa, synthetic construct
  REGION 1..565: note = hemagglutinin__InfluenzaA__AHL90253
MKVKLLVLLCTFTATYADTICIGYHANNSTDTVDTVLEKNVTVTHSVNLLENSHNGKLCLLKGIAPLQLGNCSVAGWILGNPECELLISKESWSYIVEKPNPENGTCYPGHFADYEELREQLSSVSSFERFEIFPKGSSWPNHTVTGVSASCSHNGESSFYRNLLWLTGKNGLYPNLSKSYANNKEKEVLVLWGVHHPPNIGDQKTLYHTENAYVSVVSSHYSRKFTPEIAKRPKVRDQEGRINYYWTLLEPGDTIIFEANGNLIAPRYAFALSRGFGSGIINSNAPMDKCDAKCQTPQGAINSSLPFQNVHPVTIGECPKYVRSAKLRMVTGLRNIPSIQSRGLFGAIAGFIEGGWTGMVDGWYGYHHQNEQGSGYAADQKSTQNAINGITNKVNSVIEKMNTQFTAVGKEFNKLERRMENLNKKVDDGFIDIWTYNAELLVLLENERTLDFHDSNVKNLYEKVKSQLKNNAKEIGNGCFEFYHKCNDECMESVKNGTYDYPKYSEVSKLNREKIDGVKLESMGVYQILAIYSTVASSLVLLVSLGAISFWMCSNGSLQCRICI

SEQ ID NO: 11281 - protein, 565 aa, synthetic construct; identical to SEQ ID NO: 2488
  REGION 1..565: note = hemagglutinin__InfluenzaA__AHL90265

SEQ ID NO: 11282 - protein, 565 aa, synthetic construct
  REGION 1..565: note = hemagglutinin__InfluenzaA__AHL90277
MKVKLLVLLCTFTATYADTICIGYHANNSTDTVDTVLEKNVTVTHSVNLLENSHNGKLCLLKGIAPLQLGNCSVAGWILGNPECELLISKESWSYIVEKPNPENGTCYPGHFADYEELREQLSSVSSFERFEIFPKESSWPNHTVTGVSASCSHNGESSFYRNLLWLTGKNGLYPNLSKSYANNKEKEVLVLWGVHHPPNIVDQKTLYHTENAYVSVVSSHYSRKFTPEIAKRPKVRDQEGRINYYWTLLEPGDTIIFEANGNLIAPRYAFALSRGFGSGIINSNAPMDKCDAKCQTPQGAINSSLPFQNVHPVTIGECPKYVRSAKLRMVTGLRNIPSIQSRGLFGAIAGFIEGGWTGMVDGWYGYHHQNEQGSGYAADQKSTQNAINGITNKVNSVIEKMNTQFTAVGKEFNKLERRMENLNKKVDDGFIDIWTYNAELLVLLENERTLDFHDSNVKNLYEKVKSQLKNNAKEIGNGCFEFYHKCNDECMESVKNGTYDYPKYSEESKLNREKIDGVKLESMGVYQILAIYSTVASSLVLLVSLGAISFWMCSNGSLQCRICI

SEQ ID NO: 11283 - protein, 565 aa, synthetic construct
  REGION 1..565: note = hemagglutinin__InfluenzaA__AHL90289
MKVKLLVLLCTFTATYADTICIGYHANNSTDTVDTVLEKNVTVTHSVNLLENSHNGKLCLLKGIAPLQLGNCSVAGWILGNPECELLISKESWSYIVEKPNPENGTCYPGHFADYEELREQLSSVSSFERFEIFPKESSWPNHTVTGVSASCSHNGESSFYRNLLWLTGKNGLYPNLSKSYANNKEKEVLVLWGVHHPPNIGDQKALYHTENAYVSVVSSHYSRKFTPEIAKRPKVRDQEGRINYYWTLLEPRDTIIFEANGNLIAPRYAFALSRGFGSGIINSNAPMDKCDAKCQTPQGAINSSLPFQNVHPVTIGECPKYVRSAKLRMVTGLRNIPSIQSRGLFGAIAGFIEGGWTGMVDGWYGYHHQNEQGSGYAADQKSTQNAINGITNKVNSVIEKMNTQFTAVGKEFNKLERRMENLNKKVDDGFIDIWTYNAELLVLLENERTLDFHDSNVKNLYEKVKSQLKNNAKEIGNGCFEFYHKCNDECMESVKNGTYDYPKYSEESKLNREKIDGVKLESMGVYQILAIYSTVASSLVLLVSLGAISFWMCSNGSLQCRICI

SEQ ID NO: 11284 - protein, 565 aa, synthetic construct; identical to SEQ ID NO: 11283
  REGION 1..565: note = hemagglutinin__InfluenzaA__AHL90301

SEQ ID NO: 11285 - protein, 565 aa, synthetic construct
  REGION 1..565: note = hemagglutinin__InfluenzaA__AHL90325
MKVKLLVLLCTFTATYADTICIGYHANNSTDTVDTVLEKNVTVTHSVNLLENSHNGKLCLLKGIAPLQLGNCSVAGWILGNPECELLISKESWSYIVEKPNPENGTCYPGHFADYEELREQLSSVSSFERFEIFPKESSWPNHTVTGVSASCSHNGESSFYRNLLWLTGKNGLYPNLSKSYANNKEKEVLVLWGVHHPPNIGDQKALYHTENAYVSVVSSHYSRKFTPEIAKRPKVRDQEGRINYYWTLLEPGDTIIFEANGNLIAPRYAFALSRGFGSGIINSNAPMDKCDAKCQTPQGAINSSLPFQNVHPVTIGECPKYVRSAKLRMVTGLRNIPSIQSRGLFGAIAGFIEGGWTGMVDGWYGYHHQNEQGSGYAADQKSTQNAINGITNKVNSVIEKMNTQFTAVGKEFNKLERRMENLNKKVDDGFIDIWTYNAELLVLLENERTLDFHDSNVKNLYEKVKSQLKNNAKEMGNGCFEFYHKCNDECMESVKNGTYDYPKYSEESKLNREKIDGVKLESMGVYQILAIYSTVASSLVLLVSLGAISFWMCSNGSLQCRICI

SEQ ID NO: 11286 - protein, 565 aa, synthetic construct; identical to SEQ ID NO: 11285
  REGION 1..565: note = hemagglutinin__InfluenzaA__AHL90337

SEQ ID NO: 11287 - protein, 565 aa, synthetic construct; identical to SEQ ID NO: 2488
  REGION 1..565: note = hemagglutinin__InfluenzaA__AHL90349

SEQ ID NO: 11288 - protein, 565 aa, synthetic construct; identical to SEQ ID NO: 2488
  REGION 1..565: note = hemagglutinin__InfluenzaA__AHL90361

SEQ ID NO: 11289 - protein, 565 aa, synthetic construct; identical to SEQ ID NO: 11282
  REGION 1..565: note = hemagglutinin__InfluenzaA__AHL90373

SEQ ID NO: 11290 - protein, 566 aa, synthetic construct
  REGION 1..566: note = hemagglutinin__InfluenzaA__AHL90385
MKTIIALSYIQCLVFAQKFPGNDNSTATLCLGHHAVPNGTIVKTITNDQIEVTNATELVQSSSTGEICDSPHQILDGENCTLIDALLGDPQCDGFQNKNWDLFVERSKAYSNCYPYDVPDYASLRSLVASSGTLEFNNESFNWTGVTQNGTSSACIRRSNNSFFSRLNWLTHSKFKYPALNVTMPNNENFDKLYIWGVHHPGTDNDQIFLYAQASGRITVSTKRSQQTVIPNIGSRPRVRNIPSRISIYWTIVKPGDILLINSTGNLIAPRGYFKIRSGKSSIMRSDAPIGKCNSECITPNGSIPNDKPFQNVNRITYGACPRYVKQNTLKLATGMRNVPEKQTRGIFGAIAGFIENGWEGMVDGWYGFRHQNSEGIGQAADLKSTQAAIDQINGKLNRLIGRTNEKFHQIEKEFSEVEGRIQDLEKYVEDTKIDLWSYNAELLVALENQHTIDLTDSEMNKLFEKTKKQLRENAEDMGNGCFKIYHKCDNACIGSIRNGTYDHDVYRDEALNNRFQIKGVELKSGYKDWILWISFAISCFLLCIALLGFIMWACQKGNIRCNICI

SEQ ID NO: 11291 - protein, 566 aa, synthetic construct
  REGION 1..566: note = hemagglutinin__InfluenzaA__AHL90397
MKTIIALSYILCLVFAQKLPGNDNSTATLCLGHHAVPNGTIVKTITNDQIEVTNATELVQSSSTGEICDSPHQILDGENCTLIDALLGDPQCDGFQNKKWDLFVERSKAYSNCYPYDVPDYASLRSLVASSGTLEFNNESFNWTGVTQNGTSSACIRRSNNSFFSRLNWLTHLKFKYPALNVTMPNNEQFDKLYIWGVHHPGTDNDQIFLYAQASGRITVSTKRSQQTVIPNIGSRPRVRNIPSRISIYWTIVKPGDILLINSTGNLIAPRGYFKIRSGKSSIMRSDAPIGKCSSECITPNGSIPNDKPFQNVNRITYGACPRYVKQNTLKLATGMRNVPEKQTRGIFGAIAGFIENGWEGMVDGWYGFRHQNSEGRGQAADLKSTQAAIDQINGKLNRLIGKTNEKFHQIEKEFSEVEGRIQDLEKYVEDTKIDLWSYNAELLVALENQHTIDLTDSEMNKLFEKTKKQLRENAEDMGNGCFKIYHKCDNACIGSIRNGTYDHDVYRDEALNNRFQIKGVELKSGYKDWILWISFAISCFLLCVALLGFIMWACQKGNIRCNICI

SEQ ID NO: 11292 - protein, 566 aa, synthetic construct; identical to SEQ ID NO: 2434
  REGION 1..566: note = hemagglutinin__InfluenzaA__AHL90410

SEQ ID NO: 11293 - protein, 566 aa, synthetic construct
  REGION 1..566: note = hemagglutinin__InfluenzaA__AHL90422
MKTIIALSYILCLVFAQKLPGNDNSTATLCLGHHAVPNGTIVKTITNDQIEVTNATELVQSSSTGEICDSPHQILDGENCTLIDALLGDPQCDGFQNKKWDLFVERSKAYSNCYPYDVPDYASLRSLVASSGTLEFNNESFNWTGVTQNGTSSACIRRSNNSFFSRLNWLTHSKFKYPALNVTMPNNEEFDKLYIWGVHHPGTDNDQIFLYAQASGRITVSTKRSQQTVIPNIGSRPRVRNIPSRISIYWTIVKPGDILLINSTGNLIAPRGYFKIRSGKSSIMRSDAPIGKCNSECITPNGSIPNDKPFQNVNRITYGACPRYVKQNTLKLATGMRNVPEKQTRGIFGAIAGFIENGWEGMVDGWYGFRHQNSEGIGQAADLKSTQAAIDQINGKLNRLIGKTNEKFHQIEKEFSEVEGRIQDLEKYVEDTKIDLWSYNAELLVALENQHTIDLTDSEMSKLFEKTKKQLRENAEDMGNGCFKIYHKCDNTCIGSIRNGTYDHNVYRDEALNNRFQIKGVELKSGYKDWILWISFAISCFLLCVALLGFIMWACQKGNIRCNICI

SEQ ID NO: 11294 - protein, 566 aa, synthetic construct; identical to SEQ ID NO: 2434
  REGION 1..566: note = hemagglutinin__InfluenzaA__AHL90434

SEQ ID NO: 11295 - protein, 566 aa, synthetic construct; identical to SEQ ID NO: 2434
  REGION 1..566: note = hemagglutinin__InfluenzaA__AHL90446

SEQ ID NO: 11296 - protein, 566 aa, synthetic construct
  REGION 1..566: note = hemagglutinin__InfluenzaA__AHL90458
MKTIIALSYILCLVFAQKLPGNDNSTATLCLGHHAVPNGTIVKTITNDQIEVTNATELVQSSSTGEICDSPHQILDGENCALIDALLGDPQCDGFQNKKWDLFVERSKAYSNCYPYDVPDYASLRSLVASSGTLEFNNESFNWTGVTQNGTSSACIRRSNNSFFSRLNWLTHLKFKYPALNVTMPNNEQFDKLYIWGVHHPGTDNDQIFLYAQASGRITVSTKRSQQTVIPNIGSRPRVRNIPSRISIYWTIVKPGDILLINSTGNLIAPRGYFKIRSGKSSIMRSDAPIGKCNSECITPNGSIPNDKPFQNVNRITYGACPRYVKQNTLKLATGMRNVPEKQTRGIFGAIAGFIENGWEGMVDGWYGFRHQNSEGRGQAADLKSTQAAIDQINGKLNRLIGKTNEKFHQIEKEFSEVEGRIQDLEKYVEDTKIDLWSYNAELLVALENQHTIDLTDSEMNKLFEKTKKQLRENAEDMGNGCFKIYHKCDNACIGSIRNGTYDHDVYRDEALNNRFQIKGVELKSGYKDWILWISFAISCFLLCVALLGFIMWACQKGNIRCNICI

SEQ ID NO: 11297 - protein, 566 aa, synthetic construct; identical to SEQ ID NO: 2434
  REGION 1..566: note = hemagglutinin__InfluenzaA__AHL90470

SEQ ID NO: 11298 - protein, 566 aa, synthetic construct; identical to SEQ ID NO: 2434
  REGION 1..566: note = hemagglutinin__InfluenzaA__AHL90482

SEQ ID NO: 11299 - protein, 566 aa, synthetic construct; identical to SEQ ID NO: 2537
  REGION 1..566: note = hemagglutinin__InfluenzaA__AHL90494

SEQ ID NO: 11300 - protein, 566 aa, synthetic construct; identical to SEQ ID NO: 2537
  REGION 1..566: note = hemagglutinin__InfluenzaA__AHL90506

SEQ ID NO: 11301 - protein, 566 aa, synthetic construct
  REGION 1..566: note = hemagglutinin__InfluenzaA__AHL90518
MKTIIALSYILCLVFAQKLPGNDNSTATLCLGHHAVPNGTIVKTITNDQIEVTNATELVQSSSTGEICDSPHQILDGENCTLIDALLGDPQCDGFQNKKWDLFVERSKAYSNCYPYDVPDYASLRSLVASSGTLEFKNESFNWTGVTQNGTSSACIRRSNNSFFSRLNWLTHLKFKYPALNVTMPNKEKFDKLYIWGVHHPGTDNDQIFLYAQASGRITVSTKRSQQTVIPNIGSRPRVRNIPSRISIYWTIVKPGDILLINSTGNLIAPRGYFKIRSGKSSIMRSDAPIGKCNSECITPNGSIPNDKPFQNVNRITYGACPRYVKQNTLKLATGMRNVPEKQTRGIFGAIAGFIENGWEGMVDGWYGFRHQNSEGTGQAADLKSTQAAIDQINGKLNRLIGKTNEKFHQIEKEFSEVEGRIQDLEKYVEDTKIDLWSYNAELLVALENQHTIDLTDSEMNKLFEKTKKQLRENAEDMGNGCFKIYHKCDNACIGSIRNGTYDHDVYRDEALNNRFQIKGVELKSGYKDWILWISFAISCFLLCVALLGFIMWACQKGNIRCNICI

SEQ ID NO: 11302 - protein, 566 aa, synthetic construct; identical to SEQ ID NO: 3213
  REGION 1..566: note = hemagglutinin__InfluenzaA__AHL90530

SEQ ID NO: 11303 - protein, 566 aa, synthetic construct; identical to SEQ ID NO: 2434
  REGION 1..566: note = hemagglutinin__InfluenzaA__AHL90542

SEQ ID NO: 11304 - protein, 566 aa, synthetic construct; identical to SEQ ID NO: 2434
  REGION 1..566: note = hemagglutinin__InfluenzaA__AHL90554

SEQ ID NO: 11305 - protein, 566 aa, synthetic construct; identical to SEQ ID NO: 2434
  REGION 1..566: note = hemagglutinin__InfluenzaA__AHL90566

SEQ ID NO: 11306 - protein, 566 aa, synthetic construct; identical to SEQ ID NO: 2434
  REGION 1..566: note = hemagglutinin__InfluenzaA__AHL90578

SEQ ID NO: 11307 - protein, 566 aa, synthetic construct; identical to SEQ ID NO: 2537
  REGION 1..566: note = hemagglutinin__InfluenzaA__AHL90590

SEQ ID NO: 11308 - protein, 566 aa, synthetic construct; identical to SEQ ID NO: 2434
  REGION 1..566: note = hemagglutinin__InfluenzaA__AHL90602

SEQ ID NO: 11309 - protein, 566 aa, synthetic construct; identical to SEQ ID NO: 2434
  REGION 1..566: note = hemagglutinin__InfluenzaA__AHL90614

SEQ ID NO: 11310 - protein, 566 aa, synthetic construct
  REGION 1..566: note = hemagglutinin__InfluenzaA__AHL90638
MKTIIALSYILCLVFAQKLPGNDNSTATLCLGHHAVPNGTIVKTITNDQIEVTNATELVQSSSTGEICDSPHQILDGENCTLIDALLGDPQCDGFQNKKWDLFVERSKAYSNCYPYDVPDYASLRSLVASSGTLEFNNESFNWTGVTQNGTSSACIRRSNNSFFSRLNWLTHLKFKYPALNVTMPNNEQFDKLYIWGVHHPGTDNDQIFLYAQASGRITVSTKRSQQTVIPNIGSRPRVRNIPSRISIYWTIVKPGDILLINSTGNLIAPRGYFKIRSRKSSIMRSDAPIGKCNSECITPNGSIPNDKPFQNVNRITYGACPRYVKQNTLKLATGMRNVPEKQTRGIFGAIAGFIENGWEGMVDGWYGFRHQNSEGRGQAADLKSTQAAIDQINGKLNRLIGKTNEKFHQIEKEFSEVEGRIQDLEKYVEDTKIDLWSYNAELLVALENQHTIDLTDSEMNKLFEKTKKQLRENAEDMGNGCFKIYHKCDNACIGSIRNGTYDHDVYRDEALNNRFQIKGVELKSGYKDWILWISFAISCFLLCVALLGFIMWACQKGNIRCNICI

SEQ ID NO: 11311 - protein, 566 aa, synthetic construct
  REGION 1..566: note = hemagglutinin__InfluenzaA__AHL90650
MKTIIALSYILCLVFAQKLPGNDNSTATLCLGHHAVPNGTIVKTITNDQIEVTNATELVQSSSTGEICDSPHQILDGENCTLIDALLGDPQCDGFQNKKWDLFVERSKAYSNCYPYDVPDYASLRSLVASSGTLEFNNESFNWTGVTQNGTSSACIRRSNNSFFSRLNWLTHLKFKYPALNVTMPNNEQFDKLYIWGVHHPGTDNDQTFLYAQASGRITVSTKRSQQTVIPNIGSRPRVRNIPSRISIYWTIVKPGDILLINSTGNLIAPRGYFKIRSGKSSIMRSDAPIGKCNSECITPNGSIPNDKPFQNVNRITYGACPRYVKQNTLKLATGMRNVPEKQTRGIFGAIAGFIENGWEGMVDGWYGFRHQNSEGRGQAADLKSTQAAIDQINGKLNRLIGKTNEKFHQIEKEFSEVEGRIQDLEKYVEDTKIDLWSYNAELLVALENQHTIDLTDSEMNKLFEKTKKQLRENAEDMGNGCFKIYHKCDNACIGSIRNGTYDHDVYRDEALNNRFQIKGVELKSGYKDWILWISFAISCFLLCVALLGFIMWACQKGNIRCNICI

SEQ ID NO: 11312 - protein, 566 aa, synthetic construct; identical to SEQ ID NO: 2434
  REGION 1..566: note = hemagglutinin__InfluenzaA__AHL90662

SEQ ID NO: 11313 - protein, 566 aa, synthetic construct
  REGION 1..566: note = hemagglutinin__InfluenzaA__AHL90674
MKTIIALSYILCLVFAQKLPGNDNSTATLCLGHHAVPNGTIVKTITNDQIEVTNATELVQSSSTGEICDSPHQILDGENCTLIDALLGDPQCDGFQNKKWDLFVERSKAYSNCYPYDVPDYASLRSLVASSGTLEFNNESFNWTGVTQNGTSSACIRRSNNSFFSRLNWLTHLKFKYPALNVTMPNNEKFDKLYIWGVHHPGTDNDQIFLYAQASGRITVSTKRSQQTVIPNIGSRPRVRNIPSRISIYWTIVKPGDILLINSTGNLIAPRGYFKIRSGKSSIMRSDAPIGKCNSECITPNGSIPNDKPFQNVNRITYGACPRYVKQNTLKLATGMRNVPEKQTRGIFGAIAGFIENGWEGMVDGWYGFRHQNSEGIGQAADLKSTQAAIDQINGKLNRLIGKTNEKFHQIEKEFSEVEGRIQDLEKYVEDTKIDLWSYNAELLVALENQHTIDLTDSEMNKLFEKTKKQLRENAEDMGNGCFKIYHKCDNVCIGSIRNGTYDHDVYRDEALNNRFQIKGVELKSGYKDWILWISFAISCFLLCVALLGFIMWACQKGNIRCNICI

SEQ ID NO: 11314 - protein, 566 aa, synthetic construct
  REGION 1..566: note = hemagglutinin__InfluenzaA__AHL90686
MKTIIALSYILCLVFAQKLPGNDNSTATLCLGHHAVPNGTIVKTITNDQIEVTNATELVQSSSTGEICDSPHQILDGENCTLIDALLGDPQCDGFQNKKWDLFVERSKAYSNCYPYDVPDYASLRSLVASSGTLEFNNESFNWTGVTQNGTSSACIRRSNNSFFSRLNWLTHLKFKYPALNVTMPNNEQFDKLYIWGVHHPGTDNDQIFLYAQASGRITVSTKRSQQTVIPNIGSRPRVRNIPSRISIYWTIVKPGDILLINSTGNLIAPRGYFKIRSGKSSIMRSDAPIGKCNSECITPNGSIPNDKPFQNVNRITYGACPRYVKQNTLKLATGMRNVPEKQTRGIFGAIAGFIENGWEGMVDGWYGFRHQNSEGRGQAADLKSTQAAIDQINGKLNRLIGKTNEKFHQIEKEFSEVEGRIQDLEKYVEDTKIDLWSYNAELLVAMENQHTIDLTDSEMNKLFEKTKKQLRENAEDMGNGCFKIYHKCDNACIGSIRNGTYDHDVYRDEALNNRFQIKGVELKSGYKDWILWISFAISCFLLCVALLGFIMWACQKGNIRCNICI

SEQ ID NO: 11315 - protein, 566 aa, synthetic construct; identical to SEQ ID NO: 2434
  REGION 1..566: note = hemagglutinin__InfluenzaA__AHL90698

SEQ ID NO: 11316 - protein, 566 aa, synthetic construct; identical to SEQ ID NO: 2434
  REGION 1..566: note = hemagglutinin__InfluenzaA__AHL90710

SEQ ID NO: 11317 - protein, 565 aa, synthetic construct; identical to SEQ ID NO: 5972
  REGION 1..565: note = hemagglutinin__InfluenzaA__AHL90722

SEQ ID NO: 11318 - protein, 565 aa, synthetic construct
  REGION 1..565: note = hemagglutinin__InfluenzaA__AHL90746
MKVKLLVLLCTFTATYADTICIGYHANNSTDTVDTVLEKNVTVTHSVNLLENSHNGKLCLLKGIAPLQLGNCSVAGWILGNPECELLISKESWSYIVEKPNPENGTCYPGHFADYEELREQLSSVSSFKRFEIFPKESSWPNHTVTGVSASCSHNGESSFYRNLLWLTGKNGLYPNLSKSYANNKEKEVLVLWGVHHPPNIVDQKTLYRTENAYVSVVSSHYSRKFTPEIAKRPKVRDQEGRINYYWTLLEPGDTIIFEANGNLIAPRYAFALSRGFGSGIINSNAPMGKCDAKCQTPQGAINSSLPFQNVHPVTIGECPKYVRSAKLRMVTGLRNIPSIQSRGLFGAIAGFIEGGWTGMVDGWYGYHHQNEQGSGYAADQKSTQNAINGITNKVNSVIEKMNTQFTAVGKEFNKLERRMENLNKKVDDGFIDIWTYNAELLVLLENERTLDFHDSNVKNLYEKVKSQLKNNAKEIGNGCFEFYHKCNDECMESVKNGTYDYPKYSEESKLNREKIDGVKLESMGVYQILAIYSTVASSLVLLVSLGAISFWMCSNGSLQCRICI

SEQ ID NO: 11319 - protein, 565 aa, synthetic construct; identical to SEQ ID NO: 3131
  REGION 1..565: note = hemagglutinin__InfluenzaA__AHL90758

SEQ ID NO: 11320 - protein, 565 aa, synthetic construct
  REGION 1..565: note = hemagglutinin__InfluenzaA__AHL90770
MKVKLLVLLCTFTATYADTICIGYHANNSTDTVDTVLEKNVTVTHSVNLLENSHNGKLCLLKGIAPLQLGNCSVAGWILGNPECELLISKESWSYIVEKPNPENGTCYPGHFADYEELREQLSSVSSFERFEIFPKDSSWPNHTVTGVSASCSHNGESSFYRNLLWLTGKNGLYPNLSKSYANNKEKEVLVLWGVHHPPSINDQKTLYHTENAYVSVVSSHHSRKFTPEIAKRPKVRDQEGRINYYWTLLEPGDTIIFEANGNLIAPRYAFALSRGFGSGIINSNAPMDKCDAKCQTPQGAINSSLPFQNVHPVTIGECPKYVRSAKLRMVTGLRNIPSIQSRGLFGAIAGFIEGGWTGMVDGWYGYHHQNEQGSGYAADQKSTQNAINGITNKVNSVIEKMNTQFTAVGKEFNKLERRMENLNKKVDDGFIDIWTYNAELLVLLENERTLDFHDSNVKNLYEKVKSQLKNNAKEIGNGCFEFYHKCNDECMESVKNGTYDYPKYSEESKLNREKIDGVKLESMGVYQILTIYSTVASSLVLLVSLGAISFWMCSNGSLQCRICI

SEQ ID NO: 11321 - protein, 565 aa, synthetic construct; identical to SEQ ID NO: 3616
  REGION 1..565: note = hemagglutinin__InfluenzaA__AHL90782

SEQ ID NO: 11322 - protein, 565 aa, synthetic construct
  REGION 1..565: note = hemagglutinin__InfluenzaA__AHL90794
MKVKLLVLLCTFTATYADTICIGYHANNSTDTVDTVLEKNVTVTHSVNLLENSHNGKLCLLKGIAPLQLGNCSVAGWILGNPECELLISKESWSYIVEKPNPENGTCYPGHFADYEELREQLSSVSSFERFEIFPKESSWPNHTVTGVSASCSHNGESSFYRNLLWLTGKNGLYPNLSKSYANNKEKEVLVLWGVHHPPNIGDQNTLYHTENAYVSVVSSHYSRKFTPEIAKRPKVRDQEGRINYYWTLLEPGDTIIFEANGNLIAPRYAFALSRGFGSGIINSNAPMDKCDAKCQTPQGAINSSLPFQNVHPVTIGECPKYVRSAKLRMVTGLRNIPSIQSRGLFGAIAGFIEGGWTGMVDGWYGYHHQNEQGSGYAADQKSTQNAINGITNKVNSVIEKMNTQFTAVGKEFNKLERRMENLNKKVDDGFIDIWTYNAELLVLLENERTLDFHDSNVKNLYEKVKSQLKNNAKEIGNGCFEFYHKCNDECMESVKNGTYDYPKYSEESKLNREKIDGVKLESMGVYQILAIYSTVASSLVLLVSLGAISFWMCSNGSLQCRICI

SEQ ID NO: 11323 - protein, 565 aa, synthetic construct
  REGION 1..565: note = hemagglutinin__InfluenzaA__AHL90806
MKVKLLVLLCTFTATYADTICIGYHANNSTDTVDTVLEKNVTVTHSVNLLENSHNGKLCLLKGIAPLQLGNCSVAGWILGNPECELLISKESWSYIVEKPNPENGTCYPGHFADYEELREQLSSVSSFERFEIFPKESSWPNHTVTGVSASCSHNGESSFYRNLLWLTGKNGLYPNLSKSYANNKEKEVLVLWGVHHPPNIVDQKTLYRTENAYVSVVSSHYSRKFTPEIAKRPKVRDQEGRINYYWTLLEPGDTIIFEANGNLIAPRYAFALSRGFGSGIINSNAPMDKCDAKCQTPQGAINSSLPFQNVHPVTIGECPKYVRSAKLRMVTGLRNIPSIQSRGLFGAIAGFIEGGWTGMVDGWYGYHHQNEQGSGYAADQKSTQNAINGITNKVNSVIEKMNTQFTAVGKEFNKLERRMENLNKKVDDGFIDIWTYNAELLVLLENERTLDFHDSNVKNLYEKVKSQLKNNAKEIGNGCFEFYHKCNDECMESVKNGTYDYPKYSEESKLNREKIDGVKLESMGVYQILAIYSTVASSLVLLISLGAISFWMCSNGSLQCRICI

SEQ ID NO: 11324 - protein, 565 aa, synthetic construct; identical to SEQ ID NO: 5972
  REGION 1..565: note = hemagglutinin__InfluenzaA__AHL90818

SEQ ID NO: 11325 - protein, 565 aa, synthetic construct; identical to SEQ ID NO: 5972
  REGION 1..565: note = hemagglutinin__InfluenzaA__AHL90830

SEQ ID NO: 11326 - protein, 565 aa, synthetic construct; identical to SEQ ID NO: 3131
  REGION 1..565: note = hemagglutinin__InfluenzaA__AHL90842

SEQ ID NO: 11327 - protein, 565 aa, synthetic construct; identical to SEQ ID NO: 5513
  REGION 1..565: note = hemagglutinin__InfluenzaA__AHL90854

SEQ ID NO: 11328 - protein, 565 aa, synthetic construct; identical to SEQ ID NO: 3131
  REGION 1..565: note = hemagglutinin__InfluenzaA__AHL90866

SEQ ID NO: 11329 - protein, 565 aa, synthetic construct; identical to SEQ ID NO: 5513
  REGION 1..565: note = hemagglutinin__InfluenzaA__AHL90878

SEQ ID NO: 11330 - protein, 565 aa, synthetic construct; identical to SEQ ID NO: 5972
  REGION 1..565: note = hemagglutinin__InfluenzaA__AHL90890

SEQ ID NO: 11331 - protein, 565 aa, synthetic construct; identical to SEQ ID NO: 5513
  REGION 1..565: note = hemagglutinin__InfluenzaA__AHL90902

SEQ ID NO: 11332 - protein, 565 aa, synthetic construct; identical to SEQ ID NO: 3131
  REGION 1..565: note = hemagglutinin__InfluenzaA__AHL90914

SEQ ID NO: 11333 - protein, 565 aa, synthetic construct; identical to SEQ ID NO: 5513
  REGION 1..565: note = hemagglutinin__InfluenzaA__AHL90938

SEQ ID NO: 11334 - protein, 565 aa, synthetic construct; identical to SEQ ID NO: 5513
  REGION 1..565: note = hemagglutinin__InfluenzaA__AHL90950

SEQ ID NO: 11335 - protein, 565 aa, synthetic construct; identical to SEQ ID NO: 5513
  REGION 1..565: note = hemagglutinin__InfluenzaA__AHL90962

SEQ ID NO: 11336 - protein, 565 aa, synthetic construct
  REGION 1..565: note = hemagglutinin__InfluenzaA__AHL90974
MKVKLLVLLCTFTATYADTICIGYHANNSTDTVDTVLEKNVTVTHSVNLLENSHNGKLCLLKGIAPLQLGNCSVAGWILGNPECELLISKESWSYIVEKPNPENGTCYPGHFADYEELREQLSSVSSFERFEIFPKESSWPNHTVTGVSASCSHNGESSFYRNLLWLTGKNGLYPNLSKSYANNKEKEVLVLWGVHHPPSISDQKTLYHTENAYVSVVSSHYSRKFTPEVAKRPKVRDQEGRINYYWTLLEPGDTIIFEANGNLIAPRYAFALSRGFGSGIINSNAPMDKCDAKCQTPQGAINSSLPFQNVHPVTIGECPKYVRSAKLRMVTGLRNIPSIQSRGLFGAIAGFIEGGWTGMVDGWYGYHHQNEQGSGYAADQKSTQNAINGITNKVNSVIEKMNTQFTAVGKEFNKLERRMENLNKKVDDGFIDIWTYNAELLVLLENERTLDFHDSNVKNLYEKVKGQLKNNAKEIGNGCFEFYHKCNDECMESVKNGTYDYPKYSEESKLNREKIDGVKLESMGVYQILAIYSTVASSLVLLVSLGAISFWMCSNGSLQCRICI

SEQ ID NO: 11337 - protein, 565 aa, synthetic construct
  REGION 1..565: note = hemagglutinin__InfluenzaA__AHL90986
MKVKLLVLLCTFTATYADTICIGYHANNSTDTVDTVLEKNVTVTHSVNLLENSHNGKLCLLKGIAPLQLGNCSVAGWILGNPECELLISKESWSYIVEKPNPENGTCYPGHFADYEELREQLSSVSSFERFEIFPKESSWPNHTVTGVSASCSHNGESSFYRNLLWLTVKNGLYPNLSKSYANNKEKEVLVLWGVHHPPNIVDQKTLYRTENAYVSVVSSHYSRKFTPEIAKRPKVRDQEGRINYYWTLLEPGDTIIFEANGNLIAPRYAFALSKGFGSGIINSNAPMDKCDAKCQTPRGAINSSLPFQNVHPVTIGECPKYVRSAKLRMVTGLRNIPSIQSRGLFGAIAGFIEGGWTGMVDGWYGYHHQNEQGSGYAADQKSTQNAINGITNKVNSVIEKMNTQFTAVGKEFNKLERRMENLNKKVDDGFIDIWTYNAELLVLLENERTLDFHDSNVKNLYEKVKSQLKNNAKEIGNGCFEFYHKCNDECMESVKNGTYDYPKYSEESKLNREKIDGVKLESMGVYQILAIYSTVASSLVLLVSLGAISFWMCSNGSLQCRICI

SEQ ID NO: 11338 - protein, 565 aa, synthetic construct
  REGION 1..565: note = hemagglutinin__InfluenzaA__AHL91010
MKVKLLVLLCTFTATYADTICIGYHANNSTDTVDTVLEKNVTVTHSVNLLENSHNGKLCLLKGIAPLQLGNCSVAGWILGNPECELLISKESWSYIVEKPNPENGTCYPGHFADYEELREQLSSVSSFERFEIFPKDSSWPNHTVTGVSASCSHNGESSFYRNLLWLTGKNGLYPNLSKSYANNKEKEVLVLWGVHHPPSINDQKTLYHTENAYVSVVSSHYSRKFTPEIAKRPKVRDQEGRINYYWTLLEPGDTIIFEANGNLIAPRYAFALSRGFGSGIINSNAPMDKCDAKCQTPQGAINSSLPFQNVHPVTIGECPKYVRSAKLRMVTGLRNIPSIQSRGLFGAIAGFIEGGWTGMVDGWYGYHHQNEQGSGYAADQKSTQNAINGITNKVNSVIEKMNTQFTAVGKEFNKLERRMENLNKKVDDGFIDIWTYNAELLVLLENERTLDFHDSNVKNLYEKVKSQLKNNAKEIGNGCFEFYHKCNDECMESVKNGTYDYPKYSEESKLNREKIDGVKLESMGVYQILTIYSTVASSLVLLVSLGAISFWMCSNGSLQCRICI

SEQ ID NO: 11339 - protein, 565 aa, synthetic construct
  REGION 1..565: note = hemagglutinin__InfluenzaA__AHL91022
MKVKLLVLLCTFTATYADTICIGYHANNSTDTVDTVLEKNVTVTHSVNLLENSHNGKLCLLKGIAPLQLGNCSVAGWILGNPECELLISKESWSYIVEKPNPENGTCYPGHFADYEELREQLSSVSSFERFEIFPKDSSWPNHTVTGVSASCSHNGENSFYRNLLWLTGKNGLYPNLSKSYANNKEKEVLVLWGVHHPPSINDQKTLYHTENAYVSVVSSHYSRKFTPEIAKRPKVRDQEGRINYYWTLLEPGDTIIFEANGNLIAPRYAFALSRGFGSGIINSNAPMDKCDAKCQTPQGAINSSLPFQNVHPVTIGECPKYVRSAKLRMVTGLRNIPSIQSRGLFGAIAGFIEGGWTGMVDGWYGYHHQNEQGSGYAADQKSTQNAINGITNKVNSVIEKMNTQFTAVGKEFNKLERRMENLNKKVDDGFIDIWTYNAELLVLLENERTLDFHDSNVKNLYEKVKSQLKNNAKEIGNGCFEFYHKCNDECMESVKNGTYDYPKYSEESKLNREKIDGVKLESMGVYQILTIYSTVASSLVLLVSLGAISFWMCSNGSLQCRICI

SEQ ID NO: 11340 - protein, 566 aa, synthetic construct; identical to SEQ ID NO: 2434
  REGION 1..566: note = hemagglutinin__InfluenzaA__AHL91034

SEQ ID NO: 11341 - protein, 566 aa, synthetic construct; identical to SEQ ID NO: 5500
  REGION 1..566: note = hemagglutinin__InfluenzaA__AHL91046

SEQ ID NO: 11342 - protein, 566 aa, synthetic construct; identical to SEQ ID NO: 11314
  REGION 1..566: note = hemagglutinin__InfluenzaA__AHL91058

SEQ ID NO: 11343 - protein, 566 aa, synthetic construct
  REGION 1..566: note = hemagglutinin__InfluenzaA__AHL91070
MKTIIALSYILCLVFAQKLPGNDNSMATLCLGHHAVPNGTIVKTITNDQIEVTNATELVQSSSTGEICDSPHQILDGENCTLIDALLGDPQCDGFQNKKWDLFVERSKAYSNCYPYDVPDYASLRSLVASSGTLEFNNESFNWTGVTQNGTSSACMRRSNNSFFSRLNWLTHLKFKYPALNVTMPNNEQFDKLYIWGVHHPGTDNDQIFLYAQASGRITVSTKRSQQTVIPNIGSRPRVRNIPSRISIYWTIVKPGDILLINSTGNLIAPRGYFKIRSGKSSIMRSDAPIGKCNSECITPNGSIPNDKPFQNVNRITYGACPRYVKQNTLKLATGMRNVPEKQTRGIFGAIAGFIENGWEGMVDGWYGFRHQNSEGRGQAADLKSTQAAIDQINGKLNRLIGKTNEKFHQIEKEFSEVEGRIQDLEKYVEDTKIDLWSYNAELLVALENQHTIDLTDSEMNKLFEKTKKQLRENAEDMGNGCFKIYHKCDNACIGSIRNGTYDHDVYRDEALNNRFQIKGVELKSGYKDWILWISFAISCFLLCVALLGFIMWACQKGNIRCNICI

SEQ ID NO: 11344 - protein, 566 aa, synthetic construct
  REGION 1..566: note = hemagglutinin__InfluenzaA__AHL91082
MKTIIALSYILCLVFAQKLPGNDNSTATLCLGHHAVPNGTIVKTITNDQIEVTNATELVQSSSTGEICDSPHQILDGENCTLIDALLGDPQCDGFQNKKWDLFVERSKAYSNCYPYDVPDYASLRSLVASSGTLEFNNESFNWTGVTQNGTSSACIRRSNNSFFSRLNWLTHLKFKYPALNVTMPNNEQFDKLYIWGVHHPGTDNDQIFLYAQASGRITVSTKRSQQTVIPNIGSRPRVRNIPSRISIYWTIVKPGDILLINSTGNLIAPRGYFKIRSGKSSIMRSDAPIGKCNSECITPNGSIPNDKPFQNVNRITYGACPIYVKQNTLKLATGMRNVPEKQTRGIFGAIAGFIENGWEGMVDGWYGFRHQNSEGRGQAADLKSTQAAIDQINGKLNRLIGKTNEKFHQIEKEFSEVEGRIQDLEKYVEDTKIDLWSYNAELLVALENQHTIDLTDSEMNKLFEKTKKQLRENAEDMGNGCFKIYHKCDNACIGSIRNGTYDHDVYRDEALNNRFQIKGVELKSGYKDWILWISFAISCFLLCVALLGFIMWACQKGNIRCNICI

SEQ ID NO: 11345 - protein, 566 aa, synthetic construct; identical to SEQ ID NO: 5419
  REGION 1..566: note = hemagglutinin__InfluenzaA__AHL91094

SEQ ID NO: 11346 - protein, 566 aa, synthetic construct
  REGION 1..566: note = hemagglutinin__InfluenzaA__AHL91106
MKTIIALSYILCLVFAQKLPGNDNSTATLCLGHHAVPNGTIVKTITNDQIEVTNATELVQSSSKGEICDSPHQILDGENCTLIDALLGDPQCDGFQNKKWDLFVERSKAYSNCYPYDVPDYASLRSLVASSGTLEFNNESFNWTGVTQNGTSSACIRRSNNSFFSRLNWLTHLKFKYPALNVTMPNNEQFDKLYIWGVHHPGTDNDQIFLYAQASGRITVSTKRSQQTVIPNIGSRPRVRNIPSRISIYWTIVKPGDILLINSTGNLIAPRGYFKIRSGKSSIMRSDAPIGKCNSECITPNGSIPNDKPFQNVNRITYGACPRYVKQNTLKLATGMRNVPEKQTRGIFGAIAGFIENGWEGMVDGWYGFRHQNSEGRGQAADLKSTQAAIDQINGKLNRLIGKTNEKFHQIEKEFSEVEGRIQDLEKYVEDTKIDLWSYNAELLVALENQHTIDLTDSEMNKLFEKTKKQLRENAEDMGNGCFKIYHKCDNACIGSIRNGTYDHDVYRDEALNNRFQIKGVELKSGYKDWILWISFAISCFLLCVALLGFIMWACQKGNIRCNICI

SEQ ID NO: 11347 - protein, 566 aa, synthetic construct
  REGION 1..566: note = hemagglutinin__InfluenzaA__AHL91118
MKTIIALSYILCLVFAQKLPGNDNSTATLCLGHHAVPNGTIVKTITNDQIEVTNATELVQSSSTGEICDSPHQILDGENCTLIDALLGDPQCDGFQNKKWDLFVERSKAYSNCYPYDVPDYASLRSLVASSGTLEFNNESFNWTGVTQNGTSSACIRRSNNSFFSKLNWLTHLKFKYPALNVTMPNNEQFDKLYIWGVHHPGTDNDQIFLYAQASGRITVSTKRSQQTVIPNIGSRPRVRNIPSRISIYWTIVKPGDILLINSTGNLIAPRGYFKIRSGKSSIMRSDAPIGKCNSECITPNGSIPNDKPFQNVNRITYGACPRYVKQNTLKLATGMRNVPEKQTRGIFGAIAGFIENGWEGMVDGWYGFRHQNSEGRGQAADLKSTQAAIDQINGKLNRLIGKTNEKFHQIEKEFSEVEGRIQDLEKYVEDTKIDLWSYNAELLVTLENQHTIDLTDSEMNKLFEKTKKQLRENAEDMGNGCFKIYHKCDNACIGSIRNGTYDHDVYRDEALNNRFQIKGVELKSGYKDWILWISFAISCFLLCVALLGFIMWACQKGNIRCNICI

SEQ ID NO: 11348 - protein, 566 aa, synthetic construct
  REGION 1..566: note = hemagglutinin__InfluenzaA__AHL91130
MKTIIALSYILCLVFAQKLPGNDNSTATLCLGHHAVPNGTIVKTITNDQIEVTNATELVQSSSTGEICDSPHQILDGENCTLIDALLGDPQCDGFQNKKWDLFVERSKAYSNCYPYDVPDYASLRSLIASSGTLEFNNESFNWTGVTQNGTSSACIRRSNNSFFSRLNWLTHLKFKYPALNVTMPNNEQFDKLYIWGVHHPGTDNDQIFLYAQASGRITVSTKRSQQTVIPNIGSRPRVRNIPSRISIYWTIVKPGDILLINSTGNLIAPRGYFKIRSGKSSIMRSDAPIGKCNSECITPNGSIPNDKPFQNVNRITYGACPRYVKQNTLKLATGMRNVPEKQTRGIFGAIAGFIENGWEGMVDGWYGFRHQNSEGRGQAADLKSTQAAIDQINGKLNRLIGKTNEKFHQIEKEFSEVEGRIQDLEKYVEDTKIDLWSYNAELLVALENQHTIDLTDSEMNKLFEKTKKQLRENAEDMGNGCFKIYHKCDNACIGSIRNGTYDHNVYRDEALNNRFQIKGVELKSGYKDWILWISFAISCFLLCVALLGFIMWACQKGNIRCNICI

SEQ ID NO: 11349 - protein, 566 aa, synthetic construct; identical to SEQ ID NO: 2434
  REGION 1..566: note = hemagglutinin__InfluenzaA__AHL91142

SEQ ID NO: 11350 - protein, 566 aa, synthetic construct; identical to SEQ ID NO: 2434
  REGION 1..566: note = hemagglutinin__InfluenzaA__AHL91154

SEQ ID NO: 11351 - protein, 566 aa, synthetic construct; identical to SEQ ID NO: 630
  REGION 1..566: note = hemagglutinin__InfluenzaA__AHL91166

SEQ ID NO: 11352 - protein, 566 aa, synthetic construct; identical to SEQ ID NO: 10467
  REGION 1..566: note = hemagglutinin__InfluenzaA__AHL94984

SEQ ID NO: 11353 - protein, 566 aa, synthetic construct; identical to SEQ ID NO: 10467
  REGION 1..566: note = hemagglutinin__InfluenzaA__AHL94996

SEQ ID NO: 11354 - protein, 566 aa, synthetic construct; identical to SEQ ID NO: 9835
  REGION 1..566: note = hemagglutinin__InfluenzaA__AHL95008

SEQ ID NO: 11355 - protein, 566 aa, synthetic construct; identical to SEQ ID NO: 9997
  REGION 1..566: note = hemagglutinin__InfluenzaA__AHL95020

SEQ ID NO: 11356 - protein, 566 aa, synthetic construct; identical to SEQ ID NO: 9994
  REGION 1..566: note = hemagglutinin__InfluenzaA__AHL95032

SEQ ID NO: 11357 - protein, 566 aa, synthetic construct; identical to SEQ ID NO: 9868
  REGION 1..566: note = hemagglutinin__InfluenzaA__AHL95044

SEQ ID NO: 11358 - protein, 566 aa, synthetic construct; identical to SEQ ID NO: 9858
  REGION 1..566: note = hemagglutinin__InfluenzaA__AHL95056

SEQ ID NO: 11359 - protein, 566 aa, synthetic construct; identical to SEQ ID NO: 9997
  REGION 1..566: note = hemagglutinin__InfluenzaA__AHL95068

SEQ ID NO: 11360 - protein, 566 aa, synthetic construct; identical to SEQ ID NO: 10545
  REGION 1..566: note = hemagglutinin__InfluenzaA__AHL95080

SEQ ID NO: 11361 - protein, 566 aa, synthetic construct; identical to SEQ ID NO: 9868
  REGION 1..566: note = hemagglutinin__InfluenzaA__AHL95092

SEQ ID NO: 11362 - protein, 566 aa, synthetic construct
  REGION 1..566: note = hemagglutinin__InfluenzaA__AHL95104
MKTIIALSYILCLVFAQKLPGNDNSTATLCLGHHAVPNGTIVKTITNDRIEVTNATELVQNSSIGEICDSPHQILDGENCTLIDALLGDPQCDGFQNKKWDLFVERSKAYSNCYPYDVPDYASLRSLVASSGTLEFNNESFNWAGVTQNGTSSACMRGSNSSFFSRLNWLTHLNFKYPALNVTMPNNEQFDKLYIWGVHHPGTDKDQIFLYAQSSGRITVSTKRSQQAVIPNIGSRPRIRNIPSRISIYWTIVKPGDILLINSTGNLIAPRGYFKIRSGKSSIMRSDAPIGKCKSECITPNGSIPNDKPFQNVNRITYGACPRYVKQSTLKLATGMRNVPEKQTRGIFGAIAGFIENGWEGMMDGWYGFRHQNSEGRGQAADLKSTQAAIDQINGKLNRLIGKTNEKFHQIEKEFSEVEGRIQDLEKYVEDTKIDLWSYNAELLVALENQHTIDLTDSEMNKLFEKTKKQLRENAEDMGNGCFKIYHKCDNACIGSIRNGTYDHDVYRDEALNNRFQIKGVELKSGYKDWILWISFAISCFLLCVALLGFIMWACQKGNIRCNICI

SEQ ID NO: 11363 - protein, 566 aa, synthetic construct
  REGION 1..566: note = hemagglutinin__InfluenzaA__AHL95116
MKTIIALSYILCLVFAQELPGNDDSTATLCLGHYAVPNGTIVKTITNDQIEVTNATELVQSSSTGEICNSPHQILDGENCTLIDALLGDPQCDGFQNKKWDLFVERSKAHSNCYPYDVPDYASLRSLVASSGTLEFNNESFNWTGVTQNGTSSACIRRSNNSFFSRLNWLTHLNFKYPALNVTMPNNEQFDKLYIWGVHHPGTDKDQIFLYAKASGRITVSTKRSQQAVIPNIGSRPRVRNIPSRVSIYWTIVKPGDILLINSTGNLIAPRGYFKIRSGKSSIMRSDAPIGKCNSACITPNGSIPNDKPFQNVNRITYGACPRYVKQNTLKLATGMRNVPEKQTRGIFGAIAGFIENGWEGMVDGWYGFRHQNSEGRGQAADLKSTQAAIDQINGKLNRLIGKTNEKFHQIEKEFSEVEGRIQDLEKYVEDTKIDLWSYNAELLVALENQHTIDLTDSEMNKLFEKTKKQLRENAEDMGNGCFKIYHKCDNACIGSIRNGTYDHDVYRDEALNNRFQIKGVELKSGYKDWILWISFAISCFLLCVALLGFIMWACQKGNIRCNICI

SEQ ID NO: 11364 - protein, 566 aa, synthetic construct; identical to SEQ ID NO: 9835
  REGION 1..566: note = hemagglutinin__InfluenzaA__AHL95128

SEQ ID NO: 11365 - protein, 566 aa, synthetic construct; identical to SEQ ID NO: 9858
  REGION 1..566: note = hemagglutinin__InfluenzaA__AHL95140

SEQ ID NO: 11366 - protein, 566 aa, synthetic construct; identical to SEQ ID NO: 9868
  REGION 1..566: note = hemagglutinin__InfluenzaA__AHL95152

SEQ ID NO: 11367 - protein, 566 aa, synthetic construct; identical to SEQ ID NO: 9835
  REGION 1..566: note = hemagglutinin__InfluenzaA__AHL95164

SEQ ID NO: 11368 - protein, 566 aa, synthetic construct; identical to SEQ ID NO: 9868
  REGION 1..566: note = hemagglutinin__InfluenzaA__AHL95176

SEQ ID NO: 11369 - protein, 566 aa, synthetic construct; identical to SEQ ID NO: 9868
  REGION 1..566: note = hemagglutinin__InfluenzaA__AHL95188

SEQ ID NO: 11370 - protein, 566 aa, synthetic construct; identical to SEQ ID NO: 9994
  REGION 1..566: note = hemagglutinin__InfluenzaA__AHL95200

SEQ ID NO: 11371 - protein, 566 aa, synthetic construct; identical to SEQ ID NO: 9868
  REGION 1..566: note = hemagglutinin__InfluenzaA__AHL95212

SEQ ID NO: 11372 - protein, 566 aa, synthetic construct; identical to SEQ ID NO: 9858
  REGION 1..566: note = hemagglutinin__InfluenzaA__AHL95224

SEQ ID NO: 11373 - protein, 566 aa, synthetic construct; identical to SEQ ID NO: 9858
  REGION 1..566: note = hemagglutinin__InfluenzaA__AHL95236

SEQ ID NO: 11374 - protein, 566 aa, synthetic construct; identical to SEQ ID NO: 9883
  REGION 1..566: note = hemagglutinin__InfluenzaA__AHL95248

SEQ ID NO: 11375 - protein, 566 aa, synthetic construct
  REGION 1..566: note = hemagglutinin__InfluenzaA__AHL95260
MKTIIALSYILCLVFAQKLPGNDNSTATLCLGHHAVPNGTIVKTITNDRIEVTNATELVQNSSISEICDSPHQILDGENCTLIDALLGDPQCDGFQNKKWDLFVERSKAYSNCYPYDVPDYASLRSLVASSGTLEFNNESFNWAGVTQNGTSSACIRGSNSSFFSRLNWLTHLNFKYPALNVTMPNNEQFDKLYIWGVHHPGTDKDQIFLYAQSSGRITVSTKRSQQAVIPNIGSRPRIRNIPSRISIYWTIVKPGDILLINSTGNLIAPRGYFKIRSGKSSIMRSDAPIGKCKSECITPNGSIPNDKPFQNVNRITYGACPRYVKQSTLKLATGMRNVPEKQTRGIFGAIAGFIENGWEGMVDGWYGFRHQNSEGRGQAADLKSTQAAIDQINGKLNRLIGKTNEKFHQIEKEFSEVEGRIQDLEKYVEDTKIDLWSYNAELLVALENQHTIDLTDSEMNKLFEKTKKQLRENAEDMGNGCFKIYHKCDNACIGSIRNGTYDHDVYRDEALNNRFQIKGVELKSGYKDWILWISFAISCFLLCVALLGFIMWACQKGNIRCNICI

SEQ ID NO: 11376 - protein, 566 aa, synthetic construct; identical to SEQ ID NO: 9868
  REGION 1..566: note = hemagglutinin__InfluenzaA__AHL95272

SEQ ID NO: 11377 - protein, 566 aa, synthetic construct; identical to SEQ ID NO: 9994
  REGION 1..566: note = hemagglutinin__InfluenzaA__AHL95284

SEQ ID NO: 11378 - protein, 566 aa, synthetic construct
  REGION 1..566: note = hemagglutinin__InfluenzaA__AHL95296
MKAILVVLLYTFATANADTLCIGYHANNSTDTVDTVLEKNVTVTHSVNLLEDKHNGKLCKLRGVAPLHLGKCNIAGWILGNPECESLSTASSWSYIVETSSSDNGTCYPGDFINYEELREQLSSVSSFERFEMFPKTSSWPNHDSNKGVTAACPHAGAKSFYKNLIWLVKKGNSYPKLSKSYINDKGKEVLVLWGIHHPSTTADQQSLYQNADAYVFVGTSKYSKKFKPEIAIRPKVRDQEGRMNYYWTLIEPGDKITFEATGNLVVPRYAFAMERNAGSGIIISDTPVHDCNTTCQTPEGAINTSLPFQNIHPITIGKCPKYVKSTKLRLATGLRNVPSIQSRGLFGAIAGFIEGGWTGMVDGWYGYHHQNEQGSGYAADLKSTQNAIDKITNKVNSVIEKMNTQFTAVGKEFNHLEKRIENLNKKVDDGFLDIWTYNAELLVLLENERTLDYHDSNVKNLYEKVRNQLKDNAKEIGNGCFEFYHKCDNTCMESVKNGTYDYPKYSEEAKLNREKIDGVKLESTRIYQILAIYSTVASSLVLVVSLGAISFWMCSNGSLQCRICI

SEQ ID NO: 11379 - protein, 566 aa, synthetic construct; identical to SEQ ID NO: 9835
  REGION 1..566: note = hemagglutinin__InfluenzaA__AHL95307

SEQ ID NO: 11380 - protein, 566 aa, synthetic construct; identical to SEQ ID NO: 9858
  REGION 1..566: note = hemagglutinin__InfluenzaA__AHL95319

SEQ ID NO: 11381 - protein, 566 aa, synthetic construct
  REGION 1..566: note = hemagglutinin__InfluenzaA__AHL95331
MKTIIALSYILCLVFAQKLPGDDNSTATLCLGHHAVPNGTIVKTITNDRIEVTNATELVQNSSIGEICDSPHQILDGENCTLIDALLGDPQCDGFQNKKWDLFVERSKAYSNCYPYDVPDYASLRSLVASSGTLEFNNESFNWAGVTQNGTSSACIRGSNSSFFSRLNWLTHLNFKYPALNVTMPNNEQFDKLYIWGVHHPGTDKDQIFLYAQSSGRITVSTKRSQQAVIPNIGSRPRIRNIPSRISIYWTIVKPGDILLINSTGNLIAPRGYFKIRSGKSSIMRSDAPIGKCKSECITPNGSIPNDKPFQNVNRITYGACPRYVKQSTLKLATGMRNVPEKQTRGIFGAIAGFIENGWEGMVDGWYGFRHQNSEGRGQAADLKSTQAAIDQINGKLNRLIGKTNEKFHQIEKEFSEVEGRIQDLEKYVEDTKIDLWSYNAELLVALENQHTIDLTDSEMNKLFEKTKKQLRENAEDMGNGCFKIYHKCDNACIGSIRNGTYDHDVYRDEALNNRFQIKGVELKSGYKDWILWISFAISCFLLCVALLGFIMWACQKGNIRCNICI

SEQ ID NO: 11382 - protein, 566 aa, synthetic construct
  REGION 1..566: note = hemagglutinin__InfluenzaA__AHL95343
MKTIIALSYILCLVFAQKLPGNDNSTATLCLGHHAVPNGTIVKTITNDRIEVTNATELVQNSSIGEICDSPHQILDGENCTLIDALLGDPQCDGFQNKKWDLFVERSKAYSNCYPYDVPDYASLRSLVASSGTLEFNNESFNWAGVTQNGTSSACIRGSNSSFFSRLNWLTHLNFKYPALNVTMPNNEQFDKLYIWGVHHPGTDKDQIFLYAQSSGRITVSTKRSQQAVIPNIGSRPRIRNIPSRISIYWTIVKPGDILLINSTGNLIAPRGYFKIRSGKSSIMRSDAPIGKCKSECITPNGSIPNDKPFQNVNRITYGACPRYVKQSTLKLATGMRNVPEKQTRGIFGAIAGFIENGWEGMVDGWYGFRHQNSEGRGQAADLKSTQAAIDQINGKLNRLIGKTNEKFHQIEKEFSEVEGRIQDLEKYVEDTKIDLWSYNAELLVALENQHTIDLTDSEMNKLFEKTKKQLRENAEDMGNGCFKIYHKCDNACIGSIRNGTYDHDVYRDEALNNRFQIRGVELKSGYKDWILWISFAISCFLLCVALLGFIMWACQKGNIRCNICI

SEQ ID NO: 11383 - protein, 566 aa, synthetic construct; identical to SEQ ID NO: 9858
  REGION 1..566: note = hemagglutinin__InfluenzaA__AHL95432

SEQ ID NO: 11384 - protein, 566 aa, synthetic construct; identical to SEQ ID NO: 9994
  REGION 1..566: note = hemagglutinin__InfluenzaA__AHL95444

SEQ ID NO: 11385 - protein, 566 aa, synthetic construct; identical to SEQ ID NO: 9858
  REGION 1..566: note = hemagglutinin__InfluenzaA__AHL95457

SEQ ID NO: 11386 - protein, 566 aa, synthetic construct
  REGION 1..566: note = hemagglutinin__InfluenzaA__AHL95470
MKTIIALSYILCLVFAQKLPGNDNSTATLCLGHHAVPNGTIVKTITNDQIEVTNATELVQSSSTGEICNSPHQILDGENCTLIDALLGDPQCDGFQNKKWDLFVERSKAYSNCYPYDVPDYASLRSLVASSGTLEFNNESFNWTGVKQNGTSSACIRRSNSSFFSRLNWLTHLNFKYPALNVTMPNNEQFDKLYIWGVHHPGTDKDQIFLYAQSSGRITVSTKRSQQAVIPNIGSRPRIRNIPSRISIYWTIVRPGDILLINSTGNLIAPRGYFKIRSGKSSIMRSDAPIGKCNSECITPNGSIPNDKPFQNVNRITYGACPRYVKQSTLKLATGMRNVPEKQTRGIFGAIAGFIENGWEGMVDGWYGFRHQNSEGRGQAADLKSTQAAIDQINGKLNRLIGKTNEKFHQIEKEFSEVEGRIQDLEKYVEDTKIDLWSYNAELLVALENQHTIDLTDSEMNKLFEKTKKQLRENAEDMGNGCFKIYHKCDNACIGSIRNGTYNHDVYRDEALNNRFQIKGVELKSGYKDWILWISFAISCFLLCVALLGFIMWACQKGNIRCNICI

SEQ ID NO: 11387 - protein, 566 aa, synthetic construct; identical to SEQ ID NO: 9994
  REGION 1..566: note = hemagglutinin__InfluenzaA__AHL95482

SEQ ID NO: 11388 - protein, 566 aa, synthetic construct; identical to SEQ ID NO: 9994
  REGION 1..566: note = hemagglutinin__InfluenzaA__AHL95494

SEQ ID NO: 11389 - protein, 566 aa, synthetic construct
  REGION 1..566: note = hemagglutinin__InfluenzaA__AHL95506
MKTIIALSYILCLVFAQKLPGNDNSTATLCLGHHAVPNGTIVRTITNDRIEVTNATELVQNSSIGEICDSPHQILDGENCTLIDALLGDPQCDGFQNKKWDLFVERSKAYSNCYPYDVPDYASLRSLVASSGTLEFNNESFNWAGVTQNGTSSACIRGSNSSFFSRLNWLTHLNFKYPALNVTMPNNEQFDKLYIWGVHHPGTDKDQIFLYAQSSGRITVSTKRSQQAVIPNIGSRPRIRNIPSRISIYWTIVKPGDILLINSTGNLIAPRGYFKIRSGKSSIMRSDAPIGKCKSECITPNGSIPNDKPFQNVNRITYGACPRYVKQSTLKLATGMRNVPEKQTRGIFGAIAGFIENGWEGMVDGWYGFRHQNSEGRGQAADLKSTQAAIDQINGKLNRLIGKTNEKFHQIEKEFSEVEGRIQDLEKYVEDTKIDLWSYNAELLVALENQHTIDLTDSEMNKLFEKTKKQLRENAEDMGNGCFKIYHKCDNACIGSIRNGTYDHDVYRDEALNNRFQIKGVELKSGYKDWILWISFAISCFLLCVALLGFIMWACQKGNIRCNICI

SEQ ID NO: 11390 - protein, 566 aa, synthetic construct
  REGION 1..566: note = hemagglutinin__InfluenzaA__AHL95518
MKTIIALSYILCLVFAQKLPGNDNSTATLCLGHHAVPNGTIVKTITNDRIEVTNATELVQNSSIGEICDSPHQILDGENCTLIDALLGDPQCDGFQNKKWDLFVERSKAYSNCYPYDVPDYASLRSLVASSGTLEFNNESFNWAGVTQNGTSSACIRGSNSSFFSRLNWLTHLNFKYPALNVTMPNNEQFDKLYIWGVHHPGTDKDQIFLYAQSSGRITVSTKRSQQAVIPNIGSRPRIRNVPSRISIYWTIVKPGDILLINSTGNLIAPRGYFKIRSGKSSIMRSDAPIGKCKSECITPNGSIPNDKPFQNVNRITYGACPRYVKQSTLKLATGMRNVPEKQTRGIFGAIAGFIENGWEGMMDGWYGFRHQNSEGRGQAADLKSTQAAIDQINGKLNRLIGKTNEKFHQIEKEFSEVEGRIQDLEKYVEDTKIDLWSYNAELLVALENQHTIDLTDSEMNKLFEKTKKQLRENAEDMGNGCFKIYHKCDNACIGSIRNGTYDHDVYRDEALNNRFQIKGVELKSGYKDWILWISFAISCFLLCVALLGFIMWACQKGNIRCNICI

SEQ ID NO: 11391 - protein, 566 aa, synthetic construct; identical to SEQ ID NO: 9868
  REGION 1..566: note = hemagglutinin__InfluenzaA__AHL95530

SEQ ID NO: 11392 - protein, 566 aa, synthetic construct; identical to SEQ ID NO: 9868
  REGION 1..566: note = hemagglutinin__InfluenzaA__AHL95542

SEQ ID NO: 11393 - protein, 566 aa, synthetic construct
  REGION 1..566: note = hemagglutinin__InfluenzaA__AHL95554
MKTIIALSYILCLVFAQKLPGNDNSMATLCLGHHAVPNGTIVKTITNDRIEVTNATELVQNSSIGEICDSPHQILDGENCTLIDALLGDPQCDGFQNKKWDLFVERSKAYSNCYPYDVPDYASLRSLVASSGTLEFNNESFNWTGVTQNGTSSACIRRSNSSFFSRLNWLTHLNFKYPALNVTMPNNEQFDKLYIWGVHHPGTDKDQIFLYAQSSGRITVSTKRSQQAVIPNIGSRPRIRNIPSRISIYWTIVKPGDILLINSTGNLIAPRGYFKIRSGKSSIMRSDAPIGKCKSECITPNGSIPNDKPFQNVNRITYGACPRYVKQSTLKLATGMRNVPEKQTRGIFGAIAGFIENGWEGMVDGWYGFRHQNSEGRGQAADLKSTQAAIDQINGKLNRLIGKTNEKFHQIEKEFSEVEGRIQDLEKYVEDTKIDLWSYNAELLVALENQHTIDLTDSEMNKLFEKTKKQLRENAEDMGNGCFKIYHKCDNACIGSIRNGTYDHNVYRDEALNNRFQIKGVELKSGYKDWILWISFAISCFLLCVALLGFIMWACQKGNIRCNICI

SEQ ID NO: 11394 - protein, 566 aa, synthetic construct
  REGION 1..566: note = hemagglutinin__InfluenzaA__AHL95566
MKTIIALSYILCLVFAQKLPGNDNSTATLCLGHHAVPNGTIVKTITNDRIEVTNATELVQNSSIGEICDSPHQILDGENCTLIDALLGDPQCDGFQNKKWDLFVERSKAYSNCYPYDVPDYASLRSLVASSGTLEFNNESFNWAGVTQNGTSSACIRGSNSSFFSRLNWLTHLNFKYPALNVTMPNNEQFDKLYIWGVHHPGTDKDQIFLYARSSGRITVSTKRSQQAVIPNIGSRPRIRNIPSRISIYWTIVKPGDILLINSTGNLIAPRGYFKIRSGKSSIMRSDAPIGKCKSECITPNGSIPNDKPFQNVNRITYGACPRYVKQSTLKLATGMRNVPEKQTRGIFGAIAGFIENGWEGMVDGWYGFRHQNSEGRGQAADLKSTQAAIDQINGKLNRLIGKTNEKFHQIEKEFSEVEGRIQDLEKYVEDTKIDLWSYNAELLVALENQHTIDLTDSEMNKLFEKTKKQLRENAEDMGNGCFKIYHKCDNACIGSIRNGTYDHDVYRDEALNNRFQIKGVELKSGYKDWILWISFAISCFLLCVALLGFIMWACQKGNIRCNICI

SEQ ID NO: 11395 - protein, 566 aa, synthetic construct
  REGION 1..566: note = hemagglutinin__InfluenzaA__AHL95578
MKTIIALSYILCLVFAQKLPGNDDSTATLCLGHHAVPNGTIVKTITNDRIEVTNATELVQNSSIGEICDSPHQILDGENCTLIDALLGDPQCDGFQNKKWDLFVERSKAYSNCYPYDVPDYASLRSLVASSGTLEFNNESFNWAGVTQNGTSSACIRGSNSSFFSRLNWLTHLNFKYPALNVTMPNNEQFDKLYIWGVHHPGTDKDQIFLYAQSSGRITVSTKRSQQAVIPNIGSRPRIRNIPSRISIYWTIVKPGDILLINSTGNLIAPRGYFKIRSGKSSIMRSDAPIGKCKSECITPNGSIPNDKPFQNVNRITYGACPRYVKQSTLKLATGMRNVPEKQTRGIFGAIAGFIENGWEGMMDGWYGFRHQNSEGRGQAADLKSTQAAIDQINGKLNRLIGKTNEKFHQIEKEFSEVEGRIQDLEKYVEDTKIDLWSYNAELLVALENQHTIDLTDSEMNKLFEKTKKQLRENAEDMGNGCFKIYHKCDNACIGSIRNGTYDHDVYRDEALNNRFQIKGVELKSGYKDWILWISFAISCFLLCVALLGFIMWACQKGNIRCNICI

SEQ ID NO: 11396 - protein, 566 aa, synthetic construct
  REGION 1..566: note = hemagglutinin__InfluenzaA__AHL95590
MKTIIALSYILCLVFAQKLPGNDNSTATLCLGHHAVPNGTIVKTITNDRIEVTNATELVQNSSIGEICDSPHQILDGENCTLIDALLGDPQCDGFQNKKWDLFVERSKAYSNCYPYDVPDYASLRSLVASSGTLEFNNESFNWTGVTQNGTSSSCIRRSNSSFFSRLNWLTHLNFKYPALNVTMPNNEQFDKLYIWGVHHPGTDKDQIFLYAQSSGRITVSTKRSQQAVIPNIGSRPRIRNIPSRISIYWTIVKPGDILLINSTGNLIAPRGYFKIRSGKSSIMRSDAPIGKCKSECITPNGSIPNDKPFQNVNRITYGACPRYVKQSTLKLATGMRNVPEKQTRGIFGAIAGFIENGWEGMVDGWYGFRHQNSEGRGQAADLKSTQAAIDQINGKLNRLIGKTNEKFHQIEKEFSEVEGRIQDLEKYVEDTKIDLWSYNAELLVALENQHTIDLTDSEMNKLFEKTKKQLRENAEDMGNGCFKIYHKCDNACIGSIRNGTYDHNVYRDEALNNRFQIKGVELKSGYKDWILWISFAISCFLLCVALLGFIMWACQKGNIRCNICI

SEQ ID NO: 11397 - protein, 566 aa, synthetic construct; identical to SEQ ID NO: 9868
  REGION 1..566: note = hemagglutinin__InfluenzaA__AHL95602

SEQ ID NO: 11398 - protein, 566 aa, synthetic construct; identical to SEQ ID NO: 9868
  REGION 1..566: note = hemagglutinin__InfluenzaA__AHL95614

SEQ ID NO: 11399 - protein, 566 aa, synthetic construct
  REGION 1..566: note = hemagglutinin__InfluenzaA__AHL95626
MKTIIALSYVLCLVFAQKLPGNDNSTATLCLGHHAVPNGTIVKTITNDRIEVTNATELVQNSSIGEICDSPHQILDGENCTLIDALLGDPQCDGFQNKKWDLFVERSKAYSNCYPYDVPDYASLRSLVASSGTLEFNNESFNWAGVTQNGTSSACIRGSNSSFFSRLNWLTHLNFKYPALNVTMPNNEQFDKLYIWGVHHPGTDKDQIFLYAQSSGRITVSTKRSQQAVIPNIGSRPRIRNIPSRISIYWTIVKPGDILLINSTGNLIAPRGYFKIRSGKSSIMRSDAPIGKCKSECITPNGSIPNDKPFQNVNRITYGACPRYVKQSTLKLATGMRNVPEKQTRGIFGAIAGFIENGWEGMVDGWYGFRHQNSEGRGQAADLKSTQAAIDQINGKLNRLIGKTNEKFHQIEKEFSEVEGRIQDLEKYVEDTKIDLWSYNAELLVALENQHTIDLTDSEMNKLFEKTKKQLRENAEDMGNGCFKIYHKCDNACIGSIRNGTYDHDVYRDEALNNRFQIKGVELKSGYKDWILWISFAISCFLLCVALLGFIMWACQKGNIRCNICI

SEQ ID NO: 11400 - protein, 566 aa, synthetic construct; identical to SEQ ID NO: 9868
  REGION 1..566: note = hemagglutinin__InfluenzaA__AHL95638

SEQ ID NO: 11401 - protein, 566 aa, synthetic construct; identical to SEQ ID NO: 9868
  REGION 1..566: note = hemagglutinin__InfluenzaA__AHL95650

SEQ ID NO: 11402 - protein, 566 aa, synthetic construct
  REGION 1..566: note = hemagglutinin__InfluenzaA__AHL95662
MKTIIALSYILCLVFAQKLPGNDNSTATLCLGHHAVPNGTIVKTITNDRIEVTNATELVQNSSIGEICDSPHQILDGENCTLIDALLGDPQCDGFQNKKWDLFVERSKAYSNCYPYDVPDYASLRSLVASSGTLEFNNESFNWAGVTQNGTSSACIRGSNSSFFSRLNWLTHLNFKYPALNVTMPNNEQFDKLYIWGVHHPGTDKDQIFLYAQSSGRITVSTKRSQQAVIPNIGSRPRIRNIPSRISIYWTIVKPGDILLINSTGNLIAPRGYFKIRSGKSSIMRSDAPIGKCKSECITPNGSIPNDKPFQNVNRITYGACPRYVKQSTLKLATGMRNVPEKQTRGIFGAIAGFIENGWEGMMDGWYGFRHQNSEGRGQAADLKSTQAAIDQINGKLNRLIGKTNEKFHQIEKEFSEVEGRIQDLEKYVEDTKIDLWSYNAELLVTLENQHTIDLTDSEMNKLFEKTKKQLRENAEDMGNGCFKIYHKCDNACIGSIRNGTYDHDVYRDEALNNRFQIKGVELKSGYKDWILWISFAISCFLLCVALLGFIMWACQKGNIRCNICI

SEQ ID NO: 11403 - protein, 566 aa, synthetic construct; identical to SEQ ID NO: 9994
  REGION 1..566: note = hemagglutinin__InfluenzaA__AHL95686

SEQ ID NO: 11404 - protein, 566 aa, synthetic construct; identical to SEQ ID NO: 9994
  REGION 1..566: note = hemagglutinin__InfluenzaA__AHL95698

SEQ ID NO: 11405 - protein, 566 aa, synthetic construct; identical to SEQ ID NO: 9868
  REGION 1..566: note = hemagglutinin__InfluenzaA__AHL95710

SEQ ID NO: 11406 - protein, 566 aa, synthetic construct; identical to SEQ ID NO: 11382
  REGION 1..566: note = hemagglutinin__InfluenzaA__AHL95722

SEQ ID NO: 11407 - protein, 566 aa, synthetic construct; identical to SEQ ID NO: 9858
  REGION 1..566: note = hemagglutinin__InfluenzaA__AHL95734

SEQ ID NO: 11408 - protein, 566 aa, synthetic construct; identical to SEQ ID NO: 9858
  REGION 1..566: note = hemagglutinin__InfluenzaA__AHL95746

SEQ ID NO: 11409 - protein, 566 aa, synthetic construct; identical to SEQ ID NO: 9997
  REGION 1..566: note = hemagglutinin__InfluenzaA__AHL95758

SEQ ID NO: 11410 - protein, 566 aa, synthetic construct; identical to SEQ ID NO: 9868
  REGION 1..566: note = hemagglutinin__InfluenzaA__AHL95770

SEQ ID NO: 11411 - protein, 566 aa, synthetic construct
  REGION 1..566: note = hemagglutinin__InfluenzaA__AHL95782
MKTIIALSYILCLVFAQKLPGNDNSTATLCLGHHAVPNGTIVKTITNDRIEVTNATELVQNSSIGEICNSPHQILDGENCTLIDALLGDPQCDGFQNKKWDLFVERSKAYSNCYPYDVPDYASLRSLVASSGTLEFNNESFNWTGVTQNGTSSACIRRSNSSFFSRLNWLTHLNFKYPALNVTMPNNEQFDKLYIWGVHHPGTDKDQIFLYAQSSGRITVSTKRSQQAVIPNIGSRPRIRNIPSRISIYWTIVKPGDILLINSTGNLIAPRGYFKIRSGKSSIMRSDAPIGKCKSECITPNGSIPNDKPFQNVNRITYGACPRYVKQSTLKLATGMRNVPEKQTRGIFGAIAGFIENGWEGMVDGWYGFRHQNSEGRGQAADLKSTQAAIDQINGKLNRLIGKTNEKFHQIEKEFSEVEGRIQDLEKYVEDTKIDLWSYNAELLVALENQHTIDLTDSEMNKLFEKTKKQLRENAEDMGNGCFKIYHKCDNACIGSIRNGTYDHDVYRDEALNNRFQIKGVELKSGYKDWILWISFAISCFLLCVALLGFIMWACQKGNIRCNICI

SEQ ID NO: 11412 - protein, 566 aa, synthetic construct
  REGION 1..566: note = hemagglutinin__InfluenzaA__AHL95794
MKTIIALSYILCLVFAQKLPGNDNSTATLCLGHHAVPNGTIVKTITNDRIEVTNATELVQNSSIGEICDSPHQILDGENCTLIDALLGDPQCDGFQNKKWDLFVERNKAYSNCYPYDVPDYASLRSLVASSGTLEFNNESFNWAGVTQNGTSSACIRGSNSSFFSRLNWLTHLNFKYPALNVTMPNNEQFDKLYIWGVHHPGTDKDQIFLYAQSSGRITVSTKRSQQAVIPNIGSRPRIRNIPSRISIYWTIVKPGDILLINSTGNLIAPRGYFKIRSGKSSIMRSDAPIGKCKSECITPNGSIPNDKPFQNVNRITYGACPRYVKQSTLKLATGMRNVPEKQTRGIFGAIAGFIENGWEGMVDGWYGFRHQNSEGRGQAADLKSTQAAIDQINGKLNRLIGKTNEKFHQIEKEFSEVEGRIQDLEKYVEDTKIDLWSYNAELLVALENQHTIDLTDSEMNKLFEKTKKQLRENAEDMGNGCFKIYHKCDNACIGSIRNGTYDHDVYRDEALNNRFQIKGVELKSGYKDWILWISFAISCFLLCVALLGFIMWACQKGNIRCNICI

SEQ ID NO: 11413 - protein, 566 aa, synthetic construct
  REGION 1..566: note = hemagglutinin__InfluenzaA__AHL95806
MKTIIALSYILCLVFAQKLPGNDNSTATLCLGHHAVPNGTIVKTITNDRIEVTNATELVQNSSIGEICDSPHQILDGENCTLIDALLGDPQCDGFQNKKWDLFVERSKAYSNCYPYDVPDYASLRSLVASSGTLEFNNESFNWAGVTQNGTSSACIRGSNSSFFSRLNWLTHLNFKYPALNVTMPNNEQFDKLYIWGVHHPGTDKDQIFLYAQSSGRITVSTKRSQQAVIPNIGSRPRIRNIPSRISIYWTIVKPGDILLINSTGNLIAPRGYFKIRSGKSSIMRSDAPIGKCKSECITPNGSIPNDKPFQNVNRITYGACPRYVKQSTLKLATGMRNVPEKQTRGIFGAIAGFIENGWEGMVDGWYGFRHQNSEGRGQAADLKSTQAAIDQINGKLNRLIGKTNEKFHQIEKEFSEVEGRIQDLEKYVEDTKIDLWSYNAELLVALENQHTIDLTDSEMNKLFEKTKKQLRENAEDMGNGCFKIYHKCDNACIGSIRNGTYDHDVYRDEALNNRFQIKGVELKSGYKDWILWISFAISCFLLCVALLGSIMWACQKGNIRCNICI

SEQ ID NO: 11414 - protein, 566 aa, synthetic construct; identical to SEQ ID NO: 9994
  REGION 1..566: note = hemagglutinin__InfluenzaA__AHL95818

SEQ ID NO: 11415 - protein, 566 aa, synthetic construct; identical to SEQ ID NO: 9858
  REGION 1..566: note = hemagglutinin__InfluenzaA__AHL95830

SEQ ID NO: 11416 - protein, 566 aa, synthetic construct; identical to SEQ ID NO: 9994
  REGION 1..566: note = hemagglutinin__InfluenzaA__AHL95842

SEQ ID NO: 11417 - protein, 566 aa, synthetic construct; identical to SEQ ID NO: 9858
  REGION 1..566: note = hemagglutinin__InfluenzaA__AHL95854

SEQ ID NO: 11418 - protein, 566 aa, synthetic construct; identical to SEQ ID NO: 9868
  REGION 1..566: note = hemagglutinin__InfluenzaA__AHL95866

SEQ ID NO: 11419 - protein, 566 aa, synthetic construct
  REGION 1..566: note = hemagglutinin__InfluenzaA__AHL95878
MKAILVIMLYTFATANADTLCIGYHANNSTDTVDTVLEKNVTVTHSVNLLEDKHNGKLCKLRGVSPLHLGKCNIAGWILGNPECESLSTASSWSYIVETSGSDNGTCYPGDFIDYEELREQLSSVSSFERFEIFPKTSSWPNHDSNKGVTAACPHAGAKGFYKNLIWLVKKGNSYPKLSISYINDKGKEVLVLWGIHHPSTTADQQSLYQNADTYVFVGTSRYSKKFKPEIAIRPKVRDQEGRMNYYWTLVEPGDKITFEATGNLVVPRYAFAMERNAGSGIIISDTPVHDCNTTCQTPKGAINTSLPFQNIHPITIGKCPKYVKSTKLRLATGLRNVPSIQSRGLFGAIAGFIEGGWTGMVDGWYGYHHQNEQGSGYAADLKSTQNAIDKITNKVNSVIEKMNTQFTAVGKEFNHLEKRIENLNKKVDDGFLDIWTYNAELLVLLENERTLDYHDSNVKNLYEKVRNQLKNNAKEIGNGCFEFYHKCDNTCMESVKNGTYDYPKYSEEAKLNREEIDGVKLESTRIYQILAIYSTAASSLVLVVSLGAISFWMCSNGSLQCRICI

SEQ ID NO: 11420 - protein, 566 aa, synthetic construct; identical to SEQ ID NO: 9868
  REGION 1..566: note = hemagglutinin__InfluenzaA__AHL95889

SEQ ID NO: 11421 - protein, 566 aa, synthetic construct; identical to SEQ ID NO: 9994
  REGION 1..566: note = hemagglutinin__InfluenzaA__AHL95901

SEQ ID NO: 11422 - protein, 566 aa, synthetic construct; identical to SEQ ID NO: 9994
  REGION 1..566: note = hemagglutinin__InfluenzaA__AHL95913

SEQ ID NO: 11423 - protein, 566 aa, synthetic construct
  REGION 1..566: note = hemagglutinin__InfluenzaA__AHL95937
MKTIIALSYILCLVFAQKLPGNDNSTATLCLGHHAVPNGTIVKTITNDRIEVTNATELVQNSSIGEICDSPHQILDGENCTLIDALLGDPQCDGFQNKKWDLFVERSKAYSNCYPYDVPDYASLRSLVASSGTLEFNNESFNWAGVTQNGTSSACIRGSNSSFFSRLNWLTHLNFKYPALNVTMPNNEQFDKLYIWGVHHPGTDKDQIFLYAQSSGRITVSTKRSQQAVIPNIGSRPRIRNIPSRISIYWTIVKPGDILLINSTGNLIAPRGYFKIRSGKSSIMRSDAPIGKCKSECITPNGSIPNDKPFQNVNRITYGACPRYVKQSTLKLATGMRNVPEKQTRGIFGAIAGFIENGWEGMVDGWYGFRHQNSEGRGQAADLKSTQAAIDQINGKLNRLIGKTNEKFHQIEKEFSEVEGRIQDLEKYVEDTKTDLWSYNAELLVALENQHTIDLTDSEMNKLFEKTKKQLRENAEDMGNGCFKIYHKCDNACIGSIRNGTYDHDVYRDEALNNRFQIKGVELKSGYKDWILWISFAISCFLLCVALLGFIMWACQKGNIRCNICI

SEQ ID NO: 11424 - protein, 566 aa, synthetic construct
  REGION 1..566: note = hemagglutinin__InfluenzaA__AHL95949
MKTIIALSYILCLVFAQKLPGNDNSTATLCLGHHAVPNGTIVKTITNDRIEVTNATELVQNSSIGEICDSPHQILDGENCTLIDALLGDPQCDGFQNKKWDLFVERSKAYSNCYPYDVPDYASLRSLVASSGTLEFNNESFNWTGVTQNGTSSACIRRSNNSFFSRLNWLTHSNFKYPALNMTMPNNEQFDKLYIWGVHHPGTDKDQIFLYAQSSGRITVSTKRSQQAVIPNIGSRPRIRNIPSRISIYWTIVKPGDILLINSTGNLIAPRGYFKIRSGKSSIMRSDAPIGKCKSECITPNGSIPNDKPFQNVNRITYGACPRYVKQSTLKLATGMRNVPEKQTRGIFGAIAGFIENGWEGMMDGWYGFRHQNSEGRGQAADLKSTQAAIDQINGKLNRLIGKTNEKFHQIEKEFSEVEGRIQDLEKYVEDTKIDLWSYNAELLVALENQHTIDLTDSEMNKLFEKTKKQLRENAEDMGNGCFKIYHKCDNACIGSIRNGTYDHDVYRDEALNNRFQIKGVELKSGYKDWILWISFAISCFLLCVALLGFIMWACQKGNIRCNICI

SEQ ID NO: 11425 - protein, 566 aa, synthetic construct; identical to SEQ ID NO: 9868
  REGION 1..566: note = hemagglutinin__InfluenzaA__AHL95961

SEQ ID NO: 11426 - protein, 566 aa, synthetic construct; identical to SEQ ID NO: 9868
  REGION 1..566: note = hemagglutinin__InfluenzaA__AHL95973

SEQ ID NO: 11427 - protein, 566 aa, synthetic construct; identical to SEQ ID NO: 9868
  REGION 1..566: note = hemagglutinin__InfluenzaA__AHL95985

SEQ ID NO: 11428 - protein, 566 aa, synthetic construct
  REGION 1..566: note = hemagglutinin__InfluenzaA__AHL95997
MKTIIALSYILCLVFAQKLPGNDNSTATLCLGHHAVPNGTIVKTITNDRIEVTNATELVQNSSIGEICDSPHQILDGENCTLIDALLGDPQCDGFQNKKWDLFVERSKAYSNCYPYDVPDYASLRSLVASSGTLEFNNESFNWAGVTQNGTSSSCIRGSKSSFFSRLNWLTHLNFKYPALNVTMPNNEQFDKLYIWGVHHPGTDKDQIFLYAQSSGRITVSTKRSQQAVIPNIGSRPRIRNIPSRISIYWTIVKPGDILLINSTGNLIAPRGYFKIRSGKSSIMRSDAPIGKCKSECITPNGSIPNDKPFQNVNRITYGACPRYVKQSTLKLATGMRNVPEKQTRGIFGAIAGFIENGWEGMMDGWYGFRHQNSEGRGQAADLKSTQAAIDQINGKLNRLIGKTNEKFHQIEKEFSEVEGRIQDLEKYVEDTKIDLWSYNAELLVALENQHTIDLTDSEMNKLFEKTKKQLRENAEDMGNGCFKIYHKCDNACIGSIRNGTYDHDVYRDEALNNRFQIKGVELKSGYKDWILWISFAISCFLLCVALLGFIMWACQKGNIRCNICI

SEQ ID NO: 11429 - protein, 566 aa, synthetic construct
  REGION 1..566: note = hemagglutinin__InfluenzaA__AHL96021
MKTIIALSYILCLVFAQKLPGNDNSTATLCLGHHAVPNGTIVKTITNDRIEVTNATELVQNSSIGEICDSPHQILDGENCTLIDALLGDPQCDGFQNKKWDLFVERSKAYSNCYPYDVPDYASLRSLVASSGTLEFNNESFNWAGVTQNGTSSACIRGSKSSFFSRLNWLTHLNFKYPALNVTMPNNEQFDKLYIWGVHHPGTDKDQIFLYAQSSGRITVSTKRSQQAVIPNIGSRPRIRNIPSRISIYWTIVKPGDILLINSTGNLIAPRGYFKIRSGKSSIMRSDAPIGKCKSECITPNGSIPNDKPFQNVNRITYGACPRYVKQSTLKLATGMRNVPEKQTRGIFGAIAGFIENGWEGMMDGWYGFRHQNSEGRGQAADLKSTQAAIDQINGKLNRLIGKTNEKFHQIEKEFSEVEGRIQDLEKYVEDTKIDLWSYNAELLVALENQHTIDLTDSEMNKLFEKTKKQLRENAEDMGNGCFKIYHKCDNACIGSIRNGTYDHDVYRDEALNNRFQIKGVELKSGYKDWILWISFAISCFLLCVALLGFIMWACQKGNIRCNICI

SEQ ID NO: 11430 - protein, 566 aa, synthetic construct; identical to SEQ ID NO: 9868
  REGION 1..566: note = hemagglutinin__InfluenzaA__AHL96033

SEQ ID NO: 11431 - protein, 566 aa, synthetic construct; identical to SEQ ID NO: 10123
  REGION 1..566: note = hemagglutinin__InfluenzaA__AHL96045

SEQ ID NO: 11432 - protein, 566 aa, synthetic construct; identical to SEQ ID NO: 9994
  REGION 1..566: note = hemagglutinin__InfluenzaA__AHL96056

SEQ ID NO: 11433 - protein, 566 aa, synthetic construct; identical to SEQ ID NO: 9858
  REGION 1..566: note = hemagglutinin__InfluenzaA__AHL96068

SEQ ID NO: 11434 - protein, 566 aa, synthetic construct; identical to SEQ ID NO: 9868
  REGION 1..566: note = hemagglutinin__InfluenzaA__AHL96080

SEQ ID NO: 11435 - protein, 566 aa, synthetic construct
  REGION 1..566: note = hemagglutinin__InfluenzaA__AHL96092
MKTIIALSYILCLVFAQKLPGNDNSTATLCLGHHAVPNGTIVKTITNDRIEVTNATELVQNSSIGEICDSPHQILDGENCTLIDALLGDPQCDGFQNKKWDLFIERSKAYSNCYPYDVPDYASLRSLVASSGTLEFNNESFNWAGVTQNGTSSACIRGSNSSFFSRLNWLTHLNFKYPALNVTMPNNEQFDKLYIWGVHHPGTDKDQIFLYAQSSGRITVSTKRSQQAVIPNIGSRPRIRNIPSRISIYWTIVKPGDILLINSTGNLIAPRGYFKIRSGKSSIMRSDAPIGKCKSECITPNGSIPNDKPFQNVNRITYGACPRYVKQSTLKLATGMRNVPEKQTRGIFGAIAGFIENGWEGMVDGWYGFRHQNSEGRGQAADLKSTQAAIDQINGKLNRLIGKTNEKFHQIEKEFSEVEGRIQDLEKYVEDTKIDLWSYNAELLVALENQHTIDLTDSEMNKLFEKTKKQLRENAEDMGNGCFKIYHKCDNACIGSIRNGTYDHDVYRDEALNNRFQIKGVELKSGYKDWILWISFAISCFLLCVALLGFIMWACQKGNIRCNICI

SEQ ID NO: 11436 - protein, 566 aa, synthetic construct
  REGION 1..566: note = hemagglutinin__InfluenzaA__AHL96104
MKTIIALSYILCLVFAQKLPGNDNSTATLCLGHHAVPNGTIVKTITNDRIEVTNATELVQNSSIGEICDSPHQILDGENCTLIDALLGDPQCDGFQNKKWDLFVERSKAYSNCYPYDVPDYASLRSLVASSGTLEFNNESFNWTGVTQNGTSSACIRRSNSSFFSRLNWLTHLNFKYPALNVTMPNNEQFDKLYIWGVHHPGTDKDQIFLYAQSSGRITVSTKRSQQAVIPNIGSRPRIRNIPSRISIYWTIVKPGDILLINSTGNLIAPRGYFKIRSGKSSIMRSDAPIGKCKSECITPNGSIPNDKPFQNVNRITYGACPRYVKQSTLKLATGMRNVPERQTRGIFGAIAGFIENGWEGMVDGWYGFRHQNSEGRGQAADLKSTQAAIDQINGKLNRLIGKTNEKFHQIEKEFSEVEGRIQDLEKYVEDTKIDLWSYNAELLVALENQHTIDLTDSEMNKLFEKTKKQLRENAEDMGNGCFKIYHKCDNACIGSIRNGTYDHNVYRDEALNNRFQIKGVELKSGYKDWILWISFAISCFLLCVALLGFIMWACQKGNIRCNICI

SEQ ID NO: 11437 - protein, 566 aa, synthetic construct; identical to SEQ ID NO: 10482
  REGION 1..566: note = hemagglutinin__InfluenzaA__AHL96116

SEQ ID NO: 11438 - protein, 566 aa, synthetic construct; identical to SEQ ID NO: 9858
  REGION 1..566: note = hemagglutinin__InfluenzaA__AHL96128

SEQ ID NO: 11439 - protein, 566 aa, synthetic construct; identical to SEQ ID NO: 9994
  REGION 1..566: note = hemagglutinin__InfluenzaA__AHL96152

SEQ ID NO: 11440 - protein, 566 aa, synthetic construct
  REGION 1..566: note = hemagglutinin__InfluenzaA__AHL96164
MKTIIALSYILCLVFAQKLPGNDNSTATLCLGHHAVPNGTIVKTITNDRIEVTNATELVQNSSIGEICDSPHQILDGENCTLIDALLGDPQCDGFQNKKWDLFVERSKAYSNCYPYDVPDYASLRSLVASSGTLEFNNESFNWAGVTQNGTSSACIRGSNSSFFSRLNWLTHLNFKYPALNVTMPNNEQFDKLYIWGVHHPGTDKDQIFLYAQSSGRITVSTKRSQQAVIPNIGSRPRIRNIPSRISIYWTIVKPGDILLINSTGNLIAPRGYFKIRSGKSSIMRSDAPIGKCKSECITPNGSIPNDKPFQNVNRITYGACPRYVKQSTLKLATGMRNVPEKQTRGIFGAIAGFIENGWEGMVDGWYGFRHQNSEGRGQAADLKSTQAAIDQINGKLNRLIGKTNEKFHQIEKEFSEVEGRIQDLEKYVEDTKIDLWSYNAELLVALENQHTIDLTDSEMNKLFEKTKKQLRENAEDMGNGCFKIYHKCDNACIGSIRNGTYDHDVYRDEALNNRFQIKGVELKSGYKNWILWISFAISCFLLCVALLGFIMWACQKGNIRCNICI

SEQ ID NO: 11441 - protein, 566 aa, synthetic construct; identical to SEQ ID NO: 9994
  REGION 1..566: note = hemagglutinin__InfluenzaA__AHL96176

SEQ ID NO: 11442 - protein, 566 aa, synthetic construct; identical to SEQ ID NO: 9994
  REGION 1..566: note = hemagglutinin__InfluenzaA__AHL96188

SEQ ID NO: 11443 - protein, 566 aa, synthetic construct
  REGION 1..566: note = hemagglutinin__InfluenzaA__AHL96200
MKTIIALSYILCLVFAQKLPGNDNSTATLCLGHHAVPNGTIVKTITNDRIEVTNATELVQNSSIGEICDSPHQVLDGENCTLIDALLGDPQCDGFQNKKWDLFVERSKAYSNCYPYDVPDYASLRSLVASSGTLEFNNESFNWAGVTQNGTSSACIRGSNSSFFSRLNWLTHLNFKYPALNVTMPNNEQFDKLYIWGVHHPGTDKDQIFLYAQSSGRITVSTKRSQQAVIPNIGSRPRIRNIPSRISIYWTIVKPGDILLINSTGNLIAPRGYFKIRSGKSSIMRSDAPIGKCKSECITPNGSIPNDKPFQNVNRITYGACPRYVKQSTLKLATGMRNVPEKQTRGIFGAIAGFIENGWEGMVDGWYGFRHQNSEGRGQAADLKSTQAAIDQINGKLNRLIGKTNEKFHQIEKEFSEVEGRIQDLEKYVEDTKIDLWSYNAELLVALENQHTIDLTDSEMNKLFEKTKKQLRENAEDMGNGCFKIYHKCDNACIGSIRNGTYDHDVYRDEALNNRFQIKGVELKSGYKDWILWISFAISCFLLCVALLGFIMWACQKGNIRCNICI

SEQ ID NO: 11444 - protein, 566 aa, synthetic construct; identical to SEQ ID NO: 9858
  REGION 1..566: note = hemagglutinin__InfluenzaA__AHL96212

SEQ ID NO: 11445 - protein, 566 aa, synthetic construct; identical to SEQ ID NO: 10467
  REGION 1..566: note = hemagglutinin__InfluenzaA__AHL96224

SEQ ID NO: 11446 - protein, 566 aa, synthetic construct
  REGION 1..566: note = hemagglutinin__InfluenzaA__AHL96236
MKTIIALSYILCLVFAQKLPGNDNSTATLCLGHHAVPNGTIVKTITNDRIEVTNATELVQNSSMGEICDSPHQILDGENCTLIDALLGDPQCDGFQNKKWDLFVERSKAYSNCYPYDVPDYASLRSLVASSGTLEFNNESFNWTGVTQNGTSSACIRRSNSSFFSRLNWLTHLNFKYPALNVTMPNNEQFDKLYIWGVHHPGTDKDQIFLYAQSSGRITVSTKRSQQAVIPNIGSRPRIRNIPSRISIYWTIVKPGDILLINSTGNLIAPRGYFKIRSGKSSIMRSDAPIGKCKSECITPNGSIPNDKPFQNVNRITYGACPRYVKQSTLKLATGMRNVPEKQTRGIFGAIAGFIENGWEGMVDGWYGFRHQNSEGRGQAADLKSTQAAIDQINGKLNRLIGKTNEKFHQIEKEFSEVEGRIQDLEKYVEDTKIDLWSYNAELLVALENQHTIDLTDSEMNKLFEKTKKQLRENAEDMGNGCFKIYHKCDNACIESIRNGTYDHDVYRDEALNNRFQIKGVELKSGYKNWILWISFAISCFLLCVALLGFIMWACQKGNIRCNICI

SEQ ID NO: 11447 - protein, 566 aa, synthetic construct
  REGION 1..566: note = hemagglutinin__InfluenzaA__AHL96248
MKTIIALGYILCLVFAQKLPGNDNSTATLCLGHHAVPNGTIVKTITNDRIEVTNATELVQNSSIGEICDSPHQILDGENCTLIDALLGDPQCDGFQNKKWDLFIERSKAYSNCYPYDVPDYASLRSLVASSGTLEFNNESFNWTGVTQNGTSSACIRRSNSSFFSRLNWLTHLNFKYPALNVTMPNNEQFDKLYIWGVHHPGTDKDQIFLYAQSSGRITVSTKRSQQAVIPNIGSRPRIRNIPSRISIYWTIVKPGDILLINSTGNLIAPRGYFKIRSGKSSIMRSDAPIGKCKSECITPNGSIPNDKPFQNVNRITYGACPRYVKQSTLKLATGMRNVPEKQTRGIFGAIAGFIENGWEGMVDGWYGFRHQNSEGRGQAADLKSTQAAIDQINGKLNRLIGKTNEKFHQIEKEFSEVEGRIQDLEKYVEDTKIDLWSYNAELLVALENQHTIDLTDSEMNKLFEKTKKQLRENAEDMGNGCFKIYHKCDNACIGSIRNGTYDHDVYRDEALNNRFQIKGVELKSGYKDWILWISFAISCFLLCVALLGFIMWACQKGNIRCNICI

SEQ ID NO: 11448 - protein, 566 aa, synthetic construct; identical to SEQ ID NO: 9994
  REGION 1..566: note = hemagglutinin__InfluenzaA__AHL96260

SEQ ID NO: 11449 - protein, 566 aa, synthetic construct; identical to SEQ ID NO: 9858
  REGION 1..566: note = hemagglutinin__InfluenzaA__AHL96274

SEQ ID NO: 11450 - protein, 566 aa, synthetic construct; identical to SEQ ID NO: 9994
  REGION 1..566: note = hemagglutinin__InfluenzaA__AHL96304

SEQ ID NO: 11451 - protein, 566 aa, synthetic construct; identical to SEQ ID NO: 9835
  REGION 1..566: note = hemagglutinin__InfluenzaA__AHL96318

SEQ ID NO: 11452 - protein, 566 aa, synthetic construct; identical to SEQ ID NO: 9994
  REGION 1..566: note = hemagglutinin__InfluenzaA__AHL96330

SEQ ID NO: 11453 - protein, 566 aa, synthetic construct; identical to SEQ ID NO: 9997
  REGION 1..566: note = hemagglutinin__InfluenzaA__AHL96342

SEQ ID NO: 11454 - protein, 566 aa, synthetic construct
  REGION 1..566: note = hemagglutinin__InfluenzaA__AHL96354
MKTIIALSYILCLVFAQKLPGNDNSTATLCLGHHAVPNGTIVKTITNDRIEVTNATELVQNSSIGEICDSPHQILDGENCTLIDALLGDPQCDGFQNKKWDLFVERSKAYSNCYPYDVPDYASLRSLVASSGTLEFNNESFNWAGVTQNGTSSACIRGSNSSFFSRLNWLTHLNFKYPALNVTMPNNEQFDKLYIWGVHHPGTDKDQIFLYAQSSGRITVSTKRSQQAVIPNIGSRPRIRNIPSRISIYWTIVKPGDILLINSTGNLIAPRGYFKIRSGKSSIMRSDAPIGKCKSECITPNGSIPNDKPFQNVNRITYGACPRYVKQSTLKLATGMRNVPEKQTRGIFGAIAGFIENGWEGMVDGWYGFRHLNSEGRGQAADLKSTQAAIDQINGKLNRLIGKTNEKFHQIEKEFSEVEGRIQDLEKYVEDTKIDLWSYNAELLVALENQHTIDLTDSEMNKLFEKTKKQLRENAEDMGNGCFKIYHKCDNACIGSIRNGTYDHDVYRDEALNNRFQIKGVELKSGYKDWILWISFAISCFLLCVALLGFIMWACQKGNIRCNICI

SEQ ID NO: 11455 - protein, 566 aa, synthetic construct
  REGION 1..566: note = hemagglutinin__InfluenzaA__AHL96366
MKTIIALSYILCLVFAQKLPENDNSTATLCLGHHAVPNGTIVKTITNDRIEVTNATELVQNSSIGEICDSPHQILDGENCTLIDALLGDPQCDGFQNKKWDLFVERSKAYSNCYPYDVPDYASLRSLVASSGTLEFNNESFNWAGVTQNGTSSACIRGSNSSFFSRLNWLTHLNFKYPALNVTMPNNEQFDKLYIWGVHHPGTDKDQIFLYAQSSGRITVSTKRSQQAVIPNIGSRPRIRNIPSRISIYWTIVKPGDILLINSTGNLIAPRGYFKIRSGKSSIMRSDAPIGKCKSECITPNGSIPNDKPFQNVNRITYGACPRYVKQSTLKLATGMRNVPEKQTRGIFGAIAGFIENGWEGMVDGWYGFRHQNSEGRGQAADLKSTQAAIDQINGKLNRLIGKTNEKFHQIEKEFSEVEGRIQDLEKYVEDTKIDLWSYNAELLVALENQHTIDLTDSEMNKLFEKTKKQLRENAEDMGNGCFKIYHKCDNACIGSIRNGTYDHDVYRDEALNNRFQIKGVELKSGYKDWILWISFAISCFLLCVALLGFIMWACQKGNIRCNICI

SEQ ID NO: 11456 - protein, 566 aa, synthetic construct; identical to SEQ ID NO: 9868
  REGION 1..566: note = hemagglutinin__InfluenzaA__AHL96378

SEQ ID NO: 11457 - protein, 566 aa, synthetic construct; identical to SEQ ID NO: 9858
  REGION 1..566: note = hemagglutinin__InfluenzaA__AHL96390

SEQ ID NO: 11458 - protein, 566 aa, synthetic construct
  REGION 1..566: note = hemagglutinin__InfluenzaA__AHL96402
MKTIIALSYILCLVFAQKIPGNDNSTATLCLGHHAVPNGTIVKTITNDRIEVTNATELVQNSSIGEICDSPHQILDGENCTLIDALLGDPQCDGFQNKKWDLFVERSKAYSNCYPYDVPDYASLRSLVASSGTLEFNNESFNWTGVTQNGTSSACIRGSNSSFFSRLNWLTHLNFKYPALNVTMPNNEQFDKLYIWGVHHPGTDKDQIFLYAQSSGRITVSTKRSQQAVIPNIGSRPRIRNIPSRISIYWTIVKPGDILLINSTGNLIAPRGYFKIRSGKSSIMRSDAPIGKCKSECITPNGSIPNDKPFQNVNRITYGACPRYVKQSTLKLATGMRNVPEKQTRGIFGAIAGFIENGWEGMVDGWYGFRHQNSEGRGQAADLKSTQAAIDQINGKLNRLIGKTNKKFHQIEKEFSEVEGRIQDLEKYVEDTKIDLWSYNAELLVALENQHTIDLTDSEMNKLFEKTKKQLRENAEDMGNGCFKIYHKCDNACIGSIRNGTYDHDVYRDEALNNRFQIKGVELKSGYKDWILWISFAISCFLLCVALLGFIMWACQKGNIRCNICI

SEQ ID NO: 11459 - protein, 566 aa, synthetic construct; identical to SEQ ID NO: 9868
  REGION 1..566: note = hemagglutinin__InfluenzaA__AHL96414

SEQ ID NO: 11460 - protein, 566 aa, synthetic construct; identical to SEQ ID NO: 9994
  REGION 1..566: note = hemagglutinin__InfluenzaA__AHL96426

SEQ ID NO: 11461 - protein, 566 aa, synthetic construct
  REGION 1..566: note = hemagglutinin__InfluenzaA__AHL96438
MKTIIALSYILCLVFAQELPGNDDSTATLCLGHHAVPNGTIVKTITNDQIEVTNATELVQSSSTGEICNSPHQILDGENCTLIDALLGDPQCDGFQNKKWDLFVERSKAHSNCYPYDVPDYASLRSLVASSGTLEFNNESFNWTGVTQNGTSSACIRRSNNSFFSRLNWLTHLNFKYPALNVTMPNNEQFDKLYIWGVHHPGTDKDQIFLYAQASGRITVSTKRSQQAVIPNIGSRPRVRNIPSRVSIYWTIVKPGDILLINSTGNLIAPRGYFKIRSGKSSIMRSDAPIGKCSSACITPNGSIPNDKPFQNVNRITYGACPRYVKQNTLKLATGMRNVPEKQTRGIFGAIAGFIENGWEGMVDGWYGFRHQNSEGRGQAADLKSTQAAIDQINGKLNRLIGKTNEKFHQIEKEFSEVEGRIQDLEKYVEDTKIDLWSYNAELLVALENQHTIDLTDSEMNKLFEKTKKQLRENAEDMGNGCFKIYHKCDNACIGSIRNGTYDHDVYRDEALNNRFQIKGVELKSGYKDWILWISFAISCFLLCVALLGFIMWACQKGNIRCNICI

SEQ ID NO: 11462 - protein, 566 aa, synthetic construct; identical to SEQ ID NO: 9868
  REGION 1..566: note = hemagglutinin__InfluenzaA__AHL96450

SEQ ID NO: 11463 - protein, 566 aa, synthetic construct; identical to SEQ ID NO: 9994
  REGION 1..566: note = hemagglutinin__InfluenzaA__AHL96462

SEQ ID NO: 11464 - protein, 566 aa, synthetic construct
  REGION 1..566: note = hemagglutinin__InfluenzaA__AHL96474
MKAILVVMLYTFATANADTLCIGYHANNSTDTVDTVLEKNVTVTHSVNLLEDKHNGKLCKLRGVSPLHLGKCNIAGWILGNPECESLSTASSWSYIVETSGSDNGTCYPGDFIDYEELREQLSSVSSFERFEIFPKTSSWPNHDSNKGVTAACPHAGAKGFYKNLIWLVKKGNSYPKLSISYINDKGKEVLVLWGIHHPSTTADQQSLYQNADTYVFVGTSRYSKKFKPEIAIRPKVRDQEGRMNYYWTLVEPGDKITFEATGNLVVPRYAFAMERNAGSGIIISDTPVHDCNTTCQTPKGAINTSLPFQNIHPITIGKCPKYVKSTKLRLATGLRNVPSIQSRGLFGAIAGFIEGGWTGMVDGWYGYHHQNEQGSGYAADLKSTQNAIDKITNKVNSVIEKMNTQFTAVGKEFNHLEKRIENLNKKVDDGFLDIWTYNAELLVLLENERTLDYHDSNVKNLYEKVRNQLKNNAKEIGNGCFEFYHKCDNTCMESVKNGTYDYPKYSEEAKLNREEIDGVKLESTRIYQILAIYSTAASSLVLVVSLGAISFWMCSNGSLQCRICI

SEQ ID NO: 11465 - protein, 566 aa, synthetic construct
  REGION 1..566: note = hemagglutinin__InfluenzaA__AHL96485
MKTIIALSYILCLVFAQKLPGNDNSTATLCLGHHAVPNGTIVKTITNDRIEVTNATELVQNSSIGEICDSPHQILDGENCTLIDALLGDPQCDGFQNKKWDLFVERSKAYSNCYPYDVPDYASLRSLVASSGTLEFNNESFNWTGVTQNGTSSACIRRSNSSFFSRLNWLTHLNFKYPALNVTMPNNEQFDKLYIWGVHHPGTDKDQIFLYAQSSGRITVSTKRSQQAVIPNIGSRPRIRNIPSRISIYWTIVKPGDILLINSTGNLIAPRGYFKIRSGKSSIMKSDAPIGKCKSECITPNGSIPNDKPFQNVNRITYGACPRYVKQSTLKLATGMRNVPEKQTRGIFGAIAGFIENGWEGMVDGWYGFRHQNSEGRGQAADLKSTQAAIDQINGKLNRLIGKTNEKFHQIEKEFSEVEGRIQDLEKYVEDTKIDLWSYNAELLVALENQHTIDLTDSEMNKLFEKTKKQLRENAEDMGNGCFKIYHKCDNACIGSIRNGTYDHNVYRDEALNNRFQIKGVELKSGYKDWILWISFAISCFLLCVALLGFIMWACQKGNIRCNICI

SEQ ID NO: 11466 - protein, 566 aa, synthetic construct; identical to SEQ ID NO: 9994
  REGION 1..566: note = hemagglutinin__InfluenzaA__AHL96497

SEQ ID NO: 11467 - protein, 566 aa, synthetic construct; identical to SEQ ID NO: 9868
  REGION 1..566: note = hemagglutinin__InfluenzaA__AHL96509

SEQ ID NO: 11468 - protein, 566 aa, synthetic construct; identical to SEQ ID NO: 9835
  REGION 1..566: note = hemagglutinin__InfluenzaA__AHL96521

SEQ ID NO: 11469 - protein, 566 aa, synthetic construct; identical to SEQ ID NO: 9994
  REGION 1..566: note = hemagglutinin__InfluenzaA__AHL96533

SEQ ID NO: 11470 - protein, 566 aa, synthetic construct; identical to SEQ ID NO: 9858
  REGION 1..566: note = hemagglutinin__InfluenzaA__AHL96545

SEQ ID NO: 11471 - protein, 566 aa, synthetic construct
  REGION 1..566: note = hemagglutinin__InfluenzaA__AHL96569
MKTIIALSYILCLVFAQKLPGNDNSTATLCLGHHAVPNGTIVKTITNDRIEVTNATELVQNSSIGEICDSPHQILDGENCTLIDALLGDPQCDGFQNKKWDLFVERSKAYSNCYPYDVPDYASLRSLVASSGTLEFNNESFNWTGVTQNGTSSACIRRSNSSFFSRLNWLTHLNFKYPALNVTMPNNEQFDKLYIWGVHHPGTDKDQIFLYAQSSGRVTVSTKRSQQAVIPNIGSRPRIRNIPSRISIYWTIVKPGDILLINSTGNLIAPRGYFKIRSGKSSIMRSDAPIGKCKSECITPNGSIPNDKPFQNVNRITYGACPRYVKQSTLKLATGMRNVPEKQTRGIFGAIAGFIENGWEGMVDGWYGFRHQNSEGRGQAADLKSTQAAIDQINGKLNRLIGKTNEKFHQIEKEFSEVEGRIQDLEKYVEDTKIDLWSYNAELLVALENQHTIDLTDSEMNKLFEKTKKQLRENAEDMGNGCFKIYHKCDNACIGSIRNGTYDHDVYRDEALNNRFQIKGVELKSGYKDWILWISFAISCFLLCVALLGFIMWACQKGNIRCNICI

SEQ ID NO: 11472 - protein, 566 aa, synthetic construct; identical to SEQ ID NO: 11464
  REGION 1..566: note = hemagglutinin__InfluenzaA__AHL96581

SEQ ID NO: 11473 - protein, 566 aa, synthetic construct
  REGION 1..566: note = hemagglutinin__InfluenzaA__AHL96592
MKTIIALGYILCLVFAQKIPGNDNSTATLCLGHHAVPNGTIVKTITNDRIEVTNATELVQNSSIGEICDSPHQILDGENCTLIDALLGDPQCDGFQNKKWDLFIERSKAYSNCYPYDVPDYASLRSLVASSGTLEFNNESFNWTGVTQNGTSSACIRRSNSSFFSRLNWLTHLNFKYPALNVTMPNNEQFDKLYIWGVHHPGTDKDQIFLYAQSSGRITVSTKRSQQAVIPNIGSRPRIRNIPSRISIYWTIVKPGDILLINSTGNLIAPRGYFKIRSGKSSIMRSDAPIGKCKSECITPNGSIPNDKPFQNVNRITYGACPRYVKQSTLKLATGMRNVPEKQTRGIFGAIAGFIENGWEGMVDGWYGFRHQNSEGRGQAADLKSTQAAIDQINGKLNRLIGKTNEKFHQIEKEFSEVEGRIQDLEKYVEDTKIDLWSYNAELLVALENQHTIDLTDSEMNKLFEKTKKQLRENAEDMGNGCFKIYHKCDNACIGSIRNGTYDHDVYRDEALNNRFQIKGVELKSGYKDWILWISFAISCFLLCVALLGFIMWACQKGNIRCNICI

SEQ ID NO: 11474 - protein, 566 aa, synthetic construct; identical to SEQ ID NO: 9994
  REGION 1..566: note = hemagglutinin__InfluenzaA__AHL96604

SEQ ID NO: 11475 - protein, 566 aa, synthetic construct; identical to SEQ ID NO: 9994
  REGION 1..566: note = hemagglutinin__InfluenzaA__AHL96616

SEQ ID NO: 11476 - protein, 566 aa, synthetic construct
  REGION 1..566: note = hemagglutinin__InfluenzaA__AHL96628
MKTIIALSYILCLVFAQKLPGNDNSTATLCLGHHAVPNGTIVKTITNDRIEVTNATELVQNSSIGEICDSPHQILDGENCTLIDALLGDPQCDGFQNKKWDLFVERSKAYSNCYPYDVPDYASLRSLVASSGTLEFNNESFNWTGVTQNGTSSACIRRSNSSFFSRLNWLTHLNFKYPALNVTMPNNEQFDKLYIWGVHHPGTDKDQIFLYAQSSGRITVSTKRSQQAVIPNIGSRPRIRNIPSRISIYWTIVKPGDILLINSTGNLIAPRGYFKIRSGKSSIMRSDAPIGKCKSECITPNGSIPNDKPFQNVNRITYGACPRYVKQSTLKLATGMRNVPEKQTRGIFGAIAGFIENGWGGMVDGWYGFRHQNSEGRGQAADLKSTQAAIDQINGKLNRLIGKTNEKFHQIEKEFSEVEGRIQDLEKYVEDTKIDLWSYNAELLVALENQHTIDLTDSEMNKLFEKTKKQLRENAEDMGNGCFKIYHKCDNACIGSIRNGTYDHNVYRDEALNNRFQIKGVELKSGYKDWILWISFAISCFLLCVALLGFIMWACQKGNIRCNICI

SEQ ID NO: 11477 - protein, 566 aa, synthetic construct; identical to SEQ ID NO: 11465
  REGION 1..566: note = hemagglutinin__InfluenzaA__AHL96640

SEQ ID NO: 11478 - protein, 566 aa, synthetic construct
  REGION 1..566: note = hemagglutinin__InfluenzaA__AHL96652
MKTIIALSYILCLVFAQKLPGNDNSTATLCLGHHAVPNGTIVKTITNDRIEVTNATELVQDSSIGEICDSPHQILDGENCTLIDALLGDPQCDGFQNKKWDLFVERSKAYSNCYPYDVPDYASLRSLVASSGTLEFNNESFNWAGVTQNGTSSACIRGSNSSFFSRLNWLTHLNFKYPALNVTMPNNEQFDKLYIWGVHHPGTDKDQIFLYAQSSGRITVSTKRSQQAVIPNIGSRPRIRNIPSRISIYWTIVKPGDILLINSTGNLIAPRGYFKIRSGKSSIMRSDAPIGKCKSECITPNGSIPNDKPFQNVNRITYGACPRYVKQSTLKLATGMRNVPEKQTRGIFGAIAGFIENGWEGMVDGWYGFRHQNSEGRGQAADLKSTQAAIDQINGKLNRLIGKTNEKFHQIEKEFSEVEGRIQDLEKYVEDTKIDLWSYNAELLVALENQHTIDLTDSEMNKLFEKTKKQLRENAEDMGNGCFKIYHKCDNACIGSIRNGTYDHDVYRDEALNNRFQIKGVELKSGYKDWILWISFAISCFLLCVALLGFIMWACQKGNIRCNICI

SEQ ID NO: 11479 - protein, 566 aa, synthetic construct; identical to SEQ ID NO: 10467
  REGION 1..566: note = hemagglutinin__InfluenzaA__AHL96664

SEQ ID NO: 11480 - protein, 566 aa, synthetic construct
  REGION 1..566: note = hemagglutinin__InfluenzaA__AHL96676
MKTIIALSYILCLVFAQKLPGNDNSTATLCLGHHAVPNGTIVKTITNDRIEVTNATELVQNSSIGEICDSPHQILDGENCTLIDALLGDPQCDGFQNKKWDLFVERSKAYSNCYPYDVPDYASLRSLVASSGTLEFNNESFNWTGVTQNGTSSACIRRSNSSFFSRLNWLTHLNFKYPALNVTMPNNEQFDKLYIWGVHHPGTDKDQIFLYAQSSGRITVSTKRSQQAVIPNIGSRPRIRNIPSRISIYWTIVKPGDILLINSTGNLIAPRGYFKIRSGKSSIMRSDAPIGKCKSECITPNGSIPIDKPFQNVNRITYGACPRYVKQSTLKLATGMRNVPEKQTRGIFGAIAGFIENGWEGMVDGWYGFRHQNSEGRGQAADLKSTQAAIDQINGKLNRLIGKTNEKFHQIEKEFSEVEGRIQDLEKYVEDTKIDLWSYNAELLVALENQHTIDLTDSEMNKLFEKTKKQLRENAEDMGNGCFKIYHKCDNACIGSIRNGTYDHDVYRDEALNNRFQIKGVELKSGYKDWILWISFAISCFLLCVALLGFIMWACQKGNIRCNICI

SEQ ID NO: 11481 - protein, 566 aa, synthetic construct; identical to SEQ ID NO: 9994
  REGION 1..566: note = hemagglutinin__InfluenzaA__AHL96688

SEQ ID NO: 11482 - protein, 566 aa, synthetic construct; identical to SEQ ID NO: 9994
  REGION 1..566: note = hemagglutinin__InfluenzaA__AHL96700

SEQ ID NO: 11483 - protein, 566 aa, synthetic construct; identical to SEQ ID NO: 9994
  REGION 1..566: note = hemagglutinin__InfluenzaA__AHL96712

SEQ ID NO: 11484 - protein, 566 aa, synthetic construct; identical to SEQ ID NO: 9868
  REGION 1..566: note = hemagglutinin__InfluenzaA__AHL96724

SEQ ID NO: 11485 - protein, 566 aa, synthetic construct; identical to SEQ ID NO: 9858
  REGION 1..566: note = hemagglutinin__InfluenzaA__AHL96748

SEQ ID NO: 11486 - protein, 566 aa, synthetic construct; identical to SEQ ID NO: 9868
  REGION 1..566: note = hemagglutinin__InfluenzaA__AHL96784

SEQ ID NO: 11487 - protein, 566 aa, synthetic construct
  REGION 1..566: note = hemagglutinin__InfluenzaA__AHL96796
MKTIIALSYILCLVFAQKLPGNDNSTATLCLGHHAVPNGTIVKTITNDRIEVTNATELVQNSSIGEICDSPHQILDGENCTLIDALLGDPQCDGFQNKKWDLFIERSKAYSNCYPYDVPDYASLRSLVASSGTLEFNNESFNWTGVTQNGTSSACIRRSNSSFFSRLNWLTHLNFKYPALNVTMPNNEQFDKLYIWGVHHPGTDKDQIFLYAQSSGRITVSTKRSQQAVIPNIGSRPRIRNIPSRISIYWTIVKPGDILLINSTGNLIAPRGYFKIRSGKSSIMRSDAPIGKCKSECITPNGSIPNDKPFQNVNRITYGACPRYVKQSTLKLATGMRNVPEKQTRGIFGAIAGFIENGWEGMVDGWYGFRHQNSEGRGQAADLKSTQAAIDQINGKLNRLIGKTNEKFHQIEKEFSEVEGRIQDLEKYVEDTKIDLWSYNAELLVALENQHTIDLTDSEMNKLFEKTKKQLRENAEDMGNGCFKIYHKCDNACIGSIRNGTYDHDVYRDEALNNRFQIKGVELKSGYKDWILWISFAISCFLLCVALLGFIMWACQKGNIRCNICI

SEQ ID NO: 11488 - protein, 566 aa, synthetic construct; identical to SEQ ID NO: 9858
  REGION 1..566: note = hemagglutinin__InfluenzaA__AHL96808

SEQ ID NO: 11489 - protein, 566 aa, synthetic construct; identical to SEQ ID NO: 9858
  REGION 1..566: note = hemagglutinin__InfluenzaA__AHL96820

SEQ ID NO: 11490 - protein, 566 aa, synthetic construct; identical to SEQ ID NO: 9868
  REGION 1..566: note = hemagglutinin__InfluenzaA__AHL96832

SEQ ID NO: 11491 - protein, 566 aa, synthetic construct; identical to SEQ ID NO: 9868
  REGION 1..566: note = hemagglutinin__InfluenzaA__AHL96844

SEQ ID NO: 11492 - protein, 566 aa, synthetic construct; identical to SEQ ID NO: 9868
  REGION 1..566: note = hemagglutinin__InfluenzaA__AHL96856

SEQ ID NO: 11493 - protein, 566 aa, synthetic construct
  REGION 1..566: note = hemagglutinin__InfluenzaA__AHL96868
MKTIIALSYILCLVFAQKLPGNDNSTATLCLGHHAVPNGTIVKTITNDRIEVTNATELVQNSSIGEICDSPHQILDGGNCTLIDALLGDPQCDGFQNKKWDLFVERSKAYSNCYPYDVPDYASLRSLVASSGTLEFNNESFNWTGVTQNGTSSACIRRSNSSFFSRLNWLTHLNFKYPALNVTMPNNEQFDKLYIWGVHHPGTDKDQIFLYAQSSGRITVSTKRSQQAVVPNIGSRPRIRNIPSRISIYWTIVKPGDILLINSTGNLIAPRGYFKIRSGKSSIMRSDAPIGKCKSECITPNGSIPNDKPFQNVNRITYGACPRYVKQSTLKLATGMRNVPEKQTRGIFGAIAGFIENGWEGMMDGWYGFRHQNSEGRGQAADLKSTQAAIDQINGKLNRLIGKTNEKFHQIEKEFSEVEGRIQDLEKYVEDTKIDLWSYNAELLVALENQHTIDLTDSEMNKLFEKTKKQLRENAEDMGNGCFKIYHKCDNACIGSIRNGTYDHDVYRDEALNNRFQIKGVELKSGYKDWILWISFAMSCFLLCVALLGFIMWACQKGNIRCNICI

SEQ ID NO: 11494 - protein, 566 aa, synthetic construct; identical to SEQ ID NO: 9858
  REGION 1..566: note = hemagglutinin__InfluenzaA__AHL96880

SEQ ID NO: 11495 - protein, 566 aa, synthetic construct
  REGION 1..566: note = hemagglutinin__InfluenzaA__AHL96892
MKTIIALSYILCLVFAQKLPGNDNSTATLCLGHHAVPNGTIVKTITNDRIEVTNATELVQNSSIGEICDSPHQILDGENCTLIDALLGDPQCDGFQNKKWDLFVERSKAYSNCYPYDVPDYASLRSLVASSGTLEFNNESFNWAGVTQNGTSSACIRGSNSSFFSRLNWLTHLNFKYPALNVTMPNNEQFDKLYIWGVHHPGTDKDQIFLYAQSSGRITVSTKRSQQAVIPNIGSRPRIRNIPSRISIYWTIVKPGDILLINSTGNLIAPRGYFKIRSGKSSIMRSDAPIGKCKSECITPNGSIPNDKPFQNVNRITYGACPRYVKQSTLKLATGMRNVPEKQTRGIFGAIAGFIENGWEGMVDGWYGFRHQNSEGRGQAADLKSTQAAIDQINGKLNRLIGKTNEKFHQIEKEFSEVEGRVQDLEKYVEDTKIDLWSYNAELLVALENQHTIDLTDSEMNKLFEKTKKQLRENAEDMGNGCFKIYHKCDNACIGSIRNGTYDHDVYRDEALNNRFQIKGVELKSGYKDWILWISFAISCFLLCVALLGFIMWACQKGNIRCNICI

SEQ ID NO: 11496 - protein, 566 aa, synthetic construct
  REGION 1..566: note = hemagglutinin__InfluenzaA__AHL96904
MKTIIALSYILCLVFAQKLPGNDNSTATLCLGHHAVPNGMIVKTITNDRIEVTNATELVQNSSIGEICDSPHQILDGENCTLIDALLGDPQCDGFQNKKWDLFVERSKAYSNCYPYDVPDYASLRSLVASSGTLEFNNESFNWTGVTQNGTSSACIRRSNSSFFSRLNWLTHLNFKYPALNVTMPNNEQFDKLYIWGVHHPGTDKDQIFLYAQSSGRITVSTKRSQQAVVPNIGSRPRIRNIPSRISIYWTIVKPGDILLINSTGNLIAPRGYFKIRSGKSSIMRSDAPIGKCKSECITPNGSIPNDKPFQNVNRITYGACPRYVKQSTLKLATGMRNVPEKQTRGIFGAIAGFIENGWEGMVDGWYGFRHQNSEGRGQAADLKSTQAAIDQINGKLNRLIGKTNEKFHQIEKEFSEVEGRIQDLEKYVEDTKIDLWSYNAELLVALENQHTIDLTDSEMNKLFEKTKKQLRENAEDMGNGCFKIYHKCDNACIGSIRNGTYDHDVYRDEALNNRFQIKGVELKSGYKDWILWISFAMSCFLLCVALLGSIMWACQKGNIRCNICI

SEQ ID NO: 11497 - protein, 566 aa, synthetic construct; identical to SEQ ID NO: 9858
  REGION 1..566: note = hemagglutinin__InfluenzaA__AHL96916

SEQ ID NO: 11498 - protein, 566 aa, synthetic construct; identical to SEQ ID NO: 9858
  REGION 1..566: note = hemagglutinin__InfluenzaA__AHL96928

SEQ ID NO: 11499 - protein, 566 aa, synthetic construct; identical to SEQ ID NO: 9858
  REGION 1..566: note = hemagglutinin__InfluenzaA__AHL96940

SEQ ID NO: 11500 - protein, 566 aa, synthetic construct; identical to SEQ ID NO: 9868
  REGION 1..566: note = hemagglutinin__InfluenzaA__AHL96952

SEQ ID NO: 11501 - protein, 566 aa, synthetic construct; identical to SEQ ID NO: 9868
  REGION 1..566: note = hemagglutinin__InfluenzaA__AHL96964

SEQ ID NO: 11502 - protein, 566 aa, synthetic construct; identical to SEQ ID NO: 10026
  REGION 1..566: note = hemagglutinin__InfluenzaA__AHL96976

SEQ ID NO: 11503 - protein, 566 aa, synthetic construct
  REGION 1..566: note = hemagglutinin__InfluenzaA__AHL96988
MKTIIALSYILCLVFAQKLPGNDNSTATLCLGHHAVPNGTIVKTITNDRIEVTNATELVQNSSIGEICDSPHQILDGENCTLIDALLGDPQCDGFQNKKWDLFVERSKAYSNCYPYDVPDYASLRSLVASSGTLEFNNESFNWTGVTQNGTSSACIRRSNSSFFSRLNWLTHLNFKYPALNVTMPNNEQFDKLYIWGVHHPGTDKDQIFLYAQSSGRITVSTKRSQQAVIPNIGSRPRIRNIPSRISIYWTIVRPGDILLINSTGNLIAPRGYFKIRSGKSSIMRSDAPIGKCKSECITPNGSIPNDKPFQNVNRITYGACPRYVKQSTLKLATGMRNVPEKQTRGIFGAIAGFIENGWEGMVDGWYGFRHQNSEGRGQAADLKSTQAAIDQINGKLNRLIGKTNEKFHQIEKEFSEVEGRIQDLEKYVEDTKIDLWSYNAELLVALENQHTIDLTDSEMNKLFEKTKKQLRENAEDMGNGCFKIYHKCDNACIGSIRNGTYDHNVYRDEALNNRFQIKGVELKSGYKDWILWISFAISCFLLCVALLGFIMWACQKGNIRCNICI

SEQ ID NO: 11504 - protein, 566 aa, synthetic construct; identical to SEQ ID NO: 9868
  REGION 1..566: note = hemagglutinin__InfluenzaA__AHL97000

SEQ ID NO: 11505 - protein, 566 aa, synthetic construct; identical to SEQ ID NO: 9994
  REGION 1..566: note = hemagglutinin__InfluenzaA__AHL97012

SEQ ID NO: 11506 - protein, 566 aa, synthetic construct
  REGION 1..566: note = hemagglutinin__InfluenzaA__AHL97024
MKTIIALSYILCLVFAQKLPGNDNSTATLCLGHHAVPNGTIVKTIMNDRIEVTNATELVQNSSIGEICDSPHQILDGENCTLIDALLGDPQCDGFQNKKWDLFVERSKAYSNCYPYDVPDYASLRSLVASSGTLEFNNESFNWAGVTQNGTSSACIRGSNSSFFSRLNWLTHLNFKYPALNVTMPNNEQFDKLYIWGVHHPGTDKDQIFLYAQSSGRITVSTKRSQQAVIPNIGSRPRIRNIPSRISIYWTIVKPGDILLINSTGNLIAPRGYFKIRSGKSSIMRSDAPIGKCKSECITPNGSIPNDKPFQNVNRITYGACPRYVKQSTLKLATGMRNVPEKQTRGIFGAIAGFIENGWEGMMDGWYGFRHQNSEGRGQAADLKSTQAAIDQINGKLNRLIGKTNEKFHQIEKEFSEVEGRIQDLEKYVEDTKIDLWSYNAELLVALENQHTIDLTDSEMNKLFEKTKKQLRENAEDMGNGCFKIYHKCDNACIGSIRNGTYDHDVYRDEALNNRFQIKGVELKSGYKDWILWISFAISCFLLCVALLGFIMWACQKGNIRCNICI

SEQ ID NO: 11507 - protein, 566 aa, synthetic construct
  REGION 1..566: note = hemagglutinin__InfluenzaA__AHL97036
MKTIIALSYILCLVFAQKLPGNDNSTATLCLGHHAVPNGTIVKTITNDRIEVTNATELVQNSSIGEICDSPHQILDGENCTLIDALLGDPQCDGFQNKKWDLFVERSKAYSNCYPYDVPDYASLRSLVASSGTLEFNNESFNWTGVTQNGTSSACIRRSNSSFFSRLNWLTHLNFKYPALNVTMPNNEQFDKLYIWGVHHPGTDKDQIFLYAQSSGRITVSTKRSQQAVIPNIGSRPRIRNIPSRISIYWTIVKPGDILLINSTGNLIAPRGYFKIRSGKSSIMRSDAPIGKCKSECITPNGSIPNDKPFQNVNRITYGACPRYVKQSTLKLATGMRNVPEKQTRGIFGAIAGFIENGWEGMVDGWYGFRHQNSEGRGQAADLKSTQAAIDQINGKLNRLIGKTNEKFHQIEKEFSEVEGRIQDLEKYVEDTKIDLWSYNAELLVALENQHTIDLTDSEMNKLFEKTKKQLRENAEDMGNGCFKIYHKCDNTCIGSIRNGTYDHDVYRDEALNNRFQIKGVELKSGYKDWILWISFAISCFLLCVALLGFIMWACQKGNIRCNICI

SEQ ID NO: 11508 - protein, 566 aa, synthetic construct; identical to SEQ ID NO: 9883
  REGION 1..566: note = hemagglutinin__InfluenzaA__AHL97048

SEQ ID NO: 11509 - protein, 566 aa, synthetic construct
  REGION 1..566: note = hemagglutinin__InfluenzaA__AHL97060
MKTIIALSYILCLVFAQKIPGNDNSTATLCLGHHAVPNGTIVKTITNDRIEVTNATELVQNSSIGEICDSPHQILDGENCTLIDALLGDPQCDGFQNKKWDLFVERSKAYSNCYPYDVPDYASLRSLVASSGTLEFNNESFNWTGVTQNGTSSACIRRSNSSFFSRLNWLTHLNFKYPALNVTMPNNEQFDKLYIWGVHHPGTDKDQIFLYAQSSGRITVSTKRSQQAVIPNIGSRPRIRNIPSRISIYWTIVKPGDILLINSTGNLIAPRGYFKIRSGKSSIMRSDAPIGKCKSECITPNGSIPNDKPFQNVNRITYGACPRYVKQSTLKLATGMRNVPEKQTRGIFGAIAGFIENGWEGMVDGWYGFRHQNSEGRGQAADLKSTQAAIDQINGKLNRLIGKTNEKFHQIEKEFSEVEGRIQDLEKYVEDTKIDLWSYNAELLVALENQHTIDLTDSEMNKLFEKTKKQLRENAEDMGNGCFKIYHKCDNACIGSIRNGTYEHDVYRDEALNNRFQIKGVELKSGYKDWILWISFAISCFLLCVALLGFIMWACQKGNIRCNICI

SEQ ID NO: 11510 - protein, 566 aa, synthetic construct; identical to SEQ ID NO: 9994
  REGION 1..566: note = hemagglutinin__InfluenzaA__AHL97072

SEQ ID NO: 11511 - protein, 566 aa, synthetic construct; identical to SEQ ID NO: 9994
  REGION 1..566: note = hemagglutinin__InfluenzaA__AHL97084

SEQ ID NO: 11512 - protein, 566 aa, synthetic construct; identical to SEQ ID NO: 9835
  REGION 1..566: note = hemagglutinin__InfluenzaA__AHL97096

SEQ ID NO: 11513 - protein, 566 aa, synthetic construct; identical to SEQ ID NO: 9997
  REGION 1..566: note = hemagglutinin__InfluenzaA__AHL97108

SEQ ID NO: 11514 - protein, 566 aa, synthetic construct
  REGION 1..566: note = hemagglutinin__InfluenzaA__AHL97120
MKTIIALSYILCLVFAQKLPGNDNSTATLCLGHHAVPNGTIVKTITNDRIEVTNATELVQNSSIGEICDSPHQILDGENCTLIDALLGDPQCDGFQNKKWDLFVERSKAYSNCYPYDVPDYASLRSLVASSGTLEFNNESFNWAGVTQNGTSSACIRGSNSSFFSRLNWLTHLNFKYPALNVTMPNNEQFDKLYIWGVHHPGTDKDQIFLYAQSSGRITVSTKRSQQAVIPNIGSRPRIRNIPSRISIYWTIVKPGDILLINSTGNLIAPRGYFKIRSGKSSIMRSDAPIGKCKSECITPNGSIPNDKPFQNVNRVTYGACPRYVKQSTLKLATGMRNVPEKQTRGIFGAIAGFIENGWEGMVDGWYGFRHQNSEGRGQAADLKSTQAAIDQINGKLNRLIGKTNEKFHQIEKEFSEVEGRIQDLEKYVEDTKIDLWSYNAELLVALENQHTIDLTDSEMNKLFEKTKKQLRENAEDMGNGCFKIYHKCDNACIGSIINGTYDHDVYRDEALNNRFQIKGVELKSGYKDWILWISFAISCFLLCVALLGFIMWACQKGNIRCNICI

SEQ ID NO: 11515 - protein, 566 aa, synthetic construct
  REGION 1..566: note = hemagglutinin__InfluenzaA__AHL97132
MKTIIALSYILCLVFAQKLPGNDNSTATLCLGHHAVPNGTIVKTITNDQIEVTNATELVQNSSIGEICDSPHQILDGENCTLIDALLGDPQCDGFQNKKWDLFVERSKAYSNCYPYDVPDYASLRSLVASSGTLEFNNESFNWAGVTQNGTSSACIRGSNSSFFSRLNWLTHLNFKYPALNVTMPNNEQFDKLYIWGVHHPGTDKDQIFLYAQSSGRITVSTKRSQQAVIPNIGSRPRIRNIPSRISIYWTIVKPGDILLINSTGNLIAPRGYFKIRSGKSSIMRSDAPIGKCKSECITPNGSIPNDKPFQNVNRITYGACPRYVKQSTLKLATGMRNVPGKQTRGIFGAIAGFIENGWEGMVDGWYGFRHQNSEGRGQAADLKSTQAAIDQINGKLNRLIGKTNEKFHQIEKEFSEVEGRIQDLEKYVEDTKIDLWSYNAELLVALENQHTIDLTDSEMNKLFEKTKKQLRENAEDMGNGCFKIYHKCDNACIGSIRNGTYDHDVYRDEALNNRFQIKGVELKSGYKDWILWISFAISCFLLCVALLGFIMWACQKGNIRCNICI

SEQ ID NO: 11516 - protein, 566 aa, synthetic construct; identical to SEQ ID NO: 9994
  REGION 1..566: note = hemagglutinin__InfluenzaA__AHL97144

SEQ ID NO: 11517 - protein, 566 aa, synthetic construct; identical to SEQ ID NO: 9994
  REGION 1..566: note = hemagglutinin__InfluenzaA__AHL97156

SEQ ID NO: 11518 - protein, 566 aa, synthetic construct; identical to SEQ ID NO: 9994
  REGION 1..566: note = hemagglutinin__InfluenzaA__AHL97168

SEQ ID NO: 11519 - protein, 566 aa, synthetic construct; identical to SEQ ID NO: 9868
  REGION 1..566: note = hemagglutinin__InfluenzaA__AHL97180

SEQ ID NO: 11520 - protein, 566 aa, synthetic construct; identical to SEQ ID NO: 9994
  REGION 1..566: note = hemagglutinin__InfluenzaA__AHL97192

SEQ ID NO: 11521 - protein, 566 aa, synthetic construct; identical to SEQ ID NO: 9994
  REGION 1..566: note = hemagglutinin__InfluenzaA__AHL97204

SEQ ID NO: 11522 - protein, 566 aa, synthetic construct; identical to SEQ ID NO: 9994
  REGION 1..566: note = hemagglutinin__InfluenzaA__AHL97216

SEQ ID NO: 11523 - protein, 566 aa, synthetic construct
  REGION 1..566: note = hemagglutinin__InfluenzaA__AHL97228
MKTIIALSYILCLVFAQKLPGNDNSTATLCLGHHAVPNGTVVKTITNDRIEVTNATELVQNSSIGEICDSPHQILDGENCTLIDALLGDPQCDGFQNKKWDLFVERSKAYSNCYPYDVPDYASLRSLVASSGTLEFNNESFNWTGVTQNGTSSACIRRSNNSFFSRLNWLTHLNFKYPALNVTMPNNEQFDKLYIWGVHHPGTDKDQIFLYAQSSGRITVSTKRSQQAVIPNIGSRPRIRNIPSRISIYWTIVKPGDILLINSTGNLIAPRGYFKIRSGKSSIMRSDAPIGKCKSECITPNGSIPNDKPFQNVNRITYGACPRYVKQSTLKLATGMRNVPEKQTRGIFGAIAGFIENGWEGMVDGWYGFRHQNSEGRGQAADLKSTQAAIDQINGKLNRLIGKTNEKFHQIEKEFSEVEGRIQDLEKYVEDTKIDLWSYNAELLVALENQHTIDLTDSEMNKLFEKTKKQLRENAEDMGNGCFKIYHKCDNACIGSIRNGTYDHDVYRDEALNNRFQIKGVELKSGYKDWILWISFAISCFLLCVVLLGFIMWACQKGNIRCNICI

SEQ ID NO: 11524 - protein, 566 aa, synthetic construct; identical to SEQ ID NO: 9994
  REGION 1..566: note = hemagglutinin__InfluenzaA__AHL97240

SEQ ID NO: 11525 - protein, 566 aa, synthetic construct
  REGION 1..566: note = hemagglutinin__InfluenzaA__AHL97252
MKTIIALSYILCLVFAQELPGNDDSTATLCLGHHAVPNGTIVKTITNDQIEVTNATELVQSSSTGEICNSPHQILDGENCTLIDALLGDPQCDGFQNKKWDLFVERSKAHSNCYPYDVPDYASLRSLVASSGTLEFNNENFNWTGVTQNGTSSACIRRSNNSFFSRLNWLTHLNFKYPALNVTMPNNEQFDKLYIWGVHHPGTDKDQIFLYAQASGRITVSTKRSQQAVIPNIGSRPRVRNIPSRVSIYWTIVKPGDILLINSTGNLIAPRGYFKIRSGKSSIMRSDAPIGKCNSACITPNGSIPNDKPFQNVNRITYGACPRYVKQNTLKLATGMRNVPEKQTRGIFGAIAGFIENGWEGMVDGWYGFRHQNSEGRGQAADLKSTQAAIDQINGKLNRLIGKTNEKFHQIEKEFSEVEGRIQDLEKYVEDTKIDLWSYNAELLVALENQHTIDLTDSEMNKLFEKTKKQLRENAEDMGNGCFKIYHKCDNACIGSIRNGTYDHDVYRDEALNNRFQIKGVELKSGYKDWILWISFAISCFLLCVALLGFIMWACQKGNIRCNICI

SEQ ID NO: 11526 - protein, 566 aa, synthetic construct; identical to SEQ ID NO: 9858
  REGION 1..566: note = hemagglutinin__InfluenzaA__AHL97264

SEQ ID NO: 11527 - protein, 566 aa, synthetic construct; identical to SEQ ID NO: 9994
  REGION 1..566: note = hemagglutinin__InfluenzaA__AHL97276

SEQ ID NO: 11528 - protein, 566 aa, synthetic construct
  REGION 1..566: note = hemagglutinin__InfluenzaA__AHL97288
MKTIIALSYILCLVFAQKLPGNDNSTATLCLGHHAVPNGTIVKTITNDRIEVTNATELVQNSSIGEICNSPHQILDGENCTLIDALLGDPQCDGFQNKKWDLFVERSKAYSNCYPYDVPDYASLRSLVASSGTLEFNNESFNWTGVTQNGTSSACIRRSNSSFFSRLNWLTHLNFKYPALNVTMPNNEQFDKLYIWGVHHPGTDKDQIFLYAQSSGRITVSTKRSQQAVIPNIGSRPRIRNIPSRISIYWTIVKPGDILLINSTGNLIAPRGYFKIRSGKSSIMRSDAPIGKCKSECITPNGSIPNDKPFQNVNRITYGACPRYVKQSTLKLATGMRNVPEKQTRGIFGAIAGFIENGWEGMVDGWYGFRHQNSEGRGQAADLKSTQAAIDQINGKLNRLIGKTNEKFHQIEKEFSEVEGRIQDLEKYVEDTKIDLWSYNAELLVALENQHTIDLTDSEMNKLFEKIKKQLRENAEDMGNGCFKIYHKCDNACIGSIRNGTYDHNVYRDEALNNRFQIKGVELKSGYKDWILWISFAISCFLLCVALLGFIMWACQKGNIRCNICI

SEQ ID NO: 11529 - protein, 566 aa, synthetic construct; identical to SEQ ID NO: 9868
  REGION 1..566: note = hemagglutinin__InfluenzaA__AHL97300

SEQ ID NO: 11530 - protein, 566 aa, synthetic construct; identical to SEQ ID NO: 9994
  REGION 1..566: note = hemagglutinin__InfluenzaA__AHL97312

SEQ ID NO: 11531 - protein, 566 aa, synthetic construct; identical to SEQ ID NO: 9994
  REGION 1..566: note = hemagglutinin__InfluenzaA__AHL97336

SEQ ID NO: 11532 - protein, 566 aa, synthetic construct; identical to SEQ ID NO: 9994
  REGION 1..566: note = hemagglutinin__InfluenzaA__AHL97348

SEQ ID NO: 11533 - protein, 566 aa, synthetic construct
  REGION 1..566: note = hemagglutinin__InfluenzaA__AHL97372
MKTIIALSYILCLVFAQKLPGNDNSTATLCLGHHAVPNGTIVKTITNDRIEVTNATELVQNSSIGEICDSPHQILDGENCTLIDALLGDPQCDGFQNKKWDLFVERSNAYSNCYPYDVPDYASLRSLVASSGTLEFNNESFNWAGVTQNGTSSACIRGSNSSFFSRLNWLTHLNFKYPALNVTMPNNEQFDKLYIWGVHHPGTDKDQIFLYAQSSGRITVSTKRSQQAVIPNIGSRPRIRNIPSRISIYWTIVKPGDILLINSTGNLIAPRGYFKIRSGKSSIMRSDAPIGKCKSECITPNGSIPNDKPFQNVNRITYGACPRYVKQSTLKLATGMRNVPEKQTRGIFGAIAGFIENGWEGMVDGWYGFRHQNSEGRGQAADLKSTQAAIDQINGKLNRLIGKTNEKFHQIEKEFSEVEGRIQDLEKYVEDTKIDLWSYNAELLVALENQHTIDLTDSEMNKLFEKTKKQLRENAEDMGNGCFKIYHKCDNACIGSIRNGTYDHDVYRDEALNNRFQIKGVELKSGYKDWILWISFAISCFLLCVALLGFIMWACQKGNIRCNICI

SEQ ID NO: 11534 - protein, 566 aa, synthetic construct; identical to SEQ ID NO: 9994
  REGION 1..566: note = hemagglutinin__InfluenzaA__AHL97384

SEQ ID NO: 11535 - protein, 566 aa, synthetic construct; identical to SEQ ID NO: 9858
  REGION 1..566: note = hemagglutinin__InfluenzaA__AHL97396

SEQ ID NO: 11536 - protein, 566 aa, synthetic construct; identical to SEQ ID NO: 9835
  REGION 1..566: note = hemagglutinin__InfluenzaA__AHL97408

SEQ ID NO: 11537 - protein, 566 aa, synthetic construct; identical to SEQ ID NO: 11506
  REGION 1..566: note = hemagglutinin__InfluenzaA__AHL97420

SEQ ID NO: 11538 - protein, 566 aa, synthetic construct
  REGION 1..566: note = hemagglutinin__InfluenzaA__AHL97444
MKTIIALSYILCLVFAQKLPGNDNSTATLCLGHHAVPNGTIVKTITNDRIEVTNATELVQNSSIGEICDSPHQILDGENCTLIDALLGDPQCDGFQNKKWDLFVERSKAYSNCYPYDVPDYASLRSLVASSGTLEFNNESFNWAGVTQNGTSSACIRGSNSSFFSRLNWLTHLNFKYPALNVTMPNNEQFDKLYIWGVHHPGTDKDQIFLYAQSSGRITVSTKRSQQAVIPNIGSRPRIRNIPSRISIYWTIVKPGDILLINSTGNLIAPRGYFKIRSGKSSIMRSDAPIGKCKSECITPNGSIPNDKPFQNVNRITYGTCPRYVKQSTLKLATGMRNVPEKQTRGIFGAIAGFIENGWEGMVDGWYGFRHQNSEGRGQAADLKSTQAAIDQINGKLNRLIGKTNEKFHQIEKEFSEVEGRIQDLEKYVEDTKIDLWSYNAELLVALENQHTIDLTDSEMNKLFEKTKKQLRENAEDMGNGCFKIYHKCDNACIGSIRNGTYDHDVYRDEALNNRFQIKGVELKSGYKDWILWISFAISCFLLCVALLGFIMWACQKGNIRCNICI

SEQ ID NO: 11539 - protein, 566 aa, synthetic construct; identical to SEQ ID NO: 9868
  REGION 1..566: note = hemagglutinin__InfluenzaA__AHL97456

SEQ ID NO: 11540 - protein, 566 aa, synthetic construct
  REGION 1..566: note = hemagglutinin__InfluenzaA__AHL97468
MKTIIALSYILCLVFAQKLPGNDNSTATLCLGHHAVPNGTIVKTITNDRIEVTNATELVQNSSIGEICDSPHQILDGENCTLIDALLGDPQCDGFQNKKWDLFVERSKAYSNCYPYDVPDYASLRSLVASSGTLEFNNESFNWTGVTQNGTSSACIRRSNSSFFSRLNWLTHLNFKYPALNVTMPNNEQFDKLYIWGVHHPGTDKDQIFLYAQSSGRITVSTKRSQQAVIPNIGSRPRIRNIPSRISIYWTIVKPGDILLINSTGNLIAPRGYFKIRSGKSSIMRSDAPIGKCKSECITPNGSIPNDKPFQNVNRITYGACPRYVKQSTLKLATGMRNVPEKQTRGIFGAIAGFIENGWEGMMDGWYGFRHQNSEGRGQAADLKSTQAAIDQINGKLNRLIGKTNEKFHQIEKEFSEVEGRIQDLEKYVEDTKIDLWSYNAELLVALENQHTIDLTDSEMNKLFEKTKKQLRENAEDMGNGCFKIYHKCDNACIGSIRNGTYDHNVYRDEALNNRFQIKGVELKSGYKDWILWISFAISCFLLCVALLGFIMWACQKGNIRCNICI

SEQ ID NO: 11541 - protein, 566 aa, synthetic construct; identical to SEQ ID NO: 9994
  REGION 1..566: note = hemagglutinin__InfluenzaA__AHL97480

SEQ ID NO: 11542 - protein, 566 aa, synthetic construct; identical to SEQ ID NO: 9994
  REGION 1..566: note = hemagglutinin__InfluenzaA__AHL97493

SEQ ID NO: 11543 - protein, 566 aa, synthetic construct; identical to SEQ ID NO: 11506
  REGION 1..566: note = hemagglutinin__InfluenzaA__AHL97505

SEQ ID NO: 11544 - protein, 566 aa, synthetic construct
  REGION 1..566: note = hemagglutinin__InfluenzaA__AHL97517
MKTIIALSYILCLVFAQKLPGNDNSTATLCLGHHAVPNGTIVKTITNDRIEVTNATELVQNSSIGEICDSPHQILDGENCTLIDALLGDPQCDGFQNKKWDLFVERSKAYSNCYPYDVPDYASLRSLVASSGTLEFNNESFNWTGVTQNGTSSACIRRSNSSFFSRLNWLTHLNFKYPALNVTMPNNEQFDKLYIWGVHHPGTDKDQIFLYAQSSGRITVSTQRSQQAVIPNIGSRPRIRNIPSRISIYWTIVKPGDILLINSTGNLIAPRGYFKIRSGKSSIMRSDAPIGKCKSECITPNGSIPNDKPFQNVNRITYGACPRYVKQSTLKLATGMRNVPEKQTRGIFGAIAGFIENGWEGMVDGWYGFRHQNSEGRGQAADLKSTQAAIDQINGKLNRLIGKTNEKFHQIEKEFSEVEGRIQDLEKYVEDTKIDLWSYNAELLVALENQHTIDLTDSEMNKLFEKTKKQLRENAEDMGNGCFKIYHKCDNACIGSIRNGTYDHNVYRDEALNNRFQIKGVELKSGYKDWILWISFAISCFLLCVALLGFIMWACQKGNIRCNICI

SEQ ID NO: 11545 - protein, 566 aa, synthetic construct; identical to SEQ ID NO: 9883
  REGION 1..566: note = hemagglutinin__InfluenzaA__AHL97529

SEQ ID NO: 11546 - protein, 566 aa, synthetic construct; identical to SEQ ID NO: 9868
  REGION 1..566: note = hemagglutinin__InfluenzaA__AHL97541

SEQ ID NO: 11547 - protein, 566 aa, synthetic construct; identical to SEQ ID NO: 9994
  REGION 1..566: note = hemagglutinin__InfluenzaA__AHL97553

SEQ ID NO: 11548 - protein, 566 aa, synthetic construct; identical to SEQ ID NO: 9835
  REGION 1..566: note = hemagglutinin__InfluenzaA__AHL97565

SEQ ID NO: 11549 - protein, 566 aa, synthetic construct
  REGION 1..566: note = hemagglutinin__InfluenzaA__AHL97577
MKTIIALSYILCLVFAQKIPGNDNSTATLCLGHHAVPNGTIVKTITNDRIEVTNATELVQNSSIGEICDSPHQILDGENCTLIDALLGDPQCDGFQNKKWDLFVERSKAYSNCYPYDVPDYASLRSLVASSGTLEFNNESFNWTGVTQNGTSSACIRGSNSSFFSRLNWLTHLNFKYPALNVTMPNNEQFDKLYIWGVHHPGTDKDQIFLYAQSSGRITVSTKRSQQAVIPNIGSRPRIRNIPSRISIYWTIVKPGDILLINSTGNLIAPRGYFKIRSGKSSIMRSDAPIGKCKSECITPNGSIPNDKPFQNVNRITYGACPRYVKQSTLKLATGMRNVPEKQTRGIFGAIAGFIENGWEGMVDGWYGFRHQNSEGRGQAADLKSTQAAIDQINGKLNRLIGKTNEKFHQIEKEFSEVEGRIQDLEKYVEDTKIDLWSYNAELLVALENQHTIDLTDSEMNKLFERTKKQLRENAEDMGNGCFKIYHKCDNACIGSIRNGTYDHDVYRDEALNNRFQIKGVELKPGYKDWILWISFAISCFLLCVALLGFIMWACQKGNIRCNICI

SEQ ID NO: 11550 - protein, 566 aa, synthetic construct; identical to SEQ ID NO: 10023
  REGION 1..566: note = hemagglutinin__InfluenzaA__AHL97589

SEQ ID NO: 11551 - protein, 566 aa, synthetic construct; identical to SEQ ID NO: 9994
  REGION 1..566: note = hemagglutinin__InfluenzaA__AHL97601

SEQ ID NO: 11552 - protein, 566 aa, synthetic construct; identical to SEQ ID NO: 9858
  REGION 1..566: note = hemagglutinin__InfluenzaA__AHL97613

SEQ ID NO: 11553 - protein, 566 aa, synthetic construct; identical to SEQ ID NO: 11540
  REGION 1..566: note = hemagglutinin__InfluenzaA__AHL97625

SEQ ID NO: 11554 - protein, 566 aa, synthetic construct; identical to SEQ ID NO: 9868
  REGION 1..566: note = hemagglutinin__InfluenzaA__AHL97637

SEQ ID NO: 11555 - protein, 566 aa, synthetic construct
  REGION 1..566: note = hemagglutinin__InfluenzaA__AHL97661
MKTIIALGYILCLVFAQKLPGNDNSTATLCLGHHAVPNGTIVKTITNDRIEVTNATELVQNSSIGEICDSPHQILDGENCTLIDALLGDPQCDGFQNKKWDLFVERSKAYSNCYPYDVPDYASLRSLVASSGTLEFNNESFNWTGVTQNGTSSACIRRSNSSFFSRLNWLTHLNFKYPALNVTMPNNEQFDKLYIWGVHHPGTDKDQIFLYAQSSGRITVSTKRSQQAVIPNIGSRPRIRNIPSRISIYWTIVKPGDILLINSTGNLIAPRGYFKIRSGKSSIMRSDAPIGKCKSECITPNGSIPNDKPFQNVNRITYGACPRYVKQSTLKLATGMRNVPEKQTRGIFGAIAGFIENGWEGMVDGWYGFRHQNSEGRGQAADLKSTQAAIDQINGKLNRLIGKTNEKFHQIEKEFSEVEGRIQDLEKYVEDTKIDLWSYNAELLVALENQHTIDLTDSEMNKLFEKTKKQLRENAEDMGNGCFKIYHKCDNACIGSIRNGTYDHNVYRDEALNNRFQIKGVELKSGYKDWILWISFAISCFLLCVALLGFIMWACQKGNIRCNICI

SEQ ID NO: 11556 - protein, 566 aa, synthetic construct
  REGION 1..566: note = hemagglutinin__InfluenzaA__AHL97673
MKTTIALSYILCLVFAQELPGNDDSTATLCLGHHAVPNGTIVKTITNDQIEVTNATELVQSSSTGEICNSPHQILDGENCTLIDALLGDPQCDGFQNKKWDLFVERSKAHSNCYPYDVPDYASLRSLVASSGTLEFNNESFNWTGVTQNGTSSACIRRSNNSFFSRLNWLTHLNFKYPALNVTMPNNEQFDKLYIWGVHHPGTDKDQIFLYAQASGRITVSTKRSQQAVIPNIGSRPRVRNIPSRVSIYWTIVKPGDILLINSTGNLIAPRGYFKIRSGKSSIMRSDAPIGKCNSACITPNGSIPNDKPFQNVNRITYGACPRYVKQNTLKLATGMRNVPEKQTRGIFGAIAGFIENGWEGMVDGWYGFRHQNSEGRGQAADLKSTQAAIDQINGKLNRLIGKTNEKFHQIEKEFSEVEGRIQDLEKYVEDTKIDLWSYNAELLVALENQHTIDLTDSEMNKLFEKTKKQLRENAEDMGNGCFKIYHKCDNACIGSIRNGTYDHDVYRDEALNNRFQIKGVELKSGYKDWILWISFAISCFLLCVALLGFIMWACQKGNIRCNICI

SEQ ID NO: 11557 - protein, 566 aa, synthetic construct; identical to SEQ ID NO: 9994
  REGION 1..566: note = hemagglutinin__InfluenzaA__AHL97685

SEQ ID NO: 11558 - protein, 566 aa, synthetic construct
  REGION 1..566: note = hemagglutinin__InfluenzaA__AHL97697
MKTIIALSYILCLVFAQKLPGNDNSTATLCLGHHAVPNGTIVKTITNDRIEVTNATELVQNSSIGEICDSPHQILDGENCTLIDALLGDPQCDGFQNKKWDLFVERGKAYSNCYPYDVPDYASLRSLVASSGTLEFNNESFNWAGVTQNGTSSACIRGSNSSFFSRLNWLTHLNFKYPALNVTMPNNEQFDKLYIWGVHHPGTDKDQIFLYAQSSGRITVSTKRSQQAVIPNIGSRPRIRNIPSRISIYWTIVKPGDILLINSTGNLIAPRGYFKIRSGKSSIMRSDAPIGKCKSECITPNGSIPNDKPFQNVNRITYGACPRYVKQSTLKLATGMRNVPEKQTRGIFGAIAGFIENGWEGMVDGWYGFRHQNSEGRGQAADLKSTQAAIDQINGKLNRLIGKTNEKFHQIEKEFSEVEGRIQDLEKYVEDTKIDLWSYNAELLVALENQHTIDLTDSEMNKLFEKTKKQLRENAEDMGNGCFKIYHKCDNACIGSIRNGTYDHDVYRDEALNNRFQIKGVELKSGYKDWILWISFAISCFLLCVALLGFIMWACQKGNIRCNICI

SEQ ID NO: 11559 - protein, 566 aa, synthetic construct; identical to SEQ ID NO: 9868
  REGION 1..566: note = hemagglutinin__InfluenzaA__AHL97709

SEQ ID NO: 11560 - protein, 566 aa, synthetic construct; identical to SEQ ID NO: 9994
  REGION 1..566: note = hemagglutinin__InfluenzaA__AHL97721

SEQ ID NO: 11561 - protein, 566 aa, synthetic construct; identical to SEQ ID NO: 9868
  REGION 1..566: note = hemagglutinin__InfluenzaA__AHL97733

SEQ ID NO: 11562 - protein, 566 aa, synthetic construct; identical to SEQ ID NO: 9858
  REGION 1..566: note = hemagglutinin__InfluenzaA__AHL97745

SEQ ID NO: 11563 - protein, 566 aa, synthetic construct; identical to SEQ ID NO: 9994
  REGION 1..566: note = hemagglutinin__InfluenzaA__AHL97757

SEQ ID NO: 11564 - protein, 566 aa, synthetic construct; identical to SEQ ID NO: 9994
  REGION 1..566: note = hemagglutinin__InfluenzaA__AHL97769

SEQ ID NO: 11565 - protein, 566 aa, synthetic construct
  REGION 1..566: note = hemagglutinin__InfluenzaA__AHL97781
MKTIIALSYILCLVFAQELPGNDDSTATLCLGHHAVPNGTIVKTITNDQIEVTNATELVQSSSTGEICNSPHQILDGENCTLIDALLGDPQCDGFQNKKWDLFVERSKAHSNCYPYDVPDYASLRSLVASSGTLEFNNESFNWTGVTQNGTSSACIRRSNNSFFSRLNWLTHLNFKYPALNVTMPNNEQFDKLYIWGVHHPGTDKDQIFLYAQASGRITVSTKRSQQAVIPNIGSRPRVRNIPSRVSIYWTIVKPGDILLINSTGNLIAPRGYFKIRSGNSSIMRSDAPIGKCNSTCITPNGSIPNDKPFQNVNRITYGACPRYVKQNTLKLATGMRNVPEKQTRGIFGAIAGFIENGWEGMVDGWYGFRHQNSEGRGQAADLKSTQAAIDQINGKLNRLIGKTNEKFHQIEKEFSEVEGRIQDLEKYVEDTKIDLWSYNAELLVALENQHTIDLTDSEMNKLFEKTKKQLRENAEDMGNGCFKIYHKCDNACIGSIRNGTYDHDVYRDEALNNRFQIKGVELKSGYKDWILWISFAISCFLLCVALLGFIMWACQKGNIRCNICI

SEQ ID NO: 11566 - protein, 566 aa, synthetic construct; identical to SEQ ID NO: 9994
  REGION 1..566: note = hemagglutinin__InfluenzaA__AHL97793

SEQ ID NO: 11567 - protein, 566 aa, synthetic construct
  REGION 1..566: note = hemagglutinin__InfluenzaA__AHL97805
MKTIIALSYILCLVFAQKLPGNDNSTATLCLGHHAVPNGTIVKTITNDRIEVTNATELVQNSSIGEICDSPHQILDGENCTLIDALLGDPQCDGFQNKKWDLFVERSKAYSNCYPYDVPDYASLRSLVASSGTLEFNNESFNWAGVTQNGTSSACIRGSNSSFFSRLNWLTHLNFKYPALNVTMPNNEQFDKLYIWGVHHPGTDKDQIFLYAQSSGRITVSTKRSQQAVIPNIGSRPRIRNIPSRISIYWTIVKPGDILLINSTGNLIAPRGYFKIRSGKSSIMRSDAPIGKCKSECITPNGSIPNDKPFQNVNRITYGACPRYVKQSTLKLATGMRNVPEKQTRGIFGAIAGFIENGWEGMVDGWYGFRHQNYEGRGQAADLKSTQAAIDQINGKLNRLIGKTNEKFHQIEKEFSEVEGRIQDLEKYVEDTKIDLWSYNAELLVALENQHTIDLTDSEMNKLFEKTKKQLRENAEDMGNGCFKIYHKCDNACIGSIRNGTYDHDVYRDEALNNRFQIKGVELKSGYKDWILWISFAISCFLLCVALLGFIMWACQKGNIRCNICI

SEQ ID NO: 11568 - protein, 566 aa, synthetic construct; identical to SEQ ID NO: 9868
  REGION 1..566: note = hemagglutinin__InfluenzaA__AHL97817

SEQ ID NO: 11569 - protein, 566 aa, synthetic construct; identical to SEQ ID NO: 11558
  REGION 1..566: note = hemagglutinin__InfluenzaA__AHL97829

SEQ ID NO: 11570 - protein, 566 aa, synthetic construct; identical to SEQ ID NO: 9994
  REGION 1..566: note = hemagglutinin__InfluenzaA__AHL97841

SEQ ID NO: 11571 - protein, 566 aa, synthetic construct; identical to SEQ ID NO: 9994
  REGION 1..566: note = hemagglutinin__InfluenzaA__AHL97853

SEQ ID NO: 11572 - protein, 566 aa, synthetic construct; identical to SEQ ID NO: 9994
  REGION 1..566: note = hemagglutinin__InfluenzaA__AHL97865

SEQ ID NO: 11573 - protein, 566 aa, synthetic construct; identical to SEQ ID NO: 9994
  REGION 1..566: note = hemagglutinin__InfluenzaA__AHL97877

SEQ ID NO: 11574 - protein, 566 aa, synthetic construct; identical to SEQ ID NO: 9868
  REGION 1..566: note = hemagglutinin__InfluenzaA__AHL97889

SEQ ID NO: 11575 - protein, 566 aa, synthetic construct; identical to SEQ ID NO: 9868
  REGION 1..566: note = hemagglutinin__InfluenzaA__AHL97901

SEQ ID NO: 11576 - protein, 566 aa, synthetic construct; identical to SEQ ID NO: 9858
  REGION 1..566: note = hemagglutinin__InfluenzaA__AHL97913

SEQ ID NO: 11577 - protein, 566 aa, synthetic construct
  REGION 1..566: note = hemagglutinin__InfluenzaA__AHL97925
MKTIIALSYILCLVFAQKLPGNDNSTATLCLGHHAVPNGTIVKTITNDRIEVTNATELVQNSSIGEICDSPHQILDGENCTLIDALLGDPQCDGFQNKKWDLFVERSKAYSNCYPYDVPDYASLRSLVASSGTLEFNNESFNWTGVTQNGTSSACIRRSNNSFFSRLNWLTHSNFKYPALNVTMPNNEQFDKLYIWGVHHPGTDKDQIFLYAQSSGRITVSTKRSQQAVIPNIGSRPRIRNIPSRISIYWTIVKPGDILLINSTGNLIAPRGYFKIRSGKSSIMRSDAPIGKCKSECITPNGSIPNDKPFQNVNRITYGACPRYVKQSTLKLATGMRNVPEKQTRGIFGAIAGFIENGWEGMMDGWYGFRHQNSEGRGQAADLKSTQAAIDQINGKLNRLIGKTNEKFHQIEKEFSEVEGRIQDLEKYVEDTKIDLWSYNAELLVALENQHTIDLTDSEMNKLFEKTKKLLRENAEDMGNGCFKIYHKCDNACIGSIRNGTYDHDVYRDEALNNRFQIKGVELKSGYKDWILWISFAISCFLLCVALLGFIMWACQKGNIRCNICI

SEQ ID NO: 11578 - protein, 566 aa, synthetic construct; identical to SEQ ID NO: 9858
  REGION 1..566: note = hemagglutinin__InfluenzaA__AHL97937

SEQ ID NO: 11579 - protein, 566 aa, synthetic construct; identical to SEQ ID NO: 11538
  REGION 1..566: note = hemagglutinin__InfluenzaA__AHL97949

SEQ ID NO: 11580 - protein, 566 aa, synthetic construct; identical to SEQ ID NO: 9868
  REGION 1..566: note = hemagglutinin__InfluenzaA__AHL97961

SEQ ID NO: 11581 - protein, 566 aa, synthetic construct; identical to SEQ ID NO: 9868
  REGION 1..566: note = hemagglutinin__InfluenzaA__AHL97973

SEQ ID NO: 11582 - protein, 566 aa, synthetic construct; identical to SEQ ID NO: 9868
  REGION 1..566: note = hemagglutinin__InfluenzaA__AHL97985

SEQ ID NO: 11583 - protein, 566 aa, synthetic construct
  REGION 1..566: note = hemagglutinin__InfluenzaA__AHL97997
MKTIIALSYILCLVFAQKLPGNDNSTATLCLGHHAVPNGTIVKTITNDRIEVTNATELVQNSSIGEICDSPHQILDGENCTLIDALLGDPQCDGFQNKKWDLFVERSKAYSNCYPYDVPDYASLRSLVASSGTLEFNNESFNWTGVTQNGTSSACIRRSNSSFFSRLNWLTHLNFKYPALNVTMPNNEQFDKLYIWGVHHPGTDKDQIFLYAQSSGRITVSTKRSQQAVIPNIGSRPRIRNIPSRISIYWTIVKPGDILLINSTGNLIAPRGYFKIRSGKSSIMRSDAPIGKCKSECITPNGSIPNDKPFQNVNRITYGACPRYVKQSTLKLATGMRNVPEKQTRGIFGAIAGFIENGWEGMVDGWYGFRHQNSEGRGQAADLKSTQAAIDQINGKLNRLIGKTNEKFHQIEKEFSEVEGRIQDLEKYVEDTKIDLWSYNAELLVALENQHTIDLTDSEMNKLFEKTKKQLRENAEDMGNGCFKIYHKCDNACIGSIRNGTYDHDVYRDEALNNRFQIRGVELKSGYKDWILWISFAISCFLLCVALLGFIMWACQKGNIRCNICI

SEQ ID NO: 11584 - protein, 566 aa, synthetic construct; identical to SEQ ID NO: 9994
  REGION 1..566: note = hemagglutinin__InfluenzaA__AHL98009

SEQ ID NO: 11585 - protein, 566 aa, synthetic construct
  REGION 1..566: note = hemagglutinin__InfluenzaA__AHL98021
MKTIIALSYILCLVFAQKLPGNDNSTATLCLGHHAVPNGTIVKTITNDRIEVTNATELVQNSSIGKICDSPHQILDGENCTLMDALLGDPQCDGFQNKKWDLFVERSKAYSNCYPYDVPDYASLRSLVASSGTLEFNNESFNWAGVTQNGTSSACIRRSNSSFFSRLNWLTHLNFKYPALNVTMPNNEQFDKLYIWGVHHPGTDKDQIFLYAQSSGRITVSTKRSQQAVIPNIGSRPRIRNIPSRISIYWTIVKPGDILLINSTGNLIAPRGYFKIRSGKSSIMRSDAPIGKCKSECITPNGSIPNDKPFQNVNRITYGACPRYVKQSTLKLATGMRNVPEKQTRGIFGAIAGFIENGWEGMMDGWYGFRHQNSEGRGQAADLKSTQAAIDQINGKLNRLIGKTNEKFHQIEKEFSEVEGRIQDLEKYVEDTKIDLWSYNAELLVALENQHTIDLTDSEMNKLFEKTKKQLRENAEDMGNGCFKIYHKCDNACIGSIRNGTYDHNVYRDEALNNRFQIKGVELKSGYKDWILWISFAISCFLLCVALLGFIMWACQKGNIRCNICI

SEQ ID NO: 11586 - protein, 566 aa, synthetic construct; identical to SEQ ID NO: 9868
  REGION 1..566: note = hemagglutinin__InfluenzaA__AHL98033

SEQ ID NO: 11587 - protein, 566 aa, synthetic construct; identical to SEQ ID NO: 11465
  REGION 1..566: note = hemagglutinin__InfluenzaA__AHL98045

SEQ ID NO: 11588 - protein, 566 aa, synthetic construct; identical to SEQ ID NO: 11465
  REGION 1..566: note = hemagglutinin__InfluenzaA__AHL98057

SEQ ID NO: 11589 - protein, 566 aa, synthetic construct; identical to SEQ ID NO: 11465
  REGION 1..566: note = hemagglutinin__InfluenzaA__AHL98069

SEQ ID NO: 11590 - protein, 566 aa, synthetic construct
  REGION 1..566: note = hemagglutinin__InfluenzaA__AHL98081
MKTIIALSYILCLVFAQKLPGNDNSTATLCLGHHAVPNGTIVKTITNDRIEVTNATELVQNSSIGEICDSPHQILDGENCTLIDALLGDPQCDGFQNKKWDLFVERSKAYSNCYPYDVPDYASLRSLVASSGTLEFNNESFNWTGVTQNGTSSACIRKSNSSFFSRLNWLTHLNFKYPALNVTMPNNEQFDKLYIWGVHHPGTDKDQIFLYAQSSGRITVSTQRSQQAVIPNIGSRPRIRNIPSRISIYWTIVKPGDILLINSTGNLIAPRGYFKIRSGKSSIMRSDAPIGKCKSECITPNGSIPNDKPFQNVNRITYGACPRYVKQSTLKLATGMRNVPEKQTRGIFGAIAGFIENGWEGMVDGWYGFRHQNSEGRGQAADLKSTQAAIDQINGKLNRLVGKTNEKFHQIEKEFSEVEGRIQDLEKYVEDTKIDLWSYNAELLVALENQHTIDLTDSEMNKLFEKTKKQLRENAEDMGNGCFKIYHKCDNACIGSIRNGTYDHDVYRDEALNNRFQIKGVELKSGYKDWILWISFAISCFLLCVALLGFIMWACQKGNIRCNICI

SEQ ID NO: 11591 - protein, 566 aa, synthetic construct; identical to SEQ ID NO: 9858
  REGION 1..566: note = hemagglutinin__InfluenzaA__AHL98093

SEQ ID NO: 11592 - protein, 566 aa, synthetic construct
  REGION 1..566: note = hemagglutinin__InfluenzaA__AHL98105
MKAILVVMLYTFATANADTLCIGYHANNSTDTVDTVLEKNVTVTHSVNLLEDKHNGKLCKLRGVAPLHLGKCNIAGWILGNPECESLSTASSWSYIVETSGSDNGTCYPGDFIDYEELREQLSSVSSFERFEIFPKTSSWPNHDSNKGVTAACPHAGAKGFYKNLIWLVKKGNSYPKLSISYINDKGKEVLVLWGIHHPSTTADQQSLYQNADTYVFVGASRYSKKFKPEIAIRPKVRDQEGRMNYYWTLVEPGDKITFEATGNLVVPRYAFAMERNAGSGIIISDTPVHDCNTTCQTPKGAINTSLPFQNIHPITIGKCPKYVKSTKLRLATGLRNVPSIQSRGLFGAIAGFIEGGWTGMVDGWYGYHHQNEQGSGYAADLKSTQNAIDKITNKVNSVIEKMNTQFTAVGKEFNHLEKRIENLNKKVDDGFLDIWTYNAELLVLLENERTLDYHDSNVKNLYEKVRNQLKNNAKEIGNGCFEFYHKCDNTCMESVKNGTYDYPKYSEEAKLNREEIDGVKLESTRIYQILAIYSTAASSLVLVVSLGAISFWMCSNGSLQCRICI

SEQ ID NO: 11593 - protein, 566 aa, synthetic construct; identical to SEQ ID NO: 9858
  REGION 1..566: note = hemagglutinin__InfluenzaA__AHL98116

SEQ ID NO: 11594 - protein, 566 aa, synthetic construct; identical to SEQ ID NO: 9868
  REGION 1..566: note = hemagglutinin__InfluenzaA__AHL98128

SEQ ID NO: 11595 - protein, 566 aa, synthetic construct; identical to SEQ ID NO: 9858
  REGION 1..566: note = hemagglutinin__InfluenzaA__AHL98140

SEQ ID NO: 11596 - protein, 566 aa, synthetic construct; identical to SEQ ID NO: 9858
  REGION 1..566: note = hemagglutinin__InfluenzaA__AHL98152

SEQ ID NO: 11597 - protein, 566 aa, synthetic construct; identical to SEQ ID NO: 9868
  REGION 1..566: note = hemagglutinin__InfluenzaA__AHL98164

SEQ ID NO: 11598 - protein, 566 aa, synthetic construct; identical to SEQ ID NO: 9868
  REGION 1..566: note = hemagglutinin__InfluenzaA__AHL98176

SEQ ID NO: 11599 - protein, 566 aa, synthetic construct; identical to SEQ ID NO: 9858
  REGION 1..566: note = hemagglutinin__InfluenzaA__AHL98188

SEQ ID NO: 11600 - protein, 566 aa, synthetic construct; identical to SEQ ID NO: 10023
  REGION 1..566: note = hemagglutinin__InfluenzaA__AHL98200

SEQ ID NO: 11601 - protein, 566 aa, synthetic construct; identical to SEQ ID NO: 9858
  REGION 1..566: note = hemagglutinin__InfluenzaA__AHL98212

SEQ ID NO: 11602 - protein, 566 aa, synthetic construct; identical to SEQ ID NO: 9858
  REGION 1..566: note = hemagglutinin__InfluenzaA__AHL98224

SEQ ID NO: 11603 - protein, 566 aa, synthetic construct; identical to SEQ ID NO: 9994
  REGION 1..566: note = hemagglutinin__InfluenzaA__AHL98236

SEQ ID NO: 11604 - protein, 566 aa, synthetic construct; identical to SEQ ID NO: 9868
  REGION 1..566: note = hemagglutinin__InfluenzaA__AHL98248

SEQ ID NO: 11605 - protein, 566 aa, synthetic construct; identical to SEQ ID NO: 9858
  REGION 1..566: note = hemagglutinin__InfluenzaA__AHL98260

SEQ ID NO: 11606 - protein, 566 aa, synthetic construct; identical to SEQ ID NO: 9868
  REGION 1..566: note = hemagglutinin__InfluenzaA__AHL98272

SEQ ID NO: 11607 - protein, 566 aa, synthetic construct; identical to SEQ ID NO: 11464
  REGION 1..566: note = hemagglutinin__InfluenzaA__AHL98284

SEQ ID NO: 11608 - protein, 566 aa, synthetic construct
  REGION 1..566: note = hemagglutinin__InfluenzaA__AHL98295
MKTIIALSYILCLVFAQKIPGNDNSTATLCLGHHAVPNGTIVKTITNDRIEVTNATELVQNSSIGEICDSPHQILDGENCTLIDALLGDPQCDGFQNKKWDLFVERSKAYSNCYPYDVPDYASLRSLVASSGTLEFNNESFNWAGVTQNGTSSACIRGSNSSFFSRLNWLTHLNFKYPALNVTMPNNEQFDKLYIWGVHHPGTDKDQIFLYAQSSGRITVSTKRSQQAVIPNIGSRPRIRNIPSRISIYWTIVKPGDILLINSTGNLIAPRGYFKIRSGKSSIMRSDAPIGKCKSECITPNGSIPNDKPFQNVNRITYGACPRYVKQSTLKLATGMRNVPEKQTRGIFGAIAGFIENGWEGMMDGWYGFRHQNSEGRGQAADLKSTQAAIDQINGKLNRLIGKTNEKFHQIEKEFSEVEGRIQDLEKYVEDTKIDLWSYNAELLVALENQHTIDLTDSEMNKLFEKTKKQLRENAEDMGNGCFKIYHKCDNACIGSIRNGTYDHDVYRDEALNNRFQIKGVELKSGYKDWILWISFAISCFLLCVALLGFIMWACQKGNIRCNICI

SEQ ID NO: 11609 - protein, 566 aa, synthetic construct; identical to SEQ ID NO: 11506
  REGION 1..566: note = hemagglutinin__InfluenzaA__AHL98307

SEQ ID NO: 11610 - protein, 566 aa, synthetic construct; identical to SEQ ID NO: 9868
  REGION 1..566: note = hemagglutinin__InfluenzaA__AHL98319

SEQ ID NO: 11611 - protein, 566 aa, synthetic construct; identical to SEQ ID NO: 9868
  REGION 1..566: note = hemagglutinin__InfluenzaA__AHL98331

SEQ ID NO: 11612 - protein, 566 aa, synthetic construct; identical to SEQ ID NO: 9994
  REGION 1..566: note = hemagglutinin__InfluenzaA__AHL98343

SEQ ID NO: 11613 - protein, 566 aa, synthetic construct; identical to SEQ ID NO: 11506
  REGION 1..566: note = hemagglutinin__InfluenzaA__AHL98354

SEQ ID NO: 11614 - protein, 566 aa, synthetic construct; identical to SEQ ID NO: 9858
  REGION 1..566: note = hemagglutinin__InfluenzaA__AHL98366

SEQ ID NO: 11615 - protein, 566 aa, synthetic construct; identical to SEQ ID NO: 9858
  REGION 1..566: note = hemagglutinin__InfluenzaA__AHL98378

SEQ ID NO: 11616 - protein, 566 aa, synthetic construct; identical to SEQ ID NO: 9858
  REGION 1..566: note = hemagglutinin__InfluenzaA__AHL98390

SEQ ID NO: 11617 - protein, 566 aa, synthetic construct; identical to SEQ ID NO: 9858
  REGION 1..566: note = hemagglutinin__InfluenzaA__AHL98402

SEQ ID NO: 11618 - protein, 566 aa, synthetic construct; identical to SEQ ID NO: 9868
  REGION 1..566: note = hemagglutinin__InfluenzaA__AHL98414

SEQ ID NO: 11619 - protein, 566 aa, synthetic construct
  REGION 1..566: note = hemagglutinin__InfluenzaA__AHL98426
MKTIIALSYILCLVFAQKLPGNDNSTATLCLGHHAVPNGTIVKTITNDRIEVTNATELVQNSSIGEICDSPHQILDGENCTLIDALLGDPQCDGFQNKKWDLFVERSKAYSNCYPYDVPDYASLRSLVASSGTLEFNNESFNWTGVTQNGTSSACIRRSNNSFFSRLNWLTHSNFKYPALNVTMPNNEQFDKLYIWGVHHPGTDKDQIFLYAQSSGRITVSTKRSQQAVIPNIGSRPRIRNIPSRISIYWTIVKPGDILLINSTGNLIAPRGYFKIRSGKSSIMRSDAPIGKCKSECITPNGSIPNDKPFQNVNRITYGACPRYVKQSTLKLATGMRNVPEKQTRGIFGAIAGFIENGWEGMMDGWYGFRHQNSEGRGQAADLKSTQAAIDQINGKLNRLIGKTNEKFHQIEKEFSEVEGRIQDLEKYVEDTKIDLWSYNAELLVALENQHTIDLTDSEMNKLFEKTKKQLRENAEDMGNGCFKIYHKCDNACIGSIRNGTYDHDVYRDEALNNRFQVKGVELKSGYKDWILWISFAISCFLLCVALLGFIMWACQKGNIRCNICI

SEQ ID NO: 11620 - protein, 566 aa, synthetic construct; identical to SEQ ID NO: 10040
  REGION 1..566: note = hemagglutinin__InfluenzaA__AHL98438

SEQ ID NO: 11621 - protein, 566 aa, synthetic construct; identical to SEQ ID NO: 10040
  REGION 1..566: note = hemagglutinin__InfluenzaA__AHL98449

SEQ ID NO: 11622 - protein, 566 aa, synthetic construct
  REGION 1..566: note = hemagglutinin__InfluenzaA__AHL98471
MKAILVVLLYTFATANADTLCIGYHANNSTDTVDTVLEKNVTVTHSVNLLEDKHNGKLCKLRGVAPLHLGKCNIAGWILGNPECESLSTASSWSYIVETSSSDNGTCYPGDFINYEELREQLSSVSSFEKFEIFPKTSSWPNHDSNKGVTAACPHAGAKSFYKNLIWLVKKGNSYPKLRESYINDKGKEVLVLWGIHHPSTTADQQSLYQNADAYVFVGTSRYSKKFKPEIAIRPKVRDQEGRMNYYWTLIEPGDKITFEATGNLVVPRYAFAMERNAGSGIIISDTPVHDCNTTCQTPEGAINTSLPFQNIHPITIGKCPKYVKSTKLRLATGLRNVPSIQSRGLFGAIAGFIEGGWTGMVDGWYGYHHQNEQGSGYAADLKSTQNAIDKITNKVNSVIEKMNTQFTAVGKEFNHLEKRIENLNKKVDDGFLDIWTYNAELLVLLENERTLDYHDSNVKNLYEKVRNQLKNNAKEIGNGCFEFYHKCDNTCMESVKNGTYDYPKYSEEAKLNREKIDGVKLESTRIYQILAIYSTVASSLVLVVSLGAISFWMCSNGSLQCRICI

SEQ ID NO: 11623 - protein, 566 aa, synthetic construct; identical to SEQ ID NO: 9994
  REGION 1..566: note = hemagglutinin__InfluenzaA__AHL98482

SEQ ID NO: 11624 - protein, 566 aa, synthetic construct; identical to SEQ ID NO: 9835
  REGION 1..566: note = hemagglutinin__InfluenzaA__AHL98494

SEQ ID NO: 11625 - protein, 566 aa, synthetic construct; identical to SEQ ID NO: 9994
  REGION 1..566: note = hemagglutinin__InfluenzaA__AHL98506

SEQ ID NO: 11626 - protein, 566 aa, synthetic construct; identical to SEQ ID NO: 9994
  REGION 1..566: note = hemagglutinin__InfluenzaA__AHL98518

SEQ ID NO: 11627 - protein, 566 aa, synthetic construct; identical to SEQ ID NO: 9835
  REGION 1..566: note = hemagglutinin__InfluenzaA__AHL98530

SEQ ID NO: 11628 - protein, 566 aa, synthetic construct; identical to SEQ ID NO: 9994
  REGION 1..566: note = hemagglutinin__InfluenzaA__AHL98542

SEQ ID NO: 11629 - protein, 566 aa, synthetic construct; identical to SEQ ID NO: 9994
  REGION 1..566: note = hemagglutinin__InfluenzaA__AHL98554

SEQ ID NO: 11630 - protein, 566 aa, synthetic construct; identical to SEQ ID NO: 9868
  REGION 1..566: note = hemagglutinin__InfluenzaA__AHL98566

SEQ ID NO: 11631 - protein, 566 aa, synthetic construct; identical to SEQ ID NO: 9868
  REGION 1..566: note = hemagglutinin__InfluenzaA__AHL98578

SEQ ID NO: 11632 - protein, 566 aa, synthetic construct; identical to SEQ ID NO: 9994
  REGION 1..566: note = hemagglutinin__InfluenzaA__AHL98590

SEQ ID NO: 11633 - protein, 566 aa, synthetic construct; identical to SEQ ID NO: 9858
  REGION 1..566: note = hemagglutinin__InfluenzaA__AHL98602

SEQ ID NO: 11634 - protein, 566 aa, synthetic construct; identical to SEQ ID NO: 9835
  REGION 1..566: note = hemagglutinin__InfluenzaA__AHL98614

SEQ ID NO: 11635 - protein, 566 aa, synthetic construct
  REGION 1..566: note = hemagglutinin__InfluenzaA__AHL98626
MKTIIALSYILCLVFAQELPGNDDSTATLCLGHHAVPNGTIVKTITNDQIEVTNATELVQSSSTGEICNSPHQILDGENCTLIDALLGDPQCDGFQNKRWDLFVERSKAHSNCYPYDVPDYASLRSLVASSGTLEFNNESFNWTGVTQNGTSSACIRRSNNSFFSRLNWLTHLNFKYPALNVTMPNNEQFDKLYIWGVHHPGTDKDQIFLYAQASGRITVSTKRSQQAVIPNIGSRPRVRNIPSRVSIYWTIVKPGDILLINSTGNLIAPRGYFKIRSGKSSIMRSDAPIGKCNSACITPNGSIPNDKPFQNVNRITYGACPRYVKQNTLKLATGMRNVPEKQTRGIFGAIAGFIENGWEGMVDGWYGFRHQNSEGRGQAADLKSTQAAIDQINGKLNRLIGKTNEKFHQIEKEFSEVEGRIQDLEKYVEDTKIDLWSYNAELLVALENQHTIDLTDSEMNKLFEKTKKQLRENAEDMGNGCFKIYHKCDNACIGSIRNGTYDHDVYRDEALNNRFQIKGVELKSGYKDWILWISFAISCFLLCVALLGFIMWACQKGNIRCNICI

SEQ ID NO: 11636 - protein, 566 aa, synthetic construct; identical to SEQ ID NO: 9858
  REGION 1..566: note = hemagglutinin__InfluenzaA__AHL98638

SEQ ID NO: 11637 - protein, 566 aa, synthetic construct; identical to SEQ ID NO: 9868
  REGION 1..566: note = hemagglutinin__InfluenzaA__AHL98650

SEQ ID NO: 11638 - protein, 566 aa, synthetic construct
  REGION 1..566: note = hemagglutinin__InfluenzaA__AHL98662
MKTIIALSYILCLVFAQKLPGNDNSTATLCLGHHAVPNGTMVKTITNDRIEVTNATELVQNSSIGEICDSPHQILDGENCTLIDALLGDPQCDGFQNKKWDLFVERSKAYSNCYPYDVPDYASLRSLVASSGTLEFNNESFNWTGVTQNGTSSACIRRSNNSFFSRLNWLTHSNFKYPALNVTMPNNEQFDKLYIWGVHHPGTDKDQIFLYAQSSGRITVSTKRSQQAVIPNIGSRPRIRNIPSRISIYWTIVKPGDILLINSTGNLIAPRGYFKIRSGKSSIMRSDAPIGKCKSECITPNGSIPNDKPFQNVNRITYGACPRYVKQSTLKLATGMRNVPEKQTRGIFGAIAGFIENGWEGMMDGWYGFRHQNSEGRGQAADLKSTQAAIDQINGKLNRLIGKTNEKFHQIEKEFSEVEGRIQDLEKYVEDTKIDLWSYNAELLVALENQHTIDLTDSEMNKLFEKTKKQLRENAEDMGNGCFKIYHKCDNACIGSIRNGTYDHDVYRDEALNNRFQIKGVELKSGYKDWILWISFAISCFLLCVALLGFIMWACQKGNIRCNICI

SEQ ID NO: 11639 - protein, 566 aa, synthetic construct; identical to SEQ ID NO: 11506
  REGION 1..566: note = hemagglutinin__InfluenzaA__AHL98674

SEQ ID NO: 11640 - protein, 566 aa, synthetic construct; identical to SEQ ID NO: 9858
  REGION 1..566: note = hemagglutinin__InfluenzaA__AHL98686

SEQ ID NO: 11641 - protein, 566 aa, synthetic construct; identical to SEQ ID NO: 9994
  REGION 1..566: note = hemagglutinin__InfluenzaA__AHL98699

SEQ ID NO: 11642 - protein, 566 aa, synthetic construct; identical to SEQ ID NO: 10123
  REGION 1..566: note = hemagglutinin__InfluenzaA__AHL98711

SEQ ID NO: 11643 - protein, 566 aa, synthetic construct; identical to SEQ ID NO: 10467
  REGION 1..566: note = hemagglutinin__InfluenzaA__AHL98722

SEQ ID NO: 11644 - protein, 566 aa, synthetic construct; identical to SEQ ID NO: 9868
  REGION 1..566: note = hemagglutinin__InfluenzaA__AHL98734

SEQ ID NO: 11645 - protein, 566 aa, synthetic construct; identical to SEQ ID NO: 9994
  REGION 1..566: note = hemagglutinin__InfluenzaA__AHL98746

SEQ ID NO: 11646 - protein, 566 aa, synthetic construct; identical to SEQ ID NO: 9868
  REGION 1..566: note = hemagglutinin__InfluenzaA__AHL98758

SEQ ID NO: 11647 - protein, 566 aa, synthetic construct; identical to SEQ ID NO: 9858
  REGION 1..566: note = hemagglutinin__InfluenzaA__AHL98770

SEQ ID NO: 11648 - protein, 566 aa, synthetic construct; identical to SEQ ID NO: 9997
  REGION 1..566: note = hemagglutinin__InfluenzaA__AHL98782

SEQ ID NO: 11649 - protein, 566 aa, synthetic construct
  REGION 1..566: note = hemagglutinin__InfluenzaA__AHL98794
MKTIIALSYILCLVFAQKLPGNDNSTATLCLGHHAVPNGTIVKTITNDRIEVTNATELVQNSSIGEICDSPHQILDGENCTLIDALLGDPQCDGFQNKKWDLFVERSKAYSNCYPYDVPDYASLRSLVASSGTLEFNNESFNWAGVTQNGTSSACIRGSNSSFFSRLNWLTHLNFKYPALNVTMPNNEQFDKLYIWGVHHPGTDKDQIFLYAQSSGRITVSTKRSQQAVIPNIGSRPRIRNIPSRISIYWTIVKPGDILLINSTGNLIAPRGYFKIRSGKSSIMRSDAPIGKCRSECITPNGSIPNDKPFQNVNRITYGACPRYVKQSTLKLATGMRNVPEKQTRGIFGAIAGFIENGWEGMVDGWYGFRHQNSEGRGQAADLKSTQAAIDQINGKLNRLIGKTNEKFHQIEKEFSEVEGRIQDLEKYVEDTKIDLWSYNAELLVALENQHTIDLTDSEMNKLFEKTKKQLRENAEDMGNGCFKIYHKCDNACIGSIRNGTYDHDVYRDEALNNRFQIKGVELKSGYKDWILWISFAISCFLLCVALLGFIMWACQKGNIRCNICI

SEQ ID NO: 11650 - protein, 566 aa, synthetic construct
  REGION 1..566: note = hemagglutinin__InfluenzaA__AHL98806
MKTIIALSYILCLVFAQKLPGNDNSTATLCLGHHAVPNGTIVKTITNDRIEVTNATELVQNSSIGEICDSPHQILDGENCTLIDALLGDPQCDGFQNKKWDLFVERSKAYSNCYPYDVPDYASLRSLVASSGTLEFNNESFNWAGVTQNGTSSACIRGSNSSFFSRLNWLTHLNFKYPALNVTMPNNEQFDKLYIWGVHHPGTDKDQIFLYAQSSGRITVSTKRSQQAVIPNIGSRPRIRNIPSRISIYWTIVKPGDILLINSTGNLIAPRGYFKIRSGKSSIMRSDAPIGKCKSECITPNGSIPNDKPFQNVNRITYGACPRYVKQSTLKLATGMRNVPEKQTRGIFGAIAGFIENGWEGMVDGWYGFRHQNSEGRGQAADLKSTQTAIDQINGKLNRLIGKTNEKFHQIEKEFSEVEGRIQDLEKYVEDTKIDLWSYNAELLVALENQHTIDLTDSEMNKLFEKTKKQLRENAEDMGNGCFKIYHKCDNACIGSIRNGTYDHDVYRDEALNNRFQIKGVELKSGYKDWILWISFAISCFLLCVALLGFIMWACQKGNIRCNICI

SEQ ID NO: 11651 - protein, 566 aa, synthetic construct; identical to SEQ ID NO: 9858
  REGION 1..566: note = hemagglutinin__InfluenzaA__AHL98818

SEQ ID NO: 11652 - protein, 566 aa, synthetic construct; identical to SEQ ID NO: 9868
  REGION 1..566: note = hemagglutinin__InfluenzaA__AHL98830

SEQ ID NO: 11653 - protein, 566 aa, synthetic construct; identical to SEQ ID NO: 9858
  REGION 1..566: note = hemagglutinin__InfluenzaA__AHL98842

SEQ ID NO: 11654 - protein, 566 aa, synthetic construct; identical to SEQ ID NO: 9858
  REGION 1..566: note = hemagglutinin__InfluenzaA__AHL98854

SEQ ID NO: 11655 - protein, 566 aa, synthetic construct
  REGION 1..566: note = hemagglutinin__InfluenzaA__AHL98878
MKTIIALSYILCLVFTQKLPGNDNSTATLCLGHHAVPNGTIVKTITNDRIEVTNATELVQNSSIGEICDSPHQILDGENCTLIDALLGDPQCDGFQNKKWDLFVERSKAYSNCYPYDVPDYASLRSLVASSGTLEFNNESFNWTGVTQNGTSSACIRRSNSSFFSRLNWLTHLNFKYPALNVTMPNNEQFDKLYIWGVHHPGTDKDQIFLYAQSSGRITVSTKRSQQAVIPNIGSRPRIRNIPSRISIYWTIVKPGDILLINSTGNLIAPRGYFKIRSGKSSIMRSDAPIGKCKSECITPNGSIPNDKPFQNVNRITYGACPRYVKQSTLKLATGMRNVPEKQTRGIFGAIAGFIENGWEGMVDGWYGFRHQNSEGRGQAADLKSTQAAIDQINGKLNRLIGKTNEKFHQIEKEFSEVEGRIQDLEKYVEDTKIDLWSYNAELLVALENQHTIDLTDSEMNKLFEKTKKQLRENAEDMGNGCFKIYHKCDNACIGSIRNGTYDHNVYRDEALNNRFQIKGVELKSGYKDWILWISFAISCFLLCVALLGFIMWACQKGNIRCNICI

SEQ ID NO: 11656 - protein, 566 aa, synthetic construct
  REGION 1..566: note = hemagglutinin__InfluenzaA__AHL98890
MKTIIALSYILCLVFAQKLPGNDNSTATLCLGHHAVPNGTIVKTITNDRIEVTNATELVQNSSIGEICDSPHQILDGENCTLIDALLGDPQCDGFQNKKWDLFVERSKAYSNCYPYDVPDYASLRSLVASSGTLEFNNESFNWAGVTQNGTSSACIRGSNSSFFSRLNWLTHLNFKYPALNVTMPNNEQFDKLYIWGVHHPGTDKDQIFLYAQSSGRITVSTKRSQQAVIPNIGSRPRIRNIPSRISIYWTIVKPGDILLINSTGNLIAPRGYFKIRSGKSSIMRSDAPIGKCKSECITPNGSIPNDKPFQNVNRITYGACPRYVKQSTLKLATGMRNVPEKQTRGIFGAIAGFIENGWEGMVDGWYGFRHQNSEGRGQAADLKSTQAAIDQINGKLNRLIGKTNEKFHQIEKEFSEVEGRIQDLEKYVEDTKIDLWSYNAELLVALENQHTIDLTDSEMNKLFEKTKKQLRENAEDMGNGCFKIYHKCDNACIGSIRNGTYDHDVYRDEALNNRFQIKGVELKSGYKDWILWISFAISCLLLCVALLGFIMWACQKGNIRCNICI

SEQ ID NO: 11657 - protein, 566 aa, synthetic construct
  REGION 1..566: note = hemagglutinin__InfluenzaA__AHL98902
MKTIIALSYILCLVFAQKLPGNDNSTATLCLGHHAVPNGTVVKTITNDRIEVTNATELVQNSSIGEICDSPHQILDGENCTLIDALLGDPQCDGFQNKKWDLFVERSKAYSNCYPYDVPDYASLRSLVASSGTLEFNNESFNWAGVTQNGTSSACIRGSNSSFFSRLNWLTHLNFKYPALNVTMPNNEQFDKLYIWGVHHPGTDKDQIFLYAQSSGRITVSTKRSQQAVIPNIGSRPRIRNIPSRISIYWTIVKPGDILLINSTGNLIAPRGYFKIRSGKSSIMRSDAPIGKCKSECITPNGSIPNDKPFQNVNRITYGACPRYVKQSTLKLATGMRNVPEKQTRGIFGAIAGFIENGWEGMVDGWYGFRHQNSEGRGQAADLKSTQAAIDQINGKLNRLIGKTNEKFHQIEKEFSEVEGRIQDLEKYVEDTKIDLWSYNAELLVALENQHTIDLTDSEMNKLFEKTKKQLRENAEDMGNGCFKIYHKCDNACIGSIRNGTYDHDVYRDEALNNRFQIKGVELKSGYKDWILWISFAISCFLLCVALLGFIMWACQKGNIRCNICI

SEQ ID NO: 11658 - protein, 566 aa, synthetic construct; identical to SEQ ID NO: 9868
  REGION 1..566: note = hemagglutinin__InfluenzaA__AHL98913

SEQ ID NO: 11659 - protein, 566 aa, synthetic construct; identical to SEQ ID NO: 9858
  REGION 1..566: note = hemagglutinin__InfluenzaA__AHL98925

SEQ ID NO: 11660 - protein, 566 aa, synthetic construct; identical to SEQ ID NO: 9997
  REGION 1..566: note = hemagglutinin__InfluenzaA__AHL98937

SEQ ID NO: 11661 - protein, 566 aa, synthetic construct; identical to SEQ ID NO: 9994
  REGION 1..566: note = hemagglutinin__InfluenzaA__AHL98961

SEQ ID NO: 11662 - protein, 566 aa, synthetic construct
  REGION 1..566: note = hemagglutinin__InfluenzaA__AHL98973
MKTIIALSYILCLVFAQKLPGNDNSTATLCLGHHAVPNGTIVKTITNDRIEVTNATELVQNSSIGEICDSPHQILDGENCTLIDALLGDPQCDGFQNKKWDLFVERSKAYSNCYPYDVPDYASLRSLVASSGTLEFNNESFNWTGVTQNGTSSACIRRSNSSFFSRLNWLTHLNFKYPALNVTMPNNEQFDKLYIWGVHHPGTDKDQIFLYAQSSGRITVSTKRSQQAVVPNIGSRPRIRNIPSRISIYWTIVKPGDILLINSTGNLIAPRGYFKIRSGKSSIMRSDAPIGKCKSECITPNGSIPNDKPFQNVNRITYGACPRYVKQSTLKLATGMRNVPEKQTRGIFGAIAGFIENGWEGMVDGWYGFRHQNSEGRGQAADLKSTQAAIDQINGKLNRLIGKTNEKFHQIEKEFSEVEGRIQDLEKYVEDTKIDLWSYNAELLVALENQHTIDLTDSEMNKLFEKTKKQLRENAEDMGNGCFKIYHKCDNACIGSIRNGTYDHDVYRDEALNNRFQIKGVELKSGYKDWILWISFAMSCFLLCVALLGFIMWACQKGNIRCNICI

SEQ ID NO: 11663 - protein, 566 aa, synthetic construct
  REGION 1..566: note = hemagglutinin__InfluenzaA__AHL98985
MKTIIALSYILCLVFAQKLPGNDNSTATLCLGHHAVPNGTIVKTITNDRIEVTNATELVQNSSIGEICDSPHQILDGENCTIIDALLGDPQCDGFQNKKWDLFVERSKAYSNCYPYDVPDYASLRSLVASSGTLEFNNESFNWAGVTQNGTSSACIRGSNSSFFSRLNWLTHLNFKYPALNVTMPNNEQFDKLYIWGVHHPGTDKDQIFLYAQSSGRITVSTKRSQQAVIPNIGSRPRIRNIPSRISIYWTIVKPGDILLINSTGNLIAPRGYFKIRSGKSSIMRSDAPIGKCKSECITPNGSIPNDKPFQNVNRITYGACPRYVKQSTLKLATGMRNVPEKQTRGIFGAIAGFIENGWEGMVDGWYGFRHQNSEGRGQAADLKSTQAAIDQINGKLNRLIGKTNEKFHQIEKEFSEVEGRIQDLEKYVEDTKIDLWSYNAELLVALENQHTIDLTDSEMNKLFEKTKKQLRENAEDMGNGCFKIYHKCDNACIGSIRNGTYDHDVYRDEALNNRFQIKGVELKSGYKDWILWISFAISCFLLCVALLGFIMWACQKGNIRCNICI

SEQ ID NO: 11664 - protein, 566 aa, synthetic construct; identical to SEQ ID NO: 9994
  REGION 1..566: note = hemagglutinin__InfluenzaA__AHL98997

SEQ ID NO: 11665 - protein, 566 aa, synthetic construct; identical to SEQ ID NO: 9858
  REGION 1..566: note = hemagglutinin__InfluenzaA__AHL99009

SEQ ID NO: 11666 - protein, 566 aa, synthetic construct; identical to SEQ ID NO: 9868
  REGION 1..566: note = hemagglutinin__InfluenzaA__AHL99021

SEQ ID NO: 11667 - protein, 566 aa, synthetic construct
  REGION 1..566: note = hemagglutinin__InfluenzaA__AHL99045
MKTIIALSYILCLVFAQKIPGNDNSTATLCLGHHAVPNGTIVKTITNDRIEVTNATELVQNSSIGEICDSPHQILDGENCTLIDALLGDPQCDGFQNKKWDLFVERSKAYSNCYPYDVPDYASLRSLVASSGTLEFNNESFNWTGVTQNGTSSACIRRSNSSFFSRLNWLTHLNFKYPALNVTMPNNEQFDKLYIWGVHHPGTDKDQIFLYAQSSGRITVSTKRSQQAVIPNIGSRPRIRNIPSRISIYWTIVKPGDILLINSTGNLIAPRGYFKIRSGKSSIMRSDAPIGKCKSECITPNGSIPNDKPFQNVNRITYGPCPRYVKQSTLKLATGMRNVPEKQTRGIFGAIAGFIENGWEGMVDGWYGFRHQNSEGRGQAADLKSTQAAIDQINGKLNRLIGKTNEKFHQIEKEFSEVEGRIQDLEKYVEDTKIDLWSYNAELLVALENQHTIDLTDSEMNKLFEKTKKQLRENAEDMGNGCFKIYHKCDNACIGSIRNGTYDHDVYRDEALNNRFQIKGVELKSGYKDWILWISFAISCFLLCVALLGFIMWACQKGNIRCNICI

SEQ ID NO: 11668 - protein, 566 aa, synthetic construct
  REGION 1..566: note = hemagglutinin__InfluenzaA__AHL99057
MKTIIALSYILCLVFAQKLPGNDNSTATLCLGHHAVPNGTIVKTITNDRIEVTNATELVQNSSIGEICDSPHQIIDGENCTLIDALLGDPQCDGFQNKKWDLFVERSKAYSNCYPYDVPDYASLRSLVASSGTLEFNNESFNWAGVTQNGTSSACIRGSNSSFFSRLNWLTHLNFKYPALNVTMPNNEQFDKLYIWGVHHPGTDKDQIFLYAQSSGRITVSTKRSQQAVIPNIGSRPRIRNIPSRISIYWTIVKPGDILLINSTGNLIAPRGYFKIRSGKSSIMRSDAPIGKCKSECITPNGSIPNDKPFQNVNRITYGACPRYVKQSTLKLATGMRNVPEKQTRGIFGAIAGFIENGWEGMVDGWYGFRHQNSEGRGQAADLKSTQAAIDQINGKLNRLIGKTNEKFHQIEKEFSEVEGRIQDLEKYVEDTKIDLWSYNAELLVALENQHTIDLTDSEMNKLFEKTKKQLRENAEDMGNGCFKIYHKCDNACIGSIRNGTYDHDVYRDEALNNRFQIKGVELKSGYKDWILWISFAISCFLLCVALLGFIMWACQKGNIRCNICI

SEQ ID NO: 11669 - protein, 566 aa, synthetic construct
  REGION 1..566: note = hemagglutinin__InfluenzaA__AHL99069
MKTIIALSYILCLVFAQKLPGNDNSTATLCLGHHAVPNGTIVKTITNDRIEVTNATELVQNSSIGEICDSPHQILDGENCTLIDALLGDPQCDGFQNKKWDLFVERSKAYSNCYPYDVPDYASLRSLVASSGTLEFNNESFNWAGVTQNGTSSACIRGSNSSFFSRLNWLTHLNFKYPALNVTMPNNEQFDKLYIWGVHHPGTDKDQIFLYAQSSGRITVSTKRSQQAVIPNIGSRPRIRNIPSRISIYWTIVKPGDTLLINSTGNLIAPRGYFKIRSGKSSIMRSDAPIGKCKSECITPNGSIPNDKPFQNVNRITYGACPRYVKQSTLKLATGMRNVPEKQTRGIFGAIAGFIENGWEGMVDGWYGFRHQNSEGRGQAADLKSTQAAIDQINGKLNRLIGKTNEKFHQIEKEFSEVEGRIQDLEKYVEDTKIDLWSYNAELLVALENQHTIDLTDSEMNKLFEKTKKQLRENAEDMGNGCFKIYHKCDNACIGSIRNGTYDHNVYRDEALNNRFQIKGVELKSGYKDWILWISFAISCFLLCVALLGFIMWACQKGNIRCNICI

SEQ ID NO: 11670 - protein, 566 aa, synthetic construct
  REGION 1..566: note = hemagglutinin__InfluenzaA__AHL99081
MKTIIALSYILCLVFAQKLPGNDNSTATLCLGHHAVPNGTIVKTITNDRIEVTNATELVQNSSIGEICDSPHQILDGENCTLIDALLGDPQCDGFQNKKWDLFVERSKAYSNCYPYDVPDYASLRSLVASSGTLEFNNESFNWTGVTQNGTSSACIRRSNSSFFSRLNWLTHLNFKYPALNVTMPNNEQFDKLYIWGVHHPGTDKDQIFLYAQSSGRITVSTKRSQQAVIPNIGSRPRIRNIPSRISIYWTIVKPGDILLINSTGNLIAPRGYFKIRSGKSSIMRSDAPIGKCKSECITPNGSIPNDKPFQNVNRITYGACPRYVKQGTLKLATGMRNVPEKQTRGIFGAIAGFIENGWEGMVDGWYGFRHQNSEGRGQAADLKSTQAAIDQINGKLNRLIGKTNEKFHQIEKEFSEVEGRIQDLEKYVEDTKIDLWSYNAELLVALENQHTIDLTDSEMNKLFEKTKKQLRENAEDMGNGCFKIYHKCDNACIGSIRNGTYDHNVYRDEALNNRFQIKGVELKSGYKDWILWISFAISCFLLCVALLGFIMWACQKGNIRCNICI

SEQ ID NO: 11671 - protein, 566 aa, synthetic construct
  REGION 1..566: note = hemagglutinin__InfluenzaA__AHL99093
MKTIIALSYILCLIFAQKLPGNDNSTATLCLGHHAVPNGTIVKTITNDRIEVTNATELVQNSSIGEICDSPHQILDGENCTLIDALLGDPQCDGFQNKKWDLFVERSKAYSNCYPYDVPDYASLRSLVASSGTLEFNNESFNWTGVTQNGTSSACIRRSNSSFFSRLNWLTHLNFKYPALNVTMPNNEQFDKLYIWGVHHPGTDKDQIFLYAQSSGRITVSTKRSQQAVIPNIGSRPRIRNIPSRISIYWTIVKPGDILLINSTGNLIAPRGYFKIRSGKSSIMRSDAPIGKCKSECITPNGSIPNDKPFQNVNRITYGACPRYVKQSTLKLATGMRNVPEKQTRGIFGAIAGFIENGWEGMVDGWYGFRHQNSEGRGQAADLKSTQAAIDQINGKLNRLIGKTNEKFHQIEKEFSEVEGRIQDLEKYVEDTKIDLWSYNAELLVALENQHTIDLTDSEMNKLFEKTKKQLRENAEDMGNGCFKIYHKCDNACIGSIRNGTYDHNVYRDEALNNRFQIKGVELKSGYKDWILWISFAISCFLLCVALLGFIMWACQKGNIKCNICI

SEQ ID NO: 11672 - protein, 566 aa, synthetic construct; identical to SEQ ID NO: 9858
  REGION 1..566: note = hemagglutinin__InfluenzaA__AHL99117

SEQ ID NO: 11673 - protein, 566 aa, synthetic construct
  REGION 1..566: note = hemagglutinin__InfluenzaA__AHL99129
MKTIIALSYILCLVFAQKLPGNDNSTATLCLGHHAVPNGTIVKTITNDRIEVTNATELVQNSSIGEICDSPHQILDGENCTLIDALLGDPQCDGFQNKKWDLFVERSKAYSNCYPYDVPDYASLRSLVASSGTLEFNNESFNWTGVTQNGTSSACIRRSNSSFFSRLNWLTHLNFKYPALNVTMPNNEQFDKLYIWGVHHPGTDKDQIFLYAQSSGRITVSTKRSQQAVIPNIGSRPRIRNIPSRISIYWTIVKPGDILLINSTGNLIAPRGYFKIRSGKSSIMRSDAPIGKCKSECITPNGSIPNDKPFQNVNRITYGACPRYVKQSTLKLATGMRNVPEKQTRGIFGAIAGFIENGWEGMVDGWYGFRHQNSEGRGQAADLKSTQAAIDQINGKLNRLIGKTNEKFHQIEKEFSEVEGRIQDIEKYVEDTKIDLWSYNAELLVALENQHTIDLTDSEMNKLFEKTKKQLRENAEDMGNGCFKIYHKCDNACIGSIRNGTYDHNVYRDEALNNRFQIKGVELKSGYKDWILWISFAISCFLLCVALLGFIIWACQKGNIRCNICI

SEQ ID NO: 11674 - protein, 566 aa, synthetic construct
  REGION 1..566: note = hemagglutinin__InfluenzaA__AHL99141
MKTIIALSYILCLVFAQKLPGNDNSTATLCLGHHAVPNGTIVKTITNDQIEVTNATELVQNSSIGEICDSPHQILDGENCTLIDALLGDPQCDGFQNKKWDLFVERSKAYSNCYPYDVPDYASLRSLVASSGTLEFNNESFNWTGVTQNGTSSACIRRSNSSFFSRLNWLTHLDFKYPALNVTMPNNEQFDKLYIWGVHHPGTDKDQIFLYAQSSGRITVSTKRSQQAVIPNIGSRPRIRNIPSRISIYWTIVKPGDILLINSTGNLIAPRGYFKIRSGKSSIMRSDAPIGKCKSECITPNGSIPNDKPFQNVNRITYGACPRYVKQSTLKLATGMRNVPEKQTRGIFGAIAGFIENGWEGMVDGWYGFRHQNSEGRGQAADLKSTQAAIDQINGKLNRLIGKTNEKFHQIEKEFSEVEGRIQDLEKYVEDTKIDLWSYNAELLVALENQHTIDLTDSEMNKLFEKTKKQLRENAEDMGNGCFKIYHKCDNACIGSIRNGTYDHDVYRDEALNNRFQIKGVELKSGYKDWILWISFAISCFLLCVALLGFIMWACQKGNIRCNICI

SEQ ID NO: 11675 - protein, 566 aa, synthetic construct
  REGION 1..566: note = hemagglutinin__InfluenzaA__AHL99153
MKTIIALSYILCLVFAQKLPGNDNSTATLCLGHHAVPNGTIVKTITNDRIEVTNATELVQNSSIGEICDSPHQILDGENCTLIDALLGDPQCDGFQNKKWDLFVERSKAYSNCYPYDVPDYASLRSLVASSGTLEFNNESFNWAGVTQNGTSSACIRGSNSSFFSRLNWLTHLNFKYPALNVTMPNNEQFDKLYIWGVHHPGTDKDQIFLYAQSSGRITVSTKRSQQAVTPNIGSRPRIRDIPSRISIYWTIVKPGDILLINSTGNLIAPRGYFKIRSGKSSIMRSDAPIGKCKSECITPNGSIPNDKPFQNVNRITYGACPRYVKQSTLKLATGMRNVPEKQTRGIFGAIAGFIENGWEGMMDGWYGFRHQNSEGRGQAADLKSTQAAIDQINGKLNRLIGKTNEKFHQIEKEFSEVEGRIQDLEKYVEDTKIDLWSYNAELLVALENQHTIDLTDSEMNKLFEKTKKQLRENAEDMGNGCFKIYHKCDNACIGSIRNGTYDHDVYRDEALNNRFQIKGVELKSGYKDWILWISFAISCFLLCVALLGFIMWACQKGNIRCNICI

SEQ ID NO: 11676 - protein, 566 aa, synthetic construct; identical to SEQ ID NO: 9997
  REGION 1..566: note = hemagglutinin__InfluenzaA__AHL99165

SEQ ID NO: 11677 - protein, 566 aa, synthetic construct; identical to SEQ ID NO: 10482
  REGION 1..566: note = hemagglutinin__InfluenzaA__AHL99177

SEQ ID NO: 11678 - protein, 566 aa, synthetic construct; identical to SEQ ID NO: 9858
  REGION 1..566: note = hemagglutinin__InfluenzaA__AHL99189

SEQ ID NO: 11679 - protein, 566 aa, synthetic construct; identical to SEQ ID NO: 9994
  REGION 1..566: note = hemagglutinin__InfluenzaA__AHL99225

SEQ ID NO: 11680 - protein, 566 aa, synthetic construct; identical to SEQ ID NO: 10467
  REGION 1..566: note = hemagglutinin__InfluenzaA__AHL99237

SEQ ID NO: 11681 - protein, 566 aa, synthetic construct; identical to SEQ ID NO: 9868
  REGION 1..566: note = hemagglutinin__InfluenzaA__AHL99249

SEQ ID NO: 11682 - protein, 566 aa, synthetic construct; identical to SEQ ID NO: 9858
  REGION 1..566: note = hemagglutinin__InfluenzaA__AHL99261

SEQ ID NO: 11683 - protein, 566 aa, synthetic construct; identical to SEQ ID NO: 9997
  REGION 1..566: note = hemagglutinin__InfluenzaA__AHL99273

SEQ ID NO: 11684 - protein, 566 aa, synthetic construct
  REGION 1..566: note = hemagglutinin__InfluenzaA__AHL99285
MKTIIALSYILCLVFAQKLPGNDNSTATLCLGHHAVPNGTIVKTITNDRIEVTNATELVQNSSIGEICDSPHQILDGENCTLIDALLGDPQCDGFQNKKWDLFVERSKAYSNCYPYDVPDYASLRSLVASSGTLEFNNESFNWTGVTQNGTSSACIRRSNSSFFSRLNWLTHLNFKYPALNVTMPNNEQFDKLYIWGVHHPGTDKDQIFLYAQSSGRITVSTKRSQQAVIPNIGSRPRIRNIPSRISIYWTIVKPGDILLINSTGNLIAPRGYFKIQSGKSSIMRSDAPIGKCKSECITPNGSIPNDKPFQNVNRITYGACPRYVKQSTLKLATGMRNVPEKQTRGIFGAIAGFIENGWEGMVDGWYGFRHQNSEGRGQAADLKSTQAAIDQINGKLNRLIGKTNEKFHQIEKEFSEVEGRIQDLEKYVEDTKIDLWSYNAELLVALENQHTIDLTDSEMNKLFEKTKKQLRENAEDMGNGCFKIYHKCDNACIGSIRNGTYDHNVYRDEALNNRFQIKGVELKSGYKDWILWISFAISCFLLCVALLGFIMWACQKGNIRCNICI

SEQ ID NO: 11685 - protein, 566 aa, synthetic construct; identical to SEQ ID NO: 10023
  REGION 1..566: note = hemagglutinin__InfluenzaA__AHL99297

SEQ ID NO: 11686 - protein, 566 aa, synthetic construct; identical to SEQ ID NO: 9868
  REGION 1..566: note = hemagglutinin__InfluenzaA__AHL99309

SEQ ID NO: 11687 - protein, 566 aa, synthetic construct
  REGION 1..566: note = hemagglutinin__InfluenzaA__AHL99321
MKTIIALSYILCLVFTQKLPGNDNSTATLCLGHHAVPNGTIVKTITNDQIEVTNATELVQNSSIGEICDSPHQILDGENCTLIDALLGDPQCDGFQNKKWDLFVERSKAYSNCYPYDVPDYASLRSLVASSGTLEFNNESFNWAGVTQNGTSSACIRGSNSSFFSRLNWLTHLNFKYPALNVTMPNNEQFDKLYIWGVHHPGTDKDQIFLYAQSSGRITVSTKRSQQAVIPNIGSRPRIRNIPSRISIYWTIVKPGDILLINSTGNLIAPRGYFKIRSGKSSIMRSDAPIGKCKSECITPNGSIPNDKPFQNVNRITYGACPRYVKQSTLKLATGMRNVPEKQTRGIFGAIAGFIENGWEGMVDGWYGFRHQNSEGRGQAADLKSTQAAIDQINGKLNRLIGKTNEKFHQIEKEFSEVEGRIQDLEKYVEDTKIDLWSYNAELLVALENQHTIDLTDSEMNKLFEKTKKQLRENAEDMGNGCFKIYHKCDNACIGSIRNGTYDHDVYRDEALNNRFQIKGVELKSGYKDWILWISFAISCFLLCVALLGFIMWACQKGNIRCNICI

SEQ ID NO: 11688 - protein, 566 aa, synthetic construct
  REGION 1..566: note = hemagglutinin__InfluenzaA__AHL99333
MKTIIALSYILCLVFAQELPGNDDSTATLCLGHHAVPNGTIVKTITNDQIEVTNATELVQSSSTGEICNSPHQILDGENCTLIDALLGDPQCDGFQNKKWDLFVERSKAHSNCYPYDVPDYASLRSLVASSGTLEFNNESFNWTGVTQNGTSSACIRRSNNSFFSRLNWLTHLNFKYPALNVTMPNNEQFDKLYIWGVHHPGTDKDQIFLYAQASGRITVSTKRSQQAVIPNIGSRPRVRNIPSRVSIYWTIVKPGDILLINSTGNLIAPRGYFKIRSGKSSIMRSDAPIGKCNSACITPNGSIPNDKPFQNVNRITYGACPRYVKQNTLKLATGMRNVPEKQTRGIFGAIAGFIENGWEGMVDGWYGFRHQNSEGRGQAADLKSTQAAIDQINGKLNRLIGKTNEKFHQIEKEFSEVEGRIQDLEKYVEDTKIDLWSYNAELLVALENQHTIDLTDSEMNKLFEKTKKQLRENAEDMGNGCFKIYHKCDNACIGSIRNGTYDHNVYRDEALNNRFQIKGVELKSGYKDWILWISFAISCFLLCVALLGFIMWACQKGNIRCNICI

SEQ ID NO: 11689 - protein, 566 aa, synthetic construct
  REGION 1..566: note = hemagglutinin__InfluenzaA__AHL99356
MKAILVVLLYTFATANADTLCIGYHANNSTDTVDTVLEKNVTVTHSVNLLEDKHNGKLCKLRGVAPLHLGKCNIAGWILGNPECESLSTASSWSYIVETSSSDNGTCYPGDFINYEELREQLSSVSSFERFEIFPKTSSWPNHDSNKGVTAACPHAGAKSFYKNLIWLVKKGNSYPKLSKSYINDKGKEVLVLWGIHHPSTTADQQSLYQNADAYVFVGTSKYSKKFKPEIAIRPKVRDQEGRMNYYWTLIEPGDKITFEATGNLVVPRYAFAMERNAGSGIIISDTPVHDCNTTCQTPEGAINTSLPFQNIHPITIGKCPKYVKSTKLRLATGLRNVPSIQSRGLFGAIAGFIEGGWTGMVDGWYGYHHQNEQGSGYAADLKSTQNAIDKITNKVNSVIEKMNTQFTAVGKEFNHLEKRIENLNKKVDDGFLDIWTYNAELLVLLENERTLDYHDSNVKNLYEKVRNQLKNNAKEIGNGCFEFYHKCDNTCMESVKNGTYDYPKYSEEAKLNREKIDGVKLESTRIYQILAIYSTVASSLVLVVSLGAISFWMCSNGSLQCRICI

SEQ ID NO: 11690 - protein, 566 aa, synthetic construct; identical to SEQ ID NO: 9883
  REGION 1..566: note = hemagglutinin__InfluenzaA__AHL99367

SEQ ID NO: 11691 - protein, 566 aa, synthetic construct
  REGION 1..566: note = hemagglutinin__InfluenzaA__AHL99379
MKAILVVMLYTFATANADTLCIGYHANNSTDTVDTVLEKNVTVTHSVNLLEDKHNGKLCKLRGVAPLHLGKCNIAGWILGNPECESLSTASSWSYIVETSGSDNGTCYPGDFIDYEELREQLSSVSSFERFEIFPKTSSWPNHDSNKGVTAACPHAGAKGFYKNLIWLVKKGNSYPKLSISYINDKGKEVLVLWGIHHPSTTADQQSLYQNADTYVFVGTSRYSKKFKPEIAIRPKVRDQEGRMNYYWTLVEPGDKITFEATGNLVVPRYAFAMERNAGSGIIISDTPVHDCNTTCQTPKGAINTSLPFQNIHPITIGKCPKYVKSTKLRLATGLRNVPSIQSRGLFGAIAGFIEGGWTGMVDGWYGYHHQNEQGSGYAADLKSTQNAIDKITNKVNSVIEKMNTQFTAVGKEFNHLEKRIENLNKKVDDGFLDIWTYNAELLVLLENERTLDYHDSNVKNLYEKVRNQLKNNAKEIGNGCFEFYHKCDNTCMESVKNGTYDYPKYSEEAKLNREKIDGVKLESTRIYQILAIYSTAASSLVLVVSLGAISFWMCSNGSLQCRICI

SEQ ID NO: 11692 - protein, 566 aa, synthetic construct; identical to SEQ ID NO: 11684
  REGION 1..566: note = hemagglutinin__InfluenzaA__AHL99390

SEQ ID NO: 11693 - protein, 566 aa, synthetic construct; identical to SEQ ID NO: 9858
  REGION 1..566: note = hemagglutinin__InfluenzaA__AHL99402

SEQ ID NO: 11694 - protein, 566 aa, synthetic construct
  REGION 1..566: note = hemagglutinin__InfluenzaA__AHL99426
MKTIIALSYILCLVFAQKLPGNDNSTATLCLGHHAVPNGTIVKTITNDRIEVTNATELVQNSSIGEICDSPHQILDGENCTLIDALLGDPQCDGFQNKKWDLFVERSKAYSNCYPYDVPDYASLRSLVASSGTLEFNNESFNWTGVTQNGTSSACIRRSNSSFFSRLNWLTHLNFKYPALNVTMPNNEQFDKLYIWGVHHPGTDKDQIFLYAQSSGRITVSTKRSQQAVIPNIGSRPRIRNIPSRISIYWTIVKPGDILLINSTGNLIAPRGYFKIRSGKSSMMRSDAPIGKCKSECITPNGSIPNDKPFQNVNRITYGACPRYVKQSTLKLATGMRNVPEKQTRGIFGAIAGFIENGWEGMVDGWYGFRHQNSEGRGQAADLKSTQAAIDQINGKLNRLIGKTNEKFHQIEKEFSEVEGRIQDLEKYVEDTKIDLWSYNAELLVALENQHTIDLTDSEMNKLFEKTKKQLRENAEDMGNGCFKIYHKCDNACIGSIRNGTYDHDVYRDEALNNRFQIKGVELKSGYKDWILWISFAISCFLLCVALLGFIMWACQKGNIRCNICI

SEQ ID NO: 11695 - protein, 566 aa, synthetic construct
  REGION 1..566: note = hemagglutinin__InfluenzaA__AHL99438
MKTIIALSYILCLVFAQKLPGNDNSTATLCLGHHAVPNGTIVKTITNDRIEVTNATELVQNSSIGEICDSPHQILDGENCTLIDALLGDPQCDGFQNKKWDLFVERSKAYSNCYPYDVPDYASLRSLVASSGTLEFNNESFNWTGVTQNGTSSACIRRSNSSFFSRLNWLTHLNFKYPALNVTMPNNEQFDKLYIWGVHHPGTDKDQIFLYAQSSGRITVSTKRSQQAVIPNIGSRPRIRNIPSRISIYWTIVKPGDILLINSTGNLIAPRGYFKIQSGKSSIMRSDAPIGKCKSECITPNGSIPNDKPFQNVNRITYGACPRYVKQSTLKLATGMRNVPEKQTRGIFGAIAGFIENGWEGMVDGWYGFRHQNSEGRGQAADLKSTQAAIDQINGKLNRLIGKTNEKFHQIEKEFSEVEGRIQDLEKYVEDTKIDLWSYNAELLVALENQHTIDLTDSEMNKLFEKTKKQLRENAEDMGNGCFKIYHKCDNACIGSIRNGTYDHDVYRDEALNNRFQIKGVELKSGYKDWILWISFAISCFLLCVALLGFIMWACQKGNIRCNICI

SEQ ID NO: 11696 - protein, 566 aa, synthetic construct; identical to SEQ ID NO: 9994
  REGION 1..566: note = hemagglutinin__InfluenzaA__AHL99450

SEQ ID NO: 11697 - protein, 566 aa, synthetic construct; identical to SEQ ID NO: 10467
  REGION 1..566: note = hemagglutinin__InfluenzaA__AHL99462

SEQ ID NO: 11698 - protein, 566 aa, synthetic construct; identical to SEQ ID NO: 9997
  REGION 1..566: note = hemagglutinin__InfluenzaA__AHL99474

SEQ ID NO: 11699 - protein, 566 aa, synthetic construct; identical to SEQ ID NO: 10023
  REGION 1..566: note = hemagglutinin__InfluenzaA__AHL99486

SEQ ID NO: 11700 - protein, 566 aa, synthetic construct; identical to SEQ ID NO: 9994
  REGION 1..566: note = hemagglutinin__InfluenzaA__AHL99498

SEQ ID NO: 11701 - protein, 566 aa, synthetic construct; identical to SEQ ID NO: 9858
  REGION 1..566: note = hemagglutinin__InfluenzaA__AHL99510

SEQ ID NO: 11702 - protein, 566 aa, synthetic construct; identical to SEQ ID NO: 9858
  REGION 1..566: note = hemagglutinin__InfluenzaA__AHL99522

SEQ ID NO: 11703 - protein, 566 aa, synthetic construct; identical to SEQ ID NO: 9883
  REGION 1..566: note = hemagglutinin__InfluenzaA__AHL99534

SEQ ID NO: 11704 - protein, 566 aa, synthetic construct; identical to SEQ ID NO: 9858
  REGION 1..566: note = hemagglutinin__InfluenzaA__AHL99546

SEQ ID NO: 11705 - protein, 566 aa, synthetic construct; identical to SEQ ID NO: 9858
  REGION 1..566: note = hemagglutinin__InfluenzaA__AHL99558

SEQ ID NO: 11706 - protein, 566 aa, synthetic construct
  REGION 1..566: note = hemagglutinin__InfluenzaA__AHL99570
MKTIIALSYILCLVFAQKLPGNDNSTATLCLGHHAVPNGTIVKTITNDRIEVTNATELVQNSSIGEICDSPHQILDGENCTLIDALLGDPQCDGFQNKKWDLFVERSKAYSSCYPYDVPDYASLRSLVASSGTLEFNNESFNWTGVTQNGTSSACIRRSNSSFFSRLNWLTHLNFKYPALNVTMPNNEQFDKLYIWGVHHPGTDKDQIFLYAQSSGRITVSTKRSQQAVIPNIGSRPRIRNIPSRISIYWTIVKPGDILLINSTGNLIAPRGYFKIRSGKSSIMRSDAPIGKCKSECITPNGSIPNDKPFQNVNRITYGACPRYIKQSTLKLATGMRNVPEKQTRGIFGAIAGFIENGWEGMVDGWYGFRHQNSEGRGQAADLKSTQAAIDQINGKLNRLIGKTNEKFHQIEKEFSEVEGRIQDLEKYVEDTKIDLWSYNAELLVALENQHTIDLTDSEMNKLFEKTKKQLRENAEDMGNGCFKIYHKCDNACIGSIRNGTYDHDVYRDEALNNRFQIKGVELKSGYKDWILWISFAISCFLLCVALLGFIMWACQKGNIRCNICI

SEQ ID NO: 11707 - protein, 566 aa, synthetic construct; identical to SEQ ID NO: 9858
  REGION 1..566: note = hemagglutinin__InfluenzaA__AHL99582

SEQ ID NO: 11708 - protein, 566 aa, synthetic construct
  REGION 1..566: note = hemagglutinin__InfluenzaA__AHL99594
MKAILVVMLYTFATANADTLCIGYHANNSTDTVDTVLEKNVTVTHSVNLLEDKHNGKLCKLRGVAPLHLGKCNIAGWILGNPECESLSTASSWSYIVETSGSDNGTCYPGDFIDYEELREQLSSVSSFERFEIFPKTSSWPNHDSNKGVTAACPRAGAKGFYKNLIWLVKKGNSYPKLSISYINDKGKEVLVLWGIHHPSTTADQQSLYQNADTYVFVGTSRYSKKFKPEIAIRPKVRDQEGRMNYYWTLVEPGDKITFEATGNLVVPRYAFAMERNAGSGIIISDTPVHDCNTTCQTPKGAINTSLPFQNIHPITIGKCPKYVKSTKLRLATGLRNVPSIQSRGLFGAIAGFIEGGWTGMVDGWYGYHHQNEQGSGYAADLKSTQNAIDKITNKVNSVIEKMNTQFTAVGKEFNHLEKRIENLNKKVDDGFLDIWTYNAELLVLLENERTLDYHDSNVKNLYEKVRNQLKNNAKEIGNGCFEFYHKCDNTCMESVKNGTYDYPKYSEEAKLNREEIDGVKLESTRIYQILAIYSTAASSLVLVVSLGAISFWMCSNGSLQCRICI

SEQ ID NO: 11709 - protein, 566 aa, synthetic construct; identical to SEQ ID NO: 10467
  REGION 1..566: note = hemagglutinin__InfluenzaA__AHL99605

SEQ ID NO: 11710 - protein, 566 aa, synthetic construct; identical to SEQ ID NO: 9997
  REGION 1..566: note = hemagglutinin__InfluenzaA__AHL99617

SEQ ID NO: 11711 - protein, 566 aa, synthetic construct; identical to SEQ ID NO: 9858
  REGION 1..566: note = hemagglutinin__InfluenzaA__AHL99629

SEQ ID NO: 11712 - protein, 566 aa, synthetic construct
  REGION 1..566: note = hemagglutinin__InfluenzaA__AHL99641
MKTIIALSYILCLVFAQKLPGNDNSTATLCLGHHAVPNGTIVKTITNDRIEVTNATELVQNSSIGEICDSPHQILDGENCTLIDALLGDPQCDGFQNKKWDLFVERSKAYSNCYPYDVPDYASLRSLVASSGTLEFNNESFNWTGVTQNGTSSACIRRSNSSFFSRLNWLTHLNFKYPALNVTMPNNEQFDKLYIWGVHHPGTDKDQIFLYAQSSGRITVSTKRSQQAVVPNIGSRPRIRNIPSRISIYWTIVKPGDILLINSTGNLIAPRGYFKIRSGKSSIMRSDAPIGKCKSECITPNGSIPNDKPFQNVNRITYGACPRYVKQSTLKLATGMRNVPEKQTRGIFGAIAGFIENGWEGMVDGWYGFRHQNSEGRGQAADLKSTQAAIDQINGKLNRLIGKTNEKFHQIEKEFSEVEGRIQDLEKYVEDTKIDLWSYNAELLVALENQHTIDLTDSEMNKLFEKTKKQLRENAEDMGNGCFKIYHKCDNACIGSIRNGTYNHDVYRDEALNNRFQIKGVELKSGYKDWILWISFAMSCFLLCVALLGFIMWACQKGNIRCNICI

SEQ ID NO: 11713 - protein, 566 aa, synthetic construct
  REGION 1..566: note = hemagglutinin__InfluenzaA__AHL99665
MKTIIALSYILCLVFAQKLPGNDNSTATLCLGHHAVPNGTIVKTITNDRIEVTNATELVQNSSIGEICDSPHQILDGENCTLIDALLGDPQCDGFQNKKWDLFVERSKAYSNCYPYDVPDYASLRSLVASSGTLEFNNESFNWTGVTQNGTSSACIRRSNSSFFSRLNWLTHLNFKYPALNVTMPNNEQFDKLYIWGVHHPGTDKDQIFLYAQSSGRITVSTKRSQQAVIPNIGSRPRIRNIPSRISIYWTIVKPGDILLINSTGNLIAPRGYFKIRSGKSSIMRSDAPIGKCKSECITPNGSIPNDKPFQNVNRITYGACPRYIKQSTLKLATGMRNVPEKQTRGIFGAIAGFIENGWEGMVDGWYGFRHQNSEGRGQAADLKSTQAAIDQINGKLNRLIGKTNEKFHQIEKEFSEVEGRIQDLEKYVEDTKIDLWSYNAELLVALENQHTIDLTDSEMNKLFEKTKKQLRENAEDMGNGCFKIYHKCDNACIGSIRNGTYDHDVYRDEALNNRFQIKGVELKSGYKDWILWISFAISCFLLCVALLGFIMWACQKGNIRCNICI

SEQ ID NO: 11714 - protein, 566 aa, synthetic construct; identical to SEQ ID NO: 9858
  REGION 1..566: note = hemagglutinin__InfluenzaA__AHL99677

SEQ ID NO: 11715 - protein, 566 aa, synthetic construct; identical to SEQ ID NO: 9858
  REGION 1..566: note = hemagglutinin__InfluenzaA__AHL99689

SEQ ID NO: 11716 - protein, 566 aa, synthetic construct
  REGION 1..566: note = hemagglutinin__InfluenzaA__AHL99701
MKTIIALSYILCLVFAQKLPGNDNSTATLCLGHHAVPNGTIVKTITNDRIEVTNATELVQNSSIGEICDSPHQILDGENCTLIDALLGDPQCDGFQNKKWDLFVERSKAYSNCYPYDVPDYASLRSLVASSGTLEFNNESFNWAGVTQNGTSSACIRGSNSSFFSRLNWLTHLNFKYPALNVTMPNNEQFDKLYIWGVHHPGTDKDQIFLYAQSSGRITVSTKRSQQAVTPNIGSRPRIRNIPSRISIYWTIVKPGDILLINSTGNLIAPRGYFKIRSGKSSIMRSDAPIGKCKSECITPNGSIPNDKPFQNVNRITYGACPRYVKQSTLKLATGMRNVPEKQTRGIFGAIAGFIENGWEGMMDGWYGFRHQNSEGRGQAADLKSTQAAIDQINGKLNRLIGKTNEKFHQIEKEFSEVEGRIQDLEKYVEDTKIDLWSYNAELLVALENQHTIDLTDSEMNKLFEKTKKQLRENAEDMGNGCFKIYHKCDNACIGSIRNGTYDHDVYRDEALNNRFQIKGVELKSGYKDWILWISFAISCFLLCVALLGFIMWACQKGNIRCNICI

SEQ ID NO: 11717 - protein, 566 aa, synthetic construct
  REGION 1..566: note = hemagglutinin__InfluenzaA__AHL99713
MKTIIALSYILCLVFAQKLPGNDNSTATLCLGHHAVPNGTIVKTITNDRIEVTNATELVQNSSIGEICDSPHQILDGENCTLIDALLGDPQCDGFQNKKWDLFVERSKAYSNCYPYDVPDYTSLRSLVASSGTLEFNNESFNWTGVTQNGTSSACIRRSNSSFFSRLNWLTHLNFKYPALNVTMPNNEQFDKLYIWGVHHPGTDKDQIFLYAQSSGRITVSTKRSQQAVIPNIGSRPRIRNIPSRISIYWTIVKPGDILLINSTGNLIAPRGYFKIRSGKSSIMRSDAPIGKCKSECITPNGSIPNDKPFQNVNRITYGACPRYVKQSTLKLATGMRNVPEKQTRGIFGAIAGFIENGWEGMVDGWYGFRHQNSEGRGQAADLKSTQAAIDQINGKLNRLIGKTNEKFHQIEKEFSEVEGRIQDLEKYVEDTKIDLWSYNAELLVALENQHTIDLTDSEMNKLFEKTKKQLRENAEDMGNGCFKIYHKCDNACIGSIRNGTYDHDVYRDEALNNRFQIKGVELKSGYKDWILWISFAITCFLLCVALLGFIMWACQKGNIRCNICI

SEQ ID NO: 11718 - protein, 566 aa, synthetic construct; identical to SEQ ID NO: 9858
  REGION 1..566: note = hemagglutinin__InfluenzaA__AHL99725

SEQ ID NO: 11719 - protein, 566 aa, synthetic construct; identical to SEQ ID NO: 10060
  REGION 1..566: note = hemagglutinin__InfluenzaA__AHL99737

SEQ ID NO: 11720 - protein, 566 aa, synthetic construct; identical to SEQ ID NO: 9858
  REGION 1..566: note = hemagglutinin__InfluenzaA__AHL99748

SEQ ID NO: 11721 - protein, 566 aa, synthetic construct; identical to SEQ ID NO: 9858
  REGION 1..566: note = hemagglutinin__InfluenzaA__AHL99760

SEQ ID NO: 11722 - protein, 566 aa, synthetic construct; identical to SEQ ID NO: 9868
  REGION 1..566: note = hemagglutinin__InfluenzaA__AHL99772

SEQ ID NO: 11723 - protein, 566 aa, synthetic construct; identical to SEQ ID NO: 9883
  REGION 1..566: note = hemagglutinin__InfluenzaA__AHL99784

SEQ ID NO: 11724 - protein, 566 aa, synthetic construct; identical to SEQ ID NO: 10023
  REGION 1..566: note = hemagglutinin__InfluenzaA__AHL99796

SEQ ID NO: 11725 - protein, 566 aa, synthetic construct; identical to SEQ ID NO: 9858
  REGION 1..566: note = hemagglutinin__InfluenzaA__AHL99808

SEQ ID NO: 11726 - protein, 566 aa, synthetic construct
  REGION 1..566: note = hemagglutinin__InfluenzaA__AHL99820
MKTIIALSYILCLVFAQKLPGNDNSTATLCLGHHAVPNGTIVKTITNDRIEVTNATELVQNSSIGEICDSPHQILDGENCTLIDALLGDPQCDGFQNKKWDLFVERSKAYSNCYPYDVPDYASLRSLVASSGTLEFNNESFNWTGVTQNGTSSACIRRSNSSFFSRLNWLTHLNFKYPALNVTMPNNEQFDKLYIWGVHHPGTDKDQIFLYAQSSGRITVSTKRSQQAVIPNIGSRPRIRNIPSRISIYWTIVKPGDILLINSTGNLIAPRGYFKIRSGKSSIMRSDAPIGKCKSECITPNGSIPNDKPFQNVNRITYGACPRYVKQSTLKLATGMRNVPEKQTRGIFGAIAGFIENGWEGMVDGWYGFRHQNSDGRGQAADLKSTQAAIDQINGKLNRLIGKTNEKFHQIEKEFSEVEGRIQDLEKYVEDTKIDLWSYNAELLVALENQHTIDLTDSEMNKLFEKTKKQLRENAEDMGNGCFKIYHKCDNACIGSIRNGTYDHDVYRDEALNNRFQIKGVELKSGYKDWILWISFAISCFLLCVVLLGFIMWACQKGNIRCNICI

SEQ ID NO: 11727 - protein, 566 aa, synthetic construct; identical to SEQ ID NO: 9858
  REGION 1..566: note = hemagglutinin__InfluenzaA__AHL99832

SEQ ID NO: 11728 - protein, 566 aa, synthetic construct; identical to SEQ ID NO: 9883
  REGION 1..566: note = hemagglutinin__InfluenzaA__AHL99844

SEQ ID NO: 11729 - protein, 566 aa, synthetic construct; identical to SEQ ID NO: 9835
  REGION 1..566: note = hemagglutinin__InfluenzaA__AHL99856

SEQ ID NO: 11730 - protein, 566 aa, synthetic construct
  REGION 1..566: note = hemagglutinin__InfluenzaA__AHL99868
MKTIIALSYILCLVFAQELPGNDDSTATLCLGHHAVPNGTIVKTITNDQIEVTNATELVQSSSTGEICNSPHQILDGENCTLIDALLGDPQCDGFQNKKWDLFVERSKAHSNCYPYDVPDYASLRSLVASSGTLEFNNESFNWTGVTQNGTSSACIRRSNNSFFSRLNWLTHLNFKYPALNVTMPNNEQFDKLYIWGVHHPGTDKDQIFLYAQASGRITVSTKKSQQAVIPNIGSRPRVRNIPSRVSIYWTIVKPGDILLINSTGNLIAPRGYFKIRSGKSSIMRSDAPIGKCNSACITPNGSIPNDKPFQNVNRITYGACPRYVKQNTLKLATGMRNVPEKQTRGIFGAIAGFIENGWEGMVDGWYGFRHQNSEGRGQAADLKSTQAAIDQINGKLNRLIGKTNEKFHQIEKEFSEVEGRIQDLEKYVEDTKIDLWSYNAELLVALENQHTIDLTDSEMNKLFEKTKKQLRENAEDMGNGCFKIYHKCDNACIGSIRNGTYDHDVYRDEALNNRFQIKGVELKSGYKDWILWISFAISCFLLCVALLGFIMWACQKGNIRCNICI

SEQ ID NO: 11731 - protein, 566 aa, synthetic construct; identical to SEQ ID NO: 9997
  REGION 1..566: note = hemagglutinin__InfluenzaA__AHL99880

SEQ ID NO: 11732 - protein, 566 aa, synthetic construct; identical to SEQ ID NO: 9858
  REGION 1..566: note = hemagglutinin__InfluenzaA__AHL99892

SEQ ID NO: 11733 - protein, 566 aa, synthetic construct; identical to SEQ ID NO: 9994
  REGION 1..566: note = hemagglutinin__InfluenzaA__AHL99904

SEQ ID NO: 11734 - protein, 566 aa, synthetic construct
  REGION 1..566: note = hemagglutinin__InfluenzaA__AHL99916
MKTIIALSYILCLVFAQKLPGNDNSTATLCLGHHAVPNGTIVKTITNDRIEVTNATELVQNSSIGEICDSPHQILDGENCTLIDALLGDPQCDGFQNKKWDLFVERSKAYSNCYPYDVPDYASLRSLVASSGTLEFNNESFNWAGVTQNGTSSACIRGSNSSFFSRLNWLTHLNFKYPALNVTMPNNEQFDKLYIWGVHHPGTDKDQIFLYAQSSGRITVSTKRSQQAVIPNIGSRPRIRNIPSRISIYWTIVKPGDILLINSTGNLIAPRGYFKMRSGKSSIMRSDAPIGKCKSECITPNGSIPNDKPFQNVNRITYGACPRYVKQSTLKLATGMRNVPEKQTRGIFGAIAGFIENGWEGMMDGWYGFRHQNSEGRGQAADLKSTQAAIDQINGKLNRLIGKTNEKFHQIEKEFSEVEGRIQDLEKYVEDTKIDLWSYNAELLVALENQHTIDLTDSEMNKLFEKTKKQLRENAEDMGNGCFKIYHKCDNACIGSIRNGTYDHDVYRDEALNNRFQIKGVELKSGYKDWILWISFAISCFLLCVALLGFIMWACQKGNIRCNICI

SEQ ID NO: 11735 - protein, 566 aa, synthetic construct; identical to SEQ ID NO: 9883
  REGION 1..566: note = hemagglutinin__InfluenzaA__AHL99928

SEQ ID NO: 11736 - protein, 566 aa, synthetic construct
  REGION 1..566: note = hemagglutinin__InfluenzaA__AHL99940
MKTIIALSYILCLVFAQKLPGNDNSTATLCLGHHAVPNGTIVKTITNDRIEVTNATELVQNSSIGEICDSPHQILDGENCTLIDALLGDPQCDGFQNKKWDLFVERSKAYSNCYPYDVPDYASLRSLVASSGTLEFNNESFNWTGVTQNGTSSACIRRSNSSFFSRLNWLTHLNFKYPALNVTMPNNEQFDKLYIWGVHHPGTDKDQIFLYAQSSGRITVSTKRSQQAVIPNIGSRPRIRNIPSRISIYWTIVKPGDILLINSTGNLIAPRGYFKIRSGKSSIMRSDAPIGKCKSECITPNGSIPNDKPFQNVNRITYGACPRYVKQSTLKLATGMRNVPEKQTRGIFGAIAGFIENGWEGMVDGWYGFRHQNSEGRGQAADLKSTQAAIDQINGKLNRLIGKTNEKFHQIEKEFSGVEGRIQDLEKYVEDTKIDLWSYNAELLVALENQHTIDLTDSEMNKLFEKTKKQLRENAEDMGNGCFKIYHKCDNACIGSIRNGTYDHDVYRDEALNNRFQIKGVELKSGYKDWILWISFAISCFLLCVALLGFIMWACQKGNIRCNICI

SEQ ID NO: 11737 - protein, 566 aa, synthetic construct; identical to SEQ ID NO: 9858
  REGION 1..566: note = hemagglutinin__InfluenzaA__AHL99952

SEQ ID NO: 11738 - protein, 566 aa, synthetic construct; identical to SEQ ID NO: 9883
  REGION 1..566: note = hemagglutinin__InfluenzaA__AHL99964

SEQ ID NO: 11739 - protein, 566 aa, synthetic construct; identical to SEQ ID NO: 9883
  REGION 1..566: note = hemagglutinin__InfluenzaA__AHL99976

SEQ ID NO: 11740 - protein, 566 aa, synthetic construct; identical to SEQ ID NO: 9883
  REGION 1..566: note = hemagglutinin__InfluenzaA__AHL99988

SEQ ID NO: 11741 - protein, 566 aa, synthetic construct; identical to SEQ ID NO: 9858
  REGION 1..566: note = hemagglutinin__InfluenzaA__AHM00001

SEQ ID NO: 11742 - protein, 566 aa, synthetic construct; identical to SEQ ID NO: 9858
  REGION 1..566: note = hemagglutinin__InfluenzaA__AHM00013

SEQ ID NO: 11743 - protein, 566 aa, synthetic construct; identical to SEQ ID NO: 9868
  REGION 1..566: note = hemagglutinin__InfluenzaA__AHM00025

SEQ ID NO: 11744 - protein, 566 aa, synthetic construct; identical to SEQ ID NO: 9883
  REGION 1..566: note = hemagglutinin__InfluenzaA__AHM00037

SEQ ID NO: 11745 - protein, 566 aa, synthetic construct; identical to SEQ ID NO: 9883
  REGION 1..566: note = hemagglutinin__InfluenzaA__AHM00061

SEQ ID NO: 11746 - protein, 566 aa, synthetic construct; identical to SEQ ID NO: 9858
  REGION 1..566: note = hemagglutinin__InfluenzaA__AHM00073

SEQ ID NO: 11747 - protein, 566 aa, synthetic construct; identical to SEQ ID NO: 9858
  REGION 1..566: note = hemagglutinin__InfluenzaA__AHM00085

SEQ ID NO: 11748 - protein, 566 aa, synthetic construct
  REGION 1..566: note = hemagglutinin__InfluenzaA__AHM00097
MKAILVVLLYTFATANADTLCIGYHANNSTDTVDTVLEKNVTVTHSVNLLEDKHNGKLCKLRGVAPLHLGKCNIAGWILGNPECESLSTASSWSYIVETSSSDNGTCYPGDFIDYEELREQLSSVSSFERFEIFPKTSSWPNHDSNKGVTAACPHAGAKGFYKNLIWLVKKGNSYPKLSNSYINDKGKEVLVLWGIHHPSTTADQQSLYQNADTYVFVGTSRYSKKFKPEIAIRPKVRDQEGRMNYYWTLVEPGDKITFEATGNLVVPRYAFAMERNAGSGIIISDTTVHDCNTTCQTPKGAINTSLPFQNIHPITIGKCPKYVKSTKLRLATGLRNVPSIQSRGLFGAIAGFIEGGWTGMVDGWYGYHHQNEQGSGYAADLKSTQNAIDKITNKVNSVIEKMNTQFTAVGKEFNHLEKRIENLNKKVDDGFLDIWTYNAELLVLLENERTLDYHDSNVKNLYEKVRNQLKNNAKEIGNGCFEFYHKCDNMCMESVKNGTYDYPKYSEEAKLNREKIDGVKLESTRIYQILAIYSTVASSLVLVVSLGAISFWMCSNGSLQCRICI

SEQ ID NO: 11749 - protein, 566 aa, synthetic construct; identical to SEQ ID NO: 9883
  REGION 1..566: note = hemagglutinin__InfluenzaA__AHM00108

SEQ ID NO: 11750 - protein, 566 aa, synthetic construct; identical to SEQ ID NO: 9883
  REGION 1..566: note = hemagglutinin__InfluenzaA__AHM00120

SEQ ID NO: 11751 - protein, 566 aa, synthetic construct
  REGION 1..566: note = hemagglutinin__InfluenzaA__AHM00132
MKTIIALSYILCLVFAQELPGNDDSTATLCLGHHAVPNGTIVKTITNDQIEVTNATELVQSSSTGEICNSPHQILDGENCTLIDALLGDPQCDGFQNKKWDLFVERSKAHSNCYPYDVPDYASLRSLVASSGTLEFNNESFNWTGVTQNGTSSACIRRSNNSFFSRLNWLTHLNFKYPALNVTMPNNEQFDKLYIWGVHHPGTDKDQISLYAQASGRITVSTKRSQQAVIPNIGSRPRVRNIPSRVSIYWTIVKPGDILLINSTGNLIAPRGYFKIRSGKSSIMRSDAPIGKCNSACITPNGSIPNDKPFQNVNRITYGACPRYVKQNTLKLATGMRNVPEKQTRGIFGAIAGFIENGWEGMVDGWYGFRHQNSEGRGQAADLKSTQAAIDQINGKLNRLIGKTNEKFHQIEKEFSEVEGRIQDLEKYVEDTKIDLWSYNAELLVALENQHTIDLTDSEMNKLFEKTKKQLRENAEDMGNGCFKIYHKCDNACIGSIRNGTYDHDVYRDEALNNRFQIKGVELKSGYKDWILWISFAISCFLLCVALLGFIMWACQKGNIRCNICI

SEQ ID NO: 11752 - protein, 566 aa, synthetic construct; identical to SEQ ID NO: 9858
  REGION 1..566: note = hemagglutinin__InfluenzaA__AHM00144

SEQ ID NO: 11753 - protein, 566 aa, synthetic construct; identical to SEQ ID NO: 9883
  REGION 1..566: note = hemagglutinin__InfluenzaA__AHM00156

SEQ ID NO: 11754 - protein, 566 aa, synthetic construct; identical to SEQ ID NO: 9858
  REGION 1..566: note = hemagglutinin__InfluenzaA__AHM00168

SEQ ID NO: 11755 - protein, 566 aa, synthetic construct
  REGION 1..566: note = hemagglutinin__InfluenzaA__AHM00180
MKTIIALSYILCLVFAQKLPGNDNSTATLCLGHHAVPNGTIVKTITNDRIEVTNATELVQNSSIGEICDNPHQILDGENCTLIDALLGDPQCDGFQNKKWDLFVERSKAYSNCYPYDVPDYASLRSLVASSGTLEFNNESFNWTGVTQNGTSSACIRRSNSSFFSRLNWLTHLNFKYPALNVTMPNNEQFDKLYIWGVHHPGTDKDQIFLYAQSSGRITVSTKRSQQAVIPNIGSRPRIRNIPSRISIYWTIVKPGDILLINSTGNLIAPRGYFKIRSGKSSIMRSDAPIGKCKSECITPNGSIPNDKPFQNVNRITYGACPRYVKQSTLKLATGMRNVPEKQTRGIFGAIAGFIENGWEGMVDGWYGFRHQNSEGRGQAADLKSTQAAIDQINGKLNRLIGKTNEKFHQIEKEFSEVEGRIQDLEKYVEDTKIDLWSYNAELLVALENQHTIDLTDSEMNKLFEKTKKQLRENAEDMGNGCFKIYHKCDNACIGSIRNGTYDHNVYRDEALNNRFQIKGVELKSGYKDWILWISFAISCFLLCVALLGFIMWACQKGNIRCNICI

SEQ ID NO: 11756 - protein, 566 aa, synthetic construct; identical to SEQ ID NO: 9835
  REGION 1..566: note = hemagglutinin__InfluenzaA__AHM00192

SEQ ID NO: 11757 - protein, 566 aa, synthetic construct; identical to SEQ ID NO: 9883
  REGION 1..566: note = hemagglutinin__InfluenzaA__AHM00204

SEQ ID NO: 11758 - protein, 566 aa, synthetic construct; identical to SEQ ID NO: 9883
  REGION 1..566: note = hemagglutinin__InfluenzaA__AHM00216

SEQ ID NO: 11759 - protein, 566 aa, synthetic construct; identical to SEQ ID NO: 9858
  REGION 1..566: note = hemagglutinin__InfluenzaA__AHM00228

SEQ ID NO: 11760 - protein, 566 aa, synthetic construct; identical to SEQ ID NO: 9858
  REGION 1..566: note = hemagglutinin__InfluenzaA__AHM00240

SEQ ID NO: 11761 - protein, 566 aa, synthetic construct; identical to SEQ ID NO: 9858
  REGION 1..566: note = hemagglutinin__InfluenzaA__AHM00252

SEQ ID NO: 11762 - protein, 566 aa, synthetic construct; identical to SEQ ID NO: 9858
  REGION 1..566: note = hemagglutinin__InfluenzaA__AHM00264

SEQ ID NO: 11763 - protein, 566 aa, synthetic construct; identical to SEQ ID NO: 9835
  REGION 1..566: note = hemagglutinin__InfluenzaA__AHM00276

SEQ ID NO: 11764 - protein, 566 aa, synthetic construct; identical to SEQ ID NO: 9858
  REGION 1..566: note = hemagglutinin__InfluenzaA__AHM00288

SEQ ID NO: 11765 - protein, 566 aa, synthetic construct; identical to SEQ ID NO: 9858
  REGION 1..566: note = hemagglutinin__InfluenzaA__AHM00300

SEQ ID NO: 11766 - protein, 566 aa, synthetic construct; identical to SEQ ID NO: 9883
  REGION 1..566: note = hemagglutinin__InfluenzaA__AHM00312

SEQ ID NO: 11767 - protein, 566 aa, synthetic construct; identical to SEQ ID NO: 9835
  REGION 1..566: note = hemagglutinin__InfluenzaA__AHM00324

SEQ ID NO: 11768 - protein, 566 aa, synthetic construct; identical to SEQ ID NO: 9835
  REGION 1..566: note = hemagglutinin__InfluenzaA__AHM00336

SEQ ID NO: 11769 - protein, 566 aa, synthetic construct; identical to SEQ ID NO: 9883
  REGION 1..566: note = hemagglutinin__InfluenzaA__AHM00348

SEQ ID NO: 11770 - protein, 566 aa, synthetic construct
  REGION 1..566: note = hemagglutinin__InfluenzaA__AHM00360
MKTIIALSYILCLVFAQKLPGNDNSTATLCLGHHAVPNGTIVKTITNDQIEVTNATELVQNSSIGEICDSPHQILDGENCTLIDALLGDPQCDGFQNKKWDLFVERSKAYSNCYPYDVPDYASLRSLVASSGTLEFNNESFNWTGVTQNGTSSACIRRSNSSFFSRLNWLTHLNFKYPALNVTMPNNEQFDKLYIWGVHHPGTDKDQIFLYAQSSGRITVSTKRSQQAVIPNIGSRPRIRNIPSRISIYWTIVKPGDILLINSTGNLIAPRGYFKIRSGKSSIMRSDAPIGKCKSECITPNGSIPNDKPFQNVNRITYGACPRYVKQSTLKLATGMRNVPEKQTRGIFGAIAGFIENGWEGMVDGWYGFRHQNSEGRGQAADLKSTQAAIDQINGKLNRLIGKTNEKFHQIEKEFSEVEGRIQDLEKYVEDTKIDLWSYNAELLVALENQHTIDLTDSEMNKLFEKTKKQLRENAEDMGNGCFKIYHKCDNACIGSIRNGTYDHDVYRDEALNNRFQIKGVELKSGYKDWILWISFAISCFLLCVALLGFIMWACQKGNIRCNICI

SEQ ID NO: 11771 - protein, 566 aa, synthetic construct; identical to SEQ ID NO: 9883
  REGION 1..566: note = hemagglutinin__InfluenzaA__AHM00372

SEQ ID NO: 11772 - protein, 566 aa, synthetic construct; identical to SEQ ID NO: 9883
  REGION 1..566: note = hemagglutinin__InfluenzaA__AHM00395

SEQ ID NO: 11773 - protein, 566 aa, synthetic construct; identical to SEQ ID NO: 9858
  REGION 1..566: note = hemagglutinin__InfluenzaA__AHM00407

SEQ ID NO: 11774 - protein, 566 aa, synthetic construct; identical to SEQ ID NO: 9858
  REGION 1..566: note = hemagglutinin__InfluenzaA__AHM00419

SEQ ID NO: 11775 - protein, 566 aa, synthetic construct; identical to SEQ ID NO: 9858
  REGION 1..566: note = hemagglutinin__InfluenzaA__AHM00443

SEQ ID NO: 11776 - protein, 566 aa, synthetic construct; identical to SEQ ID NO: 9883
  REGION 1..566: note = hemagglutinin__InfluenzaA__AHM00455

SEQ ID NO: 11777 - protein, 566 aa, synthetic construct; identical to SEQ ID NO: 9883
  REGION 1..566: note = hemagglutinin__InfluenzaA__AHM00467

SEQ ID NO: 11778 - protein, 566 aa, synthetic construct; identical to SEQ ID NO: 9883
  REGION 1..566: note = hemagglutinin__InfluenzaA__AHM00479

SEQ ID NO: 11779 - protein, 566 aa, synthetic construct; identical to SEQ ID NO: 9883
  REGION 1..566: note = hemagglutinin__InfluenzaA__AHM00491

SEQ ID NO: 11780 - protein, 566 aa, synthetic construct; identical to SEQ ID NO: 9858
  REGION 1..566: note = hemagglutinin__InfluenzaA__AHM00503

SEQ ID NO: 11781 - protein, 566 aa, synthetic construct; identical to SEQ ID NO: 9858
  REGION 1..566: note = hemagglutinin__InfluenzaA__AHM00515

SEQ ID NO: 11782 - protein, 566 aa, synthetic construct
  REGION 1..566: note = hemagglutinin__InfluenzaA__AHM00527
MKTIIALSYILCLVFAQKLPGNDNSTATLCLGHHAVPNGTIVKTITNDRIEVTNATELVQNSPIGEICDSPHQILDGENCTLIDALLGDPQCDGFQNKKWDLFVERSKAYSNCYPYDVPDYASLRSLVASSGTLEFNNESFNWTGVTQNGTSSACIRRSNSSFFSRLNWLTHLNFKYPALNVTMPNNEQFDKLYIWGVHHPGTDKDQIFLYAQSSGRITVSTKRSQQAVIPNIGSRPRIRNIPSRISIYWTIVKPGDILLINSTGNLIAPRGYFKIRSGKSSIMRSDAPIGKCKSECITPNGSIPNDKPFQNVNRITYGACPRYVKQSTLKLATGMRNVPEKQTRGIFGAIAGFIENGWEGMVDGWYGFRHQNSEGRGQAADLKSTQAAIDQINGKLNRLIGKTNEKFHQIEKEFSEVEGRIQDLEKYVEDTKIDLWSYNAELLVALENQHTIDLTDSEMNKLFEKTKKQLRENAEDMGNGCFKIYHKCDNACIGSIRNGTYDHNVYRDEALNNRFQIKGVELKSGYKDWILWISFAISCFLLCVALLGFIMWACQKGNIRCNICI

SEQ ID NO: 11783 - protein, 566 aa, synthetic construct; identical to SEQ ID NO: 9835
  REGION 1..566: note = hemagglutinin__InfluenzaA__AHM00539

SEQ ID NO: 11784 - protein, 566 aa, synthetic construct
  REGION 1..566: note = hemagglutinin__InfluenzaA__AHM00543
MKTIIALSYILCLVFAQELPGNDDSTATLCLGHHAVPNGTIVKTITNDQIEVTNATELVQSSSTGEICNSPHQILDGENCTLIDALLGDPQCDGFQNKKWDLFVERSKAHSNCYPYDVPDYASLRSLVASSGTMEFNNESFNWTGVTQNGTSSACIRRSNNSFFSRLNWLTHLNFKYPALNVTMPNNEQFDKLYIWGVHHPGTDKDQIFLYAQASGRITVSTKRSQQAVIPNIGSRPRVRNIPSRVSIYWTIVKPGDILLINSTGNLIAPRGYFKIRSGKSSIMRSDAPIGKCNSACITPNGSIPNDKPFQNVNRITYGACPRYVKQNTLKLATGMRNVPEKQTRGIFGAIAGFIENGWEGMVDGWYGFRHQNSEGRGQAADLKSTQAAIDQINGKLNRLIGKTNEKFHQIEKEFSEVEGRIQDLEKYVEDTKIDLWSYNAELLVALENQHTIDLTDSEMNKLFEKTKKQLRENAEDMGNGCFKIYHKCDNACIGSIRNGTYDHDVYRDEALNNRFQIKGVELKSGYKDWILWISFAISCFLLCVALLGFIMWACQKGNIRCNICI

SEQ ID NO: 11785 - protein, 566 aa, synthetic construct; identical to SEQ ID NO: 9858
  REGION 1..566: note = hemagglutinin__InfluenzaA__AHM00555

SEQ ID NO: 11786 - protein, 566 aa, synthetic construct
  REGION 1..566: note = hemagglutinin__InfluenzaA__AHM00567
MKTIIALSYILCLVFAQKLPGNDNSTATLCLGHHAVPNGTIVKTITNDRIEVTNATELVQNSSIGEICDSPHQILDGENCTLIDALLGDPQCDGFQNKKWDLFVERSKAYSNCYPYDVPDYASLRSLVASSGTLEFNNESFNWTGVTQNGTSSACIRKSNSSFFSRLNWLTHLNFKYPALNVTMPNNEQFDKLYIWGVHHPGTDKDQIFLYAQSSGRITVSTKRSQQAVIPNIGSRPRIRNIPSRISIYWTIVKPGDILLINSTGNLIAPRGYFKIRSGKSSIMRSDAPIGKCKSECITPNGSIPNDKPFQNVNRITYGACPRYVKQSTLKLATGMRNVPEKQTRGIFGAIAGFIENGWEGMVDGWYGFRHQNSEGRGQAADLKSTQAAIDQINGKLNRLIGKTNEKFHQIEKEFSEVEGRIQDLEKYVEDTKIDLWSYNAELLVALENQHTIDLTDSEMNKLFEKTKKQLRENAEDMGNGCFKIYHKCDNACIGSIRNGTYDHDVYRDEALNNRFQIKGVELKSGYKDWILWISFAISCFLLCVALLGFIMWACQKGNIRCNICI

SEQ ID NO: 11787 - protein, 566 aa, synthetic construct; identical to SEQ ID NO: 9858
  REGION 1..566: note = hemagglutinin__InfluenzaA__AHM00579

SEQ ID NO: 11788 - protein, 566 aa, synthetic construct; identical to SEQ ID NO: 9883
  REGION 1..566: note = hemagglutinin__InfluenzaA__AHM00591

SEQ ID NO: 11789 - protein, 566 aa, synthetic construct; identical to SEQ ID NO: 9858
  REGION 1..566: note = hemagglutinin__InfluenzaA__AHM00603

SEQ ID NO: 11790 - protein, 566 aa, synthetic construct; identical to SEQ ID NO: 9858
  REGION 1..566: note = hemagglutinin__InfluenzaA__AHM00615

SEQ ID NO: 11791 - protein, 566 aa, synthetic construct
  REGION 1..566: note = hemagglutinin__InfluenzaA__AHM00627
MKTTIALSYILCLVFAQKLPGNDNSTATLCLGHHAVPNGTIVKTITNDRIEVTNATELVQNSSIGEICDSPHQILDGENCTLIDALLGDPQCDGFQNKKWDLFVERSKAYSNCYPYDVPDYASLRSLVASSGTLEFNNESFNWTGVTQNGTSSACIRRSNSSFFSRLNWLTHLNFKYPALNVTMPNNEQFDKLYIWGVHHPGTDKDQIFLYAQSSGRITVSTKRSQQAVIPNIGSRPRIRNIPSRISIYWTIVKPGDILLINSTGNLIAPRGYFKIRSGKSSIMRSDAPIGKCKSECITPNGSIPNDKPFQNVNRITYGACPRYVKQSTLKLATGMRNVPEKQTRGIFGAIAGFIENGWEGMVDGWYGFRHQNSEGRGQAADLKSTQAAIDQINGKLNRLIGKTNEKFHQIEKEFSEVEGRIQDLEKYVEDTKIDLWSYNAELLVALENQHTIDLTDSEMNKLFEKTKKQLRENAEDMGNGCFKIYHKCDNACIGSIRNGTYDHNVYRDEALNNRFQIKGVELKSGYKDWILWISFAISCFLLCVALLGFIMWACQKGNIRCNICI

SEQ ID NO: 11792 - protein, 566 aa, synthetic construct; identical to SEQ ID NO: 9858
  REGION 1..566: note = hemagglutinin__InfluenzaA__AHM00639

SEQ ID NO: 11793 - protein, 566 aa, synthetic construct; identical to SEQ ID NO: 9835
  REGION 1..566: note = hemagglutinin__InfluenzaA__AHM00651

SEQ ID NO: 11794 - protein, 566 aa, synthetic construct; identical to SEQ ID NO: 9994
  REGION 1..566: note = hemagglutinin__InfluenzaA__AHM00663

SEQ ID NO: 11795 - protein, 566 aa, synthetic construct; identical to SEQ ID NO: 9883
  REGION 1..566: note = hemagglutinin__InfluenzaA__AHM00675

SEQ ID NO: 11796 - protein, 566 aa, synthetic construct; identical to SEQ ID NO: 10945
  REGION 1..566: note = hemagglutinin__InfluenzaA__AHM00687

SEQ ID NO: 11797 - protein, 566 aa, synthetic construct
  REGION 1..566: note = hemagglutinin__InfluenzaA__AHM00698
MKTIIALSYILCLVFAQELPGNDDSTATLCLGHHAVPNGTIVKTITNDQIEVTNATELVQSSSTGEICNSPHQILDGENCTLIDALLGDPQCDGFQNKKWDLFVERSKAHSNCYPYDVPDYASLRSLVASSGTLEFNNESFNWTGVTQNGTSSACTRRSNNSFFSRLNWLTHLNFKYPALNVTMPNNEQFDKLYIWGVHHPGTDKDQIFLYAQASGRITVSTKRSQQAVIPNIGSRPRVRNIPSRVSIYWTIVKPGDILLINSTGNLIAPRGYFKIRSGKSSIMRSDAPIGKCNSACITPNGSIPNDKPFQNVNRITYGACPRYVKQNTLKLATGMRNVPEKQTRGIFGAIAGFIENGWEGMVDGWYGFRHQNSEGRGQAADLKSTQAAIDQINGKLNRLIGKTNEKFHQIEKEFSEVEGRIQDLEKYVEDTKIDLWSYNAELLVALENQHTIDLTDSEMNKLFEKTKKQLRENAEDMGNGCFKIYHKCDNACIGSIRNGTYDHDVYRDEALNNRFQIKGVELKSGYKDWILWISFAISCFLLCVALLGFIMWACQKGNIRCNICI

SEQ ID NO: 11798 - protein, 566 aa, synthetic construct; identical to SEQ ID NO: 9858
  REGION 1..566: note = hemagglutinin__InfluenzaA__AHM00710

SEQ ID NO: 11799 - protein, 566 aa, synthetic construct; identical to SEQ ID NO: 9858
  REGION 1..566: note = hemagglutinin__InfluenzaA__AHM00722

SEQ ID NO: 11800 - protein, 566 aa, synthetic construct; identical to SEQ ID NO: 9858
  REGION 1..566: note = hemagglutinin__InfluenzaA__AHM00734

SEQ ID NO: 11801 - protein, 566 aa, synthetic construct; identical to SEQ ID NO: 9993
  REGION 1..566: note = hemagglutinin__InfluenzaA__AHM00746

SEQ ID NO: 11802 - protein, 566 aa, synthetic construct; identical to SEQ ID NO: 9858
  REGION 1..566: note = hemagglutinin__InfluenzaA__AHM00758

SEQ ID NO: 11803 - protein, 566 aa, synthetic construct; identical to SEQ ID NO: 10026
  REGION 1..566: note = hemagglutinin__InfluenzaA__AHM00770

SEQ ID NO: 11804 - protein, 566 aa, synthetic construct; identical to SEQ ID NO: 9835
  REGION 1..566: note = hemagglutinin__InfluenzaA__AHM00782

SEQ ID NO: 11805 - protein, 566 aa, synthetic construct
  REGION 1..566: note = hemagglutinin__InfluenzaA__AHM00794
MKTIIALSYILCLVFTQKLPGNDNSTATLCLGHHAVPNGTIVKTITNDRIEVTNATELVQNSSIGEICDSPHQILDGENCTLIDALLGDPQCDGFQNKKWDLFVERSKAYSNCYPYDVPDYASLRSLVASSGTLEFNNESFNWTGVTQNGTSSACIRRSNSSFFSRLNWLTHLNFKYPALNVTMPNNEQFDKLYIWGVHHPGTDKDQIFLYAQSSGRITVSTKRSQQAVIPNIGSRPRIRNIPSRISIYWTIVKPGDILLINSTGNLIAPRGYFKIRSGKSSIMRSDAPIGKCKSECITPNGSIPNDKPFQNVNRITYGACPRYVKQSTLKLATGMRNVPEKQTRGIFGAIAGFIENGWEGMVDGWYGFRHQNSEGRGQAADLKSTQAAIDQINGKLNRLIGKTNEKFHQIEKEFSEVEGRIQDLEKYVEDTKIDLWSYNAELLVALENQHTIDLTDSEMNKLFEKTKKQLRENAEDMGNGCFKIYHKCDNACIGSIRNGTYDHDVYRDEALNNRFQIKGVELKSGYKDWILWISFAISCFLLCVALLGFIMWACQKGNIRCNICI

SEQ ID NO: 11806 - protein, 566 aa, synthetic construct; identical to SEQ ID NO: 10026
  REGION 1..566: note = hemagglutinin__InfluenzaA__AHM00806

SEQ ID NO: 11807 - protein, 566 aa, synthetic construct
  REGION 1..566: note = hemagglutinin__InfluenzaA__AHM00818
MKTIIALSYILCLVFAQKLPGNDNSTATLCLGHHAVPNGTIVKTITNDRIEVTNATELVQNSSIGEICDSPHQILDGENCTLIDALLGDPQCDGFQNKKWDLFVERSKAYSNCYPYDVPDYASLRSLVASSGTLEFNNENFNWTGVTQNGTSSACIRRSNSSFFSRLNWLTHLNFKYPALNVTMPNNEQFDKLYIWGVHHPGTDKDQIFLYAQSSGRITVSTKRSQQAVIPNIGSRPRIRNIPSRISIYWTIVKPGDILLINSTGNLIAPRGYFKIRSGKSSIMRSDAPIGKCKSECITPNGSIPNDKPFQNVNRITYGACPRYVKQSTLKLATGMRNVPEKQTRGIFGAIAGFIENGWEGMVDGWYGFRHQNSEGRGQAADLKSTQAAIDQINGKLNRLIGKTNEKFHQIEKEFSEVEGRIQDLEKYVEDTKIDLWSYNAELLVALENQHTIDLTDSEMNKLFEKTKKQLRENAEDMGNGCFKIYHKCDNACIGSIRNGTYDHDVYRDEALNNRFQIKGVELKSGYKDWILWISFAISCFLLCVALLGFIMWACQKGNIRCNICI

SEQ ID NO: 11808 - protein, 566 aa, synthetic construct; identical to SEQ ID NO: 9883
  REGION 1..566: note = hemagglutinin__InfluenzaA__AHM00830

SEQ ID NO: 11809 - protein, 566 aa, synthetic construct; identical to SEQ ID NO: 9883
  REGION 1..566: note = hemagglutinin__InfluenzaA__AHM00842

SEQ ID NO: 11810 - protein, 566 aa, synthetic construct; identical to SEQ ID NO: 11786
  REGION 1..566: note = hemagglutinin__InfluenzaA__AHM00854

SEQ ID NO: 11811 - protein, 566 aa, synthetic construct; identical to SEQ ID NO: 11786
  REGION 1..566: note = hemagglutinin__InfluenzaA__AHM00866

SEQ ID NO: 11812 - protein, 566 aa, synthetic construct; identical to SEQ ID NO: 9858
  REGION 1..566: note = hemagglutinin__InfluenzaA__AHM00878

SEQ ID NO: 11813 - protein, 566 aa, synthetic construct; identical to SEQ ID NO: 9835
  REGION 1..566: note = hemagglutinin__InfluenzaA__AHM00890

SEQ ID NO: 11814 - protein, 566 aa, synthetic construct; identical to SEQ ID NO: 9868
  REGION 1..566: note = hemagglutinin__InfluenzaA__AHM00902

SEQ ID NO: 11815 - protein, 566 aa, synthetic construct; identical to SEQ ID NO: 9858
  REGION 1..566: note = hemagglutinin__InfluenzaA__AHM00914

SEQ ID NO: 11816 - protein, 566 aa, synthetic construct; identical to SEQ ID NO: 9858
  REGION 1..566: note = hemagglutinin__InfluenzaA__AHM00926

SEQ ID NO: 11817 - protein, 566 aa, synthetic construct; identical to SEQ ID NO: 9835
  REGION 1..566: note = hemagglutinin__InfluenzaA__AHM00938

SEQ ID NO: 11818 - protein, 566 aa, synthetic construct
  REGION 1..566: note = hemagglutinin__InfluenzaA__AHM00950
MKTIIALSYILCLVFAQKLPGNDNSTATLCLGHHAVPNGTIVKTITNDRIEVTNATELVQNSSIGEICDSPHQILDGENCTLIDALLGDPQCDGFQNKKWDLFVERSKAYSNCYPYDVPDYVSLRSLVASSGTLEFNNESFNWTGVTQNGTSSACIRRSNSSFFSRLNWLTHLNFKYPALNVTMPNNEQFDKLYIWGVHHPGTDKDQIFLYAQSSGRITVSTKRSQQAVIPNIGSRPRIRNIPSRISIYWTIVKPGDILLINSTGNLIAPRGYFKIRSGKSSIMRSDAPIGKCKSECITPNGSIPNDKPFQNVNRITYGACPRYVKQSTLKLATGMRNVPEKQTRGIFGAIAGFIENGWEGMVDGWYGFRHQNSEGRGQAADLKSTQAAIDQINGKLNRLIGKTNEKFHQIEKEFSEVEGRIQDLEKYVEDTKIDLWSYNAELLVALENQHTIDLTDSEMNKLFEKTKKQLRENAEDMGNGCFKIYHKCDNACIGSIRNGTYDHNVYRDEALNNRFQIKGVELKSGYKDWILWISFAMSCFLLCVALLGFIMWACQKGNIRCNICI

SEQ ID NO: 11819 - protein, 566 aa, synthetic construct; identical to SEQ ID NO: 9835
  REGION 1..566: note = hemagglutinin__InfluenzaA__AHM00962

SEQ ID NO: 11820 - protein, 566 aa, synthetic construct
  REGION 1..566: note = hemagglutinin__InfluenzaA__AHM00974
MKTIIALSYILCLVFAQELPGNDDSTATLCLGHHAVPNGTIVKTITNDQIEVTNATELVQSSSTGEICNSPHQILDGENCTLIDALLGDPQCDGFQNKKWDLFVERSKAHSNCYPYDVPDYASLRSLVASSGTLEFNNESFNWTGVTQNGTSSACIRRSNNSFFSRLNWLTHLNFKYPALNVTMPNNEQFDKLYIWGVHHPGTDKDQIFLYAQASGGITVSTKRSQQAVIPNIGSRPRVRNIPSRVSIYWTIVKPGDILLINSTGNLIAPRGYFKIRSGKSSIMRSDAPIGKCNSACITPNGSIPNDKPFQNVNRITYGACPRYVKQNTLKLATGMRNVPEKQTRGIFGAIAGFIENGWEGMVDGWYGFRHQNSEGRGQAADLKSTQAAIDQINGKLNRLIGKTNEKFHQIEKEFSEVEGRIQDLEKYVEDTKIDLWSYNAELLVALENQHTIDLTDSEMNKLFEKTKKQLRENAEDMGNGCFKIYHKCDNACIGSIRNGTYDHDVYRDEALNNRFQIKGVELKSGYKDWILWISFAISCFLLCVALLGFIMWACQKGNIRCNICI

SEQ ID NO: 11821 - protein, 560 aa, synthetic construct
  REGION 1..560: note = hemagglutinin__InfluenzaA__AHM24224
MNTQILVFALIAIIPTNADKICLGHHAVSNGTKVNTLTERGVEVVNATETVERTNIPRICSKGKRTVDLGQCGLLGTITGPPQCDQFLEFSADLIIERREGSDVCYPGKFVKEEALRQILRESGGIDKEAMGFTYSGIRTNGATSACRRSGSSFYAEMKWLLSNTDNAAFPQMTKSYKNTRKSPALIVWGIHHSVSTAEQTKLYGSGNKLVTVGSSNYQQSFVPSPGARPQVNGLSGRIDFHWLMLNPNDTVTFSFNGAFIAPDRASFLRGKSMGIQSGVQVDANCEGDCYHSGGTIISNLPFQNIDSRAVGKCPRYVKQRSLLLATGMKNVPEIPKGRGLFGAIAGFIENGWEGLIDGWYGFRHQNAQGEGTAADYKSTQSAIDQITGKLNRLIEKTNQQFELIDNEFNEVEKQIGNVINWTRDSITEVWSYNAELLVAMENQHTIDLADSEMDKLYERVKRQLRENAEEDGTGCFEIFHKCDDDCMASIRNNTYDHSKYREEAMQNRIQIDPVKLSSGYKDVILWFSFGASCFILLAIVMGLVFICVKNGNMRCTICI

SEQ ID NO: 11822 - protein, 560 aa, synthetic construct; identical to SEQ ID NO: 9988
  REGION 1..560: note = hemagglutinin__InfluenzaA__AHM24236

SEQ ID NO: 11823 - protein, 560 aa, synthetic construct; identical to SEQ ID NO: 9988
  REGION 1..560: note = hemagglutinin__InfluenzaA__AHM24248

SEQ ID NO: 11824 - protein, 566 aa, synthetic construct
  REGION 1..566: note = hemagglutinin__InfluenzaA__AHM98309
MKAILVVLLYTFATANADTLCIGYHANNSTDTVDTVLEKNVTVTHSVNLLEDKHNGKLCKLRGVAPLHLGKCNIAGWILGNPECESLSTASSWSYIVETSSSDNGTCYPGDFINYEELREQLSSVSSFERFEVFPKTSSWPNHDSNKGVTAACPHAGAKSFYKNLIWLVKKGNSYPKLSKSYINDKGKEVLVLWGIHHPSTTADQQSLYQNADAYVFVGTSRYSKKFKPEIAIRPKVRDQEGRMNYYWTLVEPGDKITFEATGNLVVPRYAFAMERNAGSGIIISDTPVHDCNTTCQTPKGAINTSLPFQNIHPITIGKCPKYVKSTKLRLATGLRNVPSIQSRGLFGAIAGFIEGGWTGMVDGWYGYHHQNEQGSGYAADLKSTQNAIDKITNKVNSVIEKMNTQFTAVGKEFNHLEKRIENLNKKVDDGFLDIWTYNAELLVLLENERTLDYHDSNVKNLYEKVRNQLKNNAKEIGNGCFEFYHKCDNTCMESVKNGTYDYPKYSEEAKLNREEIDGVKLESTRIYQILAIYSTVASSLVLVVSLGAISFWMCSNGSLQCRICI

SEQ ID NO: 11825 - protein, 569 aa, synthetic construct
  REGION 1..569: note = hemagglutinin__InfluenzaA__AHM98339
MKAILVVLLYTFATANADTLCIGYHANNSTDTVDTVLEKNVTVTHSVNLLEDKHNGKLCKLRGVAPLHLGKCNIAGWILGNPECESLSTASSWSYIVETSSSDNGTCYPGDFIDYEELREQLSSVSSFERFEIFPKTSSWPNHDSNKGVTAACPHAGAKSFYKNLIWLVKKGNSYPKLSKSYINDKGKEVLVLWGIHHPSTTADQQSLYQNADAYVFVGTSRYSKKFKPEIAIRPKVRDQEGRMNYYWTLVEPGDKITFEATGNLVVPRYAFAMERNAGSGIIISDTPVHDCNTTCQTPKGAINTSLTSLPFQNIHPITIGKCPKYVKSTKLRLATGLRNVPSIQSRGLFGAIAGFIEGGWTGMVDGWYGYHHQNEQGSGYAADLKSTQNAIDKITNKVNSVIEKMNTQFTAVGKEFNHLEKRIENLNKKVDDGFLDIWTYNAELLVLLENERTLDYHDSNVKNLYEKVRNQLKNNAKEIGNGCFEFYHKCDNTCMESVKNGTYDYPKYSEEAKLNREEIDGVKLESTRIYQILAIYSTVASSLVLVVSLGAISFWMCSNGSLQCRICI

SEQ ID NO: 11826 - protein, 566 aa, synthetic construct
  REGION 1..566: note = hemagglutinin__InfluenzaA__AHM98350
MKAILVVMLYTFATANADTLCIGYHANNSTDTVDTVLEKNVTVTHSVNLLEDKHNGKLCKLRGVAPLHLGKCNIAGWILGNPECESLSTASSWSYIVETSSSDNGTCYPGDFIDYEELREQLSSVSSFERFEIFPKTSSWPNHDANKGVTAACPHAGAKGFYKNLIWLVKKGNSYPKLSKSYINDKGKEVLVLWGIHHPSTTADQQSLYQNADTYVFVGTSRYSKKFKPEIAIRPKVRDQEGRMNYYWTLVEPGDKITFEATGNLVVPRYAFAMERNAGSGIIISDTPVHDCNTTCQTPKGAINTSLPFQNIHPITIGKCPKYVKSTKLRLATGLRNVPSIQSRGLFGAIAGFIEGGWTGMVDGWYGYHHQNEQGSGYAADLKSTQNAIDKITNKVNSVIEKMNTQFTAVGKEFNHLEKRIENLNKKVDDGFLDIWTYNAELLVLLENERTLDYHDSNVKNLYEKVRNQLKNNAKEIGNGCFEFYHKCDNTCMESVKNGTYDYPKYSEEAKLNREEIDGVKLESTRIYQILAIYSTVASSLVLVVSLGAISFWMCSNGSLQCRICI

SEQ ID NO: 11827 - protein, 566 aa, synthetic construct; identical to SEQ ID NO: 6454
  REGION 1..566: note = hemagglutinin__InfluenzaA__AHM98361

SEQ ID NO: 11828 - protein, 566 aa, synthetic construct; identical to SEQ ID NO: 6867
  REGION 1..566: note = hemagglutinin__InfluenzaA__AHM98372

SEQ ID NO: 11829 - protein, 566 aa, synthetic construct; identical to SEQ ID NO: 6867
  REGION 1..566: note = hemagglutinin__InfluenzaA__AHM98383

SEQ ID NO: 11830 - protein, 566 aa, synthetic construct; identical to SEQ ID NO: 6824
  REGION 1..566: note = hemagglutinin__InfluenzaA__AHM98394

SEQ ID NO: 11831 - protein, 566 aa, synthetic construct
  REGION 1..566: note = hemagglutinin__InfluenzaA__AHM98405
MKAILVVLLYTFATANADTLCIGYHANNSTDTVDTVLEKNVTVTHSVNLLEDKHNGKLCKLRGVAPLHLGKCNIAGWILGNPECESLSTASSWSYIVETSSSDNGTCYPGDFIDYEELREQLSSVSSFKRFEIFPKTSSWPNHDSNKGVTAACPHAGAKGFYKNLIWLVKKGNSYPKLSKSYINDKGKEVLVLWGIHHPSTTADQQSLYQNADTYVFVGTSRYSKKFKPEIAIRPKVRDQEGRMNYYWTLVEPGDKITFEATGNLVVPRYAFAMERNAGSGIIISDTPVHDCNTTCQTPKGAINTSLPFQNIHPITIGKCPKYVKSTKLRLATGLRNVPSIQSRGLFGAIAGFIEGGWTGMVDGWYGYHHQNEQGSGYAADLKSTQNAIDKITNKVNSVIEKMNTQFTAVGKEFNHLEKRIENLNKKVDDGFLDIWTYNAELLVLLENERTLDYHDSNVKNLYEKVRNQLKNNAKEIGNGCFEFYHKCDNTCMESVKNGTYDYPKYSEEAKLNREEIDGVKLESTRIYQILAIYSTVASSLVLVVSLGAISFWMCSNGSLQCRICI

SEQ ID NO: 11832 - protein, 566 aa, synthetic construct; identical to SEQ ID NO: 11831
  REGION 1..566: note = hemagglutinin__InfluenzaA__AHM98416

SEQ ID NO: 11833 - protein, 566 aa, synthetic construct; identical to SEQ ID NO: 6824
  REGION 1..566: note = hemagglutinin__InfluenzaA__AHM98427

SEQ ID NO: 11834 - protein, 566 aa, synthetic construct; identical to SEQ ID NO: 7042
  REGION 1..566: note = hemagglutinin__InfluenzaA__AHM98438

SEQ ID NO: 11835 - protein, 566 aa, synthetic construct; identical to SEQ ID NO: 8186
  REGION 1..566: note = hemagglutinin__InfluenzaA__AHM98449

SEQ ID NO: 11836 - protein, 566 aa, synthetic construct
  REGION 1..566: note = hemagglutinin__InfluenzaA__AHM98460
MKAILVVLLCTFATANADTLCIGYHANNSTDTVDTVLEKNVTVTHSVNLLEDKHNGKLCKLRGVAPLHLGKCNIAGWILGNPECESLSTASSWSYIVETSSSDNGTCYPGDFIDYEELREQLSSVSSFERFEIFPKTSSWPNHDSNKGVTAACPHAGAKGFYKNLIWLVKKGNSYPKLSKSYINDKGKEVLVLWGIHHPSTTADQQSLYQNADTYVFVGTSRYSKKFKPEIAIRPKVRDQEGRMNYYWTLVEPGDKITFEATGNLVVPRYAFAMERNAGSGIIISDTTVHDCNTTCQTPKGAINTSLPFQNIHPITIGKCPKYVKSTKLRLATGLRNVPSIQSRGLFGAIAGFIEGGWTGMVDGWYGYHHQNEQGSGYAADLKSTQNAIDKITNKVNSVIEKMNTQFTAVGKEFNHLEKRIENLNKKVDDGFLDIWTYNAELLVLLENERTLDYHDSNVKNLYEKVRNQLKNNAKEIGNGCFEFYHKCDNTCMESVKNGTYDYPKYSEEAKLNREKIDGVKLESTRIYQILAIYSTVASSLVLVVSLGAISFWMCSNGSLQCRICI

SEQ ID NO: 11837 - protein, 566 aa, synthetic construct; identical to SEQ ID NO: 6867
  REGION 1..566: note = hemagglutinin__InfluenzaA__AHM98471

SEQ ID NO: 11838 - protein, 566 aa, synthetic construct
  REGION 1..566: note = hemagglutinin__InfluenzaA__AHM98482
MKAILVVLLYTFATANADTLCIGYHANNSTDTVDTVLEKNVTVTHSVNLLEDKHNGKLCKLRGVAPLHLGKCNIAGWILGNPECESLSTASSWSYIVETSSSDNGTCYPGDFIDYEELREQLSSVSSFERFEIFPKTSSWPNHDSNKGVTAACPHAGAKGFYKNLIWLVKKGNSYPKLSKSYINDKGKEVLVLWGIHHPSTTADQQSLYQNADTYVFVGTSRYSKKFKPEIAIRPKVRDQEGRMNYYWTLVEPGDKITFEATGNLVVPRYAFAMERNAGSGIIISDTPVHDCNTTCQTPKGAINTSLPFQNIHPITIGKCPKYVKSTKLRLATGLRNVPSIQSRGLFGAIAGFIEGGWTGMVDGWYGYHHQNEQGSGYAADLKSTQNAIDKITNKVNSVIDKMNTQFTAVGKEFNHLEKRIENLNKKVDDGFLDIWTYNAELLVLLENERTLDYHDSNVKNLYEKVRNQLKNNAKEIGNGCFEFYHKCDNTCMESVKNGTYDYPKYSEEAKLNREEIDGVKLESTRIYQILAIYSTVASSLVLVVSLGAISFWMCSNGSLQCRICI

SEQ ID NO: 11839 - protein, 566 aa, synthetic construct
  REGION 1..566: note = hemagglutinin__InfluenzaA__AHM98493
MKAILVVLLYTFATANADTLCIGYHANNSTDTVDTVLEKNVTVTHSVNLLEDKHNGKLCKLRGVAPLHLGKCNIAGWILGNPECESLSTASSWSYIVETSSSDNGTCYPGDFINYEELREQLSSVSSFERFEIFPKTSSWPNHDSNKGVTAACPHAGAKSFYKNLIWLVKKGNSYPKLSKSYINDKGKEVLVLWGIHHPSTSADQQSLYQNADAYVFVGTSKYSKKFKPEIAVRPKVRDQEGRMNYYWTLVEPGDKITFEATGNLLVPRYAFAMERNAGSGIIISDTPVHDCNTTCQTPKGAINTSLPFQNIHPITIGKYPKYVKSTKLRLATGLRNVPSIQSRGLFGAIAGFIEGGWTGMVDGWYGYHHQNEQGSGYAADLKSTQNAIDKITNKVNSVIEKMNTQFTAVGKEFNHLEKRIENLNKKVDDGFLDIWTYNAELLVLLENERTLDYHDSNVKNLYEKVRSQLKNNAKEIGNGCFEFYHKCDNTCMESVKNGTYDYPKYSEEAKLNREEIDGVKLESTRIYQILAIYSTVASSLVLVVSLGAISFWMCSNGSLQCRICI

SEQ ID NO: 11840 - protein, 566 aa, synthetic construct
  REGION 1..566: note = hemagglutinin__InfluenzaA__AHM98504
MKAILVVLLYTFATANADTLCIGYHANNSTDTVDTVLEKNVTVTHSVNLLEDKHNGKLCKLRGVAPLHLGKCNIAGWILGNPECESLSTASSWSYIVETSSSDNGTCYPGDFINYEELREQLSSVSSFERFEIFPKTSSWPNHDSNKGVTAACPHAGAKSFYKNLIWLVKKGNSYPKLSKSYINDKGKEVLVLWGIHHPSTTADQQSLYQNADAYVFVGTSRYSKKFKPEIAIRPKVRDQEGRMNYYWTLVEPGDKITFEATGNLVVPRYAFAMERNAGSGIIISDTPVHDCNTTCQTPKGAINTSLPFQNIHPITIGKCPKYVKSTKLRLATGLRNVPSIQSRGLFGAIAGFIEGGWTGMVDGWYGYHHQNEQGSGYAADLKSTQNAIDKITNKVNSVIEKMNTQFTAVGKEFNHLEKRIENLNKKVDDGFLDIWTYNAELLVLLENERTLDYHDSNVKNLYEKVRNQLKNNAKEIGNGCFEFYHKCDNTCMESVKNGTYDYPKYSKEAKLNREEIDGVKLESTRIYQILAIYSTVASSLVLVVSLGAISFWMCSNGSLQCRICI

SEQ ID NO: 11841 - protein, 566 aa, synthetic construct; identical to SEQ ID NO: 6454
  REGION 1..566: note = hemagglutinin__InfluenzaA__AHM98515

SEQ ID NO: 11842 - protein, 566 aa, synthetic construct
  REGION 1..566: note = hemagglutinin__InfluenzaA__AHM98526
MKAILVVLLHTFATANADTLCIGYHANNSTDTVDTVLEKNVTVTHSVNLLEDKHNGKLCKLRGVAPLHLGKCNIAGWILGNPECESLSTASSWSYIVETSSSDNGTCYPGDFIDYEELREQLSSVSSFERFEIFPKTSSWPNHDSNKGVTAACPHAGAKGFYKNLIWLVKKGNSYPKLSKSYINDKGKEVLVLWGIHHPSTTADQQSLYQNADTYVFVGTSRYSKKFKPEIAIRPKVRDQEGRMNYYWTLVEPGDKITFEATGNLVVPRYAFAMERNAGSGIIISDTPVHDCNTTCQTPKGAINTSLPFQNIHPITIGKCPKYVKSTKLRLATGLRNVPSIQSRGLFGAIAGFIEGGWTGMVDGWYGYHHQNEQGSGYAADLRSTQNAIDKITNKVNSVIEKMNTQFTAVGKEFNHLEKRIENLNKKVDDGFLDIWTYNAELLILLENERTLDYHDSNVKNLYEKVRNQLKNNAKEIGNGCFEFYHKCDNTCMESVKNGTYDYPKYSEEAKLNREEIDGVKLESTRIYQILAIYSTVASSLVLVVSLGAISFWMCSNGSLQCRICI

SEQ ID NO: 11843 - protein, 566 aa, synthetic construct; identical to SEQ ID NO: 6454
  REGION 1..566: note = hemagglutinin__InfluenzaA__AHM98537

SEQ ID NO: 11844 - protein, 566 aa, synthetic construct
  REGION 1..566: note = hemagglutinin__InfluenzaA__AHM98548
MKAILVVLLYTFATANADTLCIGYHANNSTDTVDTVLEKNVTVTHSVNLLEDKHNGKLCKLRGVAPLHLGKCNIAGWILGNPECESLSTASSWSYIVETSSSDNGTCYPGDFINYEELREQLSSVSSFERFEIFPKTSSWPNHDSNKGVTAACPHAGAKSFYKNLIWLVKKGNSYPKLSKSYINDKGKEVLVLWGIHHPSTTADQQSLYQNADAYVFVGTSRYSKKFKPEIAIRPKVRDQEGRMNYYWTLVEPGDKITFEATGNLVVPRYAFAMERNAGSGIIISDTPVHDCNTTCQTPKGAINTSLPFQNIHPVTIGKCPKYVKSTKLRLATGLRNVPSIQSRGLFGAIAGFIEGGWTGMVDGWYGYHHQNEQGSGYAADLKSTQNAIDKITNKVNSVIEKMNTQFTAVGKEFNHLEKRIENLNKKVDDGFLDIWTYNAELLVLLENERTLDYHDSNVKNLYEKVRNQLKNNAKEIGNGCFEFYHKCDNTCMESVKNGTYDYPKYSEEAKLNREEIDGVKLESTRIYQILAIYSTVASSLVLVVSLGAISFWMCSNGSLQCRICI

SEQ ID NO: 11845 - protein, 566 aa, synthetic construct
  REGION 1..566: note = hemagglutinin__InfluenzaA__AHM98559
MKAILVVLLYTFATAKADTLCIGYHANNSTDTVDTVLEKNVTVTHSVNLLEDKHNGKLCKLRGVAPLHLGKCNIAGWILGNPECESLSTASSWSYIVETSSSDNGTCYPGDFINYEELREQLSSVSSFERFEIFPKTSSWPNHDSNKGVTAACPHAGAKSFYKNLIWLVKKGNSYPKLSKSYINDKGKEVLVLWGIHHPSTTADQQSLYQNADAYVFVGTSRYSKKFKPEIAIRPKVRDQEGRMNYYWTLVEPGDKITFEATGNLVVPRYAFAMERNAGSGIIISDTPVHDCNTTCQTPKGAINTSLPFQNIHPITIGKCPKYVKSTKLRLATGLRNVPSIQSRGLFGAIAGFIEGGWTGMVDGWYGYHHQNEQGSGYAADLKSTQNAIDKITNKVNSVIEKMNTQFTAVGKEFNHLEKRIENLNKKVDDGFLDIWTYNAELLVLLENERTLDYHDSNVKNLYEKVRNQLKNNAKEIGNGCFEFYHKCDNTCMESVKNGTYDYPKYSEEAKLNREEIDGVKLESTRIYQILAIYSTVASSLVLVVSLGAISFWMCSNGSLQCRICI

SEQ ID NO: 11846 - protein, 566 aa, synthetic construct; identical to SEQ ID NO: 6824
  REGION 1..566: note = hemagglutinin__InfluenzaA__AHM98570

SEQ ID NO: 11847 - protein, 566 aa, synthetic construct
  REGION 1..566: note = hemagglutinin__InfluenzaA__AHM98581
MKAILVVLLYTFATANADTLCIGYHANNSTDTVDTVLEKNVTVTHSVNLLEDKHNGKLCKLRGVAPLHLGKCNIAGWILGNPECESLSTARSWSYIVETSSSDNGTCYPGDFIDYEELREQLSSVSSFKRFEIFPKTSSWPNHDSNKGVTAACPHAGAKGFYKNLIWLVKKGNSYPKLSKSYINDKGKEVLVLWGIHHPSTTADQQSLYQNADTYVFVGTSRYSKKFKPEIAIRPKVRDQEGRMNYYWTLVEPGDKITFEATGNLVVPRYAFAMERNAGSGIIISDTPVHDCNTTCQTPKGAINTSLPFQNIHPITIGKCPKYVKSTKLRLATGLRNVPSIQSRGLFGAIAGFIEGGWTGMVDGWYGYHHQNEQGSGYAADLKSTQNAIDKITNKVNSVIEKMNTQFTAVGKEFNHLEKRIENLNKKVDDGFLDIWTYNAELLVLLENERTLDYHDSNVKNLYEKVRNQLKNNAKEIGNGCFEFYHKCDNTCMESVKNGTYDYPKYSEEAKLNREEIDGVKLESTRIYQILAIYSTVASSLVLVVSLGAISFWMCSNGSLQCRICI

SEQ ID NO: 11848 - protein, 566 aa, synthetic construct; identical to SEQ ID NO: 6824
  REGION 1..566: note = hemagglutinin__InfluenzaA__AHM98592

SEQ ID NO: 11849 - protein, 566 aa, synthetic construct; identical to SEQ ID NO: 6867
  REGION 1..566: note = hemagglutinin__InfluenzaA__AHM98603

SEQ ID NO: 11850 - protein, 566 aa, synthetic construct; identical to SEQ ID NO: 6454
  REGION 1..566: note = hemagglutinin__InfluenzaA__AHM98614

SEQ ID NO: 11851 - protein, 566 aa, synthetic construct; identical to SEQ ID NO: 11831
  REGION 1..566: note = hemagglutinin__InfluenzaA__AHM98625

SEQ ID NO: 11852 - protein, 566 aa, synthetic construct; identical to SEQ ID NO: 11831
  REGION 1..566: note = hemagglutinin__InfluenzaA__AHM98636

SEQ ID NO: 11853 - protein, 566 aa, synthetic construct
  REGION 1..566: note = hemagglutinin__InfluenzaA__AHM98647
MKAILVVLLYTFATAKADTLCIGYHANNSTDTVDTVLEKNVTVTHSVNLLEDKHNGKLCKLRGVAPLHLGKCNIAGWILGNPECESLSTASSWSYIVETSSSDNGTCYPGDFINYEELREQLSSVSSFERFEIFPKTSSWPNHDSNKGVTAACPHAGAKSFYKNLIWLVKKGNSYPKLSQSYINDKGKEVLVLWGIHHPSTTADQQSLYQNADAYVFVGTSRYSKKFKPEIAIRPKVRDQEGRMNYYWTLVEPGDKITFEATGNLVVPRYAFAMERNAGSGIIISDTPVHDCNTTCQTPKGAINTSLPFQNIHPITIGKCPKYVKSTKLRLATGLRNVPSIQSRGLFGAIAGFIEGGWTGMVDGWYGYHHQNEQGSGYAADLKSTQNAIDKITNKVNSVIEKMNTQFTAVGKEFNHLEKRIENLNKKVDDGFLDIWTYNAELLVLLENERTLDYHDSNVKNLYEKVRNQLKNNAKEIGNGCFEFYHKCDNTCMESVKNGTYDYPKYSEEAKLNREEIDGVKLESTRIYQILAIYSTVASSLVLVVSLGAISFWMCSNGSLQCRICI

SEQ ID NO: 11854 - protein, 566 aa, synthetic construct; identical to SEQ ID NO: 6867
  REGION 1..566: note = hemagglutinin__InfluenzaA__AHM98658

SEQ ID NO: 11855 - protein, 566 aa, synthetic construct; identical to SEQ ID NO: 6824
  REGION 1..566: note = hemagglutinin__InfluenzaA__AHM98669

SEQ ID NO: 11856 - protein, 566 aa, synthetic construct; identical to SEQ ID NO: 8186
  REGION 1..566: note = hemagglutinin__InfluenzaA__AHM98701

SEQ ID NO: 11857 - protein, 566 aa, synthetic construct; identical to SEQ ID NO: 8186
  REGION 1..566: note = hemagglutinin__InfluenzaA__AHM98712

SEQ ID NO: 11858 - protein, 566 aa, synthetic construct
  REGION 1..566: note = hemagglutinin__InfluenzaA__AHM98723
MKAILVVLLYTFATANADTLCIGYHANNSTDTVDTVLEKNVTVTHSVNLLEDKHNGKLCKLRGVAPLHLGNCNIAGWILGNPECESLSTASSWSYIVETSSSDNGTCYPGDFINYEELREQLSSVSSFERFEILPKTSSWPNHDSNKGVTAACPQAGAKSFYKNLIWLVKKGNSYPKLSKSYINDKGKEVLVLWGIHHPSTSADQQSLYQNADAYVFVGTSKYSKKFKPEIAVRPKVRDQEGRMNYYWTLIEPGDKITFEATGNLLVPRYAFAMERNAGSGIIISDTPVHDCNTTCQTPKGAINTSLPFQNIHPITIGKCPKYVKSTKLRLATGLRNVPSIQSRGLFGAIAGFIEGGWTGMVDGWYGYHHQNAQGSGYAADLKSTQNAIDKITNKVNSVIEKMNTQFTAVGKEFNHLEKRIENLNKKVDDGFLDIWTYNAELLVLLENERTLDYHDSNVKNLYEKVRSQLKNNAKEIGNGCFEFYHKCDNTCMESVKNGTYDYPRYSEEAKLNREEIDGVKLESTRIYQILAIYSTVASSLVLIVSLGAISFWMCSNGSLQCRICI

SEQ ID NO: 11859 - protein, 566 aa, synthetic construct
  REGION 1..566: note = hemagglutinin__InfluenzaA__AHM98734
MKAILVVLLYTFATANADTLCIGYHANNSTDTVDTVLEKNVTVTHSVNLLEDKHNGKLCKLRGVAPLHLGKCNIAGWILGNPECETLSTASSWSYIVETSNSDNGTCYPGDFIDYEELREQLSSVSSFERFEIFPKTSSWPNHDSNKGVTAACPHAGSKGFYKNLIWLVKKGNSYPKLSKSYINDKGKEVLVLWGIHHPSTTADQQSLYQNADTYVFVGTSRYSKKFKPEIAIRPKVRDQEGRMNYYWTLVEPGDKITFEATGNLVVPRYAFAMERDAGSGIIISDTPVHDCNTTCQTPKGAINTSLPFQNIHPITIGKCPKYVKSTKLRLATGLRNVPSIQSRGLFGAIAGFIEGGWTGMVDGWYGYHHQNEQGSGYAADLKSTQNAIDKITNKVNSVIEKMNTQFTAVGKEFNHLEKRIENLNKKVDDGFLDIWTYNAELLVLLENERTLDYHDSNVKNLYEKVRNQLKNNAKEIGNGCFEFYHKCDNTCMESVKNGTYDYPKYSEEAKLNREEIDGVKLESTRIYQILAIYSTAASSLVLVVSLGAISFWMCSNGSLQCRICI

SEQ ID NO: 11860 - protein, 566 aa, synthetic construct; identical to SEQ ID NO: 8186
  REGION 1..566: note = hemagglutinin__InfluenzaA__AHM98745

SEQ ID NO: 11861 - protein, 566 aa, synthetic construct
  REGION 1..566: note = hemagglutinin__InfluenzaA__AHM98756
MKAILVVLLYTFATANADTLCIGYHANNSTDTVDTVLEKNVTVTHSVNLLEDKHNGKLCKLRGVAPLHLGKCNIAGWILGNPECETLSTASSWSYIVETSSSDNGTCYPGDFIDYEELREQLSSVSSFERFEIFPKTSSWPNHDSNKGVTAACPHAGAKGFYKNLIWLVKKGNSYPKLSKSYINDKGKEVLVLWGIHHPSTTADQQSLYQNADTYVFVGTSRYSKKFKPEIAIRPKVRDQEGRMNYYWTLVEPGDKITFEATGNLVVPRYAFAMERDAGSGIIISDTPVHDCNTTCQTPKGAINTSLPFQNIHPITIGKCPKYVKSTKLRLATGLRNVPSIQSRGLFGAIAGFIEGGWTGMVDGWYGYHHQNEQGSGYAADLKSTQNAIDKITNKVNSVIVKMNTQFTAVGKEFNHLEKRIENLNKKVDDGFLDIWTYNAELLVLLENERTLDYHDSNVKNLYEKVRNQLKNNAKEIGNGCFEFYHKCDNTCMESVKNGTYDYPKYSEEAKLNREEIDGVKLESTRIYQILAIYSTAASSLVLVVSLGAISFWMCSNGSLQCRICI

SEQ ID NO: 11862 - protein, 566 aa, synthetic construct; identical to SEQ ID NO: 8186
  REGION 1..566: note = hemagglutinin__InfluenzaA__AHM98767

SEQ ID NO: 11863 - protein, 566 aa, synthetic construct
  REGION 1..566: note = hemagglutinin__InfluenzaA__AHM98778
MKAILVVLLYTFATANADTLCIGYHANNSTDTVDTVLEKNVTVTHSVNLLEDKHNRKLCKLRGVAPLHLGKCNIAGWILGNPECESLSTASSWSYIVETSSSDNGTCYPGDFINYEELREQLSSVSSFERFEIFPKTSSWPNHDSNKGVTAACPRAGAKSFYKNLIWLVKKGNSYPKLSKSYINDKGKEVLVLWGIHHPSTTADQQSLYQNADAYVFVGTSRYSKKFKPEIAIRPKVRDQEGRMNYYWTLVEPGDKITFEATGNLLVPRYAFAMERNAGSGIIISDTPVHDCNTTCQTPKGAINTSLPFQNIHPITIGKCPKYVKSTKLRLATGLRNVPSIQSRGLFGAIAGFIEGGWTGMVDGWYGYHHQNEQGSGYAADLKSTQNAIDKITNKVNSVIEKMNTQFTAVGKEFNHLEKRIENLNKKVDDGFLDIWTYNAELLVLLENERTLDYHDSNVKNLYEKVRNQLKNNAKEIGNGCFEFYHKCDNTCMESVKNGTYDYPKYSEEAKLNREEIDGVKLESTRIYQILAIYSTVASSLVLVVSLGAISFWMCSNGSLQCRICI

SEQ ID NO: 11864 - protein, 566 aa, synthetic construct; identical to SEQ ID NO: 7050
  REGION 1..566: note = hemagglutinin__InfluenzaA__AHM98798

SEQ ID NO: 11865 - protein, 566 aa, synthetic construct; identical to SEQ ID NO: 6824
  REGION 1..566: note = hemagglutinin__InfluenzaA__AHM98809

SEQ ID NO: 11866 - protein, 566 aa, synthetic construct; identical to SEQ ID NO: 6824
  REGION 1..566: note = hemagglutinin__InfluenzaA__AHM98820

SEQ ID NO: 11867 - protein, 566 aa, synthetic construct; identical to SEQ ID NO: 6824
  REGION 1..566: note = hemagglutinin__InfluenzaA__AHM98831

SEQ ID NO: 11868 - protein, 566 aa, synthetic construct
  REGION 1..566: note = hemagglutinin__InfluenzaA__AHM98836
MKAILVVMLYTFATANADTLCIGYHANNSTDTVDTVLEKNVTVTHSVNLLEDKHNGKLCKLRGVAPLHLGKCNIAGWILGNPECESLSTASSWSYIVETSSSDNGTCYPGDFIDYEELREQLSSVSSFERFEIFPKTSSWPNHDSNKGVTAACPHAGAKGFYKNLIWLVKKGNSYPKLSKSYINDKGKEVLVLWGIHHPSTTADQQSLYQNADTYVFVGTSRYSKKFKPEIAIRPKVRDQEGRMNYYWILVEPGDKITFEATGNLVVPRYAFAMERNAGSGIIISDTPVHDCNTTCQTPKGAINTSLPFQNIHPITIGKCPKYVKSTKLRLATGLRNVPSIQSRGLFGAIAGFIEGGWTGMVDGWYGYHHQNEQGSGYAADLKSTQNAIDKITNKVNSVIEKMNTQFTAVGKEFNHLEKRIENLNKKVDDGFLDIWTYNAELLVLLENERTLDYHDSNVKNLYEKVRNQLKNNAKEIGNGCFEFYHKCDNTCMESVKNGTYDYPKYSEEAKLNREEIDGVKLESTRIYQILAIYSTVASSLVLVVSLGAISFWMCSNGSLQCRICI

SEQ ID NO: 11869 - protein, 566 aa, synthetic construct
  REGION 1..566: note = hemagglutinin__InfluenzaA__AHM98847
MKAILVVMLYTFATANADTLCIGYHANNSTDTVDTVLEKNVTVTHSVNLLEDKHDGKLCKLRGVAPLHLGKCNIAGWILGNPECESLSTASSWSYIVETSSSDNGTCYPGDFIDYEELREQLSSVSSFERFEIFPKTSSWPNHDSNKGVTAACPHAGAKGFYKNLIWLVKKGNSYPKLSKSYINDKGKEVLVLWGIHHPSTTADQQSLYQNADTYVFVGTSRYSKKFKPEIAIRPKVRDQEGRMNYYWTLVEPGDKITFEATGNLVVPRYAFAMERNAGSGIIISDTPVHDCNTTCQTPKGAINTSLPFQNIHPITIGKCPKYVKSTKLRLATGLRNVPSIQSRGLFGAIAGFIEGGWTGMVDGWYGYHHQNEQGSGYAADLKSTQNAIDKITNKVNSVIEKMNTQFTAVGKEFNHLEKRIENLNKKVDDGFLDIWTYNAELLVLLENERTLDYHDSNVKNLYEKVRNQLKNNAKEIGNGCFEFYHKCDNTCMESVKNGTYDYPKYSEEAKLNREEIDGVKLESTRIYQILAIYSTVASSLVLVVSLGAISFWMCSNGSLQCRICI

SEQ ID NO: 11870 - protein, 566 aa, synthetic construct; identical to SEQ ID NO: 6824
  REGION 1..566: note = hemagglutinin__InfluenzaA__AHM98858

SEQ ID NO: 11871 - protein, 566 aa, synthetic construct; identical to SEQ ID NO: 6867
  REGION 1..566: note = hemagglutinin__InfluenzaA__AHM98877

SEQ ID NO: 11872 - protein, 566 aa, synthetic construct
  REGION 1..566: note = hemagglutinin__InfluenzaA__AHM98898
MKAILVVLLYTFATANADTLCIGYHANNSTDTVDTVLEKNVTVTHSVNLLEDNHNGKLCKLRGVAPLHLGKCNIAGWILGNPECESLSTASSWSYIVETSSSDNGTCYPGDFINYEELREQLSSVSSFERFEIFPKTSSWPNHDSNKGVTAACPHAGAKSFYKNLIWLVKKGNSYPKLSKSYINDKGKEVLVLWGIHHPSTTADQQSLYQNADAYVFVGTSRYSKKFKPEIAIRPKVRDQEGRMNYYWTLVEPGDKITFEATGNLVVPRYAFAMERNAGSGIIISDTPVHDCNTTCQTPKGAINTSLPFQNIHPITIGKCPKYVKSTKLRLATGLRNVPSIQSRGLFGAIAGFIEGGWTGMVDGWYGYHHQNEQGSGYAADLKSTQNAIDKITNKVNSVIEKMNTQFTAVGKEFNHLEKRIENLNKKVDDGFLDIWTYNAELLVLLENERTLDYHDSNVKNLYEKVRNQLKNNAKEIGNGCFEFYHKCDNTCMESVKNGTYDYPKYSEEAKLNREEIDGVKLESTRIYQILAIYSTVASSLVLVVSLGAISFWMCSNGSLQCRICI

SEQ ID NO: 11873 - protein, 566 aa, synthetic construct; identical to SEQ ID NO: 10450
  REGION 1..566: note = hemagglutinin__InfluenzaA__AHM98909

SEQ ID NO: 11874 - protein, 566 aa, synthetic construct
  REGION 1..566: note = hemagglutinin__InfluenzaA__AHM98932
MKAILVVLLYTFATANADTLCIGYHANNSTDTVDTVLEKNVTVTHSVNLLEDKHNGKLCKLGGVAPLHLGKCNIAGWILGNPECESLSTASSWSYIVETSSSDNGTCYPGDFIDYEELREQLSSVSSFERFEIFPKTSSWPNHDSNKGVTAACPHAGAKSFYKNLIWLVKKGDSYPKLSKSYINDKGKEVLVLWGIHHPSTSADQQSLYQNADAYVFVGSSRYSKKFKPEIAIRPKVRDREGRMNYYWTLVEPGDKITFEATGNLVVPRYAFAMERNAGSGIIISDTPVHDCNTTCQTPKGAINTSLPFQNIHPITIGKCPKYVKSTKLRLATGLRNVPSIQSRGLFGAIAGFIEGGWTGMVDGWYGYHHQNEQGSGYAADLKSTQNAIDEITNKVNSVIEKMNTQFTAVGKEFNHLEKRIENLNKKVDDGFLDIWTYNAELLVLLENERTLDYHDSNVKNLYEKVRSQLKNNAKEIGNGCFEFYHKCDNTCMESVKNGTYDYPKYSEEAKLNREEIDGVKLESTRIYQILAIYSTVASSLVLVVSLGAISFWMCSNGSLQCRICI

SEQ ID NO: 11875 - protein, 566 aa, synthetic construct; identical to SEQ ID NO: 11874
  REGION 1..566: note = hemagglutinin__InfluenzaA__AHM98940

SEQ ID NO: 11876 - protein, 566 aa, synthetic construct; identical to SEQ ID NO: 11874
  REGION 1..566: note = hemagglutinin__InfluenzaA__AHM98951

SEQ ID NO: 11877 - protein, 566 aa, synthetic construct
  REGION 1..566: note = hemagglutinin__InfluenzaA__AHM98975
MKAILVVLLYTFATANADTLCIGYHANNSTDTVDTVLEKNVTVTHSVNLLEDKHNGKLCKLRGVAPLHLGKCNIAGWILGNPECESLSTASSWSYIVETSSSDNGTCYPGDFIDYEELREQLSSVSSFERFEIFPKTSSWPNHESNKGVTAACPHAGAKSFYKNLIWLVKKGNSYPKLSKSYINDKGKEVLVLWGIHHPSTSADQQSLYQNADAYVFVGSSRYSKKFKPEIAIRPKVRDQEGRMNYYWTLVEPGDKITFEATGNLVVPRYAFAMERNAGSGIIISDTPVHDCNTTCQTPKGAINTSLPFQNIHPITIGKCPKYVKSTKLRLATGLRNVPSIQSRGLFGAIAGFIEGGWTGMVDGWYGYHHQNEQGSGYAADLKSTQNAIDEITNKVNSVIEKMNTQFTAVGKEFNHLEKRIENLNKKVDDGFLDIWTYNAELLVLLENERTLDYHDSNVKNLYEKVRSQLKNNAKEIGNGCFEFYHKCDNTCMESVKNGTYDYPKYSEEAKLNREEIDGVKLESTRIYQILAIYSTVASSLVLVVSLGAISFWMCSNGSLQCRICI

SEQ ID NO: 11878 - protein, 566 aa, synthetic construct
  REGION 1..566: note = hemagglutinin__InfluenzaA__AHM98997
MKAILVVLLYTFATANADTLCIGYHANNSTDTVDTVLEKNVTVTHSVNLLEDKHNGKLCKLRGVAPLHLGKCNIAGWILGNPECESLSTASSWSYIVETSSSDNGTCYPGDFIDYEELREQLSSVSSFERFEIFPKTSSWPNHDSNKGVTAACPHAGAKSFYKNLIWLVKKGDSYPKLSKSYINDKGKEVLVLWGIHHPSTSADQQSLYQNADAYVFVGSSRYSKKFKPEIAIRPKVRGQEGRMNYYWTLVEPGDKITFEATGNLVVPRYAFAMERNAGSGIIISDTPVHDCNTTCQTPKGAINTSLPFQNIHPITIGKCPKYVKSTKLRLATGLRNVPSIQSRGLFGAIAGFIEGGWTGMVDGWYGYHHQNEQGSGYAADLKSTQNAIDEITNKVNSVIEKMNTQFTAVGKEFNHLEKRIENLNKKVDDGFLDIWTYNAELLVLLENERTLDYHDSNVKNLYEKVRSQLKNNAKEIGNGCFEFYHKCDNTCMESVKNGTYDYPKYSEEAKLNREEIDGVKLESTRIYQILAIYSTVASSLVLVVSLGAISFWMCSNGSLQCRICI

SEQ ID NO: 11879 - protein, 566 aa, synthetic construct
  REGION 1..566: note = hemagglutinin__InfluenzaA__AHM99019
MKAILVVLLYTFATANADTLCIGYHANNSTDTVDTVLEKNVTVTHSVNLLEDKHNGKLCKLKGVAPLHLGKCNIAGWILGNPECESLSTASSWSYIVETSSSDNGTCYPGDFIDYEELREQLSSVSSFERFEIFPKTSSWPNHDSNKGVTAACPHAGAKSFYKNLIWLVKKGDSYPKLSKSYINDKGKEVLVLWGIHHPSTSADQQSLYQNADAYVFVGSSRYSKKFKPEIAIRPKVRGQEGRMNYYWTLVEPGDKITFEATGNLVVPRYAFAMERNAGSGIIISDTPVHDCNTTCQTPKGAINTSLPFQNIHPITIGKCPKYVKSTKLRLATGLRNVPSIQSRGLFGAIAGFIEGGWTGMVDGWYGYHHQNEQGSGYAADLKSTQNAIDEITNKVNSVIEKMNTQFTAVGKEFNHLEKRIENLNKKVDDGFLDIWTYNAELLVLLENERTLDYHDSNVKNLYEKVRSQLKNNAKEIGNGCFEFYHKCDNTCMESVKNGTYDYPKYSEEAKLNREEIDGVKLESTRIYQILAIYSTVASSLVLVVSLGAISFWMCSNGSLQCRICI

SEQ ID NO: 11880 - protein, 566 aa, synthetic construct; identical to SEQ ID NO: 11879
  REGION 1..566: note = hemagglutinin__InfluenzaA__AHM99031

SEQ ID NO: 11881 - protein, 566 aa, synthetic construct; identical to SEQ ID NO: 11879
  REGION 1..566: note = hemagglutinin__InfluenzaA__AHM99043

SEQ ID NO: 11882 - protein, 566 aa, synthetic construct; identical to SEQ ID NO: 11879
  REGION 1..566: note = hemagglutinin__InfluenzaA__AHM99054

SEQ ID NO: 11883 - protein, 566 aa, synthetic construct; identical to SEQ ID NO: 11879
  REGION 1..566: note = hemagglutinin__InfluenzaA__AHM99065

SEQ ID NO: 11884 - protein, 566 aa, synthetic construct
  REGION 1..566: note = hemagglutinin__InfluenzaA__AHM99075
MKAILVVLLYTFATANADTLCIGYHANNSTDTVDTVLEKNVTVTHSVNLLEDKHNGKLCKLRGVAPLHLGKCNIAGWILGNPECESLSTASSWSYIVETSSSDNGTCYPGDFIDYEELREQLSSVSSFERFEIFPKTSSWPNHDSNKGVTAACPHAGAKSFYKNLIWLVKKGDSYPKLSKSYINDKGKEVLVLWGIHHPSTSADQQSLYQNADAYVFVGSSRYSKKFKPEIAIRPKVRDQEGRMNYYWTLVEPGDKITFEATGNLVVPRYAFAMERNAGSGIIISDTPVHDCNTTCQTPKGAINTSLPFQNIHPITIGKCPKYVKSTKLRLATGLRNVPSIQSRGLFGAIAGFIEGGWTGMVDGWYGYHHQNEQGSGYAADLKSTQNAIDEITNKVNSVIEKMNTQFTAVGKEFNHLEKRIENLNKKVDDGFLDIWTYNAELLVLLENERTLDYHDSNVKNLYEKVRSQLKNNAKEIGNGCFEFYHKCDNTCMESVKNGTYDYPKYSEEAKLNREEIDGVKLESTRIYQILAIYSTVASSLVLVVSLGAISFWMCSNGSLQCRICI

SEQ ID NO: 11885 - protein, 566 aa, synthetic construct
  REGION 1..566: note = hemagglutinin__InfluenzaA__AHN00717
MKAILLVLLCTFAATNADTLCIGYHANNSTDTVDTVLEKNVTVTHSVNLLEDRHNGKLCKLGGIAPLHLGKCNIAGWLLGNPECELLFTVSSWSYIVETSNSDNGTCYPGDFINYEELREQLSSVSSFERFEIFPKTSSWPNHETNRGVTAACPYAGANSFYRNLIWLVKKGNSYPKLSKSYVNNKGKEVLVLWGIHHPPTSTDQQSLYQNADAYVFVGSSKYNRKFKPEIAARPKVRGQAGRMNYYWTLIEPGDTITFEATGNLVVPRYAFAMNRGPGSGIIISDAPVHDCNTTCQTPKGAINTSLPFQNIHPVTIGECPKYVKSTKLRMATGLRNIPSIQSRGLFGAIAGFIEGGWTGMIDGWYGYHHQNEQGSGYAADQKSTQNAIDGITNKVNSVIKKMNTQFTAVGKEFNHLEKRIENLNKKVDDGFLDVWTYNAELLVLLENERTLDFHDSNVKNLYEKVRSQLRNNAKEIGNGCFEFYHKCDDTCMESVKNGTYDYPKYSEESKLNREEIDGVKLESTRIYQILAIYSTAASSLVLLVSLGAISFWMCSNGSLQCRICI

SEQ ID NO: 11886 - protein, 566 aa, synthetic construct
  REGION 1..566: note = hemagglutinin__InfluenzaA__AHN00764
MKAILLVLLCTFAATNADTLCIGYHANNSTDTVDTVLEKNVTVTHSVNLLEDKHNGKLCKLGGIAPLHLGKCNIAGWLLGNPECELLFTVSSWSYIVETSNSDNGTCYPGDFINYEELREQLSSVSSFERFEIFPKTSSWPNHETNRGVTAACPYAGANSFYRNLIWLVKKGNSYPKLSKSYVNNKGKEVLVLWGIHHPPTSTDQQSLYQNADAYVFVGSSKYNRKFKPEIAARPKVRGQAGRMNYYWTLIEPGDTITFEATGNLVVPRYAFAMNRGPGSGIIISDAPVHDCNTTCQTPKGAINTSLPFQNIHPVTIGECPKYVKSTKLRMATGLRNIPSIQSRGLFGAIAGFIEGGWTGMIDGWYGYHHQNEQGSGYAADQKSTQNAIDGITNKVNSVIKKMNTQFTAVGKEFNHLEKRIENLNKKVDDGFLDVWTYNAELLVLLENERTLDFHDSNVKNLYEKVRSQLRNNAKEIGNGCFEFYHKCDDTCMESVKNGTYDYPKYSEESKLNREEIDGVKLESTRIYQILAIYSTAASSLVLLVSLGAISFWMCSNGSLQCRICI

SEQ ID NO: 11887 - protein, 560 aa, synthetic construct
  REGION 1..560: note = hemagglutinin__InfluenzaA__AHN96323
MNTQILVFALIAIIPTNADKICLGHHAVSNGTKVNTLTERGVEVVNATETVERTNIPRICSKGKRTVDLGQCGLLGTITGPPQCDQFLEFSADLIIERREGSDVCYPGKFVNEEALRQILRESGGIDKEAMGFTYSGIRTNGATSACRRSGSSFYAEMKWLLSNTDNAAFPQMTKSYKNTRKSPALIVWGIHHSVSTAEQTKLYGSGNKLVTVGSSNYQQSFVPSPGARPQVNGLSGRIDFHWLMLNPNDTVTFSFNGAFIAPDRASFLRGKSMGIQSGVQVDANCEGDCYHSGGTIISNLPFQNIDSRAVGKCPRYVKQRSLLLATGMKNVPEIPKGRGLFGAIAGFIENGWEGLIDGWYGFRHQNAQGEGTAADYKSTQSAIDQITGKLNRLIEKTNQQFELIDNEFNEVEKQIGNVINWTRDSITEVWSYNAELLVAMENQHTIDLADSEMDKLYERVKRQLRENAEEDGTGCFEIFHKCDDDCMASIRNNTYDHSKYREEAMQNRIQIDPVKLSSGYKDVILWFSFGASCFILLAIVMGLVFICVKNGNMRCTIGI

SEQ ID NO: 11888 - protein, 566 aa, synthetic construct; identical to SEQ ID NO: 6982
  REGION 1..566: note = hemagglutinin__InfluenzaA__AHN96442

SEQ ID NO: 11889 - protein, 566 aa, synthetic construct
  REGION 1..566: note = hemagglutinin__InfluenzaA__AHN96443
MKTIIALSYILCLVFAQKLPGNDNSTATLCLGHHAVPNGTIVKTITNDQIEVTNATELVQSSSTGEICNSPHQILDGENCTLIDALLGDPQCDGFQNKKWDLFVERSKAHSNCYPYDVPDYTSLRSLVASSGTLEFNNESFNWTGVTQNGTSSACIRRSNNSFFSRLNWLTHLNFKYPALNVTMPNNEQFDKLYIWGVHHPGTDKDQIFLYAQASGRITVSTKRSQQAVIPNIGSRPRVRNIPSRVSIYWTIVKPGDILLINSTGNLIAPRGYFKIRSGKSSIMRSDAPIGKCNSACITPNGSIPNDKPFQNVNRITYGACPRYVKQNTLKLATGMRNVPEKQTRGIFGAIAGFIENGWEGMVDGWYGFRHQNSEGRGQAADLKSTQAAIDQINGKLNRLIGKTNEKFHQIEKEFSEVEGRIQDLEKYVEDTKIDLWSYNAELLVALENQHTIDLTDSEMNKLFEKTKKQLRENAEDMGNGCFKIYHKCDNACIGSIRNGTYDHDVYRDEALNNRFQIKGVELKSGYKDWILWISFAISCFLLCVALLGFIMWACQKGNIRCNICI

SEQ ID NO: 11890 - protein, 566 aa, synthetic construct
  REGION 1..566: note = hemagglutinin__InfluenzaA__AHN96444
MKTIIALSYILCLVFAQKLPGNDNSTATLCLGHHAVPNGTIVKTITNDRIEVTNATELVQNSSIGEICDSPHQILDGENCTLIDALLGDPQCDGFQNKKWDLFVERSKAYSNCYPYDVPDYASLRSLVASSGTLEFNNESFNWTGVTQNGTSSACIRRSNNSFFSRLNWLTHLNFKYPALNVTMPNNQQFDKLYIWGVHHPGTDKDQIFLYAQSSGRITVSTKRSQQAVIPNIGSRPRIRNIPSRISIYWTIVKPGDILLINSTGNLIAPRGYFKIRSGKSSIMRSDAPIGKCKSECITPNGSIPNDKPFQNVNRITYGACPRYVKQSTLKLATGMRNVPEKQTRGIFGAIAGFIENGWEGMVDGWYGFRHQNSEGRGQAADLKSTQAAIDQINGKLNRLIGKTNEKFHQIEKEFSEVEGRIQDLEKYVEDTKIDLWSYNAELLVALENQHTIDLTDSEMNKLFEKTKKQLRENAEDMGNGCFKIYHKCDNACIGSIRNGTYDHDVYRDEALNNRFQIKGIELKSGYKDWILWISFAISCFLLCVALLGFIMWACQKGNIRCNICI

SEQ ID NO: 11891 - protein, 566 aa, synthetic construct
  REGION 1..566: note = hemagglutinin__InfluenzaA__AHN96445
MKTIIALSYILCLVFAQKLPGNDNSTATLCLGHHAVPNGTIVKTITNDRIEVTNATELVQNSSIGEICDSPHQILDGENCTLIDALLGDPQCDGFQNKKWDLFVERSKAYSNCYPYDVPDYASLRSLVASSGTLEFNNESFNWTGVTQNGTSSACIRRSNNSFFSRLNWLTHLNFKYPALNVTMPNNQQFDKLYIWGVHHPGTDKDQIFLYAQSSGRITVSTKRSQQAVIPNIGSRPRIRNIPSRISIYWTIVKPGDILLINSTGNLIAPRGYFKILSGKSSIMRSDAPIGKCKSECITPNGSIPNDKPFQNVNRITYGACPRYVKQSTLKLATGMRNVPEKQTRGIFGAIAGFIENGWEGMVDGWYGFRHQNSEGRGQAADLKSTQAAIDQINGKLNRLIGKTNEKFHQIEKEFSEVEGRIQDLEKYVEDTKIDLWSYNAELLVALENQHTIDLTDSEMNKLFEKTKKQLRENAEDMGNGCFKIYHKCDNACIGSIRNGTYDHDVYRDEALNNRFQIKGVELKSGYKDWILWISFAISCFLLCVALLGFIMWACQKGNIRCNICI

SEQ ID NO: 11892 - protein, 566 aa, synthetic construct
  REGION 1..566: note = hemagglutinin__InfluenzaA__AHN96447
MKTIIALSYILCLVFAQKLPGNDNSTATLCLGHHAVPNGTIVKTITNDRIEVTNATELVQNSSIGEICDSPHQILDGENCTLIDALLGDPQCDGFQNKKWDLFVERSKAYSNCYPYDVPDYASLRSLVASSGTLEFNNESFNWAGVTQNGTSSACIRGSNSSFFSRLNWLTHLNFKYPALNVTMPNNEQFDKLYIWGVHHPGTDKDQIFLYAQSSGRITVSTKRSQQAVIPNIGSRPRIRNIPSRISIYWTIVKPGDILLINSTGNLIAPRGYFKIRSGKSSIMRSDAPIGKCKSECITPNGSIPNDKPFQNVNRITYGACPRYVKQSTLKLATGMRNVPEKQTRGIFGAIAGFIENGWEGMVDGWYGFRHQNSEGRGQAADLKSTQAAIDQINGKLNRLIGKTNEKFHQIEKEFSEVEGRIQDLEKYVEDTKIDLWSYNAELLVALENQHTIDLTDSEMNKLFEKTKKQLRENAEDMGNGCFKIYHKCDNACIGSIRNGTYDHDVYRDEALNNRFQIKGVELKSGYKDWILWISFAISCFLLCVVLLGFIMWACQKGNIRCNICI

SEQ ID NO: 11893 - protein, 566 aa, synthetic construct
  REGION 1..566: note = hemagglutinin__InfluenzaA__AHV83765
MKAILVVLLYTFATANADTLCIGYHANNSTDTVDTVLEKNVTVTHSVNLLEDKHNGKLCKLRGVAPLHLGKCNIAGWILGNPECESLSTASSWSYIVETSSSDNGTCYPGDFINYEELREQLSSVSSFERFEIFPKTSSWPNHDSNKGVTAACPHAGAKSFYKNLIWLVKKGNSYPKLSQSYINDKGKEVLVLWGIHHPSTTADQQSLYQNADAYVFVGTSRYSKKFKPEIAIRPKVRDQEGRMNYYWTLVEPGDKITFEATGNLVVPRYAFTMERNAGSGIIISDTPVHDCNTTCQTPEGAINTSLPFQNIHPITIGKCPKYVKSTKLRLATGLRNVPSIQSRGLFGAIAGFIEGGWTGMVDGWYGYHHQNEQGSGYAADLKSTQNAIDKITNKVNSVIEKMNTQFTAVGKEFNHLEKRIENLNKKVDDGFLDIWTYNAELLVLLENERTLDYHDSNVKNLYEKVRNQLKTNAKEIGNGCFEFYHKCDNTCMESVKNGTYDYPKYSEEAKLNREKIDGVKLESTRIYQILAIYSTVASSLVLVVSLGAISFWMCSNGSLQCRICI

SEQ ID NO: 11894 - protein, 566 aa, synthetic construct; identical to SEQ ID NO: 11021
  REGION 1..566: note = hemagglutinin__InfluenzaA__AHV83766

SEQ ID NO: 11895 - protein, 566 aa, synthetic construct; identical to SEQ ID NO: 10040
  REGION 1..566: note = hemagglutinin__InfluenzaA__AHV83767

SEQ ID NO: 11896 - protein, 566 aa, synthetic construct
  REGION 1..566: note = hemagglutinin__InfluenzaA__AHV83768
MKAILVVLLYTFTTANADTLCIGYHANNSTDTVDTVLEKNVTVTHSVNLLEDKHNGKLCKLRGVAPLHLGKCNIAGWILGNPECESLSTASSWSYIVETSSSDNGTCYPGDFINYEELREQLSSVSSFERFEIFPKTSSWPNHDSNKGVTAACPHAGAKSFYKNLIWLVKKGNSYPKLSQSYINDKGKEVLVLWGIHHPSTTADQQSLYQNADAYVFVGTSRYSKKFKPEIAIRPKVRDQEGRMNYYWTLLEPGDKITFEATGNLVVPRYAFTMERNAGSGIIISDTPVHDCNTTCQTPEGAINTSLPFQNIHPITIGKCPKYVKSTKLRLATGLRNVPSIQSRGLFGAIAGFIEGGWTGMVDGWYGYHHQNEQGSGYAADLKSTQNAIDKITNKVNSVIEKMNTQFTAVGKEFNHLEKRIENLNKKVDDGFLDIWTYNAELLVLLENERTLDYHDSNVKNLYEKVRNQLKNNAKEIGNGCFEFYHKCDNTCMDSVKNGTYDYPKYSEEAKLNREKIDGVKLESTRIYQILAIYSTVASSLVLVVSLGAISFWMCSNGSLQCRICI

SEQ ID NO: 11897 - protein, 566 aa, synthetic construct; identical to SEQ ID NO: 10998
  REGION 1..566: note = hemagglutinin__InfluenzaA__AHV83770

SEQ ID NO: 11898 - protein, 566 aa, synthetic construct
  REGION 1..566: note = hemagglutinin__InfluenzaA__AHV83771
MKAILVVLLYTFATANADTLCIGYHANNSTDTVDTVLEKNVTVTHSVNLLEDKHNGKLCKLRGVAPLHLGKCNIAGWILGNPECESLSTASSWSYIVETSSSDNGTCYPGDFINYEELREQLSSVSSFERFEIFPKTSSWPNHDSNKGVTAACPHAGAKSFYKNLIWLVKKGNSYPKLSQSYINDKGKEVLVLWGIHHPSTTTDQQSLYQNADAYVFVGTSRYSKKFKPEIAIRPKVRDQEGRMNYYWTLVEPGDKITFEATGNLVVPRYAFTMERNAGSGIIISDTPVHDCNTTCQTPEGAINTSLPFQNIHPITIGKCPKYVKSTKLRLATGLRNVPSIQSRGLFGAIAGFIEGGWTGMVDGWYGYHHQNEQGSGYAADQKSTQNAIDKITNKVNSVIEKMNTQFTAVGKEFNHLEKRIENLNKKVDDGFLDIWTYNAELLVLLENERTLDYHDSNVKNLYEKVRNQLKNNAKEIGNGCFEFYHKCDNTCMESVKNGTYDYPKYSEEAKLNREKIDGVKLESTRIYQILAIYSTVASSLVLVVSLGAISFWMCSNGSLQCRICI

SEQ ID NO: 11899 - protein, 566 aa, synthetic construct; identical to SEQ ID NO: 10040
  REGION 1..566: note = hemagglutinin__InfluenzaA__AHV83772

SEQ ID NO: 11900 - protein, 566 aa, synthetic construct; identical to SEQ ID NO: 10040
  REGION 1..566: note = hemagglutinin__InfluenzaA__AHV83773

SEQ ID NO: 11901 - protein, 566 aa, synthetic construct; identical to SEQ ID NO: 10040
  REGION 1..566: note = hemagglutinin__InfluenzaA__AHV83774

SEQ ID NO: 11902 - protein, 566 aa, synthetic construct
  REGION 1..566: note = hemagglutinin__InfluenzaA__AHV83775
MKAILVVLLYTFATANADTLCIGYHANNSTDTVDTVLEKNVTVTHSVNLLEDKHNGKLCKLRGVAPLHLGKCNIAGWILGNPECESLSTASSWSYIVETSSSDNGTCYPGDFINYEELREQLSSVSSFERFEIFPKTSSWPNHDSNKGVTAACPHAGAKSFYKNLIWLVKKGNSYPKLSQSYINDKGKEVLVLWGIHHPSTTADQQSLYQNADAYVFVGTSRYSKKFKPEIAIRPKVRDQEGRMNYYWTLVEPGDKITFEATGNLVVPRYAFTMERNAGSGIIISDTPVHDCNTTCQTPEGAINTSLPFQNIHPITIGKCPKYVKSTKLRLATGLRNIPSIQSRGLFGAIAGFIEGGWTGMVDGWYGYHHQNEQGSGYAADLKSTQNAIDKITNKVNSVIEKMNTQFTAVGKEFNHLEKRIENLNKKVDDGFLDIWTYNAELLVLLENERTLDYHDSNVKNLYEKVRNQLKNNAKEIGNGCFEFYHKCDNTCMESVKNGTYDYPKYSEEAKLNREKIDGVKLESTRIYQILAIYSTVASSLVLVVSLGAISFWMCSNGSLQCRICI

SEQ ID NO: 11903 - protein, 566 aa, synthetic construct; identical to SEQ ID NO: 10040
  REGION 1..566: note = hemagglutinin__InfluenzaA__AHV83776

SEQ ID NO: 11904 - protein, 566 aa, synthetic construct
  REGION 1..566: note = hemagglutinin__InfluenzaA__AHV83777
MKAILVVLLYTFATANADTLCIGYHANNSTDTVDTVLEKNVTVTHSVNLLEDKHNGKLCKLRGVAPLHLGKCNIAGWILGNPECESLSTASSWSYIVETSSSDNGTCYPGDFINYEELREQLSSVSSFERFEIFPKTSSWPNHDSNKGVTAACPHAGAKSFYKNLIWLVKKGNSYPKLSQSYINDKGKEVLVLWGIHHPSTTADQQSLYQNADAYVFVGTSRYSKKFKPEIAIRPKVRDQEGRMNYYWTLVEPGDKITFEATGNLVVPRYAFTMERNAGSGIIISDTPVHDCNTTCQTPEGAINTSLPFQNIHPITIGKCPKYVKSTKLRLATGLRNIPSIQSRGLFGAIAGFIEGGWTGMVDGWYGYHHQNEQGSGYAADLKSTQNAIDKITNKVNSVIEKMNTQFTAVGKEFNHLEKRIENLNKKVDDGFLDIWTYNAELLVLLENERTLDYHDSNVKNLYEKVRNQLKNNAKEIGNGCFEFYHKCDNTCMESVKNGTYDYPKYSEEAKLNREKIDGVKLESTRIYQILAIYSTVASSLVLVVSLGAICFWMCSNGSLQCRICI

SEQ ID NO: 11905 - protein, 566 aa, synthetic construct
  REGION 1..566: note = hemagglutinin__InfluenzaA__AHV83778
MKAILVVLLYTFTTANADTLCIGYHANNSTDTVDTVLEKNVTVTHSVNLLEDKHNGKLCKLRGVAPLHLGKCNIAGWILGNPECESLSTASSWSYIVETSSSDNGTCYPGDFINYEELREQLSSVSSFERFEIFPKTSSWPNHDSNKGVTAACPHAGAKSFYKNLIWLVKKGNSYPKLSQSYINDKGKEVLVLWGIHHPSTTADQQSLYQNADAYVFVGTSRYSKKFKPEIAIRPKVRDQEGRMNYYWTLVEPGDKITFEATGNLVVPRYAFTMERNAGSGIIISDTPVYDCNTTCQTPEGAINTSLPFQNIHPITIGKCPKYVKSTKLRLATGLRNVPSIQSRGLFGAIAGFIEGGWTGMVDGWYGYHHQNEQGSGYAADLKSTQNAIDKITNKVNSVIEKMNTQFTAVGKEFNHLEKRIENLNKKVDDGFLDIWTYNAELLVLLENERTLDYHDSNVKNLYEKVRNQLKNNAKEIGNGCFEFYHKCDNTCMESVKNGTYDYPKYSEEAKLNREKIDGVKLESTRIYQILAIYSTVASSLVLVVSLGAISFWMCSNGSLQCRICI

SEQ ID NO: 11906 - protein, 566 aa, synthetic construct
  REGION 1..566: note = hemagglutinin__InfluenzaA__AHV83779
MKAILVVLLYTFATTNADTLCIGYHANNSTDTVDTVLEKNVTVTHSVNLLEDKHNGKLCKLRGVAPLHLGKCNIAGWILGNPECESLSTASSWSYIVETSSSDNGTCYPGDFINYEELREQLSSVSSFERFEIFPKTSSWPNHDSNKGVTAACPHAGAKSFYKNLIWLVKKGNSYPKLSQSYINDKGKEVLVLWGIHHPSTTADQQSLYQNADAYVFVGTSRYSKKFKPEIAIRPKVRDQEGRMNYYWTLVEPGDKITFEATGNLVVPRYAFTMERNAGSGIIISDTPVHDCNTTCQTPEGAINTSLPFQNIHPITIGKCPKYVKSTKLRLATGLRNVPSIQSRGLFGAIAGFIEGGWTGMVDGWYGYHHQNEQGSGYAADLKSTQNAIDKITNKVNSVIEKMNTQFTAVGKEFNHLEKRIENLNKKVDDGFLDIWTYNAELLVLLENERTLDYHDSNVKNLYEKVRNQLKNNAKETGNGCFEFYHKCDNTCMESVKNGTYDYPKYSEEAKLNREKIDGVKLESTRIYQILAIYSTVASSLVLVVSLGAISFWMCSNGSLQCRICI

SEQ ID NO: 11907 - protein, 566 aa, synthetic construct
  REGION 1..566: note = hemagglutinin__InfluenzaA__AHV83780
MKAILVVLLYTFATANADTLCIGYHANNSTDTVDTVLEKNVTVTHSVNLLEDKHNGKLCKLRGVAPLHLGKCNIAGWILGNPECESLSTASSWSYIVETSSSDNGTCYPGDFINYEELREQLSSVSSFERFEIFPKTSSWPNHDSNKGVTAACPHAGAKSFYKNLIWLVKKGNSYPKLRQSYINDKGKEVLVLWGIHHPSTTTDQQSLYQNADAYVFVGTSRYSKKFKPEIAIRPKVRDQEGRMNYYWTLVEPGDKITFEATGNLVVPRYAFTMERNAGSGIIISDTPVHDCNTTCQTPEGAINTSLPFQNIHPITIGKCPKYVKSTKLRLATGLRNVPSIQSRGLFGAIAGFIEGGWTGMVDGWYGYHHQNEQGSGYAADLKSTQNAIDKITNKVNSVIEKMNTQFTAVGKEFNHLEKRIENLNKKVDDGFLDIWTYNAELLVLLENERTLDYHDSNVKNLYEKVRNQLKNNAKEIGNGCFEFYHKCDNTCMESVKNGTYDYPKYSEEAKLNREKIDGVKLESTRIYQILAIYSTVASSLVLVVSLGAISFWMCSNGSLQCRICI

SEQ ID NO: 11908 - protein, 566 aa, synthetic construct; identical to SEQ ID NO: 10040
  REGION 1..566: note = hemagglutinin__InfluenzaA__AHV83781

SEQ ID NO: 11909 - protein, 566 aa, synthetic construct
  REGION 1..566: note = hemagglutinin__InfluenzaA__AHV83782
MKAILVVLLYTLATANADTLCIGYHANNSTDTVDTVLEKNVTVTHSVNLLEDKHNGKLCKLRGVAPLHLGKCNIAGWILGNPECESLSTASSWSYIVETSSSDNGTCYPGDFINYEELREQLSSVSSFERFEIFPKTSSWPNHDSNKGVTAACPHAGAKSFYKNLIWLVKKGNSYPKLSQSYINDKGKEVLVLWGIHHPSTTADQQSLYQNADAYVFVGTSRYSKKFKPEIAIRPKVRDQEGRMNYYWTLVEPGDKITFEATGNLVAPRYAFTMERNAGSGIIISDTPVHDCNTTCQTPEGAINTSLPFQNIHPITIGKCPKYVKSTKLRLATGLRNVPSIQSRGLFGAIAGFIEGGWTGMVDGWYGYHHQNEQGSGYAADLKSTQNAIDKITNKVNSVIEKMNTQFTAVGKEFNHLEKRIENLNKKVDDGFLDIWTYNAELLVLLENERTLDYHDSNVKNLYEKVRNQLKNNAKEIGNGCFEFYHKCDNTCMESVKNGTYDYPKYSEEAKLNREKIDGVKLESTRIYQILAIYSTVASSLVLVVSLGAISFWMCSNGSLQCRICI

SEQ ID NO: 11910 - protein, 566 aa, synthetic construct
  REGION 1..566: note = hemagglutinin__InfluenzaA__AHV83783
MKAILVVLLYTFATANADTLCIGYHANNSTDTVDTVLEKNITVTHSVNLLEDKHNGKLCKLRGVAPLHLGKCNIAGWILGNPECESLSTASSWSYIVETSSSDNGTCYPGDFINYEELREQLSSVSSFERFEIFPKTSSWPNHDSNKGVTAACPHAGAKGFYKNLIWLVKKGNSYPKLRQSYINDKGKEVLVLWGIHHPSTTTDQQSLYQNADAYVFVGTSRYSKKFKPEIAIRPKVRDQEGRMNYYWTLVEPGDKITFEATGNLVVPRYAFTMERNAGSGIIISDTPVHDCNTTCQTPEGAINTSLPFQNIHPITIGKCPKYVKSTKLRLATGLRNVPSIQSRGLFGAIAGFIEGGWTGMVDGWYGYHHQNEQGSGYAADLKSTQNAIDKITNKVNSVIEKMNTQFTAVGKEFNHLEKRIENLNKKVDDGFLDIWTYNAELLVLLENERTLDYHDSNVKNLYEKVRNQLKNNAKEIGNGCFEFYHKCDNTCMESVKNGTYDYPKYSEEAKLNREKIDGVKLESTRIYQILAIYSTVASSLVLVVSLGAISFWMCSNGSLQCRICI

SEQ ID NO: 11911 - protein, 566 aa, synthetic construct; identical to SEQ ID NO: 10040
  REGION 1..566: note = hemagglutinin__InfluenzaA__AHV83784

SEQ ID NO: 11912 - protein, 566 aa, synthetic construct; identical to SEQ ID NO: 10040
  REGION 1..566: note = hemagglutinin__InfluenzaA__AHV83785

SEQ ID NO: 11913 - protein, 566 aa, synthetic construct; identical to SEQ ID NO: 10040
  REGION 1..566: note = hemagglutinin__InfluenzaA__AHV83787

SEQ ID NO: 11914 - protein, 566 aa, synthetic construct
  REGION 1..566: note = hemagglutinin__InfluenzaA__AHV83788
MKAILVVLLYTFATANADTLCIGYHANNSTDTVDTVLEKNVTVTHSVNLLEDKHNGKLCKLRGVSPLHLGKCNIAGWILGNPECESLSTASSWSYIVETSSSDNGTCYPGDFVNYEELREQLSSVSSFERFEIFPKTSSWPNHDSNKGVTAACPHAGAKSFYKNLIWLVKKGNSYPKLSQSYINDKGKEVLVLWGIHHPSTTADQQSLYQNADAYVFVGTSRYSKKFKPEIAIRPKVRDQEGRMNYYWTLVEPGDKITFEATGNLVVPRYAFTMERNAGSGIIISDTPVHDCNTTCQTPEGAINTSLPFQNIHPITIGKCPKYVKSTKLRLATGLRNVPSIQSRGLFGAIAGFIEGGWTGMVDGWYGYHHQNEQGSGYAADLKSTQNAIDKITNKVNSVIEKMNTQFTAVGKEFNHLEKRIENLNKKVDDGFLDIWTYNAELLVLLENERTLDYHDSNVKNLYEKVRNQLKNNAKEIGNGCFEFYHKCDNTCMESVKNGTYDYPKYSEEAKLNREKIDGVKLESTRIYQILAIYSTVASSLVLVVSLGAISFWMCSNGSLQCRICI

SEQ ID NO: 11915 - protein, 566 aa, synthetic construct; identical to SEQ ID NO: 11902
  REGION 1..566: note = hemagglutinin__InfluenzaA__AHV83789

SEQ ID NO: 11916 - protein, 566 aa, synthetic construct; identical to SEQ ID NO: 10040
  REGION 1..566: note = hemagglutinin__InfluenzaA__AHV83790

SEQ ID NO: 11917 - protein, 566 aa, synthetic construct; identical to SEQ ID NO: 10040
  REGION 1..566: note = hemagglutinin__InfluenzaA__AHV83791

SEQ ID NO: 11918 - protein, 566 aa, synthetic construct; identical to SEQ ID NO: 10040
  REGION 1..566: note = hemagglutinin__InfluenzaA__AHV83792

SEQ ID NO: 11919 - protein, 566 aa, synthetic construct
  REGION 1..566: note = hemagglutinin__InfluenzaA__AHV83793
MKAILVVLLYTFATANADTLCIGYHANNSTDTVDTVLEKNVTVTHSVNLLEDKHNGKLCKLRGVAPLHLGKCNIAGWILGNPECESLSTASSWSYIVETSSSDNGTCYPGDFINYEELREQLSSVSSFEKFEIFPKTSSWPNHDSNKGVTAACPHAGAKSFYKNLIWLVKKGNSYPKLSQSYINDKGKEILVLWGIHHPSTTADQQSLYQNADAYVFVGTSRYSKKFKPEIAIRPKVRDQEGRMNYYWTLVEPGDKITFEATGNLVVPRYAFTMERNAGSGIIISDTPVHDCNTTCQTPEGAINTSLPFQNIHPITIGKCPKYVKSTKLRLATGLRNVPSIQSRGLFGAIAGFIEGGWTGMVDGWYGYHHQNEQGSGYAADQKSTQNAIDKITNKVNSVIEKMNTQFTAVGKEFNHLEKRIENLNKKVDDGFLDIWTYNAELLVLLENERTLDYHDSNVKNLYEKVRNQLKNNAKEIGNGCFEFYHKCDNTCMESVKNGTYDYPKYSEEAKLNREKIDGVKLESTRIYQILAIYSTVASSLVLVVSLGAISFWMCSNGSLQCRICI

SEQ ID NO: 11920 - protein, 566 aa, synthetic construct
  REGION 1..566: note = hemagglutinin__InfluenzaA__AHV83794
MKAILVVLLYTFATANADTLCIGYHANNSTDTVDTVLEKNVTVTHSVNLLEDKHNGKLCKLRGVAPLHLGKCNIAGWILGNPECESLSTASSWSYIVETSSSDNGTCYPGDFINYEELREQLSSVSSFERFEIFPKTSSWPNHDSNKGVTAACPHAGAKSFYKNLIWLVKKGNSYPKLSQSYINDKGKEVLVLWGIHHPSTTADQQSLYQNADAYVFVGTSRYSKKFKPEIAIRPKVRDQEGRMNYYWTLVEPGDKITFEATGNLVVPRYAFTMERNAGSGIIISDTPVHDCNTTCQTPEGAINTSLPFQNIHPITIGKCPKYVKSTKLRLATGLRNVPSIQSRGLFGAIAGFIEGGWTGMVDGWYGYHHQNEQGSGYAADQKSTQNAIDKITNKVNSVIEKMNTQFTAVGKEFNHLEKRIENLNKKVDDGFLDIWTYNAELLVLLENERTLDYHDSNVKNLYEKVRNQLKNNAKEIGNGCFEFYHKCDNTCMESVKNGTYDYPKYSEEAKLNREKIDGVKLESTRIYQILAIYSTVASSLVLVVSLGAISFWMCSNGSLQCRICI

SEQ ID NO: 11921 - protein, 566 aa, synthetic construct
  REGION 1..566: note = hemagglutinin__InfluenzaA__AHV83795
MKAILVVLLYTFATANADTLCIGYHANNSTDTVDTVLEKNVTVTHSVNLLEDKHNGKLCKLRGVAPLHLGKCNIAGWILGNPECESLSAASSWSYIVETSSSDNGTCYPGDFINYEELREQLSSVSSFERFEIFPKTSSWPNHDSNKGVTAACPHAGAKSFYKNLIWLVKKGNSYPKLSQSYINDKGKEVLVLWGIHHPSTTADQQSLYQNADTYVFVGTSRYSKKFKPEIAIRPKVRDQEGRMNYYWTLVEPGDKITFEATGNLVVPRYAFTMERNAGSGIIISDTPVHDCNTTCQTPEGAINTSLPFQNIHPITIGKCPKYVKSTKLRLATGLRNVPSIQSRGLFGAIAGFIEGGWTGMVDGWYGYHHQNEQGSGYAADQKSTQNAIDKITNKVNSVIEKMNTQFTAVGKEFNHLEKRIENLNKKVDDGFLDIWTYNAELLVLLENERTLDYHDSNVKNLYEKVRNQLKNNAKEIGNGCFEFYHKCDNTCMESVKNGTYDYPKYSEEAKLNREKIDGVKLESTKIYQILAIYSTVASSLVLVVSLGAISFWMCSNGSLQCRICI

SEQ ID NO: 11922 - protein, 566 aa, synthetic construct; identical to SEQ ID NO: 11920
  REGION 1..566: note = hemagglutinin__InfluenzaA__AHV83796

SEQ ID NO: 11923 - protein, 566 aa, synthetic construct; identical to SEQ ID NO: 10040
  REGION 1..566: note = hemagglutinin__InfluenzaA__AHV83798

SEQ ID NO: 11924 - protein, 566 aa, synthetic construct; identical to SEQ ID NO: 10040
  REGION 1..566: note = hemagglutinin__InfluenzaA__AHV83799

SEQ ID NO: 11925 - protein, 566 aa, synthetic construct
  REGION 1..566: note = hemagglutinin__InfluenzaA__AHV83800
MKAILVVLLYTFATANADTLCIGYHANNSTDTVDTVLEKNVTVTHSVNLLEDKHNGKLCKLRGVAPLHLGKCNIAGWILGNPECESLSTASSWSYIVETSSSDNGTCYPGDFINYEELREQLSSVSSFERFEIFPKTSSWPNHDSNKGVTAACPHAGAKSFYKNLIWLVKKGNSYPKLSQSYINDKGKEVLVLWGIHHPSTTADQQSLYQNADAYVFVGTSRYSKKFKPEIAIRPKVRDQEGRMNYYWTLVEPGDKITFEATGNLVVPRYAFTMERNAGSGIIISDTPVHDCNTTCQTPEGAINTSLPFQNIHPITIGKCPKYVKSTKLRLATGLRNVPSIQSRGLFGAIAGFIEGGWTGMVDGWYGYHHQNEQGSGYAADLKSTQNAIDKITNKVNSVIEKMNTQFTAVGKEFNHLEKRIENLNKKVDDGFLDIWTYNAELLVLLENEKTLDYHDSNVKNLYEKVRNQLKNNAKEIGNGCFEFYHKCDNTCMESVKNGTYDYPKYSEEAKLNREKIDGVKLESTRIYQILAIYSTVASSLVLVVSLGAISFWMCSNGSLQCRICI

SEQ ID NO: 11926 - protein, 566 aa, synthetic construct
  REGION 1..566: note = hemagglutinin__InfluenzaA__AHV83801
MKAILVVLLYTFATANADTLCIGYHANNSTDTVDTVLEKNVTVTHSVNLLEDKHNGKLCKLRGVAPLHLGKCNIAGWILGNPECESLSTASSWSYIVETSSSDNGTCYPGDFINYEELREQLSSVSSFERFEIFPKTSSWPNHDSNKGVTAACPHAGAKSFYKNLIWLVKKGNSYPKLSQSYINDKGKEVLVLWGIHHPSTTADQQSLYQNADAYVFVGTSRYSKKFKPEIAIRPKVRDQEGRMNYYWTLVEPGDKITFEATGNLVVPRYAFTMERNAGSGIIISDTPVHDCNTTCQTPEGAINTSLPFQNIHPITIGKCPKYVKSTKLRLATGLRNVPSIQSRGLFGAIAGFIEGGWTGMVDGWYGYHHQNEQGSGYAADQKSTQNAIDKITNKVNSVIEKMNTQFTAVGKEFNHLEKRIENLNKKVDDGFLDIWTYNAELLVLLENERTLDYHDSNVKNLYEKVRNQLKNNAKEIGNGCFEFYHKCDNTCMESVKNGTYDYPKYSEEAKLNREKIDGVKLESTKIYQILAIYSTVASSLVLVVSLGAISFWMCSNGSLQCRICI

SEQ ID NO: 11927 - protein, 566 aa, synthetic construct
  REGION 1..566: note = hemagglutinin__InfluenzaA__AHV83802
MKAILVVLLYTFATANADTLCIGYHANNSTDTVDTVLEKNVTVTHSVNLLEDKHNGKLCKLRGVAPLHLGKCNIAGWILGNPECESLSTASSWSYIVETSSSDNGTCYPGDFINYEELREQLSSVSSFERFEIFPKTSSWPNHDSNKGVTAACPHAGAKSFYKNLIWLVKKGNSYPKLSQSYINDKGKEVLVLWGIHHPSTTADQQGLYQNVDAYVFVGTSRYSKKFKPEIAIRPKVRDQEGRMNYYWTLVEPGDKITFEATGNLVVPRYAFTMERNAGSGIIISDTPVHDCNTTCQTPEGAINTSLPFQNIHPITIGKCPKYVKSTKLRLATGLRNVPSIQSRGLFGAIAGFIEGGWTGMVDGWYGYHHQNEQGSGYAADLKSTQNAIDKITNKVNSVIEKMNTQFTAVGKEFNHLEKRIENLNKKVDDGFLDIWTYNAELLVLLENERTLDYHDSNVKNLYEKVRNQLKNNAKEIGNGCFEFYHKCDNTCMESVKNGTYDYPKYSEEAKLNREKIDGVKLESTRIYQILAIYSTVASSLVLVVSLGAISFWMCSNGSLQCRICI

SEQ ID NO: 11928 - protein, 566 aa, synthetic construct; identical to SEQ ID NO: 10040
  REGION 1..566: note = hemagglutinin__InfluenzaA__AHV83803

SEQ ID NO: 11929 - protein, 566 aa, synthetic construct; identical to SEQ ID NO: 10040
  REGION 1..566: note = hemagglutinin__InfluenzaA__AHV83804

SEQ ID NO: 11930 - protein, 566 aa, synthetic construct; identical to SEQ ID NO: 10040
  REGION 1..566: note = hemagglutinin__InfluenzaA__AHV83805

SEQ ID NO: 11931 - protein, 566 aa, synthetic construct; identical to SEQ ID NO: 11920
  REGION 1..566: note = hemagglutinin__InfluenzaA__AHV83806

SEQ ID NO: 11932 - protein, 566 aa, synthetic construct
  REGION 1..566: note = hemagglutinin__InfluenzaA__AHV83807
MKAILVVLLYTFATANADTLCIGYHANNSTDTVDTVLEKDVTVTHSVNLLEDKHNGKLCKLRGVAPLHLGKCNIAGWILGNPECESLSTASSWSYIVETSSSDNGTCYPGDFINYEELREQLSSVSSFERFEIFPKTSSWPNHDSNKGVTAACPHAGAKSFYKNLIWLVKKGNSYPKLSQSYINDKGKEVLVLWGIHHPSTTADQQSLYQNADAYVFVGTSRYSKKFKPEIAIRPKVRDQEGRMNYYWTLVEPGDKITFEATGNLVVPRYAFTMERNAGSGIIISDTPVHDCNTTCQTPEGAINTSLPFQNIHPITIGKCPKYVKSTKLRLATGLRNVPSIQSRGLFGAIAGFIEGGWTGMVDGWYGYHHQNEQGSGYAADLKSTQNAIDKITNKVNSVIEKMNTQFTAVGKEFNHLEKRIENLNKKVDDGFLDIWTYNAELLVLLENERTLDYHDSNVKNLYEKVRNQLKNNAKEIGNGCFEFYHKCDNTCMESVKNGTYDYPKYSEEAKLNREKIDGVKLESTRIYQILAIYSTVASSLVLVVSLGAISFWMCSNGSLQCRICI

SEQ ID NO: 11933 - protein, 566 aa, synthetic construct
  REGION 1..566: note = hemagglutinin__InfluenzaA__AHV83808
MKAILVVLLYTFATANADTLCIGYHANNSTDTVDTVLEKNVTVTHSVNLLEDKHNGKLCKLRGVAPLHLGKCNIAGWILGNPECESLSTASSWSYIVETSSSDNGTCYPGDFINYEELREQLSSVSSFERFEIFPKTSSWPNHDSNKGVTAACPHAGAKSFYKNLIWLVKKGNSYPKLSQSYINDKGKEVLVLWGIHHPSTTADQQSLYQNAEAYVFVGTSRYSKKFKPEIAIRPKVRDQEGRMNYYWTLVEPGDKITFEATGNLVVPRYAFTMERNAGSGIIISDTPVHDCNTTCQTPEGAINTSLPFQNIHPITIGKCPKYVKSTKLRLATGLRNVPSIQSRGLFGAIAGFIEGGWTGMVDGWYGYHHQNEQGSGYAADLKSTQNAIDKITNKVNSVIEKMNTQFTAVGKEFNHLEKRIENLNKKVDDGFLDIWTYNAELLVLLENERTLDYHDSNVKNLYEKVRNQLKNNAKEIGNGCFEFYHKCDNMCMESVKNGTYDYPKYSEEAKLNREKIDGVKLESTRIYQILAIYSTVASSLVLVVSLGAISFWMCSNGSLQCRICI

SEQ ID NO: 11934 - protein, 566 aa, synthetic construct; identical to SEQ ID NO: 10040
  REGION 1..566: note = hemagglutinin__InfluenzaA__AHV83809

SEQ ID NO: 11935 - protein, 566 aa, synthetic construct; identical to SEQ ID NO: 11021
  REGION 1..566: note = hemagglutinin__InfluenzaA__AHV83810

SEQ ID NO: 11936 - protein, 566 aa, synthetic construct
  REGION 1..566: note = hemagglutinin__InfluenzaA__AHV83812
MKAILVVLLYTFTTANADTLCIGYHANNSTDTVDTVLEKNVTVTHSVNLLEDKHNGKLCKLRGVAPLHLGKCNIAGWILGNPECESLSTASSWSYIVETSSSDNGTCYPGDFINYEELREQLSSVSSFERFEIFPKTSSWPNHDSNKGVTAACPHAGAKSFYKNLIWLVKKGNSYPKLSQSYINDKGKEVLVLWGIHHPSTTADQQSLYQNADAYVFVGTSRYSKKFKPEIAIRPKVRDQEGRMNYYWTLVEPGDKITFEATGNLVVPRYAFTMERNAGSGIIISDTPVHDCNTTCQTPEGAINTSLPFQNIHPITIGKCPKYVKSTKLRLATGLRNVPSIQSRGLFGAIAGFIEGGWTGMVDGWYGYHHQNEQGSGYAADLKSTQNAIDKITNKVNSVIEKMNTQFTAVGKEFNHLEKRIENLNKKVDDGFLDIWTYNAELLVLLENERTLDYHDSNVKNLYEKVRNQLKNNAKEIGNGCFEFYHKCDNTCMESVKNGTYEYPKYSEEAKLNREKIDGVKLESTKIYQILAIYSTVASSLVLVVSLGAISFWMCSNGSLQCRICI

SEQ ID NO: 11937 - protein, 566 aa, synthetic construct; identical to SEQ ID NO: 10040
  REGION 1..566: note = hemagglutinin__InfluenzaA__AHV83813

SEQ ID NO: 11938 - protein, 566 aa, synthetic construct
  REGION 1..566: note = hemagglutinin__InfluenzaA__AHV83814
MKAILVVLLYTFATANADTLCIGYHANNSTDTVDTVLEKNVTVTHSVNLLEDKHNGKLCKLRGVAPLHLGKCNIAGWILGNPECESLSTASSWSYIVETSSSDNGTCYPGDFINYEELREQLSSVSSFERFEIFPKTSSWPNHDSNKGVTAACPHAGAKSFYKNLIWLVKKGNSYPKLSQSYINDKGKEVLVLWGIHHPSTTADQQSLYQNADAYVFVGTSRYSKKFKPEIAIRPKVRDQEGRMNYYWTLVEPGDKITFEATGNLVVPRYAFTMERNAGSGIIISDTPVHDCNTTCQTPEGAINTSLPFQNIHPITIGKCPKYVKSTKLRLATGLRNVPSIQSRGLFGAIAGFIEGGWTGMVDGWYGYHHQNEQGSGYAADLKSTQNAIDKITNKVNSVIEKMNTQFTAVGKEFNHLEKRIENLNKKVDDGFLDIWTYNAELLVLLENERNLDYHDSNVKNLYEKVRNQLKTNAKEIGNGCFEFYHKCDNTCMESVKNGTYDYPKYSEEAKLNREKIDGVKLESTRIYQILAIYSTVASSLVLVVSLGAISFWMCSNGSLQCRICI

SEQ ID NO: 11939 - protein, 566 aa, synthetic construct; identical to SEQ ID NO: 11021
  REGION 1..566: note = hemagglutinin__InfluenzaA__AHV83815

SEQ ID NO: 11940 - protein, 566 aa, synthetic construct; identical to SEQ ID NO: 10040
  REGION 1..566: note = hemagglutinin__InfluenzaA__AHV83816

SEQ ID NO: 11941 - protein, 566 aa, synthetic construct
  REGION 1..566: note = hemagglutinin__InfluenzaA__AHV83817
MKAILVVLLYTFATANADTLCIGYHANNSTDTVDTVLEKNVTVTHSVNLLEDKHNGKLCKLRGVAPLHLGKCNIAGWILGNPECESLSTASSWSYIVETSSSDNGTCYPGDFINYEELREQLSSVSSFERFEIFPKTSSWPNHDSNKGVTAACPHAGAKSFYKNLVWLVKKGNSYPKLSQSYINDKGKEVLVLWGIHHPSTTADQQSLYQNADAYVFVGTSRYSKKFKPEIAIRPKVRDQEGRMNYYWTLVEPGDKITFEATGNLVVPRYAFTMERNAGSGIIISDTPVHDCNTTCQTPEGAINTSLPFQNIHPITIGKCPKYVKSTKLRLATGLRNVPSIQSRGLFGAIAGFIEGGWTGMVDGWYGYHHQNEQGSGYAADLKSTQNAIDKITNKVNSVIEKMNTQFTAVGKEFNHLEKRIENLNKKVDDGFLDIWTYNAELLVLLENERTLDYHDSNVKNLYEKVRNQLKNNAKEIGNGCFEFYHKCDNTCMESVKNGTYDYPKYSEEAKLNREKIDGVKLESTRIYQILAIYSTVASSLVLVVSLGAISFWMCSNGSLQCRICI

SEQ ID NO: 11942 - protein, 566 aa, synthetic construct; identical to SEQ ID NO: 11920
  REGION 1..566: note = hemagglutinin__InfluenzaA__AHV83818

SEQ ID NO: 11943 - protein, 566 aa, synthetic construct; identical to SEQ ID NO: 11902
  REGION 1..566: note = hemagglutinin__InfluenzaA__AHV83819

SEQ ID NO: 11944 - protein, 566 aa, synthetic construct
  REGION 1..566: note = hemagglutinin__InfluenzaA__AHV83821
MKAILVVLLYTFATANADTLCIGYHANNSTDTVDTVLEKNVTVTHSVNLLEDKHNGKLCKLRGVSPLHLGKCNIAGWILGNPECESLSTASSWSYIVETSSSDNGTCYPGDFVNYEELREQLSSVSSFERFEIFPKTSSWPNHDSNKGVTAACPHAGAKSFYKNLIWLVKKGNSYPKLSQSYINDKGKEVLVLWGIHHPSTTADQQSLYQNADAYVFVGTSRYSKKFKPEIAIRPKVRDQEGRMNYYWTLVEPGDKITFEATGNLVVPRYAFTMERNAGSGIIISDTPVHNCNTTCQTPEGAINTSLPFQNIHPITIGKCPKYVKSTKLRLATGLRNVPSIQSRGLFGAIAGFIEGGWTGMVDGWYGYHHQNEQGSGYAADLKSTQNAIDKITNKVNSVIEKMNTQFTAVGKEFNHLEKRIENLNKKVDDGFLDIWTYNAELLVLLENERTLDYHDSNVKNLYEKVRNQLKNNAKEIGNGCFEFYHKCDNTCMESVKNGTYDYPKYSEEAKLNREKIDGVKLESTRIYQILAIYSTVASSLVLVVSLGAISFWMCSNGSLQCRICI

SEQ ID NO: 11945 - protein, 566 aa, synthetic construct
  REGION 1..566: note = hemagglutinin__InfluenzaA__AHV83822
MKAILVVLLYTFATANADTLCIGYHANNSTDTVDTVLEKNVTVTHSVNLLEDKHNGKLCKLRGVSPLHLGKCNIAGWILGNPECESLSTASSWSYIVETSSSDNGTCYPGDFVNYEELREQLSSVSSFERFEIFPKTSSWPNHDSNKGVTAACPHAGAKSFYKNLIWLVKKGNSYPKLSQSYINDKGKEVLVLWGIHHPSTTADQQSLYQNADAYVFVGTSRYSKKFKPEIAIRPKVRDQEGRMNYYWTLVEPGDKITFEATGNLVVPRYAFTMERNAGSGIIISDTPVHDCNTTCQTPEGAINTSLPFQNIHPITIGKCPKYVKSTKLRLATGLRNVPSIQSRGLFGAIAGFIEGGWTGMVDGWYGYHHQNEQGSGYAADLKSTQNAIDKITNKVNSIIEKMNTQFTAVGKEFNHLEKRIENLNKKVDDGFLDIWTYNAELLVLLENERTLDYHDSNVKNLYEKVRNQLKNNAKEIGNGCFEFYHKCDNTCMESVKNGTYDYPKYSEEAKLNREKIDGVKLESTRIYQILAIYSTVASSLVLVVSLGAISFWMCSNGSLQCRICI

SEQ ID NO: 11946 - protein, 566 aa, synthetic construct
  REGION 1..566: note = hemagglutinin__InfluenzaA__AHV83823
MKAILVVLLYTFATANADTLCIGYHANNSTDTVDTVLEKNVTVTHSVNLLEDKHNGKLCKLRGVAPLHLGKCNIAGWILGNPECESLSTASSWSYIVETSSSDNGTCYPGDFINYEELREQLSSVSSFERFEIFPKTSSWPNHDSNKGVTAACPHAGAKSFYKNLIWLVKKGNSYPKISQSYINDKGKEVLVLWGIHHPSTTADQQSLYQNADAYVFVGTSRYSKKFKPEIAIRPKVRDQEGRMNYYWTLVEPGDKITFEATGNLVVPRYAFTMERNTGSGIIISDTPVHDCNTTCQTPEGAINTSLPFQNIHPITIGKCPKYVKSTKLRLATGLRNVPSIQSRGLFGAIAGFIEGGWTGMVDGWYGYHHQNEQGSGYAADLKSTQNAIDKITNKVNSVIEKMNTQFTAVGKEFNHLEKRIENLNKKVDDGFLDIWTYNAELLVLLENERTLDYHDSNVKNLYEKVRNQLKNNAKEIGNGCFEFYHKCDNTCMESVKNGTYDYPKYSEEAKLNREKIDGVKLESTRIYQILAIYSTVASSLVLVVSLGAISFWMCSNGSLQCRICI

SEQ ID NO: 11947 - protein, 566 aa, synthetic construct
  REGION 1..566: note = hemagglutinin__InfluenzaA__AHV83824
MKAILVVLLYTFATANADTLCIGYHANNSTDTVDTVLEKNVTVTHSVNLLEDKHNGKLCKLRGVAPLHLGKCNIAGWILGNPECESLSTASSWSYIVETSSSDNGTCYPGDFINYEELREQLSSVSSFERFEIFPKTSSWPNHDSNKGVTAACPHAGAKSFYKNLIWLVKKGNSYPKLRQSYINDKGKEVLVLWGIHHPSTTTDQQSLYQNADAYVFVGTSRYSKKFKPEIAIRPKVRDQEGRMNYYWTLVEPGDKITFEATGNLVVPRYAFTMERNAGSGIIISDTPVHDCNTTCQTPEGAINTSLPFQNIHPITIGKCPKYVKSTKLRLATGLRNVPSIQSRGLFGAIAGFIEGGWTGMVDGWYGYHHQNEQGSGYAADLKSTQNAIDKITNKVNSVIEKMNTQFTAVGKEFNHLEKRIENLNKKVDDGFLDIWTYNAELLVLLENERNLDYHDSNVKNLYEKVRNQLKNNAKEIGNGCFEFYHKCDNTCMESVKNGTYDYPKYSEEAKLNREKIDGVKLESTRIYQILAIYSTVASSLVLVVSLGAISFWMCSNGSLQCRICI

SEQ ID NO: 11948 - protein, 566 aa, synthetic construct; identical to SEQ ID NO: 11920
  REGION 1..566: note = hemagglutinin__InfluenzaA__AHV83825

SEQ ID NO: 11949 - protein, 566 aa, synthetic construct
  REGION 1..566: note = hemagglutinin__InfluenzaA__AHV83826
MKAILVVLLYTFATANADTLCIGYHANNSTDTVDTVLEKNVTVTHSVNLLEDKHNGKLCKLRGVAPLHLGKCNIAGWILGNPECESLSTASSWSYIVETSSSDNGTCYPGDFINYEELREQLSSVSSFERFEIFPKTSSWPNHDSNKGVTAACPHAGAKSFYKNLIWLVKKGNSYPKLSQSYFNDKGKEVLVLWGIHHPSTTADQQSLYQNADAYVFVGTSRYSKKFKPEIAIRPKVRDQEGRMNYYWTLVEPGDKITFEATGNLVVPRYAFTMERNAGSGIIISDTPVHDCNTTCQTPEGAINTSLPFQNIHPITIGKCPKYVKSTKLRLATGLRNVPSIQSRGLFGAIAGFIEGGWTGMVDGWYGYHHQNEQGSGYAADLKSTQNAIDKITNKVNSVIEKMNTQFTAVGKEFNHLEKRIENLNKKVDDGFLDIWTYNAELLVLLENERTLDYHDSNVKNLYEKVRNQLKNNAKEIGNGCFEFYHKCDNTCMESVKNGTYDYPKYSEEAKLNREKIDGVKLESTRIYQILAIYSTAASSLVLVVSLGAISFWMCSNGSLQCRICI

SEQ ID NO: 11950 - protein, 566 aa, synthetic construct; identical to SEQ ID NO: 10040
  REGION 1..566: note = hemagglutinin__InfluenzaA__AHV83827

SEQ ID NO: 11951 - protein, 566 aa, synthetic construct; identical to SEQ ID NO: 10040
  REGION 1..566: note = hemagglutinin__InfluenzaA__AHV83828

SEQ ID NO: 11952 - protein, 566 aa, synthetic construct
  REGION 1..566: note = hemagglutinin__InfluenzaA__AHV83829
MEAILVVLLYTFATANADTLCIGYHANNSTDTVDTVLEKNVTVTHSVNLLEDKHNGKLCKLRGVAPLHLGKCNIAGWILGNPECESLSTASSWSYIVETSSSDNGTCYPGDFINYEELREQLSSVSSFERFEIFPKTSSWPNHDSNKGVTAACPHAGAKSFYKNLIWLVKKGNSYPKISQSYINDKGKEVLVLWGIHHPSTTADQQSLYQNADAYVFVGTSRYSKKFKPEIAIRPKVRDQEGRMNYYWTLVEPGDKITFEATGNLVVPRYAFTMERNAGSGIIISDTPVHDCNTTCQTPEGAINTSLPFQNIHPITIGKCPKYVKSTKLRLATGLRNVPSIQSRGLFGAIAGFIEGGWTGMVDGWYGYHHQNEQGSGYAADLKSTQNAIDKITNKVNSVIEKMNTQFTAVGKEFNHLEKRIENLNKKVDDGFLDIWTYNAELLVLLENERTLDYHDSNVKNLYEKVRNQLKNNAKEIGNGCFEFYHKCDNTCMESVKNGTYDYPKYSEEAKLNREKIDGVKLESTRIYQILAIYSTVASSLVLVVSLGAISFWMCSNGSLQCRICI

SEQ ID NO: 11953 - protein, 566 aa, synthetic construct; identical to SEQ ID NO: 10040
  REGION 1..566: note = hemagglutinin__InfluenzaA__AHV83830

SEQ ID NO: 11954 - protein, 566 aa, synthetic construct
  REGION 1..566: note = hemagglutinin__InfluenzaA__AHV83831
MKAILVVLLYTFATANADTLCIGYHANNSTDTVDTVLEKNVTVTHSVNLLEDKHNGKLCKLRGVAPLHLGKCNIAGWILGNPECESLSTASSWSYIVETSSSDNGTCYPGDFINYEELREQLSSVSSFERFEIFPKTSSWPNHDSNKGVTAACPHAGAKSFYKNLIWLVKKGNSYPKLSQSYINDKGKEVLVLWGIHHPSTIADQQSLYQNADAYVFVGTSRYSKKFKPEIAIRPKVRDQEGRMNYYWTLVEPGDKITFEATGNLVVPRYAFTMERNAGSGIIVSDTPVHDCNTTCQTPEGAINTSLPFQNIHPITIGKCPKYVKSTKLRLATGLRNVPSIQSRGLFGAIAGFIEGGWTGMVDGWYGYHHQNEQGSGYAADLKSTQNAIDKITNKVNSVIEKMNTQFTAVGKEFNHLEKRIENLNKKVDDGFLDIWTYNAELLVLLENERTLDYHDSNVKNLYEKVRNQLKNNAKEIGNGCFEFYHKCDNTCMESVKNGTYDYPKYSEEAKLNREKIDGVKLESTRIYQILAIYSTVASSLVLVVSLGAISFWMCSNGSLQCRICI

SEQ ID NO: 11955 - protein, 566 aa, synthetic construct; identical to SEQ ID NO: 11003
  REGION 1..566: note = hemagglutinin__InfluenzaA__AHV83832

SEQ ID NO: 11956 - protein, 566 aa, synthetic construct; identical to SEQ ID NO: 10040
  REGION 1..566: note = hemagglutinin__InfluenzaA__AHV83833

SEQ ID NO: 11957 - protein, 566 aa, synthetic construct; identical to SEQ ID NO: 11021
  REGION 1..566: note = hemagglutinin__InfluenzaA__AHV83834

SEQ ID NO: 11958 - protein, 566 aa, synthetic construct
  REGION 1..566: note = hemagglutinin__InfluenzaA__AHV83836
MKAILVVLLYTFATANADTLCIGYHANNSTDTVDTVLEKNVTVTHSVNLLEDKHNGKLCKLRGVAPLHLGKCNIAGWILGNPECESLSTASSWSYIVETSSSDNGTCYPGDFINYEELREQLSSVSSFERFEIFPKTSSWPNHDSNKGVTAACPHAGAKSFYKNLIWLVKKENSYPKLRQSYINDKGKEVLVLWGIHHPSTTTDQQSLYQNADAYVFVGTSRYSKKFKPEIAIRPKVRDQEGRMNYYWTLVEPGDKITFEATGNLVVPRYAFTMERNAGSGIIISDTPVHDCNTTCQTPEGAINTSLPFQNIHPITIGKCPKYVKSTKLRLATGLRNVPSIQSRGLFGAIAGFIEGGWTGMVDGWYGYHHQNEQGSGYAADLKSTQNAIDKITNKVNSVIEKMNTQFTAVGKEFNHLEKRIENLNKKVDDGFLDIWTYNAELLVLLENERTLDYHDSNVKNLYEKVRNQLKNNAKEIGNGCFEFYHKCDNTCMESVKNGTYDYPKYSEEAKLNREKIDGVKLESTRIYQILAIYSTVASSLVLVVSLGAISFWMCSNGSLQCRICI

SEQ ID NO: 11959 - protein, 566 aa, synthetic construct; identical to SEQ ID NO: 11907
  REGION 1..566: note = hemagglutinin__InfluenzaA__AHV83837

SEQ ID NO: 11960 - protein, 566 aa, synthetic construct; identical to SEQ ID NO: 10040
  REGION 1..566: note = hemagglutinin__InfluenzaA__AHV83838

SEQ ID NO: 11961 - protein, 566 aa, synthetic construct; identical to SEQ ID NO: 11003
  REGION 1..566: note = hemagglutinin__InfluenzaA__AHV83839

SEQ ID NO: 11962 - protein, 566 aa, synthetic construct; identical to SEQ ID NO: 11021
  REGION 1..566: note = hemagglutinin__InfluenzaA__AHV83840

SEQ ID NO: 11963 - protein, 566 aa, synthetic construct
  REGION 1..566: note = hemagglutinin__InfluenzaA__AHV83841
MKAILVVLLYTFATANADTLCIGYHANNSTDTVDTVLEKNVTVTHSVNLLEDKHNGKLCKLRGVAPLHLGKCNIAGWILGNPECESLSTASSWSYIVETSSSDNGTCYPGDFINYEELREQLSSVSSFERFEIFPKTSSWPNHDSNKGVTAACPHAGAKSFYKNLIWLVKKGNSYPKLRQSYINDKGKEVLVLWGIHHPSTTTDQQSLYQNADAYVFVGTSRYSKKFKPEIAIRPKVRDQEGRMNYYWTLVEPGDKITFEATGNLVVPRYAFTMERNAGSGIIISDTPVHNCNTTCQTPEGAINTSLPFQNIHPITIGKCPKYVKSTKLRLATGLRNVPSIQSRGLFGAIAGFIEGGWTGMVDGWYGYHHQNEQGSGYAADLKSTQNAIDKITNKVNSVIEKMNTQFTAVGKEFNHLEKRIENLNKKVDDGFLDIWTYNAELLVLLENERTLDYHDSNVKNLYEKVRNQLKNNAKEIGNGCFEFYHKCDNTCMESVKNGTYDYPKYSEEAKLNREKIDGVKLESTRIYQILAIYSTVASSLVLVVSLGAISFWMCSNGSLQCRICI

SEQ ID NO: 11964 - protein, 566 aa, synthetic construct; identical to SEQ ID NO: 10040
  REGION 1..566: note = hemagglutinin__InfluenzaA__AHV83842

SEQ ID NO: 11965 - protein, 566 aa, synthetic construct; identical to SEQ ID NO: 10040
  REGION 1..566: note = hemagglutinin__InfluenzaA__AHV83843

SEQ ID NO: 11966 - protein, 566 aa, synthetic construct; identical to SEQ ID NO: 10040
  REGION 1..566: note = hemagglutinin__InfluenzaA__AHV83844

SEQ ID NO: 11967 - protein, 566 aa, synthetic construct
  REGION 1..566: note = hemagglutinin__InfluenzaA__AHV83845
MKAILVVLLYTFATANADTLCIGYHANNSTDTVDTVLEKNVTVTHSVNLLEDKHNGKLCKLRGVAPLHLGKCNIAGWILGNPECESLSTASSWSYIVETSSSDNGTCYPGDFINYEELREQLSSVSSFERFEIFPKTSSWPNHDSNKGVTAACPHAGAKSFYKNLIWLVKKGNSYPKLSQSYINDKGKEVLVLWGIHHPPTTADQQSLYQNADAYVFVGTSRYSKKFKPEIAIRPKVRDQEGRMNYYWTLVEPGDKITFEATGNLVVPRYAFTMERNAGSGIIISDTPVHDCNTTCQTPEGAINTSLPFQNIHPITIGKCPKYVKSTKLRLATGLRNVPSIQSRGLFGAIAGFIEGGWTGMVDGWYGYHHQNEQGSGYAADLKSTQNAIDKITNKVNSVIEKMNTQFTAVGKEFNHLEKRIENLNKKVDDGFLDIWTYNAELLVLLENERTLDYHDSNVKNLYEKVRNQLKNNAKEIGNGCFEFYHKCDNTCMESVKNGTYDYPKYSEEAKLNREKIDGVKLESTRIYQILAIYSTAASSLVLVVSLGAISFWMCSNGSLQCRICI

SEQ ID NO: 11968 - protein, 566 aa, synthetic construct; identical to SEQ ID NO: 10040
  REGION 1..566: note = hemagglutinin__InfluenzaA__AHV83846

SEQ ID NO: 11969 - protein, 566 aa, synthetic construct; identical to SEQ ID NO: 10040
  REGION 1..566: note = hemagglutinin__InfluenzaA__AHV83847

SEQ ID NO: 11970 - protein, 566 aa, synthetic construct; identical to SEQ ID NO: 10040
  REGION 1..566: note = hemagglutinin__InfluenzaA__AHV83848

SEQ ID NO: 11971 - protein, 566 aa, synthetic construct; identical to SEQ ID NO: 11893
  REGION 1..566: note = hemagglutinin__InfluenzaA__AHV83849

SEQ ID NO: 11972 - protein, 566 aa, synthetic construct
  REGION 1..566: note = hemagglutinin__InfluenzaA__AHV83850
MKAILVVLLYTFATTNADTLCIGYHANNSTDTVDTVLEKNVTVTHSVNLLEDKHNGKLCKLRGVAPLHLGKCNIAGWILGNPECESLSKASSWSYIVETSSSDNGTCYPGDFINYEELREQLSSVSSFERFEIFPKTSSWPNHDSNKGVTAACPHAGAKSFYKNLIWLVKKGNSYPKLSQSYINDKGKEVLVLWGIHHPSTTADQQSLYQNADAYVFVGTSRYSKKFKPEIAIRPKVRDQEGRMNYYWTLVEPGDKITFEATGNLVVPRYAFTMERNAGSGIIISDTPVHDCNTTCQTPEGAINTSLPFQNIHPITIGKCPKYVKSTKLRLATGLRNVPSIQSRGLFGAIAGFIEGGWTGMVDGWYGYHHQNEQGSGYAADLKSTQNAIDKITNKVNSVIEKMNTQFTAVGKEFNHLEKRIENLNKKVDDGFLDIWTYNAELLVLLENERTLDYHDSNVKNLYEKVRNQLKNNAKEIGNGCFEFYHKCDNTCMESVKNGTYDYPKYSEEAKLNREKIDGVKLESTRIYQILAIYSTVASSLVLVVSLGAISFWMCSNGSLQCRICI

SEQ ID NO: 11973 - protein, 566 aa, synthetic construct; identical to SEQ ID NO: 10040
  REGION 1..566: note = hemagglutinin__InfluenzaA__AHV83851

SEQ ID NO: 11974 - protein, 566 aa, synthetic construct; identical to SEQ ID NO: 10040
  REGION 1..566: note = hemagglutinin__InfluenzaA__AHV83852

SEQ ID NO: 11975 - protein, 566 aa, synthetic construct
  REGION 1..566: note = hemagglutinin__InfluenzaA__AHV83853
MKAILVVLLYTFATANADTLCIGYHANNSTDTVDTVLEKNVTVTHSVNLLEDKHNGKLCKLRGVAPLHLGKCNIAGWILGNPECETLSTASSWSYIVETSSSDNGTCYPGDFIDYEELREQLSSVSSFERFEIFPKTSSWPNHDSNKGVTAACPHAGAKGFYKNLIWLVKKGNSYPKLSKSYINDKGKEVLVLWGIHHPSTTADQQSLYQNADTYVFVGTSRYSKKFKPEIAIRPKVRDQEGRMNYYWTLVEPGDKITFEATGNLVVPRYAFAMERDAGSGIIISDTPVHDCNTTCQTPKGAINTSLPFQNIHPITIGKCPKYVKSTKLRLATGLRNVPSIQSRGLFGAIAGFIEGGWTGMVDGWYGYHHQNEQGSGYAADLKSTQNAIDKITNKVNSVIEKMNTQFTAVGKEFNHLEKRIENLNKKVDDGFLDIWTYNAELLVLLENERTLDYHDSNVKNLYEKVRTQLKNNAKEIGNGCFEFYHKCDNTCMESVKNGTYDYPKYSEEAKLNREEIDGVKLESTRIYQILAIYSTAASSLVLVVSLGAISFWMCSNGSLQCRICI

SEQ ID NO: 11976 - protein, 566 aa, synthetic construct; identical to SEQ ID NO: 11902
  REGION 1..566: note = hemagglutinin__InfluenzaA__AHV83855

SEQ ID NO: 11977 - protein, 566 aa, synthetic construct
  REGION 1..566: note = hemagglutinin__InfluenzaA__AHV83856
MKAILVVLLYTFATANADTLCIGYHANNSTDTVDTVLEKNVTVTHSVNLLEDKHNGKLCKLRGVAPLHLGKCNIAGWILGNPECESLSTASSWSYIVETSSSDNGTCYPGDFINYEELREQLSSVSSFERFEIFPKTSSWPNHDSNKGVTAACPHAGAKSFYKNLIWLVKKGNSYPKLSQSYINDKGKEVLVLWGIHHPSTTADQQSLYQNADAYVFVGTSRYSKKFKPEIAIRPKVRDQEGRMNYYWTLVEPGDKITFEATGNLVVPRYAFTMERNAGSGIIISDTPVHDCNTTCQTPEGAINTSLPFQNIHPITIGKCPKYVKSTKLRLATGLRNVPSIQSRGLFGAIAGFIEGGWTGMVDGWYGYHHQNEQGSGYAADLKSTQNAIDKITNKVNSVIEKMNTQFTAVGKEFNHLEKRIENLNKKVDDGFLDIWTYNAELLVLLENERTLDYHDSNVKNLYEKVRNQLKNNAKEIGNGCFEFYHKCDNTCMEIVKNGTYDYPKYSEEAKLNREKIDGVKLESTRIYQILAIYSTVASSLVLVVSLGAISFWMCSNGSLQCRICI

SEQ ID NO: 11978 - protein, 566 aa, synthetic construct; identical to SEQ ID NO: 11902
  REGION 1..566: note = hemagglutinin__InfluenzaA__AHV83857

SEQ ID NO: 11979 - protein, 566 aa, synthetic construct
  REGION 1..566: note = hemagglutinin__InfluenzaA__AHV83858
MKAILVVLLYTFATANTDTLCIGYHANNSTDTVDTVLEKNVTVTHSVNLLEDKHNGKLCKLRGVAPLHLGKCNIAGWILGNPECESLSTASSWSYIVETSSSDNGTCYPGDFINYEELREQLSSVSSFERFEIFPKTSSWPNHDSNKGVTAACPHAGAKSFYKNLIWLVKKGNSYPKLSQSYINDKGKEVLVLWGIHHPSTTADQQSLYQNADAYVFVGTSRYSKKFKPEIAIRPKVRDQEGRMNYYWTLVEPGDKITFEATGNLVVPRYAFTMERNAGSGIIISDTPVHDCNTTCQTPEGAINTSLPFQNIHPITIGKCPKYVKSTKLRLATGLRNVPSIQSRGLFGAIAGFIEGGWTGMVDGWYGYHHQNEQGSGYAADQKSTQNAIDKITNKVNSVIEKMNTQFTAVGKEFNHLEKRIENLNKKVDDGFLDIWTYNAELLVLLENERTLDYHDSNVKNLYEKVRNQLKNNAKEIGNGCFEFYHKCDNTCMESVKNGTYDYPKYSEEAKLNREKIDGVKLESTRIYQILAIYSTVASSLVLVVSLGAISFWMCSNGSLQCRICI

SEQ ID NO: 11980 - protein, 566 aa, synthetic construct; identical to SEQ ID NO: 10040
  REGION 1..566: note = hemagglutinin__InfluenzaA__AHV83859

SEQ ID NO: 11981 - protein, 566 aa, synthetic construct
  REGION 1..566: note = hemagglutinin__InfluenzaA__AHV83861
MKAILVVLLYTFTTANADTLCIGYHANNSTDTVDTVLEKNVTVTHSVNLLEDKHNGKLCKLRGVAPLHLGKCNIAGWILGNPECESLSTASSWSYIVETSSSDNGTCYPGDFINYEELREQLSSVSSFERFEIFPKTSSWPNHDSNKGVTAACPHAGAKSFYKNLIWLVKKGNSYPKLSQSYINDKGKEVLVLWGIHHPSTTADQQSLYQNADAYVFVGTSRYSKKFKPEIAIRPKVRDQEGRMNYYWTLVEPGDKITFEATGNLVVPRYAFTMERNAGSGIIISDTPVHDCNTTCQTPEGAINTSLPFQNIHPITIGKCPKYVKSTKLRLATGLRNVPSIQSRGLFGAIAGFIEGGWTGMVDGWYGYHHQNEQGSGYAADLKSTQNAIDKITNKVNSVIEKMNTQFTAVGKEFNHLEKRIENLNKKVDDGFLDIWTYNAELLVLLENERTLDYHDSNVKNLYEKVRNQLKNNAKEIGNGCFEFYHKCDNTCMESVKNGTYDYPKYSEEAKLNREKIDGVKLESTRIYQILAIYSTVASSLVLVVSLGAISFWMCSNGSLQCRICI

SEQ ID NO: 11982 - protein, 566 aa, synthetic construct; identical to SEQ ID NO: 11981
  REGION 1..566: note = hemagglutinin__InfluenzaA__AHV83862

SEQ ID NO: 11983 - protein, 566 aa, synthetic construct; identical to SEQ ID NO: 10040
  REGION 1..566: note = hemagglutinin__InfluenzaA__AHV83863

SEQ ID NO: 11984 - protein, 566 aa, synthetic construct; identical to SEQ ID NO: 10040
  REGION 1..566: note = hemagglutinin__InfluenzaA__AHV83864

SEQ ID NO: 11985 - protein, 566 aa, synthetic construct
  REGION 1..566: note = hemagglutinin__InfluenzaA__AHV83866
MKAILVVLLYTFATANADTLCIGYHANNSTDTVDTVLEKNVTVTHSVNLLEDKHNGKLCKLRGVAPLHLGKCNIAGWILGNPECESLSTASSWSYIVETSSSDNGTCYPGDFINYEELREQLSSVSSFERFEIFPKTSSWPNHDSNKGVTAACPHAGAKSFYKNLIWLVKKGNSYPKLSQSYINDKGKEVLVLWGIHHPSTTADQQSLYQNADAYVFVGTSRYSKKFKPEIAIRPKVRDQEGRMNYYWTLVEPGDKITFEATGNLVVPRYAFTMERNAGSGIIISDTPIHDCNTTCQTPEGAINTSLPFQNIHPITIGKCPKYVKSTKLRLATGLRNVPSIQSRGLFGAIAGFIEGGWTGMVDGWYGYHHQNEQGSGYAADLKSTQNAIDKITNKVNSVIEKMNTQFTAVGKEFNHLEKRIENLNKKVDDGFLDIWTYNAELLVLLENERTLDYHDSNVKNLYEKVRNQLKNNAKEIGNGCFEFYHKCDDTCMESVKNGTYDYPKYSEEAKLNREKIDGVKLESTRIYQILAIYSTVASSLVLVVSLGAISFWMCSNGSLQCRICI

SEQ ID NO: 11986 - protein, 566 aa, synthetic construct
  REGION 1..566: note = hemagglutinin__InfluenzaA__AHV83867
MKAILVVLLYTFATANADTLCIGYHANNSTDTVDTVLEKNVTVTHSVNLLEDKHNGKLCKLRGVAPLHLGKCNIAGWILGNPECESLSTASSWSYIVETSSSDNGTCYPGDFINYEELREQLSSVSSFERFEIFPKTSSWPNHDSNKGVTAACPHAGAKSFYKNLIWLVKKGNSYPKLSQSYINDKGKEVLVLWGIHHPSTTADQQSLYQNADAYVFVGTSRYSKKFKPEIAIRPKVRDQEGRMNYYWTLVEPGDKITFEATGNLVVPRYAFTMERNAGSGIIISDTPVHDCNTTCQTPEGAINTSLPFQNIHPITIGKCPKYVKSTKLRLATGLRNVPSIQSRGLFGAIAGFIEGGWTGMVDGWYGYHHQNEQGSGYAADLKSTQNAIDKITNKVNSVIEKMNTQFTAVGKEFNHLEKRIENLNKKVDDGFLDIWTYNAELLVLLENERTLDYHDSNVKNLYEKVRNQLKNNAKEIGNGCFEFYHKCDDTCMESVKNGTYDYPKYSEEAKLNREKIDGVKLESTRIYQILAIYSTVASSLVLVVSLGAISFWMCSNGSLQCRICI

SEQ ID NO: 11987 - protein, 566 aa, synthetic construct; identical to SEQ ID NO: 10040
  REGION 1..566: note = hemagglutinin__InfluenzaA__AHV83868

SEQ ID NO: 11988 - protein, 566 aa, synthetic construct
  REGION 1..566: note = hemagglutinin__InfluenzaA__AHV83869
MKAILVVLLYTFATANADTLCIGYHANNSTDTVDTVLEKNVTVTHSVNLLEDKHNGKLCKLRGVAPLHLGKCNIAGWILGNPECESLSTASSWSYIVETSSSDNGTCYPGDFINYEELREQLSSVSSFERFEIFPKTNSWPNHDSNKGVTAACPHAGAKSFYKNLIWLVKKGNSYPKLSQSYINDKGKEVLVLWGIHHPSTTADQQSLYQNADAYVFVGTSRYSKKFKPEIAIRPKVRDQEGRMNYYWTLVEPGDKITFEATGNLVVPRYAFTMERNAGSGIIISDTPVHDCNTTCQTPEGAINTSLPFQNIHPITIGKCPKYVKSTKLRLATGLRNVPSIQSRGLFGAIAGFIEGGWTGMVDGWYGYHHQNEQGSGYAADLKSTQNAIDKITNKVNSVIEKMNTQFTAVGKEFNHLEKRIENLNKKVDDGFLDIWTYNAELLVLLENERTLDYHDSNVKNLYEKVRNQLKNNAKEIGNGCFEFYHKCDNTCMESVKNGTYDYPKYSEEAKLNREKIDGVKLESTRIYQILAIYSTVASSLVLVVSLGAISFWMCSNGSLQCRICI

SEQ ID NO: 11989 - protein, 566 aa, synthetic construct; identical to SEQ ID NO: 10040
  REGION 1..566: note = hemagglutinin__InfluenzaA__AHV83870

SEQ ID NO: 11990 - protein, 566 aa, synthetic construct; identical to SEQ ID NO: 10040
  REGION 1..566: note = hemagglutinin__InfluenzaA__AHV83871

SEQ ID NO: 11991 - protein, 566 aa, synthetic construct; identical to SEQ ID NO: 10040
  REGION 1..566: note = hemagglutinin__InfluenzaA__AHV83872

SEQ ID NO: 11992 - protein, 566 aa, synthetic construct
  REGION 1..566: note = hemagglutinin__InfluenzaA__AHV83873
MKAILVVLLYTFATTNADTLCIGYHANNSTDTVDTVLEKNVTVTHSVNLLEDKHNGKLCKLRGVAPLHLGKCNIAGWILGNPECESLSTASSWSYIVETSSSDNGTCYPGDFINYEELREQLSSVSSFERFEIFPKTSSWPNHDSNKGVTAACPHAGAKSFYKNLIWLVKKGNSYPKLSQSYINDKGKEVLVLWGIHHPSTVADQQSLYQNADAYVFVGTSRYSKKFKPEIAIRPKVRDQEGRMNYYWTLVEPGDKITFEATGNLVVPRYAFTMERNAGSGIIISDTPVHDCNTTCQTPEGAINTSLPFQNIHPITIGKCPKYVKSTKLRLATGLRNVPSIQSRGLFGAIAGFIEGGWTGMVDGWYGYHHQNEQGSGYAADLKSTQNAIDKITNKVNSVIEKMNTQFTAVGKEFNHLEKRIENLNKKVDDGFLDIWTYNAELLVLLENERTLDYHDSNVKNLYEKVRNQLKNNAKEIGNGCFEFYHKCDNTCMESVKNGTYDYPKYSEEAKLNREKIDGVKLESTRIYQILAIYSTVASSLVLVVSLGAISFWMCSNGSLQCRICI

SEQ ID NO: 11993 - protein, 566 aa, synthetic construct; identical to SEQ ID NO: 10040
  REGION 1..566: note = hemagglutinin__InfluenzaA__AHV83874

SEQ ID NO: 11994 - protein, 566 aa, synthetic construct; identical to SEQ ID NO: 10040
  REGION 1..566: note = hemagglutinin__InfluenzaA__AHV83875

SEQ ID NO: 11995 - protein, 566 aa, synthetic construct; identical to SEQ ID NO: 10040
  REGION 1..566: note = hemagglutinin__InfluenzaA__AHV83876

SEQ ID NO: 11996 - protein, 566 aa, synthetic construct
  REGION 1..566: note = hemagglutinin__InfluenzaA__AHV83877
MKAILVVLLYTFATANADTLCIGYHANNSTDTVDTVLEKNVTVTHSVNLLEDKHNGKLCKLRGVAPLHLGKCNIAGWILGNPECESLSTASSWSYIVETSSSDNGTCYPGDFINYEELREQLSSVSSFKRFEIFPKTSSWPNHDSNKGVTAACPHAGAKSFYKNLIWLVKKGNSYPKLSQSYINDKGKEVLVLWGIHHPSTTADQQSLYQNADAYVFVGTSRYSKKFKPEIAIRPKVRDQEGRMNYYWTLVEPGDKITFEATGNLVVPRYAFTMERNAGSGIIISDTPVHDCNTTCQTPEGAINTSLPFQNIHPITIGKCPKYVKSTKLRLATGLRNVPSIQSRGLFGAIAGFIEGGWTGMVDGWYGYHHQNEQGSGYAADLKSTQNAIDKITNKVNSVIEKMNTQFTAVGKEFNHLEKRIENLNKKVDDGFLDIWTYNAELLVLLENERTLDYHDSNVKNLYEKVRNQLKNNAKEIGNGCFEFYHKCDNTCMESVKNGTYDYPKYSEEAKLNREKIDGVKLESTRIYQILAIYSTVASSLVLVVSLGAISFWMCSNGSLQCRICI

SEQ ID NO: 11997 - protein, 566 aa, synthetic construct; identical to SEQ ID NO: 11907
  REGION 1..566: note = hemagglutinin__InfluenzaA__AHV83878

SEQ ID NO: 11998 - protein, 566 aa, synthetic construct; identical to SEQ ID NO: 11907
  REGION 1..566: note = hemagglutinin__InfluenzaA__AHV83879

SEQ ID NO: 11999 - protein, 566 aa, synthetic construct
  REGION 1..566: note = hemagglutinin__InfluenzaA__AHV83881
MKATLVVLLYTFATANADTLCIGYHANNSTDTVDTVLEKNVTVTHSVNLLEDKHNGKLCKLRGVAPLHLGKCNIAGWILGNPECESLSTASSWSYIVETSSSDNGTCYPGDFINYEELREQLSSVSSFERFEIFPKTSSWPNHDSNKGVTAACPHAGAKSFYKNLIWLVKKGNSYPKLSQSYINDKGKEVLVLWGIHHPSTTADQQSLYQNADAYVFVGTSRYSKKFKPEIAIRPKVRDQEGRMNYYWTLVEPGDKITFEATGNLVVPRYAFTMERNAGSGIIISDTPVHDCNTTCQTPEGAINTSLPFQNIHPITIGKCPKYVKSTKLRLATGLRNVPSIQSRGLFGAIAGFIEGGWTGMVDGWYGYHHQNEQGSGYAADLKSTQNAIDKITNKVNSVIEKMNTQFTAVGKEFNHLEKRIENLNKKVDDGFLDIWTYNAELLVLLENERTLDYHDSNVKNLYEKVRNQLKNNAKEIGNGCFEFYHKCDNTCMESVKNGTYDYPKYSEEAKLNREKIDGVKLESTRIYQILAIYSTVASSLVLVVSLGAISFWMCSNGSLQCRICI

SEQ ID NO: 12000 - protein, 566 aa, synthetic construct; identical to SEQ ID NO: 11021
  REGION 1..566: note = hemagglutinin__InfluenzaA__AHV83882

SEQ ID NO: 12001 - protein, 566 aa, synthetic construct; identical to SEQ ID NO: 11003
  REGION 1..566: note = hemagglutinin__InfluenzaA__AHV83883

SEQ ID NO: 12002 - protein, 566 aa, synthetic construct; identical to SEQ ID NO: 10040
  REGION 1..566: note = hemagglutinin__InfluenzaA__AHV83884

SEQ ID NO: 12003 - protein, 566 aa, synthetic construct
  REGION 1..566: note = hemagglutinin__InfluenzaA__AHV83885
MKAILVVLLYTFATANADTLCIGYHANNSTDTVDTVLEKNVTVTHSVNLLEDKHNGKLCKLRGVAPLHLGKCNIAGWILGNPECESLSTASSWSYIVETSSSDNGTCYPGDFINYEELREQLSSVSSFERFEIFPKTSSWPNHDSNKGVTAACPHAGAKSFYKNLIWLVKKGNSYPKLSQSYINDKGKEVLVLWGIHHPSTTADQQSLYQNADAYVFVGTSRYSKKFKPEIAIRPKVRDQEGRMNYYWTLVEPGDKITFEATGNLVVPRYAFTMERNAGSGIIISDTPVYDCNTTCQTPEGAINTSLPFQNIHPITIGKCPKYVKSTKLRLATGLRNVPSIQSRGLFGAIAGFIEGGWTGMVDGWYGYHHQNEQGSGYAADLKSTQNAIDKITNKVNSVIEKMNTQFTAVGKEFNHLEKRIENLNKKVDDGFLDIWTYNAELLVLLENERTLDYHDSNVKNLYEKVRNQLKNNAKEIGNGCFEFYHKCDNTCMESVKNGTYDYPKYSEEAKLNREKIDGVKLESTRIYQILAIYSTVASSLVLVVSLGAISFWMCSNGSLQCRICI

SEQ ID NO: 12004 - protein, 566 aa, synthetic construct; identical to SEQ ID NO: 11920
  REGION 1..566: note = hemagglutinin__InfluenzaA__AHV83887

SEQ ID NO: 12005 - protein, 566 aa, synthetic construct; identical to SEQ ID NO: 10040
  REGION 1..566: note = hemagglutinin__InfluenzaA__AHV83888

SEQ ID NO: 12006 - protein, 566 aa, synthetic construct
  REGION 1..566: note = hemagglutinin__InfluenzaA__AHV83889
MKAILVVLLHTLATANADTLCIGYHANNSTDTVDTVLEKNVTVTHSVNLLEDKHNGKLCKLRGVAPLHLGKCNIAGWILGNPECESLSTASSWSYIVETSSSDNGTCYPGDFINYEELREQLSSVSSFERFEIFPKTSSWPNHDSNKGVTAACPHAGAKSFYKNLIWLVKKGNSYPKLSQSYINDKGKEVLVLWGIHHPSTTADQQSLYQNADAYVFVGTSRYSKKFKPEIAIRPKVRDQEGRMNYYWTLVEPGDKITFEATGNLVVPRYAFTMERNAGSGIIISDTPVHDCNTTCQTPEGAINTSLPFQNIHPITIGKCPKYVKSTKLRLATGLRNVPSIQSRGLFGAIAGFIEGGWTGMVDGWYGYHHQNEQGSGYAADLKSTQNAIDKITNKVNSVIEKMNTQFTAVGKEFNHLEKRIENLNKKVDDGFLDIWTYNAELLVLLENERTLDYHDSNVKNLYEKVRNQLKNNAKEIGNGCFEFYHKCDNTCMESVKNGTYDYPKYSEEAKLNREKIDGVKLESTRIYQILAIYSTVASSLVLVVSLGAISFWMCSNGSLQCRICI

SEQ ID NO: 12007 - protein, 566 aa, synthetic construct; identical to SEQ ID NO: 10040
  REGION 1..566: note = hemagglutinin__InfluenzaA__AHV83890

SEQ ID NO: 12008 - protein, 566 aa, synthetic construct; identical to SEQ ID NO: 10040
  REGION 1..566: note = hemagglutinin__InfluenzaA__AHV83891

SEQ ID NO: 12009 - protein, 566 aa, synthetic construct; identical to SEQ ID NO: 10040
  REGION 1..566: note = hemagglutinin__InfluenzaA__AHV83893

SEQ ID NO: 12010 - protein, 566 aa, synthetic construct; identical to SEQ ID NO: 10040
  REGION 1..566: note = hemagglutinin__InfluenzaA__AHV83894

SEQ ID NO: 12011 - protein, 566 aa, synthetic construct
  REGION 1..566: note = hemagglutinin__InfluenzaA__AHV83895
MKAILVVLLYTFATANADTLCIGYHANNSTDTVDTVLEKNVTVTHSVNLLEDKHNGKLCKLRGVAPLHLGKCNIAGWILGNPECESLSTASSWSYIVETSSSDNGTCYPGDFINYEELREQLSSVSSFERFEIFPKTSSWPNHDSNKGVTAACPHAGAKSFYKNLIWLVKKGNSYPKLSQSYINDKGKEVLVLWGIHHPSTTADQQSLYQNADAYVFVGTSRYSKKFKPEIAIRPKVRDQEGRMNYYWTLVEPGDKITFEATGNLVVPRYAFTMERNAGSGIIISDTPVHDCNTTCQTPEGAINTSLPFQNIHPITIGKCPKYVKSTKLRLATGLRNVPSIQSRGLFGAIAGFIEGGWTGMVDGWYGYHHQNEQGSGYAADLKSTQNAIDKITNKVNSVIEKMNTQFTAVGKEFNHLEKRIENLNKKVDDGFLDIWTYNAELLVLLENERTLDYHDSNVKNLYEKVRNQLKNNAKEIGNGCFEFYHKCDNTCMESVKNGTYDYPKYSEETKLNREKIDGVKLESTRIYQILAIYSTVASSLVLVVSLGAISFWMCSNGSLQCRICI

SEQ ID NO: 12012 - protein, 566 aa, synthetic construct; identical to SEQ ID NO: 10040
  REGION 1..566: note = hemagglutinin__InfluenzaA__AHV83896

SEQ ID NO: 12013 - protein, 566 aa, synthetic construct; identical to SEQ ID NO: 10040
  REGION 1..566: note = hemagglutinin__InfluenzaA__AHV83897

SEQ ID NO: 12014 - protein, 566 aa, synthetic construct
  REGION 1..566: note = hemagglutinin__InfluenzaA__AHV83898
MKAILVVLLYTFATANADTLCIGYHANNSTDTVDTVLEKNVTVTHSVNLLEDKHNGKLCKLRGVAPLHLGKCNIAGWILGNPECESLSTASSWSYIVETSSSDNGTCYPGDFINYEELREQLSSVSSFERFEIFPKTSSWPNHDSNKGVTAACPHAGAKSFYKNLIWLVKKGNSYPKLSQSYINDKGKEVLVLWGIHHPSTTADQQSLYQNADAYVFVGTSRYSKKFKPEIAIRPKVRDQEGRMNYYWTLVEPGDKITFEATGNLVVPRYAFTMERNAGSGIIISDTPVHDCNTTCQTPEGAINTSLPFQNIHPITIGKCPKYVKSTKLRLVTGLRNVPSIQSRGLFGAIAGFIEGGWTGMVDGWYGYHHQNEQGSGYAADLKSTQNAIDKITNKVNSVIEKMNTQFTAVGKEFNHLEKRIENLNKKVDDGFLDIWTYNAELLVLLENERTLDYHDSNVKNLYEKVRNQLKNNAKEIGNGCFEFYHKCDNTCMESVKNGTYDYPKYSEEAKLNREKIDGVKLESTRIYQILAIYSTVASSLVLVVSLGAISFWMCSNGSLQCRICI

SEQ ID NO: 12015 - protein, 566 aa, synthetic construct; identical to SEQ ID NO: 10040
  REGION 1..566: note = hemagglutinin__InfluenzaA__AHV83899

SEQ ID NO: 12016 - protein, 566 aa, synthetic construct; identical to SEQ ID NO: 10040
  REGION 1..566: note = hemagglutinin__InfluenzaA__AHV83900

SEQ ID NO: 12017 - protein, 566 aa, synthetic construct; identical to SEQ ID NO: 10040
  REGION 1..566: note = hemagglutinin__InfluenzaA__AHV83901

SEQ ID NO: 12018 - protein, 566 aa, synthetic construct; identical to SEQ ID NO: 10040
  REGION 1..566: note = hemagglutinin__InfluenzaA__AHV83902

SEQ ID NO: 12019 - protein, 566 aa, synthetic construct; identical to SEQ ID NO: 10040
  REGION 1..566: note = hemagglutinin__InfluenzaA__AHV83903

SEQ ID NO: 12020 - protein, 566 aa, synthetic construct; identical to SEQ ID NO: 10040
  REGION 1..566: note = hemagglutinin__InfluenzaA__AHV83904

SEQ ID NO: 12021 - protein, 566 aa, synthetic construct
  REGION 1..566: note = hemagglutinin__InfluenzaA__AHV83905
MKAILVVLLYTLTTANADTLCIGYHANNSTDTVDTVLEKNVTVTHSVNLLEDKHNGKLCKLRGVAPLHLGKCNIAGWILGNPECESLSTASSWSYIVETSSSDNGTCYPGDFINYEELREQLSSVSSFERFEIFPKTSSWPNHDSNKGVTAACPHAGAKSFYKNLIWLVKKGNSYPKLSQSYINDKGKEVLVLWGIHHPSTTADQQSLYQNADAYVFVGTSRYSKKFKPEIAIRPKVRDQEGRMNYYWTLVEPGDKITFEATGNLVVPRYAFTMERNAGSGIIISDTPVHDCNTTCQTPEGAINTSLPFQNIHPITIGKCPKYVKSTKLRLATGLRNVPSIQSRGLFGAIAGFIEGGWTGMVDGWYGYHHQNEQGSGYAADLKSTQNAIDKITNKVNSVIEKMNTQFTAVGKEFNHLEKRIENLNKKVDDGFLDIWTYNAELLVLLENERTLDYHDSNVKNLYEKVRNQLKNNAKEIGNGCFEFYHKCDNTCMESVKNGTYDYPKYSEEAKLNREKIDGVKLESTRIYQILAIYSTVASSLVLVVSLGAISFWMCSNGSLQCRICI

SEQ ID NO: 12022 - protein, 566 aa, synthetic construct; identical to SEQ ID NO: 10040
  REGION 1..566: note = hemagglutinin__InfluenzaA__AHV83906

SEQ ID NO: 12023 - protein, 566 aa, synthetic construct; identical to SEQ ID NO: 10040
  REGION 1..566: note = hemagglutinin__InfluenzaA__AHV83907

SEQ ID NO: 12024 - protein, 566 aa, synthetic construct
  REGION 1..566: note = hemagglutinin__InfluenzaA__AHV83908
MKAILVVLLYTFATANADTLCIGYHANNSTDTVDTVLEKNVTVTHSVNLLEDKHNGKLCKLRGVAPLHLGKCNIAGWILGNPECEPLSTASSWSYIVETSSSDNGTCYPGDFINYEELREQLSSVSSFERFEIFPKTSSWPNHDSNKGVTAACPHAGAKSFYKNLIWLVKKGNSYPKLSQSYINDKGKKVLVLWGIHHPSTTADQQSLYQNADAYVFVGTSRYSKKFKPEIAIRPKVRDQEGRMNYYWTLVEPGDKITFEATGNLVVPRYAFTMERNAGSGIIISDTPVHDCNTTCQTPEGAINTSLPFQNIHPITIGKCPKYVKSTKLRLATGLRNVPSIQSRGLFGAIAGFIEGGWTGMVDGWYGYHHQNEQGSGYAADLKSTQNAIDKITNKVNSVIEKMNTQFTAVGKEFNHLEKRIENLNKKVDDGFLDIWTYNAELLVLLENERTLDYHDSNVKNLYEKVRNQLKNNAKEIGNGCFEFYHKCDNTCMESVKNGTYDYPKYSEEAKLNREKIDGVKLESTRIYQILAIYSTVASSLVLVVSLGAISFWMCSNGSLQCRICI

SEQ ID NO: 12025 - protein, 566 aa, synthetic construct
  REGION 1..566: note = hemagglutinin__InfluenzaA__AHV83911
MKAILVVLLYTFATANADTLCIGYHANNSTDTVDTVLEKNVTVTHSVNLLEDKHNGKLCKLRGVAPLHLGKCNIAGWILGNPECEPLSTASSWSYIVETSSSDNGTCYPGDFINYEELREQLSSVSSFERFEIFPKTSSWPNHDSNKGVTAACPHAGAKSFYKNLIWLVKKGNSYPKLSQSYINDKGKEVLVLWGIHHPSTTADQQSLYQNADAYVFVGTSRYSKKFKPEIAIRPKVRDQEGRMNYYWTLVEPGDKITFEATGNLVVPRYAFTMERNAGSGIIISDTPVHDCNTTCQTPEGAINTSLPFQNIHPITIGKCPKYVKSTKLRLATGLRNVPSIQSRGLFGAIAGFIEGGWTGMVDGWYGYHHQNEQGSGYAADLKSTQNAIDKITNKVNSVIEKMNTQFTAVGKEFNHLEKRIENLNKKVDDGFLDIWTYNAELLVLLENERTLDYHDSNVKNLYEKVRNQLKNNAKEIGNGCFEFYHKCDNTCMESVKNGTYDYPKYSEEAKLNREKIDGVKLESTRIYQILAIYSTVASSLVLVVSLGAISFWMCSNGSLQCRICI

SEQ ID NO: 12026 - protein, 566 aa, synthetic construct; identical to SEQ ID NO: 10040
  REGION 1..566: note = hemagglutinin__InfluenzaA__AHV83912

SEQ ID NO: 12027 - protein, 566 aa, synthetic construct; identical to SEQ ID NO: 10040
  REGION 1..566: note = hemagglutinin__InfluenzaA__AHV83913

SEQ ID NO: 12028 - protein, 566 aa, synthetic construct; identical to SEQ ID NO: 10040
  REGION 1..566: note = hemagglutinin__InfluenzaA__AHV83915

SEQ ID NO: 12029 - protein, 566 aa, synthetic construct; identical to SEQ ID NO: 10040
  REGION 1..566: note = hemagglutinin__InfluenzaA__AHV83916

SEQ ID NO: 12030 - protein, 566 aa, synthetic construct; identical to SEQ ID NO: 12025
  REGION 1..566: note = hemagglutinin__InfluenzaA__AHV83917

SEQ ID NO: 12031 - protein, 566 aa, synthetic construct; identical to SEQ ID NO: 11003
  REGION 1..566: note = hemagglutinin__InfluenzaA__AHV83919

SEQ ID NO: 12032 - protein, 566 aa, synthetic construct; identical to SEQ ID NO: 11920
  REGION 1..566: note = hemagglutinin__InfluenzaA__AHV83920

SEQ ID NO: 12033 - protein, 566 aa, synthetic construct; identical to SEQ ID NO: 11021
  REGION 1..566: note = hemagglutinin__InfluenzaA__AHV83921

SEQ ID NO: 12034 - protein, 566 aa, synthetic construct
  REGION 1..566: note = hemagglutinin__InfluenzaA__AHV83922
MKAILVVLLYTFATANADTLCIGYHANNSTDTVDTVLEKNVTVTHSVNLLEDKHNGKLCKLRGVAPLHLGKCNIAGWILGNPECESLSTASSWSYIVETSSSDNGTCYPGDFINYEELREQLSSVSSFERFEIFPKTSSWPNHDSNKGVTAACPHAGAKSFYKNLIWLVKKGNSYPKLSQSYINDKGKEVLVLWGIHHPSTTADQQSLYQNADAYVFVGTSRYSKKFKPEIAIRPKVRDQEGRMNYYWTLVEPGDKITFEATGNLVVPRYAFTMERNAGSGIIISDTPVHDCNTTCQTPEGAINTSLPFQNIHPITIGKCPKYVKSTKLRLATGLRNVPSIQSRGLFGAIAGFIEGGWTGMVDGWYGYHHQNEQGSGYAADLKSTQNAIDKITNKVNSVIEKMNTQFTAVGKEFSHLEKRIENLNKKVDDGFLDIWTYNAELLVLLENERTLDYHDSNVKNLYEKVRNQLKNNAKEIGNGCFEFYHKCDNTCMESVKNGTYDYPKYSEEAKLNREKIDGVKLESTRIYQILAIYSTVASSLVLVVSLGAISFWMCSNGSLQCRICI

SEQ ID NO: 12035 - protein, 566 aa, synthetic construct; identical to SEQ ID NO: 11936
  REGION 1..566: note = hemagglutinin__InfluenzaA__AHV83923

SEQ ID NO: 12036 - protein, 566 aa, synthetic construct; identical to SEQ ID NO: 11920
  REGION 1..566: note = hemagglutinin__InfluenzaA__AHV83924

SEQ ID NO: 12037 - protein, 566 aa, synthetic construct; identical to SEQ ID NO: 11936
  REGION 1..566: note = hemagglutinin__InfluenzaA__AHV83925

SEQ ID NO: 12038 - protein, 566 aa, synthetic construct; identical to SEQ ID NO: 11920
  REGION 1..566: note = hemagglutinin__InfluenzaA__AHV83926

SEQ ID NO: 12039 - protein, 566 aa, synthetic construct; identical to SEQ ID NO: 12025
  REGION 1..566: note = hemagglutinin__InfluenzaA__AHV83927

SEQ ID NO: 12040 - protein, 566 aa, synthetic construct
  REGION 1..566: note = hemagglutinin__InfluenzaA__AHV83928
MKAILVVLLYTFTTANADTLCIGYHANNSTDTVDTVLEKNVTVTHSVNLLEDKHNGKLCKLRGVAPLHLGKCNIAGWILGNPECESLSTASSWSYIVETSSSDNGTCYPGDFINYEELREQLSSVSSFERFEIFPKTSSWPNHDSNKGVTAACPHAGAKSFYKNLIWLVKKGNSYPKLSQSYINDKGKEVLVLWGIHHPSTTADQQSLYQNADAYVFVGTSRYSKKFKPEIAIRPKVRDQEGRMNYYWTLVEPGDKITFEATGNLVVPRYAFTMERNAGSGIIISDTPVHDCNTTCQTPEGAINTSLPFQNIHPITIGKCPKYVKSTKLRLATGLRNVPSIQSRGLFGAIAGFIEGGWTGMVDGWYGYHHQNEQGSGYAADQKSTQNAIDKITNKVNSVIEKMNTQFTAVGKEFNHLEKRIENLNKKVDDGFLDIWTYNAELLVLLENERTLDYHDSNVKNLYEKVRNQLKNNAKEIGNGCFEFYHKCDNTCMESVKNGTYDYPKYSEEAKLNREKIDGVKLESTRIYQILAIYSTVASSLVLVVSLGAISFWMCSNGSLQCRICI

SEQ ID NO: 12041 - protein, 566 aa, synthetic construct; identical to SEQ ID NO: 11920
  REGION 1..566: note = hemagglutinin__InfluenzaA__AHV83929

SEQ ID NO: 12042 - protein, 566 aa, synthetic construct
  REGION 1..566: note = hemagglutinin__InfluenzaA__AHV83930
MKAILVILLYTFATANADTLCIGYHANNSTDTVDTVLEKNVTVTHSVNLLEDKHNGKLCKLRGVAPLHLGKCNIAGWILGNPECESLSTASSWSYIVETSSSDNGTCYPGDFINYEELREQLSSVSSFERFEIFPKTSSWPNHDSNKGVTAACPHAGAKSFYKNLIWLVKKGNSYPKLSQSYINDKGKEVLVLWGIHHPSTTADQQSLYQNADAYVFVGTSRYSKKFKPEIAIRPKVRDQEGRMNYYWTLVEPGDKITFEATGNLVVPRYAFTMERNAGSGIIISDTPVHDCNTTCQTPEGAINTSLPFQNIHPITIGKCPKYVKSTKLRLATGLRNVPSIQSRGLFGAIAGFIEGGWTGMVDGWYGYHHQNEQGSGYAADLKSTQNAIDKITNKVNSVIEKMNTQFTAVGKEFNHLEKRIENLNKKVDDGFLDIWTYNAELLVLLENERTLDYHDSNVKNLYEKVRNQLKNNAKEIGNGCFEFYHKCDNTCMESVKNGTYDYPKYSEEAKLNREKIDGVKLESTRIYQILAIYSTVASSLVLVVSLGAISFWMCSNGSLQCRICI

SEQ ID NO: 12043 - protein, 566 aa, synthetic construct; identical to SEQ ID NO: 11920
  REGION 1..566: note = hemagglutinin__InfluenzaA__AHV83931

SEQ ID NO: 12044 - protein, 566 aa, synthetic construct; identical to SEQ ID NO: 10040
  REGION 1..566: note = hemagglutinin__InfluenzaA__AHV83932

SEQ ID NO: 12045 - protein, 566 aa, synthetic construct
  REGION 1..566: note = hemagglutinin__InfluenzaA__AHV83933
MKAILVVLLYTFATANADTLCIGYHANNSTDTVDTVLEKNVTVTHSVNLLEDKHNGKLCKLRGVTPLHLGKCNIAGWILGNPECESLSTASSWSYIVETSSSDNGTCYPGDFINYEELREQLSSVSSFERFEIFPKTSSWPNHDSNKGVTAACPHAGAKSFYKNLIWLVKKGNSYPKLSQSYINDKGKEVLVLWGIHHPSTTADQQSLYQNADAYVFVGTSRYSKKFKPEIAIRPKVRDQEGRMNYYWTLVEPGDKITFEATGNLVVPRYAFTMERNAGSGIIISDTPVHDCNTTCQTPEGAINTSLPFQNIHPITIGKCPKYVKSTKLRLATGLRNVPSIQSRGLFGAIAGFIEGGWTGMVDGWYGYHHQNEQGSGYAADQKSTQNAIDKITNKVNSVIEKMNTQFTAVGKEFNHLEKRIENLNKKVDDGFLDIWTYNAELLVLLENERTLDYHDSNVKNLYEKVRNQLKNNAKEIGNGCFEFYHKCDNTCMESVKNGTYDYPKYSEEAKLNREKIDGVKLESTRIYQILALYSTVASSLVLVVSLGAISFWMCSNGSLQCRICI

SEQ ID NO: 12046 - protein, 566 aa, synthetic construct; identical to SEQ ID NO: 11003
  REGION 1..566: note = hemagglutinin__InfluenzaA__AHV83934

SEQ ID NO: 12047 - protein, 566 aa, synthetic construct; identical to SEQ ID NO: 10040
  REGION 1..566: note = hemagglutinin__InfluenzaA__AHV83935

SEQ ID NO: 12048 - protein, 566 aa, synthetic construct; identical to SEQ ID NO: 10040
  REGION 1..566: note = hemagglutinin__InfluenzaA__AHV83937

SEQ ID NO: 12049 - protein, 566 aa, synthetic construct
  REGION 1..566: note = hemagglutinin__InfluenzaA__AHV83938
MKAILVVLLYTFATANADTLCIGYHANNSTDTVDTVLEKNVTVTHSVNLLEDKHNGKLCKLRGVAPLHLGKCNIAGWILGNPECESLSTASSWSYIVETSSSDNGTCYPGDFINYEELREQLSSVSSFERFEIFPKTSSWPNHDSNKGVTAACPHAGAKSFYKNLIWLVKKGNSYPKISQSYINDKGKEVLVLWGIHHPSTTADQQSLYQNADAYVFVGTSRYSKKFKPEIAIRPKVRDQEGRMNYYWTLVEPGDKITFEATGNLVVPRYAFTMERNAGSGIIISDTPVHDCNTTCQTPEGAINTSLPFQNIHPITIGKCPKYVKSTKLRLATGLRNVPSIQSRGLFGAIAGFIEGGWTGMVDGWYGYHHQNEQGSGYAADQKSTQNAIDKITNKVNSVIEKMNTQFTAVGKEFNHLEKRIENLNKKVDDGFLDIWTYNAELLVLLENERTLDYHDSNVKNLYEKVRNQLKNNAKEIGNGCFEFYHKCDNTCMESVKNGTYDYPKYSEEAKLNREKIDGVKLESTRIYQILAIYSTVASSLVLVVSLGAISFWMCSNGSLQCRICI

SEQ ID NO: 12050 - protein, 566 aa, synthetic construct; identical to SEQ ID NO: 12049
  REGION 1..566: note = hemagglutinin__InfluenzaA__AHV83939

SEQ ID NO: 12051 - protein, 566 aa, synthetic construct
  REGION 1..566: note = hemagglutinin__InfluenzaA__AHV83940
MKAILVVLLYTFATANADTLCIGYHANNSTDTVDTVLEKNVTVTHSVNLLEDKHNGKLCKLRGVAPLHLGKCNIAGWILGNPECESLSTASSWSYIVETSSSDNGTCYPGDFINYEELREQLSSVSSFERFEIFPKTSSWPNHDSNKGVTAACPHAGAKSFYKNLIWLVKKGNSYPKLSQSYINDKGKEVLVLWGIHHPSTTADQQSLYQNADAYVFVGTSRYSKKFKPEIAIRPKVRDQEGRMNYYWTLVEPGDKITFEATGNLVVPRYAFTMERNAGSGIIISDTPVHDCNTTCQTPEGAINTSLPFQNIHPITIGKCPKYVKSTKLRLATGLRNVPSIQSRGLFGAIAGFIEGGWTGMVDGWYGYHHQNEQGSGYAADQKSTQNAIDKITNKVNSVIEKMNTQFTAVGKEFNHLEKRIENLNKKVDDGFMDIWTYNAELLVLLENERTLDYHDSNVKNLYEKVRNQLKNNAKEIGNGCFEFYHKCDNTCMESVKNGTYDYPKYSEEAKLNREKIDRVKLESTRIYQILAIYSTVASSLVLVVSLGAISFWMCSNGSLQCRICI

SEQ ID NO: 12052 - protein, 566 aa, synthetic construct; identical to SEQ ID NO: 10040
  REGION 1..566: note = hemagglutinin__InfluenzaA__AHV83941

SEQ ID NO: 12053 - protein, 566 aa, synthetic construct
  REGION 1..566: note = hemagglutinin__InfluenzaA__AHV83943
MKAILVVLLYTFATANADTLCIGYHANNSTDTVDTVLEKNVTVTHSVNLLEDKHNGKLCKLRGVAPLHLGKCNIAGWILGNPECESLSTASSWSYIVETSSSDNGTCYPGDFINYEELREQLSSVSSFERFEIFPKTSSWPNHDSNKGVTAACPHAGAKSFYKNLIWLVKKGNSYPKLSQSYINDKGKEVLVLWGIHHPSTTADQQSLYQNADAYVFVGTSRYSKKFKPEIAIRPKVRDQEGRMNYYWTLVEPGDKITFEATGNLVVPRYAFTMERNAGSGIIISDTPVHDCNTTCQTPEGAINTSLPFQNIHPITIGKCPKYVKSTKLRLATGLRNVPSIQSRGLFGAIAGFIEGGWTGMVDGWYGYHHQNEQGSGYAADLKSTQNAIDKITNKVNSVIEKMNTQFTAVGKEFNHLEKRIENLNKKVDDGFLDIWTYNAELLVLLENERTLDYHDSNVKNLYEKVRNQLKNNAKEIGNGCFEFYHKCDNMCMESVKNGTYDYPKYSEEAKLNREKIDGVKLESTRIYQILAIYSTVASSLVLVVSLGAISFWMCSNGSLQCRICI

SEQ ID NO: 12054 - protein, 566 aa, synthetic construct
  REGION 1..566: note = hemagglutinin__InfluenzaA__AHV83944
MKAILVVLLYTFATANADTLCIGYHANNSTDTVDTVLEKNVTVTHSVNLLEDEHNGKLCKLRGVAPLHLGKCNIAGWILGNPECESLSTASSWSYIVETSSSDNGTCYPGDFINYEELREQLSSVSSFERFEIFPKTSSWPNHDSNKGVTAACPHAGAKSFYKNLIWLVKKGNSYPKLSQSYINDKGKEVLVLWGIHHPSTTADQQSLYQNADAYVFVGTSRYSKKFKPEIAIRPKVRDQEGRMNYYWTLVEPGDKITFEATGNLVVPRYAFTMERNAGSGIIISDTPVHDCNTTCQTPEGAINTSLPFQNIHPITIGKCPKYVKSTKLRLATGLRNVPSIQSRGLFGAIAGFIEGGWTGMVDGWYGYHHQNEQGSGYAADLKSTQNAIDKITNKVNSVIEKMNTQFTAVGKEFNHLEKRIENLNKKVDDGFLDIWTYNAELLVLLENERTLDYHDSNVKNLYEKVRNQLKNNAKEIGNGCFEFYHKCDNTCMESVKNGTYDYPKYSEEAKLNREKIDGVKLESTRIYQILAIYSTVASSLVLVVSLGAISFWMCSNGSLQCRICI

SEQ ID NO: 12055 - protein, 566 aa, synthetic construct
  REGION 1..566: note = hemagglutinin__InfluenzaA__AHV83945
MKAILVVLLYTFATANADTLCIGYHANNSTDTVDTVLEKNVTVTHSVNLLEDKHNGKLCKLRGVAPLHLGKCNIAGWILGNPECESLSTASSWSYIVETSSSDNGTCYPGDFINYEELREQLSSVSSFERFEIFPKTSSWPNHDSNKGVTAACPHAGAKSFYKNLIWLVKKGNSYPKLSQSYINDKGKEVLVLWGIHHPSTTTDQQSLYQNADAYVFVGTSRYSKKFKPEIAIRPKVRDQEGRMNYYWTLVEPGDKITFEATGNLVVPRYAFTMERNAGSGIIISDTPVHDCNTTCQTPEGAINTSLPFQNIHPITIGKCPKYVKSTKLRLATGLRNVPSIQSRGLFGAIAGFIEGGWTGMVDGWYGYHHQNEQGSGYAADLKSTQNAIDKITNKVNSVIEKMNTQFTAVGKEFNHLEKRIENLNKKVDDGFLDIWTYNAELLVLLENERTLDYHDSNVKNLYEKVRNQLKNNAKEIGNGCFEFYHKCDNTCMESVKNGTYDYPKYSEEAKLNREKIDGVKLESTRIYQILAIYSTVASSLVLVVSLGAISFWMCSNGSLQCRICI

SEQ ID NO: 12056 - protein, 566 aa, synthetic construct
  REGION 1..566: note = hemagglutinin__InfluenzaA__AHV83947
MKAILVVLLYTFATANADTLCIGYHANNSTDTVDTVLEKNVTVTHSVNLLEDKHNGKLCKLRGVAPLHLGKCNIAGWILGNPECESLSTASSWSYIVETSSSDNGTCYPGDFINYEELREQLSSVSSFERFEIFPKTSSWPNHDSNKGVTAACPHAGAKSFYKNLIWLVKKGNSYPKLSQSYINDKGKEVLVLWGIHHPSTTADQQSLYQNADAYVFVGTSRYSKKFKPEIAIRPKVRDQEGRMNYYWTLVEPGDKITFEATGNLVVPRYAFTVKRNAGSGIIISDTPVHDCNTTCQTPEGAINTSLPFQNIHPITIGKCPKYVKSTKLRLATGLRNVPSIQSRGLFGAIAGFIEGGWTGMVDGWYGYHHQNEQGSGYAADQKSTQNAIDKITNKVNSVIEKMNTQFTAVGKEFNHLEKRIENLNKKVDDGFLDIWTYNAELLVLLENERTLDYHDSNVKNLYEKVRNQLKNNAKEIGNGCFEFYHKCDNTCMESVKNGTYDYPKYSEEAKLNREKIDGVKLESTRIYQILAIYSTVASSLVLVVSLGAISFWMCSNGSLQCRICI

SEQ ID NO: 12057 - protein, 566 aa, synthetic construct; identical to SEQ ID NO: 10040
  REGION 1..566: note = hemagglutinin__InfluenzaA__AHV83948

SEQ ID NO: 12058 - protein, 566 aa, synthetic construct; identical to SEQ ID NO: 10040
  REGION 1..566: note = hemagglutinin__InfluenzaA__AHV83949

SEQ ID NO: 12059 - protein, 566 aa, synthetic construct; identical to SEQ ID NO: 10040
  REGION 1..566: note = hemagglutinin__InfluenzaA__AHV83950

SEQ ID NO: 12060 - protein, 566 aa, synthetic construct
  REGION 1..566: note = hemagglutinin__InfluenzaA__AHV83953
MKTIIALSYILCLVFAQKLPGNDNSTATLCLGHHAVPNGTIVKTITNDRIEVTNATELVQNSSIGEICDSPHQILDGENCTLIDALLGDPQCDGFQNKKWDLFVERSKAYSNCYPYDVPDYASLRSLVASSGTLEFNNESFNWAGVTQNGTSSACIRGSNSSFFSRLNWLTHLNFKYPALNVTMPNNEQFDKLYIWGVHHPGTDKDQIFLYAQSSGRITVSTKRSQQAVIPNIGSRPRIRNIPSRISIYWTIVKPGDILLINSTGNLIAPRGYFKIRSGKSSIMRSDAPIGKCKSECITPNGSIPNDKPFQNVNRITYGACPRYVKQSTLKLATGMRNVPEKQTRGIFGAIAGFIENGWEGMMDGWYGFRHQNSEGRGQAADLKSTQAAIDQINGKLNRLIGKTNEKFHQIEKEFSEVEGRIQDLEKYVEDTKIDLWSYNAELLVALENQHTIDLTDSEMNKLFEKTKKQLRENAEDLGNGCFKIYHKCDNACIGSIRNGTYDHDVYRDEALNNRFQIKGVELKSGYKDWILWISFAISCFLLCVALLGFIMWACQKGNIRCNICI

SEQ ID NO: 12061 - protein, 566 aa, synthetic construct; identical to SEQ ID NO: 11892
  REGION 1..566: note = hemagglutinin__InfluenzaA__AHV83954

SEQ ID NO: 12062 - protein, 566 aa, synthetic construct
  REGION 1..566: note = hemagglutinin__InfluenzaA__AHV83956
MKTIIALSYILCLVFAQKLPGNDNSTATLCLGHHAVPNGTIVKTITNDRIEVTNATELVQNSSIGEICDSPHQILDGENCTLIDALLGDPQCDGFQNKKWDLFVERSKAYSNCYPYDVPDYASLRSLVASSGTLEFNNENFNWAGVTQNGTSSACIRGSNSSFFSRLNWLTHLNFKYPALNVTMPNNEQFDKLYIWGVHHPGTDKDQIFLYAQSSGRITVSTKRSQQAVIPNIGSRPRIRNIPSRISIYWTIVKPGDILLINSTGNLIAPRGYFKIRSGKSSIMRSDAPIGKCKSECITPNGSIPNDKPFQNVNRITYGACPRYVKQSTLKLATGMRNVQEKQTRGIFGAIAGFIENGWEGMKDGWYGFRHQNSEGRGQAADLKSTQAAIDQINGKLNRLIGKTNEKFHQIEKEFSEVEGRIQDLEKYVEDTKIDLWSYNAELLVALENQHTIDLTDSEMNKLFEKTKKQLRENAEDMGNGCFKIYHKCDNACIGSIRNGTYDHDVYRDEALNNRFQIKGVELKSGYKDWILWISFAISCFLLCVALLGFIMWACQKGNIRCNICI

SEQ ID NO: 12063 - protein, 566 aa, synthetic construct
  REGION 1..566: note = hemagglutinin__InfluenzaA__AHZ13523
MKTIIALSYIFCLVFAQKLPGNDNSTATLCLGHHAVPNGTLVKTITNDQIEVTNATELVQSSSTGRICDSPHRILDGKNCTLIDALLGDPHCDGFQNEKWDLFVERSKAFSNCYPYDVPDYASLRSLVASSGTLEFINEGFNWTGVTQSGGSYACKRGSVNSFFSRLNWLYKSESKYPVLNVTMPNNGKFDKLYIWGVHHPSTDKEQTNLYVRASGRVTVSTKRSQQTVIPNIGSRPWVRGLSSRISIYWTIVKPGDILLINSTGNLIAPRGYFKIRTGKSSIMRSDAPIGTCSYECITPNGSIPNDKPFQNVNKITYGACPRYVKQNTLKLATGMRNVPEKQTRGIFGAIAGFIENGWEGMVDGWYGFRHQNSEGTGQAADLKSTQAAIDQINGKLNRLIEKTNEKFHQIEKEFSEVEGRIQDLEKYVEDTKIDLWSYNAELLVALENQHTIDLTDSEMNKLFEKTRKQLRENAEDMGNGCFKIYHKCDNACIGSIRNGTYNHDVYRDEALNNRFQIKGVELKSGYKDWILWISFAISCFLLCVVLLGFIMWACQKGNIRCNICI

SEQ ID NO: 12064 - protein, 565 aa, synthetic construct; identical to SEQ ID NO: 3616
  REGION 1..565: note = hemagglutinin__InfluenzaA__AHZ13582

SEQ ID NO: 12065 - protein, 566 aa, synthetic construct
  REGION 1..566: note = hemagglutinin__InfluenzaA__AHZ35584
MKTIIALSYILCLIFAQEIPGNDNSTATLCLGHHAVPNGTIVKTITNDQIEVTNATELVQSSSTGEICNSPHQILDGENCTLIDALLGDPQCDDFQNKKWDLFVERSKAHSNCYPYDVPDYASLRSLVASSGTLEFNNESFNWTGVTQNGTSSACIRRSNNSFFSRLNWLTHLNFKYPALNVTMPNNEQFDKLYIWGVHHPGTDKDQIFLYAQASGRITVSTKRSQQAVIPNIGSRPRVRNIPSRVSIYWTIVKPGDILLINSTGNLIAPRGYFKIRSGKSSIMRSDAPIGKCNSACITPNGSIPNDKPFQNVNRITYGACPRYVKQNTLKLATGMRNVPEKQTRGIFGAIAGFIENGWEGMVDGWYGFRHQNSEGRGQAADLKSTQAAIDQINGKLNRLIGKTNEKFHQIEKEFSEVEGRIQDLEKYVEDTKIDLWSYNAELLVALENQHTIDLTDSEMNKLFEKTKKQLRENAEDMGNGCFKIYHKCDNACIGSIRNGTYDHDVYRDEALNNRFQIKGVELKSGYKDWILWISFAISCFLLCVALLGFIMWACQKGNIRCNICI

SEQ ID NO: 12066 - protein, 566 aa, synthetic construct
  REGION 1..566: note = hemagglutinin__InfluenzaA__AHZ35608
MKTIIALSYILCLIFAQEIPGNDNSTATLCLGHHAVPNGTIVKTITNDQIEVTNATELVQSSSTGEICNSPHQILDGENCTLIDALLGDPQCDDFQNKEWDLFVERSKAHSNCYPYDVPDYASLRSLVASSGTLEFNNESFNWTGVTQNGTSSACIRRSNNSFFSRLNWLTHLNFKYPALNVTMPNNEQFDKLYIWGVHHPGTDKDQIFLYAQASGRITVSTKRSQQAVIPNIGSRPRVRNIPSRVSIYWTIVKPGDILLINSTGNLIAPRGYFKIRSGKSSIMRSDAPIGKCNSACITPNGSIPNDKPFQNVNRITYGTCPRYVKQNTLKLATGMRNVPEKQTRGIFGAIAGFIENGWEGMVDGWYGFRHQNSEGRGQAADLKSTQAAIDQINGKLNRLIGKTNEKFHQIEKEFSEVEGRIQDLEKYVEDTKIDLWSYNAELLVALENQHTIDLTDSEMNKLFEKTKKQLRENAEDMGNGCFKIYHKCDNACIGSIRNGTYDHDVYRDEALNNRFQIKGVELKSGYKDWILWISFAISCFLLCVALLGFIMWACQKGNIRCNICI

SEQ ID NO: 12067 - protein, 566 aa, synthetic construct; identical to SEQ ID NO: 12065
  REGION 1..566: note = hemagglutinin__InfluenzaA__AHZ35620

SEQ ID NO: 12068 - protein, 566 aa, synthetic construct; identical to SEQ ID NO: 12065
  REGION 1..566: note = hemagglutinin__InfluenzaA__AHZ35632

SEQ ID NO: 12069 - protein, 566 aa, synthetic construct; identical to SEQ ID NO: 12065
  REGION 1..566: note = hemagglutinin__InfluenzaA__AHZ35644

SEQ ID NO: 12070 - protein, 566 aa, synthetic construct; identical to SEQ ID NO: 12065
  REGION 1..566: note = hemagglutinin__InfluenzaA__AHZ35656

SEQ ID NO: 12071 - protein, 566 aa, synthetic construct; identical to SEQ ID NO: 12065
  REGION 1..566: note = hemagglutinin__InfluenzaA__AHZ35668

SEQ ID NO: 12072 - protein, 566 aa, synthetic construct; identical to SEQ ID NO: 12066
  REGION 1..566: note = hemagglutinin__InfluenzaA__AHZ35680

SEQ ID NO: 12073 - protein, 566 aa, synthetic construct; identical to SEQ ID NO: 12065
  REGION 1..566: note = hemagglutinin__InfluenzaA__AHZ35692

SEQ ID NO: 12074 - protein, 566 aa, synthetic construct; identical to SEQ ID NO: 12065
  REGION 1..566: note = hemagglutinin__InfluenzaA__AHZ35716

SEQ ID NO: 12075 - protein, 566 aa, synthetic construct; identical to SEQ ID NO: 12066
  REGION 1..566: note = hemagglutinin__InfluenzaA__AHZ35728

SEQ ID NO: 12076 - protein, 566 aa, synthetic construct; identical to SEQ ID NO: 12065
  REGION 1..566: note = hemagglutinin__InfluenzaA__AHZ35740

SEQ ID NO: 12077 - protein, 566 aa, synthetic construct; identical to SEQ ID NO: 12065
  REGION 1..566: note = hemagglutinin__InfluenzaA__AHZ35752

SEQ ID NO: 12078 - protein, 566 aa, synthetic construct; identical to SEQ ID NO: 12065
  REGION 1..566: note = hemagglutinin__InfluenzaA__AHZ35764

SEQ ID NO: 12079 - protein, 566 aa, synthetic construct; identical to SEQ ID NO: 12065
  REGION 1..566: note = hemagglutinin__InfluenzaA__AHZ35776

SEQ ID NO: 12080 - protein, 566 aa, synthetic construct
  REGION 1..566: note = hemagglutinin__InfluenzaA__AHZ35823
MKAILVVLLYTFAIANADTLCIGYHANNSTDTVDTVLEKNVTVTHSVNLLEDKHNGKLCKLRGVAPLHLGKCNIAGWILGNPECESLSTASSWSYIVETSSSDNGTCYPGDFINYEELREQLSSVSSFERFEMFPKTSSWPNHDSNKGVTAACPHAGAKSFYKNLIWLVKKGNSYPKLSKSYINDKGKEVLVLWGIHHPSTTADQQSLYQNADAYVFVGTSRYSKKFKPEIAIRPKVRDQEGRMNYYWTLVEPGDKITFEATGNLVVPRYAFAMERNAGSGIIISDTPVHDCNTTCQTPKGAINTSLPFQNIHPITIGKCPKYVKSTKLRLATGLRNVPSIQSRGLFGAIAGFIEGGWTGMVDGWYGYHHQNEQGSGYAADLKSTQNAIDKITNKVNSVIEKMNTQFTAVGKEFNHLEKRIENLNKKVDDGFLDIWTYNAELLVLLENERTLDYHDSNVKNLYEKVRNQLKNNAKEIGNGCFEFYHKCDNTCMESVKNGTYDYPKYSEEAKLNREEIDGVKLESTRIYQILAIYSTVASSLVLVVSLGAISFWMCSNGSLQCRICI

SEQ ID NO: 12081 - protein, 566 aa, synthetic construct; identical to SEQ ID NO: 12080
  REGION 1..566: note = hemagglutinin__InfluenzaA__AHZ35834

SEQ ID NO: 12082 - protein, 566 aa, synthetic construct; identical to SEQ ID NO: 12080
  REGION 1..566: note = hemagglutinin__InfluenzaA__AHZ35845

SEQ ID NO: 12083 - protein, 566 aa, synthetic construct; identical to SEQ ID NO: 12080
  REGION 1..566: note = hemagglutinin__InfluenzaA__AHZ35856

SEQ ID NO: 12084 - protein, 566 aa, synthetic construct
  REGION 1..566: note = hemagglutinin__InfluenzaA__AHZ35867
MKTNIALSYILCLVSAQKLPGNDNSTATLCLGHHAVPNGTIVKTITNDQIEVTNATELVQSSSTGEICNSPHQILDGENCTLIDALLGDPQCDGFQNKKWDLFVERSKAHSNCYPYDVPDYASLRSLVASSGTLEFNNESFNWTGVTQNGTSSACIRRSNNSFFSRLNWLTHLNFKYPALNVTMPNNEQFDKLYIWGVHHPGTDKDQIFLYAQAAGRITVSTKRSQQAVIPNIGSRPRVRNIPSRVSIYWTIVKPGDILLINSTGNLIAPRGYFKIRSGKSSIMRSDAPIGKCNSACITPNGSIPNDKPFQNVNRITYGACPRYVKQNTLKLATGMRNVPEKQTRGIFGAIAGFIENGWEGMVDGWYGFRHQNSEGRGQAADLKSTQAAIDQINGKLNRLIGKTNEKFHQIEKEFSEVEGRIQDLEKYVEDTKIDLWSYNAELLVVLENQHTIDLTDSEMNKLFEKTKKQLRENAEDMGNGCFKIYHKCDNACIGSIRNGTYDHDVYRDEALNNRFQIKGVELKSGYKDWILWISFAISCFLLCVALLGFIMWACQKGNIRCNICI

SEQ ID NO: 12085 - protein, 566 aa, synthetic construct
  REGION 1..566: note = hemagglutinin__InfluenzaA__AHZ35879
MKTNIALSYILCLVSAQKLPGNDNSTATLCLGHHAVPNGTIVKTITNDQIEVTNATELVQSSSTGEICNSPHQILDGENCTLIDALLGDPQCDGFQNKKWDLFVERSKAHSNCYPYDVPDYASLRSLVASSGTLEFNNESFNWTGVTQNGTSSACIRRSNNSFFSRLNWLTHLNFKYPALNVTMPNNEQFDKLYIWGVHHPGTDKDQIFLYAQAAGRITVSTKRSQQAVIPNIGSRPRVRNIPSRVSIYWTIVKPGDILLINSTGNLIAPRGYFKIRSGKSSIMRSDAPIGKCNSACITPNGSIPNDKPFQNVNRITYGACPRYVKQNTLKLATGMRNVPEKQTRGIFGAIAGFIENGWEGMVDGWYGFRHQNSEGRGQAADLKSTQAAIDQINGKLNRLIGKTNEKFHQIEKEFSEVEGRIQDLEKYVEDTKIDLWSYNAELLVALENQHTIDLTDSEMNKLFEKTKKQLRENAEDMGNGCFKIYHKCDNACIGSIRNGTYDHDVYRDEALNNRFQIKGVELKSGYKDWILWISFAISCFLLCVALLGFIMWACQKGNIRCNICI

SEQ ID NO: 12086 - protein, 566 aa, synthetic construct; identical to SEQ ID NO: 12080
  REGION 1..566: note = hemagglutinin__InfluenzaA__AHZ35891

SEQ ID NO: 12087 - protein, 566 aa, synthetic construct; identical to SEQ ID NO: 12080
  REGION 1..566: note = hemagglutinin__InfluenzaA__AHZ35902

SEQ ID NO: 12088 - protein, 569 aa, synthetic construct
  REGION 1..569: note = hemagglutinin__InfluenzaA__AHZ35913
MKAILVVLLYTFAIANADTLCIGYHANNSTDTVDTVLEKNVTVTHSVNLLEDKHNGKLCKLRGVAPLHLGKCNIAGWILGNPECESLSTASSWSYIVETSSSDNGTCYPGDFINYEELREQLSSVSSFERFEMFPKTSSWPNHDSNKGVTAACPHAGAKSFYKNLIWLVKKGNSYPKLSKSYINDKGKEVLVLWGIHHPSTTADQQSLYQNADAYVFVGTSRYSKKFKPEIAIRPKVRDQEGRMNYYWTLVEPGDKITFEATGNLVVPRYAFAMERNAGSGIIISDTPVHDCNTTCQTPKGAINTSLTSLPFQNIHPITIGKCPKYVKSTKLRLATGLRNVPSIQSRGLFGAIAGFIEGGWTGMVDGWYGYHHQNEQGSGYAADLKSTQNAIDKITNKVNSVIEKMNTQFTAVGKEFNHLEKRIENLNKKVDDGFLDIWTYNAELLVLLENERTLDYHDSNVKNLYERVRNQLKNNAKEIGNGCFEFYHKCDNTCMESVKNGTYDYPKYSEEAKLNREEIDGVKLESTRIYQILAIYSTVASSLVLVVSLGAISFWMCSNGSLQCRICI

SEQ ID NO: 12089 - protein, 566 aa, synthetic construct
  REGION 1..566: note = hemagglutinin__InfluenzaA__AHZ35924
MKAILVVLLYTFATANADTLCIGYHANNSTDTVDTVLEKNVTVTHSVNLLEDKHNGKLCKLRGVAPLHLGKCNIAGWILGNPECESLSTASSWSYIVETSSSDNGTCYPGDFINYEELREQLSSVSSFERFEIFPKTSSWPNHDSNKGVTAACPQAGAKSFYKNLIWLVKKGNSYPKLSKSYINDKGKEVLVLWGIHHPSTSADQQSLYQNADAYVFVGTSKYSKKFKPEIAVRPKVRDQEGRMNYYWTLVEPGDKITFEATGNLLVPRYAFAMERNAGSGIIISDTPVHDCNTTCQTPKGAINTSLPFQNIHPITIGKCPKYVKSTKLRLATGLRNVPSTQSRGLFGAIAGFIEGGWTGMVDGWYGYHHQNAQGSGYAADLKSTQNAIDKITNKVNSVIEKMNTQFTAVGKEFNHLEKRIENLNKKVDDGFLDIWTYNAELLVLLENERTLDYHDSNVKNLYEKVRSQLKNNAKEIGNGCFEFYHKCDNTCMESVKNGTYDYPKYSEEAKLNREEIDGVKLESTRIYQILAIYSTVASSLVLVVSLGAISFWMCSNGSLQCRICI

SEQ ID NO: 12090 - protein, 566 aa, synthetic construct
  REGION 1..566: note = hemagglutinin__InfluenzaA__AHZ35935
MKAILVVLLYTFAIANADTLCIGYHANNSTDTVDTVLEKNVTVTHSVNLLEDKHNGKLCKLRGVAPLHLGKCNIAGWILGNPECESLSTASSWSYIVETSSSDNGTCYPGDFINYEELREQLSSVSSFERFEMFPKTSSWPNHDSNKGVTAACPHAGAKSFYKNLIWLVKKGNSYPKLSKSYINDKGKEVLVLWGIHHPSTTADQQSLYQNADAYVFVGTSRYSKKFKPEIAIRPKVRDQEGRMNYYWTLVEPGDKITFEATGNLVVPRYAFAMERNAGSGIIISDTPVHDCNTTCQTPKGAINTSLPFQNIHPITIGKCPKYVKSTKLRLATGLRNIPSIQSRGLFGAIAGFIEGGWTGMVDGWYGYHHQNEQGSGYAADLKSTQNAIDKITNKVNSVIEKMNTQFTAVGKEFNHLEKRIENLNKKVDDGFLDIWTYNAELLVLLENERTLDYHDSNVKNLYEKVRNQLKNNAKEIGNGCFEFYHKCDNTCMESVKNGTYDYPKYSEEAKLNREEIDGVKLESTRIYQILAIYSTVASSLVLVVSLGAISFWMCSNGSLQCRICI

SEQ ID NO: 12091 - protein, 566 aa, synthetic construct; identical to SEQ ID NO: 12085
  REGION 1..566: note = hemagglutinin__InfluenzaA__AHZ35946

SEQ ID NO: 12092 - protein, 566 aa, synthetic construct; identical to SEQ ID NO: 12080
  REGION 1..566: note = hemagglutinin__InfluenzaA__AHZ35958

SEQ ID NO: 12093 - protein, 566 aa, synthetic construct; identical to SEQ ID NO: 12080
  REGION 1..566: note = hemagglutinin__InfluenzaA__AHZ35980

SEQ ID NO: 12094 - protein, 566 aa, synthetic construct; identical to SEQ ID NO: 12080
  REGION 1..566: note = hemagglutinin__InfluenzaA__AHZ35991

SEQ ID NO: 12095 - protein, 566 aa, synthetic construct; identical to SEQ ID NO: 12080
  REGION 1..566: note = hemagglutinin__InfluenzaA__AHZ36002

SEQ ID NO: 12096 - protein, 566 aa, synthetic construct
  REGION 1..566: note = hemagglutinin__InfluenzaA__AHZ36013
MKAILVVLLYTFAIANADTLCIGYHANNSTDTVDTVLEKNVTVTHSVNLLEDKHNRKLCKLRGVAPLHLGKCNIAGWILGNPECESLSTASSWSYIVETSSSDNGTCYPGDFINYEELREQLSSVSSFERFEMFPKTSSWPNHDSNKGVTAACPHAGAKSFYKNLIWLVKKGNSYPKLSKSYINDKGKEVLVLWGIHHPSTTADQQSLYQNADAYVFVGTSRYSKKFKPEIAIRPKVRDQEGRMNYYWTLVEPGDKITFEATGNLVVPRYAFAMERNAGSGIIISDTPVHDCNTTCQTPKGAINTSLPFQNIHPITIGKCPKYVKSTKLRLATGLRNVPSIQSRGLFGAIAGFIEGGWTGMVDGWYGYHHQNEQGSGYAADLKSTQNAIDKITNKVNSVIEKMNTQFTAVGKEFNHLEKRIENLNKKVDDGFLDIWTYNAELLVLLENERTLDYHDSNVKNLYEKVRNQLKNNAKEIGNGCFEFYHKCDNTCMESVKNGTYDYPKYSEEAKLNREEIDGVKLESTRIYQILAIYSTVASSLVLVVSLGAISFWMCSNGSLQCRICI

SEQ ID NO: 12097 - protein, 566 aa, synthetic construct
  REGION 1..566: note = hemagglutinin__InfluenzaA__AHZ36024
MKAILVVLLYTFATANADTLCIGYHANNSTDTVDTVLEKNVTVTHSVNLLEDKHNGKLCKLRGVAPLHLGKCNIAGWILGNPECESLSTASSWSYIVETSSSDNGTCYPGDFINYEELREQLSSVSSFERFEIFPKTSSWPNHDSNKGVTAACPHAGAKSFYKNLIWLVKKGNSYPKLSKSYINDKGKEVLVLWGIHHPSTTADQQSLYQNADAYVFVGTSRYSKKFKPEIAIRPKVRDQEGRMNYYWTLVEPGDKITFEATGNLVVPRYAFAMERNAGSGIIISDTPVHDCNTTCQTPKGAINTSLPFQNIHPITIGKCPKYVKSTKLRLATGLRNVPSIQSRGLFGAIAGFIEGGWTGMVDGWYGYHHQNEQGSGYAADLKSTQNAIDKITNKVNSVIEKMNTQFTAVGKEFNHLEKRIENLNKKVDDGFLDIWTYNAELLVLLENERTLDYHDSNVKNLYEKVRNQLKNNAKEIGNGCFEFYHKCDNTCMESVKNGTYDYPKYSEEAKLNREEIDGVKLESTRTYQILAIYSTVASSLVLVVSLGAISFWMCSNGSLQCRICI

SEQ ID NO: 12098 - protein, 566 aa, synthetic construct
  REGION 1..566: note = hemagglutinin__InfluenzaA__AHZ36035
MKTIIALSYILCLVFAQKLPGNDNSTATLCLGHHAVPNGTIVKTITNDQIEVTNATELIQSSSTGEICNSPHQILDGENCTLIDALLGDPQCDGFQNKKWDLFVERSKAHSNCYPYDVPDYASLRSLVASSGTLEFNNESFNWTGVTQNGTSSACIRRSNNSFFSRLNWLTHLNFKYPALNVTMPNNEQFDKLYIWGVHHPGTDKDQIFLYAQAAGRITVSTKRSQQAVIPNIGSRPRVRNIPSRVSIYWTIVKPGDILLINSTGNLIAPRGYFKIRSGKSSIMRSDAPIGKCNSACITPNGSIPNDKPFQNVNRITYGACPRYVKQNTLKLATGMRNVPEKQTRGIFGAIAGFIENGWEGMVDGWYGFRHQNSEGRGQAADLKSTQAAIDQINGKLNRLIGKTNEKFHQIEKEFSEVEGRIQDLEKYVEDTKIDLWSYNAELLVALENQHTIDLTDSEMNKLFEKTKKQLRENAEDMGNGCFKIYHKCDNACIGSIRNGTYDHDVYRDEALNNRFQIKGVELKSGYKDWILWISFAISCFLLCVALLGFIMWACQKGNIRCNICI

SEQ ID NO: 12099 - protein, 566 aa, synthetic construct; identical to SEQ ID NO: 6855
  REGION 1..566: note = hemagglutinin__InfluenzaA__AHZ36047

SEQ ID NO: 12100 - protein, 566 aa, synthetic construct; identical to SEQ ID NO: 12080
  REGION 1..566: note = hemagglutinin__InfluenzaA__AHZ36059

SEQ ID NO: 12101 - protein, 566 aa, synthetic construct; identical to SEQ ID NO: 12097
  REGION 1..566: note = hemagglutinin__InfluenzaA__AHZ36070

SEQ ID NO: 12102 - protein, 566 aa, synthetic construct; identical to SEQ ID NO: 12096
  REGION 1..566: note = hemagglutinin__InfluenzaA__AHZ36081

SEQ ID NO: 12103 - protein, 566 aa, synthetic construct; identical to SEQ ID NO: 12097
  REGION 1..566: note = hemagglutinin__InfluenzaA__AHZ36092

SEQ ID NO: 12104 - protein, 566 aa, synthetic construct; identical to SEQ ID NO: 12080
  REGION 1..566: note = hemagglutinin__InfluenzaA__AHZ36103

SEQ ID NO: 12105 - protein, 566 aa, synthetic construct; identical to SEQ ID NO: 12097
  REGION 1..566: note = hemagglutinin__InfluenzaA__AHZ36114

SEQ ID NO: 12106 - protein, 566 aa, synthetic construct; identical to SEQ ID NO: 12080
  REGION 1..566: note = hemagglutinin__InfluenzaA__AHZ36125

SEQ ID NO: 12107 - protein, 566 aa, synthetic construct; identical to SEQ ID NO: 12080
  REGION 1..566: note = hemagglutinin__InfluenzaA__AHZ36136

SEQ ID NO: 12108 - protein, 566 aa, synthetic construct; identical to SEQ ID NO: 6855
  REGION 1..566: note = hemagglutinin__InfluenzaA__AHZ36147

SEQ ID NO: 12109 - protein, 566 aa, synthetic construct
  REGION 1..566: note = hemagglutinin__InfluenzaA__AHZ36158
MKAILVVLLYTFAIANADTLCIGYHANNSTDTVDTVLEKNVTVTHSVNLLEDKHNGKLCKLRGVAPLHLGKCNIAGWILGNPECESLSTASSWSYIVETSSSDNGTCYPGDFINYEELREQLSSVSSFERFEMFPKTSSWPNHDSNKGVTAACPHAGAKSFYKNLIWLVKKGNSYPKLSKSYINDKGKEVLVLWGIHHPSTTADQQSLYQNADAYVFVGTSRYSKKFKPEIATRPKVRDQEGRMNYYWTLVEPGDKITFEATGNLVVPRYAFAMERNAGSGIIISDTPVHDCNTTCQTPKGAINTSLPFQNIHPITIGKCPKYVKSTKLRLATGLRNVPSIQSRGLFGAIAGFIEGGWTGMVDGWYGYHHQNEQGSGYAADLKSTQNAIDKITNKVNSVIEKMNTQFTAVGKEFNHLEKRIENLNKKVDDGFLDIWTYNAELLVLLENERTLDYHDSNVKNLYEKVRNQLKNNAKEIGNGCFEFYHKCDNTCMESVKNGTYDYPKYSEEAKLNREEIDGVKLESTRIYQILAIYSTVASSLVLVVSLGAISFWMCSNGSLQCRICI

SEQ ID NO: 12110 - protein, 566 aa, synthetic construct; identical to SEQ ID NO: 12080
  REGION 1..566: note = hemagglutinin__InfluenzaA__AHZ36169

SEQ ID NO: 12111 - protein, 566 aa, synthetic construct
  REGION 1..566: note = hemagglutinin__InfluenzaA__AHZ36180
MKAILVVLLYTFAIANADTLCIGYHANNSTDTVDTVLEKNVTVTHSVNLLEDKHNGKLCKLRGVAPLHLGKCNIAGWILGNPECESLSTASSWSYIVETSSSDNGTCYPGDFINYEELREQLSSVSSFERFEMFPKTSSWPNHDSNKGVTAACPHAGAKSFYKNLIWLVKKGNSYPKLSKSYINDKGKEVLVLWGIHHPSTTADQQSLYQNADAYVFVGTSRYSKKFKPEIAIRPKVRDQEGRMNYYWTLVEPGDKITFEATGNLVVPRYAFAMERNAGSGIIISDTPIHDCNTTCQTPKGAINTSLPFQNIHPITIGKCPKYVKSTKLRLATGLRNVPSIQSRGLFGAIAGFIEGGWTGMVDGWYGYHHQNEQGSGYAADLKSTQNAIDKITNKVNSVIEKMNTQFTAVGKEFNHLEKRIENLNKKVDDGFLDIWTYNAELLVLLENERTLDYHDSNVKNLYEKVRNQLKNNAKEIGNGCFEFYHKCDNTCMESVKNGTYDYPKYSEEAKLNREEIDGVKLESTRIYQILAIYSTVASSLVLVVSLGAISFWMCSNGSLQCRICI

SEQ ID NO: 12112 - protein, 566 aa, synthetic construct; identical to SEQ ID NO: 12085
  REGION 1..566: note = hemagglutinin__InfluenzaA__AHZ36191

SEQ ID NO: 12113 - protein, 566 aa, synthetic construct; identical to SEQ ID NO: 6855
  REGION 1..566: note = hemagglutinin__InfluenzaA__AHZ36203

SEQ ID NO: 12114 - protein, 566 aa, synthetic construct; identical to SEQ ID NO: 12080
  REGION 1..566: note = hemagglutinin__InfluenzaA__AHZ36215

SEQ ID NO: 12115 - protein, 566 aa, synthetic construct; identical to SEQ ID NO: 6855
  REGION 1..566: note = hemagglutinin__InfluenzaA__AHZ36226

SEQ ID NO: 12116 - protein, 566 aa, synthetic construct; identical to SEQ ID NO: 12080
  REGION 1..566: note = hemagglutinin__InfluenzaA__AHZ36238

SEQ ID NO: 12117 - protein, 566 aa, synthetic construct; identical to SEQ ID NO: 12080
  REGION 1..566: note = hemagglutinin__InfluenzaA__AHZ36249

SEQ ID NO: 12118 - protein, 566 aa, synthetic construct
  REGION 1..566: note = hemagglutinin__InfluenzaA__AHZ36260
MKAILVVLLYTFAIANADTLCIGYHANNSTDTVDTVLEKNVTVTHSVNLLEDKHNGKLCKLRGVAPLHLGKCNIAGWILGNPECESLSTASSWSYIVETFSSDNGTCYPGDFINYEELREQLSSVSSFERFEMFPKTSSWPNHDSNKGVTAACPHAGAKSFYKNLIWLVKKGNSYPKLSKSYINDKGKEVLVLWGIHHPSTTADQQSLYQNADAYVFVGTSRYSKKFKPEIAIRPKVRDQEGRMNYYWTLVEPGDKITFEATGNLVVPRYAFAMERNAGSGIIISDTPVHDCNTTCQTPKGAINTSLPFQNIHPITIGKCPKYVKSTKLRLATGLRNVPSIQSRGLFGAIAGFIEGGWTGMVDGWYGYHHQNEQGSGYAADLKSTQNAIDKITNKVNSVIEKMNTQFTAVGKEFNHLEKRIENLNKKVDDGFLDIWTYNAELLVLLENERTLDYHDSNVKNLYEKVRNQLKNNAKEIGNGCFEFYHKCDNTCMESVKNGTYDYPKYSEEAKLNREEIDGVKLESTRIYQILAIYSTVASSLVLVVSLGAISFWMCSNGSLQCRICI

SEQ ID NO: 12119 - protein, 566 aa, synthetic construct; identical to SEQ ID NO: 12065
  REGION 1..566: note = hemagglutinin__InfluenzaA__AHZ36271

SEQ ID NO: 12120 - protein, 566 aa, synthetic construct; identical to SEQ ID NO: 12080
  REGION 1..566: note = hemagglutinin__InfluenzaA__AHZ36283

SEQ ID NO: 12121 - protein, 566 aa, synthetic construct; identical to SEQ ID NO: 12065
  REGION 1..566: note = hemagglutinin__InfluenzaA__AHZ36294

SEQ ID NO: 12122 - protein, 566 aa, synthetic construct
  REGION 1..566: note = hemagglutinin__InfluenzaA__AHZ36306
MKAILVVLLYTFAIANADTLCIGYHANNSTDTVDTVLEKNVTVTHSVNLLEDKHNGKLCKLRGVAPLHLGKCNIAGWILGNPECESLSTASSWSYIVETSSSDNGTCYPGDFINYEELREQLSSVSSFERFEMFPKTSSWPNHDSNKGVTAACPHAGAKSFYKNLIWLVKKGNSYPKLSKSYINDKGKEVLVLWGIHHPSTTADQQSLYQNADAYVFVGTSRYSKKFKPEIAIRPKVRDQEGRMNYYWTLVEPGDKITFEATGNLVVPRYAFAMERNAGSGIIISDTPVHDCNTTCQTPKGAINTSLPFQNIHPITIGKCPKYVKSKKLRLATGLRNVPSIQSRGLFGAIAGFIEGGWTGMVDGWYGYHHQNEQGSGYAADLKSTQNAIDKITNKVNSVIEKMNTQFTAVGKEFNHLEKRIENLNKKVDDGFLDIWTYNAELLVLLENERTLDYHDSNVKNLYEKVRNQLKNNAKEIGNGCFEFYHKCDNTCMESVKNGTYDYPKYSEEAKLNREEIDGVKLESTRIYQILAIYSTVASSLVLVVSLGAISFWMCSNGSLQCRICI

SEQ ID NO: 12123 - protein, 566 aa, synthetic construct; identical to SEQ ID NO: 12080
  REGION 1..566: note = hemagglutinin__InfluenzaA__AHZ36317

SEQ ID NO: 12124 - protein, 566 aa, synthetic construct; identical to SEQ ID NO: 12080
  REGION 1..566: note = hemagglutinin__InfluenzaA__AHZ36328

SEQ ID NO: 12125 - protein, 566 aa, synthetic construct
  REGION 1..566: note = hemagglutinin__InfluenzaA__AHZ36339
MKAILVVLLYTFAIANADTLCIGYHANNSTDTVDTVLEKNVTVTHSVNLLEDKHNGKLCKLRGVAPLHLGKCNIAGWILGNPECESLSTASSWSYIVETSSSDNGTCYPGDFINYEELREQLSSVSSFERFEMFPKTSSWPNHDSNKGVTAACPHAGAKSFYKNLIWLVKKGNSYPKLSKSYINDKGKEVLVLWGIHHPSTTADQQSLYQNADAYVFVGTSRYSKKFKPEIAIRPKVRDQEGRMNYYWTLVEPGDKITFEATGNLVVPRYAFAMERNAGSGIIISDTPVHDCNTTCQTPKGAVNTSLPFQNIHPITIGKCPKYVKSTKLRLATGLRNVPSIQSRGLFGAIAGFIEGGWTGMVDGWYGYHHQNEQGSGYAADLKSTQNAIDKITNKVNSVIEKMNTQFTAVGKEFNHLERRIENLNKKVDDGFLDIWTYNAELLVLLENERTLDYHDSNVKNLYEKVRNQLKNNAKEIGNGCFEFYHKCDNTCMESVKNGTYDYPKYSEEAKLNREEIDGVKLESTRIYQILAIYSTVASSLVLVVSLGAISFWMCSNGSLQCRICI

SEQ ID NO: 12126 - protein, 566 aa, synthetic construct
  REGION 1..566: note = hemagglutinin__InfluenzaA__AHZ36362
MKAILVVLLYTFAIANADTLCIGYHANNSTDTVDTVLEKNVTVTHSINLLEDKHNGKLCKLRGVAPLHLGKCNIAGWILGNPECESLSTASSWSYIVETSSSDNGTCYPGDFINYEELREQLSSVSSFERFEMFPKTSSWPNHDSNKGVTAACPHAGAKSFYKNLIWLVKKGNSYPKLSKSYINDKGKEVLVLWGIHHPSTTADQQSLYQNADAYVFVGTSRYSKKFKPEIAIRPKVRDQEGRMNYYWTLVEPGDKITFEATGNLVVPRYAFAMERNAGSGIIISDTPVHDCNTTCQTPKGAVNTSLPFQNIHPITIGKCPKYVKSTKLRLATGLRNVPSIQSRGLFGAIAGFIEGGWTGMVDGWYGYHHQNEQGSGYAADLKSTQNAIDKITNKVNSVIEKMNTQFTAVGKEFNHLERRIENLNKKVDDGFLDIWTYNAELLVLLENERTLDYHDSNVKNLYEKVRNQLKNNAKEIGNGCFEFYHKCDNTCMESVKNGTYDYPKYSEEAKLNREEIDGVKLESTRIYQILAIYSTVASSLVLVVSLGAISFWMCSNGSLQCRICI

SEQ ID NO: 12127 - protein, 566 aa, synthetic construct
  REGION 1..566: note = hemagglutinin__InfluenzaA__AHZ36385
MKTIIALSYILCLIFAQEIPGNDNSTATLCLGHHAVPNGTIVKTITNDQIEVTNATELVQSSSTGEICNSPHQILDGENCTLIDALLGDPQCDDFQNKKWDLFVERSKAHSNCYPYDVPDYASLRSLVASSGTLEFNNESFNWTGVTQNGTSSACIRRSNNSFFSRLNWLTHLNFKYPALNVTMPNNEQFDKLYIWGVHHPGTDKDQIFLYAQASGRITVSTKRSQQAVIPNIGSRPRVRNIPSRVSIYWTIVKPGDILLINSTGNLIAPRGYFKIRSGKSSIMRSDAPIGKCNSACITPNGSIPNDKPFQNVNRITYGACPRYVKQNTLKLATGMRNVPEKQTRGIFGAIAGFIENGWEGMVDGWYGFRHQNSEGRGQAADLKSTQAAIDQINGKLNRLIGKTNEKFHQIEKEFSEVEGRIQDLEKYVEDTKIDLWSYNAELLVALENQHTIDLTDSEMNKLFEKTKKQLRENAEDMGNGCFKIYHKCDNACIGSIRNGTYDHDVYRDEALNNRFKIKGVELKSGYKDWILWISFAISCFLLCVALLGFIMWACQKGNIRCNICI

SEQ ID NO: 12128 - protein, 566 aa, synthetic construct
  REGION 1..566: note = hemagglutinin__InfluenzaA__AHZ36397
MKTIIALSYILCLIFAQEIPGNDNSTATLCLGHHAVPNGTIVKTITNDQIEVTNATELVQSSSTGEICNSPHQILDGENCTLIDALLGDPQCDDFQNKKWDLFVERSKAHSNCYPYDVPDYASLRSLVASSGTLEFNNESFNWTGVTQNGTSSACIRRSNNSFFSRLNWLTHLNFKYPALNVTMPNNEQFDKLYIWGVHHPGTDKDQIFLYAQASGRITVSTKRSQQAVIPNIGSRPRVRNIPSRVSIYWTIVKPGDILLINSTGNLIAPRGYFKIRSGKSSIMRSDAPIGKCNSACITPNGSIPNDKPFQNVNRITYGACPRYVKQNTLKLATGMRNVPEKQTRGIFGAIAGFIENGWEGMVDGWYGFRHQNSEGRGQAADLKSTQAAIDQINGKLNRLIGKTNEKFHQIEKEFSEVEGRIQDLEKYVEDTKIDLWSYNAELLVALENQHTIDLTDSEMNKLFEKTKKQLRENAEDMGNGCFKIYHKCDNACIGSIRNGTYDHNVYRDEALNNRFKIKGVELKSGYKDWILWISFAISCFLLCVALLGFIMWACQKGNIRCNICI

SEQ ID NO: 12129 - protein, 566 aa, synthetic construct; identical to SEQ ID NO: 12065
  REGION 1..566: note = hemagglutinin__InfluenzaA__AHZ36409

SEQ ID NO: 12130 - protein, 566 aa, synthetic construct; identical to SEQ ID NO: 12066
  REGION 1..566: note = hemagglutinin__InfluenzaA__AHZ36433

SEQ ID NO: 12131 - protein, 566 aa, synthetic construct
  REGION 1..566: note = hemagglutinin__InfluenzaA__AHZ36445
MKTIIALSYILCLIFAQEIPGNDNSTATLCLGHHAVPNGTIVKTITNDQIEVTNATELVQSSSTGEICNSPHQILDGENCTLIDALLGDPQCDDFQNKKWDLFVERSKAHSNCYPYDVPDYASLRSLVASSGTLEFNNESFNWTGVTQNGTSSACIRRSNNSFFSRLNWLTHLNFKYPALNVTMPNNEQFDKLYIWGVHHPGTDKDQIFLYAQASGRITVSTKRSQQAVIPNIGSRPRVRNIPSRVSIYWTIVKPGDILLINSTGNLIAPRGYFKIRSGKSSIMRSDAPIGKCNSACITPNGSIPNDKPFQNVNRITYGACPRYVKQNTLKLATGMRNVPEKQTRGIFGAIAGFIENGWEGMVDGWYGFRHQNSEGRGQAADLKSTQAAIDQINGKLNRLIGKTNEKFHQIEKEFSEVEGRIQDLEKYVEDTKIDLWSYNAELLVALENQHTIDLTDSEMNKLFEKTKKQLRENAEDMGNGCFKIYHKCDDACIGSIRNGTYDHDVYRDEALNNRFQIKGVELKSGYKDWILWISFAISCFLLCVALLGFIMWACQKGNIRCNICI

SEQ ID NO: 12132 - protein, 566 aa, synthetic construct; identical to SEQ ID NO: 12065
  REGION 1..566: note = hemagglutinin__InfluenzaA__AHZ36457

SEQ ID NO: 12133 - protein, 566 aa, synthetic construct; identical to SEQ ID NO: 12065
  REGION 1..566: note = hemagglutinin__InfluenzaA__AHZ36469

SEQ ID NO: 12134 - protein, 566 aa, synthetic construct
  REGION 1..566: note = hemagglutinin__InfluenzaA__AHZ36481
MKTIIALSYILCLIFAQEIPGNDNSTATLCLGHHAVPNGTIVKTITNDQIEVTNATELVQSSSTGEICNSPHQILDGENCTLIDALLGDPQCDDFQNKKWDLFVERSKAHSNCYPYDVPDYASLRSLVASSGTLEFNNESFNWTGVTQNGTSSACIRRSNNSFFSRLNWLTHLNFKYPALNVTMPNNEQFDKLYIWGVHHPGTDKDQIFLYAQASGRITVSTKRSQQAVIPNIGSRPRVRNIPSRVSIYWTIVKPGDILLINSTGNLIAPRGYFKIRNGKSSIMRSDAPIGKCNSACITPNGSIPNDKPFQNVNRITYGACPRYVKQNTLKLATGMRNVPEKQTRGIFGAIAGFIENGWEGMVDGWYGFRHQNSEGRGQAADLKSTQAAIDQINGKLNRLIGKTNEKFHQIEKEFSEVEGRIQDLEKYVEDTKIDLWSYNAELLVALENQHTIDLTDSEMNKLFEKTKKQLRENAEDMGNGCFKIYHKCDNACIGSIRNGTYDHDVYRDEALNNRFQIKGVELKSGYKDWILWISFAISCFLLCVALLGFIMWACQKGNIRCNICI

SEQ ID NO: 12135 - protein, 566 aa, synthetic construct; identical to SEQ ID NO: 12066
  REGION 1..566: note = hemagglutinin__InfluenzaA__AHZ36493

SEQ ID NO: 12136 - protein, 566 aa, synthetic construct; identical to SEQ ID NO: 12066
  REGION 1..566: note = hemagglutinin__InfluenzaA__AHZ36505

SEQ ID NO: 12137 - protein, 566 aa, synthetic construct; identical to SEQ ID NO: 12066
  REGION 1..566: note = hemagglutinin__InfluenzaA__AHZ36517

SEQ ID NO: 12138 - protein, 566 aa, synthetic construct
  REGION 1..566: note = hemagglutinin__InfluenzaA__AHZ36529
MKTIIALSYILCLIFAQEIPGNDNSTATLCLGHHAVPNGTIVKTITNDQIEVTNATELVQSSSTGEICNSPHQILDGENCTLIDALLGDPQCDDFQNKKWDLFVERSKAHSNCYPYDVPDYASLRSLVASSGTLEFNNESFNWTGVTQNGTSSACIRRSNNSFFSRLNWLTHLNFKYPALNVTMPNNEQFDKLYIWGVHHPGTDKDQIFLYAQASGRITVSTKRSQQAVIPNIGSRPRVRNIPSRVSIYWTIVKPGDILLINSTGNLIAPRGYFKIRSGKSSIMRSDAPIGKCNSSCITPNGSIPNDKPFQNVNRITYGACPRYVKQNTLKLATGMRNVPEKQTRGIFGAIAGFIENGWEGMVDGWYGFRHQNSEGRGQAADLKSTQAAIDQINGKLNRLIGKTNEKFHQIEKEFSEVEGRIQDLEKYVEDTKIDLWSYNAELLVALENQHTIDLTDSEMNKLFEKTKKQLRENAEDMGNGCFKIYHKCDNACIGSIRNGTYDHDVYRDEALNNRFQIKGVELKSGYKDWILWISFAISCFLLCVALLGFIMWACQKGNIRCNICI

SEQ ID NO: 12139 - protein, 566 aa, synthetic construct; identical to SEQ ID NO: 12065
  REGION 1..566: note = hemagglutinin__InfluenzaA__AHZ36541

SEQ ID NO: 12140 - protein, 566 aa, synthetic construct
  REGION 1..566: note = hemagglutinin__InfluenzaA__AHZ36553
MKTIIALSYILCLIFAQEIPGNDNSTATLCLGHHAVPNGTIVKTITNDQIEVTNATELVQSSSTGEICNSPHQILDGENCTLIDALLGDPQCDDFQNKEWDLFVERSKAHSNCYPYDVPDYASLRSLVASSGTLEFKNESFNWTGVTQNGTSSACIRRSNNSFFSRLNWLTHLNFKYPALNVTMPNNEQFDKLYIWGVHHPGTDKDQIFLYAQASGRITVSTKRSQQAVIPNIGSRPRVRNIPSRVSIYWTIVKPGDILLINSTGNLIAPRGYFKIRSGKSSIMRSDAPIGKCNSACITPNGSIPNDKPFQNVNRITYGTCPRYVKQNTLKLATGMRNVPEKQTRGIFGAIAGFIENGWEGMVDGWYGFRHQNSEGRGQAADLKSTQAAIDQINGKLNRLIGKTNEKFHQIEKEFSEVEGRIQDLEKYVEDTKIDLWSYNAELLVALENQHTIDLTDSEMNKLFEKTKKQLRENAEDMGNGCFKIYHKCDNACIGSIRNGTYDHDVYRDEALNNRFQIKGVELKSGYKDWILWISFAISCFLLCVALLGFIMWACQKGNIRCNICI

SEQ ID NO: 12141 - protein, 566 aa, synthetic construct; identical to SEQ ID NO: 12065
  REGION 1..566: note = hemagglutinin__InfluenzaA__AHZ36565

SEQ ID NO: 12142 - protein, 566 aa, synthetic construct; identical to SEQ ID NO: 12065
  REGION 1..566: note = hemagglutinin__InfluenzaA__AHZ36577

SEQ ID NO: 12143 - protein, 566 aa, synthetic construct; identical to SEQ ID NO: 12065
  REGION 1..566: note = hemagglutinin__InfluenzaA__AHZ36589

SEQ ID NO: 12144 - protein, 566 aa, synthetic construct; identical to SEQ ID NO: 12140
  REGION 1..566: note = hemagglutinin__InfluenzaA__AHZ36601

SEQ ID NO: 12145 - protein, 566 aa, synthetic construct
  REGION 1..566: note = hemagglutinin__InfluenzaA__AHZ36613
MKTIIALSYILCLIFAQEIPGNDNSTATLCLGHHAVPNGTIVKTITNDQIEVTNATELVQSSSTGEICNSPHQILDGENCTLIDALLGDPQCDDFQNKEWDLFVERSKAHSNCYPYDVPDYASLRSLVASSGTLEFNNESFNWTGVTQNGTSSACIRRSNNSFFSRLNWLTHLNFKYPALNVTMPNNEQFDKLYIWGVHHPGTDKDQIFLYAQASGRITVSTKRSQQAVIPNIGSRPRVRNIPSRVSIYWTIVKPGDILLINSTGNLIAPRGYFKIRSGKSSIMRSDAPIGKCNSACITPNGSIPNDKPFQNVNRITYGTCPRYVKQNTLKLATGMRNVPEKQTRGIFGAIAGFIENGWEGMVDGWYGFRHQNSEGRGQAADLKSTQAAIDQINGKLNRLIGKTNEKFHQIEKEFSEVEGRIQDLEKYVEDTKIDLWSYNAELLVALENQHTIDLTDSEMNKLFEKTKKQLRENAEDMGNGCFKIYHKCDNACIGSIRNGTYDHDVYRDEALNNRFQIKGVELKSGYKDWILWISFATSCFLLCVALLGFIMWACQKGNIRCNICI

SEQ ID NO: 12146 - protein, 566 aa, synthetic construct; identical to SEQ ID NO: 12065
  REGION 1..566: note = hemagglutinin__InfluenzaA__AHZ36625

SEQ ID NO: 12147 - protein, 566 aa, synthetic construct; identical to SEQ ID NO: 12066
  REGION 1..566: note = hemagglutinin__InfluenzaA__AHZ36637

SEQ ID NO: 12148 - protein, 566 aa, synthetic construct; identical to SEQ ID NO: 12066
  REGION 1..566: note = hemagglutinin__InfluenzaA__AHZ36649

SEQ ID NO: 12149 - protein, 566 aa, synthetic construct; identical to SEQ ID NO: 9994
  REGION 1..566: note = hemagglutinin__InfluenzaA__AHZ36661

SEQ ID NO: 12150 - protein, 566 aa, synthetic construct; identical to SEQ ID NO: 9994
  REGION 1..566: note = hemagglutinin__InfluenzaA__AHZ36673

SEQ ID NO: 12151 - protein, 566 aa, synthetic construct
  REGION 1..566: note = hemagglutinin__InfluenzaA__AHZ36685
MKTIIALSYILCLVFAQKLPGNDNSTATLCLGHHAVPNGTIVKTITNDRIEVTNATELVQNSSIGEICDSPHQILDGENCTLIDALLGDPQCDGFQNKKWDLFVERSKAYSNCYPYDVPDYASLRSLVASSGTLEFNNESFNWAGVTQNGTSSACIRGSNSSFFSRLNWLTHLNFKYPALNVTMPNNEQFDKLYIWGVHHPGTDKDQIFLYAQSSGRITVSTKRSQQAVIPNIGSRPRIRNIPSRISIYWTIVKPGDILLINSTGNLIAPRGYFKIRSGKSSIMRSDAPIGKCKSECITPNGSIPNDKPFQNVNRITYGACPRYVKQSTLKLATGMRNVPEKQTRGIFGAIAGFIENGWEGMVDGWYGFRHQNSEGRGQAADLKSTQAAIDQINGKLNRLIGKTNEKFHQIEKEFSEVEGRIQDLEKYVEDTKIDLWSYNAELLVALENQHTIDLTDSEMNKLFEKTKKQLRENAEDMGNGCFKIYHKCDNACIGSIRNGTYDHDVYRDEALNNRFQIKRVELKSGYKDWILWISFAISCFLLCVALLGFIMWACQKGNIRCNICI

SEQ ID NO: 12152 - protein, 560 aa, synthetic construct; identical to SEQ ID NO: 9988
  REGION 1..560: note = hemagglutinin__InfluenzaA__AHZ39698

SEQ ID NO: 12153 - protein, 560 aa, synthetic construct
  REGION 1..560: note = hemagglutinin__InfluenzaA__AHZ39722
MNTQILVFALIAIIPTNADKICLGHHAVSNGTKVNTLTERGVEVVNATETVERTNIPRICSKGKRTVDLGQCGLLGTITGPPQCDQFLEFSADLIIERREGSDVCYPGKFVNEEALRQILRESGGIDKEAMGFTYSGIRTDGATSACRRSGSSFYAEMKWLLSNTDDAAFPQMTKSYKNTRKSPALIVWGIHHSVSTAEQTKLYGSGNKLVTVGSSNYQQSFVPSPGARPQVNGLSGRIDFHWLMLNPNDTVTFSFNGAFIAPDRASFLRGKSMGIQSGVQVDANCEGDCYHSGGTIISNLPFQNIDSRAVGKCPRYVKQRSLLLATGMKNVPEIPKGRGLFGAIAGFIENGWEGLIDGWYGFRHQNAQGEGTAADYKSTQSAIDQITGKLNRLIEKTNQQFELIDNEFNEVEKQIGNVINWTRDSITEVWSYNAELLVAMENQHTIDLADSEMDKLYERVKRQLRENAEEDGTGCFEIFHKCDDDCMASIRNNTYDHSKYREEAMQNRIQIDPVKLSSGYKDVILWFSFGASCFILLAIVMGLVFICVKNGNMRCTICI

SEQ ID NO: 12154 - protein, 560 aa, synthetic construct; identical to SEQ ID NO: 12153
  REGION 1..560: note = hemagglutinin__InfluenzaA__AHZ39734

SEQ ID NO: 12155 - protein, 560 aa, synthetic construct
  REGION 1..560: note = hemagglutinin__InfluenzaA__AHZ39746
MNTQILVFALIAIIPTNADKICLGHHAVSNGTKVNTLTERGVEVVNATETVERTNIPRICSKGKRTVDLGQCGLLGTITGPPQCDQFLEFSADLIIERREGSDVCYPGKFVNEEALRQILRESGGIDKEAMGFTYSGIRTNGATSACRRSGSSFYAEMKWLLSNTDNAAFPQMTKSYKNTRKSPALIVWGIHHSVSTAEQTKLYGSGNKLVTVGSSNYQQSFVPSPGERPQVNGLSGRIDFHWLMLNPNDTVTFSFNGAFIAPDRASFLRGKSMGIQSGVQVDANCEGDCYHSGGTIISNLPFQNIDSRAVGKCPRYVKQRSLLLATGMKNVPEIPKGRGLFGAIAGFIENGWEGLIDGWYGFRHQNAQGEGTAADYKSTQSAIDQITGKLNRLIEKTNQQFELIDNEFNEVEKQIGNVINWTRDSITEVWSYNAELLVAMENQHTIDLADSEMDKLYERVKRQLRENAEEDGTGCFEIFHKCDDDCMASIRNNTYDHSKYREEAMQNRIQIDPVKLSSGYKDVILWFSFGASCFILLAIVMGLVFICVKNGNMRCTICI

SEQ ID NO: 12156 - protein, 560 aa, synthetic construct; identical to SEQ ID NO: 12153
  REGION 1..560: note = hemagglutinin__InfluenzaA__AHZ39758

SEQ ID NO: 12157 - protein, 560 aa, synthetic construct; identical to SEQ ID NO: 12153
  REGION 1..560: note = hemagglutinin__InfluenzaA__AHZ39770

SEQ ID NO: 12158 - protein, 560 aa, synthetic construct; identical to SEQ ID NO: 12153
  REGION 1..560: note = hemagglutinin__InfluenzaA__AHZ39782

SEQ ID NO: 12159 - protein, 566 aa, synthetic construct; identical to SEQ ID NO: 9883
  REGION 1..566: note = hemagglutinin__InfluenzaA__AHZ39794

SEQ ID NO: 12160 - protein, 566 aa, synthetic construct; identical to SEQ ID NO: 9997
  REGION 1..566: note = hemagglutinin__InfluenzaA__AHZ39806

SEQ ID NO: 12161 - protein, 566 aa, synthetic construct
  REGION 1..566: note = hemagglutinin__InfluenzaA__AHZ39818
MKTIIALSYILCLVFAQKLPGNDNSTATLCLGHHAVPNGTIVKTITNDQIEVTNATELVQSSSTGEICNSPHQILDGENCTLIDALLGDPQCDGFQNKKWDLFVERSKAHSNCYPYDVPDYASLRSLVASSGTLEFNNESFNWTGVTQNGTSSACIRRSNNSFFSRLNWLTHLNFKYPALNVTMPNNEQFDKLYIWGVHHPGTDKDQTFLYAQAAGRITVSTKRSQQAVIPNIGSRPRVRNIPSRVSIYWTIVKPGDILLINSTGNLIAPRGYFKIRSGKSSIMRSDAPIGKCNSACITPNGSIPNDKPFQNVNRITYGACPRYVKQNTLKLATGMRNVPEKQTRGIFGAIAGFIENGWEGMVDGWYGFRHQNSEGRGQAADLKSTQAAIDQINGKLNRLIGKTNEKFHQIEKEFSEVEGRIQDLEKYVEDTKIDLWSYNAELIVALENQHTIDLTDSEMNKLFEKTKKQLRENAEDMGNGCFKIYHKCDNACIGSIRNGTYDHDVYRDEALNNRFQIKGVELKSGYKDWILWISFAISCFLLCVVLLGFIMWACQKGNIRCNICI

SEQ ID NO: 12162 - protein, 566 aa, synthetic construct; identical to SEQ ID NO: 9883
  REGION 1..566: note = hemagglutinin__InfluenzaA__AHZ39841

SEQ ID NO: 12163 - protein, 566 aa, synthetic construct; identical to SEQ ID NO: 9903
  REGION 1..566: note = hemagglutinin__InfluenzaA__AHZ39853

SEQ ID NO: 12164 - protein, 566 aa, synthetic construct; identical to SEQ ID NO: 9883
  REGION 1..566: note = hemagglutinin__InfluenzaA__AHZ39865

SEQ ID NO: 12165 - protein, 566 aa, synthetic construct
  REGION 1..566: note = hemagglutinin__InfluenzaA__AHZ39877
MKTIIALSYILCLVFAQKLPGNDNSTATLCLGHHAVPNGTIVKTITNDRIEVTNATELVQNSSIGEICDSPHQILDGENCTLIDALLGDPQCDGFQNKKWDLFVERSKAYSNCYPYDVPDYASLRSLVASSGTLEFNNESFNWTGVTQNGTSSACIRRSNSSFFSRLNWLTHLNFKYPALNVTMPNNEQFDKLYIWGVHHPGTDKDQIFLYAQSSGRITVSTKRSQQAVIPNIGSRPRIRNIPSRISIYWTIVKPGDILLINSTGNLIAPRGYFKIRSGKSSIMRSDAPIGKCKSECITPNGSIPNDKPFQNVNRITYGACPRYVKQSTLKLATGMRNVPEKQTRGIFGAIAGFIENGWEGMVDGWYGFRHQNSEGRGQAADLKSTQAAIDQINGKLNRLIGKTNEKFHQIEKEFSEVEGRIQDLEKYVEDTKIDLWSYNAELLVALENQHTIDLTDSEMNKLFEKTKKQLRENAEDMGNGCFKIYHKCDNACIGSIRNGTYDHNVYRDEALNNRFQIKGVELKSGYKDWILWISFATSCFLLCVALLGFIMWACQKGNIRCNICI

SEQ ID NO: 12166 - protein, 566 aa, synthetic construct; identical to SEQ ID NO: 9903
  REGION 1..566: note = hemagglutinin__InfluenzaA__AHZ39889

SEQ ID NO: 12167 - protein, 566 aa, synthetic construct; identical to SEQ ID NO: 9884
  REGION 1..566: note = hemagglutinin__InfluenzaA__AHZ39913

SEQ ID NO: 12168 - protein, 566 aa, synthetic construct
  REGION 1..566: note = hemagglutinin__InfluenzaA__AHZ39925
MKTIIALSYILCLVFAQKLPGNDNSTATLCLGHHAVPNGTIVKTITNDRIEVTNATELVQNSSIGEICDSPHQILDGENCTLIDALLGDPQCDGFQNKKWDLFVERSKAYSNCYPYDVPDYASLRSLVASSGTLEFNNESFNWTGVTQNGTSSACIRRSNSSFFSRLNWLTHLNFKYPALNVTMPNNEQFDKLYIWGVHHPGTDKDQIFLYAQSSGRITVSTKRSQQAVIPNIGSRPRIRDIPSRISIYWTIVKPGDILLINSTGNLIAPRGYFKIRSGKSSIMRSDAPIGKCKSECITPNGSIPNDKPFQNVNRITYGACPRYVKQSTLKLATGMRNVPEKQTRGIFGAIAGFIENGWEGMVDGWYGFRHQNSEGRGQAADLKSTQAAIDQINGKLNRLIGKTNEKFHQIEKEFSEVEGRIQDLEKYVEDTKIDLWSYNAELLVALENQHTIDLTDSEMNKLFEKTKKQLRENAEDMGNGCFKIYHKCDNACIGSIRNGTYDHDVYRDEALNNRFQIKGVELKSGYKDWILWISFAISCFLLCVALLGFIMWACQKGNIRCNICI

SEQ ID NO: 12169 - protein, 566 aa, synthetic construct; identical to SEQ ID NO: 9883
  REGION 1..566: note = hemagglutinin__InfluenzaA__AHZ39937

SEQ ID NO: 12170 - protein, 566 aa, synthetic construct; identical to SEQ ID NO: 9883
  REGION 1..566: note = hemagglutinin__InfluenzaA__AHZ39949

SEQ ID NO: 12171 - protein, 566 aa, synthetic construct; identical to SEQ ID NO: 9883
  REGION 1..566: note = hemagglutinin__InfluenzaA__AHZ39961

SEQ ID NO: 12172 - protein, 566 aa, synthetic construct; identical to SEQ ID NO: 9883
  REGION 1..566: note = hemagglutinin__InfluenzaA__AHZ39973

SEQ ID NO: 12173 - protein, 566 aa, synthetic construct
  REGION 1..566: note = hemagglutinin__InfluenzaA__AHZ39985
MKTIIALSYILCLVFAQKLPGNDNSTATLCLGHHAVPNGTIVKTITNDRIEVTNATELVQNSSIGEICDSPHQILDGENCTLIDALLGDPQCDGFQNKKWDLFVERSKAYSNCYPYDVPDYASLRSLVASSGTLEFNNESFNWTGVTQNGTSSACIRRSNSSFFSRLNWLTHLNFKYPALNVTMPNNEQFDKLYIWGVHHPGTDKDQIFLYAQSSGRITVSTKRSQQAVIPNIGSRPRIRNIPSRISIYWTIVKPGDILLINSTGNLIAPRGYFKIRSGKSSIMRSDASIGKCKSECITPNGSIPNDKPFQNVNRITYGACPRYVKQSTLKLATGMRNVPEKQTRGIFGAIAGFIENGWEGMVDGWYGFRHQNSEGRGQAADLKSTQAAIDQINGKLNRLIGKTNEKFHQIEKEFSEVEGRIQDLEKYVEDTKIDLWSYNAELLVALENQHTIDLTDSEMNKLFEKTKKQLRENAEDMGNGCFKIYHKCDNACIGSIRNGTYDHNVYRDEALNNRFQIKGVELKSGYKDWILWISFATSCFLLCVALLGFIMWACQKGNIRCNICI

SEQ ID NO: 12174 - protein, 566 aa, synthetic construct; identical to SEQ ID NO: 9883
  REGION 1..566: note = hemagglutinin__InfluenzaA__AHZ39997

SEQ ID NO: 12175 - protein, 566 aa, synthetic construct
  REGION 1..566: note = hemagglutinin__InfluenzaA__AHZ40009
MKTIIALSYILCLVFAQKLPGNDNSTATLCLGHHAVPNGTIVKTITNDRIEVTNATELVQISSIGEICDSPHQILDGENCTLIDALLGDPQCDGFQNKKWDLFVERSKAYSNCYPYDVPDYASLRSLVASSGTLEFNNESFNWTGVTQNGTSSACIRKSNSSFFSRLNWLTHLNFKYPALNVTMPNNEQFDKLYIWGVHHPGTDKDQIFLYAQSSGRITVSTKRSQQAVIPNIGSRPRIRNIPSRISIYWTIVKPGDILLINSTGNLIAPRGYFKIRSGKSSIMRSDAPIGKCKSECITPNGSIPNDKPFQNVNRITYGACPRYVKQSTLKLATGMRNVPEKQTRGIFGAIAGFIENGWEGMVDGWYGFRHQNSEGRGQAADLKSTQAAIDQINGKLNRLIGKTNEKFHQIEKEFSEVEGRIQDLEKYVEDTKIDLWSYNAELLVALENQHTIDLTDSEMNKLFEKTKKQLRENAEDMGNGCFKIYHKCDNACIGSIRNGTYDHDVYRDEALNNRFQIKGVELKSGYKDWILWISFAISCFLLCVALLGFIMWACQKGNIRCNICI

SEQ ID NO: 12176 - protein, 566 aa, synthetic construct; identical to SEQ ID NO: 9883
  REGION 1..566: note = hemagglutinin__InfluenzaA__AHZ40021

SEQ ID NO: 12177 - protein, 566 aa, synthetic construct; identical to SEQ ID NO: 9858
  REGION 1..566: note = hemagglutinin__InfluenzaA__AHZ40033

SEQ ID NO: 12178 - protein, 566 aa, synthetic construct; identical to SEQ ID NO: 9883
  REGION 1..566: note = hemagglutinin__InfluenzaA__AHZ40045

SEQ ID NO: 12179 - protein, 566 aa, synthetic construct; identical to SEQ ID NO: 9883
  REGION 1..566: note = hemagglutinin__InfluenzaA__AHZ40060

SEQ ID NO: 12180 - protein, 566 aa, synthetic construct; identical to SEQ ID NO: 9883
  REGION 1..566: note = hemagglutinin__InfluenzaA__AHZ40072

SEQ ID NO: 12181 - protein, 566 aa, synthetic construct; identical to SEQ ID NO: 9883
  REGION 1..566: note = hemagglutinin__InfluenzaA__AHZ40084

SEQ ID NO: 12182 - protein, 566 aa, synthetic construct; identical to SEQ ID NO: 9883
  REGION 1..566: note = hemagglutinin__InfluenzaA__AHZ40096

SEQ ID NO: 12183 - protein, 566 aa, synthetic construct; identical to SEQ ID NO: 9884
  REGION 1..566: note = hemagglutinin__InfluenzaA__AHZ40108

SEQ ID NO: 12184 - protein, 566 aa, synthetic construct; identical to SEQ ID NO: 9997
  REGION 1..566: note = hemagglutinin__InfluenzaA__AHZ40120

SEQ ID NO: 12185 - protein, 566 aa, synthetic construct
  REGION 1..566: note = hemagglutinin__InfluenzaA__AHZ40130
MKTIIALSYILCLVFAQKLPGNDNSTATLCLGHHAVPNGTIVKTITNDRIEVTNATELVQNSSIGEICDSPHQILDGENCTLIDALLGDPQCDGFQNKKWDLFVERSKAYSNCYPYDVPDYASLRSLVASSGTLEFNNESFNWTGVTQNGTSSACIRRSNSSFFSRLNWLTHLNFKYPALNVTMPNNEQFDKLYIWGVHHPGTDKDQIFLYAQSSGRITVSTKRSQQAVIPNIGSRPRIRNIPSRISIYWTIVKPGDILLINSTGNLIAPRGYFKIRSGKSSIMRSDAPIGKCKSECITPNGSIPNDKPFQNVNRITYGACPRYVKQSTLKLATGMRNVPEKQTRGIFGAIAGFIENGWEGMVDGWYGFRHQNSEGRGQAADLKSTQAAIDQINGKLNRLIGKTNEKFHQIEKEFSEVEGRIQDLEKYVEDTKIDLWSYNAELLVALENQHTIDLTDSEMNKLFEKTKKQLRENAEDMGNGCFKIYHKCDNACIGSIRNGTYDHNVYRDEALNNRFQIKGVELKSGYKNWILWISFAISCFLLCVALLGFIMWACQKGNIRCNICI

SEQ ID NO: 12186 - protein, 566 aa, synthetic construct
  REGION 1..566: note = hemagglutinin__InfluenzaA__AHZ40142
MKTIIALSYILCLVFAQKLPGNDNSTATLCLGHHAVPNGTIVKTITNDRIEVTNATELVQNSSIGEICDSPHQILDGENCTLIDALLGDPQCDGFQDKKWDLFVERSKAYSNCYPYDVPDYASLRSLVASSGTLEFNNENFNWTGVTQNGTSSACIRRSNSSFFSRLNWLTHLNFKYPALNVTMPNNEQFDKLYIWGVHHPGTDKDQIFLYAQSSGRITVSTKRSQQAVIPNIGSRPRIRNIPSRISIYWTIVKPGDILLINSTGNLIAPRGYFKIRSGKSSIMRSDAPIGKCKSECITPNGSIPNDRPFQNVNRITYGACPRYVKQSTLKLATGMRNVPEKQTRGIFGAIAGFIENGWEGMVDGWYGFRHQNSEGRGQAADLKSTQAAIDQINGKLNRLIGKTNEKFHQIEKEFSEVEGRIQDLEKYVEDTKIDLWSYNAELLVALENQHTIDLTDSEMNKLFEKTKKQLRENAEDMGNGCFKIYHKCDNACIGSIRNGTYDHDVYRDEALNNRFQIKGVELKSGYKDWILWISFAISCFLLCVALLGFIMWACQKGNIRCNICI

SEQ ID NO: 12187 - protein, 566 aa, synthetic construct
  REGION 1..566: note = hemagglutinin__InfluenzaA__AHZ40154
MKTIIALSYILCLGFAQELPGNDNSTATLCLGHHAVPNGTIVKTITNDQIEVTNATELVQSSSTGEICNSPHQILDGENCTLIDALLGDPQCDGFQNKKWDLFVERSKAHSNCYPYDVPDYASLRSLVASSGTLEFNNESFNWTGVTQNGTSSACIRGSNNSFFSRLNWLTHLNFKYPALNVTMPNNEQFDKLYIWGVHHPGTDKDQIFLYAQASGRITVSTKRSQQAVIPNIGSRPRVRNIPSRVSIYWTIVKPGDMLLINSTGNLIAPRGYFKIRSGKSSIMRSDAPIGKCNSACITPNGSIPNDKPFQNVNRITYGACPRYVKQNTLKLATGMRNVPEKQTRGIFGAIAGFIENGWEGMVDGWYGFRHQNSEGRGQAADLKSTQAAIDQINGKLNRLIGKTNEKFHQIEKEFSEVEGRIQDLEKYVEDTKIDLWSYNAELLVALENQHTIDLTDSEMNKLFEKTKKQLRENAEDMGNGCFKIYHKCNNACIGSIRNGTYDHDVYRDEALNNRFQIKGVELKSGYKDWILWISFAISCFLLCVALLGFIMWACQKGNIRCNICI

SEQ ID NO: 12188 - protein, 566 aa, synthetic construct
  REGION 1..566: note = hemagglutinin__InfluenzaA__AHZ40166
MKAILVVLLYTFATANADTLCIGYHANNSTDTVDTVLEKNVTVTHSVNLLEDKHNGKLCKLRGVAPLHLGKCNIAGWILGNPECESLSTASSWSYIVETSSSDNGTCYPGDFINYEELREQLSSVSSFERFEIFPKTSSWPNHDSNKGVTAACPHAGAKSFYKNLIWLVKKGNSYPKLSKSYINDKGKEVLVLWGIHHPSTTADQQSLYQNADAYVFVGTSRYSKKFKPEIAIRPKVRDQEGRMNYYWTLIEPGDKITFEATGNLVVPRYAFAMERNAGSGIIISDTPVHDCNTTCQTPEGAINTSLPFQNIHPITIGRCPKYVKSTKLRLATGLRNVPSIQSRGLFGAIAGFIEGGWTGMVDGWYGYHHQNEQGSGYAADLKSTQNAIDKITNKVNSVIEKMNTQFTAVGKEFNHLEKRIENLNKKVDDGFLDIWTYNAELLVLLENERTLDYHDSNVKNLYEKVRNQLKNNAKEIGNGCFEFYHKCDNTCMESVKNGTYDYPKYSEEAKLNREKIDGVKLESTRIYQILAIYSTVASSLVLVVSLGAISFWMCSNGSLQCRICI

SEQ ID NO: 12189 - protein, 566 aa, synthetic construct; identical to SEQ ID NO: 9883
  REGION 1..566: note = hemagglutinin__InfluenzaA__AHZ40177

SEQ ID NO: 12190 - protein, 566 aa, synthetic construct; identical to SEQ ID NO: 9883
  REGION 1..566: note = hemagglutinin__InfluenzaA__AHZ40189

SEQ ID NO: 12191 - protein, 566 aa, synthetic construct; identical to SEQ ID NO: 9883
  REGION 1..566: note = hemagglutinin__InfluenzaA__AHZ40201

SEQ ID NO: 12192 - protein, 566 aa, synthetic construct; identical to SEQ ID NO: 9868
  REGION 1..566: note = hemagglutinin__InfluenzaA__AHZ40213

SEQ ID NO: 12193 - protein, 566 aa, synthetic construct; identical to SEQ ID NO: 9835
  REGION 1..566: note = hemagglutinin__InfluenzaA__AHZ40225

SEQ ID NO: 12194 - protein, 566 aa, synthetic construct
  REGION 1..566: note = hemagglutinin__InfluenzaA__AHZ40237
MKTIIALSYILCLVFAQKLPGNDNSTATLCLGHHAVPNGTIVKTITNDQIEVTNATELVQNSSIGEICDSPHQILDGENCTLIDALLGDPQCDGFQNKKWDLFVERSKAYSNCYPYDVPDYASLRSLVASSGTLEFNNESFNWAGVTQNGTSSACIRGSNSSFFSRLNWLTHLNFKYPALNVTMPNNEQFDKLYIWGVHHPGTDKDQIFLYAQSSGRITVSTKRSQQAVIPNIGSRPRIRNIPSRISIYWTIVKPGDILLINSTGNLIAPRGYFKIRSGKSSIMRSDAPIGKCKSECITPNGSIPTDKPFQNVNRITYGACPRYVKQSTLKLATGMRNVPEKQTRGIFGAIAGFIENGWEGMVDGWYGFRHQNSEGRGQAADLKSTQAAIDQINGKLNRLIGKTNEKFHQIEKEFSEVEGRIQDLEKYVEDTKIDLWSYNAELLVALENQHTIDLTDSEMNKLFEKTKKQLRENAEDMGNGCFKIYHKCDNACIGSIRNGTYDHDVYRDEALNNRFQIKGVELKSGYKDWILWISFAISCFLLCVALLGFIMWACQKGNIRCNICI

SEQ ID NO: 12195 - protein, 566 aa, synthetic construct; identical to SEQ ID NO: 9891
  REGION 1..566: note = hemagglutinin__InfluenzaA__AHZ40249

SEQ ID NO: 12196 - protein, 566 aa, synthetic construct; identical to SEQ ID NO: 9858
  REGION 1..566: note = hemagglutinin__InfluenzaA__AHZ40261

SEQ ID NO: 12197 - protein, 566 aa, synthetic construct; identical to SEQ ID NO: 9997
  REGION 1..566: note = hemagglutinin__InfluenzaA__AHZ40273

SEQ ID NO: 12198 - protein, 566 aa, synthetic construct
  REGION 1..566: note = hemagglutinin__InfluenzaA__AHZ40285
MKTIIALSYILCLVFAQKLPGNDNSTATLCLGHHAVPNGTIVKTITNDQIEVTNATELVQSSSTGEICDSPHQILDGENCTLIDALLGDPQCDGFQNKKWDLFVERSKAYSNCYPYDVPDYASLRSLVASSGTLEFNNESFNWTGVTQNGTSSACIRRSDSSFFSRLNWLTHLNFKYPALNVTMPNNEQFDKLYIWGVHHPGTDKDQIFLYAQASGRITVSTKRSQQSVIPNIGSRPRIRNIPSRISIYWTIVKPGDILLINSTGNLIAPRGYFKIQSGKSSIMRSDTPIGKCNSECITPNGSIPNDKPFQNVNRITYGACPRYVKQNTLKLATGMRNVPEKQTRGIFGAIAGFIENGWEGMVDGWYGFRHQNSEGRGQAADLKSTQAAIDQINGKLNRLIGKTNEKFHQIEKEFSEVEGRIQDLEKYVEDTKIDLWSYNAELLVALENQHTIDLTDSEMNKLFEKTKKQLRENAEDMGNGCFKIYHKCDNACIGSIRNGTYNHDVYRDEALNNRFQIKGVELKSGYKDWILWISFAISCFLLCVALLGFIMWACQKGNIRCNICI

SEQ ID NO: 12199 - protein, 566 aa, synthetic construct; identical to SEQ ID NO: 9994
  REGION 1..566: note = hemagglutinin__InfluenzaA__AHZ40297

SEQ ID NO: 12200 - protein, 566 aa, synthetic construct
  REGION 1..566: note = hemagglutinin__InfluenzaA__AHZ40309
MKTIIALSYILCLVFAQKLPGNDNSTATLCLGHHAVPNGTIVKTITNDRIEVTNATELVQNSSIGEICDSPHQILDGENCTLIDALLGDPQCDGFQNKKWDLFVERSKAYSNCYPYDVPDYASLRSLVASSGTLEFNNESFNWTGVTQNGTSSACIRRSNNSFFSRLNWLTHLNFKYPALNVTMPNNEQFDKLYIWGVHHPGTDKDQIFLYAQSSGRITVSTKRSQQAVIPNIGSRPRIRNIPSRISIYWTIVKPGDILLINSTGNLIAPRGYFKIRNGKSSIMRSDAPIGKCKSECITPNGSIPNDKPFQNVNRITYGACPRYVKQSTLKLATGMRNVPEKQTRGIFGAIAGFIENGWEGMVDGWYGFRHQNSEGRGQAADLKSTQAAIDQINGKLNRLIGKTNEKFHQIEKEFSEVEGRIQDLEKYVEDTKIDLWSYNAELLVALENQHTIDLTDSEMNKLFEKTKKQLRENAEDMGNGCFKIYHKCDNACIGSIRNGTYDHDVYRDEALNNRFQIKGVELKSGYKDWILWISFAISCFLLCVVLLGFIMWACQKGNIRCNICI

SEQ ID NO: 12201 - protein, 566 aa, synthetic construct; identical to SEQ ID NO: 9883
  REGION 1..566: note = hemagglutinin__InfluenzaA__AHZ40321

SEQ ID NO: 12202 - protein, 566 aa, synthetic construct; identical to SEQ ID NO: 9883
  REGION 1..566: note = hemagglutinin__InfluenzaA__AHZ40333

SEQ ID NO: 12203 - protein, 566 aa, synthetic construct
  REGION 1..566: note = hemagglutinin__InfluenzaA__AHZ40345
MKTIIALSYILCLVFAQKLPGNDNSTATLCLGHHAVPNGTIVKTITNDRIEVTNATELVQNSSIGEICDSPHQILDGENCTLIDALLGDPQCDGFQNKKWDLFVERSKAYSNCYPYDVPDYASLRSLVASSGTLEFNNESFNWTGVTQNGTSSACIRRSNSSFFSRLNWLTHLNFKYPALNVTMPNNEQFDKLYIWGVHHPGTDKDQIFLYAQSSGRITVSTKRSQQAVIPNIGSRPRIRNIPSRISIYWTIVKPGDILLINSTGNLIAPRGYFKIRSGKSSIMRSDAPIGKCKSECITPNGSIPSDKPFQNVNRITYGACPRYVKQSTLKLATGMRNVPEKQTRGIFGAIAGFIENGWEGMVDGWYGFRHQNSEGRGQAADLKSTQAAIDQINGKLNRLIGKTNEKFHQIEKEFSEVEGRIQDLEKYVEDTKIDLWSYNAELLVALENQHTIDLTDSEMNKLFEKTKKQLRENAEDMGNGCFKIYHKCDNACIGSIRNGTYDHDVYRDEALNNRFQIKGVELKSGYKDWILWISFAISCFLLCVALLGFIMWACQKGNIRCNICI

SEQ ID NO: 12204 - protein, 566 aa, synthetic construct; identical to SEQ ID NO: 9884
  REGION 1..566: note = hemagglutinin__InfluenzaA__AHZ40357

SEQ ID NO: 12205 - protein, 566 aa, synthetic construct
  REGION 1..566: note = hemagglutinin__InfluenzaA__AHZ40369
MKTIIALSYILCLVFAQKLPGNDNSTATLCLGHHAVPNGTIVKTITNDRIEVTNATELVQNSSIGEICDSPHQILDGENCTLIDALLGDPQCDGFQNKKWDLFVERSKAYSNCYPYDVPDYASLRSLVASSGTLEFNNESFNWTGVTQNGTSSACIRRSNSSFFSRLNWLTHLNFKYPALNVTMPNNEQFDKLYIWGVHHPGTDKDQIFLYAQSSGRITVSTKRSQQAVIPNIGSRPRIRNIPSRISIYWTIVKPGDILLINSTGNLIAPRGYFKIRSGRSSIMRSDAPIGKCKSECITPNGSIPNDKPFQNVNRITYGACPRYVKQSTLKLATGMRNVPEKQTRGIFGAIAGFIENGWEGMVDGWYGFRHQNSEGRGQAADLKSTQAAIDQINGKLNRLIGKTNEKFHQIEKEFSEVEGRIQDLEKYVEDTKIDLWSYNAELLVALENQHTIDLTDSEMNKLFEKTKKQLRENAEDMGNGCFKIYHKCDNACIGSIRNGTYDHDVYRDEALNNRFQIKGVELKSGYKDWILWISFAISCFLLCVALLGFIMWACQKGNIRCNICI

SEQ ID NO: 12206 - protein, 566 aa, synthetic construct; identical to SEQ ID NO: 9994
  REGION 1..566: note = hemagglutinin__InfluenzaA__AHZ40381

SEQ ID NO: 12207 - protein, 566 aa, synthetic construct; identical to SEQ ID NO: 9883
  REGION 1..566: note = hemagglutinin__InfluenzaA__AHZ40393

SEQ ID NO: 12208 - protein, 566 aa, synthetic construct; identical to SEQ ID NO: 9883
  REGION 1..566: note = hemagglutinin__InfluenzaA__AHZ40405

SEQ ID NO: 12209 - protein, 566 aa, synthetic construct; identical to SEQ ID NO: 9883
  REGION 1..566: note = hemagglutinin__InfluenzaA__AHZ40417

SEQ ID NO: 12210 - protein, 566 aa, synthetic construct
  REGION 1..566: note = hemagglutinin__InfluenzaA__AHZ40429
MKTIIALSYILCLVFAQELPGNDDSTATLCLGHHAVPNGTIVKTITNDQIEVTNATELVQSSSTGEICNSPHQILDGENCTLIDALLGDPQCDGFQNKKWDLFVERSKAHSNCYPYDVPDYASLRSLVASSGTLEFKNESFNWTGVTQNGTSSACIRRSNNSFFSRLNWLTHLNFKYPALNVTMPNNEQFDKLYIWGVHHPGTDKDQIFLYAQASGRITVSTKRSQQAVIPNIGSRPRVRNIPSRVSIYWTIVKPGDILLINSTGNLIAPRGYFKIRSGKSSIMRSDAPIGKCNSACITPNGSIPNDKPFQNVNRITYGACPRYVKQNTLKLATGMRNVPEKQTRGIFGAIAGFIENGWEGMVDGWYGFRHQNSEGRGQAADLKSTQAAIDQINGKLNRLIGKTNEKFHQIEKEFSEVEGRIQDLEKYVEDTKIDLWSYNAELLVALENQHTIDLTDSEMNKLFEKTKKQLRENAEDMGNGCFKIYHKCDNACIGSIRNGTYDHDVYRDEALNNRFQIKGVELKSGYKDWILWISFAISCFLLCVALLGFIMWACQKGNIRCNICI

SEQ ID NO: 12211 - protein, 566 aa, synthetic construct; identical to SEQ ID NO: 9883
  REGION 1..566: note = hemagglutinin__InfluenzaA__AHZ40441

SEQ ID NO: 12212 - protein, 566 aa, synthetic construct; identical to SEQ ID NO: 10026
  REGION 1..566: note = hemagglutinin__InfluenzaA__AHZ40453

SEQ ID NO: 12213 - protein, 566 aa, synthetic construct
  REGION 1..566: note = hemagglutinin__InfluenzaA__AHZ40465
MKTIIALSYILCLVFAQKLPGNDNSTATLCLGHHAVPNGTIVKTITNDRIEVTNATELVQNSSIGEICDSPHQILDGENCTLIDALLGDPQCDGFQNKKWDLFVERSKAYSNCYPYDMPDYASLRSLVASSGTLEFNNESFNWTGVTQNGTSSACIRRSNSSFFSRLNWLTHLNFKYPALNVTMPNNERFDKLYIWGVHHPGTDKDQIFLYAQSSGRITVSTKRSQQAVIPNIGSRPRIRNIPSRISIYWTIVKPGDILLINSTGNLIAPRGYFKIRSGKSSIMRSDAPIGKCKSECITPNGSIPNDKPFQNVNRITYGACPRYVKQSTLKLATGMRNVPEKQTRGIFGAIAGFIENGWEGMVDGWYGFRHQNSEGRGQAADLKSTQAAIDQINGKLNRLIGKTNEKFHQIEKEFSEVEGRIQDLEKYVEDTKIDLWSYNAELLVALENQHTIDLTDSEMNKLFEKTKKQLRENAEDMGNGCFKIYHKCDNACIGSIRNGTYDHNVYRDEALNNRFQIKGVELKSGYKDWILWISFAISCFLLCVALLGFIMWACQKGNIRCNICI

SEQ ID NO: 12214 - protein, 566 aa, synthetic construct; identical to SEQ ID NO: 9884
  REGION 1..566: note = hemagglutinin__InfluenzaA__AHZ40477

SEQ ID NO: 12215 - protein, 566 aa, synthetic construct; identical to SEQ ID NO: 10060
  REGION 1..566: note = hemagglutinin__InfluenzaA__AHZ40489

SEQ ID NO: 12216 - protein, 566 aa, synthetic construct; identical to SEQ ID NO: 9883
  REGION 1..566: note = hemagglutinin__InfluenzaA__AHZ40500

SEQ ID NO: 12217 - protein, 566 aa, synthetic construct; identical to SEQ ID NO: 9883
  REGION 1..566: note = hemagglutinin__InfluenzaA__AHZ40512

SEQ ID NO: 12218 - protein, 566 aa, synthetic construct
  REGION 1..566: note = hemagglutinin__InfluenzaA__AHZ40524
MKTIIALSYILCLVFAQKLPGNDNSTATLCLGHHAVPNGTIVKTITNDRIEVTNATELVQNSSIGEICDSPHQILDGENCTLIDALLGDPQCDGFQNKKWDLFVERSKAYSNCYPYDVPDYASLRSLVASSGTLEFNNESFNWAGVTQNGTSSACIRGSNSSFFSRLNWLTHLNFKYPALNVTMPNNEQFDKLYIWGVHHPGTDKDQIFLYAQSSGRITVSTKRSQQAVIPNIGSRPRIRNIPSRISIYWTIVKPGDILLINSTGNLIAPRGYFKIRSGKSSIMRSDAPIGKCKSECITPNGSIPNDKPFQNVNRITYGACPRYVKQSTLKLATGMRNVPERQTRGIFGAIAGFIENGWEGMVDGWYGFRHQNSEGRGQAADLKSTQAAIDQINGKLNRLIGKTNEKFHQIEKEFSEVEGRIQDLEKYVEDTKIDLWSYNAELLVALENQHTIDLTDSEMNKLFEKTKKQLRENAEDMGNGCFKIYHKCDNACIGSIRNGTYDHDVYRDEALNNRFQIKGVELKSGYKDWILWISFAISCFLLCVALLGFIMWACQKGNIRCNICI

SEQ ID NO: 12219 - protein, 566 aa, synthetic construct; identical to SEQ ID NO: 11770
  REGION 1..566: note = hemagglutinin__InfluenzaA__AHZ40536

SEQ ID NO: 12220 - protein, 566 aa, synthetic construct; identical to SEQ ID NO: 9883
  REGION 1..566: note = hemagglutinin__InfluenzaA__AHZ40548

SEQ ID NO: 12221 - protein, 566 aa, synthetic construct; identical to SEQ ID NO: 9858
  REGION 1..566: note = hemagglutinin__InfluenzaA__AHZ40572

SEQ ID NO: 12222 - protein, 566 aa, synthetic construct; identical to SEQ ID NO: 9858
  REGION 1..566: note = hemagglutinin__InfluenzaA__AHZ40583

SEQ ID NO: 12223 - protein, 566 aa, synthetic construct
  REGION 1..566: note = hemagglutinin__InfluenzaA__AHZ40595
MKAILVVMLYTFATANADTLCIGYHANNSTDTVDTVLEKNVTVTHSVNLLEDKHDGKLCKLRGVAPLHLGKCNIAGWILGNPECESLSTASSWSYIVETSGSDNGTCYPGDFIDYEELREQLSSVSSFERFEIFPKTSSWPNHDSNKGVTAACPHAGAKGFYKNLIWLVKKGNSYPKLSISYINDKGKEVLVLWGIHHPSTTADQQSLYQNADTYVFVGTSRYSKKFKPEIAIRPKVRDQEGRMNYYWTLVEPGDKITFEATGNLVVPRYAFAMKRNAGSGIIISDTPVHDCNTTCQTPKGAINTSLPFQNIHPITIGKCPKYVKSTKLRLATGLRNVPSIQSRGLFGAIAGFIEGGWTGMVDGWYGYHHQNEQGSGYAADLKSTQNAIDKITNKVNSVIEKMNTQFTAVGKEFNHLEKRIENLNKKVDDGFLDIWTYNAELLVLLENERTLDYHDSNVKNLYEKVRNQLKNNAKEIGNGCFEFYHKCDNTCMESVKNGTYDYPKYSEEAKLNREKIDGVKLESTRIYQILAIYSTAASSLVLVVSLGAISFWMCSNGSLQCRICI

SEQ ID NO: 12224 - protein, 566 aa, synthetic construct
  REGION 1..566: note = hemagglutinin__InfluenzaA__AHZ40606
MKTIIALSYILCLVFAQKLPGNDNSTATLCLGHHAVPNGTIVKTITNDRIEVTNATELVQNSSIGEICDSPHQILDGENCTLIDALLGDPQCDGFQNKKWDLFVERSKAYSNCYPYDVPDYASLRSLVASSGTLEFNNESFNWTGVTQNGTSSACIRRSNSSFFSRLNWLTHLNFKYPALNVTMPNNEQFDKLYIWGVHHPGTDKDQIFLYAQSSGRITVSTKRSQQAVIPNIGSRPRIRNIPSRISIYWTIVKPGDILLINSTGNLIAPRGYFKIRSGKSSIMRSDAPIGKCKSECITPNGSIPNDKPFQNVNRITYGACPRYVKQSTLKLATGMRNVPEKQTRGIFGAIAGFIENGWEGMMDGWYGFRHQNSEGRGQAADLKSTQAAIDQINGKLNRLIGKTNEKFHQIEKEFSEVEGRIQDLEKYVEDTKIDLWSYNAELLVALENQHTIDLTDSEMNKLFEKTKKQLRENAEDMGNGCFKIYHKCDNACIGSIRNGTYDHDVYRDEALNNRFQIKGVELKSGYKDWILWISFAISCFLLCVALLGFIMWACQKGNIRCNICI

SEQ ID NO: 12225 - protein, 566 aa, synthetic construct; identical to SEQ ID NO: 9883
  REGION 1..566: note = hemagglutinin__InfluenzaA__AHZ40618

SEQ ID NO: 12226 - protein, 566 aa, synthetic construct; identical to SEQ ID NO: 9922
  REGION 1..566: note = hemagglutinin__InfluenzaA__AHZ40626

SEQ ID NO: 12227 - protein, 566 aa, synthetic construct; identical to SEQ ID NO: 9883
  REGION 1..566: note = hemagglutinin__InfluenzaA__AHZ40638

SEQ ID NO: 12228 - protein, 566 aa, synthetic construct; identical to SEQ ID NO: 9858
  REGION 1..566: note = hemagglutinin__InfluenzaA__AHZ40650

SEQ ID NO: 12229 - protein, 566 aa, synthetic construct
  REGION 1..566: note = hemagglutinin__InfluenzaA__AHZ40662
MKTIIALSYILCLVFAQELPGNDDSTATLCLGHHAVPNGTIVKTITNDRIEVTNATELVQSSSTGEICNSPHQILDGENCTLIDALLGDPQCDGFQNKKWDLFVERSKAHSNCYPYDVPDYASLRSLVASSGTLEFNNESFNWTGVTQNGTSSACIRRSNNSFFSRLNWLTHLNFKYPALNVTIPNNEQFDKLYIWGVHHPGTDKDQIFLYAQASGRITVSTKRSQQTVIPNIGSRPRVRNIPSRVSIYWTIVKPGDILLINSTGNLIAPRGYFKIRSGKSSIMRSDAPIGKCNSACITPNGSIPNDKPFQNVNRITYGACPRYVKQNTLKLATGMRNVPEKQTRGIFGAIAGFIENGWEGMVDGWYGFRHQNSEGRGQAADLKSTQAAIDQINGKLNRLIGKTNEKFHQIEKEFSEVEGRIQDLEKYVEDTKIDLWSYNAELLVALENQHTIDLTDSEMNKLFEKTKKQLRENAEDMGNGCFKIYHKCDNACIGSIRNGTYDHDVYRDEALNNRFQIKGVELKSGYKDWILWISFAISCFLLCVALLGFIMWACQKGNIRCNICI

SEQ ID NO: 12230 - protein, 566 aa, synthetic construct; identical to SEQ ID NO: 9903
  REGION 1..566: note = hemagglutinin__InfluenzaA__AHZ40674

SEQ ID NO: 12231 - protein, 566 aa, synthetic construct; identical to SEQ ID NO: 9883
  REGION 1..566: note = hemagglutinin__InfluenzaA__AHZ40686

SEQ ID NO: 12232 - protein, 566 aa, synthetic construct; identical to SEQ ID NO: 9868
  REGION 1..566: note = hemagglutinin__InfluenzaA__AHZ40698

SEQ ID NO: 12233 - protein, 566 aa, synthetic construct; identical to SEQ ID NO: 9868
  REGION 1..566: note = hemagglutinin__InfluenzaA__AHZ40710

SEQ ID NO: 12234 - protein, 566 aa, synthetic construct; identical to SEQ ID NO: 9994
  REGION 1..566: note = hemagglutinin__InfluenzaA__AHZ40722

SEQ ID NO: 12235 - protein, 566 aa, synthetic construct; identical to SEQ ID NO: 9891
  REGION 1..566: note = hemagglutinin__InfluenzaA__AHZ40734

SEQ ID NO: 12236 - protein, 566 aa, synthetic construct; identical to SEQ ID NO: 9994
  REGION 1..566: note = hemagglutinin__InfluenzaA__AHZ40746

SEQ ID NO: 12237 - protein, 566 aa, synthetic construct; identical to SEQ ID NO: 12187
  REGION 1..566: note = hemagglutinin__InfluenzaA__AHZ40758

SEQ ID NO: 12238 - protein, 566 aa, synthetic construct; identical to SEQ ID NO: 2667
  REGION 1..566: note = hemagglutinin__InfluenzaA__AHZ40782

SEQ ID NO: 12239 - protein, 566 aa, synthetic construct; identical to SEQ ID NO: 2667
  REGION 1..566: note = hemagglutinin__InfluenzaA__AHZ40793

SEQ ID NO: 12240 - protein, 566 aa, synthetic construct; identical to SEQ ID NO: 2667
  REGION 1..566: note = hemagglutinin__InfluenzaA__AHZ40804

SEQ ID NO: 12241 - protein, 566 aa, synthetic construct
  REGION 1..566: note = hemagglutinin__InfluenzaA__AHZ40815
MKAILVVLLYTFATANADTLCIGYHANNSTDTVDTVLEKNVTVTHSVNLLEDKHNGKLCKLRGVAPLHLGKCNIAGWILGNPECESLSTASSWSYIVETPSSDNGTCYPGDFIDYEELREQLSSVSSFERFEIFPKTSSWPNHDSNKGVTAACPHAGAKSFYKNLIWLVKKGNSYPKLSKSYINDKGKEVLVLWGIHHPSTSADQQSLYQNADAYVFVGSSRYSKKFKPEIAIRPKVRDREGRMNYYWTLVEPGDKITFEATGNLVVPRYAFAMERNAGSGIIISDTPVHDCNTTCQTPKGAINTSLPFQNIHPITIGKCPKYVKSTKLRLATGLRNIPSIQSRGLFGAIAGFIEGGWTGMVDGWYGYHHQNEQGSGYAADLKSTQNAIDEITNKVNSVIEKMNTQFTAVGKEFNHLEKRIENLNKKVDDGFLDIWTYNAELLVLLENERTLDYHDSNVKNLYEKVRSQLKNNAKEIGNGCFEFYHKCDNTCMESVKNGTYDYPKYSEEAKLNREEIDGVKLESTRIYQILAIYSTVASSLVLVVSLGAISFWMCSNGSLQCRICI

SEQ ID NO: 12242 - protein, 566 aa, synthetic construct
  REGION 1..566: note = hemagglutinin__InfluenzaA__AHZ40826
MKAILVVLLYTFATANADTLCIGYHANNSTDTVDTVLEKNVTVTHSVNLLEDKHNGKLCKLRGVAPLHLGKCNIAGWILGNPECESLSTASSWSYIVETPSSDNGTCYPGDFIDYEELREQLSSVSSFERFEIFPKTSSWPNHDSNKGVTAACPHAGAKSFYKNLIWLVKKGNSYPKLSKSYINDKGKEVLVLWGIHHPSTSADQQSIYQNADAYVFVGSSRYSKKFKPEIAIRPKVRDQEGRMNYYWTLVEPGDKITFEATGNLVVPRYAFAMERNAGSGIIISDTPVHDCNTTCQTPKGAINTSLPFQNIHPITIGKCPKYVKSTKLRLATGLRNIPSIQSRGLFGAIAGFIEGGWTGMVDGWYGYHHQNEQGSGYAADLKSTQNAIDEITNKVNSVIEKMNTQFTAVGKEFNHLEKRIENLNKKVDDGFLDIWTYNAELLVLLENERTLDYHDSNVKNLYEKVRSQLKNNAKEIGNGCFEFYHKCDNTCMESVKNGTYDYPKYSEEAKLNREEIDGVKLESTRIYQILAIYSTVASSLVLVVSLGAISFWMCSNGSLQCRICI

SEQ ID NO: 12243 - protein, 566 aa, synthetic construct
  REGION 1..566: note = hemagglutinin__InfluenzaA__AHZ40848
MKAILVVLLYTFATANADTLCIGYHANNSTDTVDTVLEKNVTVTHSVNLLEDKHNGKLCKLRGVAPLHLGKCNIAGWILGNPECESLSTASSWSYIVETPSSDNGTCYPGDFIDYEELREQLSSVSSFERFEIFPKTSSWPNHDSNKGVTAACPHAGAKSFYKNLIWLVKEGNSYPKLSKSYINDKGKEVLVLWGIHHPSTSAEQQSLYQNADAYVFVGSSRYSKKFKPEIAARPKVRGQAGRMNYYWTLVEPGDKITFEATGNLVVPRYAFAMERNAGSGIIISDTPVHDCNTTCQTPKGAINTSLPFQNIHPITIGKCPKYVKSTKLRLATGLRNIPSIQSRGLFGAIAGFIEGGWTGMVDGWYGYHHQNEQGSGYAADLKSTQNAIDEITNKVNSVIEKMNTQFTAVGKEFNHLEKRIENLNKKVDDGFLDIWTYNAELLVLLENERTLDYHDSNVKNLYEKVRSQLKNNAKEIGNGCFEFYHKCDNTCMESVKNGTYDYPKYSEEAKLNREEIDGVKLESTRIYQILAIYSTVASSLVLVVSLGAISFWMCSNGSLQCRICI

SEQ ID NO: 12244 - protein, 566 aa, synthetic construct
  REGION 1..566: note = hemagglutinin__InfluenzaA__AHZ40881
MKAILVVLLYTFATANADTLCIGYHANNSTDTVDTVLEKNVTVTHSVNLLEDKHNGKLCKLRGVAPLHLGKCNIAGWILGNPECESLSTASSWSYIVETPSSDNGTCYPGDFIDYEELREQLSSVSSFERFEIFPKTSSWPNHDSNKGVTAACPHAGAKSFYKNLIWLVKKGNSYPKLSKSYINDKGKEVLVLWGIHHPSTSAEQQSLYQNADAYVFVGSSRYSKKFKPEIAARPKVRGQAGRMNYYWTLVEPGDKITFEATGNLVVPRYAFAMERNAGSGIIISDTPVHDCNTTCQTPKGAINTSLPFQNIHPITIGKCPKYVKSTKLRLATGLRNIPSIQSRGLFGAIAGFIEGGWTGMVDGWYGYHHQNEQGSGYAADLKSTQNAIDEITNKVNSVIEKMNTQFTAVGKEFNHLEKRIENLNKKVDDGFLDIWTYNAELLVLLENERTLDYHDSNVKNLYEKVRSQLKNNAKEIGNGCFEFYHKCDNTCMESVKNGTYDYPKYSEEAKLNREEIDGVKLESTRIYQILAIYSTVASSLVLVVSLGAISFWMCSNGSLQCRICI

SEQ ID NO: 12245 - protein, 566 aa, synthetic construct; identical to SEQ ID NO: 12244
  REGION 1..566: note = hemagglutinin__InfluenzaA__AHZ40892

SEQ ID NO: 12246 - protein, 566 aa, synthetic construct; identical to SEQ ID NO: 12243
  REGION 1..566: note = hemagglutinin__InfluenzaA__AHZ40914

SEQ ID NO: 12247 - protein, 566 aa, synthetic construct; identical to SEQ ID NO: 12244
  REGION 1..566: note = hemagglutinin__InfluenzaA__AHZ40925

SEQ ID NO: 12248 - protein, 566 aa, synthetic construct
  REGION 1..566: note = hemagglutinin__InfluenzaA__AHZ40936
MKAILVVLLYTFATANADTLCIGYHANNSTDTVDTVLEKNVTVTHSVNLLEDKHNGKLCKLRGVAPLHLGKCNIAGWILGNPECESLSTASSWSYIVETPSSDNGTCYPGDFIDYEELREQLSSVSSFERFEIFPKTSSWPNHDSNKGVTAACPHAGAKSFYKNLIWLVKKGNSYPKLSKSYINDKGKEVLVLWGIHHPSTSAEQQSLYQNADAYVFVGSSRYSKKFKPEIAARPKVRDQAGRMNYYWTLVEPGDKITFEATGNLVVPRYAFAMERNAGSGIIISDTPVHDCNTTCQTPKGAINTSLPFQNIHPITIGKCPKYVKSTKLRLATGLRNIPSIQSRGLFGAIAGFIEGGWTGMVDGWYGYHHQNEQGSGYAADLKSTQNAIDEITNKVNSVIEKMNTQFTAVGKEFNHLEKRIENLNKKVDDGFLDIWTYNAELLVLLENERTLDYHDSNVKNLYEKVRSQLKNNAKEIGNGCFEFYHKCDNTCMESVKNGTYDYPKYSEEAKLNREEIDGVKLESTRIYQILAIYSTVASSLVLVVSLGAISFWMCSNGSLQCRICI

SEQ ID NO: 12249 - protein, 566 aa, synthetic construct; identical to SEQ ID NO: 12243
  REGION 1..566: note = hemagglutinin__InfluenzaA__AHZ40947

SEQ ID NO: 12250 - protein, 566 aa, synthetic construct; identical to SEQ ID NO: 12244
  REGION 1..566: note = hemagglutinin__InfluenzaA__AHZ40958

SEQ ID NO: 12251 - protein, 566 aa, synthetic construct; identical to SEQ ID NO: 12248
  REGION 1..566: note = hemagglutinin__InfluenzaA__AHZ40969

SEQ ID NO: 12252 - protein, 566 aa, synthetic construct; identical to SEQ ID NO: 12248
  REGION 1..566: note = hemagglutinin__InfluenzaA__AHZ40980

SEQ ID NO: 12253 - protein, 566 aa, synthetic construct; identical to SEQ ID NO: 12248
  REGION 1..566: note = hemagglutinin__InfluenzaA__AHZ40991

SEQ ID NO: 12254 - protein, 566 aa, synthetic construct; identical to SEQ ID NO: 12248
  REGION 1..566: note = hemagglutinin__InfluenzaA__AHZ41002

SEQ ID NO: 12255 - protein, 566 aa, synthetic construct; identical to SEQ ID NO: 12248
  REGION 1..566: note = hemagglutinin__InfluenzaA__AHZ41013

SEQ ID NO: 12256 - protein, 566 aa, synthetic construct; identical to SEQ ID NO: 12244
  REGION 1..566: note = hemagglutinin__InfluenzaA__AHZ41024

SEQ ID NO: 12257 - protein, 566 aa, synthetic construct; identical to SEQ ID NO: 12244
  REGION 1..566: note = hemagglutinin__InfluenzaA__AHZ41035

SEQ ID NO: 12258 - protein, 566 aa, synthetic construct; identical to SEQ ID NO: 12244
  REGION 1..566: note = hemagglutinin__InfluenzaA__AHZ41046

SEQ ID NO: 12259 - protein, 566 aa, synthetic construct; identical to SEQ ID NO: 12244
  REGION 1..566: note = hemagglutinin__InfluenzaA__AHZ41057

SEQ ID NO: 12260 - protein, 566 aa, synthetic construct; identical to SEQ ID NO: 12244
  REGION 1..566: note = hemagglutinin__InfluenzaA__AHZ41068

SEQ ID NO: 12261 - protein, 566 aa, synthetic construct; identical to SEQ ID NO: 12248
  REGION 1..566: note = hemagglutinin__InfluenzaA__AHZ41079

SEQ ID NO: 12262 - protein, 566 aa, synthetic construct; identical to SEQ ID NO: 12244
  REGION 1..566: note = hemagglutinin__InfluenzaA__AHZ41090

SEQ ID NO: 12263 - protein, 566 aa, synthetic construct; identical to SEQ ID NO: 12248
  REGION 1..566: note = hemagglutinin__InfluenzaA__AHZ41101

SEQ ID NO: 12264 - protein, 566 aa, synthetic construct; identical to SEQ ID NO: 12244
  REGION 1..566: note = hemagglutinin__InfluenzaA__AHZ41112

SEQ ID NO: 12265 - protein, 566 aa, synthetic construct; identical to SEQ ID NO: 12244
  REGION 1..566: note = hemagglutinin__InfluenzaA__AHZ41123

SEQ ID NO: 12266 - protein, 566 aa, synthetic construct; identical to SEQ ID NO: 12244
  REGION 1..566: note = hemagglutinin__InfluenzaA__AHZ41134

SEQ ID NO: 12267 - protein, 566 aa, synthetic construct; identical to SEQ ID NO: 12244
  REGION 1..566: note = hemagglutinin__InfluenzaA__AHZ41145

SEQ ID NO: 12268 - protein, 566 aa, synthetic construct; identical to SEQ ID NO: 12244
  REGION 1..566: note = hemagglutinin__InfluenzaA__AHZ41156

SEQ ID NO: 12269 - protein, 566 aa, synthetic construct; identical to SEQ ID NO: 12244
  REGION 1..566: note = hemagglutinin__InfluenzaA__AHZ41167

SEQ ID NO: 12270 - protein, 566 aa, synthetic construct; identical to SEQ ID NO: 12244
  REGION 1..566: note = hemagglutinin__InfluenzaA__AHZ41178

SEQ ID NO: 12271 - protein, 566 aa, synthetic construct; identical to SEQ ID NO: 12244
  REGION 1..566: note = hemagglutinin__InfluenzaA__AHZ41189

SEQ ID NO: 12272 - protein, 566 aa, synthetic construct; identical to SEQ ID NO: 12243
  REGION 1..566: note = hemagglutinin__InfluenzaA__AHZ41246

SEQ ID NO: 12273 - protein, 566 aa, synthetic construct; identical to SEQ ID NO: 12248
  REGION 1..566: note = hemagglutinin__InfluenzaA__AHZ41263

SEQ ID NO: 12274 - protein, 566 aa, synthetic construct; identical to SEQ ID NO: 12244
  REGION 1..566: note = hemagglutinin__InfluenzaA__AHZ41281

SEQ ID NO: 12275 - protein, 566 aa, synthetic construct; identical to SEQ ID NO: 12244
  REGION 1..566: note = hemagglutinin__InfluenzaA__AHZ41292

SEQ ID NO: 12276 - protein, 566 aa, synthetic construct; identical to SEQ ID NO: 12243
  REGION 1..566: note = hemagglutinin__InfluenzaA__AHZ41303

SEQ ID NO: 12277 - protein, 566 aa, synthetic construct; identical to SEQ ID NO: 12243
  REGION 1..566: note = hemagglutinin__InfluenzaA__AHZ41314

SEQ ID NO: 12278 - protein, 566 aa, synthetic construct; identical to SEQ ID NO: 12243
  REGION 1..566: note = hemagglutinin__InfluenzaA__AHZ41325

SEQ ID NO: 12279 - protein, 566 aa, synthetic construct; identical to SEQ ID NO: 12243
  REGION 1..566: note = hemagglutinin__InfluenzaA__AHZ41336

SEQ ID NO: 12280 - protein, 566 aa, synthetic construct; identical to SEQ ID NO: 12243
  REGION 1..566: note = hemagglutinin__InfluenzaA__AHZ41347

SEQ ID NO: 12281 - protein, 566 aa, synthetic construct; identical to SEQ ID NO: 12244
  REGION 1..566: note = hemagglutinin__InfluenzaA__AHZ41358

SEQ ID NO: 12282 - protein, 566 aa, synthetic construct; identical to SEQ ID NO: 12244
  REGION 1..566: note = hemagglutinin__InfluenzaA__AHZ41366

SEQ ID NO: 12283 - protein, 566 aa, synthetic construct; identical to SEQ ID NO: 12248
  REGION 1..566: note = hemagglutinin__InfluenzaA__AHZ41377

SEQ ID NO: 12284 - protein, 566 aa, synthetic construct; identical to SEQ ID NO: 12244
  REGION 1..566: note = hemagglutinin__InfluenzaA__AHZ41388

SEQ ID NO: 12285 - protein, 566 aa, synthetic construct; identical to SEQ ID NO: 12248
  REGION 1..566: note = hemagglutinin__InfluenzaA__AHZ41410

SEQ ID NO: 12286 - protein, 566 aa, synthetic construct; identical to SEQ ID NO: 12244
  REGION 1..566: note = hemagglutinin__InfluenzaA__AHZ41432

SEQ ID NO: 12287 - protein, 566 aa, synthetic construct
  REGION 1..566: note = hemagglutinin__InfluenzaA__AHZ41441
MKAILVVLLYTFATANADTLCIGYHANNSTDTVDTVLEKNVTVTHSVNLLEDKHNGKLCKLRGVAPLHLGKCNIAGWILGNPECESLSTASSWSYIVETPSSDNGTCYPGDFIDYEELREQLSSVSSFERFEIFPKTSSWPNHDSNKGVTAACPHAGAKSFYKNLIWLVKEGNSYPKLSKSYINDKGKEVLVLWGIHHPSTSAEQQSLYQNADAYVFVGSSRYSKKFKPEIAARPKVRDQAGRMNYYWTLVEPGDKITFEATGNLVVPRYAFAMERNAGSGIIISDTPVHDCNTTCQTPKGAINTSLPFQNIHPITIGKCPKYVKSTKLRLATGLRNIPSIQSRGLFGAIAGFIEGGWTGMVDGWYGYHHQNEQGSGYAADLKSTQNAIDEITNKVNSVIEKMNTQFTAVGKEFNHLEKRIENLNKKVDDGFLDIWTYNAELLVLLENERTLDYHDSNVKNLYEKVRSQLKNNAKEIGNGCFEFYHKCDNTCMESVKNGTYDYPKYSEEAKLNREEIDGVKLESTRIYQILAIYSTVASSLVLVVSLGAISFWMCSNGSLQCRICI

SEQ ID NO: 12288 - protein, 566 aa, synthetic construct; identical to SEQ ID NO: 12243
  REGION 1..566: note = hemagglutinin__InfluenzaA__AHZ41452

SEQ ID NO: 12289 - protein, 566 aa, synthetic construct
  REGION 1..566: note = hemagglutinin__InfluenzaA__AHZ41463
MKAILVVLLYTFATANADTLCIGYHANNSTDTVYTVLEKNVTVTHSVNLLEDKHNGKLCKLRGVAPLHLGKCNIAGWILGNPECESLSTASSWSYIVETPSSDNGTCYPGDFIDYEELREQLSSVSSFERFEIFPKTSSWPNHDSNKGVTAACPHAGAKSFYKNLIWLVKKGNSYPKLSKSYINDKGKEVLVLWGIHHPSTSAEQQSLYQNADAYVFVGSSRYSKKFKPEIAARPKVRGQAGRMNYYWTLVEPGDKITFEATGNLVVPRYAFAMERNAGSGIIISDTPVHDCNTTCQTPKGAINTSLPFQNIHPITIGKCPKYVKSTKLRLATGLRNIPSIQSRGLFGAIAGFIEGGWTGMVDGWYGYHHQNEQGSGYAADLKSTQNAIDEITNKVNSVIEKMNTQFTAVGKEFNHLEKRIENLNKKVDDGFLDIWTYNAELLVLLENERTLDYHDSNVKNLYEKVRSQLKNNAKEIGNGCFEFYHKCDNTCMESVKNGTYDYPKYSEEAKLNREEIDGVKLESTRIYQILAIYSTVASSLVLVVSLGAISFWMCSNGSLQCRICI

SEQ ID NO: 12290 - protein, 566 aa, synthetic construct; identical to SEQ ID NO: 12243
  REGION 1..566: note = hemagglutinin__InfluenzaA__AHZ41473

SEQ ID NO: 12291 - protein, 566 aa, synthetic construct; identical to SEQ ID NO: 12243
  REGION 1..566: note = hemagglutinin__InfluenzaA__AHZ41484

SEQ ID NO: 12292 - protein, 566 aa, synthetic construct; identical to SEQ ID NO: 12248
  REGION 1..566: note = hemagglutinin__InfluenzaA__AHZ41495

SEQ ID NO: 12293 - protein, 566 aa, synthetic construct; identical to SEQ ID NO: 12243
  REGION 1..566: note = hemagglutinin__InfluenzaA__AHZ41506

SEQ ID NO: 12294 - protein, 566 aa, synthetic construct
  REGION 1..566: note = hemagglutinin__InfluenzaA__AHZ41517
MKAILVVLLYTFATANADTLCIGYHANNSTDTVDTVLEKNVTVTHSVNLLEDKHNGKLCKLRGVAPLHLGKCNIAGWILGNPECESLSTASSWSYIVETPSSDNGTCYPGDFIDYEELREQLSSVSSFERFEIFPKTSSWPNHDSNKGVTAACPHAGAKSFYKNLIWLVKKGNSYPKLSESYINDKGKEVLVLWGIHHPSTSAEQQSLYQNADAYVFVGSSRYSKKFKPEIAARPKVRGQAGRMNYYWTLVEPGDKITFEATGNLVVPRYAFAMERNAGSGIIISDTPVHDCNTTCQTPKGAINTSLPFQNIHPITIGKCPKYVKSTKLRLATGLRNIPSIQSRGLFGAIAGFIEGGWTGMVDGWYGYHHQNEQGSGYAADLKSTQNAIDEITNKVNSVIEKMNTQFTAVGKEFNHLEKRIENLNKKVDDGFLDIWTYNAELLVLLENERTLDYHDSNVKNLYEKVRSQLKNNAKEIGNGCFEFYHKCDNTCMESVKNGTYDYPKYSEEAKLNREEIDGVKLESTRIYQILAIYSTVASSLVLVVSLGAISFWMCSNGSLQCRICI

SEQ ID NO: 12295 - protein, 566 aa, synthetic construct
  REGION 1..566: note = hemagglutinin__InfluenzaA__AHZ41528
MKAILVVLLYTFATANADTLCIGYHANNSTDTVDTVLEKNVTVTHSVNLLEDKHNGKLCKLRGVAPLHLGKCNIAGWILGNPECESLSTASSWSYIVETPSSDNGTCYPGDFIDYEELREQLSSVSSFERFEIFPKTSSWPNHDSNKGVTAACPHAGAKSFYKNLIWLVKKGNSYPKLSESYINDKGKEVLVLWGIHHPSTSADQQSLYQNADAYVFVGSSRYSKKFKPEIAARPKVRGQAGRMNYYWTLVEPGDKITFEATGNLVVPRYAFAMERNAGSGIIISDTPVHDCNTTCQTPKGAINTSLPFQNIHPITIGKCPKYVKSTKLRLATGLRNIPSIQSRGLFGAIAGFIEGGWTGMVDGWYGYHHQNEQGSGYAADLKSTQNAIDEITNKVNSVIEKMNTQFTAVGKEFNHLEKRIENLNKKVDDGFLDIWTYNAELLVLLENERTLDYHDSNVKNLYEKVRSQLKNNAKEIGNGCFEFYHKCDNTCMESVKNGTYDYPKYSEEAKLNREEIDGVKLESTRIYQILAIYSTVASSLVLVVSLGAISFWMCSNGSLQCRICI

SEQ ID NO: 12296 - protein, 566 aa, synthetic construct; identical to SEQ ID NO: 12248
  REGION 1..566: note = hemagglutinin__InfluenzaA__AHZ41539

SEQ ID NO: 12297 - protein, 566 aa, synthetic construct; identical to SEQ ID NO: 12243
  REGION 1..566: note = hemagglutinin__InfluenzaA__AHZ41550

SEQ ID NO: 12298 - protein, 566 aa, synthetic construct; identical to SEQ ID NO: 12244
  REGION 1..566: note = hemagglutinin__InfluenzaA__AHZ41561

SEQ ID NO: 12299 - protein, 566 aa, synthetic construct
  REGION 1..566: note = hemagglutinin__InfluenzaA__AHZ41572
MKAILVVLLYTFATANADTLCIGYHANNSTDTVDTVLEKNVTVTHSVNLLEDKHNGKLCKLRGVAPLHLGKCNIAGWILGNPECESLSTASSWSYIVETPSSDNGTCYPGDFIDYEELREQLSSVSSFERFEIFPKTSSWPNHDSNKGVTAACPHAGAKSFYKNLIWLVKKGNSYPKLSKSYINDKGKEVLVLWGIHHPSTSAEQQSLYQNADAYVFVGSSRYSKKFKPEIAARPKVRGQAGRMNYYWTLVEPGDEITFEATGNLVVPRYAFAMERNAGSGIIISDTPVHDCNTTCQTPKGAINTSLPFQNIHPITIGKCPKYVKSTKLRLATGLRNIPSIQSRGLFGAIAGFIEGGWTGMVDGWYGYHHQNEQGSGYAADLKSTQNAIDEITNKVNSVIEKMNTQFTAVGKEFNHLEKRIENLNKKVDDGFLDIWTYNAELLVLLENERTLDYHDSNVKNLYEKVRSQLKNNAKEIGNGCFEFYHKCDNTCMESVKNGTYDYPKYSEEAKLNREEIDGVKLESTRIYQILAIYSTVASSLVLVVSLGAISFWMCSNGSLQCRICI

SEQ ID NO: 12300 - protein, 566 aa, synthetic construct; identical to SEQ ID NO: 12248
  REGION 1..566: note = hemagglutinin__InfluenzaA__AHZ41583

SEQ ID NO: 12301 - protein, 566 aa, synthetic construct; identical to SEQ ID NO: 12243
  REGION 1..566: note = hemagglutinin__InfluenzaA__AHZ41594

SEQ ID NO: 12302 - protein, 566 aa, synthetic construct
  REGION 1..566: note = hemagglutinin__InfluenzaA__AHZ41605
MKAILVVLLYTFATANADTLCIGYHANNSTDTVDTVLEKNVTVTHSVNLLEDKHNGKLCKLRGVAPLHLGKCNIAGWILGNPECESLSTASSWSYIVETPSSDNGTCYPGDFIDYEELREQLSSVSSFERFEIFPNTSSWPNHDSNKGVTAACPHAGAKSFYKNLIWLVKKGNSYPKLSKSYINDKGKEVLVLWGIHHPSTSAEQQSLYQNADAYVFVGSSRYSKKFKPEIAARPKVMGQAGRMNYYWTLVEPGDKITFEATGNLVVPRYAFAMERNAGSGIIISDTPVHDCNTTCQTPKGAINTSLPFQNIHPITIGKCPKYVKSTKLRLATGLRNIPSIQSRGLFGAIAGFIEGGWTGMVDGWYGYHHQNEQGSGYAADLKSTQNAIDEITNKVNSVIEKMNTQFTAVGKEFNHLEKRIENLNKKVDDGFLDIWTYNAELLVLLENERTLDYHDSNVKNLYEKVRSQLKNNAKEIGNGCFEFYHKCDNTCMESVKNGTYDYPKYSEEAKLNREEIDGVKLESTRIYQILAIYSTVASSLVLVVSLGAISFWMCSNGSLQCRICI

SEQ ID NO: 12303 - protein, 566 aa, synthetic construct; identical to SEQ ID NO: 12243
  REGION 1..566: note = hemagglutinin__InfluenzaA__AHZ41616

SEQ ID NO: 12304 - protein, 566 aa, synthetic construct; identical to SEQ ID NO: 12248
  REGION 1..566: note = hemagglutinin__InfluenzaA__AHZ41627

SEQ ID NO: 12305 - protein, 566 aa, synthetic construct; identical to SEQ ID NO: 12248
  REGION 1..566: note = hemagglutinin__InfluenzaA__AHZ41638

SEQ ID NO: 12306 - protein, 566 aa, synthetic construct; identical to SEQ ID NO: 12244
  REGION 1..566: note = hemagglutinin__InfluenzaA__AHZ41649

SEQ ID NO: 12307 - protein, 566 aa, synthetic construct; identical to SEQ ID NO: 12244
  REGION 1..566: note = hemagglutinin__InfluenzaA__AHZ41660

SEQ ID NO: 12308 - protein, 566 aa, synthetic construct; identical to SEQ ID NO: 12248
  REGION 1..566: note = hemagglutinin__InfluenzaA__AHZ41671

SEQ ID NO: 12309 - protein, 566 aa, synthetic construct; identical to SEQ ID NO: 12248
  REGION 1..566: note = hemagglutinin__InfluenzaA__AHZ41682

SEQ ID NO: 12310 - protein, 566 aa, synthetic construct; identical to SEQ ID NO: 12248
  REGION 1..566: note = hemagglutinin__InfluenzaA__AHZ41693

SEQ ID NO: 12311 - protein, 566 aa, synthetic construct; identical to SEQ ID NO: 12248
  REGION 1..566: note = hemagglutinin__InfluenzaA__AHZ41704

SEQ ID NO: 12312 - protein, 566 aa, synthetic construct; identical to SEQ ID NO: 12248
  REGION 1..566: note = hemagglutinin__InfluenzaA__AHZ41715

SEQ ID NO: 12313 - protein, 566 aa, synthetic construct; identical to SEQ ID NO: 12248
  REGION 1..566: note = hemagglutinin__InfluenzaA__AHZ41726

SEQ ID NO: 12314 - protein, 566 aa, synthetic construct; identical to SEQ ID NO: 12248
  REGION 1..566: note = hemagglutinin__InfluenzaA__AHZ41737

SEQ ID NO: 12315 - protein, 566 aa, synthetic construct; identical to SEQ ID NO: 12248
  REGION 1..566: note = hemagglutinin__InfluenzaA__AHZ41748

SEQ ID NO: 12316 - protein, 566 aa, synthetic construct; identical to SEQ ID NO: 12248
  REGION 1..566: note = hemagglutinin__InfluenzaA__AHZ41759

SEQ ID NO: 12317 - protein, 566 aa, synthetic construct; identical to SEQ ID NO: 10075
  REGION 1..566: note = hemagglutinin__InfluenzaA__AHZ42561

SEQ ID NO: 12318 - protein, 566 aa, synthetic construct
  REGION 1..566: note = hemagglutinin__InfluenzaA__AHZ42572
MKTIIALSYILCLVFAQKLPGNDNSTATLCLGHHAVPNGTIVKTITNDRIEVTNATELVQNSSIGEICDSPHQILDGENCTLIDALLGDPQCDGFQNKKWDLFVERSKAYSNCYPYDVPDYASLRSLVASSGTLEFNNESFNWTGVTQNGTSSACIRRSNSSFFSRLNWLTHLNFKYPALNVTMPNNEQFDKLYIWGVHHPGTDKDQIFLYAQSSGRITVSTKRSQQAVIPNIGSRPRIRNIPSRISIYWTIVKPGDILLINSTGNLIAPRGYFKIRSGKSSIMRSDAPIGKCKSECITPNGSIPNDKPFQNVNRITYGACPRYVKQSTLKLATGMRNVPEKQTRGIFGAIAGFIENGWEGMVDGWYGFRHQNSEGRGQAADLKSTQAAIDQINGKLNRLIGKTNEKFHQIEKEFSEVEGRIQDLEKYVEDTKIDLWSYNAELLVALENQHTIDLTDSEMDKLFEKTKKQLRENAEDMGNGCFKIYHKCDNACIGSIRNGTYDHDVYRDEALNNRFQIKGVELKSGYKDWILWISFAISCFLLCVALLGFIMWACQKGNIRCNICI

SEQ ID NO: 12319 - protein, 566 aa, synthetic construct; identical to SEQ ID NO: 11786
  REGION 1..566: note = hemagglutinin__InfluenzaA__AHZ42584

SEQ ID NO: 12320 - protein, 566 aa, synthetic construct; identical to SEQ ID NO: 9883
  REGION 1..566: note = hemagglutinin__InfluenzaA__AHZ42596

SEQ ID NO: 12321 - protein, 566 aa, synthetic construct; identical to SEQ ID NO: 10060
  REGION 1..566: note = hemagglutinin__InfluenzaA__AHZ42608

SEQ ID NO: 12322 - protein, 566 aa, synthetic construct; identical to SEQ ID NO: 9883
  REGION 1..566: note = hemagglutinin__InfluenzaA__AHZ42619

SEQ ID NO: 12323 - protein, 566 aa, synthetic construct
  REGION 1..566: note = hemagglutinin__InfluenzaA__AHZ42631
MKTIIALSYILCLVFAQKLPGNYNSTATLCLGHHAVPNGTIVKTITNDRIEVTNATELVQNSSIGEICDSPHQILDGENCTLIDALLGDPQCDGFQNKKWDLFVERSKAYSNCYPYDVPDYASLRSLVASSGTLEFNNESFNWTGVTQNGTSSACIRRSNSSFFSRLNWLTHLNFKYPALNVTMPNNEQFDKLYIWGVHHPGTDKDQIFLYAQSSGRITVSTKRSQQAVIPNIGSRPRIRNIPSRISIYWTIVKPGDILLINSTGNLIAPRGYFKIRSGKSSIMRSDAPIGKCKSECITPNGSIPNDKPFQNVNRITYGACPRYVKQSTLKLATGMRNVPEKQTRGIFGAIAGFIENGWEGMVDGWYGFRHQNSEGRGQAADLKSTQAAIDQINGKLNRLIGKTNEKFHQIEKEFSEVEGRIQDLEKYVEDTKIDLWSYNAELLVALENQHTIDLTDSEMNKLFEKTKKQLRENAEDMGNGCFKIYHKCDNACIGSIRNGTYDHDVYRDEALNNRFQIKGVELKSGYKDWILWISFAISCFLLCVALLGFIMWACQKGNIRCNICI

SEQ ID NO: 12324 - protein, 566 aa, synthetic construct
  REGION 1..566: note = hemagglutinin__InfluenzaA__AHZ42643
MKAILVVMLYTFATANADTLCIGYHANNSTDTVDTVLEKNVTVTHSVNLLEDKHNGKLCKLRGVAPLHLGKCNIAGWILGNPECESLSTASSWSYIVETSGSDNGTCYPGDFIDYEELREQLSSVSSFERFEIFPKASSWPNHDSNKGVTAACPHAGAKGFYKNLIWLVKKGNSYPKLSISYINDKGKEVLVLWGIHHPSTTADQQSLYQNADTYVFVGTSRYSKKFKPEIAIRPKVRDQEGRMNYYWTLVEPGDKITFEATGNLVVPRYAFAMERNAGSGIIISDTPVHDCNTTCQTPKGAINTSLPFQNIHPITIGKCPKYVKSTKLRLATGLRNVPSIQSRGLFGAIAGFIEGGWTGMVDGWYGYHHQNEQGSGYAADLKSTQNAIDKITNKVNSVIEKMNTQFTAVGKEFNHLEKRIENLNKKVDDGFLDIWTYNAELLVLLENERTLDYHDSNVKNLYEKVRNQLKNNAKEIGNGCFEFYHKCDNTCMESVKNGTYDYPKYSEEAKLNREKIDGVKLESTRIYQILAIYSTAASSLVLVVSLGAISFWMCSNGSLQCRICI

SEQ ID NO: 12325 - protein, 566 aa, synthetic construct; identical to SEQ ID NO: 9883
  REGION 1..566: note = hemagglutinin__InfluenzaA__AHZ42654

SEQ ID NO: 12326 - protein, 566 aa, synthetic construct; identical to SEQ ID NO: 9858
  REGION 1..566: note = hemagglutinin__InfluenzaA__AHZ42666

SEQ ID NO: 12327 - protein, 566 aa, synthetic construct; identical to SEQ ID NO: 9858
  REGION 1..566: note = hemagglutinin__InfluenzaA__AHZ42678

SEQ ID NO: 12328 - protein, 566 aa, synthetic construct
  REGION 1..566: note = hemagglutinin__InfluenzaA__AHZ42690
MKAILVVLLYTYATANADTLCIGYHANNSTDTVDTVLEKNVTVTHSVNLLEDKHNGKLCKLRGVAPLHLGKCNIAGWILGNPECESLSTASSWSYIVETSSSDNGTCYPGDFINYEELREQLSSVSSFERFEIFPKTSSWPNHDSNKGVTAACPHAGAKSFYKNLIWLVKKGNSYPKLSKSYINDKGKEVLVLWGIHHPSTTTDQQSLYQNADAYVFVGTSRYSKKFKPEIAIRPKVRDQEGRMNYYWTLIEPGDKITFEATGNLVVPRYAFAMERNAGSGIIISDTPVHDCNTTCQTPEGAINTSLPFQNIHPITIGKCPKYVKSTKLRLATGLRNVPSIQSRGLFGAIAGFIEGGWTGMVDGWYGYHHQNEQGSGYAADLKSTQNAIDKITNKVNSVIEKMNTQFTAVGKEFNHLEKRIENLNKKVDDGFLDIWTYNAELLVLLENERTLDYHDSNVKNLYEKVRNQLKNNAKEIGNGCFEFYHKCDNTCMESVKNGTYDYPKYSEEAKLNREKIDGVKLESTRIYQILAIYSTVASSLVLVVSLGAISFWMCSNGSLQCRICI

SEQ ID NO: 12329 - protein, 566 aa, synthetic construct; identical to SEQ ID NO: 9883
  REGION 1..566: note = hemagglutinin__InfluenzaA__AHZ42701

SEQ ID NO: 12330 - protein, 566 aa, synthetic construct; identical to SEQ ID NO: 9858
  REGION 1..566: note = hemagglutinin__InfluenzaA__AHZ42713

SEQ ID NO: 12331 - protein, 566 aa, synthetic construct
  REGION 1..566: note = hemagglutinin__InfluenzaA__AHZ42725
MKTIIALSYILCLVFAQKLPGNDNSTATLCLGHHAVPNGTIVKTITNDRIEVTNATELVQNSSIGEICDSPHQILDGENCTLIDALLGDPQCDGFQNKKWDLFVERSKAYSNCYPYDVPDYASLRSLVASSGTLEFNNESFNWTGVTQNGTSSACIRRSNSSFFSRLNWLTHLNFKYPALNVTMPNNEQFDKLYIWGVHHPGTDKDQIFLYAQSSGRITVSTKRSQQAVIPNIGSRPRIRNIPSRISIYWTIVKPGDILLINSTGNLIAPRGYFKIRNGKSSIMRSDAPIGKCKSECITPNGSIPNDKPFQNVNRITYGACPRYVKQSTLKLATGMRNVPEKQTRGIFGAIAGFIENGWEGMVDGWYGFRHQNSEGRGQAADLKSTQAAIDQINGKLNRLIGKTNEKFHQIEKEFSEVEGRIQDLEKYVEDTKIDLWSYNAELLVALENQHTIDLTDSEMNKLFEKTKKQLRENAEDMGNGCFKIYHKCDNACIGSIRNGTYDHDVYRDEALNNRFQIKGVELKSGYKDWILWISFAISCFLLCVALLGFIMWACQKGNIRCNICI

SEQ ID NO: 12332 - protein, 566 aa, synthetic construct
  REGION 1..566: note = hemagglutinin__InfluenzaA__AHZ42737
MKAILVVLLYTFATANADTLCIGYHANNSTDTVDTVLEKNVTVTHSVNLLEDKHNGKLCKLRGVAPLHLGKCNIAGWILGNPECESLSTASSWSYIVETSSSDNGTCYPGDFINYEELREQLSSVSSFERFEIFPKTSSWPNHDSNKGVTAACPHAGAKSFYKNLIWLVKKGNSYPKLSKSYINDKGKEVLVLWGIHHPSTTADQQSLYQNADAYVFVGTSRYSKKFKPEIAIRPKVRDQEGRMNYYWTLIEPGDKITFEATGNLVVPRYAFAMERNAESGIIISDTPVHDCNTTCQTPEGAINTSLPFQNIHPITIGKCPKYVKSTKLRLATGLRNVPSIQSRGLFGAIAGFIEGGWTGMVDGWYGYHHQNEQGSGYAADLKSTQNAIDKITNKVNSVIEKMNTQFTAVGKEFNHLEKRIENLNKKVDDGFLDIWTYNAELLVLLENERTLDYHDSNVKNLYEKVRNQLKNNAKEIGNGCFEFYHKCDNTCMESVKNGTYDYPKYSEEAKLNREKIDGVKLESTRIYQILAIYSTVASSLVLVVSLGAISFWMCSNGSLQCRICI

SEQ ID NO: 12333 - protein, 566 aa, synthetic construct; identical to SEQ ID NO: 9883
  REGION 1..566: note = hemagglutinin__InfluenzaA__AHZ42748

SEQ ID NO: 12334 - protein, 566 aa, synthetic construct; identical to SEQ ID NO: 9903
  REGION 1..566: note = hemagglutinin__InfluenzaA__AHZ42760

SEQ ID NO: 12335 - protein, 566 aa, synthetic construct
  REGION 1..566: note = hemagglutinin__InfluenzaA__AHZ42772
MKTIIALSYILCLVFAQELPGNDDSTATLCLGHHAVPNGTIVKTITNDRIEVTNATELVQSSSTGEICNSPHQILDGENCTLIDALLGDPQCDGFQNKKWDLFVERSKAHSNCYPYDVPDYASLRSLVASSGTLEFNNESFNWTGVTQNGTSSACIRRSNNSFFSRLNWLTHLNFKYPALNVTMPNNEQFDKLYIWGVHHPGTDKDQIFLYAQASGRITVSTKRSQQTVIPNIGSRPRVRNIPSRVSIYWTIVKPGDILLINSTGNLIAPRGYFKIRSGKSSIMRSDAPIGKCNSACITPNGSIPNDKPFQNVNRITYGACPRYVKQNTLKLATGMRNVPEKQTRGIFGAIAGFIENGWEGMVDGWYGFRHQNSEGRGQAADLKSTQAAIDQINGKLNRLIGKTNEKFHQIEKEFSEVEGRIQDLEKYVEDTKIDLWSYNAELLVALENQHTIDLTDSEMNKLFEKTKKQLRENAEDMGNGCFKIYHKCDNACIGSIRNGTYDHDVYRDEALNNRFQIKEVELKSGYKDWILWISFAISCFLLCVALLGFIMWACQKGNIRCNICI

SEQ ID NO: 12336 - protein, 566 aa, synthetic construct; identical to SEQ ID NO: 9883
  REGION 1..566: note = hemagglutinin__InfluenzaA__AHZ42784

SEQ ID NO: 12337 - protein, 566 aa, synthetic construct; identical to SEQ ID NO: 9858
  REGION 1..566: note = hemagglutinin__InfluenzaA__AHZ42796

SEQ ID NO: 12338 - protein, 566 aa, synthetic construct; identical to SEQ ID NO: 9858
  REGION 1..566: note = hemagglutinin__InfluenzaA__AHZ42808

SEQ ID NO: 12339 - protein, 566 aa, synthetic construct; identical to SEQ ID NO: 12332
  REGION 1..566: note = hemagglutinin__InfluenzaA__AHZ42820

SEQ ID NO: 12340 - protein, 566 aa, synthetic construct; identical to SEQ ID NO: 10467
  REGION 1..566: note = hemagglutinin__InfluenzaA__AHZ42831

SEQ ID NO: 12341 - protein, 566 aa, synthetic construct
  REGION 1..566: note = hemagglutinin__InfluenzaA__AHZ42843
MKTIIALSYILCLVFAQKLPGNDNSTATLCLGHHAVPNGTMVKTITNDRIEVTNATELVQNSSIGEICDSPHQILDGENCTLIDALLGDPQCDGFQNKKWDLFVERSKAYSNCYPYDVPDYASLRSLVASSGTLEFNNESFNWTGVTQNGTSSACIRRSNSSFFSRLNWLTHLNFKYPALNVTMPNNEQFDKLYIWGVHHPGTDKDQIFLYAQSSGRITVSTKRSQQAVIPNIGSRPRIRNIPSRISIYWTIVKPGDILLINSTGNLIAPRGYFKIRSGKSSIMRSDAPIGKCKSECITPNGSIPNDKPFQNVNRITYGACPRYVKQSTLKLATGMRNVPEKQTRGIFGAIAGFIENGWEGMVDGWYGFRHQNSEGRGQAADLKSTQAAIDQINGKLNRLIGKTNEKFHQIEKEFSEVEGRIQDLEKYVEDTKIDLWSYNAELLVALENQHTIDLTDSEMNKLFEKTKKQLRENAEDMGNGCFKIYHKCDNACIGSIRNGTYDHNVYRDEALNNRFQIKGVELKSGYKDWILWISFAISCFLLCVALLGFIMWACQKGNIRCNICI

SEQ ID NO: 12342 - protein, 566 aa, synthetic construct
  REGION 1..566: note = hemagglutinin__InfluenzaA__AHZ42855
MKTIIALSYILCLVFAQKLPGNDNSTATLCLGHHAVPNGTIVKTITNDRIEVTNATELVQNSSIGEICDSPHQILDGENCTLIDALLGDPQCDGFQNKKWDLFVERSKAYSNCYPYDVPDYASLRSLVASSGTLEFNNESFNWTGVTQNGTSSACIRRSNSSFFSRLNWLTHLNFKYPALNMTMPNNEQFDKLYIWGVHHPGTDKDQIFLYAQSSGRITVSTKRSQQAVIPNIGSRPRIRNIPSRISIYWTIVKPGDILLINSTGNLIAPRGYFKIRSGKSSIMRSDAPIGKCKSECITPNGSIPNDKPFQNVNRITYGACPRYVKQSTLKLATGMRNVPEKQTRGIFGAIAGFIENGWEGMVDGWYGFRHQNSEGRGQAADLKSTQAAIDQINGKLNRLIGKTNEKFHQIEKEFSEVEGRIQDLEKYVEDTKIDLWSYNAELLVALENQHTIDLTDSEMNKLFEKTKKQLRENAEDMGNGCFKIYHKCDNACIGSIRNGTYDHNVYRDEALNNRFQIKGVELKSGYKDWILWISFAISCFLLCVALLGFIMWACQKGNIRCNICI

SEQ ID NO: 12343 - protein, 566 aa, synthetic construct
  REGION 1..566: note = hemagglutinin__InfluenzaA__AHZ42867
MKTIIALSYILCLVFAQKLPGNDNSTATLCLGHHAVPNGTIVKTITNDQIEVTNATELVQNSSIGEICDSPHQILDGENCTLIDALLGDPQCDGFQNKKWDLFVERSKAYSNCYPYDVPDYASLRSLVASSGTLEFNNESFNWAGVTQNGTSSACIRGSNSSFFSRLNWLTHLNFKYPALNVTMPNNEQFDKLYIWGVHHPGTDKDQIFLYAQSSGRITVSTKRSQQAVIPNIGSRPRIRNIPSRISIYWTIVKPGDILLINSTGNLIAPRGYFKIRSGKSSIMRSDAPIGKCKSECITPNGSIPNDKPFQNVNRITYGACPRYVKQSTLKLATGMRNVPEKQTRGIFGAIAGFIENGWEGMVDGWYGFRHQNSEGRGQAADLKSTQAAIDQINGKLNRLIGKTNEKFHQIEKEFSEVEGRIQDLEKYVEDTKIDLWSYNAELLVALENQHTIDLTDSEMNKLFEKTKKQLRENAEDMGNGCFKIYHKCDNACIGSIRNGTYDHDVYRDEALNNRFQIKGVELKSEYKDWILWISFAISCFLLCVALLGFIMWACQKGNIRCNICI

SEQ ID NO: 12344 - protein, 566 aa, synthetic construct; identical to SEQ ID NO: 9858
  REGION 1..566: note = hemagglutinin__InfluenzaA__AHZ42879

SEQ ID NO: 12345 - protein, 566 aa, synthetic construct
  REGION 1..566: note = hemagglutinin__InfluenzaA__AHZ42891
MKTIIALSYILCLVFAQKLPGNDNSTATLCLGHHAVPNGTIVKTITNDRIEVTNATELVQNSSIGEICDSPHQILDGENCTLIDALLGDPQCDGFQNKKWDLFVERSKAYSSCYPYDVPDYASLRSLVASSGTLEFNNESFNWAGVTQNGTSSACIRRSNSSFFSRLNWLTHLNFKYPALNVTMPNNEQFDKLYIWGVHHPGTDKDQIFLYAQSSGRITVSTKRSQQAVIPNIGSRPRIRNIPSRISIYWTIVKPGDILLINSTGNLIAPRGYFKIRSGKSSIMRSDAPIGKCKSECITPNGSIPNDKPFQNVNRITYGACPRYVKQSTLKLATGMRNVPEKQTRGIFGAIAGFIENGWEGMVDGWYGFRHQNSEGRGQAADLKSTQAAIDQINGKLNRLIGKTNEKFHQIEKEFSEVEGRIQDLEKYVEDTKIDLWSYNAELLVALENQHTIDLTDSEMNKLFEKTKKQLRENAEDMGNGCFKIYHKCDNACIGSIRNGTYDHDVYRDEALNNRFQIKGVELKSGYKDWILWISFAISCFLLCVALLGFIMWACQKGNIRCNICI

SEQ ID NO: 12346 - protein, 566 aa, synthetic construct
  REGION 1..566: note = hemagglutinin__InfluenzaA__AHZ42903
MKTIIALSYILCLVFAQKIPGNDNSTATLCLGHHAVPNGTIVKTITNDRIEVTNATELVQNSSIGEICDSPHQILDGENCTLIDALLGDPQCDGFQNKKWDLFVERSKAYSNCYPYDVPDYASLRSLVASSGTLEFNNESFNWTGVTQNGTSSACIRRSNSSFFSRLNWLTHLNFKYPALNVTMPNNEQFDKLYIWGVHHPGTDKDQIFLYAQSSGRITVSTKRSQQAVIPNIGSRPRIRNIPSRISIYWTIVKPGDILLINSTGNLIAPRGYFKIRSGKSSIMRSDAPIGKCKSECITPNGSIPNDKPFQNVNRITYGACPRYVKQSTLKLATGMRNVPEKQTRGIFGAIAGFIENGWEGMVDGWYGFRHQNSEGRGQAADLKSTQAAIDQINGKLNRLIGKTNEKFHQIEKEFSEVEGRIQDLEKYVEDTKIDLWSYNAELLVALENQHTIDLTDSEMNKLFEKTKKQLRENAEDMGNGCFKIYHKCDNACIGSIRNGTYDHNVYRDEALNNRFQIKGVELKSGYKDWILWISFAISCFLLCVALLGFIMWACQKGNIRCNICI

SEQ ID NO: 12347 - protein, 566 aa, synthetic construct; identical to SEQ ID NO: 9835
  REGION 1..566: note = hemagglutinin__InfluenzaA__AHZ42915

SEQ ID NO: 12348 - protein, 560 aa, synthetic construct; identical to SEQ ID NO: 9988
  REGION 1..560: note = hemagglutinin__InfluenzaA__AHZ59747

SEQ ID NO: 12349 - protein, 560 aa, synthetic construct
  REGION 1..560: note = hemagglutinin__InfluenzaA__AHZ59759
MNTQILVFALIAIIPTNADKICLGHHAVSNGTKVNTLTERGVEVVNATETVERTNIPRICSKGKRTVDLGQCGLLGTITGPPQCDQFLEFSADLIIERREGSDVCYPGKFVNEEALRQILRESGGIDKEAMGFTYSGIRTNGATSACRRSGSSFYAEMKWLLSNTDNAAFPQMTKSYKNTRKSPALIVWGIHHSVSTAEQTKLYGSGNKLVTVGSSNYQQSFVPSPGARPQVNGLSGRIDFHWLMLNPNDTVTFSFNGAFIAPDRASFLRGKSMGIQSGVQVDANCEGDCYHSGGTIISNLPFQNIDSRAVGKCPRYVKQRSLLLATGMKNVPEIPKGRGLFGAIAGFIENGWEGLIDGWYGFRHQNAQGEGTAADYKSTQSAIDQITGKLNRLIEKTNQQFELIDNEFNEVEKQIGNVINWTRDSITEVWSYNAELLVAMENQHTIDLADSEMDKLYERVKRQLRENAEEDGTGCFEIFHKCDDDCMASIRNNTYDHSKSREEAMQNRIQIDPVKLSSGYKDVILWFSFGASCFILLAIVMGLVFICVKNGNMRCTICI

SEQ ID NO: 12350 - protein, 560 aa, synthetic construct
  REGION 1..560: note = hemagglutinin__InfluenzaA__AHZ59771
MNTQILVFALIAIIPTNADKICLGHHAVSNGTKVNTLTERGVEVVNATETVERTNIPRICSKGKRTVDLGQCGLLGTITGPPQCDQFLEFSADLIIERREGSDVCYPGKFVNEEALRQILRESGGIDKEAMGFTYSGIRTNGATSACRRSGSSFYAEMKWLLSNTDNAAFPQMTKSYKNTRKSPALIVWGIHHSVSTAEQTKLYGSGNKLVTVGSSNYQQSFVPSPGARPQVNGQSGRIDFHWLMLNPNDTVTFSFNGAFIAPDRASFLRGKSMGIQSGVQVDANCEGDCYHSGGTIISNLPFQNIDSRAVGKCPRYVKQRSLLLATGMKNVPEIPKGRGLFGAIAGFIENGWEGLIDGWYGFRHQNAQGEGTAADYKSTQSAIDQITGKLNRLIEKTNQQFELIDNEFNEVEKQIGNVINWTRDSITEVWSYNAELLVAMENQHTIDLADSEMDKLYERVKRQLRENAEEDGTGCFEIFHKCDDDCMASIRNNTYDHSKYREEAMQNRIQIDPVKLSSGYKDVILWFSFGASCFILLAIVMGLVFICVKNGNMRCTICI

SEQ ID NO: 12351 - protein, 560 aa, synthetic construct
  REGION 1..560: note = hemagglutinin__InfluenzaA__AHZ59795
MNTQILVFALIAIIPTNADKICLGHHAVSNGTKVNTLTERGVEVVNATETVERTNIPRICSKGKRTVDLGQCGLLGTITGPPQCDQFLEFSADLIIERREGSDVCYPGKFVNEEALRQILRESGGIDKEAMGFTYSGIRTNGTTSACRRSGSSFYAEMKWLLSNTDNAAFPQMTKSYKNTRKSPALIVWGIHHSVSTAEQTKLYGSGNKLVTVGSSNYQQSFVPSPGARPQVNGLSGRIDFHWLMLNPNDTVTFSFNGAFIAPDRASFLRGKSMGIQSGVQVDANCEGDCYHSGGTIISNLPFQNIDSRAVGKCPRYVKQRSLLLATGMKNVPEIPKGRGLFGAIAGFIENGWEGLIDGWYGFRHQNAQGEGTAADYKSTQSAIDQITGKLNRLIEKTNQQFELIDNEFNEVEKQIGNVINWTRDSITEVWSYNAELLVAMENQHTIDLADSEMDKLYERVKRQLRENAEEDGTGCFEIFHKCDDDCMASIRNNTYDHSKYREEAMQNRIQIDPVKLSSGYKDVILWFSFGASCFILLAIVMGLVFICVKNGNMRCTICI

SEQ ID NO: 12352 - protein, 560 aa, synthetic construct; identical to SEQ ID NO: 12351
  REGION 1..560: note = hemagglutinin__InfluenzaA__AHZ59807

SEQ ID NO: 12353 - protein, 560 aa, synthetic construct; identical to SEQ ID NO: 12351
  REGION 1..560: note = hemagglutinin__InfluenzaA__AHZ59819

SEQ ID NO: 12354 - protein, 560 aa, synthetic construct; identical to SEQ ID NO: 9988
  REGION 1..560: note = hemagglutinin__InfluenzaA__AHZ59831

SEQ ID NO: 12355 - protein, 560 aa, synthetic construct; identical to SEQ ID NO: 9988
  REGION 1..560: note = hemagglutinin__InfluenzaA__AHZ59843

SEQ ID NO: 12356 - protein, 560 aa, synthetic construct; identical to SEQ ID NO: 9988
  REGION 1..560: note = hemagglutinin__InfluenzaA__AHZ59855

SEQ ID NO: 12357 - protein, 560 aa, synthetic construct; identical to SEQ ID NO: 12350
  REGION 1..560: note = hemagglutinin__InfluenzaA__AHZ59867

SEQ ID NO: 12358 - protein, 560 aa, synthetic construct; identical to SEQ ID NO: 9988
  REGION 1..560: note = hemagglutinin__InfluenzaA__AHZ59879

SEQ ID NO: 12359 - protein, 560 aa, synthetic construct; identical to SEQ ID NO: 12350
  REGION 1..560: note = hemagglutinin__InfluenzaA__AHZ59915

SEQ ID NO: 12360 - protein, 560 aa, synthetic construct; identical to SEQ ID NO: 9988
  REGION 1..560: note = hemagglutinin__InfluenzaA__AHZ59927

SEQ ID NO: 12361 - protein, 560 aa, synthetic construct; identical to SEQ ID NO: 12350
  REGION 1..560: note = hemagglutinin__InfluenzaA__AHZ59939

SEQ ID NO: 12362 - protein, 560 aa, synthetic construct; identical to SEQ ID NO: 9988
  REGION 1..560: note = hemagglutinin__InfluenzaA__AHZ59951

SEQ ID NO: 12363 - protein, 560 aa, synthetic construct; identical to SEQ ID NO: 9988
  REGION 1..560: note = hemagglutinin__InfluenzaA__AHZ59963

SEQ ID NO: 12364 - protein, 560 aa, synthetic construct; identical to SEQ ID NO: 9988
  REGION 1..560: note = hemagglutinin__InfluenzaA__AHZ59988

SEQ ID NO: 12365 - protein, 560 aa, synthetic construct; identical to SEQ ID NO: 9988
  REGION 1..560: note = hemagglutinin__InfluenzaA__AHZ60000

SEQ ID NO: 12366 - protein, 560 aa, synthetic construct; identical to SEQ ID NO: 9988
  REGION 1..560: note = hemagglutinin__InfluenzaA__AHZ60012

SEQ ID NO: 12367 - protein, 560 aa, synthetic construct; identical to SEQ ID NO: 9988
  REGION 1..560: note = hemagglutinin__InfluenzaA__AHZ60024

SEQ ID NO: 12368 - protein, 560 aa, synthetic construct; identical to SEQ ID NO: 12351
  REGION 1..560: note = hemagglutinin__InfluenzaA__AHZ60036

SEQ ID NO: 12369 - protein, 560 aa, synthetic construct; identical to SEQ ID NO: 12351
  REGION 1..560: note = hemagglutinin__InfluenzaA__AHZ60048

SEQ ID NO: 12370 - protein, 560 aa, synthetic construct; identical to SEQ ID NO: 12351
  REGION 1..560: note = hemagglutinin__InfluenzaA__AHZ60060

SEQ ID NO: 12371 - protein, 560 aa, synthetic construct; identical to SEQ ID NO: 12351
  REGION 1..560: note = hemagglutinin__InfluenzaA__AHZ60072

SEQ ID NO: 12372 - protein, 560 aa, synthetic construct; identical to SEQ ID NO: 12351
  REGION 1..560: note = hemagglutinin__InfluenzaA__AHZ60084

SEQ ID NO: 12373 - protein, 560 aa, synthetic construct
  REGION 1..560: note = hemagglutinin__InfluenzaA__AHZ60096
MNTQILVFALIAIIPTNADKICLGHHAVSNGTKVNTLTERGVEVVNATETVERTNIPRICSKGKRTVDLGQCGLLGTITGPPQCDQFLEFSADLIIERREGSDVCYPGKFVNEEALRQILRESGGIDKEAMGFTYSGIRTNGATSACRRSGSSFYAEMKWLLSNTDDAAFPQMTKSYKNTRKSPALIVWGIHHSVSTAEQTKLYGSGNKLVTVGSSNYQQSFVPSPGARPQVNGLSGRIDFHWLMLNPNDTVTFSFNGAFIAPDRASFLRGKSMGIQSGVQVDANCEGDCYHSGGTIISNLPFQNIDSRAVGKCPRYVKQRSLLLATGMKNVPEIPKGRGLFGAIAGFIENGWEGLIDGWYGFRHQNAQGEGTAADYKSTQSAIDQITGKLNRLIEKTNQQFELIDNEFNEVEKQIGNVINWTRDSITEVWSYNAELLVAMENQHTIDLADSEMDKLYERVKRQLRENAEEDGTGCFEIFHKCDDDCMASIRNNTYDHSKYREEAMQNRIQIDPVKLSSGYKDVILWFSFGASCFILLAIVMGLVFICVKNGNMRCTICI

SEQ ID NO: 12374 - protein, 566 aa, synthetic construct
  REGION 1..566: note = hemagglutinin__InfluenzaA__AIC64889
MKAILVVLLYTFATANADTLCIGYHANNSTDTVDTVLEKNVTVTHSVNILEDKHNGKLCKLRGVAPLHLGKCNIAGWILGNPECESLSTASSWSYIVETSSSDNGTCYPGDFIDYEELREQLSSVSSFERFEIFPKTSSWPNHDSNKGVTAACPHAGAKSFYKNLIWLVKKENSYPKLSKSYINDKGKEVLVLWGIHHPSTSADQQSLYQNADAYVFVGSSRYSKKFKPEIAIRPKVRGQEGRMNYYWTLVEPGDKITFEATGNLVVPRYAFAMERNAGSGIIISDTPVHDCNTTCQTPKGAINTSLPFQNIHPITIGKCPKYVKSTKLRLATGLRNVPSIQSRGLFGAIAGFIEGGWTGMVDGWYGYHHQNEQGSGYAADLKSTQNAIDEITNKVNSVIEKMNTQFTAVGKEFNHLEKRIENLNKKVDDGFLDIWTYNAELLVLLENERTLDYHDSNVKNLYEKVRSQLKNNAKEIGNGCFEFYHKCDNTCMESVKNGTYDYPKYSEEAKLNREEIDGVKLESTRIYQILAIYSTVASSLVLVVSLGAISFWMCSNGSLQCRICI

SEQ ID NO: 12375 - protein, 566 aa, synthetic construct; identical to SEQ ID NO: 10040
  REGION 1..566: note = hemagglutinin__InfluenzaA__AIC73738

SEQ ID NO: 12376 - protein, 566 aa, synthetic construct
  REGION 1..566: note = hemagglutinin__InfluenzaA__AIC73739
MKAILVVLLYTFATANADTLCIGYHANNSTDTVDTVLEKNVTVTHSVNLLEDKHNGKLCKLRGVAPLHLGKCNIAGWILGNPECESLSTASSWSYIVETSSSDNGTCYPGDFINYEELREQLSSVSSFERFEIFPKTSSWPNHDSNKGVTAACPHAGAKSFYKNLIWLVKKGNSYPKLSQSYINDKGKEVLVLWGIHHPSTTADQQSLYQNADAYVFVGTSRYSKKFKPEIAIRPKVRDQEGRMNYYWTLVEPGDKITFEATGNLVVPRYAFTMERHAGSGIIISDTPVHDCNTTCQTPEGAINTSLPFQNIHPITIGKCPKYVKSTKLRLATGLRNVPSIQSRGLFGAIAGFIEGGWTGMVDGWYGYHHQNEQGSGYAADLKSTQNAIDKITNKVNSVIEKMNTQFTAVGKEFNHLEKRIENLNKKVDDGFLDIWTYNAELLVLLENERTLDYHDSNVKNLYEKVRNQLKNNAKEIGNGCFEFYHKCDNTCMESVKNGTYDYPKYSEEAKLNREKIDGVKLESTRIYQILAIYSTVASSLVLVVSLGAISFWMCSNGSLQCRICI

SEQ ID NO: 12377 - protein, 566 aa, synthetic construct
  REGION 1..566: note = hemagglutinin__InfluenzaA__AIC73740
MKAILVVLLYTFTTANADTLCIGYHANNSTDTVDTVLEKNVTVTHSVNLLEDKHNGKLCKLRGVAPLHLGKCNIAGWILGNPECESLSTASSWSYIVETSSSDNGTCYPGDFINYEELREQLSSVSSFERFEIFPKTSSWPNHDSNKGVTAACPHAGAKSFYKNLIWLVKKGNSYPKLSQSYINDKGKEVLVLWGIHHPPTTADQQSLYQNADAYVFVGTSRYSKKFKPEIAIRPKVRDQEGRMNYYWTLVEPGDKITFEATGNLVVPRYAFTMERNAGSGIIISDTPVHDCNTTCQTPEGAINTSLPFQNIHPITIGKCPKYVKSTKLRLATGLRNVPSIQSRGLFGAIAGFIEGGWTGMVDGWYGYHHQNEQGSGYAADLKSTQNAIDKITNKVNSVIEKMNTQFTAVGKEFNHLEKRIENLNKKVDDGFLDIWTYNAELLVLLENERTLDYHDSNVKNLYEKVRNQLKNNAKEIGNGCFEFYHKCDNTCMESVKNGTYDYPKYSEEAKLDREKIDGVRLESTRIYQILAIYSTVASSLVLVVSLGAISFWMCSNGSLQCRICI

SEQ ID NO: 12378 - protein, 566 aa, synthetic construct
  REGION 1..566: note = hemagglutinin__InfluenzaA__AIC73741
MKTIIALSYILCLVFAQKLPGNDNSTATLCLGHHAVPNGTIVKTITNDRIEVTNATELVQNSSIGEICDSPHQILDGENCTLIDALLGDPHCDGFQNKKWDLFVERSKAYSNCYPYDVPDYASLRSLVASSGTLEFNNESFNWAGVTQNGTSSACIRGSNSSFFSRLNWLTHLNFKYPALNVTMPNNEQFDKLYIWGVHHPGTDKDQIFLYAQSSGRITVSTKRSQQAVIPNIGSRPRIRNIPSRISIYWTIVKPGDILLINSTGNLIAPRGYFKIRSGKSSIMRSDAPIGKCKSECITPNGSIPNDKPFQNVNRITYGACPRYVKQSTLKLATGMRNVPEKQTRGIFGAIAGFIENGWEGMMDGWYGFRHQNSEGRGQAADLKSTQAAIDQINGKLNRLIGKTNEKFHQIEKEFSEVEGRIQDLEKYVEDTKIDLWSYNAELLVALENQHTIDLTDSEMNKLFEKTKKQLRENAEDMGNGCFKIYHRCDNACIGSIRNGTYDHNVYRDEALNNRFQIRGVELKSGYKDWILWISFAISCFLLCVALLGFIMWACQKGNIRCNICI

SEQ ID NO: 12379 - protein, 566 aa, synthetic construct
  REGION 1..566: note = hemagglutinin__InfluenzaA__AIC73742
MKAILVVLLYTFATANADTLCIGYHANNSTDTVDTVLEKNVTVTHSVNLLEDKHNGKLCKLRGVAPLHLGKCNIAGWILGNPECESLSTASSWSYIVETSSSDNGTCYPGDFINYEELREQLSSVSSFERFEIFPKTSSWPNHDSNKGVTAACPHAGAKSFYKNLIWLVKKGNSYPKLRQSYINDKGKEVLVLWGIHHPSTTTDQQSLYQNADAYVFVGTSRYSKKFKPEIAIRPKVRDQEGRMNYYWTLVEPGDKITFEATGNLVVPRYAFTMERNAGSGIIISDTPVHDCNTTCQTPEGAINTSLPFQNIHPITIGKCPKYVKSTKLRLATGLRNVPSIQSRGLFGAIAGFIEGGWTGMVDGWYGYHHQNEQGSGYAADLKSTQNAIDKITNKVNSVIEKMNTQFTAVGKEFNHLEKRIENLNRKVDDGFLDIWTYNAELLVLLENERTLDYHDSNVKNLYEKVRNQLKNNAKEIGNGCFEFYHKCDNTCMESVKNGTYDYPKYSEEAKLNREKIDGVKLESTRIYQILAIYSTVASSLVLVVSLGAISFWMCSNGSLQCRICI

SEQ ID NO: 12380 - protein, 566 aa, synthetic construct; identical to SEQ ID NO: 12379
  REGION 1..566: note = hemagglutinin__InfluenzaA__AIC73743

SEQ ID NO: 12381 - protein, 566 aa, synthetic construct
  REGION 1..566: note = hemagglutinin__InfluenzaA__AIC73744
MKAILVVLLYTFATANADTLCIGYHANNSTDTVDTVLEKNVTVTHSVNLLEDKHNGKLCKLRGVAPLHLGKCNIAGWILGNPECESLSTASSWSYIVETSSSDNGTCYPGDFINYEELREQLSSVSSFERFEIFPKTSSWPNHDSNKGVTAACPHAGAKSFYKNLIWLVKKGNSYPKLNQSYINDKGKEVLVLWGIHHPSTTADQQSLYQNADAYVFVGTSRYSKKFKPEIAIRPKVRDQEGRMNYYWTLVEPGDKITFEATGNLVVPRYAFTMERNAGSGIIISDTPAHDCNTTCQTPEGAINTSLPFQNIHPITIGKCPKYVKSTKLRLATGLRNVPSIQSRGLFGAIAGFIEGGWTGMVDGWYGYHHQNEQGSGYAADLKSTQNAIDKITNKVNSVIEKMNTQFTAVGKEFNHLEKRIENLNKKVDDGFLDIWTYNAELLVLLENERTLDYHDSNVKNLYEKVRNQLKNNAKEIGNGCFEFYHKCDNTCMESVKNGTYDYPKYSEEAKLNREKIDGVKLESTRIYQILAIYSTVASSLVLVVSLGAISFWMCSNGSLQCRICI

SEQ ID NO: 12382 - protein, 566 aa, synthetic construct
  REGION 1..566: note = hemagglutinin__InfluenzaA__AIC73745
MKAILVVLLYTFATANADTLCIGYHANNSTDTVDTVLEKNVTVTHSVNLLEDKHNGKLCKLRGVAPLHLGKCNIAGWILGNPECESLSTASSWSYIVETSSSDNGTCYPGDFINYEELREQLSSVSSFERFEIFPKTSSWPNHDSNKGVTAACPHAGAKSFYKNLIWLVKKGNSYPKLSQSYINDKGKEVLVLWGIHHPSTTADQQSLYQNADAYVFVGTSRYSKKFKPEIAIRPKVRDQEGRMNYYWALVEPGDKITFEATGNLVVPRYAFTMERNAGSGIIISDTPVHDCNTTCQTPEGAINTSLPFQNIHPITIGKCPKYVKSTKLRLATGLRNIPSIQSRGLFGAIAGFIEGGWTGMVDGWYGYHHQNEQGSGYAADLKSTQNAIDKITNKVNSVIEKMNTQFTAVGKEFNHLEKRIENLNKKVDDGFLDIWTYNAELLVLLENERTLDYHDSNVKNLYEKVRNQLKNNAKEIGNGCFEFYHKCDNTCMESVKNGTYDYPKYSEEAKLNREKIDGVKLESTRIYQILAIYSTVASSLVLVVSLGAISFWMCSNGSLQCRICI

SEQ ID NO: 12383 - protein, 566 aa, synthetic construct
  REGION 1..566: note = hemagglutinin__InfluenzaA__AIC73746
MKAILVVLLYTFATANADTLCIGYHANNSTDTVDTVLEKNVTVTHSVNLLEDKHNGKLCKLRGVTPLHLGKCNIAGWILGNPECESLSTASSWSYIVETSSSDNGTCYPGDFINYEELREQLSSVSSFERFEIFPKTSSWPNHDSNKGVTAACPHAGAKSFYKNLIWLVKKGNSYPKLSQSYINDKGKEVLVLWGIHHPSTTTDQQSLYQNADAYVFVGTSRYSKKFKPEIAIRPKVRDQEGRMNYYWTLVEPGDKITFEATGNLVVPRYAFTMERNAGSGIIISDTPVHDCNTTCQTPEGAINTSLPFQNIHPITIGKCPKYVKSTKLRLATGLRNVPSIQSRGLFGAIAGFIEGGWTGMVDGWYGYHHQNEQGSGYAADLKSTQNAIDKITNKVNSVIEKMNTQFTAVGKEFNHLEKRIENLNKKVDDGFLDIWTYNAELLVLLENERTLDYHDSNVKNLYEKVRNQLKNNAKEIGNGCFEFYHKCDNTCMESVKNGTYDYPKYSEEAKLNREKIDGVKLESTRIYQILAIYSTVASSLVLVVSLGAISFWMCSNGSLQCRICI

SEQ ID NO: 12384 - protein, 566 aa, synthetic construct
  REGION 1..566: note = hemagglutinin__InfluenzaA__AIC73747
MKAILVVLLYTLATANADTLCIGYHANNSTDTVDTVLEKNVTVTHSVNLLEDKHNGKLCKLRGVAPLHLGKCNIAGWILGNPECESLSTASSWSYIVETSSSDNGTCYPGDFINYEELREQLSSVSSFERFEIFPKTSSWPNHDSNKGVTAACPHAGAKSFYKNLIWLVKKGNSYPKLSQSYINDKGKEVLVLWGIHHPSTTADQQSLYQNADAYVFVGTSRYSKKFKPEIAIRPKVRDQEGRMNYYWTLVEPGDKITFEATGNLVVPRYAFTMERNTGSGIIISDTPVHDCNTTCQTPEGAINTSLPFQNIHPITIGKCPKYVKSTKLRLATGLRNVPSIQSRGLFGAIAGFIEGGWTGMVDGWYGYHHQNEQGSGYAADLKSTQNAIDKITNKVNSVIEKMNTQFTAVGKEFNHLEKRIENLNKKVDDGFLDIWTYNAELLVLLENERTLDYHDSNVKNLYEKVRNQLKNNAKEIGNGCFEFYHKCDNTCMESVKNGTYDYPKYSEEAKLNREKIDGVKLESTRIYQILAIYSTVASSLVLVVSLGAISFWMCSNGSLQCRICI

SEQ ID NO: 12385 - protein, 566 aa, synthetic construct; identical to SEQ ID NO: 10040
  REGION 1..566: note = hemagglutinin__InfluenzaA__AIC73748

SEQ ID NO: 12386 - protein, 566 aa, synthetic construct
  REGION 1..566: note = hemagglutinin__InfluenzaA__AIC73749
MKTIIALSYILCLVFAQKLPGNDNSTATLCLGHHAVPNGTIVKTITNDRIEVTNATELVQNSSIGEICDSPHQILDGKNCTLIDALLGDPQCDGFQNKRWDLFVERSKAYSNCYPYDVPDYASLRSLVASSGTLEFNDESFNWAGVTQNGTSSACIRGSNSSFFSRLNWLTHSNFKYPALNVTMPNNEQFDKLYIWGVHHPGTDKDQIFLYAHSSGRITVSTKRSQQAVIPNIGSRPRIRNIPSRISIYWTIVKPGDILLINSTGNLIAPRGYFKIQSGKSSIMRSDAPIGKCKSECITPNGSITNDKPFQNVNRITYGACPRYVKQSTLKLATGMRNVPEKQTRGIFGAIAGFIENGWEGMKDGWYGFRHQNSEGRGQAADLKSTQAAIDQINGKLNRLIGKTNEKFHQIEKEFSEVEGRIQDLEKYVEDTKIDLWSYNAELLVALENQHTIDLTDSEMNKLFEKTKKQLRENAEDMGNGCFKIYHKCDNACIGSIRNGTYDHDVYRDEALNNRFQIKGVELKSGYKDWILWISFAISCFLLCVALLGFIMWACQKGNIRCNICI

SEQ ID NO: 12387 - protein, 566 aa, synthetic construct; identical to SEQ ID NO: 10040
  REGION 1..566: note = hemagglutinin__InfluenzaA__AIC73750

SEQ ID NO: 12388 - protein, 566 aa, synthetic construct
  REGION 1..566: note = hemagglutinin__InfluenzaA__AIC73754
MKAILVVLLYTFATANADTLCIGYHANNSTDTVDTVLEKNVTVTHSVNLLEDKHNGKLCKLRGVAPLHLGKCNIAGWILGNPECESLSTASSWSYIVETSSSDNGTCYPGDFINYEELREQLSSVSSFERFEIFPKTSSWPNHDSNKGVTAACPHAGAKSFYKNLIWLVKKGNSYPKLSQSYINDKGKEVLVLWGIHHPSTTADQQSLYQNADAYVFVGTSRYSRKFKPEIAIRPKVRDQEGRMNYYWTLVEPGDKITFEATGNLVVPRYAFTMERNAGSGIIISDTPVHDCNTTCQTPEGAINTSLPFQNIHPITIGKCPKYVKSTKLRLATGLRNVPSIQSRGLFGAIAGFIEGGWTGMVDGWYGYHHQNEQGSGYAADLKSTQNAIDKITNKVNSVIEKMNTQFTAVGKEFNHLEKRIENLNKKVDDGFLDIWTYNAELLVLLENERTLDYHDSNVKNLYEKVRNQLKNNAKEIGNGCFEFYHKCDNTCMESVKNGTYDYPKYSEEAKLNREKIDGVKLESTRIYQILAIYSTVASSLVLVVSLGAISFWMCSNGSLQCRICI

SEQ ID NO: 12389 - protein, 566 aa, synthetic construct; identical to SEQ ID NO: 10040
  REGION 1..566: note = hemagglutinin__InfluenzaA__AIC73755

SEQ ID NO: 12390 - protein, 566 aa, synthetic construct; identical to SEQ ID NO: 10040
  REGION 1..566: note = hemagglutinin__InfluenzaA__AIC73756

SEQ ID NO: 12391 - protein, 566 aa, synthetic construct; identical to SEQ ID NO: 10040
  REGION 1..566: note = hemagglutinin__InfluenzaA__AIC73757

SEQ ID NO: 12392 - protein, 566 aa, synthetic construct
  REGION 1..566: note = hemagglutinin__InfluenzaA__AIC73758
MKAILVVLLYTFATANADTLCIGYHANNSTDTVDTVLEKNVTVTHSVNLLEDKHNGKLCKLRGIAPLHLGKCNIAGWILGNPECESLSTASSWSYIVETSSSDNGTCYPGDFINYEELREQLSSVSSFERFEIFPKTSSWPNHDSNKGVTAACPHAGAKSFYKNLIWLVKKGNSYPKLSQSYINDKGKEVLVLWGIHHPSTTADQQSLYQNADAYVFVGTSRYSKKFKPEIAIRPKVRDQEGRMNYYWTLVEPGDKITFEATGNLVVPRYAFTMERNAGSGIIISDTPVHDCNTTCQTPEGAINTSLPFQNIHPITIGKCPKYVKSTKLRLATGLRNVPSIQSRGLFGAIAGFIEGGWTGMVDGWYGYHHQNEQGSGYAADLKSTQNAIDKITNKVNSVIEKMNTQFTAVGKEFNHLEKRIENLNKKVDDGFLDIWTYNAELLVLLENERTLDYHDSNVKNLYEKVRNQLKNNAKEIGNGCFEFYHKCDNTCMESVKNGTYDYPKYSEEAKLNREKIDGVKLESTRIYQILAIYSTVASSLVLVVSLGAISFWMCSNGSLQCRICI

SEQ ID NO: 12393 - protein, 566 aa, synthetic construct
  REGION 1..566: note = hemagglutinin__InfluenzaA__AIC73760
MKAILIVLLYTFATANADTLCIGYHANNSTDTVDTVLEKNVTVTHSVNLLEDKHNGKLCKLRGVAPLHLGKCNIAGWILGNPECESLSTASSWSYIVETSSSDNGTCYPGDFINYEELREQLSSVSSFERFEIFPKTSSWPNHDSNKGVTAACPHAGAKSFYKNLIWLVKKGNSYPKLSQSYINDKGKEVLVLWGIHHPSTTADQQSLYQNADAYVFVGTSRYSKKFKPEIAIRPKVRDQEGRMNYYWTLVEPGDKITFEATGNLVVPRYAFTMERNAGSGIIISDTPVHDCNTTCQTPEGAINTSLPFQNIHPITIGKCPKYVKSTKLRLATGLRNVPSIQSRGLFGAIAGFIEGGWTGMVDGWYGYHHQNEQGSGYAADLKSTQNAIDKITNKVNSVIEKMNTQFTAVGKEFNHLEKRIENLNKKVDDGFLDIWTYNAELLVLLENERTLDYHDSNVKNLYEKVRNQLKNNAKEIGNGCFEFYHKCDNTCMESVKNGTYDYPKYSEEAKLNREKIDGVKLESTRIYQILAIYSTVASSLVLVVSLGAISFWMCSNGSLQCRICI

SEQ ID NO: 12394 - protein, 566 aa, synthetic construct; identical to SEQ ID NO: 12393
  REGION 1..566: note = hemagglutinin__InfluenzaA__AIC73761

SEQ ID NO: 12395 - protein, 566 aa, synthetic construct; identical to SEQ ID NO: 11920
  REGION 1..566: note = hemagglutinin__InfluenzaA__AIC73762

SEQ ID NO: 12396 - protein, 566 aa, synthetic construct
  REGION 1..566: note = hemagglutinin__InfluenzaA__AIC73763
MKAILVVLLYTFATANADTLCIGYHANNSTDTVDTVLEKNVTVTHSVNLLEDKHNGKLCKLRGVAPLHLGKCNIAGWILGNPECESLSTASSWSYIVETSSSDNGTCYPGDFINYEELREQLSSVSSFERFEIFPKTSSWPNHDSNKGVTAACPHAGAKSFYKNLIWLVKKGNSYPKISQSYINDKGKEVLVLWGIHHPSTTADQQSLYQNADAYVFVGTSRYSKKFKPEIAIRPKVRDQEGRMNYYWTLVEPGDKITFEATGNLVVPRYAFTMERNAGSGIIISDTPVHDCNTTCQTPEGAINTSLPFQNIHPITIGKCPKYVKSTKLRLATGLRNVPSIQSRGLFGAIAGFIEGGWTGMVDGWYGYHHQNEQGSGYAADLKSTQNAIDKITNKVNSVIEKMNTQFTAVGKEFNHLEKRIENLNKKVDDGFLDIWTYNAELLVLLENERTLDYHDSNVKNLYEKVRNQLKNNAKEIGNGCFEFYHKCDNTCMESVKNGTYDYPKYSEEAKLNREKIDGVKLESTRIYQILAIYSTVASSLVLVVSLGAISFWMCSNGSLQCRICI

SEQ ID NO: 12397 - protein, 566 aa, synthetic construct; identical to SEQ ID NO: 10040
  REGION 1..566: note = hemagglutinin__InfluenzaA__AIC73765

SEQ ID NO: 12398 - protein, 566 aa, synthetic construct; identical to SEQ ID NO: 10040
  REGION 1..566: note = hemagglutinin__InfluenzaA__AIC73766

SEQ ID NO: 12399 - protein, 566 aa, synthetic construct
  REGION 1..566: note = hemagglutinin__InfluenzaA__AIC73767
MKAILVVLLYTFATANADTLCIGYHANNSTDTVDTVLEKNVTVTHSVNLLEDKHNGKLCKLRGVAPLHLGKCNIAGWILGNPECESLSTASSWSYIVETSSSDNGTCYPGDFINYEELREQLSSVSSFERFEIFPKTSSWPNHDSNKGVTAACPHAGAKSFYKNLIWLIKKGNSYPKLSQSYINDKGKEVLVLWGIHHPSTTADQQSLYQNADAYVFVGTSRYSKKFKPEIAIRPKVRDQEGRMNYYWTLVEPGDKITFEATGNLVVPRYAFTMERNAGSGIIISDTPVHDCNTTCQTPEGAINTSLPFQNIHPITIGKCPKYVKSTKLRLATGLRNIPSIQSRGLFGAIAGFIEGGWTGMVDGWYGYHHQNEQGSGYAADLKSTQNAIDKITNKVNSVIEKMNTQFTAVGKEFNHLEKRIENLNKKVDDGFLDIWTYNAELLVLLENERTLDYHDSNVKNLYEKIRNQLKNNAKEIGNGCFEFYHKCDNMCMESVKNGTYDYPKYSEEAKLNREKIDGVKLESTRIYQILAIYSTVASSLVLVVSLGAISFWMCSNGSLQCRICI

SEQ ID NO: 12400 - protein, 566 aa, synthetic construct; identical to SEQ ID NO: 10040
  REGION 1..566: note = hemagglutinin__InfluenzaA__AIC73768

SEQ ID NO: 12401 - protein, 566 aa, synthetic construct; identical to SEQ ID NO: 10040
  REGION 1..566: note = hemagglutinin__InfluenzaA__AIC73769

SEQ ID NO: 12402 - protein, 566 aa, synthetic construct; identical to SEQ ID NO: 10040
  REGION 1..566: note = hemagglutinin__InfluenzaA__AIC73770

SEQ ID NO: 12403 - protein, 566 aa, synthetic construct; identical to SEQ ID NO: 10040
  REGION 1..566: note = hemagglutinin__InfluenzaA__AIC73771

SEQ ID NO: 12404 - protein, 566 aa, synthetic construct
  REGION 1..566: note = hemagglutinin__InfluenzaA__AIC73772
MKAILVVLLYTFATANADTLCIGYHANNSTDTVDTVLEKNVTVTHSVNLLEDKHNGKLCKLRGVAPLHLGKCNIAGWILGNPECESLSTASSWSYIVETSSSDNGTCYPGDFINYEELREQLSSVSSFERFEIFPKTSSWPNHDSNKGVTAACPHAGAKSFYKNLIWLVKKGNSYPKLSQSYINDKGKEVLVLWGIHHPSTTADQQSLYQNADAYVFVGTSRYSKKFKPEIAIRPKVRDQEGRMNYYWTLVEPGDKITFEATGNLVVPRYAFTMERNAGSGIIISDTPVHDCNTTCQTPEGAINTSLPFQNIHPITIGKCPKYVKSTKLRLATGLRNVPSIQSRGLFGAIAGFIEGGWTGMVDGWYGYHHQNEQGSGYAADLKSTQNAIDKITNKVNSVIEKMNTQFTAVGKEFNHLEKRIENLNKKVDDGFLDIWTYNAELLVLLENERTLDYHDSNVKNLYEKVRNQLKNNAKEIGNGCFEFYHKCDNTCMESVKNGTYDYPKYSEEAKLNREKIDGVKLESTRVYQILAIYSTVASSLVLVVSLGAISFWMCSNGSLQCRICI

SEQ ID NO: 12405 - protein, 566 aa, synthetic construct; identical to SEQ ID NO: 10040
  REGION 1..566: note = hemagglutinin__InfluenzaA__AIC73773

SEQ ID NO: 12406 - protein, 566 aa, synthetic construct; identical to SEQ ID NO: 10040
  REGION 1..566: note = hemagglutinin__InfluenzaA__AIC73775

SEQ ID NO: 12407 - protein, 566 aa, synthetic construct; identical to SEQ ID NO: 10040
  REGION 1..566: note = hemagglutinin__InfluenzaA__AIC73776

SEQ ID NO: 12408 - protein, 566 aa, synthetic construct; identical to SEQ ID NO: 12404
  REGION 1..566: note = hemagglutinin__InfluenzaA__AIC73777

SEQ ID NO: 12409 - protein, 566 aa, synthetic construct
  REGION 1..566: note = hemagglutinin__InfluenzaA__AIC73778
MKTIIALSYILCLVFAQKLPGNDNSTATLCLGHHAVPNGTIVKTITNDRIEVTNATELVQNSSIGEICDSPHQILDGENCTLIDALLGDPQCDGFQNKKWDLFVERSKAHSNCYPYDVPDYASLRSLVASSGTLEFNNESFNWTGVTQNGTSSACIRRSNSSFFSRLNWLTHLNFKYPALNVTMPNNEQFDKLYIWGVHHPGTDKDQIFLYAQSSGRITVSTKRSQQAVIPNIGSRPRIRNIPSRISIYWTIVKPGDILLINSTGNLIAPRGYFKIRSGKSSIMRSDAPIGKCKSECITPNGSIPNDKPFQNVNRITYGACPRYVKQSTLKLATGMRNVPEKQTRGIFGAIAGFIENGWEGMVDGWYGFRHQNSEGRGQAADLKSTQAAIDQINGKLNRLIGKTNEKFHQIEKEFSEVEGRIQDLEKYVEDTKIDLWSYNAELLVALENQHTIDLTDSEMNKLFEKTKKQLRENAEDMGNGCFKIYHKCDNACIGSIRNGTYDHNVYRDEALNNRFQIKGVELKSGYKDWILWISFAISCFLLCVALLGFIMWACQKGNIRCNICI

SEQ ID NO: 12410 - protein, 566 aa, synthetic construct; identical to SEQ ID NO: 12409
  REGION 1..566: note = hemagglutinin__InfluenzaA__AIC73779

SEQ ID NO: 12411 - protein, 566 aa, synthetic construct; identical to SEQ ID NO: 12409
  REGION 1..566: note = hemagglutinin__InfluenzaA__AIC73780

SEQ ID NO: 12412 - protein, 566 aa, synthetic construct; identical to SEQ ID NO: 10998
  REGION 1..566: note = hemagglutinin__InfluenzaA__AIC73781

SEQ ID NO: 12413 - protein, 566 aa, synthetic construct; identical to SEQ ID NO: 12409
  REGION 1..566: note = hemagglutinin__InfluenzaA__AIC73782

SEQ ID NO: 12414 - protein, 566 aa, synthetic construct; identical to SEQ ID NO: 12409
  REGION 1..566: note = hemagglutinin__InfluenzaA__AIC73783

SEQ ID NO: 12415 - protein, 566 aa, synthetic construct; identical to SEQ ID NO: 12409
  REGION 1..566: note = hemagglutinin__InfluenzaA__AIC73784

SEQ ID NO: 12416 - protein, 566 aa, synthetic construct; identical to SEQ ID NO: 10040
  REGION 1..566: note = hemagglutinin__InfluenzaA__AIC73785

SEQ ID NO: 12417 - protein, 566 aa, synthetic construct; identical to SEQ ID NO: 12409
  REGION 1..566: note = hemagglutinin__InfluenzaA__AIC73786

SEQ ID NO: 12418 - protein, 566 aa, synthetic construct; identical to SEQ ID NO: 10040
  REGION 1..566: note = hemagglutinin__InfluenzaA__AIC73787

SEQ ID NO: 12419 - protein, 566 aa, synthetic construct; identical to SEQ ID NO: 10040
  REGION 1..566: note = hemagglutinin__InfluenzaA__AIC73788

SEQ ID NO: 12420 - protein, 566 aa, synthetic construct
  REGION 1..566: note = hemagglutinin__InfluenzaA__AIC73789
MKTIIALSYILCLVFAQKPPGNDNSTATLCLGHHAVPNGTIVKTITNDRIEVTNATELVQNSSIGEICDSPHQILDGENCTLIDALLGDPQCDGFQNKKWDLFVERSKAYSNCYPYDVPDYASLRSLVASSGTLEFNNESFNWAGVTQNGTSSACIRGSNSSFFSRLNWLTHLNFKYPALNVTMPNNEQFDKLYIWGVHHPGTDKDQIFLYAQSSGRITVSTKRSQQAVIPNIGSRPRIRNIPSRISIYWTIVKPGDILLINSTGNLIAPRGYFKIRSGKSSIMRSDAPIGKCKSECITPNGSIPNDKPFQNVNRITYGACPRYVKQSTLKLATGMRNVPEKQTRGIFGAIAGFIENGWEGMVDGWYGFRHQNSEGRGQAADLKSTQAAIDQINGKLNRLIGKTNEKFHQIEKEFSEVEGRIQDLEKYVEDTKIDLWSYNAELLVALENQHTIDLTDSEMNKLFEKTKKQLRENAEDMGNGCFKIYHKCDNACIGSIRNGTYDHDVYRDEALNNRFQIKGVELKSGYKDWILWISFAISCFLLCVVLLGFIMWACQKGNIRCNICI

SEQ ID NO: 12421 - protein, 566 aa, synthetic construct
  REGION 1..566: note = hemagglutinin__InfluenzaA__AIC73790
MKAILVVLLYTFATTNADTLCIGYHANNSTDTVDTVLEKNVTVTHSVNLLEDKHNGKLCKLRGVAPLHLGKCNIAGWILGNPECESLSTASSWSYIVETSSSDNGTCYPGDFINYEELREQLSSVSSFERFEIFPKTSSWPNHDSNKGVTAACPHAGAKSFYKNLIWLVKKGNSYPKLRQSYINDKGKEVLVLWGIHHPSTTTDQQSLYQNADAYVFVGTSRYSKKFKPEIAIRPKVRDQEGRMNYYWTLVEPGDKITFEATGNLVVPRYAFTMERNAGSGIIISDTPVHDCNTTCQTPEGAINTSLPFQNIHPITIGKCPKYVKSTKLRLATGLRNVPSIQSRGLFGAIAGFIEGGWTGMVDGWYGYHHQNEQGSGYAADLKSTQNAIDKITNKVNSVIEKMNTQFTAVGKEFNHLEKRIENLNKKVDDGFLDIWTYNAELLVLLENERTLDYHDSNVKNLYEKVRNQLKNNAKEIGNGCFEFYHKCDNTCMESVKNGTYDYPKYSEEAKLNREKIDGVKLESTRIYQILAIYSTVASSLVLVVSLGAISFWMCSNGSLQCRICI

SEQ ID NO: 12422 - protein, 566 aa, synthetic construct
  REGION 1..566: note = hemagglutinin__InfluenzaA__AIC73791
MKAILVVLLYTFATANADTLCIGYHANNSTDTIDTVLEKNVTVTHSVNLLEDKHNGKLCKLRGVAPLHLGKCNIAGWILGNPECESLSTASSWSYIVETSSSDNGTCYPGDFINYEELREQLSSVSSFERFEIFPKTSSWPNHDSNKGVTAACPHAGAKSFYKNLIWLVKKGNSYPKLSQSYINDKGKEVLVLWGIHHPSTTADQQSLYQNADAYVFVGTSRYSKKFKPEIAIRPKVRDQEGRMNYYWTLVEPGDKITFEATGNLVVPRYAFTMERNAGSGIIISDTPVHDCNTTCQTPEGAINTSLPFQNIHPITIGKCPKYVKSTKLRLATGLRNVPSIQSRGLFGAIAGFIEGGWTGMVDGWYGYHHQNEQGSGYAADLKSTQNAIDKITNKVNSVIEKMNTQFTAVGKEFNHLEKRIENLNKKVDDGFLDIWTYNAELLVLLENERTLDYHDSNVKNLYEKVRNQLKNNAKEIGNGCFEFYHKCDNTCMESVKNGTYDYPKYSEEAKLNREKIDGVKLESTRIYQILAIYSTVASSLVLVVSLGAISFWMCSNGSLQCRICI

SEQ ID NO: 12423 - protein, 566 aa, synthetic construct; identical to SEQ ID NO: 10040
  REGION 1..566: note = hemagglutinin__InfluenzaA__AIC73792

SEQ ID NO: 12424 - protein, 566 aa, synthetic construct; identical to SEQ ID NO: 12404
  REGION 1..566: note = hemagglutinin__InfluenzaA__AIC73793

SEQ ID NO: 12425 - protein, 566 aa, synthetic construct
  REGION 1..566: note = hemagglutinin__InfluenzaA__AIC73794
MKTIIGVSYILCLVFAQKLPGNDNSTATLCLGHHAVPNGTIVKTITNDRIEVTNATELVQNSSIGEICDSPHQILDGENCTLIDALLGDPQCDGFQNKKWDLFVERSKAYSNCYPYDVPDYASLRSLVASSGTLEFNNESFNWAGVTQNGTSSSCIRGSNSSFFSRLNWLTHLNSKYPALNVTMPNNEQFDKLYIWGVHHPGTDKDQIFLYAQSSGRITVSTKRSQQAVIPNIGSRPRIRDIPSRISIYWTIVKPGDILLINSTGNLIAPRGYFKIRSGKSSIMRSDAPIGKCKSECITPNGSIPNDKPFQNVNRITYGACPRYVKQSTLKLATGMRNVPERQTRGIFGAIAGFIENGWEGMVDGWYGFRHQNSEGRGQAADLKSTQAAIDQINGKLNRLIGKTNEKFHQIEKEFSEVEGRIQDLEKYVEDTKIDLWSYNAELLVALENQHTIDLTDSEMNKLFEKTKKQLRENAEDMGNGCFKIYHKCDNACIGSIRNGTYDHDVYRDEALNNRFQIKGVELKSGYKDWILWISFAISCFLLCVALLGFIMWACQKGNIRCNICI

SEQ ID NO: 12426 - protein, 566 aa, synthetic construct; identical to SEQ ID NO: 10040
  REGION 1..566: note = hemagglutinin__InfluenzaA__AIC73796

SEQ ID NO: 12427 - protein, 566 aa, synthetic construct
  REGION 1..566: note = hemagglutinin__InfluenzaA__AIC73797
MKTIIALSYILCLVFAQKLPGNDNSTATLCLGHHAVPNGTIVKTITNDRIEVTNATELVQNSSIGEICDSPHQILDGENCTLIDALLGDPQCDGFQNKKWDLFVERSKAYSNCYPYDVPDYASLRSLVASSGTLEFNNESFNWAGVTQNGTSSSCIRGSNSSFFSRLNWLTHLNSKYPALNVTMPNNEQFDKLYIWGVHHPGTDKDQIFLYAQSSGRITVSTKRSQQAVIPNIGSRPRIRDIPSRISIYWTIVKPGDILLINSTGNLIAPRGYFKIRSGKSSIMRSDAPIGKCKSECITPNGSIPNDKPFQNVNRITYGACPRYVKQSTLKLATGMRNVPERQTRGIFGAIAGFIENGWEGMVDGWYGFRHQNSEGRGQAADLKSTQAAIDQINGKLNRLIGKTNEKFHQIEKEFSEVEGRIQDLEKYVEDTKIDLWSYNAELLVALENQHTIDLTDSEMNKLFEKTKKQLRENAEDMGNGCFKIYHKCDNACIGSIRNGTYDHDVYRDEALNNRFQIKGVELKSGYKDWILWISFAISCFLLCVALLGFIMWACQKGNIRCNICI

SEQ ID NO: 12428 - protein, 566 aa, synthetic construct; identical to SEQ ID NO: 12427
  REGION 1..566: note = hemagglutinin__InfluenzaA__AIC73798

SEQ ID NO: 12429 - protein, 566 aa, synthetic construct; identical to SEQ ID NO: 12427
  REGION 1..566: note = hemagglutinin__InfluenzaA__AIC73800

SEQ ID NO: 12430 - protein, 566 aa, synthetic construct; identical to SEQ ID NO: 12427
  REGION 1..566: note = hemagglutinin__InfluenzaA__AIC73801

SEQ ID NO: 12431 - protein, 566 aa, synthetic construct; identical to SEQ ID NO: 12427
  REGION 1..566: note = hemagglutinin__InfluenzaA__AIC73802

SEQ ID NO: 12432 - protein, 566 aa, synthetic construct; identical to SEQ ID NO: 12427
  REGION 1..566: note = hemagglutinin__InfluenzaA__AIC73803

SEQ ID NO: 12433 - protein, 566 aa, synthetic construct; identical to SEQ ID NO: 12427
  REGION 1..566: note = hemagglutinin__InfluenzaA__AIC73804

SEQ ID NO: 12434 - protein, 566 aa, synthetic construct; identical to SEQ ID NO: 12427
  REGION 1..566: note = hemagglutinin__InfluenzaA__AIC73805

SEQ ID NO: 12435 - protein, 566 aa, synthetic construct; identical to SEQ ID NO: 12427
  REGION 1..566: note = hemagglutinin__InfluenzaA__AIC73806

SEQ ID NO: 12436 - protein, 566 aa, synthetic construct
  REGION 1..566: note = hemagglutinin__InfluenzaA__AIC73807
MKAILVVLLYTFATANADTLCIGYHANNSTDTVDTVLEKNVTVTHSVNLLEDKHNGKLCKLRGVAPLHLGKCNIAGWILGNPECESLSTASSWSYIVETSSSDNGTCYPGDFINYEELREQLSSVSSFERFEIFPKTSSWPNHDSNKGVTAACPHAGAKSFYKNLIWLVKKGNSYPKLSQSYINNKGKEVLVLWGIHHPSTTADQQSLYQNADAYVFVGTSRYSKKFKPEIAIRPKVRDQEGRMNYYWTLVEPGDKITFEATGNLVVPRYAFTMERNAGSGIIISDTPVHDCNTTCQTPEGAINTSLPFQNIHPITIGKCPKYVKSTKLRLATGLRNVPSIQSRGLFGAIAGFIEGGWTGMVDGWYGYHHQNEQGSGYAADLKSTQNAIDKITNKVNSVIEKMNTQFTAVGKEFNHLEKRIENLNKKVDDGFLDIWTYNAELLVLLENERTLDYHDSNVKNLYEKVRNQLKNNAKEIGNGCFEFYHKCDNTCMESVKNGTYDYPKYSEEAKLNREKIDGVKLESTRIYQILAIYSTVASSLVLVVSLGAISFWMCSNGSLQCRICI

SEQ ID NO: 12437 - protein, 566 aa, synthetic construct; identical to SEQ ID NO: 12427
  REGION 1..566: note = hemagglutinin__InfluenzaA__AIC73808

SEQ ID NO: 12438 - protein, 566 aa, synthetic construct
  REGION 1..566: note = hemagglutinin__InfluenzaA__AIC73809
MKAILVVLLYTFATANADTLCIGYHANNSTDTVDTVLEKNVTVTHSVNLLEDKHNGKLCKLRGVAPLHLGKCNIAGWILGNPECESLSTASSWSYIVETSSSDNGTCYPGDFINYEELREQLSSVSSFERFEIFPKTSSWPNHDSNKGVTAACPHAGAKSFYKNLIWLVKKGNSYPKLRQSYINDKGKEVLVLWGIHHPSTTTDQQSLYQNADAYVFVGTSRYSKKFKPEIAIRPKVRDQEGRMNYYWTLVEPGDKITFEATGNLVVPRYAFTMERNAGSGIIISDTPVHDCNTTCQTPEGAINTSLPFQNIHPITIGKCPKYVKSTKLRLATGLRNVPSIQSRGLFGAIAGFIEGGWTGMVDGWYGYHHQNEQGSGYAADLKSTQNAIDKITNKVNSVIEKMNTQFTAVGKEFNHLEKRIENLNKKVDDGFLDIWTYNAELLVLLENERTLDYHDSNVKNLYEKVRNQLKNNAKEIGNGCFEFYHKCDNTCMESVKNGTYDYPKYSEEAKLNREKIDEVKLESTRIYQILAIYSTVASSLVLVVSLGAISFWMCSNGSLQCRICI

SEQ ID NO: 12439 - protein, 566 aa, synthetic construct
  REGION 1..566: note = hemagglutinin__InfluenzaA__AIC73810
MKAILVVLLYTFATANADTLCIGYHANNSTDTVDTVLEKNVTVTHSVNLLEDKHNGKLCKLRGVAPLHLGKCNIAGWILGNPECESLSTASSWSYIVETSSSDNGTCYPGDFINYEELREQLSSVSSFERFEIFPKTSSWPNHDSNKGVTAACPHAGAKSFYKNLIWLVKKGNSYPKLSQSYINDKGKEVLVLWGIHHPSTTADQQSLYQNADAYVFVGTSRYSKKFKPEIAIRPKVRDQEGRMNYYWTLVEPGDKITFEATGNLVVPRYAFTMERNAGSGIIISDTPVHDCNTTCQTPEGAINTSLPFQNIHPITIGKCPKYVKSTKLRLATGLRNVPSIQSRGLFGAIAGFIEGGWTGMVDGWYGYHHQNEQGSGYAADLKSTQNAIDKITNKVNSVIEKMNTQFTAVGKEFNHLEKRIENLNKKVDDGFLDIWTYNAELLVLLENERTLDYHDSNVKNLYEKVRNQLKNNAKEIGNGCFEFYHRCDNTCMESVKNGTYDYPKYSEEAKLNREKIDGVKLESTRIYQILAIYSTVASSLVLVVSLGAISFWMCSNGSLQCRICI

SEQ ID NO: 12440 - protein, 566 aa, synthetic construct
  REGION 1..566: note = hemagglutinin__InfluenzaA__AIC73813
MKAILVVLLYTFATANADTLCIGYHANNSTDTVDTVLEKNVTVTHSVNLLEDKHNGKLCKLRGVAPLHLGKCNIAGWILGNPECESLSTASSWSYIVETSSSDNGTCYPGDFINYEELREQLSSVSSFERFEIFPKTSSWPNHDSNKGVTAACPHAGAKSFYKNLIWLVKKGNSYPKLSQSYINDKGKEVLVLWGIHHPSTTADQQSLYQNADAYVFVGTSRYSKKFKPEIAIRPKVRDQEGRMNYYWTLVEPGDKITFEATGNLVVPRYAFTMERNAGSGIIISDTPVHDCNTTCQTPEGAINTSLPFQNIHPITIGKCPKYVKSTKLRLATGLRNVPSIQSRGLFGAIAGFIEGGWTGMVDGWYGYHHQNEQGSGYAADLKSTQNAIDKITNKVNSVIEKMNTQFTAVGKEFNHLEKRIENLNKKVDDGFLDIWTYNAELLVLLENERTLDYHDSNVKNLYEKVRNQLKNNAKEIGNGCFEFYHKCDNTCMESVKNGTYDYPKYSEEAKLNREKIDGVKLESTRIYQILAIYSTAASSLVLVISLGAISFWMCSNGSLQCRICI

SEQ ID NO: 12441 - protein, 566 aa, synthetic construct
  REGION 1..566: note = hemagglutinin__InfluenzaA__AIC73815
MKTIIALSYILCLVFAQKIPGNDNSTATLCLGHHAVPNGTIVKTITNDRIEVTNATELVQNSSIGEICDSPHQILDGENCTLIDALLGDPQCDGFQNKKWDLFVERSKAYSNCYPYDVPDYASLRSLVASSGTLEFNNESFNWTGVTQNGTSSACIRRSSSSFFSRLNWLTHLNYTYPALNVTMPNNEQFDKLYIWGVHHPGTDKDQIFLYAQSSGRITVSTKRSQQAVIPNIGSRPRIRDIPSRISIYWTIVKPGDILLINSTGNLIAPRGYFKIRSGKSSIMRSDAPIGKCKSECITPNGSIPNDKPFQNVNRITYGACPRYVKHSTLKLATGMRNVPEKQTRGIFGAIAGFIENGWEGMVDGWYGFRHQNSEGRGQAADLKSTQAAIDQINGKLNRLIGKTNEKFHQIEKEFSEVEGRIQDLEKYVEDTKIDLWSYNAELLVALENQHTIDLTDSEMNKLFEKTKKQLRENAEDMGNGCFKIYHKCDNACIGSIRNGTYDHNVYRDEALNNRFQIKGVELKSGYKDWILWISFAISCFLLCVALLGFIMWACQKGNIRCNICI

SEQ ID NO: 12442 - protein, 566 aa, synthetic construct; identical to SEQ ID NO: 11920
  REGION 1..566: note = hemagglutinin__InfluenzaA__AIC73817

SEQ ID NO: 12443 - protein, 566 aa, synthetic construct; identical to SEQ ID NO: 10040
  REGION 1..566: note = hemagglutinin__InfluenzaA__AIC73819

SEQ ID NO: 12444 - protein, 566 aa, synthetic construct
  REGION 1..566: note = hemagglutinin__InfluenzaA__AIC73820
MKTIIALSYILCLVFAQKIPGNDNSTATLCLGHHAVPNGTIVKTITNDRIEVTNATELVQNSSIGEICDSPHQILDGENCTLIDALLGDPQCDGFQNKKWDLFVERSKAYSNCYPYDVPDYASLRSLVASSGTLEFNNESFNWTGVTQNGTSSACIRRSSSSFFSRLNWLTHLNYTYPALNVTMPNNEQFDKLYIWGVHHPGTDKDQIFLYAQSSGRITVSTKRSQQAVIPNIGSRPRIRDIPSRISIYWTIVKPGDILLINSTGNLIAPRGYFKIRSGKSSIMRSDAPIGKCKSECITPNGSIPNDKPFQNVNRITYGACPRYVKHSTLKLATGMRNVPEKQTRGIFGAIAGFIENGWEGMVDGWYGFRHQNSEGRGQAADLKSTQAAIDQINGKLNRLIGKTNEKFHQIEKEFSEVEGRIQDLEKYIEDTKIDLWSYNAELLVALENQHTIDLTDSEMNKLFEKTKKQLRENAEDMGNGCFKIYHKCDNACIGSIRNGTYDHNVYRDEALNNRFQIKGVELKSGYKDWILWISFAISCFLLCVALLGFIMWACQKGNIRCNICI

SEQ ID NO: 12445 - protein, 566 aa, synthetic construct; identical to SEQ ID NO: 10040
  REGION 1..566: note = hemagglutinin__InfluenzaA__AIC73821

SEQ ID NO: 12446 - protein, 566 aa, synthetic construct; identical to SEQ ID NO: 12404
  REGION 1..566: note = hemagglutinin__InfluenzaA__AIC73824

SEQ ID NO: 12447 - protein, 566 aa, synthetic construct; identical to SEQ ID NO: 10040
  REGION 1..566: note = hemagglutinin__InfluenzaA__AIC73825

SEQ ID NO: 12448 - protein, 566 aa, synthetic construct
  REGION 1..566: note = hemagglutinin__InfluenzaA__AIC73827
MKAILVVLLYTFATANADTLCIGYHANNSTDTVDTVLEKNVTVTHSVNLLEDKHNGKLCKLRGVAPLHLGKCNIAGWILGNPECEPLSTASSWSYIVETSSSDNGTCYPGDFINYEELREQLSSVSSFERFEIFPKTSSWPNHDSNKGVTAACPHAGAKSFYKNLIWLVKKGNSYPKLSQSYINDKGKEVLVLWGIHHPSTTADQQSLYQNADAYVFVGTSRYSKKFKPEIAIRPKVRDQEGRMNYYWTLVEPGDKITFEATGNLVVPRYAFTMERNAGSGIIISDTPVHDCNTTCQTPEGAINTSLPFQNIHPITIGKCPKYVKSTKLRLATGLRNVPSIQSRGLFGAIAGFIEGGWTGMVDGWYGYHHQNEQGSGYAADLKSTQNAIDKITNKVNSVIEKMNTQFTAVGKEFNHLEKRIENLNKKVDDGFLDIWTYNAELLVLLENERTLDYHDSNVKNLYEKVRNQLKNNAKEIGNGCFEFYHKCDNTCMESVKNGTYDYPKYSEEAKLNREKIDGVKLESTRIYQILAIYSTVASSLILVVSLGAISFWMCSNGSLQCRICI

SEQ ID NO: 12449 - protein, 566 aa, synthetic construct
  REGION 1..566: note = hemagglutinin__InfluenzaA__AIC73828
MKAILVVLLYTFATANADTLCIGYHANNSTDTVDTVLEKNVTVTHSVNLLEDKHNGKLCKLRGVAPLHLGKCNIAGWILGNPECESLSTASSWSYIVETSSSDNGTCYPGDFINYEELREQLSSVSSFERFEIFPKTSSWPNHDSNKGVTAACPHAGAKSFYKNLIWLVKKGNSYPKLSQSYINDKGKEVLVLWGIHHPSTTADQQSLYQNADAYVFVGTSRYSKKFKPEIAIRPKVRDQEGRMNYYWTLVEPGDKITFEATGNLVVPRYAFTMERNAGSGIIISDTPVHDCNTTCQTPEGAINTSLPFQNIHPITIGKCPKYVKSTKLRLATGLRNVPSIQSRGLFGAIAGFIEGGWTGMVDGWYGYHHQNEQGSGYAADLKSTQNAIDKITNKVNSVIEKMNTQFTAVGKEFNHLEKRIENLNKKVDDGFLDIWTYNAELLVLLENERTLDYHDSNVKNLYEKVRNQLKTNAKEIGNGCFEFYHKCDNTCMESVKNGTYDYPKYSEEAKLNREKIDGVKLESTRIYQILAIYSTAASSLVLVVSLGAISFWMCSNGSLQCRICI

SEQ ID NO: 12450 - protein, 566 aa, synthetic construct
  REGION 1..566: note = hemagglutinin__InfluenzaA__AIC73830
MKAILVVLLYTFATANADTLCIGYHANNSTDTVDTVLEKNVTVTHSVNLLEDKHNGKLCKLKGVAPLHLGKCNIAGWILGNPECESLSTASSWSYIVETSSSDNGTCYPGDFINYEELREQLSSVSSFERFEIFPKTSSWPNHDSNKGVTAACPHAGAKSFYKNLIWLVKKGNSYPKLSQSYINDKGKEVLVLWGIHHPSTTADQQSLYQNADAYVFVGTSRYSKKFKPEIAIRPKVRDQEGRMNYYWTLVEPGDKITFEATGNLVVPRYAFTMERNAGSGIIISDTPVHDCNTTCQTPEGAINTSLPFQNIHPITIGKCPKYVKSTKLRLATGLRNVPSIQSRGLFGAIAGFIEGGWTGMVDGWYGYHHQNEQGSGYAADLKSTQNAIDKITNKVNSVIEKMNTQFTAVGKEFNHLEKRIENLNKKVDDGFLDIWTYNAELLVLLENERTLDYHDSNVKNLYEKVRNQLKNNAKEIGNGCFEFYHKCDNTCMESVKNGTYDYPKYSEEAKLNREKIDGVKLESTRIYQILAIYSTVASSLVLVVSLGAISFWMCSNGSLQCRICI

SEQ ID NO: 12451 - protein, 566 aa, synthetic construct
  REGION 1..566: note = hemagglutinin__InfluenzaA__AIC73833
MKAILVVLLYTFATANADTLCIGYHANNSTDTVDTVLEKNVTVTHSVNLLEDKHNGKLCKLRGVAPLHLGKCNIAGWILGNPECESLSTASSWSYIVETSSSDNGTCYPGDFINYEELREQLSSVSSFERFEIFPKTSSWPNHDSNKGVTAACPHAGAKSFYKNLIWLVKKGNSYPKLSQSYINDKGKEVLVLWGIHHPSTTADQQSLYQNADAYVFVGTSRYSKKFKPEIAIRPKVRDQEGRMNYYWTLVEPGDKITFEATGNLVVPRYAFTMERNAGSGIIISDTPVHDCNTTCQTPEGAINTSLPFQNIHPITIGKCPKYVKSTKLRLATGLRNVPSIQSRGLFGAIAGFIEGGWTGMVDGWYGYHHQNEQGSGYAADLKSTQNAIDKITNKVNSVIEKMNTQFTAVGKEFNHLEKRIENLNKKVDDGFLDIWTYNAELLVLLENERTLDYHDSNVKNLYEKVRNQLKNNAKEIGNGCFEFYHKCDNTCMESVKNGTYDYPKYSEEAKLNREKIDGVKLESTRIYQILAIYSTAASSLVLVVSLGAISFWMCSNGSLQCRICI

SEQ ID NO: 12452 - protein, 566 aa, synthetic construct
  REGION 1..566: note = hemagglutinin__InfluenzaA__AIC73834
MKAILVVLLYTFATANADTLCIGYHANNSTDTVDTVLEKNVTVTHSVNLLEDKHNGKLCKLRGVAPLHLGKCNIAGWILGNPECESLSTASSWSYIVETSSSDNGTCYPGDFINYEELREQLSSVSSFERFEIFPKTSSWPNHDSNKGVTAACPHDGAKSFYKNLIWLVKKGNSYPKLSQSYINDKGKEVLVLWGIHHPSTTAGQQSLYQNADAYVFVGTSRYSKKFKPEIAIRPKVRDQEGRMNYYWTLVEPGDKITFEATGNLVVPRYAFTMERNAGSGIIISDTPVHDCNTTCQTPEGAINTSLPFQNIHPITIGKCPKYVKSTKLRLATGLRNVPSIQSRGLFGAIAGFIEGGWTGMVDGWYGYHHQNEQGSGYAADLKSTQNAIDKITNKVNSVIEKMNTQFTAVGKEFNHLEKRIENLNKKVDDGFLDIWTYNAELLVLLENERTLDYHDSNVKNLYEKVRNQLKNNAKEIGNGCFEFYHKCDNTCMESVKNGTYDYPKYSEEAKLNREKIDGVKLESTRIYQILAIYSTVASSLVLVVSLGAISFWMCSNGSLQCRICI

SEQ ID NO: 12453 - protein, 566 aa, synthetic construct
  REGION 1..566: note = hemagglutinin__InfluenzaA__AIC73835
MKAILVVLLYTFATANADTLCIGYHANNSTDTVDTVLEKNVTVTHSVNLLEDKHNGKLCKLRGVAPLHLGKCNIAGWILGNPECESLSTASSWSYIVETSSSDNGTCYPGDFINYEELREQLSSVSSFERFEIFPKTSSWPNHDSNKGVTAACPHAGAKSFYKNLIWLVKKGNSYPKLSQSYINDKGKEVLVLWGIHHPSTTADQQSLYQNADAYVFVGTSRYSKKFKPEIAIRPKVRDQEGRMNYYWTLIEPGDKITFEATGNLVVPRYAFTMERNAGSGIIISDTPVHDCNTTCQTPEGAINTSLPFQNIHPITIGKCPKYVKSTKLRLATGLRNVPSIQSRGLFGAIAGFIEGGWTGMVDGWYGYHHQNEQGSGYAADLKSTQNAIDKITNKVNSVIEKMNTQFTAVGKEFNHLEKRIENLNKKVDDGFLDIWTYNAELLVLLENERTLDYHDSNVKNLYEKVRNQLKNNAKEIGNGCFEFYHKCDNTCMESVKNGTYDYPKYSEEAKLNREKIDGVKLESTRIYQILAIYSTVASSLVLVVSLGAISLWMCSNGSLQCRICI

SEQ ID NO: 12454 - protein, 566 aa, synthetic construct; identical to SEQ ID NO: 12396
  REGION 1..566: note = hemagglutinin__InfluenzaA__AIC73836

SEQ ID NO: 12455 - protein, 566 aa, synthetic construct
  REGION 1..566: note = hemagglutinin__InfluenzaA__AIC73837
MKTIIALSYILCLVFAQKLPGNDNSTATLCLGHHAVPNGTIVKTITNDRIEVTNATELVQNSSIGEICDSPHQILDGENCTLIDALLGDPQCDGFQNKKWDLFVERSKAYSNCYPYDVPDYASLRSLVASSGTLEFNNESFNWAGVTQNGTSSACIRGSNSSFFSRLNWLTHLNFKYPALNVTMPNNEQFDKLYIWGVHHPGTDKDQIFLYAQSSGRITVSTKRSQQAVIPNIGSRPRIRNIPSRISIYWTIVKPGDILLINSTGNLIAPRGYFKIRSGKSSIMRSDAPIGKCKSECITPNGSIPNDKPFQNVNRITYGACPRYVKQSTLKLATGMRNVPEKQTRGIFGAIAGFIENGWEGMKDGWYGFRHQNSEGRGQAADLKSTQAAIDQINGKLNRLIGKTNEKFHQIEKEFSEVEGRIQDLEKYVEDTKIDLWSYNAELLVALENQHTIDLTDSEMNKLFEKTKKQLRENAEDMGNGCFKIYHKCDNACIGSIRNGTYDHDVYRDEALNNRFQIKGVELKSGYKDWILWISFAISCFLLCVALLGFIMWACQKGNIRCNICI

SEQ ID NO: 12456 - protein, 566 aa, synthetic construct
  REGION 1..566: note = hemagglutinin__InfluenzaA__AIC73838
MKTIIALSYILCLVFAQKLPGNDNSTATLCLGHHAVPNGTIVKTITNDRIEVTNATELVQNSSIGEICNSPHQILDGENCTLIDALLGDPQCDGFQNKKWDLFVERSKAYSNCYPYDVPDYASLRSLVASSGTLEFNNESFNWAGVTQNGTSSACIRGSNSSFFSRLNWLTHSNFKYPALNVTMPNNEQFDKLYIWGVHHPGTDKDQIFLYAQSSGRITVSTKRSQQAVIPNIGSRPRIRNIPSRISIYWTIVKPGDILLINSTGNLIAPRGYFKIRSGKSSIMRSDAPIGKCKSECITPNGSIPNDKPFQNVNRITYGACPRYVKQSTLKLATGMRNVPEKQTRGIFGAIAGFIENGWEGMMDGWYGFRHQNSEGRGQAADLKSTQAAIDQINGKLNRLIGKTNEKFHQIEKEFSEVEGRIQDLEKYVEDTKIDLWSYNAELLVALENQHTIDLTDSEMNKLFEKTKKQLRENAEDLGNGCFKIYHKCDNACIGSIRNGTYDHDVYRDEALNNRFQIKGVELKSGYKDWILWISFAISCFLLCVALLGFIMWACQKGNIRCNICI

SEQ ID NO: 12457 - protein, 566 aa, synthetic construct
  REGION 1..566: note = hemagglutinin__InfluenzaA__AIC73839
MKAILVVLLYTFATANADTLCIGYHANNSTDTVDTVLEKNVTVTHSVNLLEDKHNGKLCKLRGVAPLHLGKCNIAGWILGNPECESLSTASSWSYIVETSSSDNGTCYPGDFINYEELREQLSSVSSFERFEIFPKTSSWPDHDSNKGVTAACPHAGAKSFYKNLIWLVKKGNSYPKLSQSYINDKGKEVLVLWGIHHPSTTADQQSLYQNADAYVFVGTSRYSKKFKPEIAIRPKVRDQEGRMNYYWTLVEPGDKITFEATGNLVVPRYAFTMERNAGSGIIISDTPVHDCNTTCQTPEGAINTSLPFQNIHPITIGKCPKYVKSTKLRLATGLRNVPSIQSRGLFGAIAGFIEGGWTGMVDGWYGYHHQNEQGSGYAADLKSTQNAIDKITNKVNSVIEKMNTQFTAVGKEFNHLEKRIENLNKKVDDGFLDIWTYNAELLVLLENERTLDYHDSNVKNLYEKVRNQLKNNAKETGNGCFEFYHKCDNTCMESVKNGTYDYPKYSEEAKLNREKIDGVKLESTRIYQILAIYSTVASSLVLVVSLGAISFWMCSNGSLQCRICI

SEQ ID NO: 12458 - protein, 566 aa, synthetic construct; identical to SEQ ID NO: 10040
  REGION 1..566: note = hemagglutinin__InfluenzaA__AIC73840

SEQ ID NO: 12459 - protein, 566 aa, synthetic construct
  REGION 1..566: note = hemagglutinin__InfluenzaA__AIC73841
MKAILVVLLYTFATANADTLCIGYHANNSTDTVDTVLEKNVTVTHSVNLLEDKHNGKLCKLRGVAPLHLGKCNIAGWILGNPECESLSTASSWSYIVETSSSDNGTCYPGDFINYEELREQLSSVSSFERFEIFPKTSSWPNHDSNKGVTAACPHAGAKSFYKNLIWLVKKGNSYPKLSQSYINDKGKEVLVLWGIHHPSTIADQQSLYQNADAYVFVGTSRYSKKFKPEIAIRPKVRDQEGRMNYYWTLVEPGDKITFEATGNLVVPRYAFTMERNAGSGIIISDTPVHDCNTTCQTPEGAINTSLPFQNIHPITIGKCPKYVKSTKLRLATGLRNIPSIQSRGLFGAIAGFIEGGWTGMVDGWYGYHHQNEQGSGYAADLKSTQNAIDKITNKVNSVIEKMNTQFTAVGKEFNHLEKRIENLNKKVDDGFLDIWTYNAELLVLLENERTLDYHDSNVKNLYEKVRNQLKNNAKEIGNGCFEFYHKCDNTCMESVKNGTYDYPKYSEEAKLNREKIDGVKLESTRIYQILAIYSTVASSLVLVVSLGAISFWMCSNGSLQCRICI

SEQ ID NO: 12460 - protein, 566 aa, synthetic construct; identical to SEQ ID NO: 12455
  REGION 1..566: note = hemagglutinin__InfluenzaA__AIC73842

SEQ ID NO: 12461 - protein, 568 aa, synthetic construct
  REGION 1..568: note = hemagglutinin__InfluenzaA__AID48082
MEKIVLLFAIVSLVKSDQICIGYHANNSTEQVDTIMEKNVTVTHAQDILEKTHNGKLCDLDGVKPLILRDCSVAGWLLGNPMCDEFINVPEWSYIVEKANPVNDLCYPGDFNDYEELKHLLSRINHFEKIQIIPKSSWSSHEASLGVSSACPYQGKSSFFRNVVWLIKKNSTYPTIKRSYNNTNQEDLLVLWGIHHPNDAAEQTKLYQNPTTYISVGTSTLNQRLVPRIATRSKVNGQSGRMEFFWTILKPNDAINFESNGNFIAPEYAYKIVKKGDSTIMKSELEYGNCNTKCQTPMGAINSSMPFHNIHPLTIGECPKYVKSNRLVLATGLRNSPQRERRRKKRGLFGAIAGFIEGGWQGMVDGWYGYHHSNEQGSGYAADKESTQKAIDGVTNKVNSIIDKMNTQFEAVGREFNHLERRIENLNKKMEDGFLDVWTYNAELLVLMENERTLDFHDSNVKNLYDKVRLQLRDNAKELGNGCFEFYHKCDDECMESVRNGTYDYPQYSEEARLKREEISGVKLESIGIYQILSIYSTVASSLALAIMVAGLSLWMCSNGSLQCRICI

SEQ ID NO: 12462 - protein, 566 aa, synthetic construct
  REGION 1..566: note = hemagglutinin__InfluenzaA__AID70444
MKAVLVVLLYTFATANADTLCIGYHANNSTDTVDTVLEKNVTVTHSVNLLEDKHNGKLCKLRGVAPLHLGKCNIAGWILGNPECESLATASSWSYIVETSNSDNGTCYPGDFIDYEELREQLSSVSSFERFEIFPKTSSWPNHDSNKGVTAACPHAGAKSFYKNLIWLVKKGNSYPKLSKSYINDKGREVLVLWGIHHPSTSADQQSLYQNADTYVFVGTSRYSKKFKPEIAIRPKVRDQEGRMNYYWTLVEPGDKITFEATGNLVVPRYAFAMERNAGSGIIISDTPVHDCNTTCQTPKGAINTSLPFQNIHPITIGKCPKYVKSTKLRLATGLRNVPSIQSRGLFGAIAGFIEGGWTGMVDGWYGYHHQNEQGSGYAADLKSTQNAIDEITNKVNSVIEKMNTQFTAVGKEFNHLEKRIENLNKKVDDGFLDIWTYNAELLVVLENERTLEYHDSNVKNLYEKVRSQVKNNAKEIGNGCFEFYHKCDNTCMESVKNGTYDYPKYSEEAKLNREEIDGVKLESTRIYQILAIYSTVASSLVLVVSLGAISFWMCFNGSLQCRIYI

SEQ ID NO: 12463 - protein, 566 aa, synthetic construct
  REGION 1..566: note = hemagglutinin__InfluenzaA__AID70445
MKAILVVLLYTFATANADTLCIGYHANNSTDTVDTVLEKNVTVTHSVNLLEDKHNGKLCKLRGVAPLHLGKCNIAGWILGNPECESLSTASSWSYIVETSSSDNGTCYPGDFIDYEELREQLSSVSSFERFEIFPKTSSWPNHDSNKGVTAACPHAGAKSFYKNLIWLVKKGNSYPKLSKSYINDKGKEVLVLWGIHHPSTTADQQSLYQNADTYVFVGTSRYSKKFKPEIAIRPKVRDQEGRMNYYWTLVEPGDKITFEATGNLVVPRYAFAMERNAGSGIIISDTPVHDCNTTCQTPKGAINTSLPFQNIHPITIGKCPKYVKSTKLRLATGLRNVPSIQSRGLFGAIAGFIEGGWTGMVDGWYGYHHQNEQGSGYAADLKSTQNAIDKITNKVNSVIEKMNTQFTAVGKEFNHLEKRIENLNKKVDDGFLDIWTYNAELLVVLENERTLEYHDSNVKNLYEKVRNQLKNNAKEIGNGCFEFYHKCDNTCMESVKNGIYDYPKYSEEAKLNREEIDGVKLESTRIYQILAIYSTVASSLVQVVSLGAISFWMCFNGSLQCRICI

SEQ ID NO: 12464 - protein, 566 aa, synthetic construct
  REGION 1..566: note = hemagglutinin__InfluenzaA__AID70446
MKAVLVVLLYTFATANADTLCIGYHANNSTDTVDTVLEKNVTVTHSVNLLEDKHNGKLCKLRGVAPLHLGKCNIAGWILGNPECESLSTASSWSYIVETSSSDNGTCYPGDFIDYEELREQLSSVSSFERFEIFPKTSSWPNHDSNKGVTAACPHAGAKSFYKNLIWLVKKGNSYPKLSKSYINDKGKEILVLWGIHHPSTTADQQSLYQNADTYVFVGTSRYSKKFKPEIAIRPKVRDQEGRMNYYWTLVEPGDKITFEATGNLVVPRYAFAMERNAGSGIIISGTPVHDCNTTCQTPKGAINTSLPFQNIHPITIGKCPKYVKSTKLRLATGLRNVPSIQSRGLFGAIAGFIEGGWTGMVDGWYGYHHQNEQGSGYAADLKSTQNAIDKITNKVNSVIEKMNTQFTAVGKEFNHLEKRIENLNKKVDDGFLDIWTYNAELLVVLENERTLEYHDSNVKNLYEKVRNQLKNNAKEIGNGCFEFYHKCDNTCMESVKNGIYDYPKYSEEAKLNREEIDGVKLESTRIYQILAIYSTVASSLVQVVSLGAISFWMCFNGSLQCRICI

SEQ ID NO: 12465 - protein, 566 aa, synthetic construct
  REGION 1..566: note = hemagglutinin__InfluenzaA__AID70447
MKAILVVLLYTFATANADTLCIGYHANNSTDTVDTVLEKNVTVTHSVNLLEDKHNGKLCKLRGVAPLHLGKCNIAGWILGNPECESLSTASSWSYIVETSSSDNGTCYPGDFIDYEELREQLSSVSSFERFEIFPKTSSWPNHDSNKGVTAACPQAGAKGFYKNLLWLVKKGNSYPKLSKSYINDKGKEVLVLWGIHHPSTTADQQSLYQNADTYVFVGTSRYSKKFKPEIAIRPKVRDQEGRMNYYWTLVEPGDKITFEATGNLVVPRYAFAMERNAGSGIIISDTPVHDCNTTCQTPKGAINTSLPFQNIHPITIGKCPKYVKSTKLRLATGLRNVPSIQSRGLFGAIAGFIEGGWTGMVDGWYGYHHQNEQGSGYAADLKSTQNAIDKITNKVNSVIEKMNTQFTSVGKEFNHLEKRMENLNKKVDDGFLDIWTYNAELLVVLENERTLEYHDSNVKNLYEKVRNQLKNNAKEIGNGCFEFYHKCDNTCMESVKNGIYDYPKYSEEAKLNREEIDGVKLESTRIYQILAIYSTVASSLVLVVSLGAISFWMCFNGSLQCRICI

SEQ ID NO: 12466 - protein, 566 aa, synthetic construct
  REGION 1..566: note = hemagglutinin__InfluenzaA__AID70448
MKAILVVLLYTFATANADTLCIGYHANNSTDTVDTVLEKNVTVTHSVNLLEDKHNGKLCKLRGVAPLHLGKCNIAGWILGNPECESLSTASSWSYIVETSSSDNGTCYPGDFIDYEELREQLSSVSSFERFEIFPKTSSWPNHDSNKGVTAACPHAGAKGFYKNLIWLVKKGNSYPKLSKSYINDKGKEVLVLWGIHHPSTTADQQSLYQNADTYVFVGTSRYSKKFKPEIAIRPKVRDQEGRMNYYWTLVEPGDKITFEATGNLVVPRYAFTMERDAGSGIIISDTPVHDCNTTCQTPKGAINTSLPFQNIHPITIGKCPKYVKSTKLRLATGLRNVPSIQSRGLFGAIAGFIEGGWTGMVDGWYGYHHQNEQGSGYAADLKSTQNAIDKITNKVNSVIEKMNTQFTAVGKEFNHLEKRIENLNKKVDDGFLDIWTYNAELLVVLENERTLEYQDSNVKNLYEKVRNQLKNNAKEIGNGCLEFYHKFDNTCMESVKNGTYDYPKYSEEAKLNREKIDGVKLESTRIYQILAIYSTVASSLVLVVSLGTISFWMCFNGSLQCRICI

SEQ ID NO: 12467 - protein, 566 aa, synthetic construct
  REGION 1..566: note = hemagglutinin__InfluenzaA__AID70449
MKAILVVLLYTFATANADTLCIGYHANNSTDTVDTVLEKNVTVTHSVNLLEDKHNGKLCKLRGVAPLHLGKCNIAGWILGNPECESLSTASSWSYIVETSSSDNGTCYPGDFIDYEELREQLSSVSSFERFEIFPKTSSWPNHDSNKGVTAACPHAGAKSFYKNLIWLVKKGNSYPKLSKSYINDKGKEVLVLWGIHHPSTTADQQSLYQNADTYVFVGTSRYSKKFKPEIAIRPKVRDQEGRMNYYWTLVEPGDKITFEATGNLVVPRYAFAMERNAGSGIIISDTPVHDCNTTCQTPKGAINTSLPFQNIHPITIGKCPKYVKSTKLRLATGLRNVPSIQSRGLFGAIAGFIEGGWTGMVDGWYGYHHQNEQGSGYAADLKSTQNAIDKITNKVNSVIEKMNTQFTAVGKEFNHLEKRIENLNKKVDDGFLDIWTYNAELLVVLENERTLEYHDSNVKNLYEKVRNQLKNNAKEIGNGCFEFYHKCDNTCMESVKNGTYDYPKYSEEAKLNREEIDGVKLESTRIYQILAIYSTVASSLVLVVSLGAISFWMCFNGSLQCRICV

SEQ ID NO: 12468 - protein, 566 aa, synthetic construct
  REGION 1..566: note = hemagglutinin__InfluenzaA__AID70450
MKAILVVLLYTFATANADTLCIGYHANNSTDTVDTVLEKNVTVTHSVNLLEDKHNGKLCKLRGVAPLHLGKCNIAGWILGNPECESLSTASSWSYIVETSSSDNGTCYPGDFIDYEELREQLSSVSSFERFEIFPKTSSWPNHDSNKGVTAACPHAGAKGFYKNLIWLVKKGNSYPKLSKSYINDKGKEVLVLWGIHHPSTTADQQSLYQNADTYVFVGTSRYSKKFKPEIAIRPKVRDQEGRMNYYWTLVEPGDKITFEATGNLVVPRYAFAMERDAGSGIIISDTPVHDCNTTCQTSKGAINTSLPFQNIHPITIGKCPKYVKSTKLRLATGLRNVPSIQSRGLFGAIAGFIEGGWTGMVDGWYGYHHQNEQGSGYAADLKSTQNAIDKITNKVNSVIEKMNTQFTAVGKEFNHLEKRIENLNKKVDDGFLDIWTYNAELLVVLENERTLEYHDSNVKNLYEKVRNQLKNNAKEIGNGCFEFYHKFDNTCMESVKNGTYDYPKYSEEAKLNREKIDGVKLESTRIYQILAIYSTVASSLVQVVSLGAISFWMCFNGSLQCRICI

SEQ ID NO: 12469 - protein, 566 aa, synthetic construct
  REGION 1..566: note = hemagglutinin__InfluenzaA__AID70451
MKAILVVMLYTFATANADTLCIGYHANNSTDTVDTVLEKNVTVTHSVNLLEDKHNGKLCKLRGVAPLHLGKCNIAGWILGNPECESLSTASSWSYIVETSSSDNGTCYPGDFIDYEELREQLSSVSSFERFEIFPKTSSWPNHDSNKGVTAACPHAGAKGFYKNLIWLVKKGNSYPKLSKSYINDKGKEVLVLWGIHHPSTTADQQSLYQNADTYVFVGTSRYSKKFKPEIAIRPKVRDQEGRMNYYWTLVEPGDKITFEATGNLVVPRYAFAMERNAGSGIIISDTPVHDCNTTCQTPKGAINTSLPFQNIHPITIGKCPKYVKSTKLRLATGLRNVPSIQSRGLFGAIAGFIEGGWTGMVDGWYGYHHQNEQGSGYAADLKSTQNAIDKITNKVNSVIEKMNTQFTAVGKEFNHLEKRIENLNKKVDDGFLDIWTYNAELLVVLENERTLEYHDSNVKNLYEKVRNQLKNNAKEIGNGCFEFYHKFDNTCMESVKNGTYDYPKYSEEAKLNREEIDGVKLESTRIYQILAIYSTVASSLVLVVSLGAISFWMCFNGSLQCRICI

SEQ ID NO: 12470 - protein, 566 aa, synthetic construct
  REGION 1..566: note = hemagglutinin__InfluenzaA__AID70452
MKAILVVLLYTFATANADTLCIGYHANNSTDTVDTVLEKNVTVTHSVNLLEDKHNGKLCKLRGVAPLHLGKCNIAGWILGNPECESLSTASSWSYIVETSSSDNGTCYPGDFIDYEELREQLGSVSSFKRFEIFPKTSSWPNHDSNKGVTAACPHAGAKGFYKNLIWLVKKGNSYPKLSKSYINDKGKEVLVLWGIHHPSTTADQQSLYQNADTYVFVGTSRYSKKFKPEIAIRPKVRDQEGRMNYYWTLVEPGDKITFEATGNLVVPRYAFAMERDAGSGIIISDTPVHDCNTTCQTPKGAINTSLPFQNIHPITIGKCPKYVKSTKLRLATGLRNVPSIQSRGLFGAIAGFIEGGWTGMVDGWYGYHHQNEQGSGYAADLKSTQNAIDKITNKVNSVIEKMNTQFTAVGKEFNHLEKRIENLNKKVDDGFLDIWTYNAELLVVLENERTLEYHDSNVKNLYEKVRNQLKNNAKEIGNGCFEFYHKCDNTCMESVKNGIYDYPKYSEEAKLNREKIDGVKLESTRIYQILAIYSTVASSLVLVVSLGAISFWMRFNGSLQCSICI

SEQ ID NO: 12471 - protein, 566 aa, synthetic construct
  REGION 1..566: note = hemagglutinin__InfluenzaA__AID70453
MKAILVVLLYTFATANADTLCIGYHANNSTDTVDTVLEKNVTVTHSVNLLEDKHNGKLCKLRGVAPLHLGKCNIAGWILGNPECESLSTASSWSYIVETSSSDNGTCYPGDFIDYEELREQLSSVSSFERFEIFPKTSSWPNHDSNKGVTAACPHAGAKGFYKNLIWLVKKGNSYPKLSKSYINDKGKEVLVLWGIHHPSTTADQQSLYQNADTYVFVGTSRYSKKFKPEIAIRPKVRDQEGRMNYYWTLVEPGDKITFEATGNLVVPRYAFAMERDAGSGIIISDTPVQDCNTTCQTPKGAINTSLPFQNIHPITIGKCPKYVKSTKLRLVTGLRNVPSIQSRGLFGAIAGFIEGGWTGMVDGWYGYHHQNEQGSGYAADLKSTQNAIDKITNKVNSVIEKMNTQFTAVGKEFNHLEKRIENLNKKVDDGFLDIWTYNAELLVVLENERTLEYHDSNLKNLYEKVRNQLKNNAKEIGNGCFEFYHKFDNTCMESVKNGTYDYPKYSEEAKLNREEIDGVKLESTRIYQILAIYSTVASSLVQVVSLGAISFWMRFNGSLHCRICI

SEQ ID NO: 12472 - protein, 566 aa, synthetic construct
  REGION 1..566: note = hemagglutinin__InfluenzaA__AID70454
MKAILVVLLYTFATANADTLCIGYHANNSTDTVDTVLEKNVTVTHSVNLLEDKHNGKLCKLRGVAPLHLGKCNIAGWILGNPECESLSTASSWSYIVETSSSDNGTCYPGDFINYEELREQLSSVSSFERFEIFPKTSSWPNHDSNKGVTAACPHAGAKSFYKNLIWLVKKGNSYPKLSKSYINDKGKEVLVLWGIHHPSTTADQQSLYQNADAYVFVGTSRYSKKFKPEIAIRPKVRDQEGRMNYYWTLVEPGDKITFEATGNLVVPRYAFAMERNAGSGIIISDTPVHDCNTTCQTPKGAINTSLPFQNIHPITIGKCPKYVKSTKMRLATGLRNVPCIQSRGLFGAIAGFIEGGWTGMVDGWYGYHHQNEQGSGYAADLKSTQNAIDKITNKVNSVIEKMNTQFTAVGKEFNHLEKRIENLNKKVDDGFLDIWTYNAELLVVLENERTLDYHDSNVKNLYEKVRNQLKNNAKEIGNGCFEFYHKCDNTCMESVKNGTYDYPKYSEEAKLNREEIDGVKLESTRIYQILAIYSTVASSLVLVVSLGAISFWMCSNGSLQCRICI

SEQ ID NO: 12473 - protein, 566 aa, synthetic construct
  REGION 1..566: note = hemagglutinin__InfluenzaA__AID70455
MKAILVVLLYTFATANADTLCIGYHANNSTDTVDTVLEKNVTVTHSVNLLEDKHNGKLCKLGGVAPLHLGKCNIAGWILGNPECESLSTASSWSYIVETSSSDNGTCYPGDFIDYEELREQLSSVSSFERFEIFPKTSSWPNHDSNKGVTAACPHAGAKGFYKNLIWLVKKGNSYPKISKSYINDKGKEVLVLWGIHHPSTTADQQSLYQNADTYIFVGTSRYSKKFKPEIAIRPKVRDQEGRMNYYWTLVEPGDKITFEATGNLVVPRYAFAMERDAGSGIIISDTPVHDCNTTCQTPKGAINTSLPFQNIHPITIGKCPKYVKSTKLRLATGLRNVPSIQSRGLFGAIAGFIEGGWTGMVDGWYGYHHQNEQGSGYAADLKSTQNAIDKITNKVNSVIKKMNTQFTAVGKEFNHLEKRIENLNKKVDDGFLDIWTYNAELLVVLENERTLEYHDSNVKNLYEKVRNQLKNNAKEIGNGCFEFYHKFDNTCMESVKNGTYDYPKYSEEAKLNREEIDGVKLESTRIYQILAIYSTVASSLVLVVSLGAISFWMCFNGSLQCRICI

SEQ ID NO: 12474 - protein, 566 aa, synthetic construct
  REGION 1..566: note = hemagglutinin__InfluenzaA__AID70456
MKAILVVLLYTFATANADTLCIGYHANNSTDTVDTVLEKNVTVTHSVNLLEDKHNGKLCKLRGVAPLHLGKCNIAGWILGNPECESLSTASSWSYIVETSSSDNGTCYPGDFIDYEELREQLSSVSSFERFEIFPKTSSWPNHDSNKGVTAACPHAGAKSFYKNLIWLVKKGNSYPKLSKSYINDKGKEVLVLWGIHHPSTTADQQSLYQNADTYVFVGTSRYSKKFKPEIAIRPKVRDQEGRMNYYWTLVEPGDKITFEATGNLVVPRYAFAMERNAGSGIIISDTPVHDCNTTCQTPKGAINTSLPFQNIHPITIGKCPKYVKSTKLRLATGLRNVPSIQSRGLFGAIAGFIEGGWTGMVDGWYGYHHQNEQGSGYAADLKSTQNAIDKITNKVNSVIEKMNTQFTAVVKEFNHLEKRIENLNKKVDDGFLDIWTYNAELLVVLENERTLEYHDSNLKNLYEKVRNQLKNNAKEIGNGCFEFYHKFDNTCMESVKNGTYDYPKYSEEAKLNREEIDGVKLESTRIYQILAIYSTVASSLVQVVSLGAISFWMCFNGSLQCRICI

SEQ ID NO: 12475 - protein, 566 aa, synthetic construct
  REGION 1..566: note = hemagglutinin__InfluenzaA__AID70457
MKAILVVLLYTFATANADTLCIGYHANNSTDTVDTVLEKNVTVTHSVNLLEDKHNGKLCKLRGVAPLHLGKCNIAGWILGNPECESLSTASSWSYIVETSSSDNGTCYPGDFIDYEELREQLSSVSSFERFEIFPKTSSWPNHDSNKGVTAACPHAGAKGFYKNLIWLVKKGNSYPKLSKSYINDKGKEVLVLWGIHHPSTTADQQSLYQNADTYVFVGTSRYSKKFKPEIAIRPKVRDQEGRMNYYWTLVEPGDKITFEATGNLVVPRYAFAMERDAGSGIIISDTPVHDCNTTCQTPKGAINTSLPFQNIHPITIGKCPKYVKSTKLRLATGLRNVPSIQSRGLFGAIAGFIEGGWTGMVDGWYGYHHQNEQGSGYAADLKSTQNAIDKITNKVNSVIEKMNTQFTAVGKEFNHLEKRIENLNKKVDDGFLDIWTYNAELLVVLENERTLEYHDSNVKNLYEKVRNQLKNNAKEIGNGCFEFYHKFDNTCMESVKNGTYDYPKYSEEAKLNREKIDGVKLESTRIYQILAIYSTVASSLVQVVSLGAISFWKCFNGSLQCRICS

SEQ ID NO: 12476 - protein, 566 aa, synthetic construct
  REGION 1..566: note = hemagglutinin__InfluenzaA__AID70458
MKTIIALSYILCLVFAQKFPGNDNSMATLCLGHHAVPNGTMVKTITNDQIEVTNATELVQSSSTGGICNSPHQILDGGNCTLIDALLGDPQCDGFQNKKWDLFVERSKAYSNCYPYDVPDYASLRSIVASSGTLEFNNESFNWTGVTQNGKSASCKRGSDNSFFSRLNWLTHLNYKYPALKVTMPNNEKFDKLYIWGVHHPGTYNDQISLYAQASGIITVSTKRNQQTVIPNIGSRPRVRDIPSRISIYWTIVKPGDILLINSTGNLIAPRGYFKIQSGKSSIMRSDAPIGKCNSECITPNGSIPNDKPFQNVNRITYGACPRYVKQNTLKLATGMRNVPEKQTRGIFGAIAGFIENGWEGMVDGWYGFRHQNSEGMGQAADLKSTQAAINQINGKLNRLIGKTIEKFHQIEKEFSEVEGRIQDLEKYVEDTKIDLWSYNAELLVALENQHTIDLTDSEMDKLFERTKKQMRENAEDMGNGCFKIYHKCDNACIGSIRNGIYDRDIYRDEALSNRFQIKGVELKAGYKDWILWISFAISCFLLCVVLLGFIMWACQKGNLRCNICI

SEQ ID NO: 12477 - protein, 566 aa, synthetic construct
  REGION 1..566: note = hemagglutinin__InfluenzaA__AID70459
MKTIIALSYILCLVFAQKVPGNDNSTATLCLGHHAVPNGTIVKTITNDQIEVTNATELVQSSSTGEICNSPHQILDGENCTLIDALLGDPQCDGFQNKKWDLFVERSKAHSNCYPYDVPDYASLRSLVASSGTLEFNNESFNWTGVTQNGTSSACIRRSNNSFFSRLNWLTHLNFKYPALNVTMPNNEQFDKLYIWGVHHPGTDKDQIFLYAQASGRITVSTKKSQQAVIPNIGSRPRVRNIPSRVSIYWTIVKPGDILLINSTGNLIAPRGYFKIRSGKSSIMRSDAPIGKCNSACITPNGSIPNDKPFQNVNRITYGACPRYVKQNTLKLAPGMRNVPEKQTRGIFGAIAGFIENGWEGMVDGWYGFRHQNSEGRGQAADLKSTQAAIDQINGKLNRLIGKTIEKFHQIENEFSEVEGRIQDLEKYVEDTKIDLWSYIAELLVALENQHTIDLTDSEMNKLFEKTKKQLRENAEDMGNGCFKIYHKCDNACIGSIRNGIYDHDVYRDEALNNRFQIKGVELKSGYKDWILWISFAISCFLLCVALLGFIMWACQKGNIRCNICI

SEQ ID NO: 12478 - protein, 566 aa, synthetic construct
  REGION 1..566: note = hemagglutinin__InfluenzaA__AID70460
MKTIIALSYILCLVFAQKLPGNDNSTATLCLGHHAVPNGTIVKTITNDQIEVTNATELVQSSSTGEICNSPHQILDGENCTLIDALLGDPQCDGFQNKKWDLFVERSKAHSNCYPYDVPDYASLRSLVASSGTLEFNNESFNWTGVTQNGTSSACIRRSNNSFFSRLNWLTHLNFKYPALNVTMPNNEQFDKLYIWGVHHPGTDKDQIFLYAQASGRITVSTKKSQQAVIPNIGSRPRVRNIPSRVSIYWTIVKPGDILLINSTGNLIAPRGYFKIRSGKSSIMRSDAPIGKCNSACITPNGSIPNDKPFQNVNRITYGACPRYVKQNTLKLATGMRNVPEKQTRGIFGAIAGFIENGWEGMVDGWYGFRHQNSEGRGQAADLKSTQAAIDQINGKLNRLIGKTIEKFHQIEKEFSEVEGRIQDLEKYVEDTKIDLWSYNAELLVALENQHTIDLTDSEMNKLFEKTKKQLRENAEDMGNGCFKIYHKCDNACIGSIRNGIYDHDVYRDEALNNRFQIKGVELKSGYKDWILWISFAISCFLLCVALLGFIMWACQKGNIRCNICI

SEQ ID NO: 12479 - protein, 566 aa, synthetic construct
  REGION 1..566: note = hemagglutinin__InfluenzaA__AID70461
MKTIIALSYILCLVFAQKLPGNDNSTATLCLGHHAVPNGTIVKTITNDQIEVTNATELVQSSSTGEICNSPHQILDGENCTLIDALLGDPQCDGFQNKKWDLFVERSKAHSNCYPYDVPDYASLRSLVASSGTLEFNNESFNWTGVTQNGTSSACIRRSNNSFFSRLNWLTHLNFKYPALNVTMPNNEQFDKLYIWGVHHPGTDKDQIFLYAQASGRITVSTKKSQQAVIPNIGSRPRVRNIPSRVSIYWTIVKPGDILLINSTGNLIAPRGYFKIRSGKSSIMRSDAPIGKCNSECITPNGSIPNDKPFQNVNRITYGACPRYVKQNTLKLATGMRNVPEKQTRGIFGAIAGFIENGWEGMVDGWYGFRHQNSEGRGQAADLKSTQAAIDQINGKLNRLIGKTIEKFHQIEKEFSEVEGRIQDLEKYIEDTKIDLWSYNAELLVALENQHTIDLTDSEMNKLFEKTKKQLRENAEDMGNGCFKIYHKCDNACIGSIRNGIYDHDVYRDEALNNRFQIKGVELKSGYKDWILWISFAISCFLLCVALLGFIMWACQKGNIRCITCI

SEQ ID NO: 12480 - protein, 566 aa, synthetic construct
  REGION 1..566: note = hemagglutinin__InfluenzaA__AID70463
MKTIIALSYILCLVFAQKIPGNDNSTATLCLGHHAVPNGTIVKTITNDQIEVTNATELVQSSSTGEICNSPHQILDGENCTLIDALLGDPQCDGFQNKKWDLFVERSKAHSNCYPYDVPDYASLRSLVASSGTLEFNNESFNWTGVTQNGTSSACIRRSNNSFFSRLNWLTHLNFKYPALNVTMPNNEQFDKLYIWGVHHPGTDKDQIFLYAQASGRITVSTKKSQQAVIPNIGSRPRVRNIPSRVSIYWTIVKPGDILLINSTGNLIAPRGYFKIRSGKSSIMRSDAPIGKCNSACITPNGSIPNDKPFQNVNRITYGACPRYVKQNTLKLATGMRNVPEKQTRGIFGAIAGFIENGWEGMVDGWYGFRHQNSEGRGQAADLKSTQAAIDQINGKLNRLIGKTIEKFHQIEKEFSEVEGRIQDLEKYVEDTKIDLWSYNAELLVALENQHTIDLTDSEMNKLFEKTKKQLRENAEDMGNGCFKIYHKCDNACIGSIRNGIYDHDVYRDEALNNRFQIKGVELKSGYKDWILWISFAISCFLLCVALLGFIMWACQKGNIRCNICI

SEQ ID NO: 12481 - protein, 566 aa, synthetic construct
  REGION 1..566: note = hemagglutinin__InfluenzaA__AID70464
MKTIIALSYILCLVFAQKLPGDDNSTATLCLGHHAVPNGTIVKTITNDQIEVTNATELVQSSSTGEICNSPHQILDGENCTLIDALLGDPQCDGFQNKKWDLFVERSKAHSNCYPYDVPDYASLRSLVASSGTLEFNNESFNWTGVTQNGTSSACIRRSNNSFFSRLNWLTHLNFKYPALNVTMPNNEQFDKLYIWGVHHPGTDKDQIFLYAQASGRITVSTKKSQQAVIPNIGSRPRVRNIPSRVSIYWTIVKPGDILLINSTGNLIAPRGYFKIRSGKSSIMRSDAPIGKCNSACITPNGSIPNDKPFQNVNRITYGACPRYVKQNTLKLATGMRNVPEKQTRGIFGAIAGFIENGWEGMVDGWYGFRHQNSEGRGQAADLKSTQAAIDQINGKLNRLIGKTIEKFHQIEKEFSEVEGRIQDLEKYVEDTKIDLWSYNAELLVALENQHTIDLTDSEMNKLFEKTKKQLRENAEDMGNGCFKIYHKCDNACIGSIRNGTYDHDVYRDEALNNRFQIKGVELKSGYKDWILWISFAISCFLLCVALLGFIMWACQKGNIRCNICI

SEQ ID NO: 12482 - protein, 566 aa, synthetic construct
  REGION 1..566: note = hemagglutinin__InfluenzaA__AID70465
MKTIIALSYILCLVFAQKLPGDDNSTATLCLGHHAVPNGTIVKTITNDQIEVTNATELVQSSSTGEICNSPHQILDGENCTLIDALLGDPQCDGFQNKKWDLFVERSKAHSNCYPYDVPDYASLRSLVASSGTLEFNNESFNWTGVTQNGTSSACIRRSNNSFFSRLNWLTHLNFKYPALNVTMPNNEQFDKLYIWGVHHPGTDKDQIFLYAQASGRITVSTKKSQQAVIPNIGSRPRVRNIPSRVSIYWTIVKPGDILLINSTGNLIAPRGYFKIRSGKSSIMRSDAPIGKCNSACITPNGSIPNDKPFQNVNRITYGACPRYVKQNTLKLATGMRNVPEKQTRGIFGAIAGFIENGWEGMVDGWYGFRHQNSEGRGQAADLKSTQAAIDQINGKLNRLIGKTIEKFHQIEKEFSEVEGRIQDLEKYVEDTKIDLWSYNAELLVALENHHAIDLTDSEMNKLFEKTKKQMRENAEDMGNGCFKIYLKCDNACIGSIRNGIYDHDVYRDEALNNRFQIKGVELKSGYKDWILWISFTESCFLLCVALLGFIMWACQKGNIRCNICI

SEQ ID NO: 12483 - protein, 566 aa, synthetic construct
  REGION 1..566: note = hemagglutinin__InfluenzaA__AID70466
MKTIIALSYILCLVFAQKLPGNDNSTATLCLGHHAVPNGTIVKTITNDQIEVTNATELVQSSSTGEICNSPHQILDGENCTLIDALLGDPQCDGFQNKKWDLFVERSKAHSNCYPYDVPDYASLRSLVASSGTLEFNNESFNWTGVTQNGTSSACIRRSNNSFFSRLNWLTHLNFKYPALNVTMPNNEQFDKLYIWGVHHPGTDKDQIFLYAQASGRITVSTKKSQQAVIPNIGSRPRVRNIPSRVSIYWTIVKPGDILLINSTGNLIAPRGYFKIRSGKSSIMRSDAPIGKCNSACITPNGSIPNDKPFQNVNRITYGACPRYVKQNTLKLATGMRNVPEKQTRGIFGAIAGFIENGWEGMVDGWYGFRHQNSEGRGQAADLKSTQAAIDQINGKLNRLIGKTIEKFHQIENEFSEVEGRIQDLEKYVEDTKIDLWSYIGELLVALENQHTIDLTDSEMNKLFEKTKKQLRENAEDMGNGCFKIYHKCDNACIGSIRNGIYDHDVYRDEALNNRFQIKGVELKSGYKDWILWISFAISCFLLCVALLGFIMWACQKGNIRCNICI

SEQ ID NO: 12484 - protein, 566 aa, synthetic construct
  REGION 1..566: note = hemagglutinin__InfluenzaA__AID70467
MKTIIALSYILCLVFAQKLPGNDNSTATLCLGHHAVPNGTIVKTITNDQIEVTNATELVQSSSTGEICNSPHQILDGENCTLIDALLGDPQCDGFQNKKWDLFVERSKAHSNCYPYDVPDYASLRSLVASSGTLEFNNESFNWTGVTQNGTSSACIRRSNNSFFSRLNWLTHLNFKYPALNVTMPNNEQFDKLYIWGVHHPGTDKDQIFLYAQASGRITVSTKKSQQAVIPNIGSRPRVRNIPSRVSIYWTIVKPGDILLINSTGNLIAPRGYFKIRSGKSSIMRSDAPIGKCNSACITPNGSIPNDKPFQNVNRITYGACPRYVKQNTLKLATGMRNVPEKQTRGIFGAIAGFIENGWEGMVDGWYGFRHQNCEGRGQAADLKSTQAAIDQINGKLNRLIGKTIEKFHQIENEFSEVEGRIQGLEKYVEDTKIDLWSYIAELIVALENQHTIDLTDSEMNKLFEKTKKQMRENAEDMGNGCFKIYHKCDNACIGSIRNGIYDHDVYRDEALNNRFQIKGVELKSGYKDWILWISFAISCFLLCVALLGFIMWACQKGNIRCNICI

SEQ ID NO: 12485 - protein, 566 aa, synthetic construct
  REGION 1..566: note = hemagglutinin__InfluenzaA__AID70468
MKTIIALSYILCLVFAQKLPGNDNSTATLCLGHHAVPNGTIVKTITNDQIEVTNATELVQSSSTGEICNSPHQILDGENCTLIDALLGDPQCDGFQNKKWDLFVERSKAHSNCYPYDVPDYASLRSLVASSGTLEFNNESFNWTGVTQNGTSSACIRRSNNSFFSRLNWLTHLNFKYPALNVTMPNNEQFDKLYIWGVHHPGTDKDQIFLYAQASGRITVSTKRSQQAVIPNIGSRPRVRNIPSRVSIYWTIVKPGDILLINSTGNLIAPRGYFKIRSGKSSIMRSDAPIGKCNSACITPNGSIPNDKPFQNVNRITYGACPRYVKQNTLKLATGMRNVPEKQTRGIFGAIAGFIENGWEGMVDGWYGFRHQNCEGRGQAADLKSTQAAIDQINGKLNRLMGKSIEKFHQIENEFSEVEGRIQGLEKYVEDTKIDLWSYNGELIVALENQHAIDLTDSEMNKLFEKTKKQMRENAEDMGNGCFKIYLKCDNACIGSIRNGIYDHDVYRDEALNNRFQIKGVELKSGYKDWILWISFTISCFLLCVALLGFIMWARQKGNIRCNICI

SEQ ID NO: 12486 - protein, 566 aa, synthetic construct
  REGION 1..566: note = hemagglutinin__InfluenzaA__AID70469
MKTIIALSYILCLVFAQKVPGNENSTATLCLGHHAVPNGTIVKTITNDQIEVTNATELVQSSSTGEICNSPHQILDGENCTLIDALLGDPQCDGFQNKKWDLFVERSKAHSNCYPYDVPDYASLRSLVASSGTLEFNNESFNWTGVTQNGTSSACIRRSNNSFFSRLNWLTHLNFKYPALNVTMPNNEQFDKLYIWGVHHPGTDKDQIFLYAQASGRITVSTKRSQQAVIPNIGSRPRVRNIPSRVSIYWTIVKPGDILLINSTGNLIAPRGYFKIRSGKSSIMRSDAPIGKCNSACITPNGSIPNDKPFQNVNRITYGACPRYVKQNTLKLATGMRNVPEKQTRGIFGAIAGFIENGWEGMVDGWYGFRHQNCEGRGQAADLKSTQAAIDQINGKLNRLIGKTIEKFHQIEKEFSEVEGRIQGLEKYVEDTKIDLWSYNAELLVALENQHTIDLTDSEMNKLFEKTKKQMRENAEDMGNGCFKIYHKCDNACIGSIRNGIYDHDVYRDEALNNRFQIKGVELKSGYKDWILWISFTISCFLLCVALLGFIMWACQKGNIRCNICI

SEQ ID NO: 12487 - protein, 566 aa, synthetic construct
  REGION 1..566: note = hemagglutinin__InfluenzaA__AID70470
MKTIIALSYILCLVFAQKVPGNENSTATLCLGHHAVPNGTIVKTITNDQIEVTNATELVQSSSTGEICNSPHQILDGENCTLIDALLGDPQCDGFQNKKWDLFVERSKAHSNCYPYDVPDYASLRSLVASSGTLEFNNESFNWTGVTQNGTSSACIRRSNNSFFSRLNWLTHLNFKYPALNVTMPNNEQFDKLYIWGVHHPGTDKDQIFLYAQASGRITVSTKRSQQAVIPNIGSRPRVRNIPSRVSIYWTIVKPGDILLINSTGNLIAPRGYFKIRSGKSSIMRSDAPIGKCNSACITPNGSIPNDKPFQNVNRITYGACPRYVKQNTLKLATGMRNVPEKQTRGIFGAIAGFIENGWEGMVDGWYGFRHQNCEGRGQAADLKSTQAAIDQINGKLNRLIGKTIEKFHQIEKEFSEVEGRIQGLEKYVEDTKIDLWSYNGELLVALENHHTIDLTDSEMNKLFEKTKKQMRENAEDMGNGCFKIYHKCDNACIGSIRNGIYDHDVYRDEALNNRFQIKGVELKSGYKDWILWISFTISCFLLCVALLGFIMWACQKGNIRCNICI

SEQ ID NO: 12488 - protein, 566 aa, synthetic construct
  REGION 1..566: note = hemagglutinin__InfluenzaA__AID70471
MKTIIALSYILCLVFTQKLPGNDNSTATLCLGHHAVPNGTIVKTITNDQIEVTNATELVQSSSTGEICNSPHQILDGENCTLIDALLGDPQCDGFQNKKWDLFVERSKAHSNCYPYDVPDYASLRSLVASSGTLEFNNESFNWTGVTQNGTSSACIRRSNNSFFSRLNWLTHLNFKYPALNVTMPNNEQFDKLYIWGVHHPGTDKDQIFLYAQASGRITVSTKKSQQAVIPNIGSRPRVRNIPSRVSIYWTIVKPGDILLINSTGNLIAPRGYFKIRSGKSSIMRSDAPIGKCNSACITPNGSIPNDKPFQNVNRITYGACPRYVKQNTLKLATGMRNVPEKQTRGIFGAIAGFIENGWEGMVDGWYGFRHQNSEGRGQAADLKSTQAAIDQINGKLNRLIGKTIEKFHQIENEFSEVEGRIQDLEKYVEDTKIDLWSYNAELIVALENHHTIDLTDSEMNKLFEKTKKQMRENAEDMGNGCFKIYHKCDNACIGSIRNGIYDHDVYRDEALNNRFQIKGVELKSGYKDWILWISFAISCFLICVALLGFIMWACQKGNLRCNICI

SEQ ID NO: 12489 - protein, 566 aa, synthetic construct
  REGION 1..566: note = hemagglutinin__InfluenzaA__AID70472
MKTIIALSYILCLVFAQKLPGNDNSTATLCLGHHAVPNGTIVKTITNDQIEVTNATELVQSSSTGEICNSPHQILDGENCTLIDALLGDPQCDGFQNKKWDLFVERSKAHSNCYPYDVPDYASLRSLVASSGTLEFNNESFNWTGVTQNGTSSACIRRSNNSFFSRLNWLTHLNFKYPALNVTMPNNEQFDKLYIWGVHHPGTDKDQIFLYAQASGRITVSTKKSQQAVIPNIGSRPRVRNIPSRVSIYWTIVKPGDILLINSTGNLIAPRGYFKIRSGKSSIMRSDAPIGKCNSACITPNGSIPNDKPFQNVNRITYGACPRYVKQNTLKLATGMRNVPEKQTRGIFGAIAGFIENGWEGMVDGWYGFRHQNSEGRGQAADLKSTQAAIDQINGKLNRLIGKTIEKFHQIEKEFSEVEGRIQDLEKYVEDTKIDLWSYNAELLVALENHHTIDLTDSEMNKLFEKTKKQMRENAEDMGNGCFKIYHKCDNACIGSIRNGIYDHDVYRDEALNNRFQIKGVELKSGYKDWILWISFAISCFLLCVALLGFIMWACQKGNIRCNICI

SEQ ID NO: 12490 - protein, 566 aa, synthetic construct
  REGION 1..566: note = hemagglutinin__InfluenzaA__AID70473
MKTIIALSYILCLVFAQKLPGNDNSTATLCLGHHAVPNGTIVKTITNDQIEVTNATELVQSSSTGEICNSPHQILDGENCTLIDALLGDPQCDGFQNKKWDLFVERSKAHSNCYPYDVPDYASLRSLVASSGTLEFNNESFNWTGVTQNGTSSACIRRSNNSFFSRLNWLTHLNFKYPALNVTMPNNEQFDKLYIWGVHHPGTDKDQIFLYAQASGRITVSTKKSQQAVIPNIGSRPRVRNIPSRVSIYWTIVKPGDILLINSTGNLIAPRGYFKIRSGKSSIMRSDAPIGKCNSACITPNGSIPNDKPFQNVNRITYGACPRYVKQNTLKLATGMRNVPEKQTRGIFGAIAGFIENGWEGMVDGWYGFRHQNCEGRGQAADLKSTQAAIDQINGKLNRLIGKTIEKFHQIEKEFSEVEGRIQGLEKYVEDTKIDLWSYNAELLVALENQHTIDLTDSEMNKLFEKTKKQMRENAEDMGNGCFKIYHKCDNACIGSIRNGIYDHDVYRDEALNNRFQIKGVELKSGYKDWILWISFAISCFLLCVALLGFIMWACQKGNIRCNICI

SEQ ID NO: 12491 - protein, 566 aa, synthetic construct
  REGION 1..566: note = hemagglutinin__InfluenzaA__AID70474
MKTIIALSYILCLVFAQKLPGNDNSTATLCLGHHAVPNGTIVKTITNDQIEVTNATELVQSSSTGEICNSPHQILDGENCTLIDALLGDPQCDGFQNKKWDLFVERSKAHSNCYPYDVPDYASLRSLVASSGTLEFNNESFNWTGVTQNGTSSACIRRSNNSFFSRLNWLTHLNFKYPALNVTMPNNEQFDKLYIWGVHHPGTDKDQIFLYAQASGRITVSTKKSQQAVIPNIGSRPRVRNIPSRVSIYWTIVKPGDILLINSTGNLIAPRGYFKIRSGKSSIMRSDAPIGKCNSACITPNGSIPNDKPFQNVNRITYGACPRYVKQNTLKLATGMRNVPEKQTRGIFGAIAGFIENVWEGMVDGWFGFRHQICEGRGQAAGLESTQAAIDQINGKMNRLMGKTIGKFHQIVNEFSEVEGRIQDLEKYVEDTKIDLWSYIGELLVALENHHAIDLTDSEMNKLFEKTKKQMRENAEDMGNGCFKIYHKCDNACIGSIRNGIYDRDVYRDEALNNRFHIKGVELKSGYKDWIIWISSTESCFLLCVALLGFIMWACQKGNIRSNICI

SEQ ID NO: 12492 - protein, 566 aa, synthetic construct
  REGION 1..566: note = hemagglutinin__InfluenzaA__AID70475
MKTIIALSYMLCLVFAQKLPGNDNSTATLCLGHHAVPNGTIVKTITNDQIEVTNATELVQSSSTGEICNSPHQILDGENCTLIDALLGDPQCDGFQNKKWDLFVERSKAHSNCYPYDVPDYASLRSLVASSGTLEFNNESFNWTGVTQNGTSSACIRRSNNSFFSRLNWLTHLNFKYPALNVTMPNNEQFDKLYIWGVHHPGTDKDQIFLYAQASGRITVSTKKSQQAVIPNIGSRPRVRNIPSRVSIYWTIVKPGDILLINSTGNLIAPRGYFKIRSGKSSIMRSDAPIGKCNSACITPNGSIPNDKPFQNVNRITYGACPRYVKQNTLKLATGMRNVPEKQTRGIFGAIAGFIENVWEGMVDGWYGFRHQNCEGRGQAADLKSAQAAIDPINGKLNRLMGKTIGKFHQIEKEFSEVEGRIQDLEKYVEDTKIDLWSYNGELLVALENQHAIDLTDSEMNKVFEKTKKQLRENAEDMGNGCFKIYHKCDNACIGSIRNGIYDHDVYRNEALNNRFQIKGVELKSGYKDWILWISFAISCFLLSVASLGFIMWAYQKGNIRCNICI

SEQ ID NO: 12493 - protein, 566 aa, synthetic construct
  REGION 1..566: note = hemagglutinin__InfluenzaA__AID70476
MKTIIALSYILCLVFAQKLPGNENSTATLGLGHHAVPNGTIVKTITNDQIEVTNATELVQSSSTGEICNSPHQILDGENCTLIDALLGDPQCDDFQNKKWDLFVERSKAHSNCYPYDVPDYASLRSLVASSGTLEFNNESFNWTGVTQNGTSSACIRRSNNSFFSRLNWLTHLNFKYPALNVTMPNNEQFDKLYIWGVHHPGTDKDQIFLYAQASGRITVSTKKSQQAVIPNIGSRPRVRNIPSRVSIYWTIVKPGDILLINSTGNLIAPRGYFKIRSGKSSIMRSDAPIGKCNSACITPNGSIPNDKPFQNVNRITYGACPRYVKQNNLKLATGMRNVPEKQTRGIFGAIAGFIENGWEGMVDGWYGFRHQNSEGRGQAADLKSTQAAIDQINGKLNRLIGKTIEKFHQIEKEFSEVEGRIQGREKYVEDTKIDLWSYIGEFIVALENQHTIDLTDSEMNKLFEKTKKQMRENAEDMGNGCFKIYHKCDNACIGSIRNGIYDHDVYRDEALNNRFQIKGVELKSGYKDWILWISFAISCFLLCVALLGFIMWACQKGNIRCNICI

SEQ ID NO: 12494 - protein, 566 aa, synthetic construct
  REGION 1..566: note = hemagglutinin__InfluenzaA__AID70477
MKTIIALSYILCLVFAQKLPGNDSSTGTLCLGHHAVPNGTIVKTITNDQIEVTNATELVQSSSTGEICNRPHQILDGENCTLIDALLGDPQCDGFQNKKWDLFVERSKAHSNCYPYDVPDYASLRSLVASSGTLEFNNESFNWTGVTQNGTSSACIRRSNNSFFSILNWLTHLNFKYPALNVTMPNNEQFDKLYIWGVHHPGTDKDQIFLYAQASGRITVSTKKSQQAVIPNIGSRPRVRNIPSRVSIYWTIVKPGEILLINSTGNLIAPRGYFKIRSGKSSIMRSDAPIGKCYSACITPNGSIPNDKPFQNVNRITYGACPRYVKQHPLKLATGMRNVPEKQTRGIFGAIAGFIENGWEGMVDGWYGFRHQICEGRGQAADLKSTQAAIDQINGKLNRLIGKTIEKFHQIEKEFSEVEWRIQGLEKYVEDTKVDLWSYNGELIVALENHHTIDLTDSEMNKLFEKTKKQMRENAEDMGNGCFKIYLKCDNACIGSIRNGIYDHDVYRDEALNNRFQIKGVELKSGYKDWILWISFTESCFLLSVALLGFIMWACQKGNIRCNICI

SEQ ID NO: 12495 - protein, 566 aa, synthetic construct
  REGION 1..566: note = hemagglutinin__InfluenzaA__AID70478
MKTIIALSYILCLVFAQKLPGNDNSTATLCLGHHAVPNGTIVKTITNDQIEVTNATELVQSSSTGEICNSPHQILDGENCTLIDALLGDPQCDGFQNKKWDLFVERSKAHSNCYPYDVPDYASLRSLVASSGTLEFNNESFNWTGVTQNGTSSACIRRSNNSFFSRLNWLTHLNFKYPALNVTMPNNEQFDKLYIWGVHHPGTDKDQIFLYAQASGRITVSTKKSQQAVIPNIGSRPRVRNIPSRVSIYWTIVKPGDILLINSTGNLIAPRGYFKIRSGKSSIMRSDAPIGKCNSACITPNGSIPNDKPFQNVNRITYGACPRYVKQNTLKLATGMRNVPEKQTRGIFGAIAGFIENGWEGMVDGWYGFRHQNCEGRGQAADLESTQAAIDQINGKMNRLMGKTIEKFHQIEKEFSEVEGRIQGREKYVEDTKIDLWSYNGELLVDLENQHTIDLTDSEMNKVFEKTKKQMRENAEDMGNGCFKIYHKCDNACIGSIRNGIYDHDVYRDEALNNRFQIKGVELKSGYKDWIQWISFTISCFLLCVSLLGFIMWACQKGNIRCNICI

SEQ ID NO: 12496 - protein, 566 aa, synthetic construct; identical to SEQ ID NO: 10040
  REGION 1..566: note = hemagglutinin__InfluenzaA__AID70632

SEQ ID NO: 12497 - protein, 560 aa, synthetic construct
  REGION 1..560: note = hemagglutinin__InfluenzaA__AID70634
MNTQILVFALIAIIPTNADKICLGHHAVSNGTKVNTLTERGVEVVNATETVERTNIPRICSKGKRTVDLGQCGLLGTITGPPQCDQFLEFSADLIIERREGSDVCYPGKFVNEEALRQILRESGGIDKEAMGFTYSGIRTNGATSACRRSGSSFYAEMKWLLSNTDNAAFPQMTKSYKNTRKSPALIVWGIHHSVSTAEQTKLYGSGNKLVTVGSSNYQQSFVPSPGARPQVNGLSGRIDFHWLMLNPNDTVTFSFNGAFIAPDRASFLRGKSMGIQSGVQVDANCEGDCYHSGGTIISNLPFQNIDSRAVGKCPRYVKQRSLLLATGMKNVPEIPKGRGLFGAIAGFIENGWEGLIDGWYGFRHQNAQGEGTAADYKSTQSAIDQITGKLNRIIEKTNQQFELIDNEFNEVEKQISNVINWTRDSITEVWSYNAELLVAMENQHTIDLADSEMDKLYERVKRQLRENAEEDGTGCFEIFHKCDDDCMASIRNNTYDHSKYREEAMQNRIQIDPVKLSSGYKDVILWFSFGASCFILLAIVMGLVFICVKNGNMRCTICI

SEQ ID NO: 12498 - protein, 566 aa, synthetic construct
  REGION 1..566: note = hemagglutinin__InfluenzaA__AIF72902
MKTIIALSYILCLVFAQKLPGNDNSTATLCLGHHAVPNGTIVKTITNDQIEVTNATELVQSSSAGEICDSPHQILDGENCTLIDALLGDPQCDGFQNKKWDLFVERSRAYSNCYPYDVPDYASLRSLVASSGTLEFNNESFNWTGVTQNGTSSACIRRSNNSFFSRLNWLTHLNFKYPALNVTMPNNEQFDKLYIWGVHHPGTDKDQIFLYAQASGRITVSTKRSQQAVIPNIGSRPRVRNIPSRISIYWTIVKPGDILLINSTGNLIAPRGYFKIRSGKSSIMRSDAPIGKCNSECITPNGSIPNDKPFQNVNRITYGACPRYVKQSTLKLATGMRNVPEKQTRGIFGAIAGFIENGWEGMVDGWYGFRHQNSEGRGQAADLKSTQAAIDQINGKLNRLIGKTNEKFHQIEKEFSEVEGRIQDLEKYVEDTKIDLWSYNAELLVALENQHTIDLTDSEMNKLFEKTKKQLRENAEDMGNGCFKIYHKCDNACIGSIRNGTYDHDVYRDEALNNRFQIKGVELKSGYKDWILWISFAISCFLLCVALLGFIMWACQKGNIRCNICI

SEQ ID NO: 12499 - protein, 566 aa, synthetic construct
  REGION 1..566: note = hemagglutinin__InfluenzaA__AIF72903
MKTIIALSYILCLVFAQELPGNDNSTATLCLGHHAVPNGTIVKTITNDQIEVTNATELVQSSSAGEICDSPHQILDGENCTLIDALLGDPQCDGFQNKKWDLFVERSRAYSNCYPYDVPDYASLRSLVASSGTLEFNNESFNWTGVTQNGTSSACIRRSNNSFFSRLNWLTHLNFKYPALNVTMPNNEQFDKLYIWGVHHPGTDKDQIFLYAQASGRITVSTKRSQQAVIPNIGSRPRVRNIPSRISIYWTIVKPGDILLINSTGNLIAPRGYFKIRSGKSSIMRSDAPIGKCNSECITPNGSIPNDKPFQNVNRITYGACPRYVKQSTLKLATGMRNVPEKQTRGIFGAIAGFIENGWEGMVDGWYGFRHQNSEGRGQAADLKSTQAAIDQINGKLNRLIGKTNEKFHQIEKEFSEVEGRIQDLEKYVEDTKIDLWSYNAELLVALENQHTIDLTDSEMNKLFEKTKKQLRENAEDMGNGCFKIYHKCDNACIGSIRNGTYDHDVYRDEALNNRFQIKGVELKSGYKDWVLWISFAISCFLLCVALLGFIMWACQKGNIRCNICI

SEQ ID NO: 12500 - protein, 566 aa, synthetic construct
  REGION 1..566: note = hemagglutinin__InfluenzaA__AIF72904
MKTIIALSYILCLVFAQELPGNDNSTATLCLGHHAVPNGTIVKTITNDQIEVTNATELVQSSSAGEICDSPHQILDGENCTLIDALLGDPQCDGFQNKKWDLFVERSRAYSNCYPYDVPDYASLRSLVASSGTLEFNNESFNWTGVTQNGTSSACIRRSNNSFFSRLNWLTHLNFKYPALNVTMPNNEQFDKLYIWGVHHPGTDKDQIFLYAQASGRITVSTKRSQQAVIPNIGSRPRVRNIPSRISIYWTIVKPGDILLINSTGNLIAPRGYFKIRSGKSSIMRSDAPIGKCNSECITPNGSIPNDKPFQNVNRITYGACPRYVKQSTLKLATGMRNVPEKQTRGIFGAIAGFIENGWEGMMDGWYGFRHQNSEGRGQAADLKSTQAAIDQINGKLNRLIGKTNEKFHQIEKEFSEVEGRIQDLEKYVEDTKIDLWSYNAELLVALENQHTIDLTDSEMNKLFEKTKKQLRENAEDMGNGCFKIYHKCDNACIGSIRNGTYDHDVYRDEALNNRFQIKGVELKSGYKDWVLWISFAISCFLLCVALLGFIMWACQKGNIRCNICI

SEQ ID NO: 12501 - protein, 566 aa, synthetic construct
  REGION 1..566: note = hemagglutinin__InfluenzaA__AIF72905
MKTIIALSYILCLVFAQKLPGNDNSTATLCLGHHAVPNGTIVKTITNDQIEVTNATELVQSSSAGEICDSPHQILDGENCTLIDALLGDPQCDGFQNKKWDLFVERSRAYSNCYPYDVPDYASLRSLVASSGTLEFKNESFNWTGVTQNGTSSACIRRSNNSFFSRLNWLTHSNFKYPALNVTMPNNEQFDKLYIWGVHHPGTDKDQIFLYAQASGRITVSTKRSQQAVIPNIGSRPRVRNIPSRISIYWTIVKPGDILLINSTGNLIAPRGYFKIRSGKSSIMRSDAPIGKCNSECITPNGSIPNDKPFQNVNRITYGACPRYVKQSTLKLATGMRNVPEKQTRGIFGAIAGFIENGWEGMMDGWYGFRHQNSEGRGQAADLKSTQAAIDQINGKLNRLIGKTNEKFHQIEKEFSEVEGRIQDLEKYVEDTKIDLWSYNAELLVALENQHTIDLTDSEMNKLFEKTKKQLRENAEDMGNGCFKIYHKCDNACIGSIRNGTYDHDVYRDEALNNRFQIKGVELKSGYKDWILWISFAISCFLLCVALLGFIMWACQKGNIRCNICI

SEQ ID NO: 12502 - protein, 566 aa, synthetic construct; identical to SEQ ID NO: 3411
  REGION 1..566: note = hemagglutinin__InfluenzaA__AIF72906

SEQ ID NO: 12503 - protein, 566 aa, synthetic construct; identical to SEQ ID NO: 3411
  REGION 1..566: note = hemagglutinin__InfluenzaA__AIF72907

SEQ ID NO: 12504 - protein, 566 aa, synthetic construct; identical to SEQ ID NO: 3411
  REGION 1..566: note = hemagglutinin__InfluenzaA__AIF72908

SEQ ID NO: 12505 - protein, 566 aa, synthetic construct
  REGION 1..566: note = hemagglutinin__InfluenzaA__AIF72909
MKTIIALSYILCLVFAQKLPGNDNSTATLCLGHHAVPNGTIVKTITNDQIEVTNATELVQSSSAGEICDGPHQILDGENCTLIDALLGDPQCDGFQNKKWDLFVERSRAYSNCYPYDVPDYASLRSLVASSGTLEFNNESFNWTGTTQNGTSSACIRRSNNSFFSRLNWLTHLNFKYPALNVTMPNNEQFDKLYIWGVHHPGTDKDQIFLYAQASGRITVSTKRSQQAVIPNIGSRPRVRNIPSRISIYWTIVKPGDILLINSTGNLIAPRGYFKIRSGKSSIMRSDAPIGKCNSECITPNGSIPNDKPFQNVNRITYGACPRYVKQSTLKLATGMRNVPEKQTRGIFGAIAGFIENGWEGMVDGWYGFRHQNSEGRGQAADLKSTQAAIDQINGKLNRLIGKTNEKFHQIEKEFSEVEGRIQDLEKYVEDTKIDLWSYNAELLVALENQHTIDLTDSEMNKLFEKTKKQLRENAEDMGNGCFKIYHKCDNACIGSIRNGTYDHDVYRDEALNNRFQIKGVELKSGYKDWILWISFAISCFLLCVALLGFIMWACQKGNIRCNICI

SEQ ID NO: 12506 - protein, 566 aa, synthetic construct; identical to SEQ ID NO: 3411
  REGION 1..566: note = hemagglutinin__InfluenzaA__AIF72910

SEQ ID NO: 12507 - protein, 566 aa, synthetic construct; identical to SEQ ID NO: 3411
  REGION 1..566: note = hemagglutinin__InfluenzaA__AIF72911

SEQ ID NO: 12508 - protein, 566 aa, synthetic construct; identical to SEQ ID NO: 12498
  REGION 1..566: note = hemagglutinin__InfluenzaA__AIF72912

SEQ ID NO: 12509 - protein, 566 aa, synthetic construct; identical to SEQ ID NO: 3411
  REGION 1..566: note = hemagglutinin__InfluenzaA__AIF72913

SEQ ID NO: 12510 - protein, 566 aa, synthetic construct
  REGION 1..566: note = hemagglutinin__InfluenzaA__AIF72914
MKTIIALSYILCLVFAQKLPGNDNSTATLCLGHHAVPNGTIVKTITNDQIEVTNATELVQSSSTGEICDSPHQILDGENCTLIDALLGDPQCDGFQNKKWDLFVERSKAYSNCYPYDVPDYASLRSLVASSGTLEFNNESFNWTGVTQNGTSSACIRRSNNSFFSRLNWLTHLNFKYPALNVTMPNNEQFDKLYIWGVHHPGTDKDQIFLYAQASGRITVSTKRSQQAVIPNIGSRPRVRNIPSRISIYWTIVKPGDILLINSTGNLIAPRGYFKIRGGKSSIMRSDAPIGKCNSECITPNGSIPNDKPFQNVNRITYGACPRYVKQNTLKLATGMRNVPEKQTRGIFGAIAGFIENGWEGMVDGWYGFRHQNSEGRGQAADLKSTQAAIDQINGKLNRLIGKTNEKFHQIEKEFSEVEGRIHDLEKYVEDTLFDLWVYNSELLVALQNQHTIDLPDSEMNKLFEKTKKQLRENAEDMGNGCFKIYHKCDNACIGSIRNGTYDHDVYRDEALNNRFQIKGVELKSGYKDWILWISFAISCFLLCVALLGFIMWACQKGNIRCNICI

SEQ ID NO: 12511 - protein, 566 aa, synthetic construct
  REGION 1..566: note = hemagglutinin__InfluenzaA__AIF72915
MKTIIALSYILCLVFAQKLPGNDNSTATLCLGHHAVPNGTIVKTITNDQIEVTNATELVQSSSTGEICDSPLQILDGENCTLIDALLGDPQCDGFQNKKWDLFVERSKAYSNCYPYDVPDYASLRSLVASSGTLEFNNESFNWTGVTQNGTSSACIRRSNNSFFSRLNWLTHLNFKYPALNVTMPNNEQFDKLYIWGVHHPGTDKDQIFLYAQASGRITVSTKRSQQAVIPNIGSRPRVRNIPSRISIYWTIVKPGDILLINSTGNLIAPRGYFKIRSGKSSIMRSNAPIGKCNSECITPNGSIPNDKPFQNVNRITYGACPRYVKQNTLKLATGMRNVPEKQTRGIFGAIAGFIENGWEGMVDGWYGFRHQNSEGRGQAADLKSTQAAIDQINGKLNRLIGKTNEKFHQIEKEFSEVEGRIQDLEKYVEDTKIDLWSYNAELLVALENQHTIDLTDSEMNKLFEKTKKQLRENAEDMGNGCFKIYHKCDNACIGSIRNGTYDHDVYRDEALNNRFQIKGVELKSGYKDWILWISFAISCFLLCVALLGFIMWACQKGNIRCNICI

SEQ ID NO: 12512 - protein, 566 aa, synthetic construct; identical to SEQ ID NO: 3411
  REGION 1..566: note = hemagglutinin__InfluenzaA__AIF72916

SEQ ID NO: 12513 - protein, 566 aa, synthetic construct
  REGION 1..566: note = hemagglutinin__InfluenzaA__AIF72917
MKTIIALSYILCLVFAQKLPRNDNSTATLCLGHHAVPNGTIVKTITNDQIEVTNATELVQSSSTGEICDSPHQILDGENCTLIDALLGDPQCDGFQNKKWDLFVERSKAYSNCYPYDVPDYASLRSLVASSGTLEFKNESFNWTGVTQNGTSSACIRRSNNSFFSRLNWLTHLNFKYPALNVTMPNNEQFDKLYIWGVHHPGTDKDQIFLYAQASGRITVSTKRSQQAVIPNIGSRPRVRNIPSRISIYWTIVKPGDILLINSTGNLIAPRGYFKIRSGKSSIMRSDAPIGKCNSECITPNGSIPNDKPFQNVNRITYGACPRYVKQNTLKLATGMRNVPEKQTRGIFGAIAGFIENGWEGMVDGWYGFRHQNSEGRGQAADLKSTQAAIDQINGKLNRLIGKTNEKFHQIEKEFSEVEGRIQDLEKYVEDTKIDLWSYNAELLVALENQHTIDLTDSEMNKLFEKTKKQLRENAEDMGNGCFKIYHKCDNACIGSIRNGTYDHDVYRDEALNNRFQIKGVELKSGYKDWILWISFAISCFLLCVALLGFIMWACQKGNIRCDICI

SEQ ID NO: 12514 - protein, 560 aa, synthetic construct
  REGION 1..560: note = hemagglutinin__InfluenzaA__AIG44693
METASLITILLVVTVSNADKICIGYQSTNSTETVDTLTENNVPVTHAKELLHTEHNGMLCATSLGQPLILDTCTIEGLIYGNPSCDLLLGGREWSYIVERPSAVNGLCYPGNVENLEELRSLFSSARSYQRIQIFPDTIWNVSYSGTSKACSDSFYRSMRWLTQKDNAYPIQDAQYTNNQEKNILFMWGINHPPTDTAQTNLYTRTDTTTSVATEEINRTFKPLIGPRPLVHGLMGRINYYWSVLKPGQTLRIKSNGNLIAPWYGHILSGKSHGRILKTDLKRGNCTVQCQTEKGGLNTTLPFQNVSKYAFGNCSKYIGIKSLKLAVGLRNVPSRSSRGLFGAIAGFIEGGWSGLVAGWYGFQHSNDQGVGMAADRDSTQKAIDKITSKVNNIVDKMNKQYEIIDHEFSEVETRLNMINNKIDDQIQDIWAYNAELLVLLENQKTLDEHDANVNNLYNKVKRALGSNAVEDGKGCFELYHKCDDQCMETIRNGTYNRRKYQEESKLEKQKIEGVKLESEGTYKILTIYSTVASSLVIAMGFAAFLFWAMSNGSCRCNICI

SEQ ID NO: 12515 - protein, 566 aa, synthetic construct; identical to SEQ ID NO: 6982
  REGION 1..566: note = hemagglutinin__InfluenzaA__AIJ10728

SEQ ID NO: 12516 - protein, 566 aa, synthetic construct
  REGION 1..566: note = hemagglutinin__InfluenzaA__AIJ10729
MKTIIALSYILCLVFAQKLPGHDNSTATLCLGHHAVPNGTIVKTITNDQIEVTNATELVQSSSTGEICNSPHQILDGENCTLIDALLGDPQCDGFQNKKWDLFVERSKAHSNCYPYDVPDYASLRSLVASSGTLEFNNESFNWTGVTQNGTSSACIRRSNNSFFSRLNWLTHLNFKYPALNVTMPNNEQFDKLYIWGVHHPGTDKDQIFLYAQASGRITVSTKRSQQAVIPNIGSRPRVRNIPSRVSIYWTIVKPGDILLINSTGNLIAPRGYFKIRSGKSSIMRSDAPIGKCNSACITPNGSIPNDKPFQNVNRITYGACPRYVKQNTLKLATGMRNVPEKQTKGIFGAIAGFIENGWEGMVDGWYGFRHQNSEGRGQAADLKSTQAAIDQINGKLNRLIGKTNEKFHQIEKEFSEVEGRIQDLEKYVEDTKIDLWSYNAELLVALENQHTIDLTDSEMNKLFEKTKKQLRENAEDMGNGCFKIYHKCDNACIGSIRNGTYDHDVYRDEALNNRFQIKGVELKSGYKDWILWISFAISCFLLCVALLGFIMWACQKGNIRCNICI

SEQ ID NO: 12517 - protein, 566 aa, synthetic construct; identical to SEQ ID NO: 6982
  REGION 1..566: note = hemagglutinin__InfluenzaA__AIJ10730

SEQ ID NO: 12518 - protein, 566 aa, synthetic construct; identical to SEQ ID NO: 6982
  REGION 1..566: note = hemagglutinin__InfluenzaA__AIJ10731

SEQ ID NO: 12519 - protein, 566 aa, synthetic construct
  REGION 1..566: note = hemagglutinin__InfluenzaA__AIJ10732
MKTIIALSYILCLVFAQELPGNDNSTATLCLGHHAVPNGTIVKTITNDQIEVTNATELVQSSSTGEICNSPHQILDGENCTLIDALLGDPQCDGFQNKKWDLFVERSKAHSNCYPYDVPDYASLRSLVASSGTLEFNNESFNWTGVTQNGTSSACIRRSNNSFFSRLNWLTHLNFRYPALNVTMPNNEQFDKLYIWGVHHPGTDKDQIFLYAQASGRITVSTKRSQQAVIPNIGSRPRVRNIPSRVSIYWTIVKPGDILLINSTGNLIAPRGYFKIRSGKSSIMRSDAPIGKCNSACITPNGSIPNDKPFQNVNRITYGACPRYVKQNTLKLATGMRNVPEKQTRGIFGAIAGFIENGWEGMVDGWYGFRHQNSEGRGQAADLKSTQAAIDQINGKLNRLIGKTNEKFHQIEKEFSEVEGRIQDLEKYVEDTKIDLWSYNAELLVALENQHTIDLTDSEMNKLFEKTKKQLRENAEDMGNGCFKIYHKCDNACIGSIRNGTYDHDVYRDEALNNRFQIKGVELKSGYKDWILWISFAISCFLLCVALLGFIMWACQKGNIRCNICI

SEQ ID NO: 12520 - protein, 566 aa, synthetic construct
  REGION 1..566: note = hemagglutinin__InfluenzaA__AIJ10733
MKTIIALSYILCLVFAQELPGNDNSTATLCLGHHAVPNGTIVKTITNDQIEVTNATELVQSSSTGEICNSPHQILDGENCTLIDALLGDPQCDGFQNKKWDLFVERSKAHSNCYPYDVPDYASLRSLVASSGTLEFNNESFNWTGVTQNGTSSACIRRSNNSFFSRLNWLTHLNFRYPALNVTMPNNEQFDKLYIWGVHHPGTDKDQIFLYAQASGRITVSTKRSQQAVIPNIGSRPRVRNIPSRVSIYWTIVKPGDILLINSTGNLIAPRGYFKIRSGKSSIMRSDAPIGKCKSACITPNGSIPNDKPFQNVNRITYGACPRYVKQNTLKLATGMRNVPEKQTRGIFGAIAGFIENGWEGMVDGWYGFRHQNSEGRGQAADLKSTQAAIDQINGKLNRLIGKTNEKFHQIEKEFSEVEGRIQDLEKYVEDTKIDLWSYNAELLVALENQHTIDLTDSEMNKLFEKTKKQLRENAEDMGNGCFKIYHKCDNACIGSIRNGTYDHDVYRDEALNNRFQIKGVELKSGYKDWILWISFAISCFLLCVALLGFIMWACQKGNIRCNICI

SEQ ID NO: 12521 - protein, 566 aa, synthetic construct
  REGION 1..566: note = hemagglutinin__InfluenzaA__AIJ10734
MKTIIALSYILCLVFAQKLPENDNSTATLCLGHHAVPNGTIVKTITNDQIEVTNATELVQSSSTGEICNSPHQILDGENCTLIDALLGDPQCDGFQNKKWDLFVERSKAHSNCYPYDVPDYASLRSLVASSGTLEFNNESFNWTGVTQNGTSSACIRRSNNSFFSRLNWLTHLNFKYPALNVTMPNNEQFDKLYIWGVHHPGTDKDQIFLYAQASGRITVSTKRSQQAVIPNIGSRPRVRNIPSRISIYWTIVKPGDILLINSTGNLIAPRGYFKIRSGKSSIMRSDAPIGKCNSTCITPNGSIPNDKPFQNVNRITYGACPRYVKQNTLKLATGMRNVPEKQTRGIFGAIAGFIENGWEGMVDGWYGFRHQNSEGRGQAADLKSTQAAIDQINGKLNRLIGKTNEKFHQIEKEFSEVEGRIQDLEKYVEDTKIDLWSYNAELLVALENQHTIDLTDSEMNKLFEKTKKQLRENAEDMGNGCFKIYHKCDNACIGSIRNGTYDHDVYRDEALNNRFQIKGVELKSGYKDWILWISFAISCFLLCVALLGFIMWACQKGNIRCNICI

SEQ ID NO: 12522 - protein, 566 aa, synthetic construct
  REGION 1..566: note = hemagglutinin__InfluenzaA__AIJ10735
MKTIIALSYILCLIFAQKLPENDNSTATLCLGHHAVPNGTIVKTITNDQIEVTNATELVQSSSTGEICNSPHQILDGENCTLIDALLGDPQCDGFQNKKWDLFVERSKAHSNCYPYDVPDYASLRSLVASSGTLEFNNESFNWTGVTQNGTSSACIRRSNNSFFSRLNWLTHLNFKYPALNVTMPNNEQFDKLYIWGVHHPGTDKDQIFLYAQASGRITVSTKRSQQAVIPNIGSRPRVRNIPSRVSIYWTIVKPGDILLINSTGNLIAPRGYFKIRSGKSSIMRSDAPIGKCNSTCITPNGSIPNDKPFQNVNRITYGACPRYVKQNTLKLATGMRNVPEKQTRGIFGAIAGFIENGWEGMVDGWYGFRHQNSEGKGQAADLKSTQAAIDQINGKLNRLIGKTNEKFHQIEKEFSEVEGRIQDLEKYVEDTKIDLWSYNAELLVALENQHTIDLTDSEMNKLFEKTKKQLRENAEDMGNGCFKIYHKCDNACIGSIRNGTYDHDVYRDEALNNRFQIKGVELKSGYKDWILWISFAISCFLLCVALLGFIMWACQKGNIRCNICI

SEQ ID NO: 12523 - protein, 566 aa, synthetic construct
  REGION 1..566: note = hemagglutinin__InfluenzaA__AIJ10736
MKTIIALSYILCLVFAQKLPGNDNSTATLCLGHHAVPNGTIVKTITNDRIEVTNATELVQNSTIGEICDSPHQILDGENCTLIDALLGDPQCDGFQNKKWDLFVERSKAYSNCYPYDVPDYASLRSLVASSGTLEFNNESFNWTGVTQNGTSSACIRRSNNSFFSRLNWLTHLNFKYPALNVTMPNNEQFDKLYIWGVHHPGTDKDQIFLYAQSSGRITVSTKRSQQAVIPNIGSRPRIRNIPSRISIYWTIVKPGDILLINSTGNLIAPRGYFKIRSGKSSIMRSDAPIGKCKSECITPNGSIPNDKPFQNVNRITYGACPRYVKQSTLKLATGMRNVPEKQTRGIFGAIAGFIENGWEGMVDGWYGFRHQNSEGRGQAADLKSTQAAIDQINGKLNRLIGKTNEKFHQIEKEFSEVEGRIQDLEKYVEDTKIDLWSYNAELLVALENQHTIDLTDSEMNKLFEKTKKQLRENAEDMGNGCFKIYHKCDNACIGSIRNGTYDHDVYRDEALNNRFQIKGVELKSGYKDWILWISFAISCFLLCVALLGFIMWACQKGNIRCNICI

SEQ ID NO: 12524 - protein, 566 aa, synthetic construct
  REGION 1..566: note = hemagglutinin__InfluenzaA__AIJ10737
MKTIIALSYILCLVVAQKLPGNDNSTATLCLGHHAVPNGTIVKTITNDRIEVTNATELVQNSSIGEICDSPHQILDGENCTLIDALLGDPQCDGFQNKKWDLFVERSKAYSNCYPYDVPDYASLRSLVASSGTLEFNNESFNWTGVTQNGTSSACIRRSNNSFFSRLNWLTHLNFKYPALNVTMPNNEQFDKLYIWGVHHPGTDKDQIFLYAQSSGRITVSTKRSQQAVIPNIGSRPRIRNIPSRISIYWTIVKPGDILLINSTGNLIAPRGYFKIRSGKSSIMRSDAPIGKCKSECITPNGSIPNDKPFQNVNRITYGACPRYVKQSTLKLATGMRNVPEKQTRGIFGAIAGFIENGWEGMVDGWYGFRHQNSEGRGQAADLKSTQAAIDQINGKLNRLIGKTNEKFHQIEKEFSEVEGRIQDLEKYVEDTKIDLWSYNAELLVALENQHTIDLTDSEMNKLFEKTKKQLRENAEDMGNGCFKIYHKCDNACIGSIRNGTYDHDVYRDEALNNRFQIKGVELKSGYKDWILWISFAISCFLLCVALLGFIMWACQKGNIRCNICI

SEQ ID NO: 12525 - protein, 566 aa, synthetic construct
  REGION 1..566: note = hemagglutinin__InfluenzaA__AIJ10738
MKTIIALSYILCLVFAQKLPGNDNSTATLCLGHHAVPNGTIVKTITNDRIEVTNATELVQNSSIGEICDSPHQILDGENCTLIDALLGDPQCDGFQNKKWDLFVERSKAYSNCYPYDVPDYASLRSLVASSGTLEFNNESFNWTGVTQNGTSSACIRRSNNSFFSRLNWLTHLNFKYPALNVTMPNNEHFDKLYIWGVHHPGTDKDQIFLYAQSSGRITVSTKRSQQAVIPNIGSRPRIRNIPSRISIYWTIVKPGDILLINSTGNLIAPRGYFKIRSGKSSIMRSDAPIGKCKSECITPNGSIPNDKPFQNVNRITYGACPRYVKQSTLKLATGMRNVPEKQTRGIFGAIAGFIENGWEGMVDGWYGFRHQNSEGRGQAADLKSTQAAIDQINGKLNRLIGKTNEKFHQIEKEFSEVEGRIQDLEKYVEDTKIDLWSYNAELLVALENQHTIDLTDSEMNKLFEKTKKQLRENAEDMGNGCFKIYHKCDNACIGSIRNGTYDHDVYRDEALNNRFQIKGVELKSGYKDWILWISFAISCFLLCVALLGFIMWACQKGNIRCNICI

SEQ ID NO: 12526 - protein, 566 aa, synthetic construct; identical to SEQ ID NO: 9453
  REGION 1..566: note = hemagglutinin__InfluenzaA__AIJ10740

SEQ ID NO: 12527 - protein, 566 aa, synthetic construct; identical to SEQ ID NO: 9453
  REGION 1..566: note = hemagglutinin__InfluenzaA__AIJ10741

SEQ ID NO: 12528 - protein, 566 aa, synthetic construct
  REGION 1..566: note = hemagglutinin__InfluenzaA__AIJ10742
MKTIIALSYILCLVFAQKLPGNDNSTATLCLGHHAVPNGTIVKTITNDRIEVTNATELVQNSSIGEICDSPHQILDGENCTLIDALLGDPQCDGFQNKKWDLFVERSKAYSNCYPYDVPDYASLRSLVASSGTLEFNNESFNWTGVTQNGTSSACIRRSNNSFFSRLNWLTHLNFKYPALNVTMPNNEQFDKLYIWGVHHPGTDKDQIFLYAQSSGRITVATKRSQQAVIPNIGSRPRIRNIPSRISIYWTIVKPGDILLINSTGNLIAPRGYFKIRSGKSSIMRSDAPIGKCKSECITPNGSIPNDKPFQNVNRITYGACPRYVKQSTLKLATGMRNVPEKQTRGIFGAIAGFIENGWEGMVDGWYGFRHQNSEGRGQAADLKSTQAAIDQINGKLNRLIGKTNEKFHQIEKEFSEVEGRIQDLEKYVEDTKIDLWSYNAELLVALENQHTIDLTDSEMNKLFEKTKKQLRENAEDMGNGCFKIYHKCDNACIGSIRNGTYDHDVYRDEALNNRFQIKGVELKSGYKDWILWISFAISCFLLCVALLGFIMWACQKGNIRCNICI

SEQ ID NO: 12529 - protein, 566 aa, synthetic construct
  REGION 1..566: note = hemagglutinin__InfluenzaA__AIJ10743
MKTIIALSYILCLVFAQKLPGNDNSTATLCLGHHAVPNGTIVKTITNDRIEVTNATELVQNSSIGEICDSPHQILDGENCTLIDALLGDPQCDGFQNKKWDLFVERSKAYSNCYPYDVPDYASLRSLVASSGTLEFNNESFNWTGVTQNGTSSACIRRSNNSFFSRLNWLTHLNFKYPALNVTMPNNEQFDKLYIWGVHHPGTDKDQIFLYAQSSGRITVSTKRSQQAVIPNIGSRPRIRNIPSRISIYWTIVKPGDILLINSTGNLIAPRGYFKIRSGKSSIMRSDAPIGKCKSECITPNGSIPNDKPFQNVNRITYGACPRYVKQSTLKLATGMRNVPEKQTRGIFGAIAGFIENGWEGMVDGWYGFRHQNSEGRGQAADLKSTQAAIDQINGKLNRLIGKTNEKFHQIEKEFSEVEGRIQDLEKYVEDIKIDLWSYNAELLVALENQHTIDLTDSEMNKLFEKTKKQLRENAEDMGNGCFKIYHKCDNACIGSIRNGTYDHDVYRDEALNNRFQIKGVELKSGYKDWILWISFAISCFLLCVALLGFIMWACQKGNIRCNICI

SEQ ID NO: 12530 - protein, 566 aa, synthetic construct
  REGION 1..566: note = hemagglutinin__InfluenzaA__AIJ10744
MKTIIALSYILCLVFAQKLPGNDNSTATLCLGHHAVPNGTIVKTITNDRIEVTNATELVQNSSIGEICDSPHQILDGENCTLIDALLGDPQCDGFQNKKWDLFVERSKAYSNCYPYDVPDYASLRSLVASSGTLEFNNESFNWTGVTQNGTSSACIRRSNNSFFSRLNWLTHLNFKYPALNVTMPNNEQFDKLYIWGVHHPGTDKDQIFLYAQSSGRITVSTKRSQQAVIPNIGSRPRIRNIPSRISIYWTIVKPGDILLINSTGNLIAPRGYFKIRSGKSSIMRSDAPIGKCKSECITPNGSIPNDKPFQNVNRITYGACPRYVKQRTLKLATGMRNVPEKQTRGIFGAIAGFIENGWEGMVDGWYGFRHQNSEGRGQAADLKSTQAAIDQINGKLNRLIGKTNEKFHQIEKEFSEVEGRIQDLEKYVEDTKIDLWSYNAELLVALENQHTIDLTDSEMNKLFEKTKKQLRENAEDMGNGCFKIYHKCDNACIGSIRNGTYDHDVYRDEALNNRFQIKGVELKSGYKDWILWISFAISCFLLCVALLGFIMWACQKGNIRCNICI

SEQ ID NO: 12531 - protein, 566 aa, synthetic construct; identical to SEQ ID NO: 9994
  REGION 1..566: note = hemagglutinin__InfluenzaA__AIJ10745

SEQ ID NO: 12532 - protein, 566 aa, synthetic construct
  REGION 1..566: note = hemagglutinin__InfluenzaA__AIJ10747
MKTIIALSYILCLVFAQKLPGNDNSTATLCLGHHAVPNGTIVKTITNDRIEVTNATELVQNSSIGEICDSPHQILDGENCTLIDALLGDPQCDDFQNKKWDLFVERSKAYSNCYPYDVPDYASLRSLVASSGTLEFNNENFNWTGVTQNGTSSACIRRSNNSFFSRLNWLTHLNFKYPALNVTMPNNEQFDKLYIWGVHHPGTDKDQIFLYAQSSGRITVSTKRSQQAVIPNIGSRPRIRNIPSRISIYWTIVKPGDILLINSTGNLIAPRGYFKIRSGKSSIMRSDAPIGKCKSECITPNGSIPNDKPFQNVNRITYGACPRYVKQSTLKLATGMRNVPEKQTRGIFGAIAGFIENGWEGMVDGWYGFRHQNSEGRGQAADLKSTQAAIDQINGKLNRLIGKTNEKFHQIEKEFSEVEGRIQDLEKYVEDTKIDLWSYNAELLVALENQHTIDLTDSEMNKLFEKTKKQLRENAEDMGNGCFKIYHKCDNACIGSIRNGTYDHDVYRDEALNNRFQIKGVELKSGYKDWILWISFAISCFLLCVALLGFIMWACQKGNIRCNICI

SEQ ID NO: 12533 - protein, 566 aa, synthetic construct; identical to SEQ ID NO: 12532
  REGION 1..566: note = hemagglutinin__InfluenzaA__AIJ10748

SEQ ID NO: 12534 - protein, 566 aa, synthetic construct
  REGION 1..566: note = hemagglutinin__InfluenzaA__AIJ10750
MKTIIALSYILCLVFAQKLPGNDNSTATLCLGHHAVPNGTIVKTITNDRIEVTNATELVQNSSIGEICDSPHQILDGENCTLIDALLGDPQCDGFQNKKWDLFVERSKAYSNCYPYDVPDYASLRSLVASSGTLEFNNESFNWTGVTQNGTSSACIRRSNSSFFSRLNWLTHLNFKYPALNVTMPNNEQFDKLYIWGVHHPGTDKDQIFLYAQSSGRITVSTKRSQQAVIPNIGSRPRIRNIPSRISIYWTIVKPGDILLINSTGNLIAPRGYFKIRSGKSSIIRSDAPIGKCKSECITPNGSIPNDKPFQNVNRITYGACPRYVKQSTLKLATGMRNVPEKQTRGIFGAIAGFIENGWEGMVDGWYGFRHQNSEGRGQAADLKSTQAAIDQINGKLNRLIGKTNEKFHQIEKEFSEVEGRIQDLEKYVEDTKIDLWSYNAELLVALENQHTIDLTDSEMNKLFEKTKKQLRENAEDMGNGCFKIYHKCDNACIGSIRNGTYDHNVYRDEALNNRFQIKGVELKSGYKDWILWISFAISCFLLCVALLGFIMWACQKGNIRCNICI

SEQ ID NO: 12535 - protein, 566 aa, synthetic construct
  REGION 1..566: note = hemagglutinin__InfluenzaA__AIJ10752
MKTIIALSYILCLVFAQKLPGNDNSTATLCLGHHAVPNGTIVKTITNDRIEVTNATELVQNSSIGEICDSPHQILDGENCTLIDALLGDPQCDGFQNKKWDLFVERSKAYSNCYPYDVPDYASLRSLVASSGTLEFNNESFNWTGVTQNGTSSACIRRSNSSFFSRLNWLTHLNFKYPALNVTMPNNEQFDKLYIWGVHHPGTDKDQIFLYAQSSGRITVSTKRSQQAVIPNIGSRPRIRNIPSRISIYWTIVKPGDILLINSTGNLIAPRGYFKIRSGKSSIMRSDAPIGKCKSECITPNGSIPNDKPFQNVNRITYGACPRYVKQSTLKLATGMRNVPEKQTRGIFGAIAGFIENGWEGMVDGWYGFRHQNSEGRGQAADLKSTQAAIDQINGKLNRLIGKTNEKFHQIEKEFSEVEGRIQDLEKYVEDTKIDLWSYNAELLVALENQHTIDLTDSEMNKLFEKTKKQLRENAEDMGNGCFKIYHKCDNACIGSIRNGTYDHDVYRDEALNNRFQIKGVELKSGYKDWILWISFAMSCFLLCVALLGFIMWACQKGNIRCNICI

SEQ ID NO: 12536 - protein, 566 aa, synthetic construct
  REGION 1..566: note = hemagglutinin__InfluenzaA__AIJ10753
MKTIIALSYILCLVFAQKLPGNDNSTATLCLGHHAVPNGTIVKTITNDRIEVTNATELVQNSSIGEICDSPHQILDGENCTLIDALLGDPQCDGFQNKKWDLFVERSKAYSNCYPYDVPDYASLRSLVASSGTLEFNNESFNWAGVTQNGTSSSCIRGSNNSFFSRLNWLTHLNFKYPALNVTMPNNEQFDKLYIWGVHHPGTDKDQIFLYAQSSGRITVSTKRSQQAVIPNIGSRPRIRNIPSRISIYWTIVKPGDILLINSTGNLIAPRGYFKIRSGKSSIMRSDAPIGKCKSECITPNGSIPNDKPFQNVNRITYGACPRYVKQSTLKLATGMRNVPEKQTRGIFGAIAGFIENGWEGMMDGWYGFRHQNSEGRGQAADLKSTQAAIDQINGKLNRLIGKTNEKFHQIEKEFSEVEGRIQDLEKYVEDTKIDLWSYNAELLVALENQHTIDLTDSEMNKLFEKTKKQLRENAEDMGNGCFKIYHKCDNACIGSIRNGTYDHDVYRDEALNNRFQIKGVELKSGYKDWILWISFAISCFLLCVALLGFIMWACQKGNIRCNICI

SEQ ID NO: 12537 - protein, 566 aa, synthetic construct; identical to SEQ ID NO: 9994
  REGION 1..566: note = hemagglutinin__InfluenzaA__AIJ10754

SEQ ID NO: 12538 - protein, 566 aa, synthetic construct
  REGION 1..566: note = hemagglutinin__InfluenzaA__AIJ10755
MKTIIALSYILCLVFAQKLPGNDNSTATLCLGHHAVPNGTIVKTITNDRIEVTNATELVQNSSIGEICDSPHQILDGENCTLIDALLGDPQCDGFQNKKWDLFVERSKAYSNCYPYDVPDYASLRSLVASSGTLEFNNESFNWAGVTQNGTSSACIRGSNSSFFSRLNWLTHLNFKYPALNVTMPNNEQFDKLYIWGVHHPGTDKDQIFLYAQSSGRITVSTKRSQQAVIPNIGSRPRIRNIPSRISIYWTIVKPGDILLINSTGNLIAPRGYFKIRSGKSSIMRSDAPIGKCKSECITPNGSIPNDKPFQNVNRITYGACPRYVKQSTLKLATGMRNVPEKQTRGIFGAIAGFIENGWEGMVDGWYGFRHQNSEGRGQAADLKSTQSAIDQINGKLNRLIGKTNEKFHQIEKEFSEVEGRIQDLEKYVEDTKIDLWSYNAELLVALENQHTIDLTDSEMNKLFEKTKKQLRENAEDMGNGCFKIYHKCDNACIGSIRNGTYDHDVYRDEALNNRFQIKGVELKSGYKDWILWISFAISCFLLCVALLGFIMWACQKGNIRCNICI

SEQ ID NO: 12539 - protein, 566 aa, synthetic construct; identical to SEQ ID NO: 9994
  REGION 1..566: note = hemagglutinin__InfluenzaA__AIJ10756

SEQ ID NO: 12540 - protein, 566 aa, synthetic construct
  REGION 1..566: note = hemagglutinin__InfluenzaA__AIJ10757
MKTIIALSYILCLVIAQKLPGNDNSTATLCLGHHAVPNGTIVKTITNDRIEVTNATELVQNSSIGEICDSPHQILDGENCTLIDALLGDPQCDGFQNKKWDLFVERSKAYSNCYPYDVPDYASLRSLVASSGTLEFNNESFNWAGVTQNGTSSACIRGSNSSFFSRLNWLTHLNFKYPALNVTMPNNEQFDKLYIWGVHHPGTDKDQIFLYAQSSGRITVSTKRSQQAVIPNIGSRPRIRNIPSRISIYWTIVKPGDILLINSTGNLIAPRGYFKIRSGKSSIMRSDAPIGKCKSECITPNGSIPNDKPFQNVNRITYGACPRYVKQSTLKLATGMRNVPEKQTRGIFGAIAGFIENGWEGMVDGWYGFRHQNSEGRGQAADLKSTQAAIDQINGKLNRLIGKTNEKFHQIEKEFSEVEGRIQDLEKYVEDTKIDLWSYNAELLVALENQHTIDLTDSEMNKLFEKTKKQLRENAEDMGNGCFKIYHKCDNACIGSIRNGTYDHDVYRDEALNNRFQIKGVELKSGYKDWILWISFAISCFLLCVVLLGFIMWACQKGNIRCNICI

SEQ ID NO: 12541 - protein, 566 aa, synthetic construct
  REGION 1..566: note = hemagglutinin__InfluenzaA__AIJ10758
MKTIIALSYILCLVFAQKLPGNDNSTATLCLGHHAVPNGTIVKTITNDRIEVTNATELVQNSSIGEICDSPHQILDGENCTLIDALLGDPQCDGFQNKKWDLFVERSKAYSNCYPYDVPDYASLRSLVASSGTLEFNNESFNWAGVTQNGTSSACIRGSNSSFFSRLNWLTHSNFKYPALNVTMPNNEQFDKLYIWGVHHPGTDKDQIFLYAQSSGRITVSTKRSQQAVIPNIGSRPRIRNIPSRISIYWTIVKPGDILLINSTGNLIAPRGYFKIRSGKSSIMRSDAPIGKCKSECITPNGSIPNDKPFQNVNRITYGACPRYVKQSTLKLATGMRNVPEKQTRGIFGAIAGFIENGWEGMMDGWYGFRHQNSEGRGQAADLKSTQAAIDQINGKLNRLIGKTNEKFHQIEKEFSEVEGRIQDLEKYVEDTKIDLWSYNAELLVALENQHTIDLTDSEMNKLFEKTKKQLRENAEDMGNGCFKIYHKCDNACIGSIRNGTYDHDVYRDEALNNRFQIKGVELKSGYKDWILWISFAISCFLLCVALLGFIMWACQKGNIRCNICI

SEQ ID NO: 12542 - protein, 566 aa, synthetic construct; identical to SEQ ID NO: 9994
  REGION 1..566: note = hemagglutinin__InfluenzaA__AIJ10759

SEQ ID NO: 12543 - protein, 566 aa, synthetic construct
  REGION 1..566: note = hemagglutinin__InfluenzaA__AIJ10760
MKTIIALSYILCLVIAQKLPGNDNSTATLCLGHHAVPNGTIVKTITNDRIEVTNATELVQNSSIGEICDSPHQILDGENCTLIDALLGDPQCDGFQNKKWDLFVERSKAYSNCYPYDVPDYASLRSLVASSGTLEFNNESFNWAGVTQNGTSSACIRGSNSSFFSRLNWLTHLNFKYPALNVTMPNNEQFDKLYIWGVHHPGTDKDQIFLYAQSSGRITVSTKRSQQAVIPNIGSRPRIRNIPSRISIYWTIVKPGDILLINSTGNLIAPRGYFKIRSGKSSIMRSDAPIGKCKSECITPNGSIPNDKPFQNVNRITYGACPRYVKQSTLKLATGMRNVPEKQTRGIFGAIAGFIENGWEGMVDGWYGFRHQNSEGRGQAADLKSTQAAIDQINGKLNRLIGKTNEKFHQIEKEFSEVEGRIQDLEKYVEDTKIDLWSYNAELLVALENQHTIDLTDSEMNKLFEKTKKQLRENAEDMGNGCFKIYHKCDNACIGSIRNGTYDHDVYRDEALNNRFQIKGVELKSGYKDWILWISFAISCFLLCVALLGFIMWACQKGNIRCNICI

SEQ ID NO: 12544 - protein, 566 aa, synthetic construct
  REGION 1..566: note = hemagglutinin__InfluenzaA__AIJ10761
MKTIIALSYILCLVFAQKLPGNDNSTATLCLGHHAVPNGTIVKTITNDRIEVTNATELVQNSSIGEICDSPHQILDGENCTLIDALLGDPQCDGFQNKKWDLFVERSKAYSNCYPYDVPDYASLRSLVASSGTLEFNNESFNWAGVTQNGTSSACIRGSNSSFFSRLNWLTHLNFKYPALNVTMPNNEQFDKLYIWGVHHPGTDKDQIFLYAQSSGRITVSTKRSQQAVIPNIGSRPRIRNIPSRISIYWTIVKPGDILLINSTGNLIAPRGYFKIRSGKSSIMRSDAPIGKCKSECITPNGSIPNDKPFQNVNRITYGACPRYVKQSTLKLATGMRNVPEKQTRGIFGAIAGFIENGWEGMVDGWYGFRHQNSEGRGQAADLKSTQAAIDQINGKLNRLIGKTNEKFHQIEKEFSEVEGRIQDLEKYVEDTKIDLWSYNAELLVALENQHTIDLTDSEMNKLFEKTKKQLRENAEDMGNGCFKIYHKCDNACIGSIRNGTYDHDVYRNEALNKRFQIKGVELKSGYKDWILWISFAISCFLLCVVLLGFIMWACQKGNIRCNICI

SEQ ID NO: 12545 - protein, 566 aa, synthetic construct; identical to SEQ ID NO: 11892
  REGION 1..566: note = hemagglutinin__InfluenzaA__AIJ10762

SEQ ID NO: 12546 - protein, 566 aa, synthetic construct; identical to SEQ ID NO: 11892
  REGION 1..566: note = hemagglutinin__InfluenzaA__AIJ10763

SEQ ID NO: 12547 - protein, 566 aa, synthetic construct; identical to SEQ ID NO: 11892
  REGION 1..566: note = hemagglutinin__InfluenzaA__AIJ10764

SEQ ID NO: 12548 - protein, 566 aa, synthetic construct; identical to SEQ ID NO: 11892
  REGION 1..566: note = hemagglutinin__InfluenzaA__AIJ10765

SEQ ID NO: 12549 - protein, 566 aa, synthetic construct; identical to SEQ ID NO: 11892
  REGION 1..566: note = hemagglutinin__InfluenzaA__AIJ10766

SEQ ID NO: 12550 - protein, 566 aa, synthetic construct; identical to SEQ ID NO: 11892
  REGION 1..566: note = hemagglutinin__InfluenzaA__AIJ10767

SEQ ID NO: 12551 - protein, 566 aa, synthetic construct
  REGION 1..566: note = hemagglutinin__InfluenzaA__AIJ10768
MKTIIALSYILCLVFAQKLPGNDNSTATLCLGHHAVPNGTIVKTITNDRIEVTNATELVQNSSIGEICDSPHQILDGENCTLIDALLGDPQCDGFQNKKWDLFVERSKAYSNCYPYDVPDYASLRSLVASSGTLEFNNESFNWAGVTQNGTSSACIRGSNSSFFSRLNWLTHLNFKYPALNVTMPNNEQFDKLYIWGVHHPGTDKDQIFLYAQSSGRITVSTKRSQQAVIPNIGSRPRIRNIPSRISIYWTIVKPGDILLINSTGNLIAPRGYFKIRSGKSSIMRSDAPIGKCKSECITPNGSIPNDKPFQNVNRITYGACPRYVKQSTLKLATGMRNIPEKQTRGIFGAIAGFIENGWEGMVDGWYGFRHQNSEGRGQAADLKSTQAAIDQINGKLNRLIGKTNEKFHQIEKEFSEVEGRIQDLEKYVEDTKIDLWSYNAELLVALENQHTIDLTDSEMNKLFEKTKKQLRENAEDMGNGCFKIYHKCDNACIGSIRNGTYDHDVYRDEALNNRFQIKGVELKSGYKDWILWISFAISCFLLCVVLLGFIMWACQKGNIRCNICI

SEQ ID NO: 12552 - protein, 566 aa, synthetic construct
  REGION 1..566: note = hemagglutinin__InfluenzaA__AIJ10769
MKTIIALSYILCLVFAQKLPGNDNSTATLCLGHHAVPNGTIVKTITNDRIEVTNATELVQNSSIGEICDSPHQILDGENCTLIDALLGDPQCDGFQNKKWDLFVERSKAYSNCYPYDVPDYASLRSLVASSGTLEFNNESFNWAGVTQNGTSSACIRGSNSSFFSRLNWLTHLNFKYPALNVTMPNNEQFDKLYIWGVHHPGTDKDQIFLYAQSSGRITVSTKRSQQAVIPNIGSRPRIRNIPSRISIYWTIVKPGDILLINSTGNLIAPRGYFKIQSGKSSIMRSDAPIGKCKSECITPNGSIPNDKPFQNVNRITYGACPRYVKQSTLKLATGMRNVPEKQTRGIFGAIAGFIENGWEGMVDGWYGFRHQNSEGRGQAADLKSTQAAIDQINGKLNRLIGKTNEKFHQIEKEFSEVEGRIQDLEKYVEDTKIDLWSYNAELLVALENQHTIDLTDSEMNKLFEKTKKQLRENAEDMGNGCFKIYHKCDNACIGSIRNGTYDHDVYRDEALNNRFQIKGVELKSGYKDWILWISFAISCFLLCVVLLGFIMWACQKGNIRCNICI

SEQ ID NO: 12553 - protein, 566 aa, synthetic construct; identical to SEQ ID NO: 11892
  REGION 1..566: note = hemagglutinin__InfluenzaA__AIJ10770

SEQ ID NO: 12554 - protein, 566 aa, synthetic construct; identical to SEQ ID NO: 11892
  REGION 1..566: note = hemagglutinin__InfluenzaA__AIJ10771

SEQ ID NO: 12555 - protein, 566 aa, synthetic construct; identical to SEQ ID NO: 11892
  REGION 1..566: note = hemagglutinin__InfluenzaA__AIJ10772

SEQ ID NO: 12556 - protein, 566 aa, synthetic construct; identical to SEQ ID NO: 11892
  REGION 1..566: note = hemagglutinin__InfluenzaA__AIJ10773

SEQ ID NO: 12557 - protein, 566 aa, synthetic construct
  REGION 1..566: note = hemagglutinin__InfluenzaA__AIJ10774
MKTIIALSYILCLVFAQKLPGNDNSTATLCLGHHAVPNGTIVKTITNDRIEVTNATELVQNSSIGEICNSPHQILDGENCTLIDALLGDPQCDGFQNKKWDLFVERSKAYSNCYPYDVPDYASLRSLVASSGTLEFNNESFNWAGVTQNGTSSACIRGSNSSFFSRLNWLTHLNFKYPALNVTMPNNEQFDKLYIWGVHHPGTDKDQIFLYAQSSGRITVSTKRSQQAVIPNIGSRPRIRNIPSRISIYWTIVKPGDILLINSTGNLIAPRGYFKIRSGKSSIMRSDAPIGKCKSECITPNGSIPNDKPFQNVNRITYGACPRYVKQSTLKLATGMRNVPEKQTRGIFGAIAGFIENGWEGMMDGWYGFRHQNSEGRGQAADLKSTQSAIDQINGKLNRLIGKTNEKFHQIEKEFSEVEGRIQDLEKYVEDTKIDLWSYNAELLVALENQHTIDLTDSEMNKLFEKTKKQLRENAEDMGNGCFKIYHKCDNACIGSIRNGTYDHDVYRDEALNNRFQIKGVELKSGYKDWILWISFAISCFLLCVVLLGFIMWACQKGNIRCNICI

SEQ ID NO: 12558 - protein, 566 aa, synthetic construct
  REGION 1..566: note = hemagglutinin__InfluenzaA__AIJ10776
MKTIIALSCILCLVFAQKLPGNDNSTATLCLGHHAVPNGTIVKTITNDRIEVTNATELVQNSSIGEICDSPHQILDGENCTLIDALLGDPQCDGFQNKKWDLFVERSKAYSNCYPYDVPDYASLRSLVASSGTLEFNNESFNWAGVTQNGTSSACIRGSNSSFFSRLNWLTHLNFKYPALNVTMPNNEQFDKLYIWGVHHPGTDKDQIFLYAQSSGRITVSTKRSQQAVIPNIGSRPRIRNIPSRISIYWTIVKPGDILLINSTGNLIAPRGYFKIRSGKSSIMRSDAPIGKCKSECITPNGSIPNDKPFQNVNRITYGACPRYVKQSTLKLATGMRNVPEKQTRGIFGAIAGFIENGWEGMVDGWYGFRHQNSEGRGQAADLKSTQAAIDQINGKLNRLIGKTNEKFHQIEKEFSEVEGRIQDLEKYVEDTKIDLWSYNAELLVALENQHTIDLTDSEMSKLFEKTKKQLRENAEDMGNGCFKIYHKCDNACIGSIRNGTYDHDVYRDEALNNRFQIKGVELKSGYKDWILWISFAISCFLLCVVLLGFIMWACQKGNIRCNICI

SEQ ID NO: 12559 - protein, 566 aa, synthetic construct; identical to SEQ ID NO: 11892
  REGION 1..566: note = hemagglutinin__InfluenzaA__AIJ10777

SEQ ID NO: 12560 - protein, 566 aa, synthetic construct; identical to SEQ ID NO: 11892
  REGION 1..566: note = hemagglutinin__InfluenzaA__AIJ10778

SEQ ID NO: 12561 - protein, 566 aa, synthetic construct
  REGION 1..566: note = hemagglutinin__InfluenzaA__AIJ10780
MKTIIALSYILCLVFAQKLPGNDNSTATLCLGHHAVPNGTIVKTITNDRIEVTNATELVQNSSIGEICDSPHQILDGENCTLIDALLGDPQCDSFQNKKWDLFVERSKAYSNCYPYDVPDYASLRSLVASSGTLEFNNESFNWAGVTQNGTSSACIRGSNSSFFSRLNWLTHSNFKYPALNVTMPNNEQFDKLYIWGVHHPGTDKDQIFLYAQSSGRITVSTKRSQQAVIPNIGSRPRIRNIPSRISIYWTIVKPGDILLINSTGNLIAPRGYFKIRSGKSSIMRSDAPIGKCKSECITPNGSIPNDKPFQNVNRITYGACPRYVKQSTLKLATGMRNVPEKQTRGIFGAIAGFIENGWEGMMDGWYGFRHQNSEGRGQAADLKSTQAAIDQINGKLNRLIGKTNEKFHQIEKEFSEVEGRIQDIEKYVEDTKIDLWSYNAELLVALENQHTIDLTDSEMNKLFEKTKKQLRENAEDMGNGCFKIYHKCDNACIGSIRNGTYDHDVYRDEALNNRFQIKGVELKSGYKDWILWISFAISCFLLCVALLGFIMWACQKGNIRCNICI

SEQ ID NO: 12562 - protein, 566 aa, synthetic construct; identical to SEQ ID NO: 11892
  REGION 1..566: note = hemagglutinin__InfluenzaA__AIJ10781

SEQ ID NO: 12563 - protein, 566 aa, synthetic construct; identical to SEQ ID NO: 11892
  REGION 1..566: note = hemagglutinin__InfluenzaA__AIJ10782

SEQ ID NO: 12564 - protein, 566 aa, synthetic construct
  REGION 1..566: note = hemagglutinin__InfluenzaA__AIJ10783
MKTIIALSYILCLVFAQKLPGNDNSTATLCLGHHAVPNGTIVKTITNDRIEVTNATELVQNSSIGEICDSPHQILDGENCTLIDALLGDPQCDGFQNKKWDLFVERSKAYSNCYPYDVPDYASLRSLVASSGTLEFNNESFNWVGVTQNGTSSACIRGSNSSFFSRLNWLTHLNFKYPALNVTMPNNEQFDKLYIWGVHHPGTDKDQIFLYAQSSGRITVSTKRSQQAVIPNIGSRPRIRNIPSRISIYWTIVKPGDILLINSTGNLIAPRGYFKIRSGKSSIMRSDAPIGKCKSECITPNGSIPNDKPFQNVNRITYGACPRYVKQSTLKLATGMRNVPEKQTRGIFGAIAGFIENGWEGMKDGWYGFRHQNSEGRGQAADLKSTQAAIDQINGKLNRLIGKTNEKFHQIEKEFSEVEGRIQDLEKYVEDTKIDLWSYNAELLVALENQHTIDLTDSEMNKLFEKTKKQLRENAEDMGNGCFKIYHKCDNACIGSIRNGTYDHDVYRDEALNNRFQIKGVELKSGYKDWILWISFAISCFLLCVALLGFIMWACQKGNIRCNICI

SEQ ID NO: 12565 - protein, 566 aa, synthetic construct; identical to SEQ ID NO: 12564
  REGION 1..566: note = hemagglutinin__InfluenzaA__AIJ10784

SEQ ID NO: 12566 - protein, 566 aa, synthetic construct
  REGION 1..566: note = hemagglutinin__InfluenzaA__AIJ10785
MKTIIALSYILCLVFAQKLPGNDNSTATLCLGHHAVPNGTIVKTITNDRIEVTNATELVQNSSIGEICNSPHQILDGENCTLIDALLGDPQCDGFQNKKWDLFVERSKAYSNCYPYDVPDYASLRSLVASSGTLEFNNESFNWAGVTQNGTSSACIRGSNSSFFSRLNWLTHLNFKYPALNVTMPNNEQFDKLYIWGVHHPGTDKDQIFLYAQSSGRITVSTKRSQQAVIPNIGSRPRIRNIPSRISIYWTIVKPGDILLINSTGNLIAPRGYFKIRSGKSSIMRSDAPIGKCKSECITPNGSIPNDKPFQNVNRITYGACPRYVKQSTLKLATGMRNVPEKQTRGIFGAIAGFIENGWEGMMDGWYGFRHQNSEGRGQAADLKSTQSAIDQINGKLNRLIGKTNEKFHQIEKEFSEVEGRIQDLEKYVEDTKIDLWSYNAELLVALENQHTIDLTDSEMNKLFEKTKKQLRENAEDMGNGCFKIYHKCDNACIGSIRNGTYDHDVYRDEALNNRFQIKGVELKSGYKDWILWISFAISCFLLCVALLGFIMWACQKGNIRCNICI

SEQ ID NO: 12567 - protein, 566 aa, synthetic construct; identical to SEQ ID NO: 12564
  REGION 1..566: note = hemagglutinin__InfluenzaA__AIJ10786

SEQ ID NO: 12568 - protein, 566 aa, synthetic construct
  REGION 1..566: note = hemagglutinin__InfluenzaA__AIJ10787
MKTIIALSYILCLVFAQKLPGNDNSTATLCLGHHAVPNGTIVKTITNDRIEVTNATELVQNSSIGEICDSPHQILDGENCTLIDALLGDPQCDGFQNKKWDLFVERSKAYSNCYPYDVPDYASLRSLVASSGTLEFNNESFNWVGVTQNGTSSACIRGSNSSFFSRLNWLTHLNFKYPALNVTMPNNEQFDKLYIWGVHHPGTDKDQIFLYAQSSGRITVSTKRSQQAVIPNIGSRPRIRNIPSRISIYWTIVKPGDILLINSTGNLIAPRGYFKIRSGKSSIMRSDAPIGKCKSECITPNGSIPNDKPFQNVNRITYGACPRYVKQSTLKLATGMRNVPEKQTRGIFGAIAGFIENGWEGMKDGWYGFRHQNSEGRGQAADLKSTQAAIDQINGKLNRLIGKTNEKFHQIEKEFSEVEGRIQDLEKYVEDTKIDLWSYNAELLVALENQHTIDLTDSEMNKLFEKTKKQLRENAEDMGNGCFKIYHKCDNACIGSIRNGTYDHDVYRDEALNNRFRIKGVELKSGYKDWILWISFAISCFLLCVALLGFIMWACQKGNIRCNICI

SEQ ID NO: 12569 - protein, 566 aa, synthetic construct; identical to SEQ ID NO: 12566
  REGION 1..566: note = hemagglutinin__InfluenzaA__AIJ10788

SEQ ID NO: 12570 - protein, 566 aa, synthetic construct; identical to SEQ ID NO: 12566
  REGION 1..566: note = hemagglutinin__InfluenzaA__AIJ10789

SEQ ID NO: 12571 - protein, 566 aa, synthetic construct; identical to SEQ ID NO: 12564
  REGION 1..566: note = hemagglutinin__InfluenzaA__AIJ10790

SEQ ID NO: 12572 - protein, 566 aa, synthetic construct; identical to SEQ ID NO: 11892
  REGION 1..566: note = hemagglutinin__InfluenzaA__AIJ10791

SEQ ID NO: 12573 - protein, 566 aa, synthetic construct
  REGION 1..566: note = hemagglutinin__InfluenzaA__AIJ10792
MKTIIALSYILCLVFAQKLPGDDNSTATLCLGHHAVPNGTIVKTITNDRIEVTNATELVQNSSIGEICDSPHQILDGENCTLIDALLGDPQCDGFQNKKWDLFVERSKAYSNCYPYDVPDYASLRSLVASSGTLEFNNESFNWAGVTQNGTSSACIRGSNSSFFSRLNWLTHLNFKYPALNVTMPNNEQFDKLYIWGVHHPGTDKDQIFLYAQSSGRITVSTKRSQQAVIPNIGSRPRIRNIPSRISIYWTIVKPGDILLINSTGNLIAPRGYFKIRSGKSSIMRSDAPIGKCKSECITPNGSIPNDKPFQNVNRITYGACPRYVKQSTLKLATGMRNVPEKQTRGIFGAIAGFIENGWEGMVDGWYGFRHQNSEGRGQAADLKSTQAAIDQINGKLNRLIGKTNEKFHQIEKEFSEVEGRIQDLEKYVEDTKIDLWSYNAELLVALENQHTIDLTDSEMNKLFEKTKKQLRENAEDMGNGCFKIYHKCDNACIGSIRNGTYDHDVYRDEALNNRFQIKGVELKSGYKDWILWISFAISCFLLCVVLLGFIMWACQKGNIRCNICI

SEQ ID NO: 12574 - protein, 566 aa, synthetic construct; identical to SEQ ID NO: 9883
  REGION 1..566: note = hemagglutinin__InfluenzaA__AIJ29347

SEQ ID NO: 12575 - protein, 566 aa, synthetic construct
  REGION 1..566: note = hemagglutinin__InfluenzaA__AIJ29349
MKTIIALSYILCLVFAQKFPGNDNSTATLCLGHHAVPNGTIVKTITNDRIEVTNATELVQNSSIGEICDSPHQILDGENCTLIDALLGDPQCDGFQNKKWDLFVERSKAYSNCYPYDVPDYASLRSLVASSGTLEFNNESFNWTGVTQNGTSSACIRRSNSSFFSRLNWLTHLNFKYPALNVTMPNNEQFDKLYIWGVHHPGTDKDQIFLYAQSSGRITVSTKRSQQAVIPNIGSRPRIRNIPSRISIYWTIVKPGDILLINSTGNLIAPRGYFKIRSGKSSIMRSDAPIGKCKSECITPNGSIPNDKPFQNVNRITYGACPRYVKQSTLKLATGMRNVPEKQTRGIFGAIAGFIENGWEGMVDGWYGFRHQNSEGRGQAADLKSTQAAIDQINGKLNRLIGKTNEKFHQIEKEFSEVEGRIQDLEKYVEDTKIDLWSYNAELLVALENQHTIDLTDSEMNKLFEKTKKQLRENAEDMGNGCFKIYHKCDNACIGSIRNGTYDHDVYRDEALNNRFQIKGVELKSGYKDWILWISFAISCFLLCVALLGFIMWACQKGNIRCNICI

SEQ ID NO: 12576 - protein, 566 aa, synthetic construct
  REGION 1..566: note = hemagglutinin__InfluenzaA__AIJ29351
MKTIIALSYILCLVFAQKLPGNDNSTATLCLGHHAVPNGTIVKTITNDRIEVTNATELVQNSSIGEICDSPHQILDGENCTLIDALLGDPQCDGFQNKKWDLFVERSKAYSNCYPYDVPDYASLRSLVASSGTLEFNNESFNWTGVTQNGTSSACIRRSNSSFFSRLNWLTHLNFKYPALNVTMPNNEQFDKLYIWGVHHPGTDKDQIFLYAQSSGRITVSTKRSQQAVIPNIGSRPRIRNIPSRISIYWTIVKPGDILLINSTGNLIAPRGYFKIRSGKSSIMRSDAPIGKCKSECITPNGSIPNDKPFQNVNRITYGACPRYVKQSTLKLATGMRNVPEKQTRGIFGAIAGFIENGWEGMVDGWYGFRHQNSEGRGQAADLKSTQAAIDQINGKLNRLIGKTNEKFHQIEKEFSEVEGRIQDLEKYVEDTKIDLWSYNAELLVALENQHTIDLTDSEMNKLFEKTKKQLRENAEDMGNGCFKIYHKCDNACIGSIRNGTYDHDVYRDEALNNRFQIKGVELKSGYKDWILWISFAISCLLLCVALLGFIMWACQKGNIRCNICI

SEQ ID NO: 12577 - protein, 566 aa, synthetic construct; identical to SEQ ID NO: 9480
  REGION 1..566: note = hemagglutinin__InfluenzaA__AIJ29353

SEQ ID NO: 12578 - protein, 566 aa, synthetic construct
  REGION 1..566: note = hemagglutinin__InfluenzaA__AIJ29355
MKTIIALSYILCLVFAQKLPGNDNSTATLCLGHHAVPNGTIVKTITNDQIEVTNATELVQSSSTGEICDSPHQILDGENCTLIDALLGDPQCDGFQNKKWDLFVERSKAYSNCYPYDVPDYASLRSLVASSGTLEFNNESFNWTGVTQNGTSSACIRRSNSSFFSRLNWLTHLNFKYPALNVTMPNNEQFDKLYIWGVHHPGTDKDQIFLYAQSSGRITVSTKRSQQAVIPNIGSRSRIRNIPSRISIYWTIVKPGDILLINSTGNLIAPRGYFKIRSGKSSIMRSDAPIGKCNSECITPNGSIPNDKPFQNVNRITYGACPRYVKQSTLKLATGMRNVPEKQTRGIFGAIAGFIENGWEGMVDGWYGFRHQNSEGRGQAADLKSTQAAIDQINGKLNRLIGKTNEKFHQIEKEFSEVEGRIQDLEKYVEDTKIDLWSYNAELLVALENQHTIDLTDSEMNKLFEKTKKQLRENAEDMGNGCFKIYHKCDNACIGSIRNGTYNHDVYRDEALNNRFQIKGVELKSGYKDWILWISFAISCFLLCVALLGFIMWACQKGNIRCNICI

SEQ ID NO: 12579 - protein, 566 aa, synthetic construct; identical to SEQ ID NO: 9074
  REGION 1..566: note = hemagglutinin__InfluenzaA__AIJ29357

SEQ ID NO: 12580 - protein, 566 aa, synthetic construct
  REGION 1..566: note = hemagglutinin__InfluenzaA__AIJ29359
MKTIIALSYILCLVFAQKLPGNDNSTATLCLGHHAVPNGTIVKTITNDRIEVTNATELVQNSSIGEICDSPHQILDGENCTLIDALLGDPQCDGFQNKKWDLFVERSKAYSNCYPYDVPDYASLRSLVASSGTLEFNNESFNWTGVTQNGTSSACIRRSNNSFFSRLNWLTHLNFKYPALNVTMPNNEQFDKLYIWGVHHPGTDKDQIFLYAQSSGRITVSTKRSQQAVIPNIGSRPRIRNIPSRISIYWTIVKPGDILLINSTGNLIAPRGYFKIRSGKSSIMRSDAPIGKCKSECITPNGSIPNDKPFQNVNRITYGACPRYVKQSTLKLATGMRNVPEKQTRGIFGAIAGFIENGWEGMVDGWYGFRHQNSEGRGQAADLKSTQAAIDQINGKLNRLIGKTNEKFHQIEKEFSEVEGRIQDLEKYVEDTKIDLWSYNAELLVALENQHTIDLTDSEMNKLFEKTKKQLRENAEDMGNGCFKIYHKCDNACIGSIRNGTYDHDVYRDEAINNRFQIKGVELKSGYKDWILWISFAISCFLLCVALLGFIMWACQKGNIRCNICI

SEQ ID NO: 12581 - protein, 566 aa, synthetic construct
  REGION 1..566: note = hemagglutinin__InfluenzaA__AIJ29361
MKTIIALSYILCLVFAQKLPGNDNSTATLCLGHHAVPNGTIVKTITNDRIEVTNATELVQNSSIGEICDSPHQILDGENCTLIDALLGDPQCDGFQNKKWDLFVERSKAYSNCYPYDVPDYVSLRSLVASSGTLEFNNESFNWTGVTQNGTSSACIRRSNNSFFSRLNWLTHLNFKYPALNVTMPNNEQFDKLYIWGVHHPGTDKDQIFLYAQSSGRITVSTKRSQQAVIPNIGSRPRIRNIPSRISIYWTIVKPGDILLINSTGNLIAPRGYFKIRSGKSSIMRSDAPIGKCKSECITPNGSIPNDKPFQNVNRITYGACPRYVKQSTLKLATGMRNVPEKQTRGIFGAIAGFIENGWEGMVDGWYGFRHQNSEGRGQAADLKSTQAAIDQINGKLNRLIGKTNEKFHQIEKEFSEVEGRIQDLEKYVEDTKIDLWSYNAELLVALENQHTIDLTDSEMNKLFEKTKKQLRENAEDMGNGCFKIYHKCDNACIGSIRNGTYDHDVYRDEALNNRFQIKGVELKSGYKDWILWISFAISCFLLCVALLGFIMWACQKGNIRCNICI

SEQ ID NO: 12582 - protein, 566 aa, synthetic construct; identical to SEQ ID NO: 10040
  REGION 1..566: note = hemagglutinin__InfluenzaA__AIL93623

SEQ ID NO: 12583 - protein, 566 aa, synthetic construct
  REGION 1..566: note = hemagglutinin__InfluenzaA__AIL93634
MKAILVVLLYTFATANADTLCIGYHANNSTDTVDTVLEKNVTVTHSVNLLEDKHNGKLCKLRGVAPLHLGKCNIAGWILGNPECESLSTASSWSYIVETSSSDNGTCYPGDFINYEELREQLSSVSSFERFEIFPKTSSWPNHDSNKGVTAACPHAGAKSFYKNLIWLVKKGNSYPKLSQSYINDKGKEVLVLWGIHHPSTTADQQSLYQNADAYVFVGTSRYSKKFKPEIAIRPKVRDQEGRMNYYWTLVEPGDKITFEATGNLVVPRYAFTMERNAGSGIIISDTPVHDCNTTCQTPEGAINTSLPFQNIHPITIGKCPKYVKSTKLRLATGLRNVPSIQSRGLFGAIAGFIEGGWTGMVDGWYGYHHQNEQGSGYAADLKSTQNAIDKITNKVNSVIEKMNTQFTAVGKEFNHLEKRIENLNKKVDDGFLDIWTYNAELLVLLENERTLDYHDSNVKNLYEKVRNQLKNNAKEIGNGCFEFYHKCNNTCMESVKNGTYDYPKYSEEAKLNREKIDGVKLESTRIYQILAIYSTVASSLVLVVSLGAISFWMCSNGSLQCRICI

SEQ ID NO: 12584 - protein, 566 aa, synthetic construct
  REGION 1..566: note = hemagglutinin__InfluenzaA__AIL93645
MKTIIALSYILCLVFAQKLPGNDNSTATLCLGHHAVPNGTIVKTITNDRIEVTNATELVQNSSIGEICDSPHQILDGENCTLIDALLGDPQCDGFQNKKWDLFVERSKAYSNCYPYDVPDYASLRSLVASSGTLEFNNESFNWAGVTQNGTSSACIRGSNSSFFSRLNWLTHLNFRYPALNVTMPNNEQFDKLYIWGVHHPGTDKDQIFLYAQSSGRITVSTKRSQQAVIPNIGSRPRIRNIPSRISIYWTIVKPGDILLINSTGNLIAPRGYFKIRSGKSSIMRSDAPIGKCKSECITPNGSIPNDKPFQNVNRITYGACPRYVKQSTLKLATGMRNVPEKQTRGIFGAIAGFIENGWEGMVDGWYGFRHQNSEGRGQAADLKSTQAAIDQINGKLNRLIGKTNEKFHQIEKEFSEVEGRIQDLEKYVEDTKIDLWSYNAELLVALENQHTIDLTDSEMNKLFEKTKKQLRENAEDMGNGCFKIYHKCDNACIGSIRNGTYDHDVYRDEALNNRFQIKGVELKSGYKDWILWISFAISCFLLCVALLGFIMWACQKGNIRCNICI

SEQ ID NO: 12585 - protein, 566 aa, synthetic construct; identical to SEQ ID NO: 9994
  REGION 1..566: note = hemagglutinin__InfluenzaA__AIL93657

SEQ ID NO: 12586 - protein, 566 aa, synthetic construct; identical to SEQ ID NO: 9994
  REGION 1..566: note = hemagglutinin__InfluenzaA__AIL93669

SEQ ID NO: 12587 - protein, 566 aa, synthetic construct
  REGION 1..566: note = hemagglutinin__InfluenzaA__AIL93681
MKAILVVLLYTFATANADTLCIGYHANNSTDTVDTVLEKNVTVTHSVNLLEDKHNGKLCKLRGVAPLHLGKCNIAGWILGNPECESLSTASSWSYIVETSSSDNGTCYPGDFINYEELREQLSSVSSFERFEIFPKTSSWPNHDSNKGVTAACPHAGAKSFYKNLIWLVKKGNSYPKLSQSYINDKGKEVLVLWGIHHPSTTADQQSLYQNADAYVFVGTSRYSKKFKPEIAIRPKVRDQEGRMNYYWTLVEPGDKITFEATGNLVVPRYAFTMERSAGSGIIISDTPVHDCNTTCQTPEGAINTSLPFQNIHPITIGKCPKYVKSTKLRLATGLRNVPSIQSRGLFGAIAGFIEGGWTGMVDGWYGYHHQNEQGSGYAADLKSTQNAIDKITNKVNSVIEKMNTQFTAVGKEFNHLEKRIENLNKKVDDGFLDIWTYNAELLVLLENERTLDYHDSNVKNLYEKVRNQLKNNAKEIGNGCFEFYHKCDNTCMESVKNGTYDYPKYSEEAKLNREKIDGVKLESTRIYQILAIYSTVASSLVLVVSLGAISFWMCSNGSLQCRICI

SEQ ID NO: 12588 - protein, 566 aa, synthetic construct; identical to SEQ ID NO: 12584
  REGION 1..566: note = hemagglutinin__InfluenzaA__AIL93692

SEQ ID NO: 12589 - protein, 566 aa, synthetic construct; identical to SEQ ID NO: 12584
  REGION 1..566: note = hemagglutinin__InfluenzaA__AIL93716

SEQ ID NO: 12590 - protein, 566 aa, synthetic construct; identical to SEQ ID NO: 9994
  REGION 1..566: note = hemagglutinin__InfluenzaA__AIL93728

SEQ ID NO: 12591 - protein, 566 aa, synthetic construct; identical to SEQ ID NO: 9994
  REGION 1..566: note = hemagglutinin__InfluenzaA__AIL93740

SEQ ID NO: 12592 - protein, 566 aa, synthetic construct
  REGION 1..566: note = hemagglutinin__InfluenzaA__AIL93752
MKTIIALSYILCLVFAQKLPGNDNSTATLCLGHHAVPNGTIVKTITNDRIEVTNATELVQNSSIGEICDRPHQILDGENCTLIDALLGDPQCDGFQNKKWDLFVERSKAYSNCYPYDVPDYASLRSLVASSGTLEFNNESFNWAGVTQNGTSSACIRGSNSSFFSRLNWLTHLNFKYPALNVTMPNNEQFDKLYIWGVHHPGTDKDQIFLYAQSSGRITVSTKKSQQAVIPNIGSRPRIRNIPSRISIYWTIVKPGDILLINSTGNLIAPRGYFKIRSGKSSIMRSDAPIGKCKSECITPNGSIPNDKPFQNVNRITYGACPRYVKQSTLKLATGMRNVPEKQTRGIFGAIAGFIENGWEGMVDGWYGFRHQNSEGRGQAADLKSTQAAIDQINGKLNRLIGKTNEKFHQIEKEFSEVEGRIQDLEKYVEDTKIDLWSYNAELLVALENQHTIDLTDSEMNKLFEKTKKQLRENAEDMGNGCFKIYHKCDNACIGSIRNGTYDHDVYRDEALNNRFQIKGVELKSGYKDWILWISFAISCFLLCVALLGFIMWACQKGNIRCNICI

SEQ ID NO: 12593 - protein, 566 aa, synthetic construct
  REGION 1..566: note = hemagglutinin__InfluenzaA__AIL93764
MKTIIALSYILCLVFTQKLPGNDNSTATLCLGHHAVPNGTIVKTITNDRIEVTNATELVQNSSIGEICDSPHQILDGENCTLIDALLGDPQCDGFQNKKWDLFVERSKAYSNCYPYDVPDYASLRSLVASSGTLEFNNESFNWAGVTQNGTSSACIRGSNSSFFSRLNWLTHLNFKYPALNVTMPNNEQFDKLYIWGVHHPGTDKDQIFLYAQSSGRITVSTKRSQQAVIPNIGSRPRIRNIPSRISIYWTIVKPGDILLINSTGNLIAPRGYFKIRSGKSSIMRSDAPIGKCKSECITPNGSIPNDKPFQNVNRITYGACPRYVKQSTLKLATGMRNVPEKQTRGIFGAIAGFIENGWEGMVDGWYGFRHQNSEGRGQAADLKSTQAAIDQINGKLNRLIGKTNEKFHQIEKEFSEVEGRIQDLEKYVEDTKIDLWSYNAELLVALENQHTIDLTDSEMNKLFEKTKKQLRENAEDMGNGCFKIYHKCDNACIGSIRNETYDHDVYRDEALNNRFQIKGVELKSGYKDWILWISFAISCFLLCVALLGFIMWACQKGNIRCNICI

SEQ ID NO: 12594 - protein, 566 aa, synthetic construct; identical to SEQ ID NO: 9994
  REGION 1..566: note = hemagglutinin__InfluenzaA__AIL93776

SEQ ID NO: 12595 - protein, 566 aa, synthetic construct; identical to SEQ ID NO: 9994
  REGION 1..566: note = hemagglutinin__InfluenzaA__AIL93788

SEQ ID NO: 12596 - protein, 566 aa, synthetic construct; identical to SEQ ID NO: 9994
  REGION 1..566: note = hemagglutinin__InfluenzaA__AIL93812

SEQ ID NO: 12597 - protein, 566 aa, synthetic construct; identical to SEQ ID NO: 9994
  REGION 1..566: note = hemagglutinin__InfluenzaA__AIL93824

SEQ ID NO: 12598 - protein, 566 aa, synthetic construct; identical to SEQ ID NO: 12587
  REGION 1..566: note = hemagglutinin__InfluenzaA__AIL93836

SEQ ID NO: 12599 - protein, 566 aa, synthetic construct
  REGION 1..566: note = hemagglutinin__InfluenzaA__AIL93847
MKAILVVLLYTFATANADTLCIGYHANNSTDTVDTVLEKNVTVTHSVNLLEDKHNGKLCKLRGVAPLHLGKCNIAGWILGNPECESLSTASSWSYIVETSSSDNGTCYPGDFINYEELREQLSSVSSFERFEIFPKTSSWPNHDSNKGVTAACPHAGAKSFYKNLIWLVKKGNSYPKLSQSYINDKGKEVLVLWGIHHPSTTADQQSLYQNADAYVFVGTSRYSKKFKPEIAIRPKVRDQEGRMNYYWTLVEPGDKITFEATGNLVVPRYAFTMERSAGSGIIISDTPVHDCNTTCQTPEGAINTSLPFQNIHPITIGKCPKYVKSTKLRLATGLRNVPSIQSRGLFGAIAGFIEGGWTGMVDGWYGYHHQNEQGSGYAADLKSTQNAIDKITNKVNSVIEKMNTQFTAVGKEFNHLEKRIENLNKKVDDGFLDIWTYNAELLVLLENERTLDYHDSNVKNLYEKVRNQLKNNAKEIGNGCFEFYHKCDNTCMESVKNGTYDYPKYSEEAKLNREKIDGVKLESTRIYQILAIYSTVASSLVLVVSLGAICFWMCSNGSLQCRICI

SEQ ID NO: 12600 - protein, 566 aa, synthetic construct; identical to SEQ ID NO: 12584
  REGION 1..566: note = hemagglutinin__InfluenzaA__AIL93858

SEQ ID NO: 12601 - protein, 566 aa, synthetic construct; identical to SEQ ID NO: 9994
  REGION 1..566: note = hemagglutinin__InfluenzaA__AIL93870

SEQ ID NO: 12602 - protein, 566 aa, synthetic construct
  REGION 1..566: note = hemagglutinin__InfluenzaA__AIL93882
MKTIIALSYILCLVFAQKPPGNDNSTATLCLGHHAVPNGTIVKTITNDRIEVTNATELVQNSSIGEICDSPHQILDGENCTLIDALLGDPQCDGFQNKKWDLFVERSKAYSNCYPYDVPDYASLRSLVASSGTLEFNNESFNWAGVTQNGTSSACIRGSNSSFFSRLNWLTHLNFKYPALNVTMPNNEQFDKLYIWGVHHPGTDKDQIFLYAQSSGRITVSTKRSQQAVIPNIGSRPRIRNIPSRISIYWTIVKPGDILLINSTGNLIAPRGYFKIRSGKSSIMRSDAPIGKCKSECITPNGSIPNDKPFQNVNRITYGACPRYVKQSTLKLATGMRNVPEKQTRGIFGAIAGFIENGWEGMVDGWYGFRHQNSEGRGQAADLKSTQAAIDQINGKLNRLIGKTNEKFHQIEKEFSEVEGRIQDLEKYVEDTKIDLWSYNAELLVALENQHTIDLTDSEMNKLFEKTKKQLRENAEDMGNGCFKIYHKCDNACIGSIRNGTYDHDVYRDEALNNRFQIKGVELKSGYKDWILWISFAISCFLLCVALLGFIMWACQKGNIRCNICI

SEQ ID NO: 12603 - protein, 566 aa, synthetic construct; identical to SEQ ID NO: 9994
  REGION 1..566: note = hemagglutinin__InfluenzaA__AIL93894

SEQ ID NO: 12604 - protein, 566 aa, synthetic construct
  REGION 1..566: note = hemagglutinin__InfluenzaA__AIL93906
MKAILVVLLYTFATANADTLCIGYHANNSTDTVDTVLEKNVTVTHSINLLEDKHNGKLCKLRGVAPLHLGKCNIAGWILGNPECESLSTASSWSYIVETSSSDNGTCYPGDFINYEELREQLSSVSSFERFEMFPKTSSWPNHDSNKGVTAACPHAGAKSFYKNLIWLVKKGNSYPKLSKSYINDKGKEVLVLWGIHHPSTTADQQSLYQNADAYVFVGTSKYSKKFKPEIAIRPKVRDQEGRMNYYWTLIEPGDKITFEATGNLVVPRYAFAMERNAGSGIIISDTPVHDCNTTCQTPEGAINTSLPFQNIHPITIGKCPKYVKSTKLRLATGLRNVPSIQSRGLFGAIAGFIEGGWTGMVDGWYGYHHQNEQGSGYAADLKSTQNAIDKITNKVNSVIEKMNTQFTAVGKEFNHLEKRIENLNKKVDDGFLDIWTYNAELLVLLENERTLDYHDSNVKNLYEKVRNQLKNNAKEIGNGCFEFYHKCDNTCMESVKNGTYDYPKYSEEAKLNREKIDGVKLESTRIYQILAIYSTVASSLVLVVSLGAISFWMCSNGSLQCRICI

SEQ ID NO: 12605 - protein, 566 aa, synthetic construct
  REGION 1..566: note = hemagglutinin__InfluenzaA__AIL93917
MKTIIALSYILCLVFAQKLPGNDNSTATLCLGHHAVPNGTIVKTITNDRIEVTNATELVQNSSIGEICDRPHQILDGENCTLIDALLGDPQCDGFQNKKWDLFVERSKAYSNCYPYDVPDYASLRSLVASSGTLEFNNESFNWAGVTQNGTSSACIRGSNSSFFSRLNWLTHLNFKYPALNVTMPNNEQFDKLYIWGVHHPGTDKDQIFLYAQSSGRITVSTKRSQQAVIPNIGSRPRIRNIPSRISIYWTIVKPGDILLINSTGNLIAPRGYFKIRSGKSSIMRSDAPIGKCKSECITPNGSIPNDKPFQNVNRITYGACPRYVKQSTLKLATGMRNVPEKQTRGIFGAIAGFIENGWEGMVDGWYGFRHQNSEGRGQAADLKSTQAAIDQINGKLNRLIGKTNEKFHQIEKEFSEVEGRIQDLEKYVEDTKIDLWSYNAELLVALENQHTIDLTDSEMNKLFEKTKKQMRENAEDMGNGCFKIYHKCDNACIGSIRNGTYDHDVYRDEALNNRFQIKGVELKSGYKDWILWISFAISCFLLCVALLGFIMWACQKGNIRCNICI

SEQ ID NO: 12606 - protein, 566 aa, synthetic construct; identical to SEQ ID NO: 10040
  REGION 1..566: note = hemagglutinin__InfluenzaA__AIL93929

SEQ ID NO: 12607 - protein, 566 aa, synthetic construct
  REGION 1..566: note = hemagglutinin__InfluenzaA__AIL93940
MKAILVVLLYTFATANADTLCIGYHANNSTDTVDTVLEKNVTVTHSVNLLEDKHNGKLCKLRGVSPLHLGKCNIAGWILGNPECESLSTASSWSYIVETSSSDNGTCYPGDFINYEELREQLSSVSSFERFEIFPKTSSWPNHDSNKGVTAACPHAGAKSFYKNLIWLVKKGNSYPKLSQSYINDKGKEVLVLWGIHHPSTTADQQSLYQNADAYVFVGTSRYSKKFKPEIAIRPKVRDQEGRMNYYWTLVEPGDKITFEATGNLVVPRYAFTMERNAGSGIIISDTPVHDCNTTCQTPEGAINTSLPFQNIHPITIGKCPKYVKSTKLRLATGLRNVPSIQSRGLFGAIAGFIEGGWTGMVDGWYGYHHQNEQGSGYAADLKSTQNAIDKITNKVNSVIEKMNTQFTAVGKEFNHLEKRIENLNKKVDDGFLDIWTYNAELLVLLENERTLDYHDSNVKNLYEKVRNQLKNNAKEIGNGCFEFYHKCDNTCMESVKNGTYDYPKYSEEAKLNREKIDGVKLESTRIYQILAIYSTVASSLVLVVSLGAISFWMCSNGSLQCRICI

SEQ ID NO: 12608 - protein, 566 aa, synthetic construct; identical to SEQ ID NO: 9994
  REGION 1..566: note = hemagglutinin__InfluenzaA__AIL93951

SEQ ID NO: 12609 - protein, 566 aa, synthetic construct; identical to SEQ ID NO: 9994
  REGION 1..566: note = hemagglutinin__InfluenzaA__AIL93963

SEQ ID NO: 12610 - protein, 566 aa, synthetic construct; identical to SEQ ID NO: 9858
  REGION 1..566: note = hemagglutinin__InfluenzaA__AIL93975

SEQ ID NO: 12611 - protein, 566 aa, synthetic construct; identical to SEQ ID NO: 12587
  REGION 1..566: note = hemagglutinin__InfluenzaA__AIL93987

SEQ ID NO: 12612 - protein, 566 aa, synthetic construct; identical to SEQ ID NO: 9994
  REGION 1..566: note = hemagglutinin__InfluenzaA__AIL93998

SEQ ID NO: 12613 - protein, 566 aa, synthetic construct; identical to SEQ ID NO: 12584
  REGION 1..566: note = hemagglutinin__InfluenzaA__AIL94010

SEQ ID NO: 12614 - protein, 566 aa, synthetic construct; identical to SEQ ID NO: 12584
  REGION 1..566: note = hemagglutinin__InfluenzaA__AIL94022

SEQ ID NO: 12615 - protein, 566 aa, synthetic construct
  REGION 1..566: note = hemagglutinin__InfluenzaA__AIL94046
MKTIIALSYILCLVFAQKLPGNDNSTATLCLGHHAVPNGTIVKTITNDRIEVTNATELVQNSSIGEICDRPHQILDGENCTLIDALLGDPQCDGFQNKKWDLFVERSKAYSNCYPYDVPDYASLRSLVASSGTLEFNNESFNWAGVTQNGTSSACIRGSNSSFFSRLNWLTHLNFKYPALNVTMPNNEQFDKLYIWGVHHPGTDKDQIFLYAQSSGRITVSTKRSQQAVIPNIGSRPRIRNIPSRISIYWTIVKPGDILLINSTGNLIAPRGYFKIRSGKSSIMRSDAPIGKCKSECITPNGSIPNDKPFQNVNRITYGACPRYVKQSTLKLATGMRNVPEKQTRGIFGAIAGFIENGWEGMVDGWYGFRHQNSEGRGQAADLKSTQAAIDQINGKLNRLIGKTNEKFHQIEKEFSEVEGRIQDLEKYVEDTKIDLWSYNAELLVALENQHTIDLTDSEMNKLFEKTKKQLRENAEDMGNGCFKIYHKCDNACIGSIRNGTYDHDVYRDEALNNRFQIKGVELKSGYKDWILWISFAISCFLLCVALLGFIMWACQKGNIRCNICI

SEQ ID NO: 12616 - protein, 566 aa, synthetic construct
  REGION 1..566: note = hemagglutinin__InfluenzaA__AIL94058
MKAILVVLLYTFAPANADTLCIGYHANNSTDTVDTVLEKNVTVTHSVNLLEDKHNGKLCKLRGVAPLHLGKCNIAGWILGNPECESLSTASSWSYIVETSSSDNGTCYPGDFINYEELREQLSSVSSFERFEIFPKTSSWPNHDSNKGVTAACPHAGAKSFYKNLIWLVKKGNSYPKLSQSYINDKGKEVLVLWGIHHPSTTADQQSLYQNADAYVFVGTSRYSKKFKPEIAIRPKVRDQEGRMNYYWTLVEPGDKITFEATGNLVVPRYAFTIERSAGSGIIISDTPVHDCNTTCQTPEGAINTSLPFQNIHPITIGKCPKYVKSTKLRLATGLRNVPSIQSRGLFGAIAGFIEGGWTGMVDGWYGYHHQNEQGSGYAADLKSTQNAIDKITNKVNSVIEKMNTQFTAVGKEFNHLEKRIENLNKKVDDGFLDIWTYNAELLVLLENERTLDYHDSNVKNLYEKVRNQLKNNAKEIGNGCFEFYHKCDNTCMESVKNGTYDYPKYSEEAKLNREKIDGVKLESTRIYQILAIYSTVASSLVLVVSLGAISFWMCSNGSLQCRICI

SEQ ID NO: 12617 - protein, 566 aa, synthetic construct; identical to SEQ ID NO: 12587
  REGION 1..566: note = hemagglutinin__InfluenzaA__AIL94069

SEQ ID NO: 12618 - protein, 566 aa, synthetic construct; identical to SEQ ID NO: 10040
  REGION 1..566: note = hemagglutinin__InfluenzaA__AIL94080

SEQ ID NO: 12619 - protein, 566 aa, synthetic construct; identical to SEQ ID NO: 12584
  REGION 1..566: note = hemagglutinin__InfluenzaA__AIL94235

SEQ ID NO: 12620 - protein, 566 aa, synthetic construct; identical to SEQ ID NO: 10040
  REGION 1..566: note = hemagglutinin__InfluenzaA__AIL94247

SEQ ID NO: 12621 - protein, 566 aa, synthetic construct
  REGION 1..566: note = hemagglutinin__InfluenzaA__AIL94258
MKTIIALSYILCLVFTQKLPGNDNSTATLCLGHHAVPNGTIVKTITNDRIEVTNATELVQNSSIGEICDSPHQILDGENCTLIDALLGDPQCDGFQNKKWDLFVERSKAYSNCYPYDVPDYASLRSLVASSGTLEFNNESFNWAGVTQNGTSSACIRGSNSSFFSRLNWLTHLNFKYPALNVTMPNNEQFDKLYIWGVHHPGTDKDQIFLYAQSSGRITVSTKRSQQAVIPNIGSRPRIRNIPSRISIYWTIVKPGDILLINSTGNLIAPRGYFKIRSGKSSIMRSDAPIGKCKSECITPNGSIPNDKPFQNVNRITYGACPRYVKQSTLKLATGMRNVPEKQTRGIFGAIAGFIENGWEGMVDGWYGFRHQNSEGRGQAADLKSTQAAIDQINGKLNRLIGKTNEKFHQIEKEFSEVEGRIQDLEKYVEDTKIDLWSYNAELLVALENQHTIDLTDSEMNKLFEKTKKQLRENAEDMGNGCFKIYHKCDNACIGSIRNGTYDHDVYRDEALNNRFQIKGVELKSGYKDWILWISFAISCFLLCVALLGFIMWACQKGNIRCNICI

SEQ ID NO: 12622 - protein, 566 aa, synthetic construct
  REGION 1..566: note = hemagglutinin__InfluenzaA__AIL94270
MKTIIALSYILCLVFAQKLPGNDNSTATLCLGHHAVPNGTIVKTITNDRIEVTNATELVQNSSIGEICDSPHQILDGENCTLIDALLGDPQCDGFQNKKWDLFVERSKAYSNCYPYDVPDYASLRSLVASSGTLEFNNESFNWAGVTQNGTSSACIRGSNSSFFSRLNWLTHLNFKYPALNVTMPNNEQFDKLYIWGVHHPGTDKDQIFLYAQSSGRITVSTKRSQQAVIPNIGSRPRIRNIPSRISIYWTIVKPGDILLINSTGNLIAPRGYFKIRSGKSSIMRSDAPIGKCNSECITPNGSIPNDKPFQNVNRITYGACPRYVKQSTLKLATGMRNVPEKQTRGIFGAIAGFIENGWEGMVDGWYGFRHQNSEGRGQAADLKSTQAAIDQINGKLNRLIGKTNEKFHQIEKEFSEVEGRIQDLEKYVEDTKIDLWSYNAELLVALENQHTIDLTDSEMNKLFEKTKKQLRENAEDMGNGCFKIYHKCDNACIGSIRNGTYDHDVYRDEALNNRFQIKGVELKSGYKDWILWISFAISCFLLCVALLGFIMWACQKGNIRCNICI

SEQ ID NO: 12623 - protein, 566 aa, synthetic construct; identical to SEQ ID NO: 9994
  REGION 1..566: note = hemagglutinin__InfluenzaA__AIL94282

SEQ ID NO: 12624 - protein, 566 aa, synthetic construct; identical to SEQ ID NO: 9994
  REGION 1..566: note = hemagglutinin__InfluenzaA__AIL94294

SEQ ID NO: 12625 - protein, 566 aa, synthetic construct
  REGION 1..566: note = hemagglutinin__InfluenzaA__AIL94306
MKTITALSYILCLAFAQKPPGNDNSTATLCLGHHAVPNGTIVKTITNDRIEVTNATELVQNSSIGEICDSPHQILDGENCTLIDALLGDPQCDGFQNKKWDLFVERSKAYSNCYPYDVPDYASLRSLVASSGTLEFNNESFNWAGVTQNGTSSACIRGSNSSFFSRLNWLTHLNFKYPALNVTMPNNEQFDKLYIWGVHHPGTDKDQIFLYAQSSGRITVSTKRSQQAVIPNIGSRPRIRNIPSRISIYWTIVKPGDILLINSTGNLIAPRGYFKIRSGKSSIMRSDAPIGKCKSECITPNGSIPNDKPFQNVNRITYGACPRYVKQSTLKLATGMRNVPEKQTRGIFGAIAGFIENGWEGMVDGWYGFRHQNSEGRGQAADLKSTQAAIDQINGKLNRLIGKTNEKFHQIEKEFSEVEGRIQDLEKYVEDTKIDLWSYNAELLVALENQHTIDLTDSEMNKLFEKTKKQLRENAEDMGNGCFKIYHKCDNACIGSIRNGTYDHDVYRDEALNNRFQIKGVELKSGYKDWILWISFAISCFLLCVALLGFIMWACQKGNIRCNICI

SEQ ID NO: 12626 - protein, 566 aa, synthetic construct
  REGION 1..566: note = hemagglutinin__InfluenzaA__AIL94318
MKTIIALSYILCLVFAQKLPGNDNSTATLCLGHHAVPNGTIVKTITNDRIEVTNATELVQNSSIGEICDSPHQILDGENCTLIDALLGDPQCDGFQNKKWDLFVERSKAYSNCYPYDVPDYASLRSLVASSGTLEFNNESFNWTGVTQNGTSSACIRRSNSSFFSRLNWLTHLNFKYPALNVTMPNNEQFDKLYIWGVHHPGTDKDQIFLYAQSSGRITVSTKRSQQAVIPNIGSRPRIRNIPSRISIYWTIVKPGDILLINSTGNLIAPRGYFKIRSGKSSIMRSDAPIGKCKSECITPNGSIPNDKPFQNVNRITYGACPRYVKQSTLKLATGMRNVPEKQTRGIFGAIAGFIENGWEGMVDGWYGFRHLNSEGRGQAADLKSTQAAIDQINGKLNRLIGKTNEKFHQIEKEFSEVEGRIQDLEKYVEDTKIDLWSYNAELLVALENQHTIDLTDSEMNKLFEKTKKQLRENAEDMGNGCFKIYHKCDNACIGSIRNGTYDHNVYRDEALNNRFQIKGVELKSGYKDWILWISFAISCFLLCVALLGFIMWACQKGNIRCNICI

SEQ ID NO: 12627 - protein, 566 aa, synthetic construct; identical to SEQ ID NO: 9858
  REGION 1..566: note = hemagglutinin__InfluenzaA__AIL94330

SEQ ID NO: 12628 - protein, 566 aa, synthetic construct; identical to SEQ ID NO: 10040
  REGION 1..566: note = hemagglutinin__InfluenzaA__AIL94354

SEQ ID NO: 12629 - protein, 566 aa, synthetic construct; identical to SEQ ID NO: 9994
  REGION 1..566: note = hemagglutinin__InfluenzaA__AIL94365

SEQ ID NO: 12630 - protein, 566 aa, synthetic construct
  REGION 1..566: note = hemagglutinin__InfluenzaA__AIL94377
MKTIIALSYILCLVFAQKLPGNDNSTATLCLGHHAVPNGTIVKTITNDRIEVTNATELVQNSSIGEICDSPHQILDGENCTLIDALLGDPHCDGFQNKKWDLFVERSKAYSNCYPYDVPDYASLRSLVASSGTLEFNNESFNWAGVTQNGTSSACIRGSNSSFFSRLNWLTHLNFKYPALNVTMPNNEQFDKLYIWGVHHPGTDKDQIFLYAQSSGRITVSTKRSQQAVIPNIGSRPRIRNIPSRISIYWTIVKPGDILLINSTGNLIAPRGYFKIRSGKSSIMRSDAPIGKCKSECITPNGSIPNDKPFQNVNRITYGACPRYVKQSTLKLATGMRNVPEKQTRGIFGAIAGFIENGWEGMVDGWYGFRHQNSEGRGQAADLKSTQAAIDQINGKLNRLIGKTNEKFHQIEKEFSEVEGRIQDLEKYVEDTKIDLWSYNAELLVALENQHTIDLTDSEMNKLFEKTKKQLRENAEDMGNGCFKIYHKCDNACIGSIRNGTYDHDVYRDEALNNRFQIKGVELKSGYKDWILWISFAISCFLLCVALLGFIMWACQKGNIRCNICI

SEQ ID NO: 12631 - protein, 566 aa, synthetic construct
  REGION 1..566: note = hemagglutinin__InfluenzaA__AIL94389
MKAILVVLLYTFATANADTLCIGYHANNSTDTVDTVLEKNVTVTHSVNLLEDKHNGKLCKLRGVAPLHLGKCNIAGWILGNPECESLSTASSWSYIVETSSSDNGTCYPGDFINYEELREQLSSVSSFERFEIFPKTSSWPNHDSNKGVTAACPHAGAKSFYKNLIWLVKKGNSYPKLSQSYINDKGKEVLVLWGIHHPSTTADQQSLYQNADAYVFVGTSRYSKKFKPEIAIRPKVRDQEGRMNYYWTLVEPGDKITFEATGNLVVPRYAFTMERNAGSGIIISDTPVHDCNTTCQTPEGAINTSLPFQNIHPITIGKCPKYVKSTKLRLATGLRNVPSIQSRGLFGAIAGFIEGGWTGMVDGWYGYHHQNEQGSGYAADLKSTQNAIDKITNKVNSVIEKMNTQFTAVGKEFNHLEKRIENLNKKVDDGFLDIWTYNAELLILLENERTLDYHDSNVKNLYEKVRNQLKNNAKEIGNGCFEFYHKCDNTCMESVKNGTYDYPKYSEEAKLNREKIDGVKLESTRIYQILAIYSTVASSLVLVVSLGAISFWMCSNGSLQCRICI

SEQ ID NO: 12632 - protein, 566 aa, synthetic construct; identical to SEQ ID NO: 9994
  REGION 1..566: note = hemagglutinin__InfluenzaA__AIL94411

SEQ ID NO: 12633 - protein, 566 aa, synthetic construct; identical to SEQ ID NO: 9994
  REGION 1..566: note = hemagglutinin__InfluenzaA__AIL94423

SEQ ID NO: 12634 - protein, 566 aa, synthetic construct; identical to SEQ ID NO: 12587
  REGION 1..566: note = hemagglutinin__InfluenzaA__AIL94435

SEQ ID NO: 12635 - protein, 566 aa, synthetic construct; identical to SEQ ID NO: 9994
  REGION 1..566: note = hemagglutinin__InfluenzaA__AIL94446

SEQ ID NO: 12636 - protein, 566 aa, synthetic construct; identical to SEQ ID NO: 9994
  REGION 1..566: note = hemagglutinin__InfluenzaA__AIL94458

SEQ ID NO: 12637 - protein, 566 aa, synthetic construct
  REGION 1..566: note = hemagglutinin__InfluenzaA__AIL94470
MKAILVVLLYTFATANADTLCIGYHANNSTDTVDTVLEKNVTVTHSVNLLEDKHNGKLCKLRGVAPLHLGKCNIAGWILGNPECESLSTASSWSYIVETSSSDNGTCYPGDFINYEELREQLSSVSSFERFEIFPKTSSWPNHDSNKGVTAACPHAGAKSFYKNLIWLVKKGNSYPKLSQSYINDKGKEVLVLWGIHHPSTTADQQSLYQNADAYVFVGTSRYSKKFKPEIAIRPKVRDQEGRMNYYWTLVEPGDKITFEATGNLVVPRYAFTMERNAGSGIIISDTPAHDCNTTCQTPEGAINTSLPFQNIHPITIGKCPKYVKSTKLRLATGLRNVPSIQSRGLFGAIAGFIEGGWTGMVDGWYGYHHQNEQGSGYAADLKSTQNAIDKITNKVNSVIEKMNTQFTAVGKEFNHLEKRIENLNKKVDDGFLDIWTYNAELLVLLENERTLDYHDSNVKNLYEKVRNQLKNNAKEIGNGCFEFYHKCDNTCMESVKNGTYDYPKYSEEAKLNREKIDGVKLESTRIYQILAIYSTVASSLVLVVSLGAISFWMCSNGSLQCRICI

SEQ ID NO: 12638 - protein, 566 aa, synthetic construct
  REGION 1..566: note = hemagglutinin__InfluenzaA__AIL94481
MKTIIALSYILCLVFAQKLPGNDNSTATLCLGHHAVPNGTIVKTITNDRIEVTNATELVQNSSIGEICDSPHQILDGENCTLIDALLGDPQCDGFQNKKWDLFVERSKAYSNCYPYDVPDYASLRSLVASSGTLEFNNESFNWAGVTQNGTSSACIRGSNSSFFSRLNWLTHLNFKYPALNVTMPNNEQFDKLYIWGVHHPGTDKDQIFLYAQSSGRITVSTKRSQQAVIPNIGSRPRIRNIPSRISIYWTIVKPGDILLINSTGNLIAPRGYFKIRSGKSSIMRSDAPIGKCKSECITPNGSIPNDKPFQNVNRITYGACPRYVKQSTLKLATGMRNVPEKQTRGIFGAIAGFIENGWEGMVDGWYGFRHQNSEGRGQAADLKSTQAAIDQINGKLNRLIGKTNEKFHQIEKEFSEVEGRIQDLEKYVEDTKIDLWSYNAELLVALENQHTIDLTDSEMNKLFEKTKKQLRENAEDMGNGCFKIYHKCDNACIGSIRNGTYDHDVYRDEALNNRFQIKGVELKSGYKDWIIWISFAISCFLLCVALLGFIMWACQKGNIRCNICI

SEQ ID NO: 12639 - protein, 566 aa, synthetic construct
  REGION 1..566: note = hemagglutinin__InfluenzaA__AIL94493
MKAILVVLLYTFATANADTLCIGYHANNSTDTVDTVLEKNVTVTHSVNLLEDKHNGKLCKLRGVAPLHLGKCNIAGWILGNPECESLSTASSWSYIVETSSSDNGTCYPGDFINYEELREQLSSVSSFERFEIFPKTSSWPNHDSNKGVTAACPHAGAKSFYKNLIWLVKKGNSYPKLSQSYINDKGKEVLVLWGIHHPSTTADQQSLYQNADAYVFVGTSRYSKKFKPEIAIRPKVRDQEGRMNYYWTLVEPGDKITFEATGNLVVPRYAFTMEKNAGSGIIISDTPVHDCNTTCQTPEGAINTSFPFQNIHPITIGKCPKYVKSTKLRLATGLRNVPSIQSRGLFGAIAGFIEGGWTGMVDGWYGYHHQNEQGSGYAADLKSTQNAIDKITNKVNSVIEKMNTQFTAVGKEFNHLEKRIENLNKKVDDGFLDIWTYNAELLVLLENERTLDYHDSNVKNLYEKVRNQLKNNAKEIGNGCFEFYHKCDNTCMESVKNGTYDYPKYSEEAKLNREKIDGVKLESTRIYQILAIYSTVASSLVLVVSLGAISFWMCSNGSLQCRICI

SEQ ID NO: 12640 - protein, 566 aa, synthetic construct; identical to SEQ ID NO: 12587
  REGION 1..566: note = hemagglutinin__InfluenzaA__AIL94504

SEQ ID NO: 12641 - protein, 566 aa, synthetic construct; identical to SEQ ID NO: 9994
  REGION 1..566: note = hemagglutinin__InfluenzaA__AIL94515

SEQ ID NO: 12642 - protein, 566 aa, synthetic construct; identical to SEQ ID NO: 9994
  REGION 1..566: note = hemagglutinin__InfluenzaA__AIL94527

SEQ ID NO: 12643 - protein, 566 aa, synthetic construct
  REGION 1..566: note = hemagglutinin__InfluenzaA__AIL94539
MKAILVVLLYTFATANADTLCIGYHANNSTDTVDTVLEKNVTVTHSVNLLEDKHNGKLCKLRGVAPLHLGKCNIAGWILGNPECESLSTASSWSYIVETSSSDNGTCYPGDFINYEELREQLSSVSSFERFEIFPKTSSWPNHDSNKGVTAACPHAGAKSFYKNLIWLVKKGNSYPKLSQSYINDKGKEVLVLWGIHHPSTTADQQSLYQNADAYVFVGTSRYSKKFKPEIAIRPKVRDQEGRMNYYWTLVEPGDKITFEATGNLVVPRYAFTMERNAGSGIIISDTPAHDCNTTCQTPEGAINTSLPFQNIHPITIGKCPKYVKSTKLRLATGLRNVPSIQSRGLFGAIAGFIEGGWTGMVDGWYGYHHQNEQGSGYAADLKSTQNAIDKITNKVNSVIEKMNTQFTAVGKEFNHLEKRIENLNKKVDDGFLDIWTYNAELLVLLENERTLDYHDSNVKNLYEKVRNQLKNNAKEVGNGCFEFYHKCDNTCMESVKNGTYDYPKYSEEAKLNREKIDGVKLESTRIYQILAIYSTVASSLVLVVSLGAISFWMCSNGSLQCRICI

SEQ ID NO: 12644 - protein, 566 aa, synthetic construct; identical to SEQ ID NO: 12587
  REGION 1..566: note = hemagglutinin__InfluenzaA__AIL94550

SEQ ID NO: 12645 - protein, 566 aa, synthetic construct
  REGION 1..566: note = hemagglutinin__InfluenzaA__AIL94561
MKTIIALSYILCLVFAQKLPGNDNSTATLCLGHHAVPNGTIVKTITNDRIEVTNATELVQNSSIGEICDSPHQILDGENCTLIDALLGDPQCDGFQNKKWDLFVERSKAYSNCYPYDVPDYASLRSLVASSGTLEFNNESFNWAGVTQNGTSSACIRGSNSSFFSRLNWLTHLNFKYPALNVTMPNNEQFDKLYIWGVHHPGTDKDQIFLYAQSSGRITVSTKRSQQAVIPNIGSRPRIRNIPSRISIYWTIVKPGDILLINSTGNLIAPRGYFKIRSGKSSIMRSDAPIGKCKSECITPNGSIPNDKPFQNVNRITYGACPRYVKQSTLKLATGMRNVPEKQTRGIFGAIAGFIENGWEGMVDGWYGFRHQNSEGRGQAADLKSTQAAIDQINGKLNRLIGKTNEKFHQIEKEFSEVEGRIQDLEKYVEDTKIDLWSYNAELLVALENQHTIDLTDSEMNKLFEKTKKQLRENAEDMGNGCFKIYHKCDNACIGSIRNGTYDHDVYRDEALNNRFQIKGVELKSGYKDWILWISFAISCFLLCVALLGFIMWACQRGNIRCNICI

SEQ ID NO: 12646 - protein, 566 aa, synthetic construct
  REGION 1..566: note = hemagglutinin__InfluenzaA__AIL94573
MKAILVVLLYTFATANADTLCIGYHANNSTDTVDTVLEKNVIVTHSVNLLEDKHNGKLCKLRGVAPLHLGKCNIAGWILGNPECESLSTASSWSYIVETSSSDNGTCYPGDFINYEELREQLSSVSSFERFEIFPKTSSWPNHDSNKGVTAACPHAGAKSFYKNLIWLVKKGNSYPKLSQSYINDKGKEVLVLWGIHHPSTTADQQSLYQNADAYVFVGTSRYSKKFKPEIAIRPKVRDQEGRMNYYWTLVEPGDKITFEATGNLVVPRYAFTMERNAGSGIIISDTPVHDCNTTCQTPEGAINTSLPFQNIHPITIGKCPKYVKSTKLRLATGLRNVPSIQSRGLFGAIAGFIEGGWTGMVDGWYGYHHQNEQGSGYAADLKSTQNAIDKITNKVNSVIEKMNTQFTAVGKEFNHLEKRIENLNKKVDDGFLDIWTYNAELLVLLENERTLDYHDSNVKNLYEKVRNQLKNNAKEIGNGCFEFYHKCDNTCMESVKNGTYDYPKYSEEAKLNREKIDGVKLESTRVYQILAIYSTVASSLVLVVSLGAISFWMCSNGSLQCRICI

SEQ ID NO: 12647 - protein, 566 aa, synthetic construct
  REGION 1..566: note = hemagglutinin__InfluenzaA__AIL94584
MKAILVVLLYTFATANADTLCIGYHANNSTDTVDTVLEKNITVTHSVNLLEDKHNGKLCKLRGVAPLHLGKCNIAGWILGNPECESLSTASSWSYIVETSSSDNGTCYPGDFINYEELREQLSSVSSFERFEIFPKTSSWPNHDSNKGVTAACPHAGAKSFYKNLIWLVKKGNSYPKLSQSYINDKGKEVLVLWGIHHPSTTADQQSLYQNADAYVFVGTSRYSKKFKPEIAIRPKVRDQEGRMNYYWTLVEPGDKITFEATGNLVVPRYAFTMERNAGSGIIISDTPVHDCNTTCQTPEGAINTSLPFQNIHPITIGRCPKYVKSTKLRLATGLRNVPSIQSRGLFGAIAGFIEGGWTGMVDGWYGYHHQNEQGSGYAADLKSTQNAIDKITNKVNSVIEKMNTQFTAVGKEFNHLEKRIENLNKKVDDGFLDIWTYNAELLVLLENERTLDYHDSNVKNLYEKVRNQLKNNAKEIGNGCFEFYHKCDNTCMESVKNGTYDYPKYSEEAKLNREKIDGVKLESTRIYQILAIYSTVASSLVLVVSLGAISFWMCSNGSLQCRICI

SEQ ID NO: 12648 - protein, 566 aa, synthetic construct; identical to SEQ ID NO: 12055
  REGION 1..566: note = hemagglutinin__InfluenzaA__AIL94595

SEQ ID NO: 12649 - protein, 566 aa, synthetic construct; identical to SEQ ID NO: 9994
  REGION 1..566: note = hemagglutinin__InfluenzaA__AIL94606

SEQ ID NO: 12650 - protein, 566 aa, synthetic construct; identical to SEQ ID NO: 10040
  REGION 1..566: note = hemagglutinin__InfluenzaA__AIL94618

SEQ ID NO: 12651 - protein, 566 aa, synthetic construct; identical to SEQ ID NO: 12587
  REGION 1..566: note = hemagglutinin__InfluenzaA__AIL94629

SEQ ID NO: 12652 - protein, 566 aa, synthetic construct; identical to SEQ ID NO: 9994
  REGION 1..566: note = hemagglutinin__InfluenzaA__AIL94640

SEQ ID NO: 12653 - protein, 566 aa, synthetic construct
  REGION 1..566: note = hemagglutinin__InfluenzaA__AIL94652
MKAILVVLLYTFATANADTLCIGYHANNSTDTVDTVLEKNVTVTHSINLLEDKHNGKLCKLRGVAPLHLGKCNIAGWILGNPECESLSTASSWSYIVETSSSDNGTCYPGDFINYEELREQLSSVSSFERFEMFPKTSSWPNHDSNKGVTAACPHAGAKSFYKNLIWLVKKGNSYPKLSKSYINDKGKEVLVLWGIHHPSTTADQQSLYQNADAYVFVGTSKYSKKFKPEIAIRPKVRDQEGRMNYYWTLIEPGDKITFEATGNLVVPRYAFAMERNAGSGIIISDTPVHDCNTTCQTPEGAINTSLPFQNIHPITIGKCPKYVKSTKLRLATGLRNVPSIQSRGLFGAIAGFIEGGWTGMVDGWYGYHHQNEQGSGYAADLKSTQNAIDKITNKVNSVIEKMNTQFTAVGKEFNHLEKRIENLNKKVDDGFLDIWTYNAELLVLLENERTLDYHDSNVKNLYEKVRNQLKNNAKEIGNGCFEFYHKCDNTCMESVKNGTYDYPKYSEEAKLDREKIDGVKLESTRIYQILAIYSTVASSLVLVVSLGAISFWMCSNGSLQCRICI

SEQ ID NO: 12654 - protein, 566 aa, synthetic construct; identical to SEQ ID NO: 10040
  REGION 1..566: note = hemagglutinin__InfluenzaA__AIL94663

SEQ ID NO: 12655 - protein, 566 aa, synthetic construct; identical to SEQ ID NO: 10040
  REGION 1..566: note = hemagglutinin__InfluenzaA__AIL94674

SEQ ID NO: 12656 - protein, 566 aa, synthetic construct; identical to SEQ ID NO: 9994
  REGION 1..566: note = hemagglutinin__InfluenzaA__AIL94697

SEQ ID NO: 12657 - protein, 566 aa, synthetic construct; identical to SEQ ID NO: 10040
  REGION 1..566: note = hemagglutinin__InfluenzaA__AIL94709

SEQ ID NO: 12658 - protein, 566 aa, synthetic construct; identical to SEQ ID NO: 10040
  REGION 1..566: note = hemagglutinin__InfluenzaA__AIL94720

SEQ ID NO: 12659 - protein, 566 aa, synthetic construct; identical to SEQ ID NO: 9994
  REGION 1..566: note = hemagglutinin__InfluenzaA__AIL94731

SEQ ID NO: 12660 - protein, 566 aa, synthetic construct; identical to SEQ ID NO: 12587
  REGION 1..566: note = hemagglutinin__InfluenzaA__AIL94743

SEQ ID NO: 12661 - protein, 566 aa, synthetic construct
  REGION 1..566: note = hemagglutinin__InfluenzaA__AIL94754
MKAILVVLLYTFATANADTLCIGYHANNSTDTVDTVLEKNVTVTHSVNLLEDKHNGKLCKLRGVAPLHLGKCNIAGWILGNPECESLSTASSWSYIVETSSSDNGTCYPGDFINYEELREQLSSVSSFERFEIFPKTSSWPNHDSNKGVTAACPHAGAKSFYKNLIWLVKKGNSYPKLSQSYINDKGKEVLVLWGIHHPSTTADQQSLYQNADAYVFVGTSRYSKKFKPEIAIRPKVRDQEGRMNYYWTLVEPGDKITFEATGNLVVPRYAFTMERNAGSGIIISDTPVHDCNTTCQTPEGAINTSLPFQNIHPITIGKCPKYVKSTKLRLATGLRNVPSIQSRGLFGAIAGFIEGGWTGMVDGWYGYHHQNEQGSGYAADLKSTQNAIDKITNKVNSVIEKMNTQFTAVGKEFNHLEKRIENLNKKVDDGFLDIWTYNAELLILLENERTLDYHDSNVKNLYEKVRNQLKNNAKEIGNGCFEFYHKCDNTCMESAKNGTYDYPKYSEEAKLNREKIDGVKLESTRIYQILAIYSTVASSLVLVVSLGAISFWMCSNGSLQCRICI

SEQ ID NO: 12662 - protein, 566 aa, synthetic construct; identical to SEQ ID NO: 12615
  REGION 1..566: note = hemagglutinin__InfluenzaA__AIL94765

SEQ ID NO: 12663 - protein, 566 aa, synthetic construct; identical to SEQ ID NO: 9994
  REGION 1..566: note = hemagglutinin__InfluenzaA__AIL94777

SEQ ID NO: 12664 - protein, 566 aa, synthetic construct; identical to SEQ ID NO: 11902
  REGION 1..566: note = hemagglutinin__InfluenzaA__AIL94789

SEQ ID NO: 12665 - protein, 566 aa, synthetic construct; identical to SEQ ID NO: 10040
  REGION 1..566: note = hemagglutinin__InfluenzaA__AIL94800

SEQ ID NO: 12666 - protein, 566 aa, synthetic construct
  REGION 1..566: note = hemagglutinin__InfluenzaA__AIL94811
MKTIIALSYILCLVFAQKLPGNDNSTATLCLGHHAVPNGTIVKTITNDRIEVTNATELVQNSSIGEICDSPHQILDGENCTLIDALLGDPQCDGFQNKKWDLFVERSKAYSNCYPYDVPDYASLRSLVASSGTLEFNNESFNWTGVTQNGTSSACIRRSNSSFFSRLNWLTHLNFKYPALNVTMPNNEQFDKLYIWGVHHPGTDKDQIFLYAQSSGRITVSTKRSQQAVIPNIGSRPRIRNIPSRISIYWTIVKPGDILLINSTGNLIAPRGYFKIRSGKSSIMRSDAPIGKCKSECITPNGSIPNDKPFQNVNRITYGACPRYVKQNTLKLATGMRNVPEKQTRGIFGAIAGFIENGWEGMVDGWYGFRHQNSEGRGQAADLKSTQAAIDQINGKLNRLIGKTNEKFHQIEKEFSEVEGRIQDLEKYVEDTKIDLWSYNAELLVALENQHTIDLTDSEMNKLFEKTKKQLRENAEDMGNGCFKIYHKCDNACIGSIRNGTYDHNVYRDEALNNRFQIKGVELKSGYKDWILWISFAISCFLLCVALLGFIMWACQKGNIRCNICI

SEQ ID NO: 12667 - protein, 566 aa, synthetic construct; identical to SEQ ID NO: 9858
  REGION 1..566: note = hemagglutinin__InfluenzaA__AIL94823

SEQ ID NO: 12668 - protein, 566 aa, synthetic construct
  REGION 1..566: note = hemagglutinin__InfluenzaA__AIL94835
MKTIIALSYILCLVFAQKLPGNDNSTATLCLGHHAVPNGTIVKTITNDRIEVTNATELVQNYSIGEICDSPHQILDGENCTLIDALLGDPQCDGFQNKKWDLFVERSKAYSNCYPYDVPDYASLRSLVASSGTLEFNNESFNWAGVTQNGTSSACIRGSNSSFFSRLNWLTHLNFKYPALNVTMPNNEQFDKLYIWGVHHPGTDKDQIFLYAQSSGRITVSTKRSQQAVIPNIGSRPRIRNIPSRISIYWTIVKPGDILLINSTGNLIAPRGYFKIRSGKSSIMRSDAPIGKCKSECITPNGSIPNDKPFQNVNRITYGACPRYVKQSTLKLATGMRNVPEKQTRGIFGAIAGFIENGWEGMVDGWYGFRHQNSEGRGQAADLKSTQAAIDQINGKLNRLIGKTNEKFHQIEKEFSEVEGRIQDLEKYVEDTKIDLWSYNAELLVALENQHTIDLTDSEMNKLFEKTKKQLRENAEDMGNGCFKIYHKCDNACIGSIRNGTYDHDVYRDEALNNRFQIKGVELKSGYKDWILWISFAISCFLLCVALLGFIMWACQKGNIRCNICI

SEQ ID NO: 12669 - protein, 566 aa, synthetic construct
  REGION 1..566: note = hemagglutinin__InfluenzaA__AIL94847
MKTIIALSYILCLVFAQKLPGNDNSTATLCLGHHAVPNGTIVKTITNDQIEVTNATELVQSSSTGEICDSPHQILDGENCTLIDALLGDPQCDGFQNKKWDLFVERSKAYSNCYPYDVPDYASLRSLVASSGTLEFNNESFNWTGVTQNGTSSACIRRSNNSFFSRLNWLTHLKFKYPALNVTMPNDEKFDKLYIWGVHHPGTDNDQIFLYAQASGRITVSTKRSQQTVIPNIGSRPRVRNIPSRISIYWTIVKPGDILLINSTGNLIAPRGYFKIRSGKSSIMRSDAPIGKCNSECITPNGSIPNDKPFQNVNRITYGACPRYVKQNTLKLATGMRNVPEKQTRGIFGAIAGFIENGWEGMVDGWYGFRHQNSEGIGQAADLKSTQAAIDQINGKLNRLIGKTNEKFHQIEKEFSEVEGRIQDLEKYVEDTKIDLWSYNAELLVALENQHTIDLTDSEMNKLFEKTKKQLRENAEDMGNGCFKIYHKCDNACIGSIRNGTYDHDVYRDEALNNRFQIKGVELKSGYKDWILWISFAISCFLLCVALLGFIMWACQKGNIRCNICI

SEQ ID NO: 12670 - protein, 566 aa, synthetic construct; identical to SEQ ID NO: 5533
  REGION 1..566: note = hemagglutinin__InfluenzaA__AIL94859

SEQ ID NO: 12671 - protein, 566 aa, synthetic construct
  REGION 1..566: note = hemagglutinin__InfluenzaA__AIL94871
MKTIIALSYILCLVFAQKLPGNDNSTATLCLGHHAVPNGTIVKTITNDQIEVTNATELVQSSSTGEICDSPHQILDGENCTLIDALLGDPQCDGFQNKKWDLFVERSKAYSNCYPYDVPDYASLRSLVASSGTLEFNNESFNWTGVTQNGTSSACIRRSNNSFFSRLNWLTHLNFKYPALNVTMPNNEQFDKLYIWGVHHPGTDKDQIFLYAQASGRITVSTKRSQQAVIPNIGSRPRVRNIPSRISIYWTIVKPGDILLINSTGNLIAPRGYFKIRSGKSSIMRSDAPIGKCNSECITPNGSIPNDKPFQNVNRITYGACPRYVKQSTLKLATGMRNVPEKQTRGIFGAIAGFIENGWEGMVDGWYGFRHQNSEGRGQAADLKSTQAAIDQINGKLNRLIGKTNEKFHQIEKEFSEVEGRIQDLEKYVEDTKIDLWSYNAELLVALENQHTIDLTDSEMNKLFEKTKKQLRENAEDMGNGCFTIYHKCDNACIGSIRNGTYDHNVYRDEALNNRFQIKGIELKSGYKDWILWISFAISCFLLCVALLGFIMWACQKGNIRCNICI

SEQ ID NO: 12672 - protein, 566 aa, synthetic construct; identical to SEQ ID NO: 12080
  REGION 1..566: note = hemagglutinin__InfluenzaA__AIL94883

SEQ ID NO: 12673 - protein, 566 aa, synthetic construct; identical to SEQ ID NO: 12065
  REGION 1..566: note = hemagglutinin__InfluenzaA__AIL94894

SEQ ID NO: 12674 - protein, 566 aa, synthetic construct; identical to SEQ ID NO: 9858
  REGION 1..566: note = hemagglutinin__InfluenzaA__AIL94906

SEQ ID NO: 12675 - protein, 566 aa, synthetic construct; identical to SEQ ID NO: 9994
  REGION 1..566: note = hemagglutinin__InfluenzaA__AIL94918

SEQ ID NO: 12676 - protein, 566 aa, synthetic construct; identical to SEQ ID NO: 9994
  REGION 1..566: note = hemagglutinin__InfluenzaA__AIL94930

SEQ ID NO: 12677 - protein, 566 aa, synthetic construct; identical to SEQ ID NO: 9994
  REGION 1..566: note = hemagglutinin__InfluenzaA__AIL94942

SEQ ID NO: 12678 - protein, 566 aa, synthetic construct; identical to SEQ ID NO: 10040
  REGION 1..566: note = hemagglutinin__InfluenzaA__AIL94954

SEQ ID NO: 12679 - protein, 566 aa, synthetic construct; identical to SEQ ID NO: 9858
  REGION 1..566: note = hemagglutinin__InfluenzaA__AIL94965

SEQ ID NO: 12680 - protein, 566 aa, synthetic construct
  REGION 1..566: note = hemagglutinin__InfluenzaA__AIM55837
MKAILVVLLYTFATATADTLCIGYHANNSTDTVDTVLEKNVTVTHSVNLLEDKHNGKLCKLRGVAPLHLGKCNIAGWILGNPECESLSTASSWSYIVETSSSDNGTCYPGDFINYEELREQLSSVSSFERFEIFPKTSSWPNHDSNKGVTAACPHAGAKSFYKNLIWLVKKGNSYPKLSQSYINDKGKEVLVLWGIHHPSTTADQQSLYQNADAYVFVGTSRYSKKFKPEIAIRPKVRDQEGRMNYYWTLVEPGDKITFEATGNLVVPRYAFTMERNAGSGIIISDTPVHDCNTTCQTPEGAINTSLPFQNIHPITIGKCPKYVKSTKLSLATGLRNVPSIQSRGLFGAIAGFIEGGWTGMVDGWYGYHHQNEQGSGYAADLKSTQNAIDKITNKVNSVIEKMNTQFTAVGKEFNHLEKRIENLNKKVDDGFLDIWTYNAELLVLLENERTLDYHDSNVKNLYEKVRNQLKNNAKEIGNGCFEFYHKCDNTCMESVKNGTYDYPKYSEEAKLNREKIDGVKLESTRIYQILAIYSTVASSLVLVVSLGAISFWMCSNGSLQCRICI

SEQ ID NO: 12681 - protein, 566 aa, synthetic construct
  REGION 1..566: note = hemagglutinin__InfluenzaA__AIM55848
MKAILVVLLYTFATANADTLCIGYHANNSTDTVDTVLEKNVTVTHSVNLLEDKHNGKLCKLRGVAPLHLGKCNIAGWILGNPECESLSTASSWSYIVETSSSDNGTCYPGDFINYEELREQLSSVSSFERFEIFPKTSSWPNHDSNKGVTAACPHAGAKSFYKNLIWLVKKGNSYPKLSQSYINDKGKEVLVLWGIHHPSTTADQQSLYQNADAYVFVGTSRYSKKFKPEIAIRPKVRDQEGRMNYYWTLVEPGDKITFEATGNLVVPRYAFTMERNAGSGIIISDTPVHDCNTTCQTPEGAINTSLPFQNIHPITIGKCPKYVKSTKLRLATGLRNIPSIQSRGLFGAIAGFIEGGWTGMVDGWYGYHHQNEQGSGYAADLKSTQNAIDKITNKVNSVIEKMNTQFTAVGKEFNHLEKRIENLNKKVDDGFLDIWTYNTELLVLLENERTLDYHDSNVKNLYEKVRNQLKNNAKEIGNGCFEFYHKCDNTCMESVKNGTYDYPKYSEEAKLNREKIDGVKLESTRIYQILAIYSTVASSLVLVVSLGAISFWMCSNGSLQCRICI

SEQ ID NO: 12682 - protein, 566 aa, synthetic construct; identical to SEQ ID NO: 10040
  REGION 1..566: note = hemagglutinin__InfluenzaA__AIM55859

SEQ ID NO: 12683 - protein, 566 aa, synthetic construct; identical to SEQ ID NO: 10040
  REGION 1..566: note = hemagglutinin__InfluenzaA__AIM55870

SEQ ID NO: 12684 - protein, 566 aa, synthetic construct; identical to SEQ ID NO: 10040
  REGION 1..566: note = hemagglutinin__InfluenzaA__AIM55881

SEQ ID NO: 12685 - protein, 566 aa, synthetic construct; identical to SEQ ID NO: 11902
  REGION 1..566: note = hemagglutinin__InfluenzaA__AIM55893

SEQ ID NO: 12686 - protein, 566 aa, synthetic construct; identical to SEQ ID NO: 11021
  REGION 1..566: note = hemagglutinin__InfluenzaA__AIM55904

SEQ ID NO: 12687 - protein, 566 aa, synthetic construct; identical to SEQ ID NO: 10040
  REGION 1..566: note = hemagglutinin__InfluenzaA__AIM55915

SEQ ID NO: 12688 - protein, 569 aa, synthetic construct
  REGION 1..569: note = hemagglutinin__InfluenzaA__AIM55926
MKAILVVLLYTFATTNADTLCIGYHANNSTDTVDTVLEKNVTVTHSVNLLEDKHNGKLCKLRGVAPLHLGKCNIAGWILGNPECESLSTASSWSYIVETSSSDNGTCYPGDFINYEELREQLSSVSSFERFEIFPKTSSWPNHDSNKGVTAACPHAGAKSFYKNLIWLVKKGNSYPKLSQSYINDKGKEVLVLWGIHHPSTTADQQSLYQNADAYVFVGTSRYSKKFKPEIAIRPKVRDQEGRMNYYWTLVEPGDKITFEATGNLVVPRYAFTMERNAGSGIIISDTPVHDCNTTCQTPEGAINTSLTSLPFQNIHPITIGKCPKYVKSTKLRLATGLRNVPSIQSRGLFGAIAGFIEGGWTGMVDGWYGYHHQNEQGSGYAADLKSTQNAIDKITNKVNSVIEKMNTQFTAVGKEFNHLEKRIENLNKKVDDGFLDIWTYNAELLVLLENERTLDYHDSNVKNLYEKVRNQLKNNAKEIGNGCFEFYHKCDNTCMESVKNGTYDYPKYSEEAKLNREKIDGVKLESTRIYQILAIYSTVASSLVLVVSLGAISFWMCSNGSLQCRICI

SEQ ID NO: 12689 - protein, 566 aa, synthetic construct; identical to SEQ ID NO: 10040
  REGION 1..566: note = hemagglutinin__InfluenzaA__AIM55937

SEQ ID NO: 12690 - protein, 566 aa, synthetic construct; identical to SEQ ID NO: 11021
  REGION 1..566: note = hemagglutinin__InfluenzaA__AIM55948

SEQ ID NO: 12691 - protein, 566 aa, synthetic construct; identical to SEQ ID NO: 11003
  REGION 1..566: note = hemagglutinin__InfluenzaA__AIM55962

SEQ ID NO: 12692 - protein, 566 aa, synthetic construct; identical to SEQ ID NO: 11021
  REGION 1..566: note = hemagglutinin__InfluenzaA__AIM55984

SEQ ID NO: 12693 - protein, 566 aa, synthetic construct; identical to SEQ ID NO: 11902
  REGION 1..566: note = hemagglutinin__InfluenzaA__AIM55995

SEQ ID NO: 12694 - protein, 566 aa, synthetic construct
  REGION 1..566: note = hemagglutinin__InfluenzaA__AIM56017
MKAILVVLLYTFATTNADTLCIGYHANNSTDTVDTVLEKNVTVTHSVNLLEDKHNGKLCKLRGVAPLHLGKCNIAGWILGNPECESLSTASSWSYIVETSSSDNGTCYPGDFINYEELREQLSSVSSFERFEIFPKTSSWPNHDSNKGVTAACPHAGAKSFYKNLIWLVKKGHSYPKLSQSYINDKGKEVLVLWGIHHPSTTADQQSLYQNADAYVFVGTSRYSKKFKPEIAIRPKVRDQEGRMNYYWTLVEPGDKITFEATGNLVVPRYAFTMERNAGSGIIISDTPVHDCNTTCQTPEGAINTSLPFQNIHPITIGKCPKYVKSTKLRLATGLRNVPSIQSRGLFGAIAGFIEGGWTGMVDGWYGYHHQNEQGSGYAADLKSTQNAIDKITNKVNSVIEKMNTQFTAVGKEFNHLEKRIENLNKKVDDGFLDIWTYNAELLVLLENERTLDYHDSNVKNLYEKVRNQLKNNAKEIGNGCFEFYHKCDNTCMESVKNGTYDYPKYSEEAKLNREKIDGVKLESTRIYQILAIYSTVASSLVLVVSLGAISFWMCSNGSLQCRICI

SEQ ID NO: 12695 - protein, 566 aa, synthetic construct; identical to SEQ ID NO: 12694
  REGION 1..566: note = hemagglutinin__InfluenzaA__AIM56028

SEQ ID NO: 12696 - protein, 566 aa, synthetic construct
  REGION 1..566: note = hemagglutinin__InfluenzaA__AIM56039
MKAILVVLLYPFATANADTLCIGYHANNSTDTVDTVLEKNVTVTHSVNLLEDKHNGKLCKLRGVAPLHLGKCNIAGWILGNPECESLSTASSWSYIVEASSSDNGTCYPGDFINYEELREQLSSVSSFERFEIFPKTSSWPNHDSNKGVTAACPHAGAKSFYKNLIWLVKKGNSYPKLSQSYINDKGKEVLVLWGIHHPSTTADQQSLYQNADAYVFVGTSRYSKKFKPEIAIRPKVRDQEGRMNYYWTLVEPGDKITFEATGNLVVPRYAFTMERNAGSGIIISDTPVHDCNTTCQTPEGAINTSLPFQNIHPITIGKCPKYVKSTKLRLATGLRNVPSIQSRGLFGAIAGFIEGGWTGMVDGWYGYHHQNEQGSGYAADLKSTQNAIDKITNKVNSVIEKMNTQFTAVGKEFNHLEKRIENLNKKVDDGFLDIWTYNAELLVLLENERTLDYHDSNVKNLYEKVRNQLKNNAKEIGNGCFEFYHKCDNTCMESVKNGTYDYPKYSEEAKLNREKIDGVKLESTRIYQILAIYSTVASSLVLVVSLGAISFWMCSNGSLQCRICI

SEQ ID NO: 12697 - protein, 566 aa, synthetic construct
  REGION 1..566: note = hemagglutinin__InfluenzaA__AIM56050
MKAILVVLLYTFATTNADTLCIGYHANNSTDTVDTVLEKNVTVTHSVNLLEDKHNGKLCKLRGVAPLHLGKCNIAGWILGNPECESLSTASSWSYIVETSSSDNGTCYPGDFINYEELREQLSSVSSFERFEIFPKTSSWPNHDSNKGVTAACPHAGAKSFYKNLIWLVKKGNSYPKLSQSYINDKGKEVLVLWGIHHPSTTADQQSLYQNADAYVFVGTSRYSKKFKPEIAIRPKVRDQEGRMNYYWTLVEPGDKITFEATGNLVVPRYAFTMERNAGSGIIISDTPVHDCNTTCQTPEGAINTSLPFQNIHPITIGKCPKYVKSTKLRLATGLRNVPSIQSRGLFGAIAGFIEGGWTGMVDGWYGYHHQNEQGSGYAADLKSTQNAIDKITNKVNSVIEKMNTQFTAVGKEFNHLEKRIENLNKKVDDGFLDIWTYNAELLVLLENERTLDYHDSNVKNLYEKVRNQLKNNAKEIGNGCFEFYHKCDNTCMESVKNGTYDYPKYSEEAKLNRGKIDGVKLESTRIYQILAIYSTVASSLVLVVSLGAISFWMCSNGSLQCRICI

SEQ ID NO: 12698 - protein, 566 aa, synthetic construct; identical to SEQ ID NO: 10040
  REGION 1..566: note = hemagglutinin__InfluenzaA__AIM56061

SEQ ID NO: 12699 - protein, 566 aa, synthetic construct; identical to SEQ ID NO: 10040
  REGION 1..566: note = hemagglutinin__InfluenzaA__AIM56072

SEQ ID NO: 12700 - protein, 566 aa, synthetic construct; identical to SEQ ID NO: 11893
  REGION 1..566: note = hemagglutinin__InfluenzaA__AIM56083

SEQ ID NO: 12701 - protein, 566 aa, synthetic construct; identical to SEQ ID NO: 10040
  REGION 1..566: note = hemagglutinin__InfluenzaA__AIM56105

SEQ ID NO: 12702 - protein, 566 aa, synthetic construct; identical to SEQ ID NO: 10040
  REGION 1..566: note = hemagglutinin__InfluenzaA__AIM56116

SEQ ID NO: 12703 - protein, 566 aa, synthetic construct
  REGION 1..566: note = hemagglutinin__InfluenzaA__AIM56127
MKAILVVLLYTFATANADTLCIGYHANNSTDTVDTVLEKNVTVTHSVNLLEDKHNGKLCKLRGVAPLHLGKCNIAGWILGNPECESLSTASSWSYIVETSSSDNGTCYPGDFINYEELREQLSSVSSFERFEIFPKASSWPNHDSNKGVTAACPHAGAKSFYKNLIWLVKKGNSYPKLSQSYINDKGKEVLVLWGIHHPSTTADQQSLYQNADAYVFVGTSRYSKKFKPEIAIRPKVRDQEGRMNYYWTLVEPGDKITFEATGNLVVPRYAFTMERNAGSGIIISDTPVHDCNTTCQTPEGAINTSLPFQNIHPITIGKCPKYVKSTKLRLATGLRNIPSIQSRGLFGAIAGFIEGGWTGMVDGWYGYHHQNEQGSGYAADLKSTQNAIDKITNKVNSVIEKMNTQFTAVGKEFNHLEKRIENLNKKVDDGFLDIWTYNAELLVLLENERTLDYHDSNVKNLYEKVRNQLKNNAKEIGNGCFEFYHKCDNTCMESVKNGTYDYPKYSEEAKLNREKIDGVKLESTRIYQILAIYSTVASSLVLVVSLGAISFWMCSNGSLQCRICI

SEQ ID NO: 12704 - protein, 566 aa, synthetic construct; identical to SEQ ID NO: 10040
  REGION 1..566: note = hemagglutinin__InfluenzaA__AIM56138

SEQ ID NO: 12705 - protein, 566 aa, synthetic construct; identical to SEQ ID NO: 10040
  REGION 1..566: note = hemagglutinin__InfluenzaA__AIM56149

SEQ ID NO: 12706 - protein, 566 aa, synthetic construct; identical to SEQ ID NO: 11893
  REGION 1..566: note = hemagglutinin__InfluenzaA__AIM56160

SEQ ID NO: 12707 - protein, 566 aa, synthetic construct; identical to SEQ ID NO: 10040
  REGION 1..566: note = hemagglutinin__InfluenzaA__AIM56171

SEQ ID NO: 12708 - protein, 566 aa, synthetic construct
  REGION 1..566: note = hemagglutinin__InfluenzaA__AIM56182
MKAILVVLLYTFATANADTLCIGYHANNSTDTVDTVLEKNVTVTHSVNLLEDKHNGKLCKLRGVAPLHLGKCNIAGWILGNPECESLSTASSWSYIVETSSSDNGTCYPGDFINYEELREQLSSVSSFERFEIFPKASSWPNHDSNKGVTAACPHAGAKSFYKNLIWLVKKGNSYPKLSQSYINDKGKEVLVLWGIHHPSTTADQQSLYQNADAYVFVGTSRYSKKFKPEIAIRPKVRDQEGRMNYYWTLVEPGDKITFEATGNLVVPRYAFTMERNAGSGIIISDTPVHDCNTTCQTPEGAINTSLPFQNIHPITIGKCPKYVKSTKLRLATGLRNIPSIQSRGLFGAIAGFIEGGWTGMVDGWYGYHHQNEQGSGYAADLKSTQNAIDKITNKVNSVIEKMNTQFTAVGKEFNHLEKRIENLNKKVDDGFLDIWTYNAELLVLLENERTLDYHDSNVKNLYEKVRNQLKNNAKEIGNGCFEFYHKCDNTCMESVKNGTYDYPKYSEEAKLNKEKIDGVKLESTRIYQILAIYSTVASSLVLVVSLGAISFWMCSNGSLQCRICI

SEQ ID NO: 12709 - protein, 566 aa, synthetic construct
  REGION 1..566: note = hemagglutinin__InfluenzaA__AIM56193
MKAILVVLLYTFATANADTLCIGYHANNSTDTVDTVLEKNVTVTHSVNLLEDKHNGKLCKLRGVAPLHLGKCNIAGWILGNPECESLSTASSWSYIVETSSSDNGTCYPGDFINYEELREQLSSVSSFERFEIFPKTSSWPNHDSNKGVTAACPHAGAKSFYKNLIWLVKKGNSYPKLSQSYINDKGKEVLVLWGIHHPSTTADQQSLYQNADAYVFVGTSRYSKKFKPEIAIRPKVRDQEGRMNYYWTLVEPGDKVTFEATGNLVVPRYAFTMERNAGSGIIISDTPVHDCNTTCQTPEGAINTSLPFQNIHPITIGKCPKYVKSTKLRLATGLRNVPSIQSRGLFGAIAGFIEGGWTGMVDGWYGYHHQNEQGSGYAADLKSTQNAIDKITNKVNSVIEKMNTQFTAVGKEFNHLEKRIENLNKKVDDGFLDIWTYNAELLVLLENERTLDYHDSNVKNLYEKVRNQLKNNAKEIGNGCFEFYHKCDNTCMESVKNGTYDYPKYSEEAKLNREKIDGVKLESTRIYQILAIYSTVASSLVLVVSLGAISFWMCSNGSLQCRICI

SEQ ID NO: 12710 - protein, 566 aa, synthetic construct; identical to SEQ ID NO: 10040
  REGION 1..566: note = hemagglutinin__InfluenzaA__AIM56204

SEQ ID NO: 12711 - protein, 566 aa, synthetic construct; identical to SEQ ID NO: 10040
  REGION 1..566: note = hemagglutinin__InfluenzaA__AIM56215

SEQ ID NO: 12712 - protein, 566 aa, synthetic construct; identical to SEQ ID NO: 10040
  REGION 1..566: note = hemagglutinin__InfluenzaA__AIM56226

SEQ ID NO: 12713 - protein, 566 aa, synthetic construct; identical to SEQ ID NO: 12451
  REGION 1..566: note = hemagglutinin__InfluenzaA__AIM56237

SEQ ID NO: 12714 - protein, 566 aa, synthetic construct; identical to SEQ ID NO: 10040
  REGION 1..566: note = hemagglutinin__InfluenzaA__AIM56259

SEQ ID NO: 12715 - protein, 566 aa, synthetic construct
  REGION 1..566: note = hemagglutinin__InfluenzaA__AIM56270
MKAILVVLLYTFATANADTLCIGYHANNSTDTVDTVLEKNVTVTHSVNLLEDKHNGKLCKLRGVAPLHLGKCNIAGWILGNPECESLSTASSWSYIVETSSSDNGTCYPGDFINYEELREQLSSVSSFERFEIFPKTSSWPNHDSNKGVTAACPHAGAKSFYKNLIWLVKKGNSYPKLSQSYINDKGKEVLVLWGIHHPSTTADQQSLYQNADAYVFVGTSRYSKKFKPEIAIRPKVRDQEGRMNYYWTLVEPGDKITFEATGNLVVPRYAFTMERNAGSGIIISDTPVHDCNTTCQTPEGAVNTSLPFQNIHPITIGKCPKYVKSTKLRLATGLRNVPSIQSRGLFGAIAGFIEGGWTGMVDGWYGYHHQNEQGSGYAADLKSTQNAIDKITNKVNSVIEKMNTQFTAVGKEFNHLEKRIENLNKKVDDGFLDIWTYNAELLVLLENERTLDYHDSNVKNLYEKVRNQLKNNAKEIGNGCFEFYHKCDNTCMESVKNGTYDYPKYSEEAKLNREKIDGVKLESTRIYQILAIYSTVASSLVLVVSLGAISFWMCSNGSLQCRICI

SEQ ID NO: 12716 - protein, 566 aa, synthetic construct; identical to SEQ ID NO: 10040
  REGION 1..566: note = hemagglutinin__InfluenzaA__AIM56281

SEQ ID NO: 12717 - protein, 566 aa, synthetic construct
  REGION 1..566: note = hemagglutinin__InfluenzaA__AIM56292
MKAILVVLLYTLATANADTLCIGYHANNSTDTVDTVLEKNVTVTHSVNLLEDKHNGKLCKLRGVAPLHLGKCNIAGWILGNPECESLSTASSWSYIVETSSSDNGTCYPGDFINYEELREQLSSVSSFERFEIFPKTSSWPNHDSNKGVTAACPHAGAKSFYKNLIWLVKKGNSYPKLSQSYINDKGKEILVLWGIHHPSTTADQQSLYQNADAYVFVGTSRYSKKFKPEIAIRPKVRDQEGRMNYYWTLVEPGDKITFEATGNLVVPRYAFTMERNAGSGIIISDTPVHDCNTTCQTPEGAINTSLPFQNIHPITIGKCPKYVKSTKLRLATGLRNVPSIQSRGLFGAIAGFIEGGWTGMVDGWYGYHHQNEQGSGYAADLKSTQNAIDKITNKVNSVIEKMNTQFTAVGKEFNHLEKRIENLNKKVDDGFLDIWTYNAELLVLLENERTLDYHDSNVKNLYEKVRNQLKNNAKEIGNGCFEFYHKCDNTCMESVKNGTYDYPKYSEEAKLNREKIDGVKLESTRIYQILAIYSTVASSLVLVVSLGAISFWMCSNGSLQCRICI

SEQ ID NO: 12718 - protein, 566 aa, synthetic construct
  REGION 1..566: note = hemagglutinin__InfluenzaA__AIM56303
MKAILVVLLYTLATANADTLCIGYHANNSTDTVDTVLEKNVTVTHSVNLLEDKHNGKLCKLRGVAPLHLGKCNIAGWILGNPECESLSTASSWSYIVETSSSDNGTCYPGDFINYEELREQLSSVSSFERFEIFPKTSSWPNHDSNKGVTAACPHAGAKSFYKNLIWLVKKGNSYPKLSQSYINDKGKEVLVLWGIHHPSTTADQQSLYQNADAYVFVGTSRYSKKFKPEIAIRPKVRDQEGRMNYYWTLVEPGDKITFEATGNLVVPRYAFTMERNAGSGIIISDTQVHDCNTTCQTPEGAINTSLPFQNIHPITIGKCPKYVKSTKLRLATGLRNVPSIQSRGLFGAIAGFIEGGWTGMVDGWYGYHHQNEQGSGYAADLKSTQNAIDKITNKVNSVIEKMNTQFTAVGKEFNHLEKRIENLNKKVDDGFLDIWTYNAELLVLLENERTLDYHDSNVKNLYEKVRNQLKNNAKEIGNGCFEFYHKCDNTCMESVKNGTYDYPKYSEEAKLNREKIDGVKLESTRIYQILAIYSTVASSLVLVVSLGAISFWMCSNGSLQCRICI

SEQ ID NO: 12719 - protein, 566 aa, synthetic construct
  REGION 1..566: note = hemagglutinin__InfluenzaA__AIM56314
MKAILVVLLYTFATANADTLCIGYHANNSTDTVDTVLEKNVTVTHSVNLLEDKHNGKLCKLRGVAPLHLGKCNIAGWILGNPECESLSTASSWSYIVETSSSDNGTCYPGDFINYEELREQLSSVSSFERFEIFPKTSSWPNHDSNKGVTAACPHAGAKSFYKNLIWLVKKGNSYPKLSQSYINDKGKEVLVLWGIHHPSTTADQQSLYQNADAYVFVGTSRYSKKFKPEIAIRPKVRDQEGRMNYYWTLVEPGDKITFEATGNLVVPRYAFTMERNAGSGIIISDTPVHDCNTTCQTPEGAINTSLPFQNIHPITIGKCPKYVKSTKLRLATGLRNVPSIQSRGLFGAIAGFIEGGWTGMVDGWYGYHHQNEQGSGYAADLKSTQNAIDKITNKVNSVIEKMNTQFTAVGKEFNHLEKRIENLNKKVDDGFLDIWTYNAELLVLLENERTLDYHDSNVKKLYEKVRNQLKNNAKEIGNGCFEFYHKCDNTCMESVKNGTYDYPKYSEEAKLNREKIDGVKLESTRIYQILAIYSTVASSLVLVVSLGAISFWMCSNGSLQCRICI

SEQ ID NO: 12720 - protein, 566 aa, synthetic construct; identical to SEQ ID NO: 10040
  REGION 1..566: note = hemagglutinin__InfluenzaA__AIM56325

SEQ ID NO: 12721 - protein, 566 aa, synthetic construct
  REGION 1..566: note = hemagglutinin__InfluenzaA__AIM56336
MKAILVVLLYTFATANADTLCIGYHANNSTDTVDTVLEKNVTVTHSVNLLEDKHNGKLCKLRGVAPLHLGKCNIAGWILGNPECESLSTASSWSYIVETSSSDNGTCYPGDFINYEELREQLSSVSSFERFEIFPKTSSWPNHDSNKGVTAACPHAGAKSFYKNLIWLVKKGNSYPKLSQSYINDKGKEVLVLWGIHHPSTTADQQSLYQNADAYVFVGTSRYSKKFKPEIAIRPKVRDQEGRMNYYWTLVEPGDKITFEATGNLVVPRYAFTMERNAGSGIIISDTPVHDCNTTCQTPEGAINTSLPFQNIHPITIGKCPKYVKSTKLRLATGLRNIPSIQSRGLFGAIAGFIEGGWTGMVDGWYGYHHQNEQGSGYAADLKSTQNAIDKITNKVNSVIEKMNTQFTAVGKEFNHLEKRIENLNKKVDDGFLDIWTYNAELLVLLENERTLDYHDSNVKNLYEKIRNQLKNNAKEIGNGCFEFYHKCDNMCMESVKNGTYDYPKYSEEAKLNREKIDGVKLESTRIYQILAIYSTVASSLVLVVSLGAISFWMCSNGSLQCRICI

SEQ ID NO: 12722 - protein, 566 aa, synthetic construct
  REGION 1..566: note = hemagglutinin__InfluenzaA__AIM56347
MKAILVVLLYTFATANADTLCIGYHANNSTDTVDTVLEKNVTVTHSVNLLEDKHNGKLCKLRGVAPLHLGKCNIAGWILGNPECESLSTTSSWSYIVETSSSDNGTCYPGDFINYEELREQLSSVSSFERFEIFPKTSSWPNHDSNKGVTAACPHAGAKSFYKNLIWLVKKGNSYPKLSQSYINDKGKEVLVLWGIHHPSTTADQQSLYQNADAYVFVGTSRYSKKFKPEIAIRPKVRDQEGRMNYYWTLVEPGDKITFEATGNLVVPRYAFTMERNAGSGIIISDTPVHDCNTTCQTPEGAINTSLPFQNIHPITIGKCPKYVKSTKLRLATGLRNVPSIQSRGLFGAIAGFIEGGWTGMVDGWYGYHHQNEQGSGYAADLKSTQNAIDKITNKVNSVIEKMNTQFTAVGKEFNHLEKRIENLNKKVDDGFLDIWTYNAELLVLLENERTLDYHDSNVKNLYEKVRNQLKNNAKEIGNGCFEFYHKCDNTCMESVKNGTYDYPKYSEEAKLNREKIDGVKLESTRIYQILAIYSTVASSLVLVVSLGAISFWMCSNGSLQCRICI

SEQ ID NO: 12723 - protein, 566 aa, synthetic construct
  REGION 1..566: note = hemagglutinin__InfluenzaA__AIM56358
MKAILVVLLYTFATANADTLCIGYHANNSTDTVDTVLEKNVTVTHSVNLLEDKHNGKLCKLRGVAPLHLGKCNIAGWILGNPECESLSTASSWSYIVETSSSDNGTCYPGDFINYEELREQLSSVSSFERFEIFPKTSSWPNHDSNKGVTAACPHAGAKSFYKNLIWLVKKGNSYPKLSQSYINDKGKEVLVLWGIHHPSTTADQQSLYQNADAYVFVGTSRYSKKFKPEIAIRPKVRDQEGRMNYYWTLVKPGDKITFEATGNLVVPRYAFTMERNAGSGIIISDTPVHDCNTTCQTPEGAINTSLPFQNIHPITIGKCPKYVKSTKLRLATGLRNVPSIQSRGLFGAIAGFIEGGWTGMVDGWYGYHHQNEQGSGYAADLKSTQNAIDKITNKVNSVIEKMNTQFTAVGKEFNHLEKRIENLNKKVDDGFLDIWTYNAELLVLLENERTLDYHDSNVKNLYEKVRNQLKNNAKEIGNGCFEFYHKCDNTCMESVKNGTYDYPKYSEEAKLNREKIDGVKLESTRIYQILAIYSTVASSLVLVVSLGAISFWMCSNGSLQCRICI

SEQ ID NO: 12724 - protein, 566 aa, synthetic construct; identical to SEQ ID NO: 10040
  REGION 1..566: note = hemagglutinin__InfluenzaA__AIM56369

SEQ ID NO: 12725 - protein, 566 aa, synthetic construct
  REGION 1..566: note = hemagglutinin__InfluenzaA__AIM56380
MKAILVVLLYTFATANADTLCIGYHANNSTDTVDTVLEKNVTVTHSVNLLEDKHNGKLCKLRGVAPLHLGKCNIAGWILGNPECESLSTASSWSYIVETSSSDNGTCYPGDFINYEELREQLSSVSSFERFEIFPKTSSWPNHDSNKGVTAACPHAGAKSFYKNLIWLVKKGNSYPKLSQSYINDKGKEVLVLWGIHHPSTTADQQSLYQNADAYVFVGTSRYSKKFKPEIAIRPKVRDQEGRMNYYWTLVEPGDKITFEATGNLVVPRYAFTMERNAGSGIIISDTPVHDCNTTCQTPEGAINTSLPFQNIHPITIGKCPKYVKSTKLRLATGLRNVPSIQSRGLFGAIAGFIEGGWTGMVDGWYGYHHQNEQGSGYAADLKSTQNAIDKITNKVNSVIEKMNTQFTAVGKEFNHLEKRIENLNKKVDDGFLDIWTYNAELLVLLENERTLDYHDSNVKNLYEKVRNQLKNNAKEIGNGCFEFYHKCDNTCMESVKNGTYDYPKYSEEAKLSREKIDGVKLESTRIYQILAIYSTVASSLVLVVSLGAISFWMCSNGSLQCRICI

SEQ ID NO: 12726 - protein, 566 aa, synthetic construct; identical to SEQ ID NO: 10040
  REGION 1..566: note = hemagglutinin__InfluenzaA__AIM56391

SEQ ID NO: 12727 - protein, 566 aa, synthetic construct; identical to SEQ ID NO: 10040
  REGION 1..566: note = hemagglutinin__InfluenzaA__AIM56402

SEQ ID NO: 12728 - protein, 566 aa, synthetic construct; identical to SEQ ID NO: 11893
  REGION 1..566: note = hemagglutinin__InfluenzaA__AIM56413

SEQ ID NO: 12729 - protein, 566 aa, synthetic construct; identical to SEQ ID NO: 10040
  REGION 1..566: note = hemagglutinin__InfluenzaA__AIM56425

SEQ ID NO: 12730 - protein, 566 aa, synthetic construct; identical to SEQ ID NO: 10040
  REGION 1..566: note = hemagglutinin__InfluenzaA__AIM56436

SEQ ID NO: 12731 - protein, 566 aa, synthetic construct; identical to SEQ ID NO: 10040
  REGION 1..566: note = hemagglutinin__InfluenzaA__AIM56447

SEQ ID NO: 12732 - protein, 566 aa, synthetic construct; identical to SEQ ID NO: 10040
  REGION 1..566: note = hemagglutinin__InfluenzaA__AIM56469

SEQ ID NO: 12733 - protein, 566 aa, synthetic construct
  REGION 1..566: note = hemagglutinin__InfluenzaA__AIM56480
MKAILVVLLYTFATTNADTLCIGYHANNSTDTVDTVLEKNVTVTHSVNLLEDKHNGKLCKLRGVAPLHLGKCNIAGWILGNPECESLSTASSWSYIVETSSSDNGTCYPGDFINYEELREQLSSVSSFERFEIFPKTSSWPNHDSNKGVTAACPHAGAKSFYKNLIWLVKKGNSYPKLSQSYINDKGKEVLVLWGIHHPSTTADQQSLYQNADAYVFVGTSRYSKKFKPEIAIRPKVRDQEGRMNYYWTLVEPGDKITFEATGNLVVPRYAFTMERNAGSGIIISDTPVHDCNTTCQTPEGAINTSLPFQNIHPITLGKCPKYVKSTKLRLATGLRNVPSIQSRGLFGAIAGFIEGGWTGMVDGWYGYHHQNEQGSGYAADLKSTQNAIDKITNKVNSVIEKMNTQFTAVGKEFNHLEKRIENLNKKVDDGFLDIWTYNAELLVLLENERTLDYHDSNVKNLYEKVRNQLKNNAKEIGNGCFEFYHKCDNTCMESVKNGTYDYPKYSEEAKLNREKIDGVKLESTRIYQILAIYSTVASSLVLVVSLGAISFWMCSNGSLQCRICI

SEQ ID NO: 12734 - protein, 566 aa, synthetic construct; identical to SEQ ID NO: 10040
  REGION 1..566: note = hemagglutinin__InfluenzaA__AIM56491

SEQ ID NO: 12735 - protein, 569 aa, synthetic construct
  REGION 1..569: note = hemagglutinin__InfluenzaA__AIM56502
MKAILVVLLYTFATANADTLCIGYHANNSTDTVDTVLEKNVTVTHSVNLLEDKHNGKLCKLRGVAPLHLGKCNIAGWILGNPECESLSTASSWSYIVETSSSDNGTCYPGDFINYEELREQLSSVSSFERFEIFPKASSWPNHDSNKGVTAACPHAGAKSFYKNLIWLVKKGNSYPKLSQSYINDKGKEVLVLWGIHHPSTTADQQSLYQNADAYVFVGTSRYSKKFKPEIAIRPKVRDQEGRMNYYWTLVEPGDKITFEATGNLVVPRYAFTMERNAGSGIIISDTPVHDCNTTCQTPEGAINTSLTSLPFQNIHPITIGKCPKYVKSTKLRLATGLRNIPSIQSRGLFGAIAGFIEGGWTGMVDGWYGYHHQNEQGSGYAADLKSTQNAIDKITNKVNSVIEKMNTQFTAVGKEFNHLEKRIENLNKKVDDGFLDIWTYNAELLVLLENERTLDYHDSNVKNLYEKVRNQLKNNAKEIGNGCFEFYHKCDNTCMESVKNGTYDYPKYSEEAKLNREKIDGVKLESTRIYQILAIYSTVASSLVLVVSLGAISFWMCSNGSLQCRICI

SEQ ID NO: 12736 - protein, 566 aa, synthetic construct; identical to SEQ ID NO: 10040
  REGION 1..566: note = hemagglutinin__InfluenzaA__AIM56513

SEQ ID NO: 12737 - protein, 566 aa, synthetic construct; identical to SEQ ID NO: 11985
  REGION 1..566: note = hemagglutinin__InfluenzaA__AIM56524

SEQ ID NO: 12738 - protein, 566 aa, synthetic construct; identical to SEQ ID NO: 10040
  REGION 1..566: note = hemagglutinin__InfluenzaA__AIM56535

SEQ ID NO: 12739 - protein, 566 aa, synthetic construct; identical to SEQ ID NO: 10040
  REGION 1..566: note = hemagglutinin__InfluenzaA__AIM56546

SEQ ID NO: 12740 - protein, 566 aa, synthetic construct; identical to SEQ ID NO: 11893
  REGION 1..566: note = hemagglutinin__InfluenzaA__AIM56557

SEQ ID NO: 12741 - protein, 566 aa, synthetic construct
  REGION 1..566: note = hemagglutinin__InfluenzaA__AIM56568
MKAILVVLLYTFATANADTLCIGYHANNSTDTVDTVLEKNVTVTHSVNLLEDKHNGKLCKLRGVAPLHLGKCNIAGWILGNPECESLSTASSWSYIVETSSSDNGTCYPGDFINYEELREQLSSVSSFERFEIFSKTSSWPNHDSNKGVTAACPHAGAKSFYKNLIWLVKKGNSYPKLSQSYINDKGKEVLVLWGIHHPSTTADQQSLYQNADAYVFVGTSRYSKKFKPEIAIRPKVRDQEGRMNYYWTLVEPGDKITFEATGNLVVPRYAFTMERNAGSGIIISDTPVHDCNTTCQTPEGAINTSLPFQNIHPITIGKCPKYVKSTKLRLATGLRNVPSIQSRGLFGAIAGFIEGGWTGMVDGWYGYHHQNEQGSGYAADLKSTQNAIDKITNKVNSVIEKMNTQFTAVGKEFNHLEKRIENLNKKVDDGFLDIWTYNAELLVLLENERTLDYHDSNVKNLYEKVRNQLKNNAKEIGNGCFEFYHKCDNTCMESVKNGTYDYPKYSEEAKLNREKIDGVKLESTRIYQILAIYSTVASSLVLVVSLGAISFWMCSNGSLQCRICI

SEQ ID NO: 12742 - protein, 566 aa, synthetic construct
  REGION 1..566: note = hemagglutinin__InfluenzaA__AIM56579
MKAILVVLLYTFATTNADTLCIGYHANNSTDTVDTVLEKNVTVTHSVNLLEDEHNGKLCKLRGVAPLHLGKCNIAGWILGNPECESLSTASSWSYIVETSSSDNGTCYPGDFINYEELREQLSSVSSFERFEIFPKTSSWPNHDSNKGVTAACPHAGAKSFYKNLIWLVKKGNSYPKLSQSYINDKGKEVLVLWGIHHPSTTADQQSLYQNTDAYVFVGTSRYSKKFKPEIAIRPKVRDQEGRMSYYWTLVEPGDKITFEATGNLVVPRYAFTMERNAGSGIIISDTPVHDCNTTCQTPEGAINTSLPFQNIHPITIGKCPKYVKSTKLRLATGLRNVPSIQSRGLFGAIAGFIEGGWTGMVDGWYGYHHQNEQGSGYAADLKSTQNAIDKITNKVNSVIEKMNTQFTAVGKEFNHLEKRIENLNKKVDDGFLDIWTYNAELLVLLENERTLDYHDSNVKNLYEKVRNQLKNNAKEIGNGCFEFYHKCDNTCMESVKNGTYDYPKYSEEAKLNREKIDGVKLESTRIYQILAIYSTVASSLVLVVSLGAISFWMCSNGSLQCRICI

SEQ ID NO: 12743 - protein, 569 aa, synthetic construct
  REGION 1..569: note = hemagglutinin__InfluenzaA__AIM56590
MKAILVVLLYTFATANADTLCIGYHANNSTDTVDTVLEKNVTVTHSVNLLEDKHNGKLCKLRGVAPLHLGKCNIAGWILGNPECESLSTASSWSYIVETSSSDNGTCYPGDFINYEELREQLSSVSSFERFEIFPKTSSWPNHDSNKGVTAACPHAGAKSFYKNLIWLVKKGNSYPKLSQSYINDKGKEVLVLWGIHHPSTTADQQSLYQNADAYVFVGTSRYSKKFKPEIAIRPKVRDQEGRMNYYWTLVEPGDKITFEATGNLVVPRYAFTMERNAGSGIIISDTPVHDCNTTCQTPEGAINTSLTSLPFQNIHPITIGKCPKYVKSTKLRLATGLRNVPSIQSRGLFGAIAGFIEGGWTGMVDGWYGYHHQNEQGSGYAADLKSTQNAIDKITNKVNSVIEKMNTQFTAVGKEFNHLEKRIENLNKKVDDGFLDIWTYNAELLVLLENERTLDYHDSNVKNLYEKVRNQLKNNAKEIGNGCFEFYHKCDDTCMESVKNGTYDYPKYSEEAKLNREKIDGVKLESTRIYQILAIYSTVASSLVLVVSLGAISFWMCSNGSLQCRICI

SEQ ID NO: 12744 - protein, 569 aa, synthetic construct
  REGION 1..569: note = hemagglutinin__InfluenzaA__AIM56601
MKAILVVLLYTFATANADTLCIGYHANNSTDTVDTVLEKNVTVTHSVNLLEDKHNGKLCKLRGVAPLHLGKCNIAGWILGNPECESLSTASSWSYIVETSSSDNGTCYPGDFINYEELREQLSSVSSFERFEIFPKTSSWPNHDSNKGVTAACPHAGAKSFYKNLIWLVKKGNSYPKLSQSYINDKGKEVLVLWGIHHPSTTADQQSLYQNADAYVFVGTSRYSKKFKPEIAIRPKVRDQEGRMNYYWTLVEPGDKITFEATGNLVVPRYAFTMERNAGSGIIISDTPVHDCNTTCQTPEGAINTSLTSLPFQNIHPITIGKCPKYVKSTKLRLATGLRNVPSIQSRGLFGAIAGFIEGGWTGMVDGWYGYHHQNEQGSGYAADLKSTQNAIDKITNKVNSVIEKMNTQFTAVGKEFNHLEKRIENLNKKVDDGFLDIWTYNAELLVLLENERTLDYHDSNVKNLYEKVRNQLKNNAKEIGNGCFEFYHKCDNTCMESVKNGTYDYPKYSEEAKLNREKIDGVKLESTRIYQILAIYSTVASSLVLVVSLGAISFWMCSNGSLQCRICI

SEQ ID NO: 12745 - protein, 569 aa, synthetic construct
  REGION 1..569: note = hemagglutinin__InfluenzaA__AIM56612
MKAILVVLLYTFATANADTLCIGYHANNSTDTVDTVLEKNVTVTHSVNLLEDKHNGKLCKLRGVAPLHLGKCNIAGWILGNPECESLSTASSWSYIVETSSSDNGTCYPGDFINYEELREQLSSVSSFERFEIFPKTSSWPNHDSNKGVTAACPHAGAKSFYKNLIWLVKKGNSYPKLSQSYINDKGKEVLVLWGIHHPSTTADQQSLYQNADAYVFVGTSRYSKKFKPEIAIRPKVRDQEGRMNYYWTLVEPGDKITFEATGNLVVPRYAFTMERNTGSGIIISDTPVHDCNTTCQTPEGAINTSLTSLPFQNIHPITIGKCPKYVKSTKLRLATGLRNVPSIQSRGLFGAIAGFIEGGWTGMVDGWYGYHHQNEQGSGYAADLKSTQNAIDKITNKVNSVIEKMNTQFTAVGKEFNHLEKRIENLNKKVDDGFLDIWTYNAELLVLLENERTLDYHDSNVKNLYEKVRNQLKNNAKEIGNGCFEFYHKCDNTCMESVKNGTYDYPKYSEEAKLNREKIDGVKLESTRIYQILAIYSTVASSLVLVVSLGAISFWMCSNGSLQCRICI

SEQ ID NO: 12746 - protein, 566 aa, synthetic construct
  REGION 1..566: note = hemagglutinin__InfluenzaA__AIM56623
MKAILVVLLYTFATANADTLCIGYHANNSTDTVDTVLEKNVTVTHSVNLLEDKHNGKLCKLRGVAPLHLGKCNIAGWILGNPECESLSTASSWSYIVETSSSDNGTCYPGDFINYEELREQLSSVSSFERFEIFPKTSSWPNHDSNKGVTAACPHAGAKSFYKNLTWLVKKGNSYPKLSQSYINDKGKEVLVLWGIHHPSTTADQQSLYQNADAYVFVGTSRYSKKFKPEIAIRPKVRDQEGRMNYYWTLVEPGDKITFEATGNLVVPRYAFTMERNAGSGIIISDTPVHDCNTTCQTPEGAINTSLPFQNIHPITIGKCPKYVKSTKLRLATGLRNVPSIQSRGLFGAIAGFIEGGWTGMVDGWYGYHHQNEQGSGYAADLKSTQNAIDKITNKVNSVIEKMNTQFTAVGKEFNHLEKRIENLNKKVDDGFLDIWTYNAELLVLLENERTLDYHDSNVKNLYEKVRNQLKNNAKEIGNGCFEFYHKCDNTCMESVKNGTYDYPKYSEEAKLNREKIDGVKLESTRIYQILAIYSTVASSLVLVVSLGAISFWMCSNGSLQCRICI

SEQ ID NO: 12747 - protein, 566 aa, synthetic construct
  REGION 1..566: note = hemagglutinin__InfluenzaA__AIM56634
MKAILVVLLYTFATANADTLCIGYHANNSTDTVDTVLEKNVTVTHSVNLLEDKHNGKLCKLRGVAPLHLGKCNIAGWILGNPECESLSTANSWSYIVETSSSDNGTCYPGDFINYEELREQLSSVSSFERFEIFPKTSSWPNHDSNKGVTAACPHAGAKSFYKNLIWLVKKGNSYPKLSQSYINDKGKEVLVLWGIHHPSTTADQQSLYQNADAYVFVGTSRYSKKFKPEIAIRPKVRDQEGRMNYYWTLVEPGDKITFEATGNLVVPRYAFTMERNAGSGIIISDTPVHDCNTTCQTPEGAINTSLPFQNIHPITIGKCPKYVKSTKLRLATGLRNVPSIQSRGLFGAIAGFIEGGWTGMVDGWYGYHHQNEQGSGYAADLKSTQNAIDKITNKVNSVIEKMNTQFTAVGKEFNHLEKRIENLNKKVDDGFLDIWTYNAELLVLLENERTLDYHDSNVKNLYEKVRNQLKNNAKEIGNGCFEFYHKCDNTCMESVKNGTYDYPKYSEEAKLNREKIDGVKLESTRIYQILAIYSTVASSLVLVVSLGAISFWMCSNGSLQCRICI

SEQ ID NO: 12748 - protein, 569 aa, synthetic construct
  REGION 1..569: note = hemagglutinin__InfluenzaA__AIM56645
MKAILVVLLYTFATANADTLCIGYHANNSTDTVDTVLEKNVTVTHSVNLLEDKHNGKLCKLRGVAPLHLGKCNIAGWILGNPECESLSTASSWSYIVETSSSDNGTCYPGDFINYEELREQLSSVSSFERFEIFPKTSSWPNHDSNKGVTAACPHAGAKSFYKNLIWLVKKGNSYPKLSQSYINDKGKEVLVLWGIHHPSTTADQQSLYQNADAYVFVGTSRYSKKFKPEIAIRPKVRDQEGRMNYYWTLVEPGDKITFEATGNLVVPRYAFTMERNAGSGIIISDTPVHDCNTTCQTPEGAINTSLTSLPFQNIHPITIGKCPKYVKSTKLRLATGLRNVPSIQSRGLFGAIAGFIEGGWTGMVDGWYGYHHQNEQGSGYAADQKSTQNAIDKITNKVNSVIEKMNTQFTAVGKEFNHLEKRIENLNKKVDDGFLDIWTYNAELLVLLENERTLDYHDSNVKNLYEKVRNQLKNNAKEIGNGCFEFYHKCDNTCMESVKNGTYDYPKYSEEAKLNREKIDGVKLESTRIYQILAIYSTVASSLVLVVSLGAISFWMCSNGSLQCRICI

SEQ ID NO: 12749 - protein, 566 aa, synthetic construct
  REGION 1..566: note = hemagglutinin__InfluenzaA__AIM56656
MKAILVVLLYTFATANADTLCIGYHANNSTDTVDTVLEKNVTVTHSVNLLEDKHNGKLCKLRGVAPLHLGKCNIAGWILGNPECESLSTASSWSYIVETSSSDNGTCYPGDFINYEELREQLSSVSSFERFEIFPKTNSWPNHDSNKGVTAACPHAGAKSFYKNLIWLVKKGNSYPKLSQSYINDKGKEVLVLWGIHHPSTTADQQSLYQNADAYVFVGTSRYSKKFKPEIAIRPKVRDQEGRMNYYWTLVEPGDKITFEATGNIVVPRYAFTMERNAGSGIIISDTPVHDCNTTCQTPEGAINTSLPFQNIHPITIGKCPKYVKSTKLRLATGLRNVPSIQSRGLFGAIAGFIEGGWTGMVDGWYGYHHQNEQGSGYAADLKSTQNAIDKITNKVNSVIEKMNTQFTAVGKEFNHLEKRIENLNKKVDDGFLDIWTYNAELLVLLENERTLDYHDSNVKNLYEKVRNQLKNNAKEIGNGCFEFYHKCDNTCMESVKNGTYDYPKYSEEAKLNREKIDGVKLESTRIYQILAIYSTVASSLVLVVSLGAISFWMCSNGSLQCRICI

SEQ ID NO: 12750 - protein, 566 aa, synthetic construct; identical to SEQ ID NO: 10040
  REGION 1..566: note = hemagglutinin__InfluenzaA__AIM56667

SEQ ID NO: 12751 - protein, 566 aa, synthetic construct
  REGION 1..566: note = hemagglutinin__InfluenzaA__AIM56678
MKAILVVLLYTFATANADTLCIGYHANNSTDTVDTVLEKNVTVTHSVNLLEDKHNGKLCKLRGVPPLHLGKCNIAGWILGNPECESLSTASSWSYIVETSSSDNGTCYPGDFINYEELREQLSSVSSFERFEIFPKTSSWPNHDSNKGVTAACPHAGAKSFYKNLIWLVKKGNSYPKLSQSYINDKGKEVLVLWGIHHPSTTADQQSLYQNADAYVFVGTSRYSKKFKPEIAIRPKVRDQEGRMNYYWTLVEPGDKITFEATGNLVVPRYAFTMERNAGSGIIISDTPVHDCNTTCQTPEGAINTSLPFQNIHPITIGKCPKYVKSTKLRLATGLRNVPSIQSRGLFGAIAGFIEGGWTGMVDGWYGYHHQNEQGSGYAADLKSTQNAIDKITNKVNSVIEKMNTQFTAVGKEFNHLEKRIENLNKKVDDGFLDIWTYNAELLVLLENERTLDYHDSNVKNLYEKVRNQLKNNAKEIGNGCFEFYHKCDNTCMESVKNGTYDYPKYSEEAKLNREKIDGVKLESTRIYQILAIYSTVASSLVLVVSLGAISFWMCSNGSLQCRICI

SEQ ID NO: 12752 - protein, 566 aa, synthetic construct; identical to SEQ ID NO: 12388
  REGION 1..566: note = hemagglutinin__InfluenzaA__AIM56689

SEQ ID NO: 12753 - protein, 566 aa, synthetic construct; identical to SEQ ID NO: 10040
  REGION 1..566: note = hemagglutinin__InfluenzaA__AIM56700

SEQ ID NO: 12754 - protein, 569 aa, synthetic construct
  REGION 1..569: note = hemagglutinin__InfluenzaA__AIM56711
MKAILVVLLYTFATANADTLCIGYHANNSTDTVDTVLEKNVTVTHSVNLLEDKHNGKLCKLRGVPPLHLGKCNIAGWILGNPECESLSTASSWSYIVETSSSDNGTCYPGDFINYEELREQLSSVSSFERFEIFPKTSSWPNHDSNKGVTAACPHAGAKSFYKNLIWLVKKGNSYPKLSQSYINDKGKEVLVLWGIHHPSTTADQQSLYQNADAYVFVGTSRYSKKFKPEIAIRPKVRDQEGRMNYYWTLVEPGDKITFEATGNLVVPRYAFTMERNAGSGIIISDTPVHDCNTTCQTPEGAINTSLTSLPFQNIHPITIGKCPKYVKSTKLRLATGLRNVPSIQSRGLFGAIAGFIEGGWTGMVDGWYGYHHQNEQGSGYAADLKSTQNAIDKITNKVNSVIEKMNTQFTAVGKEFNHLEKRIENLNKKVDDGFLDIWTYNAELLVLLENERTLDYHDSNVKNLYEKVRNQLKNNAKEIGNGCFEFYHKCDNTCMESVKNGTYDYPKYSEEAKLNREKIDGVKLESTRIYQILAIYSTVASSLVLVVSLGAISFWMCSNGSLQCRICI

SEQ ID NO: 12755 - protein, 566 aa, synthetic construct; identical to SEQ ID NO: 12388
  REGION 1..566: note = hemagglutinin__InfluenzaA__AIM56722

SEQ ID NO: 12756 - protein, 566 aa, synthetic construct; identical to SEQ ID NO: 10040
  REGION 1..566: note = hemagglutinin__InfluenzaA__AIM56733

SEQ ID NO: 12757 - protein, 566 aa, synthetic construct; identical to SEQ ID NO: 10040
  REGION 1..566: note = hemagglutinin__InfluenzaA__AIM56744

SEQ ID NO: 12758 - protein, 566 aa, synthetic construct
  REGION 1..566: note = hemagglutinin__InfluenzaA__AIM56755
MKAILVVLLYTFATANADTLCIGYHANNSTDTVDTVLEKNVTVTHSVNLLEDKHNGKLCKLRGVAPLHLGKCNIAGWILGNPECESLSTASSWSYIVETSSSDNGTCYPGDFINYEELREQLSSVSSFERFEIFPKTSSWPSHDSNKGVTAACPHAGAKSFYKNLIWLVKKGNSYPKLSQSYINDKGKEVLVLWGIHHPSTTADQQSLYQNADAYVFVGTSRYSKKFKPEIAIRPKVRDQEGRMNYYWTLVEPGDKITFEATGNLVVPRYAFTMERNAGSGIIISDTPVHDCNTTCQTPEGAINTSLPFQNIHPITIGKCPKYVKSTKLRLATGLRNVPSIQSRGLFGAIAGFIEGGWTGMVDGWYGYHHQNEQGSGYAADLKSTQNAIDKITNKVNSVIEKMNTQFTAVGKEFNHLEKRIENLNKKVDDGFLDIWTYNAELLVLLENERTLDYHDSNVKNLYEKVRNQLKNNAKEIGNGCFEFYHKCDNTCMESVKNGTYDYPKYSEEAKLNREKIDGVKLESTRIYQILAIYSTVASSLVLVVSLGAISFWMCSNGSLQCRICI

SEQ ID NO: 12759 - protein, 569 aa, synthetic construct; identical to SEQ ID NO: 12744
  REGION 1..569: note = hemagglutinin__InfluenzaA__AIM56766

SEQ ID NO: 12760 - protein, 566 aa, synthetic construct
  REGION 1..566: note = hemagglutinin__InfluenzaA__AIM56777
MKAILVVLLYTFATANADTLCIGYHANNSTDTVDTVLEKNVTVTHSVNLLEGKHNGKLCKLRGVAPLHLGKCNIAGWILGNPECESLSTASSWSYIVETSSSDNGTCYPGDFINYEELREQLSSVSSFERFEIFPKTSSWPNHDSNKGVTAACPHAGAKSFYKNLIWLVKKGNSYPKLSQSYINDKGKEVLVLWGIHHPSTTADQQSLYQNADAYVFVGTSRYSKKFKPEIAIRPKVRDQEGRMNYYWTLVEPGDKITFEATGNLVVPRYAFTMERNAGSGIIISDTPVHDCNTTCQTPEGAINTSLPYQNIHPITIGKCPKYVKSTKLRLATGLRNVPSIQSRGLFGAIAGFIEGGWTGMVDGWYGYHHQNEQGSGYAADLKSTQNAIDKITNKVNSVIEKMNTQFTAVGKEFNHLEKRIENLNKKVDDGFLDIWTYNAELLVLLENERTLDYHDSNVKNLYEKVRNQLKNNAKEIGNGCFEFYHKCDNTCMESVKNGTYDYPKYSEEAKLNREKIDGVKLESTRIYQILAIYSTVASSLVLVVSLGAISFWMCSNGSLQCRICI

SEQ ID NO: 12761 - protein, 566 aa, synthetic construct; identical to SEQ ID NO: 10040
  REGION 1..566: note = hemagglutinin__InfluenzaA__AIM56788

SEQ ID NO: 12762 - protein, 566 aa, synthetic construct; identical to SEQ ID NO: 10040
  REGION 1..566: note = hemagglutinin__InfluenzaA__AIM56799

SEQ ID NO: 12763 - protein, 566 aa, synthetic construct; identical to SEQ ID NO: 10040
  REGION 1..566: note = hemagglutinin__InfluenzaA__AIM56810

SEQ ID NO: 12764 - protein, 566 aa, synthetic construct; identical to SEQ ID NO: 10040
  REGION 1..566: note = hemagglutinin__InfluenzaA__AIM56821

SEQ ID NO: 12765 - protein, 560 aa, synthetic construct
  REGION 1..560: note = hemagglutinin__InfluenzaA__AIN76383
MNTQILVFALIAIVPTNADKICLGHHAVSNGTKVNTLTERGVEVVNATETVERTNIPRICSKGKKTVDLGQCGLLGTITGPPQCDQFLEFSADLIIERREGSDVCYPGKFVNEEALRQILRESGGIDKEAMGFTYSGIRTNGTTSACRRSGSSFYAEMKWLLSNTDNAAFPQMTKSYKNTRKSPALIVWGIHHSVSTAEQTKLYGSGNKLVTVGSSNYQQSFVPSPGARPQVNGLSGRIDFHWLMLNPNDTVTFSFNGAFIAPDRASFLRGKSMGIQSGVQVDANCEGDCYHSGGTIISNLPFQNIDSRAVGKCPRYVKQKSLLLATGMKNVPEIPKGRGLFGAIAGFIENGWEGLIDGWYGFRHQNAQGEGTAADYKSTQSAIDQITGKLNRLIEKTNQQFELIDNEFNEVEKQIGNVINWTRDSITEVWSYNAELLVAMENQHTIDLADSEMDKLYERVKRQLRENAEEDGTGCFEIFHKCDDDCMASIRNNTYDHSKYREEAMQNRIQIDPVKLSSGYKDVILWFSFGASCFILLAIVMGLVFICVKNGNMRCTICI

SEQ ID NO: 12766 - protein, 562 aa, synthetic construct
  REGION 1..562: note = hemagglutinin__InfluenzaA__AIP93103
MAIIYLILLFTAVRGDQICIGYHANNSTEKVDTILERNVTVTHAKDILEKTHNGKLCKLNGIPPLELGDCSIAGWLLGNPECDRLLRVPEWSYIMEKENPRYSLCYPGSFNDYEELKHLLSSVKHFEKVKILPKDGWTQHETDGGSKACAVSGKPSFFRNMVWLTKKGPNYPVAKRSYNNTSGEQMLIIWGVHHPNDEAEQRALYQNVGTYVSASTSTLNKRSTPEIAARPKVSGLGSRMEFSWTLLDVWDTISFESTGNLVAPEYGFKISKRGSSGIMKTEGTLGNCETKCQTPLGAINTTLPFHNVHPLTIGECPKYVKSEKLVLATGPRNVPQIESRGLFGAIAGFIEGGWQGMVDGWYGYHHSNDQGSGYAADKESTQKAFDRITNKVNSVIEKMNTQFEAVGKEFSNLEKRLENLNKKMEDGFLDVWTYNAELLVLMENERTLDFHDSNVKNLYDKVRMQLRDNVKELGNGCFEFYHKCDDECMNSVKNGTYDYPKYEEESKLKRNEIKGVKLSSMGVYQILAIYATVAGSLSLAIMIAGISFWMCSNGSLQCRICI

SEQ ID NO: 12767 - protein, 562 aa, synthetic construct; identical to SEQ ID NO: 1655
  REGION 1..562: note = hemagglutinin__InfluenzaA__AIP93115

SEQ ID NO: 12768 - protein, 566 aa, synthetic construct
  REGION 1..566: note = hemagglutinin__InfluenzaA__AIR93971
MKAILVVLLYTFATTNADILCIGYHANNSTDTVDTVLEKNVTVTHSVNLLEDKHNGKLCKLRGVAPLHLGKCNIAGWILGNPECESLSTASSWSYIVETSSSDNGTCYPGDFIDYEELREQLSSVSSFERFEIFPKTSSWPNHDSNKGVTAACPHAGARSFYKNLIWLVKKGNSYPKLSKSYINDKGKEVLVLWGIHHPSTSADQQSLYQNADAYVFVGTSRYSKKFKPEIAIRPKVRDREGRMNYYWTLVEPGDKITFEATGNLVVPRYAFAMERNAGSGIITSDTPVHDCNTTCQTPKGAINTSLPFQNIHPITIGKCPKYVKSTKLRLATGLRNVPSIQSRGLFGAIAGFIEGGWTGMVDGWYGYHHQNEQGSGYAADLKSTQNAIDEITNKVNSVIEKMNTQFTAVGKEFNHLEKRIENLNKKVDDGFLDIWTYNAELLVLLENERTLDYHDSNVKNLYEKVRSQLKNNAKEIGNGCFEFYHKCDNTCMESVKNGTYDYPKYSEEAKLNREEIDGVKLESTRIYQILAIYSTVASSLVLVVSLGAISFWMCSNGSLQCRICI

SEQ ID NO: 12769 - protein, 566 aa, synthetic construct
  REGION 1..566: note = hemagglutinin__InfluenzaA__AIR93982
MKAILVVLLYTIATANADTLCIGYHANNSTDTVDTVLEKNVTVTHSVNLLEDKHNGKLCKLRGVAPLHLGKCNIAGWILGNPECESLSTASSWSYIVETSSSDNGTCYPGDFIDYEELREQLSSVSSFERFEIFPKTSSWPNHDSNKGVTAACPHAGARSFYKNLIWLVKKGNSYPKLSKSYINDKGKEVLVLWGIHHPSTSADQQSLYQNADAYVFVGTSRYSKKFKPEIAIRPKVRDREGRMNYYWTLVEPGDKITFEATGNLVVPRYAFTMERNAGSGIIISDTPVHDCNTTCQTPKGAINTSLPFQNIHPITIGKCPKYVKSTKLRLATGLRNVPSIQSRGLFGAIAGFIEGGWTGMVDGWYGYHHQNEQGSGYAADLKSTQNAIDEITNKVNSVIEKMNTQFTAVGKEFNHLEKRIENLNKKVDDGFLDIWTYNAELLVLLENERTLDYHDSNVKNLYEKVRSQLKTNAKEIGNGCFEFYHKCDNTCMESVKNGTYDYPKYSEEAKLNREEIDGVKLESTRIYQILAIYSTVASSLVLVVSLGAISFWMCSNGSLQCRICI

SEQ ID NO: 12770 - protein, 566 aa, synthetic construct
  REGION 1..566: note = hemagglutinin__InfluenzaA__AIR93993
MKAILVVLLYTFATANADTLCIGYHANNSTDTVDTVLEKNVTVTHSVNLLEDKHNGKLCKLKGVAPLHLGKCNIAGWILGNPECGSLSTASSWSYIVETSSSDNGTCYPGDFIDYEELREQLSSVSSFERFEIFPKTSSWPNHDSNKGVTAACPNAGSKSFYKNLIWLVKKGNSYPKLSKSYINDKGKEVLVLWGIHHPSTSADQQSLYQNADAYVFVGTSRYSKKFKPEIAIRPKVRGQEGRMDYYWTLVEPGDKITFEATGNLVVPRYAFAMERNTGSGIIISDTPVHDCNTICQTPKGAINTSLPFQNIHPITIGKCPKYVKSTKLRLATGLRNVPSIQSRGLFGAIAGFIEGGWTGMVDGWYGYHHQNEQGSGYAADLKSTQNAIDEITNKVNSVIEKMNTQFTAVGKEFNHLEKRIENLNKKVDDGFLDIWTYNAELLVLLENERTLDYHDSNVKNLYEKVRSQLKNNAKEIGKGCFEFYHKCDTMCMESVKNGTYDYPKYSEEAKLNREEIDGVKLESTRIYQILAIYSTVASSLVLVVSLGAISFWMCSNGSLQCRICI

SEQ ID NO: 12771 - protein, 566 aa, synthetic construct
  REGION 1..566: note = hemagglutinin__InfluenzaA__AIR94000
MKAILVVLLYTFATANADTLCIGYHANNSTDTVDTVLEKNVTVTHSVNLLEDKHNGKLCKLRGVAPLHLGKCNIAGWILGNPECESLSTASSWSYIVETSSSDNGTCYPGDFIDYEELREQLSSVSSFERFEIFPKTSSWPNHDSNKGVTAACPHAGAKSFYKNLIWLVKKGNSYPKLSKSYINDKGKEVLVLWGIHHPSTSADQQSLYQNADAYVFVGTSRYSKKFKPEIAIRPKVRDQEGRMNYYWTLVEPGDKITFEATGNLVVPRYAFAMERNAGSGIIISDTPVHDCNTTCQTPKGAINTSFPFQNIHPITIGKCPKYVKSTKLRLATGLRNVPSIQSRGLFGAIAGFIEGGWTGMVDGWYGYHHQNEQGSGYAADLKSTQNAIDEITNKVNSVIEKMNTQFTAVGKEFNHLEKRIENLNKKVDDGFLDIWTYNAELLVLLENERTLDYHDSNVKNLYEKVRSQLKTNAKEIGNGCFEFYHKCDNTCMESVKNGTYDYPKYSEEAKLNREEIDGVKLESTRIYQILAIYSTVASSLVLVVSLGAISFWMCSNGSLQCRICI

SEQ ID NO: 12772 - protein, 560 aa, synthetic construct
  REGION 1..560: note = hemagglutinin__InfluenzaA__AIR94116
METASLITILLVVTVSNADKICIGYQSTNSTETVDTLTENNVPVTHAKELLHTEHNGMLCATSLGHPLILDTCTIEGLIYGNPSCDLLLGGREWSYIVERPSAVNGLCYPGNVENLEELRSLFSSARSYQRIQIFPDTIWNVSYSGTSKACSDSFYRSMRWLTQKDNAYPIQDAQYTNNQGKNILFMWGINHPPTDTAQTNLYTRTDTTTSVATEEINRTFKPLIGPRPLVNGLMGRINYYWSVLKPGQTLRIKSNGNLIAPWYGHILSGESHGRILKTDLKRGSCTVQCQTEKGGLNTTLPFQNVSKYAFGNCSKYIGIKSLKLAVGLRNVPSRSSRGLFGAIAGFIEGGWSGLVAGWYGFQHSNDQGVGMAADRDSTQKAIDKITSKVNNIVDKMNKQYEIIDHEFNEVETRLNMINNKIDDQIQDIWAYNAELLVLLENQKTLDEHDANVNNLYNKVKRALGSNAVEDGKGCFELYHKCDDQCMETIRNGTYNRRKYQEESKLERQKIEGVKLESEGTYKILTIYSTVASSLVIAMGFAAFLFWAMSNGSCRCNICI

SEQ ID NO: 12773 - protein, 566 aa, synthetic construct
  REGION 1..566: note = hemagglutinin__InfluenzaA__AIT38333
MKTIITLSYILCHVFAQKIHGSDSSTATLCLGHHAVPNGTLVKTITNDQIEVTNATELVQSSSTGRICDNPHRILDGKNCTLIDALLGDPHCDEFQNKEWDLFVERSNAYSDCYPYYVPDYASLRSLVASSGTLEFNNESFNWTGISQDGTSSSCRRGSVKSFFSRLNWLHGLEYKYPAQNVTMLNNDEFDKLYIWGVHHPSTDSDQTSLYVQTSGRVTVSTKRSQQTVIPNIGSRPWVRGISSRISIHWTIVKPGDILLINSTGNLIAPRGYFKIRGGKSSIMRSDAPIDNCDSECVTPNGNIPNDKPFQNVNRITYGPCPRYIKQNTLKLATGMRNVPEKQTRGVLGAIAGFIENGWEGMVDGWYGFRHQNSEGTGQAADLKSTQAAIDQINGKLNRLIGKTNEKFHQIEKEFSEIEGRVQDLEKYVEDTKIDLWSYNAELLVVLENQHTIDLTDSEMNKLFERTRRQLRENAEDMGNGCFKIYHKCDNACIGSIRNGTYVHDVYRDEALNNRFQIKGVELKSGYKDWILWISFAISCFLLCAVLLGFITWACQKGNIRCNICI

SEQ ID NO: 12774 - protein, 565 aa, synthetic construct
  REGION 1..565: note = hemagglutinin__InfluenzaA__AIT38344
MKIKLLILLCTFTATYADTICIGYHANNSTDTVDTVLEKNVTVTHSVNLLEDSHNGKLCLLRGIAPLQLGNCSVAGWILGNPECESLISKESWSYIVEKPNPENGTCYPGYFADYEELREQLSSVSSFERFEIFPKESSWPNHTVTGVSASCSYNGKGNFYKNLLWLTRKNGLYPNLSKSYTNNKEKEVLILWGVHHPSNIKDQRTLYHTENAYVSVVSSHYSRRFTPEITKRPKVRDQEGRINYYWTLLEPGDTIIFEANGNLIAPWYAFALSRGFGSGIITSNAPMDECEAKCQTPRGAINSSLPFQNVHPVTIGECPKYVRSAKLRMVTGLRNIPSIQSRGLFGAIAGFIEGGWTGMIDGWYGYHHQNEQGSGYAADKESTQNAINGITNKVNSVIEKMNTQFTTVGKEFNKLERRMENLNKKVDDGFLDIWTYNAELLVLLENERTLDFHDSNVKILYEKVKSQLKNNAKEIGNGCFEFYHKCNNECMESVKNGTYDYPKYSEESKLNREKIDGVKLESMGVYQILAIYSTVASSLVLLVSLGAISFWMCSNGSLQCRICI

SEQ ID NO: 12775 - protein, 565 aa, synthetic construct
  REGION 1..565: note = hemagglutinin__InfluenzaA__AIT38360
MKIKLLILLCTFTATYADTICIGYHANNSTDTVDTVLEKNVTVTHSVNLLEDSHNGKLCLLKGIAPLQLGNCSVAGWILGNPECESLISKESWSYIVEKPNPENGTCYPGYFADYEELREQLSSVSSFERFEIFPKESSWPNHTVTGVSASCSYNGKGNFYKNLLWLTRKNGLYPNLSKSYTNNKEKEVLILWGVHHPSNIEDQRTLYHTENAYVSVVSSHYSRRFTPEITKRPKVRGQEGRINYYWTLLEPGDTIIFEANGNLIAPWYAFALSRGLGSGIITSNAPMDECEAKCQTPRGAINSSLPFQNVHPVTIGECPKYVRSAKLRMVTGLRNIPSIQSRGLFGAIAGFIEGGWTGMIDGWYGYHHQNEQGSGYAADKESTQNAINGITNKVNSVIEKMNTQFTTVGKEFNKLERRMENLNKKVDDGFLDIWTYNAELLVLLENERTLDFHDSNVKNLYEKVKSQLKNNAKEIGNGCFEFYHKCNNECMESVKNGTYDYPKYSEESKLNREKIDGVKLESMGVYQILAIYSTVASSLVLLVSLGAISFWMCSNGSLQCRICI

SEQ ID NO: 12776 - protein, 566 aa, synthetic construct; identical to SEQ ID NO: 10040
  REGION 1..566: note = hemagglutinin__InfluenzaA__AIT93147

SEQ ID NO: 12777 - protein, 566 aa, synthetic construct; identical to SEQ ID NO: 2669
  REGION 1..566: note = hemagglutinin__InfluenzaA__AIU39700

SEQ ID NO: 12778 - protein, 566 aa, synthetic construct
  REGION 1..566: note = hemagglutinin__InfluenzaA__AIU39702
MKAILVVLLYTFATANADTLCIGYHANNSTDTVDTVLEKNVTVTHSVNLLEDKHNGKLCKLRGVAPLHLGKCNIAGWILGNPECESLSTASSWSYIVETSSSDNGTCYPGDFIDYEELREQLSSVSSFERFEIFPKTSSWPNHDSNKGVTAACPHAGAKSFYKNLIWLVKKGNSYPKLSKSYINDKGKEVLVLWGIHHPSTSADQQSLYQNADAYVFVGTSRYSKKFKPEIAIRPKVRDQEGRMNYYWTLVEPGDKITFEATGNLVVPRYAFAMERNAGSGIIISDTPVHDCNTTCQTPKGAINTSFPFQNIHPITIGKCPKYVKSTKLRLATGLRNIPSIQSRGLFGAIAGFIEGGWTGMVDGWYGYHHQNEQGSGYAADLKSTQNAIDEITNKVNSVIEKMNTQFTAVGKEFNHLEKRIENLNKKVDDGFLDIWTYNAELLVLLENERTLDYHDSNVKNLYEKVRSQLKNNAKEIGNGCFEFYHKCDNTCMESVKNGTYDYPKYSEEAKLNREEIDGVKLESTRIYQILAIYSTVASSLVLVVSLGAISFWMCSNGSLQCRICI

SEQ ID NO: 12779 - protein, 566 aa, synthetic construct; identical to SEQ ID NO: 6909
  REGION 1..566: note = hemagglutinin__InfluenzaA__AIU39704

SEQ ID NO: 12780 - protein, 567 aa, synthetic construct
  REGION 1..567: note = hemagglutinin__InfluenzaA__AIU46609
MEKIVLLLAIVSLVKSDQICIGYHANNSTEQVDTIMEKNVTVTHAQDILEKTHNGKLCDLNGVKPLILKDCSVAGWLLGNPMCDEFIRVPEWSYIVERANPANDLCYPGNLNDYEELKHLLSRINHFEKILIIPKSSWTNHETSLGVSAACPYQGTPSFFRNVVWLIKKNDAYPTIKISYNNTNQEDLLILWGIHHSNNAAEQTNLYKNPTTYISVGTSTLNQRLVPKIATRSQVNGQRGRMDFFWTILKPNDAIHFESNGNFIAPEYAYKIVKKGDSTIMKSEVEYGHCNTKCQTPIGAINSSMPFHNIHPLTIGECPKYVKSNKLVLATGLRNSPLREKRRKRGLFGAIAGFIEGGWQGMVDGWYGYHHSNEQGSGYAADKESTQKAIDGVTNKVNSIIDKMNTQFEAVGREFNNLERRIENLNKKMEDGFLDVWTYNAELLVLMENERTLDFHDSNVKNLYDKVRLQLRDNAKELGNGCFEFYHKCDNECMESVRNGTYDYPQYSEEARLKREEISGVKLESIGTYQILSIYSTVASSLALAIIVAGLSLWMCSNGSLQCRICI

SEQ ID NO: 12781 - protein, 562 aa, synthetic construct
  REGION 1..562: note = hemagglutinin__InfluenzaA__AIU46714
MAIIYLILLFTAVRGDQICIGYHANNSTEKVDTILERNVTVTHAKDILEKTHNGKLCKLNGIPPLELGDCSIAGWLLGNPECDRLLRVPEWSYIMEKENPKYSLCYPGSFNDYEELKHLLSSVKHFEKVKILPKDGWTQHKTDGGSKACAVSGKQSFFRNMVWLTKKGQNYPVAKRSYNNTSGEQMLIIWGVHHPNDEEEQRALYQKVGTYVSASTSTLNKRSTPEIAARPEVNGLGSRMEFSWTLLDVWDTINFESTGNLVAPEYGFKISKRGSSGIIKTEGTLGNCETKCQTPLGAINTTLPFHNVHPLTIGECPKYVKSEKLVLATGLRNVPQIESRGLFGAIAGFIEGGWQGMVDGWYGYHHSNDQGSGYAADKESTQKAFDRITNKVNSVIEKMNTQFEAVGKEFSNLERRLENLNKKMEDGFLDVWTYNAELLVLMENERTLDFHDSNVKNLYDKVRMQLRDNVKELGNGCFEFYHKCDNECMNSVKNGTYDYPKYEEESKLKRNEIKGVKLSSMGVYQILAIYATVAGSLSLAIMIAGISFWMCSNGSLQCRICI

SEQ ID NO: 12782 - protein, 566 aa, synthetic construct
  REGION 1..566: note = hemagglutinin__InfluenzaA__AIV09219
MKAILVVLLYTFATTNADILCIGYHANNSTDTVDTVLEKNVTVTHSVNLLEDKHNGKLCKLRGVAPLHLGKCNIAGWILGNPECELLSTTSSWSYIVETSSSDNGTCYPGDFIDYEELREQLSSVSSFERFEIFPKTSSWPDHDSNKGVTAACPHAGAGSFYKNLIWLVKKGNSYPKLSKSYINDKGKEVLVLWGIHHPPTSADQQRLYQNADAYVFVGTSRYSKKFKPEIAIRPKVRDQEGRMNYYWTLVEPGDKITFEATGNLVVPRYAFAMERNAGSGIITSDTPVHDCNTTCQTPKGAINTSLPFQNIHPITIGKCPKYVKSTKLRLATGLRNVPSIQSRGLFGAIAGFIEGGWTGMVDGWYGYHHQNEQGSGYAADLKSTQNAIDEITNKVNSVIDKMNTQFTAVGKEFNHLEKRIENLNKKVDDGFLDIWTYNAELLVLLENERTLDYHDSNVKNLYEKVRSQLKNNAKEIGNGCFEFYHKCDNTCMESVKNGTYDYPKYSEEAKLNREEIDGVKLESTRIYQILAIYSTVASSLVLVVSLGAISFWMCSNGSLQCRICI

SEQ ID NO: 12783 - protein, 566 aa, synthetic construct
  REGION 1..566: note = hemagglutinin__InfluenzaA__AIW60689
MKTIIALSYILCLVFAQKLPGNDNSTATLCLGHHAVPNGTLVKTITNDQIEVTNATELVQSSSTGRICDSPHRILDGKNCTLIDALLGDPHCDGFQNKEWDLFVERSKAYSDCYPYDVPDYASLRSLVASSGTLEFTNEGFNWTGVAQDGTSYACKRGSVKSFFSRLNWLHKLEYKYPALNVTMPNNDKFDKLYIWGVHHPSTDSDQTSIYVQASGRVTVSTKRSQQTVIPNIGSRPWVRGISSRISIYWTIVKPGDILLINSTGNLIAPRGYFKIRSGKSSIMRSDAPIGNCNSECITPNGSIPNDKPFQNVNRITYGACPRYVKQNTLKLATGMRNVPEKQTRGIFGAIAGFIENGWEGMVDGWYGFRHQNYEGTGQAADLKSTQAAINQINGKLNRLIEKTNEKFHQIEKEFSEVEGRIQDLEKYVEDTKIDLWSYNAELLVALENQHTIDLTDSEMNKLFERTRKQLRENAEDMGNGCFKIYHKCDNACIGSIRNGTYDHDAYRDEALNNRFQIKGVELKSGYKDWILWISFAISCFLLCVVLLGFIMWACQKGNIRCNICI

SEQ ID NO: 12784 - protein, 566 aa, synthetic construct
  REGION 1..566: note = hemagglutinin__InfluenzaA__AIW60690
MKTIIALSYILCLVFAQKLPGNDNSTATLCLGHHAVPNGTLVKTITNDQIEVTNATELVQSSSTGRICDSPHRILDGKNCTLIDALLGDPHCDGFQNKEWDLFVERSKAYSDCYPYDVPDYASLRSLVASSGTLEFTNEGFNWTGVAQDGTSYACKRGSVKSFFSRLNWLHKLEYKYPALNVTMPNNDKFDKLYIWGVHHPSTDSDQTSLYVQASGRVTVSTKRSQQTVIPNIGSRPWVRGVSSRISIYWTIVKPGDILLINSTGNLIAPRGYFKIRSGKSSIMRSDAPIGNCNSECITPNGSIPNDKPFQNVNRITYGACPRYVKQNTLKLATGMRNVPEKQTRGIFGAIAGFIENGWEGMVDGWYGFRHQNYEGTGQAADLKSTQAAINQINGKLNRLIEKTNEKFHQIEKEFSEVEGRIQDLEKYVEDTKIDLWSYNAELLVALENQHTIDLTDSEMNKLFERTRKQLRENAEDMGNGCFKIYHKCDNACIGSIRNGTYDHDAYRDEALNNRFQIKGVELKSGYKDWILWISFAISCFLLCVVLLGFIMWACQKGNIRCNICI

SEQ ID NO: 12785 - protein, 566 aa, synthetic construct
  REGION 1..566: note = hemagglutinin__InfluenzaA__AIW60691
MKTIIALSYILCLVFAQKLPGNDNSTATLCLGHHAVPNGTLVKAITNDQIEVTNATELVQSSSTGRICDSPHRILDGKNCTLIDALLGDPHCDGFQNKEWDLFVERSKAYSDCYPYDVPDYASLRSLVASSGTLEFTNEGFNWTGVAQDGTSYACKRGSVKSFFSRLNWLHKLEYKYPALNVTMPNNDKFDKLYIWGVHHPSTDSDQTRLYVQASGRVTVSTKRSQQTVIPNIGSRPWVRGISSRISIYWTIVKPGDILLINSTGNLIAPRGYFKIRSGKSSIMRSDAPIGNCNSECITPNGSIPNDKPFQNVNRITYGACPRYVKQNTLKLATGMRNVPEKQTRGIFGAIAGFIENGWEGMVDGWYGFRHQNSEGTGQAADLKSTQAAINQINGKLNRLIEKTNEKFHQIEKEFSEVEGRIQDLEKYVEDTKIDLWSYNAELLVALENQHTIDLTDSEMNKLFERTRKQLRENAEDMGNGCFKIYHKCDNACIGSIRNGTYDHDVYRDEALNNRFQIKGVELKSGYKDWILWISFAISCFLLCVVLLGFIMWACQKGNIRCNICI

SEQ ID NO: 12786 - protein, 566 aa, synthetic construct
  REGION 1..566: note = hemagglutinin__InfluenzaA__AIW60692
MKTIIALSYILCLVFAQKLPGNDNSTATLCLGHHAVPNGTLVKAITNDQIEVTNATELVQSSSTGRICDSPHRILDGKNCTLIDALLGDPHCDGFQNKEWDLFVERSKAYSDCYPYDVPDYASLRSLVASSGTLEFTNEGFNWTGVAQDGTSYACKRGSVKSFFSRLNWLHKLEYKYPALNVTMPNNDKFDKLYIWGVHHPSTDSDQTSLYVQASGRVTVSTKRSQQTVIPNIGSRPWVRGISSRISIYWTIVKPGDILLINSTGNLIAPRGYFKIRSGKSSIMRSDAPIGNCNSECITPNGSIPNDKPFQNVNRITYGACPRYVKQNTLKLATGMRNVPEKQTRGIFGAIAGFIENGWEGMVDGWYGFRHQNSEGTGQAADLKSTQAAINQINGKLNRLIEKTNEKFHQIEKEFSEVEGRIQDLEKYVEDTKIDLWSYNAELLVALENQHTIDLTDSEMNKLFERTRKQLRENAEDMGNGCFKIYHKCDNACIGSIRNGTYDHDVYRDEALNNRFQIKGVELKSGYKDWILWISFAISCFLLCVVLLGFIMWACQKGNIRCNICI

SEQ ID NO: 12787 - protein, 566 aa, synthetic construct
  REGION 1..566: note = hemagglutinin__InfluenzaA__AIW60693
MKTIIALSYILCLVFAQKLPGNDNSTATLCLGHHAVLNGTLVKTITNDQIEVTNATELVQNSSTGRICDSPHQILDGENCTLIDALLGDPHCDGFQNKEWDLFVERSKAYSNCYPYDVPDYASLRSLVASSGTLEFNNESFNWTGVAQNGTSSACKRRSIKSFFSRLNWLHQLKYKYPALNVTMPNNEKFDKLYIWGVHHPSTDSDQTSIYAQASGRVTVSTKRSQQTVIPNIGSRPWVRGVSSIISIYWTIVKPGDILLINSTGNLIAPRGYFKIRSGKSSIMRSDAPIGKCNSECITPNGSIPNDKPFQNVNRITYGACPRYVKQNTLKLATGMRNVPEKQTRGIFGAIAGFIENGWEGMVDGWYGFRHQNSEGTGQAADLKSTQAAINQINGKLNRLIEKTNEKFHQIEKEFSEVEGRIQDLEKYVEDTKIDLWSYNAELLVALENQHTIDLTDSEMNKLFERTRKQLRENAEDMGNGCFKIYHKCDNACIGSIRNGTYDHDVYRDEALNNRFQIKGVELKSGYKDWILWISFAISCFLLCVVLLGFIMWACQKGNIRCNICI

SEQ ID NO: 12788 - protein, 566 aa, synthetic construct
  REGION 1..566: note = hemagglutinin__InfluenzaA__AIW60694
MKTIIALSYILCLVFAQKLPGNDNSTATLCLGHHAVLNGTLVKTITNDQIEVTNATELVQNSSTGRICDSPHQILDGENCTLIDALLGDPHCDGFQNKEWDLFVERSKAYSNCYPYDVPDYASLRSLVASSGTLEFNNESFNWTGVAQNGTSSACKRRSIKSFFSRLNWLHQLKYKYPALNVTMPNNEKFDKLYIWGVHHPSTDSDQTSLYAQASGRVTVSTKRSQQTVIPNIGSRPWVRGVSSRISIYWTIVKPGDILLINSTGNLIAPRGYFKIRSGKSSIMRSDAPIGKCNSECITPNGSIPNDKPFQNVNRITYGACPRYVKQNTLKLATGMRNVPEKQTRGIFGAIAGFIENGWEGMVDGWYGFRHQNSEGTGQAADLKSTQAAINQINGKLNRLIEKTNEKFHQIEKEFSEVEGRIQDLEKYVEDTKIDLWSYNAELLVALENQHTIDLTDSEMNKLFERTRKQLRENAEDMGNGCFKIYHKCDNACIGSIRNGTYDHDVYRDEALNNRFQIKGVELKSGYKDWILWISFAISCFLLCVVLLGFIMWACQKGNIRCNICI

SEQ ID NO: 12789 - protein, 566 aa, synthetic construct
  REGION 1..566: note = hemagglutinin__InfluenzaA__AIW60695
MKTIIALSYILCLVFAQKLPGNDNSTATLCLGHHAVPNGTLVKTITNDQIEVTNATELVQSSSTGGICDSPHQILDGENCTLIDALLGDPHCDGFQNKEWDLFVERSKAYSNCYPYDVPDYASLRSLVASSGTLEFNNESFNWTGVAQNGTSSACKRRSNKSFFSRLNWLHQLNYKYPALNVTMPNNEKFDKLYIWGVHHPSTDSDQISIYAQAPGRVTVSTKRSQQTVIPNIGSRPWVRGVSSIISIYWTIVKPGDILLINCTGNLIAPRGYFKIRSGKSSIMRSDASIGKCNSECITPNGSIPNDKPFQNVNRITYGACPRYVKQNTLKLATGMRNVPEKQTRGIFGAIAGFIENGWEGMVDGWYGFRHQNSEGTGQAADLKSTQAAINQINGKLNRLIEKTNEKFHQIEKEFSEVEGRIQDLEKYVEDTKIDLWSYNAELLVALENQHTIDLTDSEMNKLFERTKKQLRENAEDMGNGCFKIYHKCDNACIGSIRNGTYDHDVYRDEALNNRFQIKGVELKSGYKDWILWISFAISCFLLCVVLLGFIMWACQKGNIRCNICI

SEQ ID NO: 12790 - protein, 566 aa, synthetic construct
  REGION 1..566: note = hemagglutinin__InfluenzaA__AIW60696
MKTIIALSYILCLVFAQKLPGNDNSTATLCLGHHAVPNGTLVKTITNDQIEVTNATELVQSSSTGGICDSPHQILDGENCTLIDALLGDPHCDGFQNKEWDLFVERSKAYSNCYPYDVPDYASLRSLVASSGTLEFNNESFNWTGVDQNGTSSACKRRSNKSFFSRLNWLHQLKYKYPALNVAMPNNEKFDKLYIWGVHHPSTDSDQISLYAQAPGRVTVSTKRSQQTVIPNIGSRPWVRGVSSRISIYWTIVKPGDILLINCTGNLIAPRGYFKIRSGKSSIMRSDASIGKCNSECITPNGSIPNDKPFQNVNRITYGACPRYVKQNTLKLATGMRNVPEKQTRGIFGAIAGFIENGWEGMVDGWYGFRHQNSEGTGQAADLKSTQAAINQINGKLNRLIEKTNEKFHQIEKEFSEVEGRIQDLEKYVEDTKIDLWSYNAELLVALENQHTIDLTDSEMNKLFERTKKQLRENAEDMGNGCFKIYHKCDNACIGSIRNGTYDHDVYRDEALNNRFQIKGVELKSGYKDWILWISFAISCFLLCVVLLGFIMWACQKGNIRCNICI

SEQ ID NO: 12791 - protein, 566 aa, synthetic construct
  REGION 1..566: note = hemagglutinin__InfluenzaA__AIW60697
MKTIIALSYILCLVFAQKLPGNDNSTATLCLGHHAVPNGTIVKTITNDQIEVTNATELVQSSSTGGICDSPHQILDGENCTLIDALLGDPQCDGFQNKKWDLFVERSKAYSNCYPYDVPDHASLRSLVASSGTLEFNNESFDWTGVTQNGTSSSCKRRSNKSFFSRLNWLTHLKYKYPALNVTMPNNEKFDKLYIWGVHHPDTDSVQISLYAQASGRITVSTKRSQQTVIPNIGSRPRVRDISSRISIYWTIVKPGDILLINSTGNLIAPRGYFKIRSGKSSIMRSDAPIGKCNSECITPNGSIPNDKPFQNVNRITYGACPRYVKQNTLKLATGMRNVPEKQTRGIFGAIAGFIENGWEGMVDGWYGFRHQNSEGTGQAADLKSTQAAINQINGKLNRLIGKTNEKFHQIEKEFSEVEGRIQDLEKYVEDTKIDLWSYNAELLVALENQHTIDLTDSEMNKLFERTKKQLRENAEDMGNGCFKIYHKCDNACIGSIRNGTYDHDVYRDEALNNRFQIKGVELKSGYKDWILWISFAISCFLLCVALLGFIMWACQKGNIRCNICI

SEQ ID NO: 12792 - protein, 566 aa, synthetic construct
  REGION 1..566: note = hemagglutinin__InfluenzaA__AIW60698
MKTIIALSYILCLVFAQKLPGNDNSTATLCLGHHAVPNGTIVKTITNDQIEVTNATELVQSSSTGGICDSPHQILDGENCTLIDALLGDPQCDGFQNKKWDLFVERSKAYSNCYPYDVPDHASLRSLVASSGTLEFNNESFDWTGVTQNGTSSACKRRSNKSFFSRLNWLTHLKYKYPALNVTMPNNEKFDKLYIWGVHHPGTDSDQISLYAQASGRITVSTKRSQQTVIPNIGSRPRVRDISSRISIYWTIVKPGDILLINSTGNLIAPRGYFKIRSGKSSIMRSDAPIGKCNSECITPNGSIPNDKPFQNVNRITYGACPRYVKQNTLKLATGMRNVPEKQTRGIFGAIAGFIENGWEGMVDGWYGFRHQNSEGTGQAADLKSTQAAINQINGKLNRLIGKTNEKFHQIEKEFSEVEGRIQDLEKYVEDTKIDLWSYNAELLVALENQHTIDLTDSEMNKLFERTKKQLRENAEDMGNGCFKIYHKCDNACIGSIRNGTYDHDVYRDEALNNRFQIKGVELKSGYKDWILWISFAISCFLLCVALLGFIMWACQKGNIRCNICI

SEQ ID NO: 12793 - protein, 566 aa, synthetic construct
  REGION 1..566: note = hemagglutinin__InfluenzaA__AIW60699
MKTIIALSYILCLVFAQKLPGNDNSTATLCIGHHAVPNGTIVKTITNDQIEVTNATELVQSSSTGGICDSPHQILDGENCTLIDALLGDPQCDGFQNKKWDLFVERSKAYSNCYPYDVPDYASLRSLIASSGTLEFNNESFNWTGVTQNGTSSACKRRSNNSFFSRLNWLTHLKFKYPALNVTMPNNEEFDKLYIWGVHHPVTDNDQISLYAQASGKITVSTKRSQQTVIPNIGSRPRVRDIPSRISIYWTIVKPGDILLIKSTGNLIAPRGYFKIRSGKSSIMRSDAPIGKCNSECITPNGSIPNDKPFQNVNRITYGACPRYVKQNTLKLATGMRNVPEKQTRGIFGAIAGFIENGWEGMVDGWYGFRHQNSEGIGQAADLKSTQAAIDQINGKLNRLIGKTNEKFHQIEKEFSEVEGRIQDLEKYVEDTKIDLWSYNAELLVALENQHTIDLTDSEMNKLFEETKKQLRENAEDMGNGCFKIYHKCDNACIGSIRNGTYDHDVYRDEALNNRFQIKGVELKSGYKDWILWISFAISCFLLCVALLGFIMWACQKGNIRCNICI

SEQ ID NO: 12794 - protein, 566 aa, synthetic construct
  REGION 1..566: note = hemagglutinin__InfluenzaA__AIW60700
MKTIIALSYILCLVFAQKLPGNDNSTATLCIGHHAVPNGTIVKTITNDQIEVTNATELVQSSSTGGICDSPHQILDGENCTLIDALLGDPQCDGFQNKKWDLFVERSKAYSNCYPYDVPDYASLRSLIASSGTLEFNNESFNWTGVTQNGTSSACKRRSNNSFFSRLNWLTHLKFKYPALNVTMPNNEEFDKLYIWGVHHPGTDNDQISLYAQASGKITVSTKRSQQTVIPNIGSRPRVRDIPSRISIYWTIVKPGDILLINSTGNLIAPRGYFKIRSGKSSIMRSDAPIGKCNSECITPNGSIPNDKPFQNVNRITYGACPRYVKQNTLKLATGMRNVPEKQTRGIFGAIAGFIENGWEGMVDGWYGFRHQNSEGIGQAADLKSTQAAIDQINGKLNRLIGKTNEKFHQIEKEFSEVEGRIQDLEKYVEDTKIDLWSYNAELLVALENQHTIDLTDSEMNKLFEETKKQLRENAEDMGNGCFKIYHKCDNACIGSIRNGTYDHDVYRDEALNNRFQIKGVELKSGYKDWILWISFAISCFLLCVALLGFIMWACQKGNIRCNICI

SEQ ID NO: 12795 - protein, 566 aa, synthetic construct
  REGION 1..566: note = hemagglutinin__InfluenzaA__AIW60701
MKTIIALSYILCLVFTQKLPGNDNSTATLCLGHHAVPNGTIVKTITNDQIEVTNATELVQSSSTGEICDSPHQILDGENCTLIDALLGDPQCDGFQNKKWDLFVERSKAYSNCYPYDVPDYASLRSLVASSGTLEFNNESFNWTGVTQNGTSSACIRRSNNSFFSRLNWLTHLKFKYPALNVTMPNNEKFDKLYIWGVHHPGTDNDQIFPYAQASGRITVSTKRSQQTVIPNIGSRPRVRNIPSRISIYWTIVKPGDILLINSTGNLIAPRGYFKIRSGKSSIMRSDAPIGKCNSECITPNGSIPNDKPFQNVNRITYGACPRYVKQNTLKLATGMRNVPEKQTRGIFGAIAGFIENGWEGMVDGWYGFRHQNSEGIGQAADLKSTQAAIDQINGKLNRLIGKTNEKFHQIEKEFSEVEGRIQDLEKYVEDTKIDLWSYNAELLVALENQHTIDLTDSEMNKLFEKTKKQLRENAEDMGNGCFKIYHKCDNACIGSIRNGTYDHDVYRDEALNNRFQIKGVELKSGYKDWILWISFAISCFLLCVALLGFIMWACQKGNIRCNICI

SEQ ID NO: 12796 - protein, 566 aa, synthetic construct
  REGION 1..566: note = hemagglutinin__InfluenzaA__AIW60702
MKTIIALSYILCLVFTQKLPGNDNSTATLCLGHHAVPNGTIVKTITNDQIEVTNATELVQSSSTGEICDSPHQILDGENCTLIDALLGDPQCDGFQNKKWDLFVERSKAYSNCYPYDVPDYASLRSLVASSGTLEFNNESFNWTGVTQNGTSSACIRRSNNSFFSRLNWLTHLKFKYPALNVTMPNNEKFDKLYIWGVHHPGTDNDQIFLYAQASGRITVSTKRSQQTVIPNIGSRPRVRNIPSRISIYWTIVKPGDILLINSTGNLIAPRGYFKIRSGKSSIMRSDAPIGKCNSECITPNGSIPNDKPFQNVNRITYGACPRYVKQNTLKLATGMRNVPEKQTRGIFGAIAGFIENGWEGMVDGWYGFRHQNSEGIGQAADLKSTQAAIDQINGKLNRLIGKTNEKFHQIEKEFSEVEGRIQDLEKYVEDTKIDLWSYNAELLVALENQHTIDLTDSEMNKLFEKTKKQLRENAEDMGNGCFKIYHKCDNACIGSIRNGTYDHDVYRDEALNNRFQIKGVELKSGYKDWILWISFAISCFLLCVALLGFIMWACQKGNIRCNICI

SEQ ID NO: 12797 - protein, 566 aa, synthetic construct; identical to SEQ ID NO: 12541
  REGION 1..566: note = hemagglutinin__InfluenzaA__AIZ07211

SEQ ID NO: 12798 - protein, 566 aa, synthetic construct
  REGION 1..566: note = hemagglutinin__InfluenzaA__AIZ07212
MKTIMALSYILCLVFAQKLPGNDNSTATLCLGHHAVPNGTIVKTITNDRIEVTNATELVQNSSIGEICDSPHQILDGENCTLIDALLGDPQCDGFQNKKWDLFVERSKAYSNCYPYDVPDYASLRSLVASSGTLEFNNESFNWAGVTQNGTSSACIRGSNSSFFSRLNWLTHSNFKYPALNVTMPNNEQFDKLYIWGVHHPGTDKDQIFLYAQSSGRITVSTKRSQQAVIPNIGSRPRIRNIPSRISIYWTIVKPGDILLINSTGNLIAPRGYFKIRSGKSSIMRSDAPIGKCKSECITPNGSIPNDKPFQNVNRITYGACPRYVKQSTLKLATGMRNVPEKQTRGIFGAIAGFIENGWEGMMDGWYGFRHQNSEGRGQAADLKSTQAAIDQINGKLNRLIGKTNEKFHQIEKEFSEVEGRIQDLEKYVEDTKIDLWSYNAELLVALENQHTIDLTDSEMNKLFEKTKKQLRENAEDMGNGCFKIYHKCDNACIGSIRNGTYDHDVYRDEALNNRFQIKGVELKSGYKDWILWISFAISCFLLCVALLGFIMWACQKGNIRCNICI

SEQ ID NO: 12799 - protein, 560 aa, synthetic construct
  REGION 1..560: note = hemagglutinin__InfluenzaA__AJD78175
METASLITILLVVTVSNADKICIGYQSTNSTETVDTLTENNVPVTHAKELLHTEHNGMLCATSLGQPLILDTCTIEGLIYGNPSCDLLLGGREWSYIVERPSAANGLCYPGNVENLEELRSLFSSARSYQRIQIFPDTIWNVSYSGTSKACSDSFYRSMRWLTQKDNTYPIQDAQYTNNQGKNILFMWGINHPPTDTAQTNLYTRTDTTTSVATEEINRTFKPLIGPRPLVNGLMGRINYYWSVLKPGQTLRIKSNGNLIAPWYGHILSGESHGRILKTDLKRGSCTVQCQTEKGGLNTTLPFQNVSKYAFGNCSKYIGIKSLKLAVGLRNVPSRSSRGLFGAIAGFIEGGWSGLVAGWYGFQHSNDQGVGMAADRDSTQKAIDKITSKVNNIVDKMNKQYEIIDHEFNEVETRLNMINNKIDDQIQDIWAYNAELLVLLENQKTLDEHDANVNNLYNKVKRALGSNAVEDGKGCFELYHKCDDQCMETIRNGTYNRRKYQEESKLERQKIEGVKLESEGTYKILTIYSTVASSLVIAMGFAAFLFWAMSNGSCRCNICI

SEQ ID NO: 12800 - protein, 560 aa, synthetic construct
  REGION 1..560: note = hemagglutinin__InfluenzaA__AJD78187
METASLITILLVVTVSNADKICIGYQSTNSTETVDTLTENNVPVTHAKELLHTEHNGMLCATSLGHPLILDTCTIEGLIYGNPSCDLLLGGREWSYIVERPSAVNGLCYPGNVENLEELRSLFSSARSYQRIQIFPDTIWNVSYSGTSKTCSDSFYRSMRWLTQKDNAYPIQDAQYTNNQGKNILFMWGINHPPTDTTQTNLYTRTDTTTSVATEEINRTFKPLIGPRPLVNGLMGRINYYWSVLKPGQTLRIKSNGNLIAPWYGHILSGESHGRILKTDLKRGSCTVQCQTEKGGLNTTLPFQNVSKYAFGNCSKYIGIKSLKLAVGLRNVPSRSSRGLFGAIAGFIEGGWSGLVAGWYGFQHSNDQGVGMAADRDSTQKAIDKITSKVNNIVDKMNKQYEIIDHEFSEVETRLNMINNKIDDQIQDIWAYNAELLVLLENQKTLDEHDANVNNLYNKVKRALGSNAVEDGKGCFELYHKCDDQCMETIRNGTYNRRKYQEESKLERQKIEGVKLESEGTYKILTIYSTVASSLVIAMGFAAFLFWAMSNGSCRCNICI

SEQ ID NO: 12801 - protein, 560 aa, synthetic construct
  REGION 1..560: note = hemagglutinin__InfluenzaA__AJD78199
METVSLITILLVATVSNADKICIGYQSTNSTETVDTLTENNVPVTHAKELLHTEHNGMLCATSLGQPLILDTCTIEGLIYGNPSCDLSLEGREWSYIVERPSAVNGLCYPGNVENLEELRSLFSSARSYQRIQIFPDTIWNVSYDGTSTACSGSFYRSMRWLTRKNGDYPIQDAQYTNNQGKNILFMWGINHPPTDTTQRDLYTRTDTTTSVATEEINRIFKPLIGPRPLVNGLMGRIDYYWSVLKPGQTLRIKSDGNLIAPWYGHILSGESHGRILKTDLKRGSCTVQCQTEKGGLNTTLPFQNVSKYAFGNCSKYIGIKSLKLAVGLRNVPSRSSRGLFGAIAGFIEGGWSGLVAGWYGFQHSNDQGVGMAADRDSTQKAIDKITSKVNNIVDKMNKQYEIIDHEFSEVETRLNMINNKIDDQIQDIWAYNAELLVLLENQKTLDEHDANVNNLYNKVKRALGSNAVEDGKGCFELYHKCDDQCMETIRNGTYNRRKYQEESKLERQKIEGVKLESEGTYKILTIYSTVASSLVIAMGFAAFLFWAMSNGSCRCNICI

SEQ ID NO: 12802 - protein, 560 aa, synthetic construct
  REGION 1..560: note = hemagglutinin__InfluenzaA__AJD78211
METVSLITILLVATVSNADKICIGYQSTNSTETVDTLTENNVPVTHAKELLHTEHNGMLCATSLGQPLILDTCTIEGLIYGNPSCDLSLEGREWSYIVERPSAVNGLCYPGNVENLEELRSLFSSARSYQRIQIFPDTIWNVSYDGTSTACSGSFYRSMRWLTRKNGDYPIQDAQYTNNQGKNILFMWGINHPPTDTTQRDLYTRTDTTTSVATEEINRIFKPLIGPRPLVNGLMGRIDYYWSVLKPGQTLRIKSDGNLIAPWYGHILSGESHGRILKTDLKRGSCTVQCQTEKGGLNTTLPFQNVSKYAFGNCSKYIGIKSLKLAVGLRNVPSRSRRGLFGAIAGFIEGGWSGLVAGWYGFQHSNDQGVGMAADRDSTQKAIDKITSKVNNIVDKMNKQYEIIDHEFSEVETRLNMINNKIDDQIQDIWAYNAELLVLLENQKTLDEHDANVNNLYNKVKRALGSNAVEDGKGCFELYHKCDDQCMETIRNGTYNRRKYQEESKLERQKIEGVKLESEGTYKILTIYSTVASSLVIAMGFAAFLFWAMSNGSCRCNICI

SEQ ID NO: 12803 - protein, 562 aa, synthetic construct
  REGION 1..562: note = hemagglutinin__InfluenzaA__AJI76401
MAIIYLILLFATVRGDQICIGYHANNSTEKVDTILERNVTVTHAKDILEKTHNGKLCKLNGIPPLELGDCSIAGWLLGNPECDRLLRVPEWSYIMEKENPRYSLCYPGSLNDYEELKHLLSSVKHFEKVRILPKDRWTNHTTTGGSKACAVSGKPSFFRNMVWLTKKGPNYPVAKGSYNNTSGEQMLIIWGVHHPIDEAEQRALYQNVGTYVSASTSTLYKRSIPEIAARPEVNGLGSRMEFSWTLLDVWDTINFESTGNLVAPEYGFKISKRGSSGIMKTEGTLGNCETKCQTPLGAINTTLPFHNVHPLTIGECPKYVKSEKLVLATGLRNVPQIESRGLFGAIAGFIEGGWQGMVDGWYGYHHSNDQGSGYAADKESTQKAFDGITNKVNSVIEKMNTQFEAVGKEFNNLEKRLENLNKRMEDGFLDVWTYNAELLVLMENERTLDFHDSNVKNLYEKVRMQLRDNVRELGNGCFEFYHKCDDECMNSVKNGTYDYPKYEEESKLKRNEIKGVKLSSMGVYQILAIYATVAGSLSLAIMVAGISFWMCSNGSLQCRICI

SEQ ID NO: 12804 - protein, 566 aa, synthetic construct; identical to SEQ ID NO: 12065
  REGION 1..566: note = hemagglutinin__InfluenzaA__AJI80137

SEQ ID NO: 12805 - protein, 566 aa, synthetic construct; identical to SEQ ID NO: 12065
  REGION 1..566: note = hemagglutinin__InfluenzaA__AJI80149

SEQ ID NO: 12806 - protein, 566 aa, synthetic construct; identical to SEQ ID NO: 10040
  REGION 1..566: note = hemagglutinin__InfluenzaA__AJI80161

SEQ ID NO: 12807 - protein, 566 aa, synthetic construct
  REGION 1..566: note = hemagglutinin__InfluenzaA__AJI80172
MKTIIALSYILCLVFAQKLPGNDNSTATLCLGHHAVPNGTIVKTITNDRIEVTNATELVQNSSIGEICDSPHQILDGENCSLIDALLGDPQCDGFQNKKWDLFVERSKAYSNCYPYDVPDYASLRSLVASSGTLEFNNESFNWAGVTQNGTSSACIRGSNSSFFSRLNWLTHLNFKYPALNVTMPNNEQFDKLYIWGVHHPGTDKDQIFLYAQSSGRITVSTKRSQQAVIPNIGSRPRIRNIPSRISIYWTIVKPGDILLINSTGNLIAPRGYFKIRSGKSSIMRSDAPIGKCKSECITPNGSIPNDKPFQNVNRITYGACPRYVKQSTLKLATGMRNVPEKQTRGIFGAIAGFIENGWEGMVDGWYGFRHQNSEGRGQAADLKSTQAAIDQINGKLNRLIGKTNEKFHQIEKEFSEVEGRIQDLEKYVEDTKIDLWSYNAELLVALENQHTIDLTDSEMNKLFEKTKKQLRENAEDMGNGCFKIYHKCDNACIGSIRNGTYDHDVYRDEALNNRFQIKGVELKSGYKDWILWISFAISCFLLCVALLGFIMWACQKGNIRCNICI

SEQ ID NO: 12808 - protein, 566 aa, synthetic construct
  REGION 1..566: note = hemagglutinin__InfluenzaA__AJI80196
MKTIIALSYILCLVFAQKLPGNDNSTATLCLGHHAVPNGTIVKTITNDRIEVTNATELVQNSSIGEICDSPHQILDGENCTLIDALLGDPQCDGFQNKEWDLFVERSKAYSNCYPYDVPDYASLRSLVASSGTLEFNNESFNWAGVTQNGTSSACIRGSNSSFFSRLNWLTHLNFKYPALNVTMPNNEQFDKLYIWGVHHPGTDKDQIFLYAQSSGRITVSTKRSQQAVIPNIGSRPRIRNIPSRISIYWTIVKPGDILLINSTGNLIAPRGYFKIRSGKSSIMRSDAPIGKCKSECITPNGSIPNDKPFQNINRITYGACPRYVKQSTLKLATGMRNVPEKQTRGIFGAIAGFIENGWEGMVDGWYGFRHQNSEGRGQAADLKSTQAAIDQINGKLNRLIGKTNEKFHQIEKEFSEVEGRIQDLEKYVEDTKIDLWSYNAEFLVALENQHTIDLTDSEMNKLFEKTKKQLRENAEDMGNGCFKIYHKCDNACIGSIRNGTYDHDVYRDEALNNRFQIKGVELKSGYKDWILWISFAISCFLLCVALLGFIMWACQKGNIRCNICI

SEQ ID NO: 12809 - protein, 566 aa, synthetic construct; identical to SEQ ID NO: 12615
  REGION 1..566: note = hemagglutinin__InfluenzaA__AJI80208

SEQ ID NO: 12810 - protein, 566 aa, synthetic construct; identical to SEQ ID NO: 9994
  REGION 1..566: note = hemagglutinin__InfluenzaA__AJI80220

SEQ ID NO: 12811 - protein, 566 aa, synthetic construct; identical to SEQ ID NO: 12807
  REGION 1..566: note = hemagglutinin__InfluenzaA__AJI80232

SEQ ID NO: 12812 - protein, 566 aa, synthetic construct; identical to SEQ ID NO: 9994
  REGION 1..566: note = hemagglutinin__InfluenzaA__AJI80244

SEQ ID NO: 12813 - protein, 566 aa, synthetic construct; identical to SEQ ID NO: 9858
  REGION 1..566: note = hemagglutinin__InfluenzaA__AJI80256

SEQ ID NO: 12814 - protein, 566 aa, synthetic construct; identical to SEQ ID NO: 9994
  REGION 1..566: note = hemagglutinin__InfluenzaA__AJI80268

SEQ ID NO: 12815 - protein, 566 aa, synthetic construct
  REGION 1..566: note = hemagglutinin__InfluenzaA__AJI80280
MKTIIALSYILCLVFAQKLPGNDNSTATLCLGHHAVPNGTIVKTITNDRIEVTNATELVQNSSIGKICDSPHQILDGENCTLIDALLGDPQCDGFQNKEWDLFVERSKAYSNCYPYDVPDYASLRSLVASSGTLEFNNESFNWAGVTQNGTSSACIRGSNSSFFSRLNWLTHLNFKYPALNVTMPNNEQFDKLYIWGVHHPGTDKDQIFLYAQSSGRITVSTKRSQQAVIPNIGSRPRIRNIPSRISIYWTIVKPGDILLINSTGNLIAPRGYFKIRSGKSSIMRSDAPIGKCKSECITPNGSIPNDKPFQNVNRITYGACPRYVKQSTLKLATGMRNVPEKQTRGIFGAIAGFIENGWEGMVDGWYGFRHQNSEGRGQAADLKSTQAAIDQINGKLNRLIGKTNEKFHQIEKEFSEVEGRIQDLEKYVEDTKIDLWSYNAELLVALENQHTIDLTDSEMNKLFEKTKKQLRENAEDMGNGCFKIYHKCDNACIGSIRNGTYDHDVYRDEALNNRFQIKGVELKSGYKDWILWISFAISCFLLCVALLGFIMWACQKGNIRCNICI

SEQ ID NO: 12816 - protein, 566 aa, synthetic construct; identical to SEQ ID NO: 12587
  REGION 1..566: note = hemagglutinin__InfluenzaA__AJI80292

SEQ ID NO: 12817 - protein, 566 aa, synthetic construct; identical to SEQ ID NO: 12615
  REGION 1..566: note = hemagglutinin__InfluenzaA__AJI80303

SEQ ID NO: 12818 - protein, 566 aa, synthetic construct; identical to SEQ ID NO: 12587
  REGION 1..566: note = hemagglutinin__InfluenzaA__AJI80315

SEQ ID NO: 12819 - protein, 566 aa, synthetic construct
  REGION 1..566: note = hemagglutinin__InfluenzaA__AJI80326
MKAILVVLLYTFATANADTLCIGYHANNSTDTVDTVLEKNVTVTHSVNLLEDKHNGKLCKLRGVAPLHLGKCNIAGWILGNPECESLSTASSWSYIVETSSSDNGTCYPGDFINYEELREQLSSVSSFERFEIFPKTSSWPNHDSNKGVTAACPHAGAKSFYKNLIWLVKKGNSYPKLSQSYINDKGKEVLVLWGIHHPSTTADQQSLYQNADAYVFVGTSRYSKKFKPEIAIRPKVRDQEGRMNYYWTLVEPGDKITFEATGNLVVPRYAFTMEKNAGSGIIISDTPVHDCNTTCQTPEGAINTSLPFQNIHPITIGKCPKYVKSTKLRLATGLRNVPSIQSRGLFGAIAGFIEGGWTGMVDGWYGYHHQNEQGSGYAADLKSTQNAIDKITNKVNSVIEKMNTQFTAVGKEFNHLEKRIENLNKKVDDGFLDIWTYNAELLVLLENERTLDYHDSNVKNLYEKVRNQLKNNAKEIGNGCFEFYHKCDNTCMESVKNGTYDYPKYSEEAKLNREKIDGVKLESTRIYQILAIYSTVASSLVLVVSLGAISFWMCSNGSLQCRICI

SEQ ID NO: 12820 - protein, 566 aa, synthetic construct
  REGION 1..566: note = hemagglutinin__InfluenzaA__AJI80337
MKAILVVLLYTFATANADTLCIGYHANNSTDTVDTVLEKNVTVTHSINLLEDKHNGKLCKLRGVAPLHLGKCNIAGWILGNPECESLSTASSWSYIVETSSSDNGTCYPGDFINYEELREQLSSVSSFERFEMFPKTSSWPNHDSNKGVTAACPHAGAKSFYKNLIWLVKKGNSYPKLSKSYINDKGKEVLVLWGIHHPSTTADQQSLYQNANAYVFVGTSKYSKKFKPEIAIRPKVRDQEGRMNYYWTLIEPGDKITFEATGNLVVPRYAFAMERNAGSGIIISDTPVHDCNTTCQTPEGAINTSLPFQNIHPITIGKCPKYVKSTKLRLATGLRNIPSIQSRGLFGAIAGFIEGGWTGMVDGWYGYHHQNEQGSGYAADLKSTQNAIDKITNKVNSVIEKMNTQFTAVGKEFNHLEKRIENLNKKVDDGFLDIWTYNAELLVLLENERTLDYHDSNVKNLYEKVRNQLKNNAKEIGNGCFEFYHKCDNTCMESVKNGTYDYPKYSEEAKLNREKIDGVKLESTRIYQILAIYSTVASSLVLVVSLGAISFWMCSNGSLQCRICI

SEQ ID NO: 12821 - protein, 566 aa, synthetic construct; identical to SEQ ID NO: 9994
  REGION 1..566: note = hemagglutinin__InfluenzaA__AJI80348

SEQ ID NO: 12822 - protein, 566 aa, synthetic construct; identical to SEQ ID NO: 9858
  REGION 1..566: note = hemagglutinin__InfluenzaA__AJI80360

SEQ ID NO: 12823 - protein, 566 aa, synthetic construct; identical to SEQ ID NO: 9858
  REGION 1..566: note = hemagglutinin__InfluenzaA__AJI80372

SEQ ID NO: 12824 - protein, 566 aa, synthetic construct; identical to SEQ ID NO: 10040
  REGION 1..566: note = hemagglutinin__InfluenzaA__AJI80384

SEQ ID NO: 12825 - protein, 566 aa, synthetic construct; identical to SEQ ID NO: 10040
  REGION 1..566: note = hemagglutinin__InfluenzaA__AJI80395

SEQ ID NO: 12826 - protein, 566 aa, synthetic construct; identical to SEQ ID NO: 10040
  REGION 1..566: note = hemagglutinin__InfluenzaA__AJI80406

SEQ ID NO: 12827 - protein, 566 aa, synthetic construct; identical to SEQ ID NO: 10040
  REGION 1..566: note = hemagglutinin__InfluenzaA__AJI80417

SEQ ID NO: 12828 - protein, 566 aa, synthetic construct; identical to SEQ ID NO: 10040
  REGION 1..566: note = hemagglutinin__InfluenzaA__AJI80428

SEQ ID NO: 12829 - protein, 566 aa, synthetic construct; identical to SEQ ID NO: 9994
  REGION 1..566: note = hemagglutinin__InfluenzaA__AJI80439

SEQ ID NO: 12830 - protein, 566 aa, synthetic construct; identical to SEQ ID NO: 9994
  REGION 1..566: note = hemagglutinin__InfluenzaA__AJI80462

SEQ ID NO: 12831 - protein, 566 aa, synthetic construct
  REGION 1..566: note = hemagglutinin__InfluenzaA__AJI80474
MKAILVVLLYTFATANADTLCIGYHANNSTDTVDTVLEKNVTVTHSINLLEDKHNGKLCKLRGVAPLHLGKCNIAGWILGNPECESLSTASSWSYIVETSSSDNGTCYPGDFINYEELREQLSSVSSFERFEIFPKTSSWPNHDSNKGVTAACPHAGAKSFYKNLIWLVKKGNSYPKLSQSYINDKGKEVLVLWGIHHPSTTADQQSLYQNADAYVFVGTSRYSKKFKPEIAIRPKVRDQEGRMNYYWTLVEPGDKITFEATGNLVVPRYAFTMERNAGSGIIISDTPVHDCNTTCQTPEGAINTSLPFQNIHPITIGKCPKYVKSTKLRLATGLRNVPSIQSRGLFGAIAGFIEGGWTGMVDGWYGYHHQNEQGSGYAADLKSTQNAIDKITNKVNSVIEKMNTQFTAVGKEFNHLEKRIENLNKKVDDGFLDIWTYNAELLVLLENERTLDYHDSNVKNLYEKVRNQLKNNAKEIGNGCFEFYHKCDNTCMESVKNGTYDYPKYSEEAKLNREKIDGVKLESTRIYQILAIYSTVASSLVLVVSLGAISFWMCSNGSLQCRICI

SEQ ID NO: 12832 - protein, 566 aa, synthetic construct; identical to SEQ ID NO: 12831
  REGION 1..566: note = hemagglutinin__InfluenzaA__AJI80485

SEQ ID NO: 12833 - protein, 566 aa, synthetic construct; identical to SEQ ID NO: 10040
  REGION 1..566: note = hemagglutinin__InfluenzaA__AJI80496

SEQ ID NO: 12834 - protein, 566 aa, synthetic construct; identical to SEQ ID NO: 12643
  REGION 1..566: note = hemagglutinin__InfluenzaA__AJI80507

SEQ ID NO: 12835 - protein, 566 aa, synthetic construct; identical to SEQ ID NO: 10040
  REGION 1..566: note = hemagglutinin__InfluenzaA__AJI80518

SEQ ID NO: 12836 - protein, 566 aa, synthetic construct; identical to SEQ ID NO: 8132
  REGION 1..566: note = hemagglutinin__InfluenzaA__AJJ98765

SEQ ID NO: 12837 - protein, 566 aa, synthetic construct
  REGION 1..566: note = hemagglutinin__InfluenzaA__AJJ98777
MKTIIALSYILCLVFAQKLPGNDNSTATLCLGHHAVPNGTIVKTITNDQIEVTNATELVQSFSTGEICNSPHQILDGENCTLIDALLGDPQCDGFQNKKWDLFVERSKAYSNCYPYDVPDYASLRSLVASSGTLEFNNESFNWTGVTQNGTSSACIRRSNNSFFSRLNWLTHLKFKYPALNVTMPNNEEFDKLYIWGVHHPGTDNDQIFLYAQASGRITVSTKRSQQTVIPNIGSRPRVRNIPSRISIYWTIVKPGDILLINSTGNLIAPRGYFKIRSGKSSIMRSDAPIGKCNSECITPNGSIPNDKPFQNVNRITYGACPRYVKQNTLKLATGMRNVPEKQTRGIFGAIAGFIENGWEGMVDGWYGFRHQNSEGIGQAADLKSTQAAIDQINGKLNRLIGKTNEKFHQIEKEFSEVEGRIQDLEKYVEDTKIDLWSYNAELLVALENQHTIDLTDSEMNKLFEKTKKQLRENAEDMGNGCFKIYHKCDNACIGSIRNGTYDHDVYRDEALNNRFQIKGVELKSGYKDWILWISFAISCFLLCVALLGFIMWACQKGNIRCNICI

SEQ ID NO: 12838 - protein, 566 aa, synthetic construct; identical to SEQ ID NO: 9453
  REGION 1..566: note = hemagglutinin__InfluenzaA__AJJ98789

SEQ ID NO: 12839 - protein, 566 aa, synthetic construct
  REGION 1..566: note = hemagglutinin__InfluenzaA__AJJ98801
MKTIIALSYILCLVFAQKLPGNDNSTATLCLGHHAVPNGTIVKTITNDQIEVTNATELVQNSSIGEICDSPHQILDGENCTLIDALLGDPQCDGFQNKKWDLFVERNKAYSNCYPYDVPDYASLRSLVASSGTLEFNNESFNWTGVTQNGTSSACIRRSNNSFFSRLNWLTHLNFKYPALNVTMPNNEQFDKLYIWGVHHPGTDKDQIFLYAQSSGRITVSTKRSQQAVIPNIGSRPRIRNIPSRISIYWTIVKPGDILLINSTGNLIAPRGYFKIRSGKSSIMRSDAPIGKCKSECITPNGSIPNDKPFQNVNRITYGACPRYVKQSTLKLATGMRNVPEKQTRGIFGAIAGFIENGWEGMVDGWYGFRHQNSEGRGQAADLKSTQAAIDQINGKLNRLIGKTNEKFHQIEKEFSEVEGRIQDLEKYVEDTKIDLWSYNAELLVALENQHTIDLTDSEMNKLFEKTKKQLRENAEDMGNGCFKIYHKCDNACIGSIRNGTYDHDVYRDEALNNRFQIKGVELKSGYKDWILWISFAISCFLLCVALLGFIMWACQKGNIRCNICI

SEQ ID NO: 12840 - protein, 566 aa, synthetic construct
  REGION 1..566: note = hemagglutinin__InfluenzaA__AJJ98813
MKTIIALSYILCLVFAQKLPGNDNSTATLCLGHHAVPNGTIVKTITNDRIEVTNATELVQNSSIGEICDSPHQILDGENCTLIDALLGDPQCDGFQNKKWDLFVERSKAYSNCYPYDVPDYASLRSLVASSGTLEFNNESFNWTGVTQNGTSSACIRRSNSSFFSRLNWLTHLNFKYPALNVTMPNNEQFDKLYIWGVHHPGTDKDQIFLYAQSSGRITVSTKRSQQAVVPNIGSRPRIRNIPSRISIYWTIVKPGDILLINSTGNLIAPRGYFKIRSGKSSIMRSDAPIGKCKSECITPNGSIPNDKPFQNVNRITYGACPRYVKQSTLKLATGMRNVPEKQTRGIFGAIAGFIENGWEGMVDGWYGFRHQNSEGRGQAADLKSTQAAIDQINGKLNRLIGKTNEKFHQIEKEFSEVEGRIQDLEKYVEDTKIDLWSYNAELLVALENQHTIDLTDSEMNKLFEKTKKQLRENAEDMGNGCFKIYHKCDNACIGSIRNGTYDHDVYRDEALNNRFQIKGVELKSGYKDWILWISFAISCFLLCVALLGFIMWACQKGNIRCNICI

SEQ ID NO: 12841 - protein, 566 aa, synthetic construct
  REGION 1..566: note = hemagglutinin__InfluenzaA__AJJ98825
MKTIIALSYILCLVFAQELPGNDNSTATLCLGHHAVPNGTIVKTITNDRIEVTNATELVQNSSIGEICDSPHQILDGENCTLIDALLGDPQCDGFQNKKWDLFVERSKAYSNCYPYDVPDYASLRSLVASSGTLEFNNESFNWTGVTQNGTSSACIRRSNNSFFSRLNWLTHLNFKYPALNVTMPNNEQFDKLYIWGVHHPGTDKDQIFLYAQSSGRITVSTKRSQQAVIPNIGSRHRIRNIPSRISIYWTIVKPGDILLINSTGNLIAPRGYFKIRSGKSSIMRSDAPIGKCKSECITPNGSIPNDKPFQNVNRITYGACPRYVKQSTLKLATGMRNVPEKQTRGIFGAIAGFIENGWEGMVDGWYGFRHQNSEGRGQAADLKSTQAAIDQINGKLNRLIGKTNEKFHQIEKEFSEVEGRIQDLEKYVEDTKIDLWSYNAELLVALENQHTIDLTDSEMNKLFEKTKKQLRENAEDMGNGCFKIYHKCDNACIGSIRNGTYDHDVYRDEALNNRFQIKGVELKSGYKDWILWISFAISCFLLCVALLGFIMWACQKGNIRCNICI

SEQ ID NO: 12842 - protein, 566 aa, synthetic construct
  REGION 1..566: note = hemagglutinin__InfluenzaA__AJJ98837
MKTIIALSYILCLVFAQKLPGNDNSTATLCLGHHAVPNGTIVKTITNDQIEVTNATELVQSSSTGEICNSPHQILDGENCTLIDALLGDPQCDGFQNKKWDLFVERSKAHSNCYPYDVPDYASLRSLVASSGTLEFNNESFNWTGVTQNGTSSACIRRSNNSFFSRLNWLTHLNFKYPALNVTMPNNEQFDKLYIWGVHHPGTDKDQIFLYAQASGRITVSTKRSQQAVIPNIGSRPRVRNIPSRVSIYWTIVKPGDILLINSTGNLIAPRGYFKIRSGKSSIMRSDAPIGKCNSACITPNGSIPNDKPFQNVNRITYGACPRYVKQSTLKLATGMRNVPEKQTRGIFGAIAGFIENGWEGMVDGWYGFRHQNSEGRGQAADLKSTQAAIDQINGKLNRLIGKTNEKFHQIEKEFSEVEGRIQDLEKYVEDTKIDLWSYNAELLVALENQHTIDLTDSEMNKLFEKTKKQLRENAEDMGNGCFKIYHKCDNACIGSIRNGTYDHDVYRDEALNNRFQIKGVELKSGYKDWILWISFAISCFLLCVALLGFIMWACQKGNIRCNICI

SEQ ID NO: 12843 - protein, 566 aa, synthetic construct
  REGION 1..566: note = hemagglutinin__InfluenzaA__AJJ98849
MKTIIALSYILCLVFAQELPGNDNSTATLCLGHHAVPNGTIVKTITNDQIEVTNATELVQSSSTGEICNSPHQILDGENCTLIDALLGDPQCDGFQNKKWDLFVERSKAHSNCYPYDVPDYASLRSLVASSGTLEFNNESFNWTGVTQNGTSSACIRRSNNSFFSRLNWLTHLNFKYPALNVTMPNNEQFDKLYIWGVHHPGTDKDQIFLYAQASGRITVSTKRSQQAVIPNIGSRLRVRNIPSRVSIYWTIVKPGDILLINSTGNLIAPRGYFKIRSGKSSIMRSDAPIGKCNSACITPNGSIPNDKPFQNVNRITYGACPRYVKQNTLKLATGMRNVPEKQTRGIFGAIAGFIENGWEGMVDGWYGFRHQNSEGRGQAADLKSTQAAIDQINGKLNRLIGKTNEKFHQIEKEFSEVEGRIQDLEKYVEDTKIDLWSYNAELLVALENQHTIDLTDSEMNKLFEKTKKQLRENAEDMGNGCFKIYHKCDNACIGSIRNGTYDHDVYRDEALNNRFQIKGVELKSGYKDWILWISFAISCFLLCVALLGFIMWACQKGNIRCNICI

SEQ ID NO: 12844 - protein, 566 aa, synthetic construct
  REGION 1..566: note = hemagglutinin__InfluenzaA__AJJ98861
MKTIIALSYILCLVFAQKLPGNDNSTATLCLGHHAVPNGTIVKTITNDQIEVTNATELVQISSTGEICDSPHQILDGENCTLIDALLGDPQCDGFQNKKWDLFVERSKAYSNCYPYDVPDYASLRSLVASSGTLEFNNESFNWTGVTQNGTSSACIRRSNNSFFSRLNWLTHLKFKYPALNVTMPNNEQFDKLYIWGVHHPGTDNDQIFLYAQASGRITVSTKRSQQTVIPNIGSRPRVRNIPSRISIYWTIVKPGDILLINSTGNLIAPRGYFKIRSGKSSIMKSDAPIGKCNSECITPNGSIPNDKPFQNVNRITYGACPRYVKQNTLKLATGMRNVPEKQTRGIFGAIAGFIENGWEGMVDGWYGFRHQNSEGRGQAADLKSTQAAIDQINGKLNRLIGKTNEKFHQIEKEFSEVEGRIQDLEKYVEDTKIDLWSYNAELLVALENQHTIDLTDSEMNKLFEKTKKQLRENAEDMGNGCFKIYHKCDNACIGSIRNGTYDHDVYRDEALNNRFQIKGVELKSGYKDWILWISFAISCFLLCVALLGFIMWACQKGNIRCNICI

SEQ ID NO: 12845 - protein, 566 aa, synthetic construct
  REGION 1..566: note = hemagglutinin__InfluenzaA__AJJ98873
MKTIIALSYSLCLVFAQKLPGNDNSTATLCLGHHAVPNGTIVKTITNDQIEVTNATELVQSSSTGEICDSPHQILDGENCTLIDALLGDPQCDGFQNKKWDLFVERSKAYSNCYPYDVPDYASLRSLVASSGTLEFNNESFNWTGVTQNGTSSACIRKSNNSFFSRLNWLTHLKFKYPALNVTMPNNEQFDKLYIWGVHHPGTDNDQIFLYAQASGRITVSTKRSQQTVIPNIGSRPRVRNIPSRISIYWTIVKPGDILLINSTGNLIAPRGYFKIRSGKSSIMRSDAPIGKCNSECITPNGSIPNDKPFQNVNRITYGACPRYVKQNTLKLATGMRNVPEKQTRGIFGAIAGFIENGWEGMVDGWYGFRHQNSEGRGQAADLKSTQAAIDQINGKLNRLIGKTNEKFHQIEKEFSEVEGRIQDLEKYVEDTKIDLWSYNAELLVALENQHTIDLTDSEMNKLFEKTKKQLRENAEDMGNGCFKIYHKCDNACIGSIRNGTYDHDVYRDEALNNRFQIKGVELKSGYKDWILWISFAISCFLLCVALLGFIMWACQKGNIRCNICI

SEQ ID NO: 12846 - protein, 566 aa, synthetic construct
  REGION 1..566: note = hemagglutinin__InfluenzaA__AJJ98885
MKTIIALSNILCLVFAQKLPGNDNSTATLCLGHHAVPNGTIVKTITNDQIEVTNATELVQSSSTGEICDSPHQILDGENCTLIDALLGDPQCDGFQNKKWDLFVERSKAYSNCYPYDVPDYASLRSLVASSGTLEFNNESFNWTGVTQNGTSSACIRRSNNSFFSRLNWLTHLKFKYPALNVTMPNKEKFDKLYIWGVHHPGTDNDQIFLYAQASGRITVSTKRSQQTVIPNIGSRPRVRNIPSRISIYWTIVKPGDILLINSTGNLIAPRGYFKIRSGKSSIMRSDAPIGKCNSECITPNGSIPNDKPFQNVNRITYGACPRYVKQNTLKLATGMRNVPEKQTRGIFGAIAGFIENGWEGMVDGWYGFRHQNSEGIGQAADLKSTQAAIDQINGKLNRLIGKTNEKFHQIEKEFSEVEGRIQDLEKYVEDTKIDLWSYNAELLVALENQHTIDLTDSEMNKLFEKTKKQLRENAEDMGNGCFKIYHKCDNACIGSIRNGTYDHDVYRDEALNNRFQIKGVELKSGYKDWILWISFAISCFLLCVALLGFIMWACQKGNIRCNICI

SEQ ID NO: 12847 - protein, 566 aa, synthetic construct
  REGION 1..566: note = hemagglutinin__InfluenzaA__AJJ98897
MKTIIALSYILCLVFAQKLPGNDNSTATLCLGHHAVPNGTIVKTITNDQIEVTNATELVQSSSTGEICDSPHQILDGENCTLIDALLGDPQCDGFQNKKWDLFVERSKAYSNCYPYDVPDYASLRSLVASSGTLEFNNESFNWTGVTQNGTSSACIRRSNSSFFSRLNWLTHLKFKYPALNVTMPNNEKFDKLYIWGVHHPGTDNDQIFLYAQASGRITVSTKRSQQTVIPNIGSRPRVRNIPSRISIYWTIVKPGDILLINSTGNLIAPRGYFKIRSGKSSIMRSDAPIGKCNSECITPNGSIPNDKPFQNVNRITYGACPRYVKQNTLKLATGMRNVPEKQTRGIFGAIAGFIENGWEGMVDGWYGFRHQNSEGIGQAADLKSTQAAIDQINGKLNRLIGKTNEKFHQIEKEFSEVEGRIQDLEKYVEDTKVDLWSYNAELLVALENQHTIDLTDSEMNKLFEKTKKQLRENAEDMGNGCFKIYHKCDNACIGSIRNGTYDHDVYRDEALNNRFQIKGVELKSGYKDWILWISFAISCFLLCVALLGFIMWACQKGNIRCNICI

SEQ ID NO: 12848 - protein, 566 aa, synthetic construct; identical to SEQ ID NO: 11770
  REGION 1..566: note = hemagglutinin__InfluenzaA__AJJ98909

SEQ ID NO: 12849 - protein, 566 aa, synthetic construct
  REGION 1..566: note = hemagglutinin__InfluenzaA__AJJ98921
MKTIIALSYILCLVFAQKLPGKDNSTATLCLGHHAVPNGTIVKTITNDQIEVTNATELVQSSSTGEICNSPHQILDGENCTLIDALLGDPQCDGFQNKKWDLFVERSKAYSNCYPYDVPDYASLRSLVASSGTLEFNNESFNWTGVKQNGTSSACIRRSNSSFFSRLNWLTHLNFKYPALNVTMPNNEQFDKLYIWGVHHPGTDKDQIFLYAQSSGRITVSTKRSQQAVIPNIGSRPRIRNIPSRISIYWTIVKPGDILLINSTGNLIAPRGYFKIRSGKSSIMRSDAPIGKCNSECITPNGSIPNDKPFQNVNRITYGACPRYVKQSTLKLATGMRNVPEKQTRGIFGAIAGFIENGWEGMVDGWYGFRHQNSEGRGQAADLKSTQAAIDQINGKLNRLIGKTNEKFHQIEKEFSEVEGRIQDLEKYVEDTKIDLWSYNAELLVALENQHTIDLTDSEMNKLFEKTKKQLRENAEDMGNGCFKIYHKCDNACIGSIRNGTYNHDVYRDEALNNRFQIKGVELKSGYKDWILWISFAISCFLLCVALLGFIMWACQKGNIRCNICI

SEQ ID NO: 12850 - protein, 566 aa, synthetic construct; identical to SEQ ID NO: 9453
  REGION 1..566: note = hemagglutinin__InfluenzaA__AJJ98933

SEQ ID NO: 12851 - protein, 566 aa, synthetic construct; identical to SEQ ID NO: 6982
  REGION 1..566: note = hemagglutinin__InfluenzaA__AJJ98945

SEQ ID NO: 12852 - protein, 566 aa, synthetic construct
  REGION 1..566: note = hemagglutinin__InfluenzaA__AJJ98957
MKTIIALSYILCLVFAQKLPGNDNSTATLCLGHHAVPNGTIVKTITNDQIEVTNATELVQSSSTGEICDSPHQILDGENCTLIDALLGDPQCDGFQNKKWDLFVERSKAYSNCYPYDVPDYASLRSLVASSGTLEFNNESFNWTGVTQNGTSSACIRRSNNSFFSRLNWLTHSKFKYPALNVTMPNNEQFDKLYIWGVHHPGTDNDQIFLYAQASGRITVSTKRSQQTVIPNIGSRPRVRNIPSRISIYWTIVKPGDILLINSTGNLIAPRGYFKIRSGKSSIMRSDAPIGKCNSECITPNGSIPNDKPFQNVNRITYGACPRYVKQNTLKLATGMRNVPEKQTRGIFGAIAGFIENGWEGMVDGWYGFRHQNSEGRGQAADLKSTQAAIDQINGKLNRLIGKTNEKFHQIEKEFSEVEGRIQDLEKYVEDTKIDLWSYNAELLVALENQHTIDLTDSEMNKLFEKTKKQLRENAEDMGNGCFKIYHKCDNACIGSIRNGTYDHDVYRDEALNNRFQIKGVELKSGYKDWILWISFAISCFLLCVALLGFIMWACQKGNIRCNICI

SEQ ID NO: 12853 - protein, 566 aa, synthetic construct; identical to SEQ ID NO: 2434
  REGION 1..566: note = hemagglutinin__InfluenzaA__AJJ98969

SEQ ID NO: 12854 - protein, 566 aa, synthetic construct
  REGION 1..566: note = hemagglutinin__InfluenzaA__AJJ98981
MKTIIALSYILCLVFAQKLPGNDNSTATLCLGHHAVPNGTIVKTITNDRIEVTNATELVQNSSIGEICDSPHHILDGENCTLIDALLGDPQCDGFQNKKWDLFVERSKAYSNCYPYDVPDYASLRSLVASSGTLEFNNESFNWTGVTQNGTSSACIRRSNSSFFSRLNWLTHLNFKYPALNVTMPNNEQFDKLYIWGVHHPGTDKDQIFLYAQSSGRITVSTKRSQQAVIPNIGSRPRIRNVPSRISIYWTIVKPGDILLINSTGNLIAPRGYFKIRSGKSSIMRSDAPIGKCKSECITPNGSIPNDKPFQNVNRITYGACPRYVKQSTLKLATGMRNVPEKQTRGIFGAIAGFIENGWEGMVDGWYGFRHQNSEGRGQAADLKSTQAAIDQINGKLNRLIGKTNEKFHQIEKEFSEVEGRIQDLEKYVEDTKIDLWSYNAELLVALENQHTIDLTDSEMNKLFEKTKKQLRENAEDMGNGCFKIYHKCDNACIGSIRNGTYDHNVYRDEALNNRFQIKGVELKSGYKDWILWISFAISCFLLCVALLGFIMWACQKGNIRCNICI

SEQ ID NO: 12855 - protein, 566 aa, synthetic construct
  REGION 1..566: note = hemagglutinin__InfluenzaA__AJJ98993
MKTIIALSYILCLVFAQKLPGNDNSTATLCLGHHAVPNGTIVKTITNDQIEVTNATELVQNSSIGEICDNPHQILDGENCTLIDALLGDPQCDGFQNKKWDLFVERSKAYSNCYPYDVPDYASLRSLVASSGTLEFNNESFNWTGVTQNGTSSACMRRSNSSFFSRLNWLTHLNFKYPALNVTMPNNEQFDKLYIWGVHHPGTDKDQIFLYAQSSGRITVSTKRSQQAVIPNIGSRPRIRNIPSRISIYWTIVKPGDILLINSTGNLIAPRGYFKIRSGKSSIMRSDAPIGKCNSECITPNGSIPNDKPFQNVNRITYGACPRYVKQSTLKLATGMRNVPEKQTRGIFGAIAGFIENGWEGMVDGWYGFRHQNSEGRGQAADLKSTQAAIDQINGKLNRLIGKTNEKFHQIEKEFSEVEGRIQDLEKYVEDTKIDLWSYNAELLVALENQHTIDLTDSEMNKLFEKTKKQLRENAEDMGNGCFKIYHKCDNACIGSIRNGTYDHDVYRDEALNNRFQIKGVELKSGYKDWILWISFAISCFLLCVALLGFIMWACQKGNIRCNICI

SEQ ID NO: 12856 - protein, 566 aa, synthetic construct
  REGION 1..566: note = hemagglutinin__InfluenzaA__AJJ99005
MKTIIALSYILCLVFAQKLPGNDNSTATLCLGHHAVPNGTIVKTITNDQIEVTNATELVQSSSTGEICNSPHQILDGENCTLIDALLGDPQCDGFQNKKWDLFVERSKAHSNCYPYDVPDYASLRSLVASSGTLEFNNESFNWIGVTQNGTSSACIRRSNNSFFSRLNWLTHLNFKYPALNVTMPNNEQFDKLYIWGVHHPGTDKDQIFLYAQASGRITVSTKRSQQAVIPNIGSRPRVRNIPSRVSIYWTIVKPGDILLINSTGNLIAPRGYFKIRSGKSSIMRSDAPIGKCNSACITPNGSIPNDKPFQNVNRITYGACPRYVKQNTLKLATGMRNVPEKQTRGIFGAIAGFIENGWEGMVDGWYGFRHQNSEGRGQAADLKSTQAAIDQINGKLNRLIGKTNEKFHQIEKEFSEVEGRIQDLEKYVEDTKIDLWSYNAELLVALENQHTIDLTDSEMNKLFEKTKKQLRENAEDMGNGCFKIYHKCDNACIGSIRNGTYDHDVYRDEALNNRFQIKGVELKSGYKDWILWISFAISCFLLCVALLGFIMWACQKGNIRCNICI

SEQ ID NO: 12857 - protein, 566 aa, synthetic construct; identical to SEQ ID NO: 3411
  REGION 1..566: note = hemagglutinin__InfluenzaA__AJJ99017

SEQ ID NO: 12858 - protein, 566 aa, synthetic construct
  REGION 1..566: note = hemagglutinin__InfluenzaA__AJJ99029
MKTIIALSYILCLVFAQKLPGNDNSTATLCLGHHAVPNGTIVKTITNDQIEVTNATELVQSSSTGEICDSPHQILDGENCTLIDALLGDPQCDGFQNKKWDLFIERSKAYSNCYPYDVPDYASLRSLVASSGTLEFNNESFNWTGVTQNGTSSSCIRRSNNSFFSRLNWLTHLKFKYPALNVTMPNNEQFDKLYIWGVHHPGTDNDQIFLYAQASGRITVSTKRSQQTVIPNIGSRPRVRNIPSRISIYWTIVKPGDILLINSTGNLIAPRGYFKIRSGKSSIMRSDAPIGKCNSECITPNGSIPNDKPFQNVNRITYGACPRYVKQNTLKLATGMRNVPEKQTRGIFGAIAGFIENGWEGMVDGWYGFRHQNSEGRGQAADLKSTQAAIDQINGKLNRLIGKTNEKFHQIEKEFSEVEGRIQDLEKYVEDTKIDLWSYNAELLVALENQHTIDLTDSEMNKLFEKTKKQLRENAEDMGNGCFKIYHKCDNACIGSIRNGTYDHNVYRDEALNNRFQIKGVELKSGYKDWILWISFAISCFLLCVALLGFIMWACQKGNIRCNICI

SEQ ID NO: 12859 - protein, 566 aa, synthetic construct
  REGION 1..566: note = hemagglutinin__InfluenzaA__AJJ99041
MKTIIALSYILCLVFAQKLPGNDNSTATLCLGHHAVPNGTIVKTITNDQIEVTNATELVQSSSTGEICDSPHQILDGENCTLIDALLGDPQCDGFQNKKWDLFVERSKAYSNCYPYDVPDYASLRSLVASSGTLEFNNESFNWTGVTQNGTSSACKRGSDNSFFSRLNWLTHLKFKYPALNVTMPNNEKFDKLYIWGVHHPGTDNDQIFPYAQASGRITVSTKRSQQTVIPNIGSRPRVRNIPSRISIYWTIVKPGDILLINSTGNLIAPRGYFKIRSGKSSIMRSDAPIGKCNSGCITPNGSIPNDKPFQNVNRITYGACPRYVKQSTLKLATGMRNVPEKQTRGIFGAIAGFIENGWEGMVDGWYGFRHQNSEGIGQAADLKSTQAAINQINGKLNRLIGKTNEKFHQIEKEFSEVEGRIQDLEKYVEDTKIDLWSYNAELLVALENQHTIDLTDSEMNKLFERTKKQLRENAEDMGNGCFKIYHKCDNACIGSIRNGTYDHDVYRDEALNNRFQIKGVELKSGYKDWILWISFAISCFLLCVALLGFIMWACQKGNIRCNICI

SEQ ID NO: 12860 - protein, 566 aa, synthetic construct; identical to SEQ ID NO: 9858
  REGION 1..566: note = hemagglutinin__InfluenzaA__AJJ99053

SEQ ID NO: 12861 - protein, 566 aa, synthetic construct; identical to SEQ ID NO: 9858
  REGION 1..566: note = hemagglutinin__InfluenzaA__AJJ99065

SEQ ID NO: 12862 - protein, 566 aa, synthetic construct
  REGION 1..566: note = hemagglutinin__InfluenzaA__AJJ99089
MKTIIALSYILCLVFAQKLPGNDNSTATLCLGHHAVPNGTIVKTITNDRIEVTNATELVQNSSIGEICDSPHQILDGENCTLIDALLGDPQCDGFQNKKWDLFVERNKAYSNCYPYDVPDYASLRSLVASSGTLEFNNESFNWTGVTQNGTSSACIRRSNSSFFSRLNWLTHLNFKYPALNVTMPNNEQFDKLYIWGVHHPGTDKDQIFLYAQSSGRITVSTKRSQQAVIPNIGSRPRIRNIPSRISIYWTIVKPGDILLINSTGNLIAPRGYFKIRSGKSSIMRSDAPIGKCKSECITPNGSIPNDKPFQNVNRITYGACPRYVKQSTLKLATGMRNVPEKQTRGIFGAIAGFIENGWEGMVDGWYGFRHQNSEGRGQAADLKSTQAAIDQINGKLNRLIGKTNEKFHQIEKEFSEVEGRIQDLEKYVEDTKIDLWSYNAELLVALENQHTIDLTDSEMNKLFEKTKKQLRENAEDMGNGCFKIYHKCDNACIGSIRNGTYDHDVYRDEALNNRFQIKGVELKSGYKDWILWISFAISCFLLCVALLGFIMWACQKGNIRCNICI

SEQ ID NO: 12863 - protein, 566 aa, synthetic construct; identical to SEQ ID NO: 9548
  REGION 1..566: note = hemagglutinin__InfluenzaA__AJJ99101

SEQ ID NO: 12864 - protein, 566 aa, synthetic construct; identical to SEQ ID NO: 9453
  REGION 1..566: note = hemagglutinin__InfluenzaA__AJJ99113

SEQ ID NO: 12865 - protein, 566 aa, synthetic construct
  REGION 1..566: note = hemagglutinin__InfluenzaA__AJJ99125
MKTIIALSYILCMVFAQKLPGNDNSTATLCLGHHAVPNGTIVKTITNDQIEVTNATELVQSSSTGEICNSPHQILDGENCTLIDALLGDPQCDGFQNKKWDLFVERSKAHSNCYPYDVPDYASLRSLVASSGTLEFNNESFNWTGVTQNGTSSACIRRSSNSFFSRLNWLTHLNFKYPALNVTMPNNEQFDKLYIWGVHHPGTDKDQIFLYAQASGRITVSTKRSQQAVIPNIGSRPRVRNIPSRVSIYWTIVKPGDILLINSTGNLIAPRGYFKIRSGKSSIMRSDAPIGKCNSACITPNGSIPNDKPFQNVNRITYGACPRYVKQNTLKLATGMRNVPEKQTRGIFGAIAGFIENGWEGMVDGWYGFRHQNSEGRGQAADLKSTQAAIDQINGKLNRLIGKTNEKFHQIEKEFSEVEGRIQDLEKYVEDTKIDLWSYNAELLVALENQHTIDLTDSEMNKLFEKTKKQLRENAEDMGNGCFKIYHKCDNACIGSIRNGTYDHDVYRDEALNNRFQIKGVELKSGYKDWILWISFAISCFLLCVALLGFIMWACQKGNIRCNICI

SEQ ID NO: 12866 - protein, 566 aa, synthetic construct
  REGION 1..566: note = hemagglutinin__InfluenzaA__AJJ99137
MKTIIALSYILCLVFAQKLPGNDNSTATLCLGHHAVPNGTIVKTITNDQIEVTNATELVQSSSTGEICNSPHQILDGENCTLIDALLGDPQCDGFQNKKWDLFVERSKAHSNCYPYDVPDYASLRSLVASSGTLEFNNESFNWTGVTQNGTSSACIRRSNNSFFSRLNWLTHLNFKYPALNVTMPNNEQFDKLYIWGVHHPGTDKDQIFLYAQASGRITVSTKRSQQAVIPNIGSRPRVRNIPSRVSIYWTIVKPGDILLINSTGNLIAPRGYFKIRSGKSSIMRSDAPIGKCNSACITPNGSIPNDKPFQNVNRITYGACPRYVKQNTLKLATGMRNVPEKQTRGIFGAIAGFIENGWEGMVDGWYGFRHQNSEGRGQAADLKSTQAAIDQINGKLNRLIGKTNEKFHQIEKEFSEVEGRIQDLEKYVEDTKIDLWSYNAELLVALENQHTIDLTDSEMNKLFEKTKKQLRENAEDMGNGCFKIYHKCDNACIVSIRNGTYDHDVYRDEALNNRFQIKGVELKSGYKDWILWISFAISCFLLCVALLGFIMWACQKGNIRCNICI

SEQ ID NO: 12867 - protein, 566 aa, synthetic construct
  REGION 1..566: note = hemagglutinin__InfluenzaA__AJJ99149
MKTIIALSYILCLVFAQKFPGNDNSTATLCLGHHAVPNGTIVKTITNDQIEVTNATELVQSSSTGEICDSPHQILDGKNCTLIDALLGDPQCDGFQNKKWDLFVERSKAYSNCYPYDMPDYASLRSLVASSGTLEFNNESFNWTGVTQNGTSSACIRRSNSSFFSRLNWLTHLNFKYQALNVTMPNNEQFDKLYIWGVHHPGTDKDQIFLYAQASGRITVSTKRSQQTVIPNIGSRPRVRNIPSRISIYWTIVKPGDILLINSTGNLIAPRGYFKIQSGKSSIMRSDAPIGKCNSECITPNGSIPNDKPFQNVNRITYGACPRYVKQNTLKLATGMRNVPEKQTRGIFGAIAGFIENGWEGMVDGWYGFRHQNSEGRGQAADLKSTQAAIDQINGKLNRLIGKTNEKFHQIEKEFSEVEGRIQDLEKYVEDTKIDLWSYNAELLVALENQHTIDLTDSEMNKLFEKTKKQLRENAEDMGNGCFKIYHKCDNACIGSIRNGTYDHDVYRDEALNNRFQIKGVELKSGYKDWILWISFAISCFLLCVALLGFIMWACQKGNIRCNICI

SEQ ID NO: 12868 - protein, 566 aa, synthetic construct
  REGION 1..566: note = hemagglutinin__InfluenzaA__AJJ99161
MKTIIALSYILCLVFAQKLPGNDNSTATLCLGHHAVPNGTIVKTITNDQIEVTNATELVQSSSTGEICDSPHQILDGENCTLIDALLGDPQCDGFQNKKWDLFVERSKAYSNCYPYDVPDYASLRSLVASSGTLEFNNESFNWTGVTQNGTSSACIRRSNNSFFSRLNWLTHLKFKYPALNVTMPNNEQFDKLYIWGVHHPGTDNDQIFLYAQASGRITVSTKRSQQTVIPNIGSRPRVRDIPSRISIYWTIVKPGDILLINSTGNLIAPRGYFKIRSGKSSIMRSDAPIGKCNSECITPNGSIPNDKPFQNVNRITYGACPRYVKQNTLKLATGMRNVPEKQTRGIFGAIAGFIENGWEGMVDGWYGFRHQNSEGRGQAADLKSTQAAIDQINGKLNRLIGKTNEKFHQIEKEFSEVEGRIQDLEKYVEDTKIDLWSYNAELLVALENQHTIDLTDSEMNKLFEKTKKQLRENAEDMGNGCFKIYHKCDNACIGSIRNGTYDHDVYRDEALNNRFQIKGVELKSGYKDWILWISFAISCFLLCVALLGFIMWACQKGNIRCNICI

SEQ ID NO: 12869 - protein, 566 aa, synthetic construct
  REGION 1..566: note = hemagglutinin__InfluenzaA__AJJ99173
MKTIIALSYILCLVFAQKLPGNDNSTATLCLGHHAVPNGTIVKTITNDQIEVTNATELVQSSSTGEICNSPHQILDGENCTLIDALLGDPQCDGFQNKKWDLFVERSKAYSNCYPYDVPDYASLRSLVASSGTLEFNNESFNWTGVTQNGTSSACIRRSNSSFFSRLNWLTHLKFKYPALNVTMPNNEQFDKLYIWGVHHPGTDNDQIFLYAQASGRITVSTKRSQQTVIPNIGSRPRVRNIPSRISIYWTIVKPGDILLINSTGNLIAPRGYFKIRSGKSSIMRSDAPIGKCNSECITPNGSIPNDKPFQNVNRITYGACPRYVKQNTLKLATGMRNVPEKQTRGIFGAIAGFIENGWEGMVDGWYGFRHQNSEGRGQAADLKSTQAAIDQINGKLNRLIGKTNEKFHQIEKEFSEVEGRIQDLEKYVEDTKIDLWSYNAELLVALENQHTIDLTDSEMNKLFEKTKKQLRENAEDMGNGCFRIYHKCDNACIGSIRNGTYDHDVYRDEALNNRFQIKGVELKSGYKDWILWISFAISCFLLCVALLGFIMWACQKGNIRCNICI

SEQ ID NO: 12870 - protein, 566 aa, synthetic construct
  REGION 1..566: note = hemagglutinin__InfluenzaA__AJJ99185
MKTIIALSYILCLVFAQKLPGNDNSTATLCLGHHAVPNGTIVKTITNDQIEVTNATELVQSSSTGEICDSPHQILDGENCTLIDALLGDPQCDGFQNKKWDLFVERSKAYSNCYPYDVPDYASLRSLVASSGTLEFNNESFNWTGVTQNGTSSACIRKSNNSFFSRLNWLTHLKFKYPALNVTMPNNEQFDKLYIWGVHHPGTDNDQIFLYAQASGRITVSTKRSQQTVIPNIGSRPRVRNIPSRISIYWTIVKPGDILLINSTGNLIAPRGYFKIRSGKSSIMRADAPIGKCNSECITPNGSIPNDKPFQNVNRITYGACPRYVKQNTLKLATGMRNVPEKQTRGIFGAIAGFIENGWEGMVDGWYGFRHQNSEGRGQAADLKSTQAAIDQINGKLNRLIGKTNEKFHQIEKEFSEVEGRIQDLEKYVEDTKIDLWSYNAELLVALENQHTIDLTDSEMNKLFEKTKKQLRENAEDMGNGCFKIYHKCDNACIGSIRNGTYDHDVYRDEALNNRFQIKGVELKSGYKDWILWISFAISCFLLCVALLGFIMWACQKGNIRCNICI

SEQ ID NO: 12871 - protein, 566 aa, synthetic construct; identical to SEQ ID NO: 8808
  REGION 1..566: note = hemagglutinin__InfluenzaA__AJJ99197

SEQ ID NO: 12872 - protein, 566 aa, synthetic construct
  REGION 1..566: note = hemagglutinin__InfluenzaA__AJJ99209
MKTIIALSYILCLVFAQKLPGNDNSTATLCLGHHAVPNGTIVKTITNDQIEVTNATELVQSSSTGGICDSPHQILDGENCTLIDALLGDPQCDGFQNKKWDLFVERSKAYSNCYPYDVPDYASLRSLVASSGTLEFNNESFNWTGVTQNGTSSACKRKSDNSFFSRLNWLTHLKFKYPALNVTMPNNEEFDKLYIWGVHHPGTDNDQIFLYAQASGRITVSTKRSQQTVIPNIGSRPRVRNIPSRISIYWTIVKPGDILLINSTGNLIAPRGYFKIRSGKSSIMRSDAPIGKCNSECITPNGSIPNDKPFQNVNRITYGACPRYVKQSTLKLATGMRNVPEKQTRGIFGAIAGFIENGWEGMVDGWYGFRHQNSEGIGQAADLKSTQAAINQINGKLNRLIGKTNEKFHQIEKEFSEVEGRIQDLEKYVEDTKIDLWSYNAELLVALENQHTIDLTDSEMNKLFERTKKQLRENAEDMGNGCFKIYHKCDNACIGSIRNGTYDHDVYRDEALNNRFQIKGVELKSGYKDWILWISFAMSCFLLCVALLGFIMWACQKGNIRCNICI

SEQ ID NO: 12873 - protein, 566 aa, synthetic construct
  REGION 1..566: note = hemagglutinin__InfluenzaA__AJJ99221
MKTIIALSYILCLVFAQKLPGNDNSTATLCLGHHAVPNGTIVKTITNDQIEVTNATELVQSSSTGEICDSPHQILDGENCTLIDALLGDPQCDGFQNKKWDLFVERSKAYSNCYPYDVPDYASLRSLVASSGTLEFNNESFNWTGVTQNGTSSACIRRSNSSFFSRLNWLTHLKFKYPALNVTMPNNEKFDKLYIWGVHHPGTDNDQIFLYAQASGRITVSTKRSQQTVIPNIGSRPRVRNIPSRISIYWTIVKPGDILLINSTGNLIAPRGYFKIQSGKSSIMRSDAPIGKCNSECITPNGSIPNDKPFQNVNRITYGACPRYVKQNTLKLATGMRNVPEKQTRGIFGAIAGFIENGWEGMVDGWYGFRHQNSEGIGQAADLKSTQAAIDQINGKLNRLIGKTNEKFHQIEKEFSEVEGRIQDLEKYVEDTKIDLWSYNAELLVALENQHTIDLTDSEMNKLFEKTKKQLRENAEDMGNGCFKIYHKCDNACIGSIRNGTYDHDVYRDEALNNRFQIKGVELKSGYKDWILWISFAISCFLLCVALLGFIMWACQKGNIRCNICI

SEQ ID NO: 12874 - protein, 566 aa, synthetic construct; identical to SEQ ID NO: 1915
  REGION 1..566: note = hemagglutinin__InfluenzaA__AJJ99233

SEQ ID NO: 12875 - protein, 566 aa, synthetic construct
  REGION 1..566: note = hemagglutinin__InfluenzaA__AJJ99244
MKAILVVMLYTFATANADTLCIGYHANNSTDTVDTVLEKNVTVTHSVNLLEDKHNGKLCKLRGVAPLHLGKCNIAGWILGNPECESLSTASSWSYIVETSGSDNGTCYPGDFIDYEELREQLSSVSSFERFEIFPKTSSWPNHDSNKGVTAACPHAGAKGFYKNLIWLVKKGNSYPKLSKSYINDKGKEVLVLWGIHHPSTTADQQSLYQNADTYVFVGTSRYSKKFKPEIAIRPKVRDQEGRMNYYWTLVEPGDKITFEATGNLVVPRYAFAMERNAGSGIIISDTPVHDCNTTCQTPKGAINTSLPFQNIHPITIGKCPKYVKSTKLRLATGLRNVPSIQSRGLFGAIAGFIEGGWTGMVDGWYGYHHQNEQGSGYAADLKSTQNAIDKITNKVNSVIEKMNTQFTAVGKEFNHLEKRIENLNKKVDDGFLDIWTYNAELLVLLENERTLDYHDSNVKNLYEKVRNQLKNNAKEIGNGCFEFYHKCDNTCMESVKNGTYDYPKYSEEAKLNREEIDGVKLESTRIYQILAIYSTVASSLVLVVSLGAISFWMCSNGSLQCRICI

SEQ ID NO: 12876 - protein, 566 aa, synthetic construct
  REGION 1..566: note = hemagglutinin__InfluenzaA__AJJ99255
MKAILVVLLYTFATANADTLCIGYHANNSTDTVDTVLEKNVTVTHSVNLLEDNHNGKLCKLRGVAPLHLGKCNIAGWILGNPECESLSTASSWSYIVETSSSDNGTCYPGDFINYEELREQLSSVSSFERFEIFPKTSSWPNHDSNKGVTAACPRAGAKSFYKNLIWLVKKGNSYPKLSKSYINDKGKEVLVMWGIHHPSTTADQQSLYQNADAYVFVGTSRYSKEFKPEIAIRPKVRDQEGRMNYYWTLVEPGDKITFEATGNLLVPRYAFAMERNAGSGIIISDTPVHDCNTTCQTPKGAINTSLPFQNIHPITIGKCPKYVKSTKLRLATGLRNVPSIQSRGLFGAIAGFIEGGWTGMVDGWYGYHHQNEQGSGYAADLKSTQNAIDKITNKVNSVIEKMNTQFTAVGKEFNHLEKRIENLNKKVDDGFLDIWTYNAELLVLLENERTLDYHDSNVKNLYEKVRNQLKNNAKEIGNGCFEFYHKCDNTCMESVKNGTYDYPKYSEEAKLNREEIDGVKLESTRIYQILAIYSTVASSLVLVVSLGAISFWMCSNGSLQCRICI

SEQ ID NO: 12877 - protein, 565 aa, synthetic construct
  REGION 1..565: note = hemagglutinin__InfluenzaA__AJJ99267
MKVKLLVLLCTFTATYADTICIGYHANNSTDTVDTVLEKNVTVTHSVNLLENSHNGKLCLLKGIAPLQLGNCSVAGWILGNPECELLISKESWSYIVEKPNPENGTCYPGHFADYEELREQLSSVSSFERFEIFPKESSWPNHTITGVSASCSHNGESSFYRNLLWLTGKNGLYPNLSKSYANNKEKEVLVLWGVHHPPNIGDQKALYHTENAYVSVVSSHYSRKFTPEIAKRPKVRDQEGRINYYWTLLEPGDTIIFEANGNLIAPRYAFALSRGFGSGIINSNAPMDKCDAKCQTPQGAINSSLPFQNVHPVTIGECPKYVRSAKLRMVTGLRNIPSIQSRGLFGAIAGFIEGGWTGMVDGWYGYHHQNEQGSGYAADQKSTQNAINGITNKVNSVIEKMNTQFTAVGKEFNKLERRMENLNKKVDDGFIDIWTYNAELLVLLENERTLDFHDSNVKNLYEKVKSQLKNNAKEIGNGCFEFYHKCNDECMESVKNGTYDYPKYSEESKLNREKIDGVKLESMGVYQILAIYSTVASSLVLLVSLGAVSFWMCSNGSLQCRVCI

SEQ ID NO: 12878 - protein, 566 aa, synthetic construct; identical to SEQ ID NO: 7050
  REGION 1..566: note = hemagglutinin__InfluenzaA__AJJ99278

SEQ ID NO: 12879 - protein, 566 aa, synthetic construct; identical to SEQ ID NO: 7053
  REGION 1..566: note = hemagglutinin__InfluenzaA__AJJ99289

SEQ ID NO: 12880 - protein, 565 aa, synthetic construct
  REGION 1..565: note = hemagglutinin__InfluenzaA__AJJ99301
MKVKLLVLLCTFTATYADTICIGYHANNSTDTVDTVLEKNVTVTHSVNLLENSHNGKLCLLKGIAPLQLGNCSVAGWILGNPECESLISKESWSYIVEKPNPENGTCYPGHFADYEELREQLSSVSSFERFEIFPKESSWPNHTVTGVSASCSHNGESSFYRNLLWLTGKNGLYPNLSKSYANNKEKEVLVLWGVHHPPNIGDQKALYHTENAYVSVVSSHYSRKFTPEIAKRPKVRDQEGRINYYWTLLEPGDTIIFEANGNLIAPRYAFALSRGFGSGIINSNAPMDKCDAKCQTPQGAINSSLPFQNVHPVTIGECPKYVRSAKLRMVTGLRNIPSIQSRGLFGAIAGFIEGGWTGMVDGWYGYHHQNEQGSGYAADQKSTQNAINGITNKVNSVIEKMNTQFTAVGKEFNKLERRMENLNKKVDDGFIDIWTYNAELLVLLENERTLDFHDSNVKNLYEKVKSQLKNNAKEIGNGCFEFYHKCNDECMESVKNGTYDYPKYSEESKLNREKIDGVKLESMGVYQILAIYSTVASSLVLLVSLGAISFWMCSNGSLQCRICI

SEQ ID NO: 12881 - protein, 565 aa, synthetic construct
  REGION 1..565: note = hemagglutinin__InfluenzaA__AJJ99324
MKVKLLVLLCTFTATYADTICIGYHANNSTDTVDTVLEKNVTVTHSVNLLENSHNGKLCLLKGIAPLQLGNCSVAGWILGNPECELLISKESWSYIVEKPNPENGTCYPGHFADYEELREQLSSVSSFERFEIFPKESSWPNHTVTGVSASCSHNGENSFYRNLLWLTGKSGLYPNLSKSYANNKEKEVLVLWGVHHPPNIADQKTLYHTENAYVSVVSSHYSRKFTPEIAKRPKVRDQEGRINYYWTLLEPGDTIIFEANGNLIAPRYAFALSRGFGSGIINSNAPMDKCDAKCQTPQGAINSSLPFQNVHPVTIGECPKYVRSAKLRMVTGLRNIPSIQSRGLFGAIAGFIEGGWTGMVDGWYGYHHQNEQGSGYAADQKSTQNAINGITNKVNSVIEKMNTQFTAVGKEFNKLERRMENLNKKVDDGFIDIWTYNAELLVLLENERTLDFHDSNVKNLYEKVKSQLKNNAKEIGNGCFEFYHKCNDECMESVKNGTYDYPKYSEESKLNREKIDGVKLESMGVYQILAIYSTVASSLVLLVSLGAISFWMCSNGSLQCRICI

SEQ ID NO: 12882 - protein, 566 aa, synthetic construct
  REGION 1..566: note = hemagglutinin__InfluenzaA__AJJ99335
MEAILVVLLYTFATANADTLCIGYHANNSTDTVDTVLEKNVTVTHSVNLLEDKHNGKLCKLRGVAPLHLGKCNIAGWILGNPECESLSTASSWSYIVETSSSNNGTCYPGDFIDYEELREQLSSVSSFERFEIFPKTSSWPNHDSNKGVTAACPHAGAKSFYKNLIWLVKKGNSYPKLSKSYINDKGKEVLVLWGIHHPSTSADQQSLYQNADAYVFVGSSRYSKKFKPEIAIRPKVRDQEGRMNYYWTLVEPGDKITFEATGNLVVPRYAFAMERNAGSGIIISDTPVHDCNTTCQTPNGAINTSLPFHNIHPITIGKCPKYVKSTKLRLATGLRNVPSIQSRGLFGAIAGFIEGGWTGMVDGWYGYHHQNEQGSGYAADLKSTQNAIDEITNKVNSVIEKMNTQFTAVGKEFNHLEKRIENLNKKVDDGFLDIWTYNAELLVLLENERTLDYHDSNVKNLYEKVRSQLKNNAKEIGNGCFEFYHKCDNTCMESVKNGTYDYPKYSEEAKLNREEIDGVKLESTRIYQILAIYSTVASSLVLVVSLGAISFWMCSNGSLQCRICI

SEQ ID NO: 12883 - protein, 566 aa, synthetic construct; identical to SEQ ID NO: 4785
  REGION 1..566: note = hemagglutinin__InfluenzaA__AJJ99357

SEQ ID NO: 12884 - protein, 566 aa, synthetic construct; identical to SEQ ID NO: 6824
  REGION 1..566: note = hemagglutinin__InfluenzaA__AJJ99368

SEQ ID NO: 12885 - protein, 566 aa, synthetic construct; identical to SEQ ID NO: 6435
  REGION 1..566: note = hemagglutinin__InfluenzaA__AJJ99379

SEQ ID NO: 12886 - protein, 566 aa, synthetic construct
  REGION 1..566: note = hemagglutinin__InfluenzaA__AJJ99390
MEAILVVLLYTFATANADTLCIGYHANNSTDTVDTVLEKNVTVTHSVNLLEDKHNGKLCKLRGVAPLHLGKCNIAGWILGNPECESLSTASSWSYIVETSSSDNGTCYPGDFIDYEELREQLSSVSSFERFEIFPKTSSWPNHDSNKGVTAACPHAGAKSFYKNLIWLVKKGNSYPKLSKSYINDKGKEVLVLWGIHHPSTSADQQSLYQNADAYVFVGSSRYSKKFKPEIAIRPKVRDQEGRMNYYWTLVEPGDKITFEATGNLVVPRYAFAMERNAGSGIIISDTPVHDCNTTCQTPKGAINTSLPFHNIHPITIGKCPKYVKSTKLRLATGLRNVPSIQSRGLFGAIAGFIEGGWTGMVDGWYGYHHQNEQGSGYAADLKSTQNAIDKITNKVNSVIEKMNTQFTAVGKEFNHLEKRIENLNKKVDDGFLDIWTYNAELLVLLENERTLDYHDSNVKNLYEKVRSQLKNNAKEIGNGCFEFYHKCDNTCMESVKNGTYDYPKYSEEAKLNREEIDGVKLESTRIYQILAIYSTVASSLVLVVSLGAISFWMCSNGSLQCRICI

SEQ ID NO: 12887 - protein, 566 aa, synthetic construct; identical to SEQ ID NO: 4785
  REGION 1..566: note = hemagglutinin__InfluenzaA__AJJ99401

SEQ ID NO: 12888 - protein, 565 aa, synthetic construct
  REGION 1..565: note = hemagglutinin__InfluenzaA__AJJ99413
MKVKLLVLLCTFTATYADTICIGYHANNSTDTVDTVLEKNVTVTHSVNLLENSHNGKLCLLKGIAPLQLGNCSVAGWILGNPECELLISKESWSYIVEKPNPENGTCYPGHFADYEELREQLSSVSSFERFEIFPKESSWPNHTVTGVSASCSHNGENSFYRNLLWLTGKNGLYPNLSKSYANNKEKEVLVLWGVHHPPNIADQKTLYHTENAYVSVVSSHYSRKFTPEIAKRPKVRDQEGRINYYWTLLEPGDTIIFEANGNLIAPRYAFALSRGFGSGIINSNASMDKCDAKCQTPQGAINSSLPFQNVHPVTIGECPKYVRSAKLRMVTGLRNIPSIQSRGLFGAIAGFIEGGWTGMVDGWYGYHHQNEQGSGYAADQKSTQNAINGITNKVNSVIEKMNTQFTAVGKEFNKLERRMENLNKKVDDGFIDIWTYNAELLVLLENERTLDFHDSNVKNLYEKVKSQLKNNAKEIGNGCFEFYHKCNDECMESVKNGTYDYPKYSEESKLNREKIDGVKLESMGVYQILAIYSTVASSLVLLVSLGAISFWMCSNGSLQCRICI

SEQ ID NO: 12889 - protein, 565 aa, synthetic construct; identical to SEQ ID NO: 3626
  REGION 1..565: note = hemagglutinin__InfluenzaA__AJJ99425

SEQ ID NO: 12890 - protein, 565 aa, synthetic construct
  REGION 1..565: note = hemagglutinin__InfluenzaA__AJJ99437
MKVKLLVLLCTFTATYADTICIGYHANNSTDTVDTVLEKNVTVTHSVNLLENSHNGKLCLLKGIAPLQLGNCSVAGWILGNPECELLISKESWSYIVEKPNPENGTCYPGHFADYEELREQLSSVSSFERFEIFPKESSWPNHTVTGVSASCSHNGENSFYRNLLWLTGKNGLYPSLSKSYANNKEKEVLVLWGVHHPPNIADQKTLYHTENAYVSVVSSHYSRKFTPEIAKRPKVRDQEGRINYYWTLLEPGDTIIFEANGNLIAPRYAFALSRGFGSGIINSNAPMDKCDAKCQTPQGAINSSLPFQNVHPVTIGECPKYVRSAKLRMVTGLRNIPSIQSRGLFGAIAGFIEGGWTGMVDGWYGYHHQNEQGSGYAADQKSTQNAINGITNKVNSVIEKMNTQFTAVGKEFNKLERRMENLNKKVDDGFIDIWTYNAELLVLLENERTLDFHDSNVKNLYEKVKSQLKNNAKEIGNGCFEFYHKCNDECMESVKNGTYDYPKYSEESKLNREKIDGVKLESMGVYQILAIYSTVASSLVLLVSLGAISFWMCSNGSLQCRICI

SEQ ID NO: 12891 - protein, 565 aa, synthetic construct
  REGION 1..565: note = hemagglutinin__InfluenzaA__AJJ99449
MKVKLLVLLCTFTATYADTICIGYHANNSTDTVDTVLEKNVTVTHSVNLLENSHNGKLCLLKGIAPLQLGNCSVAGWILGNPECELLISKESWSYIVEKPNPENGTCYPGHFADYEELREQLSSVSSFERFEIFPKESSWPNHTVTGVSASCSHNGESSFYRNLLWLTGKNGLYPNLSKSYANNKEKEVLVLWGVHHPPNIGDQKALYHTENAYVSVVSSHYSRKFTPEIAKRPKVRDQEGRINYYWTLLEPGDTIIFEANGNLIAPRYAFALSRGFGSGIINSNAPMGKCDAKCQTPQGAINSSLPFQNVHPVTIGECPKYVRSAKLRMVTGLRNIPSIQSRGLFGAIAGFIEGGWTGMVDGWYGYHHQNEQGSGYAADQKSTQNAINGITNKVNSVIEKMNTQFTAVGKEFNKLERRMENLNKKVDDGFIDIWTYNAELLVLLENERTLDFHDSNVKNLYEKVKSQLKNNAKEIGNGCFEFYHKCNDECMESVKNGTYDYPKYSKESKLNREKIDGVKLESMGVYQILAIYSTVASSLVLLVSLGAISFWMCSNGSLQCRICI

SEQ ID NO: 12892 - protein, 565 aa, synthetic construct; identical to SEQ ID NO: 2488
  REGION 1..565: note = hemagglutinin__InfluenzaA__AJJ99461

SEQ ID NO: 12893 - protein, 566 aa, synthetic construct
  REGION 1..566: note = hemagglutinin__InfluenzaA__AJJ99483
MKAILLVLLYTFATANADTLCIGYHANNSTDTVDTVLEKNVTVTHSVNLLEDKHNGKLCKLRGVAPLHLGKCNIAGWILGNPECESLSTASSWSYIVETSSSDNGTCYPGDFINYEELREQLSSVSSFERFEIFPKTSSWPNHDSNKGVTAACPRAGAKSFYKNLIWLVKKGNSYPKLSKSYINDKGKEVLVLWGIHHPSTTADQQSLYQNADAYVFVGTSRYSKKFKPEIAIRPKVRDQEGRMNYYWTLVEPGDKITFEATGNLLVPRYAFAMERNAGSGIIISDTPVHDCNTTCQTPKGAINTSLPFQNIHPITIGKCPKYVKSTKLRLATGLRNVPSIQSRGLFGAIAGFIEGGWTGMVDGWYGYHHQNEQGSGYAADLKSTQNAIDKITNKVNSVIEKMNTQFTAVGKEFNHLEKRIENLNKKVDDGFLDIWTYNAELLVLLENERTLDYHDSNVKNLYEKVRNQLKNNAKEIGNGCFEFYHKCDNTCMESVKNGTYDYPKYSEEAKLNREEIDGVKLESTRIYQILAIYSTVASSLVLVVSLGAISFWMCSNGSLQCRICI

SEQ ID NO: 12894 - protein, 566 aa, synthetic construct; identical to SEQ ID NO: 7053
  REGION 1..566: note = hemagglutinin__InfluenzaA__AJJ99494

SEQ ID NO: 12895 - protein, 566 aa, synthetic construct
  REGION 1..566: note = hemagglutinin__InfluenzaA__AJJ99505
MKAILVVLLYTFATANADTLCIGYHANNSTDTVDTVLEKNVTVTHSVNLLEDKHNGKLCKLRGVAPLHLGKCNIAGWILGNPECESLSTASSWSYIVETSSSDNGTCYPGDFINYEELREQLSSVSSFERFEIFPKTSSWPNHDSNKGVTAACPHAGAKSFYKNLIWLVKKGNSYPKLSKSYINDKGKEVLVLWGIHHPSTSADQQSLYQNADAYVFVGTSKYSKKFKPEIAVRPKVRDQEGRMNYYWTLVEPGDKITFEATGNLLVPRYAFAMERNAGSGIIISDTPVHDCNTTCQTPKGAINTSLPFQNIHPITIGKCPKYVKSTKLRLATGLRNVPSIQSRGLFGAIAGFIEGGWTGMVDGWYGYHHQNEQGSGYAADLKSTQNAIDKITNKVNSVIEKMNTQFTAVGKGFNHLEKRIENLNKKVDDGFLDIWTYNAELLVLLENERTLDYHDSNVKNLYEKVRSQLKNNAKEIGNGCFEFYHKCDNTCMESVKNGTYDYPKYSEEAKLNREEIDGVKLESTRIYQILAIYSTVASSLVLVVSLGAISFWMCSNGSLQCRICI

SEQ ID NO: 12896 - protein, 566 aa, synthetic construct; identical to SEQ ID NO: 2911
  REGION 1..566: note = hemagglutinin__InfluenzaA__AJJ99516

SEQ ID NO: 12897 - protein, 566 aa, synthetic construct
  REGION 1..566: note = hemagglutinin__InfluenzaA__AJJ99527
MKAILLVLLYTFATANADTLCIGYHANNSTDTVDTVLEKNVTVTHSVNLLEDKHNGKLCKLRGVAPLHLGKCNIAGWILGNPECESLSTASSWSYIVETSSSDNGTCYPGDFINYEELREQLSSVSSFERFEIFPKTSSWPNHDSNKGVTAACPRAGAKSFYKNLIWLVKKGNSYPKLSKSYINDKGKEVLVLWGIHHPSTTADQQSLYQNADAYVFVGTSRYSKKFKPEIAIRPKVRDQEGRMNYYWTLVEPGDKITFEATGNLLVPRYAFAMERNAGSGIIISDTPVHDCNTTCQTPKGAINTSLPFQNIHPITIGKCPKYVKSTKLRLATGLRNVPSIQSRGLFGAIAGFIEGGWTGMVDGWYGYHHQNEQGSGYAADLKSTQNVIDKITNKVNSVIEKMNTQFTAVGKEFNHLEKRIENLNKKVDDGFLDIWTYNAELLVLLENERTLDYHDSNVKNLYEKVRNQLKNNAKEIGNGCFEFYHKCDNTCMESVKNGTYDYPKYSEEAKLNREEIDGVKLESTRIYQILAIYSTVASSLVLVVSLGAISFWMCSNGSLQCRICI

SEQ ID NO: 12898 - protein, 566 aa, synthetic construct
  REGION 1..566: note = hemagglutinin__InfluenzaA__AJJ99538
MKAILVVLLYTFATANADTLCIGYHANNSTDTVDTVLEKNVTVTHSVNLLEDKHNGKLCKLRGVAPLHLGKCNIAGWILGNPECESLSTASSWSYIVETSSSDNGTCYPGDFIDYEELREQLSSVSSFERFEIFPKTSSWPNHDSNKGVTAACPHAGAKSFYKNLIWLVKKGNSYPKLSKSYINDKGKEVLVLWGIHHPSTTADQQSLYQNADTYVFVGTSRYSKKFKPEIAIRPKVRDQEGRMNYYWTLVEPGDKITFEATGNLVVPRYAFAMERNAGSGIIISDTPVHDCNTTCQTPKGAINTSLPFQNIHPITIGKCPKYVKSTKLRLATGLRNVPSIQSRGLFGAIAGFIEGGWTGMVDGWYGYHHQNEQGSGYAADLKSTQNAIDKITNKVNSVIEKMNTQFTAVGKEFNHLEKRIENLNKKVDDGFLDIWTYNAELLVLLENERTLDYHDSNVKNLYEKVRNQLKNNAKETGNGCFEFYHKCDNTCMESVKNGTYDYPKYSEEAKLNREKIDGVKLESTRIYQILAIYSTVASSLVLVVSLGAISFWMCSNGSLQCRICI

SEQ ID NO: 12899 - protein, 566 aa, synthetic construct
  REGION 1..566: note = hemagglutinin__InfluenzaA__AJJ99549
MKAILVVLLYTFATANADTLCIGYHANNSTDTVDTVLEKNVTVTHSVNLLEDKHNGKLCKLRGVAPLHLGKCNIAGWILGNPECESLSTASSWSYIVETSSSDNGTCYPGDFIDYEELREQLSSVSSFERFEIFPKTSSWPNHDSNKGVTAACPHAGAKGFYKNLIWLVKKGNSYPKLSKSYINDKGKEVLVLWGIHHPSTTADQQSLYQNADTYVFVGTSRYSKKFKPEIAIRPKVRDQEGRMNYYWTLVEPGDKITFEATGNLVVPRYAFAMERNAGSGIIISDTPVHDCNTTCQTPKGAINTSLPFQNIHPITIGKCPKYVKSTKLRLATGLRNVPSIQSRGLFGAIAGFIEGGWTGMVDGWYGYHHQNEQGSGYAADLKSTQNAIDKITNKVNSVIEKMNTQFTAVGKEFNHLEKRIENLNKKVDDGFLDIWTYNAELLVLLENERTLDYHDSNVKNLYEKVRNQLKNNAKEIGNGCFEFYHKCDNMCMESVKNGTYDYPKYSEEAKLNREEIDGVKLESTRIYQILAIYSTAASSLVLVVSLGAISFWMCSNGSLQCRICI

SEQ ID NO: 12900 - protein, 566 aa, synthetic construct; identical to SEQ ID NO: 7089
  REGION 1..566: note = hemagglutinin__InfluenzaA__AJJ99560

SEQ ID NO: 12901 - protein, 566 aa, synthetic construct
  REGION 1..566: note = hemagglutinin__InfluenzaA__AJJ99571
MKAILVVLLYTFATANADTLCIGYHANNSTDTVDTVLEKNVTVTHSVNLLEDKHNGKLCKLRGVAPLHLGKCNIAGWILGNPECESLSTASSWSYIVETSSSDNGTCYPGDFIDYEELREQLSSVSSFERFEIFPKTSSWPNHDSNKGVTAACPHAGAKSFYKNLIWLVKKGNSYPKLSKSYINDKGKEVLVLWGIHHPSTTADQQSLYQNADTYVFVGTSRYSKKFKPEIAIRPKVRDQEGRMNYYWTLVEPGDKITFEATGNLVVPRYAFAMERNAGSGIIISDTPVHDCNTTCQTPKGAINTSLPFQNIHPITIGKCPKYVKSTKLRLATGLRNVPSIQSRGLFGAIAGFIEGGWTGMVDGWYGYHHQNEQGSGYAADLKSTQNAIDKITNKVNSVIEKMNIQFTAVGKEFNHLEKRIENLNKKVDDGFLDIWTYNAELLVLLENERTLDYHDSNVKNLYEKVRNQLKNNAKEIGNGCFEFYHKCDNTCMESVKNGTYDYPKYSEEAKLNREEIDGVKLESTRIYQILAIYSTVASSLVLVVSLGAISFWMCSNGSLQCRICI

SEQ ID NO: 12902 - protein, 566 aa, synthetic construct
  REGION 1..566: note = hemagglutinin__InfluenzaA__AJJ99582
MKAILVVLLYTFATANADTLCIGYHANNSTDTVDTVLEKNVTVTHSVNLLEDKHNGKLCKLRGVAPLHLGKCNIAGWILGNPECESLSTASSWSYIVETSSSDNGTCYPGDFIDYEELREQLSSVSSFERFEIFPKTSSWPNHDSNKGVTAACPHAGAKSFYKNLIWLVKKGNSYPKLSKSYINDKGKEVLVLWGIHHPSTSADQQSLYQNADAYVFVGTSRYSKKFKPEIAIRPKVRDQEGRMNYYWTLVEPGDKITFEATGNLVVPRYAFAMERNAGSGIIISDTPVHDCNTTCQTPNGAINTSLPFQNIHPITIGKCPKYVKSTKLRLATGLRNVPSIQSRGLFGAIAGFIEGGWTGMVDGWYGYHHQNEQGSGYAADLKSTQNAIDKITNKVNSVIEKMNTQFTAVGKEFNHLEKRIENLNKKVDDGFLDIWTYNAELLVLLENERTLDYHDSNVKNLYEKVRSQLKNNAKEIGNGCFEFYHKCDNTCMESVKNGTYDYPKYSEEAKLNREEIDGVKLESTRIYQILAIYSTVASSLVLVVSLGAISFWMCSNGSLQCRICI

SEQ ID NO: 12903 - protein, 566 aa, synthetic construct; identical to SEQ ID NO: 2911
  REGION 1..566: note = hemagglutinin__InfluenzaA__AJJ99593

SEQ ID NO: 12904 - protein, 566 aa, synthetic construct
  REGION 1..566: note = hemagglutinin__InfluenzaA__AJJ99604
MKAILVVLLYTFATANADTLCIGYHANNSTDTVDTVLEKNVTVTHSVNLLEDKHNGKLCKLRGVAPLHLGKCNIAGWILGNPECESLSTASSWSYIVETSSSDNGTCYPGDFIDYEELREQLSSVSSFERFEIFPKTSSWPNHDSNKGVTAACPHAGAKSFYKNLIWLVKKGNSYPKLSKSYINDKGKEVLVLWGIHHPSTSADQQSLYQNADAYVFVGTSRYSKKFKPEIAIRPRVRDQEGRMNYYWTLVEPGDKITFEATGNLVVPRYAFAMERDAGSGIIISDTPVHDCNTTCQTPKGAINTSLPFQNIHPITIGKCPKYVKSTKLRLATGLRNVPSIQSRGLFGAIAGFIEGGWTGMVDGWYGYHHQNEQGSGYAADLKSTQNAIDEITNKVNSVIEKMNTQFTAVGKEFNHLEKRIENLNKKIDDGFLDIWTYNAELLVLLENERTLDYHDSNVKNLYEKVRSQLKNNAKEIGNGCFEFYHKCDNTCMESVKNGTYDYPKYSEEAKLNREEIDGVKLESTRIYQILAIYSTVASSLVLVVSLGAISFWMCSNGSLQCRICI

SEQ ID NO: 12905 - protein, 565 aa, synthetic construct
  REGION 1..565: note = hemagglutinin__InfluenzaA__AJJ99616
MKVKLLVLLCTFTATYADTICIGYHANNSTDTVDTVLEKNVTVTHSVNLLENSHNGKLCLLKGIAPLQLGNCSVAGWILGNPECELLISKESWSYIVEKPNPENGTCYPGHFADYEELREQLSSVSSFERFEIFPKESSWPNHTVTGVSASCSHNGENSFYRNLLWLTGKNGLYPNLSKSYANNKEKEVLVLWGVHHPPNIANQKTLYHTENAYVSVVSSHYSRKLTPEIAKRPKVRDQEGRINYYWTLLEPGDTIIFEANGNLIAPRYAFALSRGFGSGIINSNAPMDKCDAKCQTPQGAINSSLPFQNVHPVTIGECPKYVRSAKLRMVTGLRNIPSIQSRGLFGAIAGFIEGGWTGMVDGWYGYHHQNEQGSGYAADQKSTQNAINGITNKVNSVIEKMNTQFTAVGKEFNKLERRMENLNKKVDDGFIDIWTYNAELLVLLENERTLDFHDSNVKNLYEKVKSQLKNNAKEIGNGCFEFYHKCNDECMESVKNGTYDYPKYSEESKLNREKIDGVKLESMGVYQILAIYSTVASSLVLLVSLGAISFWMCSNGSLQCRICI

SEQ ID NO: 12906 - protein, 565 aa, synthetic construct; identical to SEQ ID NO: 3626
  REGION 1..565: note = hemagglutinin__InfluenzaA__AJJ99628

SEQ ID NO: 12907 - protein, 565 aa, synthetic construct
  REGION 1..565: note = hemagglutinin__InfluenzaA__AJJ99640
MKVKLLVLLCTFTATYADTICIGYHANNSTDTVDTVLEKNVTVTHSVNLLENSHNGKLCLLKGIAPLQLGNCSVAGWILGNPECELLISKESWSYIVEKPNPENGTCYPGHFADYEELREQLSSVSSFERFEIFPKESSWPNHTVTGVSASCSHNGENSFYRNLLWLTGKNGLYPNLSKSYANNKEKEVLVLWGVHHPPNIANQKTLYHTENAYVSVVSSHYSRKFTPEIAKRPKVRDQEGRINYYWTLLEPGDTIIFEANGNLIAPRYAFALSRGFGSGIINSNAPMDKCDAKCQTPQGAINSSLPFQNVHPVTIGECPKYVRSAKLRMVTGLRNIPSIQSRGLFGAVAGFIEGGWTGMVDGWYGYHHQNEQGSGYAADQKSTQNAINGITNKVNSVIEKMNTQFTAVGKEFNKLERRMENLNKKVDDGFIDIWTYNAELLVLLENERTLDFHDSNVKNLYEKVKSQLKNNAKEIGNGCFEFYHKCNDECMESVKNGTYDYPKYSEESKLNREKIDGVKLESMGVYQILAIYSTVASSLVLLVSLGAISFWMCSNGSLQCRICI

SEQ ID NO: 12908 - protein, 565 aa, synthetic construct; identical to SEQ ID NO: 3626
  REGION 1..565: note = hemagglutinin__InfluenzaA__AJJ99652

SEQ ID NO: 12909 - protein, 565 aa, synthetic construct
  REGION 1..565: note = hemagglutinin__InfluenzaA__AJJ99664
MKAKLLVLLCTFTATYADTICIGYHANNSTDTVDTVLEKNVTVTHSVNLLENSHNGKLCLLKGIAPLQLGNCSIAGWILGNPECELLISKESWSYIVEKPNPENGTCYPGHFADYEELREQLSSVSSFERFEIFPKESSWPNHTVTGVSASCSHNGESSFYRNLLWLTGKNGLYPNLSKSYANNKEKEVLVLWGVHHPPNIGDQKALYHTENAYVSVVSSHYSRKFTPEIAKRPKVRDQEGRINYYWTLLEPGDTIIFEANGNLIAPRYAFALSRGFGSGIINSNAPMDKCDAKCQTPQGAINSSLPFQNVHPVTIGECPKYVRSAKLRMVTGLRNIPSIQSRGLFGAIAGFIEGGWTGMVDGWYGYHHQNEQGSGYAADQKSTQNAINGITNKVNSVIEKMNTQFTAVGKEFNKLERRMENLNKKVDDGFIDIWTYNAELLVLLENERTLDFHDSNVKNLYEKVKSQLKNNAKEIGNGCFEFYHKCNDECMESVKNGTYDYPKYSEESKLNREKIDGVKLESMGVYQILAIYSTVASSLVLLVSLGAISFWMCSNGSLQCRICI

SEQ ID NO: 12910 - protein, 566 aa, synthetic construct
  REGION 1..566: note = hemagglutinin__InfluenzaA__AJJ99675
MKAILLVLLYTFATAKADTLCIGYHANNSTDTVDTVLEKNVTVTHSVNLLEDKHNGKLCKLRGVAPLHLGKCNIAGWILGNPECESLSTASSWSYIVETSSSDNGTCYPGDFINYEELREQLSSVSSFERFEIFPKTSSWPNHDSNKGVTAACPRAGAKSFYKNLIWLVKKGNSYPKLSKSYINDKGKEVLVLWGIHHPSTTADQQSLYQNADAYVFVGTSRYSKKFKPEIAIRPKVRDQEGRMNYYWTLVEPGDKITFEATGNLLVPRYAFAMERNAGSGIIISDTPVHDCNTTCQTPKGAINTSLPFQNIHPITIGKCPKYVKSTKLRLATGLRNVPSIQSRGLFGAIAGFIEGGWTGMVDGWYGYHHQNEQGSGYAADLKSTQNAIDKITDKVNSVIEKMNTQFTAVGKEFNHLEKRIENLNKKVDDGFLDIWTYNAELLVLLENERTLDYHDSNVKNLYEKVRNQLKNNAKEIGNGCFEFYHKCDNTCMESVKNGTYDYPKYSEEAKLNREEIDGVKLESTRIYQILAIYSTVASSLVLVVSLGAISFWMCSNGSLQCRICI

SEQ ID NO: 12911 - protein, 566 aa, synthetic construct
  REGION 1..566: note = hemagglutinin__InfluenzaA__AJJ99686
MTAILLVLLYTFATANADTLCIGYHANNSTDTVDTVLEKNVTVTHSVNLLEDKHNGKLCKLRGVAPLHLGKCNIAGWILGNPECESLSTASSWSYIVETSSSDNGTCYPGDFINYEELREQLSSVSSFERFEIFPKTSSWPNHDSNKGVTAACPRAGAKSFYKNLIWLVKKGNSYPKLSKSYINDKGKEVLVLWGIHHPSTTADQQSLYQNADAYVFVGTSRYSKKFKPEIAIRPKVRDQEGRMNYYWTLVEPGDKITFEATGNLLVPRYAFAMERNAGSGIIISDTPVHDCNTTCQTPKGAINTSLPFQNIHPITIGKCPKYVKSTKLRLATGLRNVPSIQSRGLFGAIAGFIEGGWTGMVDGWYGYHHQNEQGSGYAADLKSTQNAIDKITNKVNSVIEKMNTQFTAVGKEFNHLEKRIENLNKKVDDGFLDIWTYNAELLVLLENERTLDYHDSNVKNLYEKVRNQLKNNAKEIGNGCFEFYHKCDNTCMESVKNGTYDYPKYSEEAKLNREEIDGVKLESTRIYQILAIYSTVASSLVLVVSLGAISFWMCSNGSLQCRICI

SEQ ID NO: 12912 - protein, 566 aa, synthetic construct
  REGION 1..566: note = hemagglutinin__InfluenzaA__AJJ99697
MKAILVVLLYTFATANADTLCIGYHANNSTDTVDTVLEKNVTVTHSVNLLEDKHNGKLCKLRGVAPLHLGKCNIAGWILGNPECESLSTASSWSYIVETSSSDNGTCYPGDFIDYEELREQLSSVSSFERFEIFPKTSSWPNHDSNKGVTAACPHAGAKSFYKNLIWLVKKGNSYPKLSKSYINDKGKEVLVLWGIHHPSTTADQQSLYQNADTYVFVGTSRYSKKFKPEIAIRPKVRDQEGRMNYYWTLVEPGDKITFEATGNLVVPRYAFVMERNAGSGIIISDTPVHDCNTTCQTPKGAINTSLPFQNIHPITIGKCPKYVKSTKLRLATGLRNVPSIQSRGLFGAIAGFIEGGWTGMVDGWYGYHHQNEQGSGYAADLKSTQNAIDKITNKVNSVIEKMNTQFTAVGKEFNHLEKRIENLNKKVDDGFLDIWTYNAELLVLLENERTLDYHDSNVKNLYEKVRNQLKNNAKETGNGCFEFYHKCDNTCMESVKNGTYDYPKYSEEAKLNREKIDGVKLESTRIYQILAIYSTVASSLVLVVSLGAISFWMCSNGSLQCRICI

SEQ ID NO: 12913 - protein, 566 aa, synthetic construct
  REGION 1..566: note = hemagglutinin__InfluenzaA__AJJ99708
MKAILVVLLYTFATANADTLCIGYHANNSTDTVDTVLEKNVTVTHSVNLLEDKHNGKLCKLRGVAPLHLGKCNIAGWILGNPECESLSTASSWSYIVETSSSDNGTCYPGDFIDYEELREQLSSVSSFERFEIFPKTSSWPDHDSNKGVTAACPHAGAKSFYKNLIWLVKKGNSYPKLSKSYINDKGKEVLVLWGIHHPSTTADQQSLYQNADTYVFVGTSRYSKKFKPEIAIRPKVRDQEGRMNYYWTLVEPGDKITFEATGNLVVPRYAFVMERNAGSGIIISDTPVHDCNTTCQTPKGAINTSLPFQNIHPITIGKCPKYVKSTKLRLATGLRNVPSIQSRGLFGAIAGFIEGGWTGMVDGWYGYHHQNEQGSGYAADLKSTQNAIDKITNKVNSVIEKMNTQFTAVGKEFNHLEKRIENLNKKVDDGFLDIWTYNAELLVLLENERTLDYHDSNVKNLYEKVRNQLKNNAKETGNGCFEFYHKCDNTCMESVKNGTYDYPKYSEEAKLNREKIDGVKLESTRIYQILAIYSTVASSLVLVVSLGAISFWMCSNGSLQCRICI

SEQ ID NO: 12914 - protein, 566 aa, synthetic construct
  REGION 1..566: note = hemagglutinin__InfluenzaA__AJJ99719
MKAILVVMLYTFATANADTLCIGYHANNSTDTVDTVLEKNVTVTHSVNLLEDKHNGKLCKLRGVAPLHLGKCNIAGWILGNPECESLSTASSWSYIVETSSSDNGTCYPGDFIDYEELREQLSSVSSFERFEIFPKTSSWPNHDSNKGVTAACPHAGAKGFYKNLIWLVKKGNSYPKLSKSYINDKGKEVLVLWGIHHPSTTADQQSLYQNADTYVFVGTSRYSKKFKPEIAIRPKVRDQEGRMNYYWTLVEPGDKITFEATGNLVVPRYAFAMERNAGSGIIISDTPVHDCNTTCQTPKGAINTSLPFQNIHPITIGKCPKYVKSTKLRLATGLRNVPSIQSRGLFGAIAGFIEGGWTGMVDGWYGYHHQNEQGSGYAADLKSTQNAIDKITNKVNSVIEKMNTQFTAVGKEFNHLEKRIENLNKKVDDGFLDIWTYNAELLVLLENERTLDYHDSNVKNLYEKVRNQLKNNAKEIGNGCFEFYHKCDNTCMESVKNGTYDYPKYSEEAKLNREEIEGVKLESTRIYQILAIYSTVASSLVLVVSLGAISFWMCSNGSLQCRICI

SEQ ID NO: 12915 - protein, 566 aa, synthetic construct
  REGION 1..566: note = hemagglutinin__InfluenzaA__AJJ99730
MKAILVVMLYTFATANADTLCIGYHANNSTDTVDTVLEKNVTVTHSVNLLEDKHNGKLCKLRGVAPLHLGKCNIAGWILGNPECESLSTASSWSYIVETSSSDNGTCYPGDFIDYEELREQLSSVSSFERFEIFPKTSSWPNHDSNKGVTAACPHAGAKGFYKNLIWLVKKGNSYPKLSKSYINDKGKEVLVLWGIHHPSTTADQQSLYQNADTYVFVGTSRYSKKFKPEIAIRPKVRDQEGRMNYYWTLIEPGDKITFEATGNLVVPRYAFAMERNAGSGIIISDTPVHDCNTTCQTPKGAINTSLPFQNIHPITIGKCPKYVKSTKLRLATGLRNVPSIQSRGLFGAIAGFIEGGWTGMVDGWYGYHHQNEQGSGYAADLKSTQNAIDKITNKVNSVIEKMNTQFTAVGKEFNHLEKRIENLNKKVDDGFLDIWTYNAELLVLLENERTLDYHDSNVKNLYEKVRNQLKNNAKEIGNGCFEFHHKCDNTCMESVKNGTYDYPKYSEEAKLNREEIDGVKLESTRIYQILAIYSTVASSLVLVVSLGAISFWMCSNGSLQCRICI

SEQ ID NO: 12916 - protein, 566 aa, synthetic construct; identical to SEQ ID NO: 7042
  REGION 1..566: note = hemagglutinin__InfluenzaA__AJJ99741

SEQ ID NO: 12917 - protein, 566 aa, synthetic construct; identical to SEQ ID NO: 3833
  REGION 1..566: note = hemagglutinin__InfluenzaA__AJJ99752

SEQ ID NO: 12918 - protein, 566 aa, synthetic construct; identical to SEQ ID NO: 2669
  REGION 1..566: note = hemagglutinin__InfluenzaA__AJJ99763

SEQ ID NO: 12919 - protein, 565 aa, synthetic construct
  REGION 1..565: note = hemagglutinin__InfluenzaA__AJJ99775
MKVKLLVLLCTFTATYADTICIGYHANNSTDTVDTVLEKNVTVTHSVNLLENSHNGKLCLLKGIAPLQLGNCSVAGWILGNPECELLISKESWSYIVEKPNPENGTCYPGHFADYEELREQLSSVSSFERFEIFPKESSWPNHTVTGVSASCSHNGENSFYRNLLWLTGKNGLYPNLSKSYANNKEKEVLVLWGVHHPPNIADQKTLYHTENAYVSVVSSHYSRKFTPEIAKRPKVRDQEGRINYYWTLLEPGDTIIFEANGNLIAPRYAFALSRGFGSGIINSNAPTDKCDAKCQTPQGAINSSLPFQNVHPVTIGECPKYVRSAKLRMVTGLRNIPSIQSRGLFGAIAGFIEGGWTGMVDGWYGYHHQNEQGSGYAADQKSTQNAINGITNKVNSVIEKMNTQFTAVGKEFNKLERRMENLNKKVDDGFIDIWTYNAELLVLLENERTLDFHDSNVKNLYEKVKSQLKNNAKEIGNGCFEFYHKCNDECMESVKNGTYDYPKYSEESKLNREKIDGVKLESMGVYQILAIYSTVASSLVLLVSLGAISFWMCSNGSLQCRICI

SEQ ID NO: 12920 - protein, 566 aa, synthetic construct
  REGION 1..566: note = hemagglutinin__InfluenzaA__AJJ99786
MKAILVVLLYTFATANADTLCIGYHANNSTDTVDTVLEKNVTVTHSVNLLEDKHNGKLCKLRGVAPLHLGKCNIAGWILGNPECESLSTASSWSYIVETSSSDNGTCYPGDFIDYEELREQLSSVSSFERFEIFPKTSSWPNHDSNKGVTAACPHAGAKSFYKNLIWLVKKGNSYPKLSKSYINDKGKEVLVLWGIHHPSTSADQQSLYQNADAYVFVGTSRYSKKFKPEIAIRPKVRDQEGRMNYYWTLVEPGDKITFEATGNLVVPRYAFAMERDAGSGIIISDTPVHDCNTTCQTPKGAINTSLPFQNIHPITIGKCPKYVKSTKLRLATGLRNIPSIQSRGLFGAIAGFIEGGWTGMVDGWYGYHHQNEQGSGYAADLKSTQNAIDEITNKVNSVIEKMNTQFTAVGKEFNHLEKRIENLNKKIDDGFLDIWTYNAELLVLLENERTLDYHDSNVKNLYEKVRSQLKNNAKEIGNGCFEFYHKCDNTCMESVKNGTYDYPKYSEEAKLNREEIDGVKLESTRIYQILAIYSAVASSLVLVVSLGAISFWMCSNGSLQCRICI

SEQ ID NO: 12921 - protein, 565 aa, synthetic construct
  REGION 1..565: note = hemagglutinin__InfluenzaA__AJJ99798
MKVKLLVLLCTFTATYADTICIGYHANNSTDTVDTVLEKNVTVTHSVNLLENSHNGKLCLLKGIAPLQLGNCSVAGWILGNPECELLISKESWSYIVERPNPENGTCYPGHFADYEELREQLSSVSSFERFEIFPKESSWPNHTVTGVSASCSHNGENSFYRNLLWLTGKNGLYPNLSKSYANNKEKEVLVLWGVHHPPNIANQKTLYHTENAYVSVVSSHYSRKFTPEIAKRPKVRDQEGRINYYWTLLEPGDTIMFEANGNLIAPRYAFALSRGFGSGIINSNAPMDKCDAKCQTPQGAINSSLPFQNVHPVTIGECPKYVRSAKLRMVTGLRNIPSIQSRGLFGAIAGFIEGGWTGMVDGWYGYHHQNEQGSGYAADQKSTQNAINGITNKVNSVIEKMNTQFTAVGKEFNKLERRMENLNKKVDDGFIDIWTYNAELLVLLENERTLDFHDSNVKNLYEKVKSQLKNNAKEIGNGCFEFYHKCNDECMESVKNGTYDYPKYSEESKLNREKIDGVKLESMGVYQILAIYSTVASSLVLLVSLGAISFWMCSNGSLQCRICI

SEQ ID NO: 12922 - protein, 565 aa, synthetic construct; identical to SEQ ID NO: 2488
  REGION 1..565: note = hemagglutinin__InfluenzaA__AJJ99810

SEQ ID NO: 12923 - protein, 565 aa, synthetic construct
  REGION 1..565: note = hemagglutinin__InfluenzaA__AJJ99822
MKVKLLVLLCTFTATYADTICIGYHANNSTDTVDTVLEKNVTVTHSVNLLENSHNGKLCLLKGIAPLQLGNCSVAGWILGNPECELLISKESWSYIVEKPNPENGTCYPGHFADYEELREQLSSVSSFERFEIFPKESSWPNHTVTGVSASCSHNGESSFYRNLLWLTGKNGLYPNLSKSYANNKEKEVLVLWGVHHPPNIGDQKALYHTENAYVSVVSSHYSRKFTPEIAKRPKVRDQEGRINYYWTLLEPGDTIIFEANGNLIAPRYAFALSRGFGSGIINSNAPMDKCDAKCQTPQGAINSSLPFQNVHPVTIGECPKYVRSAKLRMVTGLRNIPFIQSRGLFGAIAGFIEGGWTGMVDGWYGYHHQNEQGSGYAADQKSTQNAINGITNKVNSVIEKMNTQFTAVGKEFNKLERRMENLNKKVDDGFIDIWTYNAELLVLLENERTLDFHDSNVKNLYEKVKSQLKNNAKEIGNGCFEFYHKCNDECMESVKNGTYDYPKYSEESKLNREKIDGVKLESMGVYQILAIYSTVASSLVLLVSLGAISFWMCSNGSLQCRICI

SEQ ID NO: 12924 - protein, 566 aa, synthetic construct
  REGION 1..566: note = hemagglutinin__InfluenzaA__AJJ99833
MKAILLVLLYTFATANADTLCIGYHANNSTDTVDTVLEKNVTVTHSVNLLEDKHNGKLCKLRGVAPLHLGKCNIAGWILGNPECESLSTASSWSYIVETSSSDNGTCYPGDFINYEELREQLSSVSSFERFEIFPKTSSWPNHDSNKGVTAACPRAGAKSFYKNLIWLVKKGNSYLKLSKSYINDKGKEVLVLWGIHHPSTTADQQSLYQNADAYVFVGTSRYSKKFKPEIAIRPKVRDQEGRMNYYWTLVEPGDKITFEATGNLLVPRYAFAMERNAGSGIIISDTPVHDCNTTCQTPKGAINTSLPFQNIHPITIGKCPKYVKSTKLRLATGLRNVPSIQSRGLFGAIAGFIEGGWTGMVDGWYGYHHQNEQGSGYAADLKSTQNAIDKITNKVNSVIEKMNTQFTAVGKEFNHLEKRIENLNKKVDDGFLDIWTYNAELLVLLENERTLDYHDSNVKNLYEKVRNQLKNNAKEIGNGCFEFYHKCDNTCMESVKNGTYDYPKYSEEAKLNREEIDGVKLESTRIYQILAIYSTVASSLVLVVSLGAISFWMCSNGSLQCRICI

SEQ ID NO: 12925 - protein, 566 aa, synthetic construct; identical to SEQ ID NO: 6824
  REGION 1..566: note = hemagglutinin__InfluenzaA__AJJ99844

SEQ ID NO: 12926 - protein, 566 aa, synthetic construct
  REGION 1..566: note = hemagglutinin__InfluenzaA__AJJ99855
MKAILVVLLYTFATANADTLCIGYHANNSTDTVDTVLEKNVTVTHSVNLLEDKHNGKLCKLRGVAPLHLGKCNIAGWILGNPECESLSTASSWSYIVETSSSDNGTCYPGDFIDYEELREQLSSVSSFERFEIFPKTSSWPNHDSNKGVTAACPHAGAKSFYKNLIWLVKKGNSYPKLSKSYINDKGKEVLVLWGIHHPSTTADQQSLYQNADTYVFVGTSRYSKKFKPEIAIRPKVRDQEGRMNYYWTLVEPGDKITFEATGNLVVPRYAFAMERNAGSGIIISDTPVHDCNTTCQTPKGAINTSLPFQNIHPITIGKCPKYVKSTKLRLATGLRNVPSIQSRGLFGAIAGFIEGGWTGMVDGWYGYHHQNEQGSGYAADLKSTQNAIDKITNKVNSVIEKMNTQFTAVGKEFNHLEKRIENLNKKVDDGFLDIWTYNAELLVLLENERTLDYHDSNVKNLYEKVRNQLKNNAKEIGNGCFEFYHKCDSTCMESVKNGTYDYPKYSEEAKLNREEIDGVKLESTRIYQILAIYSTVASSLVLVVSLGAISFWMCSNGSLQCRICI

SEQ ID NO: 12927 - protein, 566 aa, synthetic construct
  REGION 1..566: note = hemagglutinin__InfluenzaA__AJJ99866
MKAILVVLLYTFATANADTLCIGYHANNSTDTVDTVLEKNVTVTHSVNLLEDKHNGKLCKLKGVAPLHLGKCNIAGWILGNPECESLSTASSWSYIVETSSSDNGTCYPGDFIDYEELREQLSSVSSFERFEIFPKTSSWPNHDSNKGVTAACPHAGAKSFYKNLIWLVKKGNSYPKLSKSYINDKGKEVLVLWGIHHPSTSADQQSLYQNADAYVFVGTSRYSKKFKPEIAIRPKVRDQEGRMNYYWTLVEPGDKITFEATGNLVVPRYAFAMERNAGSGIIISDTPVHDCNTTCQTPKGAINTSLPFQNIHPITIGKCPKYVKSTKLRLATGLRNVPSIQSRGLFGAIAGFIEGGWTGMVDGWYGYHHQNEQGSGYAADLKSTQNAIDEITNKVNSVIEKMNTQFTAVGKEFNHLEKRIENLNKKVDDGFLDIWTYNAELLVLLENERTLDYHDSNVKNLYEKVRSQLKNNAKEIGNGCFEFYHKCDNTCMESVKNGTYDYPKYSEEAKLNREEIDGVKLESTRIYQILAIYSTVASSLVLVVSLGAISFWMCSNGSLQCRICI

SEQ ID NO: 12928 - protein, 566 aa, synthetic construct
  REGION 1..566: note = hemagglutinin__InfluenzaA__AJJ99877
MEAILVVLLYTFATANADTLCIGYHANNSTDTVDTVLEKNVTVTHSVNLLEDKHNGKLCKLRGVAPLHLGKCNIAGWILGNPECESLSTASSWSYIVETSSSDNGTCYPGDFIDYEELREQLSSVSSFERFEIFPKTSSWPNHDSNKGVTAACPHAGAKSFYKNLIWLVKKGNSYPKLSKSYINDKGKEVLVLWGIHHPSTSADQQSLYQNADAYVFVGSSRYSKKFKPEIAIRPKVRDQEGRMNYYWTLVEPGDKITFEATGNLVVPRYAFAMERNAGSGIIISDTPVHDCNTTCQTPKGAINTSLPFHNIHPITIGKCPKYVKSTKLRLATGLRNVPSIQSRGLFGAIAGFIEGGWTGMVDGWYGYHHQNEQGSGYAADLKSTQNAIDEITNKVNSVIEKMNTQFTAVGKEFNHLEKRIENLNKKVDDGFLDIWTYNAELLVLLENERTLDYHDSNVRNLYEKVRSQLKNNAKEIGNGCFEFYHKCDNTCMESVKNGTYDYPKYSEEAKLNREEIDGVKLESTRIYQILAIYSTVASSLVLVVSLGAISFWMCSNGSLQCRICI

SEQ ID NO: 12929 - protein, 566 aa, synthetic construct
  REGION 1..566: note = hemagglutinin__InfluenzaA__AJJ99888
MKAILVVLLYTFATANADTLCIGYHANNSTDTVDTVLEKNVTVTHSVNLLEDKHNGKLCKLRGVAPLHLGKCNIAGWILGNPECESLSTASSWSYIVETSSSDNGTCYPGDFIDYEELREQLSSVSSFERFEIFPKTSSWPNHDSNKGVTAACPHAGAKGFYKNLIWLVKKGNSYPKLSKSYINDKGKEVLVLWGIHHPSTSADQQSLYQNADAYVFVGTSRYSKKFKPEIAIRPKVRDQEGRMNYYWTLVEPGDKITFEATGNLVVPRYAFAMERDAGSGIIISDTPVHDCNTTCQTPKGAINTSLPFQNIHPITIGKCPKYVKSTKLRLATGLRNVPSIQSRGLFGAIAGFIEGGWTGMVDGWYGYHHQNEQGSGYAADLKSTQNAIDEITNKVNSVIEKMNTQFTAVGKEFNHLEKRIENLNKKIDDGFLDIWTYNAELLVLLENERTLDYHDSNVKNLYEKVRSQLKNNAKEIGNGCFEFYHKCDNTCMESVKNGTYDYPKYSEEAKLNREEIDGVKLESTRIYQILAIYSTVASSLVLVVSLGAISFWMCSNGSLQCRICI

SEQ ID NO: 12930 - protein, 566 aa, synthetic construct
  REGION 1..566: note = hemagglutinin__InfluenzaA__AJJ99899
MKAILVVLLYTFATANADTLCIGYHANNSTDTVDTVLEKNVTVTHSVNLLEDKHNGKLCKLRGVAPLHLGKCNIAGWILGNPECESLSTASSWSYIVETSSSDNGTCYPGDFINYEELREQLSSVSSFERFEIFPKTSSWPNHDSNKGVTAACPRAGAKSFYKNLIWLVKKGNSYPNLSKSYINDKGKEVLVLWGIHHPSTTADQQSLYQNADAYVFVGTSRYSKKFKPEIAIRPKVRDQEGRMNYYWTLLEPGDKITFEATGNLLVPRYAFAMERNAGSGIIISDTPVHDCNTTCQTPKGAINTSLPFQNIHPITIGKCPKYVKSTKLRLATGLRNVPSIQSRGLFGAIAGFIEGGWTGMVDGWYGYHHQNGQGSGYAADLKSTQNAVDKITNKVNSVIEKMNTQFTAVGKEFNHLEKRIENLNKKVDDGFLDIWTYNAELLVLLENERTLDYHDSNVKNLYEKVRNQLKNNAKEIGNGCFEFYHKCDNTCMESVKNGTYDYPKYSEEAKLNREEIDGVKLESTRIYQILAIYSTVASSLVLVVSLGAISFWMCSNGSLQCRICI

SEQ ID NO: 12931 - protein, 566 aa, synthetic construct
  REGION 1..566: note = hemagglutinin__InfluenzaA__AJJ99910
MKAILVVLLYTFATANADTLCIGYHANNSTDTVDTVLEKNVTVTHSVNLLEDKHNGKLCKLRGVAPLHLGKCNIAGWILGNPECESLSTASSWSYIVETSSSDNGTCYPGDFIDYEELREQLSSVSSFERFEIFPKTSSWPNHDSDKGVTAACPHAGAKSFYKNLIWLVKKGNSYPKLSKSYINDKGKEVLVLWGIHHPSTTADQQSLYQNADTYVFVGTSRYSKKFKPEIAIRPKVRDQEGRMNYYWTLVEPGDKITFEATGNLVVPRYAFAMERNAGSGIIISDTPVHDCNTTCQTPKGAINTSLPFQNIHPITIGKCPKYVKSTKLRLATGLRNVPSIQSRGLFGAIAGFIEGGWTGMVDGWYGYHHQNEQGSGYAADLKSTQNAIDKITNKVNSVIEKMNTQFTAVGKEFNHLEKRIENLNKKVDDGFLDIWTYNAELLVLLENERTLDYHDSNVKNLYEKVRNQLKNNAKETGNGCFEFYHKCDNTCMESVKNGTYDYPKYSEEAKLNREKIDGVKLESTRIYQILAIYSTVASSLVLVVSLGAISFWMCSNGSLQCRICI

SEQ ID NO: 12932 - protein, 566 aa, synthetic construct; identical to SEQ ID NO: 6824
  REGION 1..566: note = hemagglutinin__InfluenzaA__AJJ99921

SEQ ID NO: 12933 - protein, 566 aa, synthetic construct
  REGION 1..566: note = hemagglutinin__InfluenzaA__AJJ99932
MKAILVVLLYTFATANADTLCIGYHANNSTDTVDTVLEKNVTVTHSVNLLEDKHNGKLCKLRGVAPLHLGKCDIAGWILGNPECESLSTASSWSYIVETSSSDNGTCYPGDFIDYEELREQLSSVSSFERFEIFPKTSSWPNHDSNKGVTAACPHAGAKSFYKNLIWLVKKGNSYPKLSKSYINDKGKEVLVLWGIHHPSTTADQQSLYQNADAYVFVGTSRYSKKFKPEIAIRPKVRDQEGRMNYYWTLVEPGDKITFEATGNLVVPRYAFAMERNAGSGIIISDTPVHDCNTTCQTPKGAINTSLPFQNIHPITIGKCPKYVKSTKLRLATGLRNVPSIQSRGLFGAIAGFIEGGWTGMVDGWYGYHHQNEQGSGYAADLKSTQNAIDKITNKVNSVIEKMNTQFTAVGKEFNHLEKRIENLNKKVDDGFLDIWTYNAELLVLLENERTLDYHDSNVKNLYEKVRNQLKNNAKEIGNGCFEFYHKCDNTCMESVKNGTYDYPKYSEEAKLNREEIDGVKLESTRIYQILAIYSTVASSLVLVVSLGAISFWMCSNGSLQCRICI

SEQ ID NO: 12934 - protein, 566 aa, synthetic construct; identical to SEQ ID NO: 6454
  REGION 1..566: note = hemagglutinin__InfluenzaA__AJJ99943

SEQ ID NO: 12935 - protein, 566 aa, synthetic construct
  REGION 1..566: note = hemagglutinin__InfluenzaA__AJJ99954
MKAILVVLLYTFATANADTLCIGYHANNSTDTVDTVLEKNVTVTHSVNLLEDKHNGKLCKLRGVAPLHLGKCNIAGWILGNPECESLSTASSWSYIVETSSSDNGTCYPGDFIDYEELREQLSSVSSFEKFEIFPKTSSWPNHDSNKGVTAACPHAGAKSFYKNLIWLVKKGNSYPKLSKSYINDKGKEVLVLWGIHHPSTSADQQSLYQNADAYVFVGTSRYSKKFKPEIAIRPKVRDQEGRMNYYWTLVEPGDKITFEATGNLVVPRYAFAMERNAGSGIITSDTPVHDCNTTCQTPKGAINTSLPFQNIHPITIGNCPKYVKSTKLRLATGLRNVPSIQSRGLFGAIAGFIEGGWTGMVDGWYGYHHQNEQGSGYAADLKSTQNAIDKITNKVNSVIEKMNTQFTAVGKEFNHLEKRIENLNKKVDDGFLDIWTYNAELLVLLENERTLDYHDSNVKNLYEKVRSQLKNNAKEIGNGCFEFYHKCDNTCMESVKNGTYDYPKYSEEAKLNREEIDGVKLESTRIYQILAIYSTVASSLVLVVSLGAISFWMCSNGSLQCRICI

SEQ ID NO: 12936 - protein, 566 aa, synthetic construct; identical to SEQ ID NO: 2911
  REGION 1..566: note = hemagglutinin__InfluenzaA__AJJ99965

SEQ ID NO: 12937 - protein, 565 aa, synthetic construct
  REGION 1..565: note = hemagglutinin__InfluenzaA__AJJ99989
MKVKLLVLLCTFTATYADTICIGYHANNSTDTVDTVLERNVTVTHSVNLLENSHNGKLCLLKGIAPLQLGNCSVAGWILGNPECELLISKESWSYIVEKPNPENGTCYPGHFADYEELREQLSSVSSFERFEIFPKESSWPNHTVTGVSASCSHNGESSFYRNLLWLTGKNGLYPNLSKSYANNKEKEVLVLWGVHHPPNIGDQKALYHTENAYVSVVSSHYSKKFTPEIAKRPKVRDQEGRINYYWTLLEPGDTIIFEANGNLIAPRYAFALSRGFGSGIINSNAPMDKCDAKCQTPQGAINSSLPFQNVHPVTIGECPKYVRSAKLRMVTGLRNIPSIQSRGLFGAIAGFIEGGWTGMVDGWYGYHHQNEQGSGYAADQRSTQNAINGITNKVNSVIEKMNTQFTAVGKEFNKLERRMENLNKKVDDGFIDIWTYNAELLVLLENERTLDFHDSNVKNLYEKVKSQLKNNAKEIGNGCFEFYHKCNDECMESVKNGTYDYPKYSEESKLNREKIDGVKLESMGVYQILAIYSTVASSLVLLVSLGAISFWMCSNGSLQCRICI

SEQ ID NO: 12938 - protein, 566 aa, synthetic construct
  REGION 1..566: note = hemagglutinin__InfluenzaA__AJK00001
MKAILVVLLYTFATANADTLCIGYHANNSTDTVDTVLEKNVTVTHSVNLLEDKHNGKLCKLRGVAPLHLGKCNIAGWILGNPECESLSTASSWSYIVETSSSDNGTCYPGDFINYEELREQLSSVSSFERFEIFPKTSSWPNHDSNKGVTAACPRAGEKSFYKNLIWLVKKGNSYPKLSKSYINDKGKEVLVLWGIHHPSTTADQQSLYQNADAYVFVGTSRYSKKFKPEIAIRPKVRDQEGRMNYYWTLVEPGDKITFEATGNLLVPRYAFAMERNAGSGIIISDTPVHDCNTTCQTPKGAINTSLPFQNIHPITIGKCPKYVKSTKLRLATGLRNVPSIQSRGLFGAIAGFIEGGWTGMVDGWYGYHHQNEQGSGYAADLKSTQNAIDKITNKVNSVIEKMNTQFTAVGKEFNHLEKRIENLNKKVDDGFLDIWTYNAELLVLLENERTLDYHDSNVKNLYEKVRNQLKNNAKEIGNGCFEFYHKCDNTCMESVKNGTYDYPKYSEEAKLNREKIDGVKLESTRIYQILAIYSTVASSLVLVVSLGAISFWMCSNGSLQCRICI

SEQ ID NO: 12939 - protein, 566 aa, synthetic construct
  REGION 1..566: note = hemagglutinin__InfluenzaA__AJK00012
MKAILVVLLCTFATANADTLCIGYHANNSTDTVDTVLEKNVTVTHSVNLLEDKHNGKLCKLRGVAPLHLGKCNIAGWILGNPECESLSTASSWSYIVETSSSDNGTCYPGDFIDYEELREQLSSVSSFERFEIFPKTSSWPNHDSNKGVTAACPHAGAKGFYKNLIWLVKKGNSYPKLSKSYINDKGKEVLVLWGIHHPSTTADQQSLYQNADTYVFVGTSRYSKKFKPEIAIRPKVRDQEGRMNYYWTLVEPGDKITFEATGNLVVPRYAFAMERNAGSGIIISDTTVHDCNTTCQTPKGAINTSLPFQNIHPITIGKCPKYVKSTKLRLATGLRNVPSIQSRGLFGAIAGFIEGGWTGMVDGWYGYHHQNEQGSGYAADLKSTQNAIDKITNKVNSVIEKMNTQFTAVGKEFNHLEKRIENLNKKVDDGFLDIWTYNAELLVLLENERTLDYHDSNVKNLYEKVRNQLKNNAKEIGDGCFEFYHKCDNTCMESVKNGTYDYPKYSEEAKLNREKIDGVKLESTRIYQILAIYSTVASSLVLVVSLGAISFWMCSNGSLQCRICI

SEQ ID NO: 12940 - protein, 566 aa, synthetic construct
  REGION 1..566: note = hemagglutinin__InfluenzaA__AJK00023
MKAILVVLLYTFATANADTLCIGYHANNSTDTVDTVLEKNVTVTHSVNLLEDKHNGKLCKLRGVAPLHLGKCNIAGWILGNPECESLSTASSWSYIVETSSSDNGTCYPGDFINYEELREQLSSVSSFERFEIFPKTSSWPNHDSNKGVTAACPRAGAKSFYKNLIWLVKKGNSYPKLSKSYINDKGKEVLVLWGIHHPSTTADQQSLYQNADAYVFVGTSRYSKKFKPEIAIRPKVRDQEGRMNYYWTLVEPGDKITFEATGNLLVPRYAFAMERNAGSGIIISDTPVHDCNTTCQTPKGAINTSLPFQNIHPITIGKCPKYVKSTKLRLATGLRNVPSIQSRGLFGAIAGFIEGGWTGMVDGWYGYHHQNEQGSGYAADLKSTQNAIDKITNKVNSVIEKMNTQFTAVGKEFNHLEKRIENLNKKVDDGFLDIWTYNAELLVLLENERTLDYHDSNVKNLYEKVRNQLKNNAKEIGNGCFEFYHKCDNTCMESVKNGTYDYPKYSEEAKLNREEIDGVKLESTRIYQILAIYSTVASSLVLVVSLGAISFWMCSNGSLQCRICI

SEQ ID NO: 12941 - protein, 566 aa, synthetic construct; identical to SEQ ID NO: 6824
  REGION 1..566: note = hemagglutinin__InfluenzaA__AJK00034

SEQ ID NO: 12942 - protein, 566 aa, synthetic construct; identical to SEQ ID NO: 7042
  REGION 1..566: note = hemagglutinin__InfluenzaA__AJK00045

SEQ ID NO: 12943 - protein, 566 aa, synthetic construct; identical to SEQ ID NO: 7042
  REGION 1..566: note = hemagglutinin__InfluenzaA__AJK00056

SEQ ID NO: 12944 - protein, 566 aa, synthetic construct; identical to SEQ ID NO: 2911
  REGION 1..566: note = hemagglutinin__InfluenzaA__AJK00067

SEQ ID NO: 12945 - protein, 565 aa, synthetic construct
  REGION 1..565: note = hemagglutinin__InfluenzaA__AJK00079
MKVKLLVLLCTFTATYADTICIGYHANNSTDTVDTVLEKNVTVTHSVNLLENSHNGKLCLLKGIAPLQLGNCSVAGWILGNPECELLISKESWSYIVEKPNPENGTCYPGHFADYEELREQLSSVSSFERFEIFPKESSWPNHTVTGVSASCSHNGENSFYRNLLWLTRKNGLYPNLSKSYANNKEKEVLVLWGVHHPPNIADQKTLYHTENAYVSVVSSHYSRKFTPEIAKRPKVRDQEGRINYYWTLLEPGDTIIFEANGNLIAPRYAFALSRGFGSGIINSNAPMDKCDAKCQTPQGAINSSLPFQNVHPVTIGECPKYVRSAKLRMVTGLRNIPSIQSRGLFGAIAGFIEGGWTGMVDGWYGYHHQNEQGSGYAADQKSTQNAINGITNKVNSVIEKMNTQFTAVGKEFNKLERRMENLNKKVDDGFIDIWTYNAELLVLLENERTLDFHDSNVKNLYEKVKSQLKNNAKEIGNGCFEFYHKCNDECMESVKNGTYDYPKYSEESKLNREKIDGVKLESMGVYQILAIYSTVASSLVLLVSLGAISFWMCSNGSLQCRICI

SEQ ID NO: 12946 - protein, 565 aa, synthetic construct
  REGION 1..565: note = hemagglutinin__InfluenzaA__AJK00091
MKVKLLVLLCTFTATYADTICIGYHANNSTDTVDTVLEKNVTVTHSVNLLENSHNGKLCLLKGIAPLQLGNCSVAGWILGNPECELLISKESWSYIVEKPNPENGTCYPGHFADYEELREQLSSVSSFERFEIFPKESSWPNHTITGVSASCSHNGESSFYRNLLWLTGKNGLYPNLSKSYANNKEKEVLVLWGVHHPPNIGVQKALYHTENAYVSVVSSHYSRKFTPEIAKRPKVRDQEGRINYYWTLLEPGDTIIFEANGNLIAPRYAFALSRGFGSGIINSNAPMDKCDAKCQTPQGAINSSLPFQNVHPVTIGECPKYVRSAKLRMVTGLRNIPSIQSRGLFGAIAGFIEGGWTGMVDGWYGYHHQNEQGSGYAADQKSTQNAINGITNKVNSVIEKMNTQFTAVGKEFNKLERRMENLNKKVDDGFIDIWTYNAELLVLLENERTLDFHDSNVKNLYEKVKSQLKNNAKEIGNGCFEFYHKCNDECMESVKNGTYDYPKYSEESKLNREKIDGVKLESMGVYQILAIYSTVASSLVLLVSLGAVSFWMCSNGSLQCRVCI

SEQ ID NO: 12947 - protein, 565 aa, synthetic construct; identical to SEQ ID NO: 2488
  REGION 1..565: note = hemagglutinin__InfluenzaA__AJK00103

SEQ ID NO: 12948 - protein, 566 aa, synthetic construct; identical to SEQ ID NO: 6920
  REGION 1..566: note = hemagglutinin__InfluenzaA__AJK00114

SEQ ID NO: 12949 - protein, 566 aa, synthetic construct
  REGION 1..566: note = hemagglutinin__InfluenzaA__AJK00125
MKAILVVLLYTFATANADTLCIGYHANNSTDTVDTVLEKNVTVTHSVNLLEDKHNGKLCKLREVAPLHLGKCNIAGWILGNPECESLSTASSWSYIVETSSSDNGTCYPGDFIDYEELREQLSSVSSFERFEIFPKTNSWPNHDSNKGVTAACPHAGAKSFYKNLIWLVKKGNSYPKLSKSYINDKGKEVLVLWGIHHPSTSADQQSLYQNADAYVFVGTSRYSKKFKPEIAIRPKVRDQEGRMNYYWTLVEPGDKITFEATGNLVVPRYAFAMERNAGSGIIISDTPVYDCNTTCQTPKGAINTSLPFQNIHPITIGKCPKYVKSTKLRLATGLRNVPSIQSRGLFGAIAGFIEGGWTGMVDGWYGYHHQNEQGSGYAADLKSTQNAIDEITNKVNSVIEKMNTQFTAVGKEFNHLEKRIENLNKKVDDGFLDIWTYNAELLVLLENERTLDYHDSNVKNLYEKVRSQLKNNAKEIGNGCFEFYHKCDNTCMESVKNGTYDYPKYSEEAKLNREKIDGVKLESTRIYQILAIYSTVASSLVLVVSLGAISFWMCSNGSLQCRICI

SEQ ID NO: 12950 - protein, 566 aa, synthetic construct; identical to SEQ ID NO: 2669
  REGION 1..566: note = hemagglutinin__InfluenzaA__AJK00136

SEQ ID NO: 12951 - protein, 567 aa, synthetic construct
  REGION 1..567: note = hemagglutinin__InfluenzaA__AJK00166
MEKIVLLLAIVSLVKSDQICIGYHANNSTEQVDTIMEKNVTVTHAQDILEKTHNGKLCDLDGVKPLILRDCSVAGWLLGNPMCDEFINVPEWSYIVEKANPANDLCYPGNFNDYEELKHLLSRINHFEKIQIIPKSSWSDHEASSGVSSACPYQGKPSFFRNVVWLIKKNNTYPTIKRSYNNTNQEDLLILWGIHHSNDAAEQTKLYQNPTTYISVGTSTLNQRLVPKIATRSKVNGQSGRMDFFWTILKPNDAINFESNGNFIAPEYAYKIVKKGDSAIMKSEVEYGNCNTKCQTPIGAINSSMPFHNIHPLTIGECPKYVKSNKLVLATGLRNSPLRERRRKRGLFGAIAGFIEGGWQGMVDGWYGYHHSNEQGSGYAADKESTQKAIDGVTNKVNSIIDKMNTQFEAVGREFNNLERRIENLNKKMEDGFLDVWTYNAELLVLMENERTLDFHDSNVKNLYDKVRLQLRDNAKELGNGCFEFYHKCDNECMESVRNGTYDYPQYSEEARLKREEISGVKLESIGTYQILSIYSTVASSLALAIMVAGLSLWMCSNGSLQCRICI

SEQ ID NO: 12952 - protein, 568 aa, synthetic construct
  REGION 1..568: note = hemagglutinin__InfluenzaA__AJK00177
MEKIVLLLAVVSLVRSDQICIGYHANNSTEQVDTIMEKNVTVTHAQDILEKTHNGKLCDLDGVKPLILRDCSVAGWLLGNPMCDEFINVPEWSYIVEKANPANDLCYPGNLNDYEELKHLLSRINHFEKIQIIPKSSWSDHEASLGVSSACPYQGTPSFFRNVVWLIKKNNTYPTIKRSYNNTNQEDLLILWGIHHSNDEAEQIKLYQNPTTYVSVGTSTLNQRLVPKIATRSKVNGQSGRMDFFWTILKPDDAINFESNGNFIAPEYAYKIVKKGDSAIMKSEVEYGNCNTKCQTPIGAINSSMPFHNIHPLTIGECPKYVKSNKLVLATGLRNSPLREKRRRKRGLFGAIAGFIEGGWQGMVDGWYGYHHSNEQGSGYAADKESTQKAIDGVTNKVNSIIDKMNTQFEAVGREFNNLERRIENLNKKMEDGFLDVWTYNAELLVLMENERTLDFHDSNVKNLYDKVRLQLRDNAKELGNGCFEFYHKCDNECMESVRNGTYDYPQYSEEARLKREEISGVKLESIGIYQILSIYSTVASSLALAIMVAGLSLWMCSNGSLQCRICI

SEQ ID NO: 12953 - protein, 567 aa, synthetic construct
  REGION 1..567: note = hemagglutinin__InfluenzaA__AJK00188
MEKIVLLLAVVSLVRSDQICIGYHANNSTEQVDTIMEKNVTVTHAQDILEKTHNGKLCDLDGVKPLILRDCSVAGWLLGNPMCDEFINVPEWSYIVEKANPANDLCYPGNLNDYEELKHLLSRINHFEKIQIIPKSSWSDHEASLGVSSACPYQGTPSFFRNVVWLIKKNNTYPTIKRSYNNTNQEDLLILWGIHHSNDEAEQIKLYQNPTTYISVGTSTLNQRLVPKIATRSKVNGQSGRMDFFWTILKPDDAINFESNGNFIAPEYAYKIVKKGDSAIMKSEVEYGNCNTKCQTPIGAINSSMPFHNIHPLTIGECPKYVKSNKLVLATGLRNSPLREKRRKRGLFGAIAGFIEGGWQGMVDGWYGYHHSNEQGSGYAADKESTQKAIDGVTNKVNSIIDKMNTQFEAVGREFNNLERRIENLNKKMEDGFLDVWTYNAELLVLMENERTLDFHDSNVKNLYDKVRLQLRDNAKELGNGCFEFYHKCDNECMESVRNGTYDYPQYSEEARLKREEISGVKLESIGTYQILSIYSTVASSLALAIMVAGLSLWMCSNGSLQCRICI

SEQ ID NO: 12954 - protein, 567 aa, synthetic construct
  REGION 1..567: note = hemagglutinin__InfluenzaA__AJK00207
MEKIVLLLAIVSLVRSDQICIGYHANNSTEQVDTIMEKNVTVTHAQDILEKTHNGKLCDLDGVKPLILRDCSVAGWLLGNPMCDEFINVPEWSYIVEKANPANDLCYPGNFNDYEELKHLLSRINHFEKIQIIPKSSWSDHEASSGVSSACPYQGTPSFFRNVVWLIKKNNTYPTIKRSYNNTSQEDLLVLWGIHHSNDATEQMKLYQNPTTYVSVGTSTLNQRLVPKIATRSKVNGQSGRMDFFWTILKSNDAINFESNGNFIAPEYAYKIVKKGDSAIMKSEVEYGNCSTKCQTPIGAINSSMPFHNIHPLTIGECPKYVKSNKLVLATGLRNSPLRERRRKRGLFGAIAGFIEGGWQGMVDGWYGYHHSNEQGSGYAADKESTQKAIDGVTNKVNSIIDKMNTQFEAVGREFNNLERRIENLNKKMEDGFLDVWTYNAELLVLMENERTLDFHDSNVKNLYDKVRLQLRDNTKELGNGCFEFYHKCDNECMESVRNGTYDYPQYSEEARLKREEISGVKLESIGTYQILSIYSTVASSLALAIMVAGLSLWMCSNGSLQCRICI

SEQ ID NO: 12955 - protein, 567 aa, synthetic construct
  REGION 1..567: note = hemagglutinin__InfluenzaA__AJK00218
MEKIVLFLAIVSLVRSDQICIGYHANNSTEQVDTIMEKNVTVTHAQDILEKTHNGKLCDLDGVKPLILRDCSVAGWLLGNPMCDEFINVPEWSYIVEKANPANDLCYPGNFNDYEELKHLLSRINHFEKIRIIPKSSWPDHEASSGVSSACPYQGTPSFFRNIVWLIKKNNTYPTIKRSYNNTSQEDLLVLWGIHHSSDATEQIKLYQNPTTYVSVGTSTLNQRLVPKIATRSKVNGQSGRMDFFWTILKSNDAINFESNGNFIAPEYAYKIVKKGDSAIMKSEVEYGNCSTKCQTPIGAINSSMPFHNIHPLTIGECPKYVKSNKLVLATGLRNSPLRERRRKRGLFGAIAGFIEGGWQGMVDGWYGYHHSNEQGSGYAADKESTQKAIDGVTNKVNSIIDKMNTQFEAVGREFNNLERRIENLNKKMEDGFLDVWTYNAELLVLMENERTLDFHDSNVKNLYDKVRLQLRDNAKELGNGCFEFYHKCDNECMESVRNGTYDYPQYSEEARLKREEISGVKLESIGTYQILSIYSTAASSLALAIMVAGLSLWMCSNGSLQCRICI

SEQ ID NO: 12956 - protein, 567 aa, synthetic construct
  REGION 1..567: note = hemagglutinin__InfluenzaA__AJK00239
MEKIVLLLAIVSLVRSDQICIGYHANNSTEQVDTIMEKNVTVTHAQDILEKTHNGKLCDLDGVKPLILRDCSVAGWLLGNPMCDEFINVPEWSYIVEKANPANDLCYPGNFNDYEELKHLLSRINHFEKIQIIPKSSWSDHEASSGVSSACPYQGTPSFFRNVVWLIKKNNTYPTIKRSYNNTSQEDLLVLWGIHHSNDATEQMKLYQNPTTYVSVGTSTLNQRLVPKIATRSKVNGQSGRMDFFWTILKSNDAINFESNGNFIAPEYAYKIVKKGDSAIMKSEVEYGNCSTKCQTPIGAINSSMPFHNIHPLTIGECPKYVKSNKLVLATGLRNSPLRERRRKRGLFGAIAGFIEGGWQGMVDGWYGYHHSNEQGSGYAADKESTQKAIDGVTNKVNSIIDKMNTQFEAVGREFNNLERRIENLNKKMEDGFLDVWTYNAELLVLMENERTLDFHDSNVKNLYDKVRLQLRDNAKELGNGCFEFYHKCDNECMESVRNGTYDYPQYSEEARLKREEISGVKLESIGTYQILSIYSTVASSLALAIMVAGLSLWMCSNGSLQCRICI

SEQ ID NO: 12957 - protein, 567 aa, synthetic construct
  REGION 1..567: note = hemagglutinin__InfluenzaA__AJS18468
MEKIVLLLAVVSLVKSDQICIGYHANNSTEQVDTIMEKNVTVTHAQDILEKTHNGRLCDLNGVKPLILKDCSVAGWLLGNPMCDEFIRVPEWSYIVERANPANDLCYPGNLNDYEELKHLLSRINHFEKTLIIPKSSWPNHETSLGVSAACPYQGVPSFFRNVVWLTKKNDAYPTIKMSYNNTNREDLLILWGIHHSNNAAEQTNLYKNPTTYVSVGTSTLNQRLVPKIATRSQVNGQRGRMDFFWTILKPNDAIHFESNGNFIAPEYAYKIVKKGDSTIMKSEMEYGHCNTKCQTPIGAINSSMPFHNIHPLTIGECPKYVKSNKLVLATGLRNSPLRERRRKRGLFGAIAGFIEGGWQGMVDGWYGYHHSNEQGSGYAADRESTQKAIDGVTNKVNSIIDKMNTQFEAVGREFNNLERRIENLNKKMEDGFLDVWTYNAELLVLMENERTLDFHDSNVKNLYDKVRLQLRDNAKELGNGCFEFYHKCDNECMESVRNGTYDYPQYSEEARLKREEISGVKLESIGTYQILSIYSTVASSLTLAIIVAGLSLWMCSNGSLQCRICI

SEQ ID NO: 12958 - protein, 567 aa, synthetic construct
  REGION 1..567: note = hemagglutinin__InfluenzaA__AJS18479
MEKIVLLLAVVSLVKSDQICIGYHANNSTEQVDTIMEKNVTVTHAQDILEKTHNGRLCDLNGVKPLILKDCSVAGWLLGNPMCDEFIRVPEWSYIVERANPANDLCYPGNLNDYEELKHLLSRINHFEKTLIIPKSSWPNHETSLGVSAACPYQGMPSFFRNVVWLTKKNDTYPTIKMSYNNTNREDLLILWGIHHSNNAAEQTNLYKNPTTYVSVGTATLNQRLVPKIATRSQVNGQRGRMDFFWTILKPNDAIHFESNGNFIAPEYAYKIVKKGDSTIMKSEMEYGHCNTKCQTPIGAINSSMPFHNIHPLTIGECPKYVKSNKLVLATGLRNSPLRERRRKRGLFGAIAGFIEGGWQGMVDGWYGYHHSNEQGSGYAADRESTQKAIDGVTNKVNSIIDKMNTQFEAVGREFNNLERRIENLNKKMEDGFLDVWTYNAELLVLMENERTLDFHDSNVKNLYDKVRLQLRDNAKELGNGCFEFYHKCDNECMESVRNGTYDYPQYSEEARLKREEISGVKLESIGTYQILSIYSTVASSLALAIIVAGLSLWMCSNGSLQCRICI

SEQ ID NO: 12959 - protein, 567 aa, synthetic construct
  REGION 1..567: note = hemagglutinin__InfluenzaA__AJY79339
MEKIVLLLAIVSIVKSDQICIGYHANNSTEQVDTIMEKNVTVTHAQDILEKTHNGKLCNLDGVKPLILRDCSVAGWLLGNPMCDEFLNVPEWSYIVEKINPANDLCYPGNLNDYEELKHLLSRINHFEKIQIIPKDSWSDHEASGVSSACPYQGRSSFFRNVVWLTKKNDAYPTIKKSYNNTNQEDLLVLWGIHHPNDAAEQTRLYQNPTTYISVGTSTLNQRLVPKIATRSKVNGQSGRMEFFWTILKSNDAINFESNGNFIAPENAYKIVKKGDSTIMKSELEYSNCNTKCQTPIGAINSSMPFHNIHPLTIGECPKYVKSNRLVLATGLRNSPQGEKRRKKRGLFGAIAGFIEGGWQGMVDGWYGYHHSNEQGSGYAADKESTQRAIDGVTNKVNSIIDKMNTQFEAVGREFNNLERRIENLNKKMEDGFLDVWTYNAELLVLMENERTLDFHDSNVKNLYDKVRLQLRDNAKELGNGCFEFYHRCDNECMESVRNGTYDYPQYSEEARLKREEISGVKLESIGTYQILSIYSTVASSLALAIMVAGLSLWMCSNGSLQCRICI

SEQ ID NO: 12960 - protein, 567 aa, synthetic construct
  REGION 1..567: note = hemagglutinin__InfluenzaA__AJY79341
MEKIVLLLAIVSIVKSDQICIGYHANNSTEQVDTIMEKNVTVTHAQDILEKTHNGKLCNLDGVKPLILRDCSVAGWLLGNPMCDEFLNVPEWSYIVEKINPANDLCYPGNFNDYEELKHLLSRINHFEKIQIIPKDSWSDHETSGVSSACPYQGRSSFFRNVVWLTKKNDAYPTIKKSYNNTNQEDLLVLWGIHHPNDAAEQTRLYQNPTTYISVGTSTLNQRLVPKIATRSKVNGQNGRMEFFWTILKSNDAINFESNGNFIAPENAYKIVKKGDSTIMRSELEYSNCNTKCQTPIGAINSSMPFHNIHPLTIGECPKYVKSNRLVLATGLRNSPQGEKRRKKRGLFGAIAGFIEGGWQGMVDGWYGYHHSNEQGSGYAADKESTQRAIDGVTNKVNSIIDKMNTQFEAVGREFNNLERRIENLNKKMEDGFLDVWTYNAELLVLMENERTLDFHDSNVKNLYDKVRLQLRDNAKELGNGCFEFYHRCDNECMESVRNGTYDYPQYSEEARLKREEISGVKLESIGTYQILSIYSTVASSLALAIMVAGLSLWMCSNGSLQCRICI

SEQ ID NO: 12961 - protein, 567 aa, synthetic construct
  REGION 1..567: note = hemagglutinin__InfluenzaA__AJY79342
MEKIVLLLAIVSIVKSDQICIGYHANNSTEQVDTIMEKNVTVTHAQDILEKTHNGKLCNLDGVKPLILRDCSVAGWLLGNPMCDEFLNVPEWSYIVEKINPANDLCYPGNFNDYEELKHLLSRINHFEKIQIIPKDSWSDHEASGVSSACPYQGRSSFFRNVVWLTKKNDAYPTIKKSYNNTNQEDLLVLWGIHHPNDAAEQTRLYQNPTTYISVGTSTLNQRLVPKIATRSKVNGQSGRMEFFWTILKSNDAINFESNGNFIAPENAYKIVKKGDSTIMKSELEYSNCNTKCQTPIGAINSSMPFHNIHPLTIGECPKYVKSNRLVLATGLRNSPQGEKRRKKRGLFGAIAGFIEGGWQGMVDGWYGYHHSNEQGSGYAADKESTQRAIDGVTNKVNSIIDKMNTQFEAVGREFNNLERRIENLNKKMEDGFLDVWTYNAELLVLMENERTLDFHDSNVKNLYDKVRLQLRDNAKELGNGCFEFYHRCDNECMESVRNGTYDYPQYSEEARLKREEISGVKLESIGTYQILSIYSTVASSLALAIMVAGLSLWMCSNGSLQCRICI

SEQ ID NO: 12962 - protein, 567 aa, synthetic construct
  REGION 1..567: note = hemagglutinin__InfluenzaA__AJY79343
MEKIVLLLAIVSIVKSDQICIGYHANNSTEQVDTIMEKNVTVTHAQDILEKTHNGKLCNLDGVKPLILRDCSVAGWLLGNPMCDEFLNVPEWSYIVEKINPANDLCYPGNFNDYEELKHLLSRINHFEKIQIIPKDSWSDHEASGVSSACPYQGRSSFFRNVVWLTKKNDAYPTIKKSYNNTNQEDLLVLWGIHHPNDAAEQTRLYQNPTTYISVGTSTLNQRLVPKIATRSKVNGQSGRMEFFWTILKSNDAINFESNGNFIAPENAYKIVKKGDSTIMKSELEYSNCNTKCQTPIGAINSSMPFHNIHPLTIGECPKYVKSNRLVLATGLRNSPQGEKRRKKRGLFGAIAGFIEGGWQGMVDGWYGYHHSNEQGSGYAADKESTQRAIDGVTNKVNSIIDKMNTQFEAVGREFNNLERRIENLNKKMEDGFLDVWTYNAELLVLMENERTLDFHDSNVKNLYDKVRLQLRDNAKELGNGCFEFYHRCDDECMESVRNGTYDYPQYSEEARLKREEISGVKLESIGTYQILSIYSTVASSLALAIMVAGLSLWMCSNGSLQCRICI

SEQ ID NO: 12963 - protein, 567 aa, synthetic construct
  REGION 1..567: note = hemagglutinin__InfluenzaA__AJY79345
MEKIVLLLAIVSIVKSDQICIGYHANNSTEQVDTIMEKNVTVTRAQDILEKTHNGKLCNLDGVKPLILRDCSVAGWLLGNPMCDEFLNVPEWSYIVEKINPANDLCYPGNFNDYEELKHLLSRINHFEKIQIIPKDSWSDHEASGVSSACPYQGRSSFFRNVVWLTKKNDAYPTIKKSYNNTNQEDLLVLWGIHHPNDAAEQTRLYQNPTTYISVGTSTLNQRLVPKIATRSKVNGQSGRMEFFWTILKSNDAINFESNGNFIAPENAYKIVKKGDSTIMKSELEYSNCNTKCQTPIGAINSSMPFHNIHPLTIGECPKYVKSNRLVLATGLRNSPQGEKRRKKRGLFGAIAGFIEGGWQGMVDGWYGYHHSNEQGSGYAADKESTQRAIDGVTNKVNSIIDKMNTQFEAVGREFNNLERRIENLNKKMEDGFLDVWTYNAELLVLMENERTLDFHDSNVKNLYDKVRLQLRDNAKELGNGCFEFYHRCDNECMESVRNGTYDYPQYSEEARLKREEISGVKLESIGTYQILSIYSTVASSLALAIMVAGLSLWMCSNGSLQCRICI

SEQ ID NO: 12964 - protein, 566 aa, synthetic construct; identical to SEQ ID NO: 12441
  REGION 1..566: note = hemagglutinin__InfluenzaA__AKA54643

SEQ ID NO: 12965 - protein, 566 aa, synthetic construct
  REGION 1..566: note = hemagglutinin__InfluenzaA__AKA54650
MKTIIALSYILCLVFTQKIPGNDNSTATLCLGHHAVPNGTIVKTITNDRIEVTNATELVQNSSIGEICDSPHQILDGENCTLIDALLGDPQCDGFQNKKWDLFVERSKAYSNCYPYDVPDYASLRSLVASSGTLEFNNESFNWTGVTQNGTSSACIRRSSSSFFSRLNWLTHLNYKYPALNVTMPNNEQFDKLYIWGVHHPGTDKDQIFLYAQSSGRITVSTKRSQQAVIPNIGSRPRIRDIPSRISIYWTIVKPGDILLINSTGNLIAPRGYFKIRSGKSSIMRSDAPIGKCKSECITPNGSIPNDKPFQNVNRITYGACPRYVKHSTLKLATGMRNVPEKQTRGIFGAIAGFIENGWEGMVDGWYGFRHQNSEGRGQAADLKSTQAAIDQINGKLNRLIGKTNEKFHQIEKEFSEVEGRIQDLEKYVEDTKIDLWSYNAELLVALENQHTIDLTDSEMNKLFEKTKKQLRENAEDMGNGCFKIYHKCDNACIGSIRNGTYDHNVYRDEALNNRFQIKGVELKSGYKDWILWISFAISCFLLCVALLGFIMWACQKGNIRCNICI

SEQ ID NO: 12966 - protein, 566 aa, synthetic construct
  REGION 1..566: note = hemagglutinin__InfluenzaA__AKA54651
MKTIIAFSCILCQISAQKLPGSDNSMATLCLGHHAVPNGTLVKTITDDQIEVTNATELVQSTSKGEICSSPHQILDGKNCTLIDALLGDPHCDDFQNKKWDLFVERSTAYSNCYPYYVPDYASLRSLVASSGTLEFTQESFNWTGVAQDGASYSCRRESENSFFSRLNWLYSLNYKYPALNVTMPNNDKFDKLYIWGVHHPGTDKDQTSLYIQASGRVTVSTKWSQQTVIPNIGSRPWIRGVSSIISIYWTIVKPGDILLINSTGNLIAPRGYFKIQSGKSSIMRSDAHIGNCNSECITPNGSIPNDKPFQNVNRITYGACPRYVKQNTLKLATGMRNVPEKQTRGIFGAIAGFIENGWEGMVDGWYGFRHQNSEGTGQAADLKSTQAAINQITGKLNRVIKKTNEKFHQIEKEFSEVEGRIQDLERYVEDTKIDLWSYNAELLVALENQHTIDLTDSEMNKLFERTRKQLRENAEDMGNGCFKIYHKCDNACIGSIRNGTYDHDVYRDEAVNNRFQIKGVQLKLGYKDWILWISFAISCFLLCAVLLGFIMWACQKGNIRCNICI

SEQ ID NO: 12967 - protein, 566 aa, synthetic construct
  REGION 1..566: note = hemagglutinin__InfluenzaA__AKA59351
MKAILVILLYTFAAANADTICIGYHANNSTDTVDTVLEKNVTVTHSVDLLEDKHNGRLCKLRGVAPLHLGKCNIAGWILGNPECESLSTASSWSYIVETSSSDNGTCYPGDFIDYEELREQLSSVSSFERFEIFPKTSSWPNHESNKGVTAACPQAGAKSFYKNLIWLVKKENSYPKLSKSYINDKGKEVLVLWGIHHPSTSADQQSLYQNADAYVFVGTSRYSKKFKPEIAIRPKVRDQEGRMNYYWTLVEPGDKITFEATGNLVVPRYAFAMERNAGSGIIISDTPVHDCNTTCQTPKGAINTSLPFQNIHPITIGKCPKYVKSTKLRLATGLRNVPSIQSRGLFGAIAGFIEGGWTGMVDGWYGYHHQNEQGSGYAADLKSTQNAIDEITNKVNSVIEKMNTQFTAVGKEFNHLEKRIENLNKKVDDGFLDIWTYNAELLVLLENERTLDYHDSNVKNLYEKVRSQLKNNAKEIGNGCFEFYHKCDNTCMESVKNGTYDYPKYSEEAKLNREEIDGVKLESTRIYQILAIYSTVASSLVLVVSLGAISFWMCSNGSLQCRICI

SEQ ID NO: 12968 - protein, 566 aa, synthetic construct
  REGION 1..566: note = hemagglutinin__InfluenzaA__AKA59353
MKAILVVLLYTFATANADTLCIGYHANNSTDTVDTVLEKNVTVTHSVNLLEDKHNGKLCKLRGVAPLHLGECNIAGWILGNPECESLSTASSWSYIVETPSSNNGTCYPGDFIDYEELREQLSSVSSFERFEIFPNTSSWPNHDSSKGVTAACPHAGAKSFYKNLIWLVKKGNSYPKLSKSYINDKGKEVLVLWGIHHPSTSADQQKLYQNEDAYVFVGTSRYSKKFKPEIAIRPKVRDQEGRMNYYWTLVEPGDKITFEATGNIVVPRYAFAMERNAGSGIIISDTPVHNCNTTCQTPKGAINTSLPFQNVHPITIGKCPKYVKSTKLRLATGLRNVPSIQSRGLFGAIAGFIEGGWTGMVDGWYGYHHQNEQGSGFAADLKSTQNAIDGITNKVNSVIEKMNTQFTAVGKEFNHLEKRIENLNRKIDDGFLDIWTYNAELLILLENERTLDYHDSNVRNLYEKVRSQLKNNAKEIGNGCFEFYHKCDNTCMESVKNGTYDYPKYSEEAKLNREEIDGVKLESTRIYQILAIYSTVASSLVLIVSLGAISFWMCSNGSLQCRICI

SEQ ID NO: 12969 - protein, 566 aa, synthetic construct
  REGION 1..566: note = hemagglutinin__InfluenzaA__AKA59355
MKAILVVLLYTFATANADTLCIGYHANNSTDTVDTVLEKNVTVTHSVNLLEDKHNGKLCKLRGVAPLHLGKCNIAGWILGNPECESLSTASSWSYIVETSSSDNGTCYPGDFIDYEELREQLSSVSSFERFEIFPKTSSWPNHDSNKGVTAACPHAGARSFYKNLIWLVKKGNSYPKLNQSYINDKGKEVLVLWGIHHPPTSADQQSLYQNADAYVFVGTSRYSKKFKPEIAIRPKVRDQEGRMNYYWTLVEPGDKITFEATGNLVVPRYAFAMERNAGSGIIISDTPVHDCNTTCQTPKGAINTSLPFQNIHPITIGKCPKYVKSTKLRLATGLRNVPSIQSRGLFGAIAGFIEGGWTGMVDGWYGYHHQNEQGSGYAADLKSTQNAIDEITNKVNLVIEKMNTQFTAVGKEFSHLEKRIENLNKKVDDGFLDIWTYNAELLVLLENERTLDYHDSNVKNLYEKIRSQLKNNAKEIGNGCFEFYHKCDNTCMESVKNGTYDYPKYSEEAKLNREEIDGVKLESTRVYQILAIYSTVASSLVLVVSLGAISFWMCSNGSLQCRICI

SEQ ID NO: 12970 - protein, 566 aa, synthetic construct
  REGION 1..566: note = hemagglutinin__InfluenzaA__AKE37137
MKARLVVLLYTFATANADTLCIGYHANNSTDTVDTVLEKNVTVTHSVNLLEDKHNGKLCKLRGVAPLHLGKCNIAGWILGNPECESLSTASSWSYIVETSSSDNGTCYPGDFIDYEELREQLSSVSSFERFEIFPKTSSWPNHDPNKGVTAACPHAGAKSFYKNLIWLVKKGNSYPKLSTSYINDKGKEVLVLWGIHHPSTSADQQSLYQNADAYAFVGTSRYSKKFKPEIAIRPKVRDREGRMNYYWTLVEPGDKITFEATGNLVVPRYAFAMERNAGSGIIISDTSVHDCNTTCQTPKGAINTSLPFQNVHPITIGKCPKYVKSTKLRLATGLRNVPSIQSRGLFGAIAGFIEGGWTGMVDGWYGYHHQNEQGSGYAADLKSTQNAFDEITNKVNSVIEKMNTQFTAVGKEFNHLEKRIENLNKKVDDGFLDIWTYNAELLVLLENERTLDYHDSNVKNLYEKVRSQLKNNAKEIGNGCFEFYHKCDNTCMESVKNGTYDYPKYSEEAKLNREEIDGVKLESTRIYQILAIYSTVASSLVLVVSLGAISFWMCSNGSLQCRICI

SEQ ID NO: 12971 - protein, 566 aa, synthetic construct
  REGION 1..566: note = hemagglutinin__InfluenzaA__AKS48035
MEKMVLLLAVVSLVKSDQICIGYHANNSTEQVDTIMEKNVTVTHAQDILEKTHNGRLCDLNGVKPLILKDCSVAGWLLGNPMCDEFIRVPEWSYIVERANPANDLCYPGNLNDYEELKHLLSRINHFEKTLIIPKSSWPNHTSSGVSAACPYQGMPSFFRNVVWLTKKNDAYPTIKMSYNNTYREDLLILWGIHHSNNAAEQTNLYKNPTTYVSVGTSTLNQRLEPKIATRSQVNGQRGRMDFFWTILKPNDAIHFESNGNFIAPEYAYKIVKKGDSTIMKSEMEYGHCNTKCQTPIGAINSSMPFHNIHPLTIGECPKYVKSNKLVLATGLRNSPLRERRRKRGLFGAIAGFIEGGWQGMVDGWYGYHHSNEQGSGYAADRESTQKAIDGVTNKVNSIIDKMNTQFEAVGREFNNLERRIENLNKKMEDGFLDVWTYNAELLVLMENERTLDFHDSNVKNLYDKVRLQLRDNAKELGNGCFEFYHKCDNECMESVRNGTYDYPQYSEEARLKREEISGVKLESIGTYQILSIYSTVASSLALAIIVAGLSLWMCSNGSLQCRICI

SEQ ID NO: 12972 - protein, 566 aa, synthetic construct
  REGION 1..566: note = hemagglutinin__InfluenzaA__ALA08472
MKTIIALSYILCLVFAQKIPGNDNSTATLCLGHHAVPNGTIVKTITNDRIEVTNATELVQNSSIGEICDSPHQILDGENCTLIDALLGDPQCDGFQNKKWDLFVERSKAYSNCYPYDVPDYASLRSLVASSGTLEFNNESFNWTGVTQNGTSSACIRRSSSSFFSRLNWLTHLNYTYPALNVTMPNNEQFDKLYVWGVHHPGTDKDQIFLYAQSSGRITVSTKRSQQAVIPNIGSRPRIRDIPSRISIYWTIVKPGDILLINSTGNLIAPRGYFKIRSGKSSIMRSDAPIGKCKSECITPNGSIPNDKPFQNVNRITYGACPRYVKHSTLKLATGMRNVPEKQTRGIFGAIAGFIENGWEGMVDGWYGFRHQNSEGRGQAADLKSTQAAIDQINGKLNRLIGKTNEKFHQIEKEFSEVEGRIQDLEKYVEDTKIDLWSYNAELLVALENQHTIDLTDSEMNKLFEKTKKQLRENAEDMGNGCFKIYHKCDNACIGSIRNGTYDHNVYRDEALNNRFQIKGVELKSGYKDWILWISFAISCFLLCVALLGFIMWACQKGNIRCNICI

SEQ ID NO: 12973 - protein, 566 aa, synthetic construct; identical to SEQ ID NO: 12441
  REGION 1..566: note = hemagglutinin__InfluenzaA__ALA08475

SEQ ID NO: 12974 - protein, 566 aa, synthetic construct
  REGION 1..566: note = hemagglutinin__InfluenzaA__ALA08478
MKTIIALSYILCLVFAQKLPGNDNSTATLCLGHHAVPNGTIVKTITNDRIEVTNATELVQNSSIGEICDSPHQILDGKNCTLIDALLGDPQCDGFQNKRWDLFVERSKAYSNCYPYDVPDYASLRSLVASSGTLEFNDESFNWAGVTQNGTSSACIRGSNSSFFSRLNWLTHSNFKYPALNVTMPNNEQFDKLYIWGVHHPGTDKDQIFLYAQSSGRITVSTKRSQQAVIPNIGSRPRIRNIPSRISIYWTIVKPGDILLINSTGNLIAPRGYFKIQSGKSSIMRSDAPIGKCKSECITPNGSIPNDKPFQNVNRITYGACPRYVKQSTLKLATGMRNVPEKQTRGIFGAIAGFIENGWEGMKDGWYGFRHQNSEGRGQAADLKSTQAAIDQINGKLNRLIGKTNEKFHQIEKEFSEVEGRIQDLEKYVEDTKIDLWSYNAELLVALENQHTIDLTDSEMNKLFEKTKKQLRENAEDMGNGCFKIYHKCDNACIGSIRNGTYDHDVYRDEALNNRFQIKGVELKSGYKDWILWISFAISCFLLCVALLGFIMWACQKGNIRCNICI

SEQ ID NO: 12975 - protein, 566 aa, synthetic construct; identical to SEQ ID NO: 9994
  REGION 1..566: note = hemagglutinin__InfluenzaA__ALA08479

SEQ ID NO: 12976 - protein, 566 aa, synthetic construct
  REGION 1..566: note = hemagglutinin__InfluenzaA__ALA08481
MKTIIALSYILCLVFAQKLPGNDNSTATLCLGHHAVPNGTIVKTITNDRIEVTNATELVQNSSIGEICDSPHQILDGENCTLIDALLGDPQCDGFQNKKWDLFVERSKAHSNCYPYDVPDYASLRSLVASSGTLEFNNESFNWAGVTQNGTSSSCIRGSNSSFFSRLNWLTHLNSKYPALNVTMPNNEQFDKLYIWGVHHPGTDKDQIFLYAQSSGRITVSTKRSQQAVIPNIGSRPRIRDIPSRISIYWTIVKPGDILLINSTGNLIAPRGYFKIRSGKSSIMRSDAPIGKCKSECITPNGSIPNDKPFQNVNRITYGACPRYVKQSTLKLATGMRNVPERQTRGIFGAIAGFIENGWEGMVDGWYGFRHQNSEGRGQAADLKSTQAAIDQINGKLNRLIGKTNEKFHQIEKEFSEVEGRIQDLEKYVEDTKIDLWSYNAELLVALENQHTIDLTDSEMNKLFEKTKKQLRENAEDMGNGCFKIYHKCDNACIGSIRNGTYDHDVYRDEALNNRFQIKGVELKSGYKDWILWISFAISCFLLCVALLGFIMWACQKGNIRCNICI

SEQ ID NO: 12977 - protein, 566 aa, synthetic construct; identical to SEQ ID NO: 12976
  REGION 1..566: note = hemagglutinin__InfluenzaA__ALA08482

SEQ ID NO: 12978 - protein, 566 aa, synthetic construct
  REGION 1..566: note = hemagglutinin__InfluenzaA__ALA08483
MKTIIGLSYILCLVFAQKLPGNDNSTATLCLGHHAVPNGTIVKTITNDRIEVTNATELVQNSSIGEICDSPHQILDGENCTLIDALLGDPQCDGFQNKKWDLFVERSKAYSNCYPYDVPDYASLRSLVASSGTLEFNNESFNWAGVTQNGTSSSCIRGSNSSFFSRLNWLTHLNSKYPALNVTMPNNEQFDKLYIWGVHHPGTDKDQIFLYAQSSGRITVSTKRSQQAVIPNIGSRPRIRDIPSRISIYWTIVKPGDILLINSTGNLIAPRGYFKIRSGKSSIMRSDAPIGKCKSECITPNGSIPNDKPFQNVNRITYGACPRYVKQSTLKLATGMRNVPERQTRGIFGAIAGFIENGWEGMVDGWYGFRHQNSEGRGQAADLKSTQAAIDQINGKLNRLIGKTNEKFHQIEKEFSEVEGRIQDLEKYVEDTKIDLWSYNAELLVALENQHTIDLTDSEMNKLFEKTKKQLRENAEDMGNGCFKIYHKCDNACIGSIRNGTYDHDVYRDEALNNRFQIKGVELKSGYKDWILWISFAISCFLLCVALLGFIMWACQKGNIRCNICI

SEQ ID NO: 12979 - protein, 566 aa, synthetic construct
  REGION 1..566: note = hemagglutinin__InfluenzaA__ALA08484
MKTIIALSYILCLVFAQKIPGNDNSTATLCLGHHAVPNGTIVKTITNDRIEVTNATELVQNSSIGEICDSPHQILDGENCTLIDALLGDPQCDGFQNKKWDLFVERSKAYSNCYPYDVPDYASLRSLVASSGTLEFNNESFNWTGVTQNGTSSACIRRSSSSFFSRLNWLTHLNYTYPALNVTMPNNEQFDKLYIWGVHHPGTDKDQIFLYAQSSGRITISTKRSQQAVIPNIGSRPRIRDIPSRISIYWTIVKPGDILLINSTGNLIAPRGYFKIRSGKSSIMRSDAPIGKCKSECITPNGSIPNDKPFQNVNRITYGACPRYVKHSTLKLATGMRNVPEKQTRGIFGAIAGFIENGWEGMVDGWYGFRHQNSEGRGQAADLKSTQAAIDQINGKLNRLIGKTNEKFHQIEKEFSEVEGRIQDLEKYVEDTKIDLWSYNAELLVALENQHTIDLTDSEMNKLFEKTKKQLRENAEDMGNGCFKIYHKCDNACIGSIRNGTYDHNVYRDEALNNRFQIKGVELKSGYKDWILWISFAISCFLLCVALLGFIMWACQKGNIRCNICI

SEQ ID NO: 12980 - protein, 566 aa, synthetic construct
  REGION 1..566: note = hemagglutinin__InfluenzaA__ALA08488
MKTIIALSYILCLVFAQKIPGNGNSTATLCLGHHAVPNGTIVKTITNDRIEVTNATELVQNSSIGEICDSPHQILDGENCTLIDALLGDPQCDGFQNKKWDLFVERSKAYSNCYPYDVPDYASLRSLVASSGTLEFNNESFNWTGVTQNGTSSACIRRSSSSFFSRLNWLTHLNYTYPALNVTMPNNEQFDKLYIWGVHHPGTDKDQIFLYAQSSGRITVSTKRSQQAVIPNIGSRPRIRDIPSRISIYWTIVKPGDILLINSTGNLIAPRGYFKIRSGKSSIMRSDAPIGKCKSECITPNGSIPNDKPFQNVNRITYGACPRYVKHSTLKLATGMRNVPEKQTRGIFGAIAGFIENGWEGMVDGWYGFRHQNSEGRGQAADLKSTQAAIDQINGKLNRLIGKTNEKFHQIEKEFSEVEGRIQDLEKYVEDTKIDLWSYNAELLVALENQHTIDLTDSEMNKLFEKTKKQLRENAEDMGNGCFKIYHKCDNACIGSIRNGTYDHNVYRDEALNNRFQIKGVELKSGYKDWILWISFAISCFLLCVALLGFIMWACQKGNIRCNICI

SEQ ID NO: 12981 - protein, 566 aa, synthetic construct
  REGION 1..566: note = hemagglutinin__InfluenzaA__ALA08490
MKTIIALSYILCLVFAQKIPGNDNSTATLCLGHHAVPNGTIVKTITNDRIEVTNATELVQNSSIGEICDSPHQILDGENCTLIDALLGDPQCDGFQNKKWDLFVERSKAYSNCYPYDVPDYASLRSLVASSGTLEFNNESFNWTGVTQNGTSSACIRRSSSSFFSRLNWLTHLNYTYPALNVTMPNNEQFDKLYIWGVHHPGTDKDQIFLYAQSSGRITVSTKRSQQAVIPNIGSRPRIRDIPSRISIYWTIVKPGDILLINSTGNLIAPRGYFKIRSGKSSIMRSDAPIGKCKSECITPNGSIPNDKPFQNVNRITYGACPRYVKHSTLKLATGMRNVPEKQTRGIFGAIAGFIENGWEGMVDGWYGFRHQNSEGRGQAADLKSTQAAIDQINGKLNRLIGKTNEKFHQIEKEFSEVEGRIQDLEKYVEDTKIDLWSYNAELLVALENQHTIDLTDSEMNKLFEKTKKQLRENAEDMGNGCFKIYHKCDNACIGSIRNGTYDHNVYRDEALNNRFQIKGIELKSGYKDWILWISFAISCFLLCVALLGFIMWACQKGNIRCNICI

SEQ ID NO: 12982 - protein, 566 aa, synthetic construct
  REGION 1..566: note = hemagglutinin__InfluenzaA__ALA08491
MKTIIALSYILCLVFAQKLPGNDNSTATLCLGHHAVPNGTIVKTITNDRIEVTNATELVQNSSIGEICDSPHQILDGENCTLIDALLGDPQCDGFQNKKWDLFVERSKAYSNCYPYDVPDYASLRSLVASSGTLEFNNESFNWAGVTQNGTSSACIRGSNSSFFSRLNWLTHLNFKYPALNMTMPNNEQFDKLYIWGVHHPGTDKDQIFLYAQSSGRITVSTKRSQQAVIPNIGSRPRIRNIPSRISIYWTIVKPGDILLINSTGNLIAPRGYFKIRSGKSSIMRSDAPIGKCKSECITPNGSIPNDKPFQNVNRITYGACPRYVKQSTLKLATGMRNVPEKQTRGIFGAIAGFIENGWEGMKDGWYGFRHQNSEGRGQAADLKSTQAAIDQINGKLNRLIGKTNEKFHQIEKEFSEVEGRIQDLEKYVEDTKIDLWSYNAELLVALENQHTIDLTDSEMNKLFEKTKKQLRENAEDMGNGCFKIYHKCDNACIGSIRNGTYDHDVYRDEALNNRFQIKGVELKSGYKDWILWISFAISCFLLCVALLGFIMWACQKGNIRCNICI

SEQ ID NO: 12983 - protein, 566 aa, synthetic construct; identical to SEQ ID NO: 12981
  REGION 1..566: note = hemagglutinin__InfluenzaA__ALA08492

SEQ ID NO: 12984 - protein, 566 aa, synthetic construct
  REGION 1..566: note = hemagglutinin__InfluenzaA__ALA08493
MKTIIALSYILCLVFAQKIPGNDNSTATLCLGHHAVPNGTIVKTITNDRIEVTNATELVQNSSIGEICDSPHQILDGENCTLIDALLGDPQCDGFQNKKWDLFVERSKAYSNCYPYDVPDYASLRSLVASSGTLEFNNESFNWTGVTQNGTSSACIRRSSSSFFSRLNWLTHLNYTYPALNVTMPNNEQFDKLYIWGVHHPGTDKDQIFLYAQSSGRITVSTKRSQQAVIPNIGSRPRIRDIPSRISIYWTIVKPGDILLINSTGNLIAPRGYFKIRSGKSSIMRSDAPIGKCRSECITPNGSIPNDKPFQNVNRITYGACPRYVKHSTLKLATGMRNVPEKQTRGIFGAIAGFIENGWEGMVDGWYGFRHQNSEGRGQAADLKSTQAAIDQINGKLNRLIGKTNEKFHQIEKEFSEVEGRIQDLEKYVEDTKIDLWSYNAELLVALENQHTIDLTDSEMNKLFEKTKKQLRENAEDMGNGCFKIYHKCDNACIGSIRNGTYDHNVYRDEALNNRFQIKGIELKSGYKDWILWISFAISCFLLCVALLGFIMWACQKGNIRCNICI

SEQ ID NO: 12985 - protein, 566 aa, synthetic construct
  REGION 1..566: note = hemagglutinin__InfluenzaA__ALA08494
MKTIIALSYILCLVFAQKIPGNDNSTATLCLGHHAVPNGTIVKTITNDRIEVTNATELVQNSSIGEICDSPHQILDGENCTLIDALLGDPQCDGFQNKKWDLFVERSKAYSNCYPYDVPDYASLRSLVASSGTLEFNNESFNWTGVTQNGTSSACIRRSSSSFFSRLNWLTHLNYTYPALNVTMPNNEQFDKLYIWGVHHPGTDKDQIFLYAQSSGRITVSTKGSQQAVIPNIGSRPRIRDIPSRISIYWTIVKPGDILLINSTGNLIAPRGYFKIRSGKSSIMRSDAPIGKCKSECITPNGSIPNDKPFQNVNRITYGACPRYVKHSTLKLATGMRNVPEKQTRGIFGAIAGFIENGWEGMVDGWYGFRHQNSEGRGQAADLKSTQAAIDQINGKLNRLIGKTNEKFHQIEKEFSEVEGRIQDLEKYVEDTKIDLWSYNAELLVALENQHTIDLTDSEMNKLFEKTKKQLRENAEDMGNGCFKIYHKCDNACIGSIRNGTYDHNVYRDEALNNRFQIKGVELKSGYKDWILWISFAISCFLLCVALLGFIMWACQKGNIRCNICI

SEQ ID NO: 12986 - protein, 566 aa, synthetic construct; identical to SEQ ID NO: 12985
  REGION 1..566: note = hemagglutinin__InfluenzaA__ALA08495

SEQ ID NO: 12987 - protein, 566 aa, synthetic construct; identical to SEQ ID NO: 12985
  REGION 1..566: note = hemagglutinin__InfluenzaA__ALA08496

SEQ ID NO: 12988 - protein, 566 aa, synthetic construct; identical to SEQ ID NO: 12441
  REGION 1..566: note = hemagglutinin__InfluenzaA__ALA08497

SEQ ID NO: 12989 - protein, 566 aa, synthetic construct; identical to SEQ ID NO: 12441
  REGION 1..566: note = hemagglutinin__InfluenzaA__ALA08498

SEQ ID NO: 12990 - protein, 566 aa, synthetic construct
  REGION 1..566: note = hemagglutinin__InfluenzaA__ALA08499
MKTIIALSYILCLVFAQKLPENDNSTATLCLGHHAVPNGTIVKTITSDRIEVTNATELVQNSSIGEICDSPHQILDGKNCTLIDALLGDPQCDGFQNKKWDLFVERSKAYSNCYPYDVPDYASLRSLVASSGTLEFNDESFNWAGVTQNGTSSACIRGSNSSFFSRLNWLTHSNFKYPALNVTMPNNEQFDKLYIWGVHHPGTDKDQIFLYAQSSGRITVSTKRSQQAVIPNIGSRPRIRDIPSRISIYWTIVKPGDILLINSTGNLIAPRGYFKIRSGKSSIMRSDAPIGKCKSECITPNGSIPNDKPFQNVNRITYGACPRYVKQSTLKLATGMRNVPEKQTRGIFGAIAGFIENGWEGMKDGWYGFRHQNSEGRGQAADLKSTQAAIDQINGKLNRLIGKTNEKFHQIEKEFSEVEGRIQDLEKYVEDTKVDLWSYNAELLVALENQHTIDLTDSEMNKLFEKTKKQLRENAEDMGNGCFKIYHKCDNACIGSIRNGTYDHDVYRDEALNNRFQIKGVELKSGYKDWILWISFAISCFLLCVALLGFIMWACQKGNIRCNICI

SEQ ID NO: 12991 - protein, 566 aa, synthetic construct; identical to SEQ ID NO: 12974
  REGION 1..566: note = hemagglutinin__InfluenzaA__ALA08501

SEQ ID NO: 12992 - protein, 566 aa, synthetic construct
  REGION 1..566: note = hemagglutinin__InfluenzaA__ALA08502
MKTIIALSYILCLVFAQKLPENDNSTATLCLGHHAVPNGTIVKTITSDRIEVTNATELVQNSSIGEICDSPHQILDGKNCTLIDALLGDPQCDGFQNKKWDLFVERSKAYSNCYPYDVPDYASLRSLVASSGTLEFNDESFNWAGVTQNGTSSACIRGSNSSFFSRLNWLTHSNFKYPALNVTMPNNEQFDKLYIWGVHHPGTDKDQIFLYAQSSGRITVSTKRSQQAVIPNIGSRPRIRNIPSRISIYWTIVKPGDILLINSTGNLIAPRGYFKIRSGKSSIMRSDAPIGKCKSECITPNGSIPNDKPFQNVNRITYGACPRYVKQSTLKLATGMRNVPEKQTRGIFGAIAGFIENGWEGMKDGWYGFRHQNSEGRGQAADLKSTQAAIDQINGKLNRLIGKTNEKFHQIEKEFSEVEGRIQDLEKYVEDTKVDLWSYNAELLVALENQHTIDLTDSEMNKLFEKTKKQLRENAEDMGNGCFKIYHKCDNACIGSIRNGTYDHDVYRDEALNNRFQIKGVELKSGYKDWILWISFAISCFLLCVALLGFIMWACQKGNIRCNICI

SEQ ID NO: 12993 - protein, 566 aa, synthetic construct; identical to SEQ ID NO: 12992
  REGION 1..566: note = hemagglutinin__InfluenzaA__ALA08503

SEQ ID NO: 12994 - protein, 566 aa, synthetic construct; identical to SEQ ID NO: 12441
  REGION 1..566: note = hemagglutinin__InfluenzaA__ALA08504

SEQ ID NO: 12995 - protein, 566 aa, synthetic construct; identical to SEQ ID NO: 12441
  REGION 1..566: note = hemagglutinin__InfluenzaA__ALA08505

SEQ ID NO: 12996 - protein, 566 aa, synthetic construct; identical to SEQ ID NO: 12441
  REGION 1..566: note = hemagglutinin__InfluenzaA__ALA08506

SEQ ID NO: 12997 - protein, 566 aa, synthetic construct; identical to SEQ ID NO: 12441
  REGION 1..566: note = hemagglutinin__InfluenzaA__ALA08507

SEQ ID NO: 12998 - protein, 566 aa, synthetic construct
  REGION 1..566: note = hemagglutinin__InfluenzaA__ALA08508
MKTIIALSYILCLVFAQKLPENDNSTATLCLGHHAVPNGTIVKTITSDRIEVTNATELVQNSSIGEICDSPHQILDGKNCTLIDALLGDPQCDGFQNKKWDLFVERSKAYSNCYPYDVPDYASLRSLVASSGTLEFNDESFNWAGVTQNGTSSACIRGSNSSFFSRLNWLTHSNFKYPALNVTMPNNEQFDKLYIWGVHHPGTDKDQIFLYAQSSGRITVSTKRSQQAVIPNIGSRPRIRNIPSRISIYWTIVKPGDILLINSTGNLIAPRGYFKIRSGKSSIMRSDAPIGKCKSECITPNGSIPNDKPFQNVNRITYGACPRYVKQSTLKLATGMRNVPEKQTRGIFGAIAGFIENGWEGMKDGWYGFRHQNSEGRGQAADLKSTQAAIDQINGKLNRLIGKTNEKFHQIEKEFSEVEGRIQDLEKYVEDTKIDLWSYNAELLVALENQHTIDLTDSEMNKLFEKTKKQLRENAEDMGNGCFKIYHKCDNACIGSIRNGTYDHDVYRDEALNNRFQIKGVELKSGYKDWILWISFAISCFLLCVALLGFIMWACQKGNIRCNICI

SEQ ID NO: 12999 - protein, 566 aa, synthetic construct; identical to SEQ ID NO: 12441
  REGION 1..566: note = hemagglutinin__InfluenzaA__ALA08509

SEQ ID NO: 13000 - protein, 566 aa, synthetic construct; identical to SEQ ID NO: 12441
  REGION 1..566: note = hemagglutinin__InfluenzaA__ALA08510

SEQ ID NO: 13001 - protein, 566 aa, synthetic construct
  REGION 1..566: note = hemagglutinin__InfluenzaA__ALA08511
MKTIIALSYILCLVFAQKIPGNDNSTATLCLGHHAVPNGTIVKTITNDRIEVTNATELVQNSSIGEICDSPHQILDGENCTLIDALLGDPQCDGFQNKKWDLFVERSKAYSNCYPYDVPDYASLRSLVASSGTLEFNNESFNWTGVTQNGTSSSCIRRSSSSFFSRLNWLTHLNYTYPALNVTMPNNEQFDKLYIWGVHHPSTDKDQIFLYAQSSGRITVSTKRSQQAVIPNIGSRPRIRDIPSRISIYWTIVKPGDILLINSTGNLIAPRGYFKIRSGKSSIMRSDAPIGKCKSECITPNGSIPNDKPFQNVNRITYGACPRYVKHSTLKLATGMRNVPEKQTRGIFGAIAGFIENGWEGMVDGWYGFRHQNSEGRGQAADLKSTQAAIDQINGKLNRLIGKTNEKFHQIEKEFSEVEGRIQDLEKYVEDTKIDLWSYNAELLVALENQHTIDLTDSEMNKLFEKTKKQLRENAEDMGNGCFKIYHKCDNACIGSIRNGTYDHNVYRDEALNNRFQIKGVELKSGYKDWILWISFAISCFLLCVALLGFIMWACQKGNIRCNICI

SEQ ID NO: 13002 - protein, 566 aa, synthetic construct; identical to SEQ ID NO: 12441
  REGION 1..566: note = hemagglutinin__InfluenzaA__ALA08512

SEQ ID NO: 13003 - protein, 566 aa, synthetic construct; identical to SEQ ID NO: 12441
  REGION 1..566: note = hemagglutinin__InfluenzaA__ALA08514

SEQ ID NO: 13004 - protein, 566 aa, synthetic construct; identical to SEQ ID NO: 12441
  REGION 1..566: note = hemagglutinin__InfluenzaA__ALA08515

SEQ ID NO: 13005 - protein, 566 aa, synthetic construct; identical to SEQ ID NO: 12441
  REGION 1..566: note = hemagglutinin__InfluenzaA__ALA08516

SEQ ID NO: 13006 - protein, 566 aa, synthetic construct; identical to SEQ ID NO: 12998
  REGION 1..566: note = hemagglutinin__InfluenzaA__ALA08517

SEQ ID NO: 13007 - protein, 566 aa, synthetic construct; identical to SEQ ID NO: 12441
  REGION 1..566: note = hemagglutinin__InfluenzaA__ALA08519

SEQ ID NO: 13008 - protein, 566 aa, synthetic construct
  REGION 1..566: note = hemagglutinin__InfluenzaA__ALA08520
MKTIIALSYILCLVFAQKIPGNDNSTATLCLGHHAVPNGTIVKTITNDRIEVTNATELVQNSSIGEICDSPHQILDGENCTLIDALLGDPQCDGFQNKKWDLFVERSKAYSNCYPYDVPDYASLRSLVASSGTLEFNNESFNWTGVTQNGTSSACIRRSSSSFFSRLNWLTHLNYTYPALNVTMPNNEQFDKLYIWGVHHPGTDKDQIFLYAQPSGRITVSTKRSQQAVIPNIGSRPRIRDIPSRISIYWTIVKPGDILLINSTGNLIAPRGYFKIRNGKSSIMRSDAPIGKCKSECITPNGSIPNDKPFQNVNRITYGACPRYVKHSTLKLATGMRNVPEKQTRGIFGAIAGFIENGWEGMVDGWYGFRHQNSEGRGQAADLKSTQAAIDQINGKLNRLIGKTNEKFHQIEKEFSEVEGRIQDLEKYVEDTKIDLWSYNAELLVALENQHTIDLTDSEMNKLFEKTKKQLRENAEDMGNGCFKIYHKCDNACIGSIRNGTYDHNVYRDEALNNRFQIKGVELKSGYKDWILWISFAISCFLLCVALLGFIMWACQKGNIRCNICI

SEQ ID NO: 13009 - protein, 566 aa, synthetic construct; identical to SEQ ID NO: 10138
  REGION 1..566: note = hemagglutinin__InfluenzaA__ALA08522

SEQ ID NO: 13010 - protein, 566 aa, synthetic construct
  REGION 1..566: note = hemagglutinin__InfluenzaA__ALA08523
MKTIIALSYILCLVFAQKIPGNDNSTATLCLGHHAVPNGTIVKTITNDRIEVTNATELVQNSSIGEICDSPHQILDGENCTLIDALLGDPQCDGFQNKKWDLFVERSKAYSNCYPYDVPDYASLRSLVASSGTLEFNNESFNWTGVTQNGTSSACIRRSSSSFFSRLNWLTHLNYTYPALNVTMPNNEQFDKLYIWGVHHPGTDKDQIFLYAQSSGRITVSTKRSQQAVIPNIGSRPRIRDIPSRISIYWTIVKPGDILLINSIGNLIAPRGYFKIRSGKSSIMRSDAPIGKCKSECITPNGSIPNDKPFQNVNRITYGACPRYVKHSTLKLATGMRNVPEKQTRGIFGAIAGFIENGWEGMVDGWYGFRHQNSEGRGQAADLKSTQAAIDQINGKLNRLIGKTNEKFHQIEKEFSEVEGRIQDLEKYVEDTKIDLWSYNAELLVALENQHTIDLTDSEMNKLFEKTKKQLRENAEDMGNGCFKIYHKCDNACIGSIRNGTYDHNVYRDEALNNRFQIKGVELKSGYKDWILWISFAISCFLLCVALLGFIMWACQKGNIRCNICI

SEQ ID NO: 13011 - protein, 566 aa, synthetic construct
  REGION 1..566: note = hemagglutinin__InfluenzaA__ALA08524
MKTIIALSYILCMVFAQKIPGNDNSTATLCLGHHAVPNGTIVKTITNDRIEVTNATELVQNSSIGEICDSPHQILDGENCTLIDALLGDPQCDGFQNKKWDLFVERSKAYSNCYPYDVPDYASLRSLVASSGTLEFNNESFNWTGVTQNGTSSACIRRSSSSFFSRLNWLTHLNYTYPALNVTMPNNEQFDKLYIWGVHHPGTDKDQIFLYAQSSGRITVSTKRSQQAVIPNIGSRLRIRDIPSRISIYWTIVKPGDILLINSTGNLIAPRGYFKIRSGKSSIMRSDAPIGKCKSECITPNGSIPNDKPFQNVNRITYGACPRYVKHSTLKLATGMRNVPEKQTRGIFGAIAGFIENGWEGMVDGWYGFRHQNSEGRGQAADLKSTQAAIDQINGKLNRLIGKTNEKFHQIEKEFSEVEGRIQDLEKYVEDTKIDLWSYNAELLVALENQHTIDLTDSEMNKLFEKTKKQLRENAEDMGNGCFKIYHKCDNACIGSIRNGTYDHNVYRDEALNNRFQIKGVELKSGYKDWILWISFAISCFLLCVALLGFIMWACQKGNIRCNICI

SEQ ID NO: 13012 - protein, 566 aa, synthetic construct; identical to SEQ ID NO: 12441
  REGION 1..566: note = hemagglutinin__InfluenzaA__ALA08525

SEQ ID NO: 13013 - protein, 566 aa, synthetic construct; identical to SEQ ID NO: 12441
  REGION 1..566: note = hemagglutinin__InfluenzaA__ALA08526

SEQ ID NO: 13014 - protein, 566 aa, synthetic construct; identical to SEQ ID NO: 12998
  REGION 1..566: note = hemagglutinin__InfluenzaA__ALA08527

SEQ ID NO: 13015 - protein, 566 aa, synthetic construct
  REGION 1..566: note = hemagglutinin__InfluenzaA__ALA08528
MKTIIALSYILCLVFAQKLPENDNSTATLCLGHHAVPNGTIVKTITSDRIEVTNATELVQNSSIGEICDSPHQILDGKNCTLIDALLGDPQCDGFQNKKWDLFVERSKAYSNCYPYDVPDYASLRSLVASSGTLEFNDESFNWAGVTQNGTSSACIRGSNSSFFSRLNWLTHSNFKYPALNVTMPNNEQFDKLYIWGVHHPGTDKDQIYLYAQSSGRITVSTKRSQQAVIPNIGSRPRIRNIPSRISIYWTIVKPGDILLINSTGNLIAPRGYFKIRSGKSSIMRSDAPIGKCKSECITPNGSIPNDKPFQNVNRITYGACPRYVKQSTLKLATGMRNVPEKQTRGIFGAIAGFIENGWEGMKDGWYGFRHQNSEGRGQAADLKSTQAAIDQINGKLNRLIGKTNEKFHQIEKEFSEVEGRIQDLEKYVEDTKIDLWSYNAELLVALENQHTIDLTDSEMNKLFEKTKKQMRENAEDMGNGCFKIYHKCDNACIGSIRNGTYDHDVYRDEALNNRFQIKGVELKSGYKDWILWISFAISCFLLCVALLGFIMWACQKGNIRCNICI

SEQ ID NO: 13016 - protein, 566 aa, synthetic construct; identical to SEQ ID NO: 12441
  REGION 1..566: note = hemagglutinin__InfluenzaA__ALA08529

SEQ ID NO: 13017 - protein, 566 aa, synthetic construct; identical to SEQ ID NO: 12441
  REGION 1..566: note = hemagglutinin__InfluenzaA__ALA08530

SEQ ID NO: 13018 - protein, 566 aa, synthetic construct
  REGION 1..566: note = hemagglutinin__InfluenzaA__ALA08531
MKTIIALSYILCLVFAQKLPENDNSTATLCLGHHAVPNGTIVKTITSDRIEVTNATELVQNSSIGEICDSPHQILDGKNCTLIDALLGDPQCDGFQNKKWDLFVERSKAYSNCYPYDVPDYASLRSLVASSGTLEFNDESFNWAGVTQNGTSSACIRGSNSSFFSRLNWLTHSNFKYPALNVTMPNNEQFDKLYIWGVHHPGTDKDQIFLYAQSSGRITVSTKRSQQAVIPNIGSRPRIRNIPSRISIYWTIVKPGDILLINSTGNLIAPRGYFKIRSGKSSIMRSDAPIGKCKSECITPNGSIPNDKPFQNVNRITYGACPRYVKQSTLKLATGMRNVPEKQTRGIFGAIAGFIENGWEGMKDGWYGFRHQNSEGRGQAADLKSTQAAIDQINGKLNRLIGKTNEKFHQIEKEFSEVEGRIQDLEKYVEDTKIDLWSYNAELLVALENQHTIDLTDSEMNKLFEKTKKQLRENAEDMGNGCFKIYHKCDNACIGSIRNGTYNHDVYRDEALNNRFQIKGVELKSGYKDWILWISFAISCFLLCVALLGFIMWACQKGNIRCNICI

SEQ ID NO: 13019 - protein, 566 aa, synthetic construct; identical to SEQ ID NO: 12441
  REGION 1..566: note = hemagglutinin__InfluenzaA__ALA08532

SEQ ID NO: 13020 - protein, 566 aa, synthetic construct; identical to SEQ ID NO: 12441
  REGION 1..566: note = hemagglutinin__InfluenzaA__ALA08533

SEQ ID NO: 13021 - protein, 566 aa, synthetic construct; identical to SEQ ID NO: 12441
  REGION 1..566: note = hemagglutinin__InfluenzaA__ALA08534

SEQ ID NO: 13022 - protein, 566 aa, synthetic construct; identical to SEQ ID NO: 12441
  REGION 1..566: note = hemagglutinin__InfluenzaA__ALA08535

SEQ ID NO: 13023 - protein, 566 aa, synthetic construct; identical to SEQ ID NO: 12998
  REGION 1..566: note = hemagglutinin__InfluenzaA__ALA08536

SEQ ID NO: 13024 - protein, 566 aa, synthetic construct; identical to SEQ ID NO: 12998
  REGION 1..566: note = hemagglutinin__InfluenzaA__ALA08537

SEQ ID NO: 13025 - protein, 566 aa, synthetic construct; identical to SEQ ID NO: 12998
  REGION 1..566: note = hemagglutinin__InfluenzaA__ALA08538

SEQ ID NO: 13026 - protein, 566 aa, synthetic construct; identical to SEQ ID NO: 12441
  REGION 1..566: note = hemagglutinin__InfluenzaA__ALA08539

SEQ ID NO: 13027 - protein, 566 aa, synthetic construct; identical to SEQ ID NO: 12998
  REGION 1..566: note = hemagglutinin__InfluenzaA__ALA08540

SEQ ID NO: 13028 - protein, 566 aa, synthetic construct; identical to SEQ ID NO: 12998
  REGION 1..566: note = hemagglutinin__InfluenzaA__ALA08541

SEQ ID NO: 13029 - protein, 566 aa, synthetic construct; identical to SEQ ID NO: 12998
  REGION 1..566: note = hemagglutinin__InfluenzaA__ALA08542

SEQ ID NO: 13030 - protein, 566 aa, synthetic construct
  REGION 1..566: note = hemagglutinin__InfluenzaA__ALA08543
MKTIIALSYILCLVFAQKIPGNDNSTATLCLGHHAVPNGTIVKTITNDRIEVTNATELVQNSSIGEICDSPHQILDGENCTLIDALLGDPQCDGFQNKKWDLFVERSKAYSNCYPYDVPDYASLRSLVASSGTLEFNNESFNWTGVTQNGTSSACIRRSSSSFFSRLNWLTHLNYTYPALNVTMPNNEQFDKLYIWGVHHPGTDKDQIFLYAQSSGRITVSTKRSQQAAIPNIGSRPRIRDIPSRISIYWTIVKPGDILLINSTGNLIAPRGYFKIRSGKSSIMRSDAPIGKCKSECITPNGSIPNDKPFQNVNRITYGACPRYVKHSTLKLATGMRNVPEKQTRGIFGAIAGFIENGWEGMVDGWYGFRHQNSEGRGQAADLKSTQAAIDQINGKLNRLIGKTNEKFHQIEKEFSEVEGRIQDLEKYVEDTKIDLWSYNAELLVALENQHTIDLTDSEMNKLFEKTKKQLRENAEDMGNGCFKIYHKCDNACIGSIRNGTYDHNVYRDEALNNRFQIKGVELKSGYKDWILWISFAISCFLLCVALLGFIMWACQKGNIRCNICI

SEQ ID NO: 13031 - protein, 566 aa, synthetic construct; identical to SEQ ID NO: 12441
  REGION 1..566: note = hemagglutinin__InfluenzaA__ALA08545

SEQ ID NO: 13032 - protein, 566 aa, synthetic construct; identical to SEQ ID NO: 12441
  REGION 1..566: note = hemagglutinin__InfluenzaA__ALA08546

SEQ ID NO: 13033 - protein, 566 aa, synthetic construct
  REGION 1..566: note = hemagglutinin__InfluenzaA__ALA08548
MKTIIALSYILCLVFAQKLPENDNSTATLCLGHHAVPNGTIVKTITSDRIEVTNATELVQNSSIGEICDSPHQILDGKNCTLIDALLGDPQCDGFQNKKWDLFVERSKAYSNCYPYDVPDYASLRSLVASSGTLEFNDESFNWAGVAQNGTSSACIRGSNSSFFSRLNWLTHSNFKYPALNVTMPNNEQFDKLYIWGVHHPGTDKDQIFLYAQSSGRITVSTKRSQQAVIPNIGSRPRIRNIPSRISIYWTIVKPGDILLINSTGNLIAPRGYFKIRSGKSSIMRSDAPIGKCKSECITPNGSIPNDKPFQNVNRITYGACPRYVKQSTLKLATGMRNVPEKQTRGIFGAIAGFIENGWEGMKDGWYGFRHQNSEGRGQAADLKSTQAAIDQINGKLNRLIGKTNEKFHQIEKEFSEVEGRIQDLEKYVEDTKIDLWSYNAELLVALENQHTIDLTDSEMNKLFEKTKKQLRENAEDMGNGCFKIYHKCDNACIGSIRNGTYDHDVYRDEALNNRFQIKGVELKSGYKDWILWISFAISCFLLCVALLGFIMWACQKGNIRCNICI

SEQ ID NO: 13034 - protein, 566 aa, synthetic construct
  REGION 1..566: note = hemagglutinin__InfluenzaA__ALA08549
MKTIIALSYILCLVFAQKIPGNDNSTATLCLGHHAVPNGTIVKTITNDRIEVTNATELVQNSSTGVICDSPHQILDGENCTLIDALLGDPQCDGFQNKKWDLFVERSKAYSNCYPYDVPDYASLRSLVASSGTLEFNNESFNWTGVTQNGTSSACIRRSSSSFFSRLNWLTHLNYTYPALNVTMPNNEQFDKLYIWGVHHPGTDKDQIFLYAQSSGRITVSTKGSQQAVIPNIGSRPRIRDIPSRISIYWTIVKPGDILLINSTGNLIAPRGYFKIRSGKSSIMRSDAPIGKCKSECITPNGSIPNDKPFQNVNRITYGACPRYVKHSTLKLATGMRNVPEKQTRGIFGAIAGFIENGWEGMVDGWYGFRHQNSEGRGQAADLKSTQAAIDQINGKLNRLIGKTNEKFHQIEKEFSEVEGRIQDLEKYVEDTKIDLWSYNAELLVALENQHTIDLTDSEMNKLFEKTRKQLRENAEDMGNGCFKIYHKCDNACIGSIRNGTYDHNVYRDEALNNRFQIKGVELKSGYKDWILWISFAISCFLLCVALLGFIMWACQKGNIRCNICI

SEQ ID NO: 13035 - protein, 566 aa, synthetic construct; identical to SEQ ID NO: 12998
  REGION 1..566: note = hemagglutinin__InfluenzaA__ALA08550

SEQ ID NO: 13036 - protein, 566 aa, synthetic construct
  REGION 1..566: note = hemagglutinin__InfluenzaA__ALA08551
MKTIIALSYILCLVFAQKLLENDNSTATLCLGHHAVPNGTIVKTITSDRIEVTNATELVQNSSIGEICDSPHQILDGKNCTLIDALLGDPQCDGFQNKKWDLFVERSKAYSNCYPYDVPDYASLRSLVASSGTLEFNDESFNWAGVTQNGTSSACIRGSNSSFFSRLNWLTHSNFKYPALNVTMPNNEQFDKLYIWGVHHPGTDKDQIFLYAQSSGRITVSTKRSQQAVIPNIGSRPRIRNIPSRISIYWTIVKPGDILLINSTGNLIAPRGYFKIRSGKSSIMRSDAPIGKCKSECITPNGSIPNDKPFQNVNRITYGACPRYVKQSTLKLATGMRNVPEKQTRGIFGAIAGFIENGWEGMKDGWYGFRHQNSEGRGQAADLKSTQAAIDQINGKLNRLIGKTNEKFHQIEKEFSEVEGRIQDLEKYVEDTKIDLWSYNAELLVALENQHTIDLTDSEMNKLFEKTKKQLRENAEDMGNGCFKIYHKCDNACIGSIRNGTYDHNVYRDEALNNRFQIKGVELKSGYKDWILWISFAISCFLLCVALLGFIMWACQKGNIRCNICI

SEQ ID NO: 13037 - protein, 566 aa, synthetic construct; identical to SEQ ID NO: 12998
  REGION 1..566: note = hemagglutinin__InfluenzaA__ALA08552

SEQ ID NO: 13038 - protein, 566 aa, synthetic construct; identical to SEQ ID NO: 12998
  REGION 1..566: note = hemagglutinin__InfluenzaA__ALA08553

SEQ ID NO: 13039 - protein, 566 aa, synthetic construct
  REGION 1..566: note = hemagglutinin__InfluenzaA__ALA08554
MKTIIALSYILCLVFAQKIPGNDNSTATLCLGHHAVPNGTIVKTITNDRIEVTNATELVQNSSIGEICDSPHQILDGENCTLIDALLGDPQCDGFQNKKWDLFVERSKAYSNCYPYDVPDYASLRSLVASSGTLEFNNESFNWTGVTQNGTSSACIRRSSSSFFSRLNWLTHLNYTYPALNVTMPNNEQFDKLYIWGVHHPGTDKDQIFLYAQSSGRITVSTKRSQQAVIPNIGSRPRIRDIPSRISIYWTIVKPGDILLINSTGNLIAPRGYFKIRSGKSSIMRSDAPIGKCKSECITPNGSIPNDKPFQNVNRITYGACPRYVKHSTLKLATGMRNVPEKQTRGIFGAIAGFIENGWEGMVDGWYGFRHQNSEGRGQAADLKSTQAAIDQINGKLNRLIGKTNEKFHQIEKEFSEVEGRIQDLEKYVEDTKIDLWSYNAELLVALENQHTIDLTDSEMNKLFEKTKKQLRENAEDMGNGCFKIYHKCDNACIGSIRNGTYDHNVYRDEALNNRFQIKGVELMSGYKDWILWISFAISCFLLCVALLGFIMWACQKGNIRCNICI

SEQ ID NO: 13040 - protein, 566 aa, synthetic construct
  REGION 1..566: note = hemagglutinin__InfluenzaA__ALA08555
MKTIIALSYILCLVFAQKLPENDNSTATLCLGHHAVPNGTIVKTITSDQIEVTNATELVQNSSIGEICDSPHQILDGKNCTLIDALLGDPQCDGFQNKKWDLFVERSKAYSNCYPYDVPDYASLRSLVASSGTLEFNDESFNWAGVTQNGTSSACIRGSNSSFFSRLNWLTHSNFKYPALNVTMPNNEQFDKLYIWGVHHPGTDKDQIFLYAQSSGRITVSTKRSQQAVIPSIGSRPRIRNIPSRISIYWTIVKPGDILLINSTGNLIAPRGYFKIRSGKSSIMRSDAPIGKCKSECITPNGSIPNDKPFQNVNRITYGACPRYVKQSTLKLATGMRNVPEKQTRGIFGAIAGFIENGWEGMKDGWYGFRHQNSEGRGQAADLKSTQAAIDQINGKLNRLIGKTNEKFHQIEKEFSEVEGRIQDLEKYVEDTKIDLWSYNAELLVALENQHTIDLTDSEMNKLFEKTKKQLRENAEDMGNGCFKIYHKCDNACIGSIRNGTYDHNVYRDEALNNRFQIKGVELKSGYKDWILWISFAISCFLLCVALLGFIMWACQKGNIRCNICI

SEQ ID NO: 13041 - protein, 566 aa, synthetic construct
  REGION 1..566: note = hemagglutinin__InfluenzaA__ALA08556
MKTIIALSYILCLVFAQKIPGNDNSTATLCLGHHAVPNGTIVKTITNDRIEVTNATELVQNSSIGEICDSPHQILDGENCTLIDALLGDPQCDGFQNKKWDLFVERSKAYSNCYPYDVPDYASLRSLVASSGTLEFNNESFNWTGITQNGTSSACIRRSSSSFFSRLNWLTHLNYTYPALNVTMPNNEQFDKLYIWGVHHPGTDKDQIFLYAQSSGRITVSTKRSQQAVIPNIGSRPRIRDIPSRISIYWTIVKPGDILLINSTGNLIAPRGYFKIRSGKSSIMRSDAPIGKCKSECITPNGSIPNDKPFQNVNRITYGACPRYVKHSTLKLATGMRNVPEKQTRGIFGAIAGFIENGWEGMVDGWYGFRHQNSEGRGQAADLKSTQAAIDQINGKLNRLIGKTNEKFHQIEKEFSEVEGRIQDLEKYVEDTKIDLWSYNAELLVALENQHTIDLTDSEMNKLFEKTKKQLRENAEDMGNGCFKIYHKCDNACIGSIRNGTYDHNVYRDEALNNRFQIKGVELKSGYKDWILWISFAISCFLLCVALLGFIMWACQKGNIRCNICI

SEQ ID NO: 13042 - protein, 566 aa, synthetic construct; identical to SEQ ID NO: 12998
  REGION 1..566: note = hemagglutinin__InfluenzaA__ALA08557

SEQ ID NO: 13043 - protein, 566 aa, synthetic construct; identical to SEQ ID NO: 12998
  REGION 1..566: note = hemagglutinin__InfluenzaA__ALA08558

SEQ ID NO: 13044 - protein, 566 aa, synthetic construct
  REGION 1..566: note = hemagglutinin__InfluenzaA__ALA08559
MKTIIALSYILCLVFAQKIPGNDNSTATLCLGHHAVPNGTIVKTITNDRIEVTNATELVQNSSIGEICDSPHQILDGENCTLIDALLGDPQCDGFQNKKWDLFVERSKAYSNCYPYDVPDYASLRSLVASSGTLEFNNESFNWTGVTQNGTSSACIRRSSSSFFSRLNWLTHLNYTYPALNVTMPNNEQFDKLYIWGVHHPGTDKDQIFLYARSSGRITVSTKGSQQAVIPNIGSRPRIRDIPSRISIYWTIVKPGDILLINSAGNLIAPRGYFKIRSGKSSIMRSDAPIGKCKSECITPNGSIPNDKPFQNVNRITYGACPRYVKHSTLKLATGMRNVPEKQTRGIFGAIAGFIENGWEGMVDGWYGFRHQNSEGRGQAADLKSTQAAIDQINGKLNRLIGKTNEKFHQIEKEFSEVEGRIQDLEKYVEDTKIDLWSYNAELLVALENQHTIDLTDSEMNKLFEKTKKQLRENAEDMGNGCFKIYHKCDNACIGSIRNGTYDHNVYRDEALNNRFQIKGVELKSGYKDWILWISFAISCFLLCVALLGFIMWACQKGNIRCNICI

SEQ ID NO: 13045 - protein, 566 aa, synthetic construct; identical to SEQ ID NO: 12441
  REGION 1..566: note = hemagglutinin__InfluenzaA__ALA08560

SEQ ID NO: 13046 - protein, 566 aa, synthetic construct
  REGION 1..566: note = hemagglutinin__InfluenzaA__ALA08561
MKTIIALSYILCLVFAQKIPGNDNSTATLCLGHHAVPNGTIVKTITNDRIEVTNATELVQNSSIGEICDSPHQILDGENCTLIDALLGDPQCDGFQNKKWDLFVERSKAYSNCYPYDVPDYASLRSLVASSGTLEFNNESFNWTGVTQNGTSSACIRRSSSSFFSRLNWLTHLNYKYPALNVTMPNKEQFDKLYIWGVHHPGTDKDQIFLYAQSSGRITVSTKRSQQAVIPNIGSRPRIRDIPSRISIYWTIVKPGDILLINSTGNLIAPRGYFKIRSGKSSIMRSDAPIGKCKSECITPNGSIPNDKPFQNVNRITYGACPRYVKHSTLKLATGMRNVPEKQTRGIFGAIAGFIENGWEGMVDGWYGFRHQNSEGRGQAADLKSTQAAIDQINGKLNRLIGKTNEKFHQIEKEFSEVEGRIQDLEKYVEDTKIDLWSYNAELLVALENQHTIDLTDSEMNKLFEKTKKQLRENAEDMGNGCFKIYHKCDNACIGSIRNGTYDHNVYRDEALNNRFQIKGVELKSGYKDWILWISFAISCFLLCVALLGFIMWACQKGNIRCNICI

SEQ ID NO: 13047 - protein, 566 aa, synthetic construct
  REGION 1..566: note = hemagglutinin__InfluenzaA__ALA08563
MKTIIALSYILCLVFAQKIPGNDNSTATLCLGHHAVPNGTIVKTITNDRIEVTNATELVQNSSIGEICDSPHQILDGENCTLIDALLGDPQCDGFQNKKWDLFVERSKAYSNCYPYDVPDYASLRSLVASSGTLEFNNESFNWTGVTQNGTSSACIRRSSSSFFSRLNWLTHLNYTYPALNVTMPNNEQFDKLYIWGVHHPGTDKDQIFLYAQSSGRITVSTKRSQQAVIPNIGSRPRIRDIPSRISIYWTIVKPGDILLINSTGNLIAPRGYFKILSGKSSIMRSDAPIGKCKSECITPNGSIPNDKPFQNVNRITYGACPRYVKHSTLKLATGMRNVPEKQTRGIFGAIAGFIENGWEGMVDGWYGFRHQNSEGRGQAADLKSTQAAIDQINGKLNRLIGKTNEKFHQIEKEFSEVEGRIQDLEKYVEDTKIDLWSYNAELLVALENQHTIDLTDSEMNKLFEKTKKQLRENAEDMGNGCFKIYHKCDNACIGSIRNGTYDHNVYRDEALNNRFQIKGVELKSGYKDWILWISFAISCFLLCVALLGFIMWACQKGNIRCNICI

SEQ ID NO: 13048 - protein, 566 aa, synthetic construct
  REGION 1..566: note = hemagglutinin__InfluenzaA__ALA08571
MKTIIALSYILCLVFAQKIPGNDNSTATLCLGHHAVPNGTIVKTITNDRIEVTNATELVQNSSIGEICDSPHQILDGENCTLIDALLGDPQCDGFQNKKWDLFVERSKAYSNCYPYDVPDYASLRSLVASSGTLEFNNESFNWTGVTQNGTSSACIRRSSSSFFSRLNWLTHLNYTYPALNVTMPNNEQFDKLYIWGVHHPGTDKDQIFLYAQSSGRITVSTKRSQQAVIPNIGSRPRIRDIPSRISIYWTIVKPGDILLINSTGNLIAPRGYFKIRSGKSSIMRSDAPIGKCKSECITPNGSIPNDKPFQNVNRITYGACPRYVKHSTLKLATGMRNVPEKQTRGIFGAIAGFIENGWEGMVDGWYGFRHQNSEGRGQAADLKSTQAAIDQINGKLNRLIGKTNEKFHQIEKEFSEVEGRIQDLEKYVEDTKIDLWSYNAELLVALENQHTIDLTDSEMNKLFEKTKKQLRENAEDMGNGCFKIYHKCDNACIGSIRNGTYDHNVYRDEALNNRFQIKGVELKSGYKDWILWISFATSCFLLCVALLGFIMWACQKGNIRCNICI

SEQ ID NO: 13049 - protein, 566 aa, synthetic construct; identical to SEQ ID NO: 12984
  REGION 1..566: note = hemagglutinin__InfluenzaA__ALA08572

SEQ ID NO: 13050 - protein, 566 aa, synthetic construct; identical to SEQ ID NO: 12981
  REGION 1..566: note = hemagglutinin__InfluenzaA__ALA08573

SEQ ID NO: 13051 - protein, 566 aa, synthetic construct
  REGION 1..566: note = hemagglutinin__InfluenzaA__ALA08574
MKTIIALSYILCLVFAQKIPGNDNSTATLCLGHHAVPNGTIVKTITNDRIEVTNATELVQNSSIGEICDSPHQILDGENCTLIDALLGDPQCDGFQNKKWDLFVERSKAYSNCYPYDVPDYASLRSLVASSGTLEFNNESFNWTGVTQNGTSSACIRRSSSSFFSRLNWLTHLNYTYPALNVTMPNNEQFDKLYIWGVHHPGTDKDQIFLYAQSSGRITVSTKRSQQAVIPNIGSRPRIRDIPSRISIYWTIVKPGDILLINSTGNLIAPRGYFKIRSGKSSIMRSDAPIGKCKSECITPNGSIPNDKPFQNVNRITYGACPRYVKHSTLKLATGMRNVPEKQTRGIFGAIAGFIENGWEGMVDGWYGFRHQNSEGRGQAADLKSTQAAIDQISGKLNRLIGKTNEKFHQIEKEFSEVEGRIQDLEKYVEDTKIDLWSYNAELLVALENQHTIDLTDSEMNKLFEKTKKQLRENAEDMGNGCFKIYHKCDNACIGSIRNGTYDHNVYRDEALNNRFQIKGVELKSGYKDWILWISFAISCFLLCVALLGFIMWACQKGNIRCNICI

SEQ ID NO: 13052 - protein, 566 aa, synthetic construct
  REGION 1..566: note = hemagglutinin__InfluenzaA__ALA08575
MKTIIALSYILCLVFAQKIPGNDNSTATLCLGHHAVPNGTIVKTITNDRIEVTNATELVQNSSIGEICDSPHQILDGENCTLIDALLGDPQCDGFQNKKWDLFVERSKAYSNCYPYDVPDYASLRSLVASSGTLEFNNESFNWTGVTQNGTSSACIRRSSSSFFSRLNWLTHLNYTYPALNVTMPNNEQFDKLYIWGVHHPGTDKDQIFLYAQSSGRITVSTKRSQQAVIPNIGSRPRIRDIPSRISIYWTIVKPGDILLINSTGNLIAPRGYFKIRSGKSSIMRSDAPIGKCKSECITPNGSIPNDKPFQNVNRITYGACPRYVKQSTLKLATGMRNVPEKQTRGIFGAIAGFIENGWEGMVDGWYGFRHQNSEGRGQAADLKSTQAAIDQINGKLNRLIGKTNEKFHQIEKEFSEVEGRIQDLEKYVEDTKIDLWSYNAELLVALENQHTIDLTDSEMNKLFEKTKKQLRENAEDMGNGCFKIYHKCDNACIGSIRNGTYDHNVYRDEALNNRFQIKGVELKSGYKDWILWISFAISCFLLCVALLGFIMWACQKGNIRCNICI

SEQ ID NO: 13053 - protein, 566 aa, synthetic construct; identical to SEQ ID NO: 12441
  REGION 1..566: note = hemagglutinin__InfluenzaA__ALA08576

SEQ ID NO: 13054 - protein, 566 aa, synthetic construct; identical to SEQ ID NO: 12441
  REGION 1..566: note = hemagglutinin__InfluenzaA__ALA08577

SEQ ID NO: 13055 - protein, 566 aa, synthetic construct
  REGION 1..566: note = hemagglutinin__InfluenzaA__ALA08579
MKTIIALSYILCLIFAQKIPGNDNSTATLCLGHHAVPNGTIVKTITNDRIEVTNATELVQNSSIGEICDSPHQILDGENCTLIDALLGDPQCDGFQNKKWDLFVERSKAYSNCYPYDVPDYASLRSLVASSGTLEFNNESFNWTGVTQNGTSSACIRKSSSSFFSRLNWLTHLNYTYPALNVTMPNNEQFDKLYIWGVHHPGTDKDQIFLYARSSGRITVSTKRSQQAVIPNIGSRPRIRDIPSRISIYWTIVKPGDILLINSTGNLIAPRGYFKIRSGKSSIMRSDAPIGKCKSECITPNGSIPNDKPFQNVNRITYGACPRYVKHSTLKLATGMRNVPEKQTRGIFGAIAGFIENGWEGMVDGWYGFRHQNSEGRGQAADLKSTQAAIDQINGKLNRLIGKTNEKFHQIEKEFSEVEGRIQDLEKYVEDTKIDLWSYNAELLVALENQHTIDLTDSEMNKLFEKTKKQLRENAEDMGNGCFKIYHKCDNACIGSIRNGTYDHNVYRDEALNNRFQIKGVELKSGYKDWILWISFAISCFLLCVALLGFIMWACQKGNIRCNICI

SEQ ID NO: 13056 - protein, 566 aa, synthetic construct
  REGION 1..566: note = hemagglutinin__InfluenzaA__ALA08580
MKTIIALSYILCLVFAQKIPGNDNSTATLCLGHHAVPNGTIVKTITNDRIEVTNATELVQNSSIGEICDSPHQILDGENCTLIDALLGDPQCDGFQNKKWDLFVERSKAYSNCYPYDVPDYASLRSLVASSGTLEFNNESFNWTGVTQNGTSSACIRRSSSSFFSRLNWLTHLNYTYPALNVTMPNNEQFDKLYIWGVHHPGTDKDQIFLYARSSGRITVSTKGSQQAVIPNIGSRPRIRDIPSRISIYWTIVKPGDILLINSTGNLIAPRGYFKIRSGKSSIMRSDAPIGKCKSECITPNGSIPNDKPFQNVNRITYGACPRYVKHSTLKLATGMRNVPEKQTRGIFGAIAGFIENGWEGMVDGWYGFRHQNSEGRGQAADLKSTQAAIDQINGKLNRLIGKTNEKFHQIEKEFSEVEGRIQDLEKYVEDTKIDLWSYNAELLVALENQHTIDLTDSEMNKLFEKTKKQLRENAEDMGNGCFKIYHKCDNACIGSIRNGTYDHNVYRDEALNNRFQIKGVELKSGYKDWILWISFAISCFLLCVALLGFIMWACQKGNIRCNICI
